United States Patent Application Publication US 2018/0305689 A1 - sequence listing, part 140

SEQ ID NO: 1929850 - RNA, 19 nt, Artificial Sequence
  Description of Artificial Sequence: Synthetic oligonucleotide
  Sense strand starting at position 1571 of SEQ ID NO: 1879748
gaaggaaggugcuugcuau

SEQ ID NO: 1929851 - RNA, 19 nt, Artificial Sequence
  Description of Artificial Sequence: Synthetic oligonucleotide
  Antisense strand to SEQ ID NO: 1929850
auagcaagcaccuuccuuc

SEQ ID NO: 1929852 - RNA, 19 nt, Artificial Sequence
  Description of Artificial Sequence: Synthetic oligonucleotide
  Sense strand starting at position 1572 of SEQ ID NO: 1879748
aaggaaggugcuugcuaua

SEQ ID NO: 1929853 - RNA, 19 nt, Artificial Sequence
  Description of Artificial Sequence: Synthetic oligonucleotide
  Antisense strand to SEQ ID NO: 1929852
uauagcaagcaccuuccuu

SEQ ID NO: 1929854 - RNA, 19 nt, Artificial Sequence
  Description of Artificial Sequence: Synthetic oligonucleotide
  Sense strand starting at position 1577 of SEQ ID NO: 1879748
aggugcuugcuauaaguga

SEQ ID NO: 1929855 - RNA, 19 nt, Artificial Sequence
  Description of Artificial Sequence: Synthetic oligonucleotide
  Antisense strand to SEQ ID NO: 1929854
ucacuuauagcaagcaccu

SEQ ID NO: 1929856 - RNA, 19 nt, Artificial Sequence
  Description of Artificial Sequence: Synthetic oligonucleotide
  Sense strand starting at position 1844 of SEQ ID NO: 1879748
cagagucacuaugcaugau

SEQ ID NO: 1929857 - RNA, 19 nt, Artificial Sequence
  Description of Artificial Sequence: Synthetic oligonucleotide
  Antisense strand to SEQ ID NO: 1929856
aucaugcauagugacucug

SEQ ID NO: 1929858 - RNA, 19 nt, Artificial Sequence
  Description of Artificial Sequence: Synthetic oligonucleotide
  Sense strand starting at position 1847 of SEQ ID NO: 1879748
agucacuaugcaugauaau

SEQ ID NO: 1929859 - RNA, 19 nt, Artificial Sequence
  Description of Artificial Sequence: Synthetic oligonucleotide
  Antisense strand to SEQ ID NO: 1929858
auuaucaugcauagugacu

SEQ ID NO: 1929860 - RNA, 19 nt, Artificial Sequence
  Description of Artificial Sequence: Synthetic oligonucleotide
  Sense strand starting at position 1848 of SEQ ID NO: 1879748
gucacuaugcaugauaaug

SEQ ID NO: 1929861 - RNA, 19 nt, Artificial Sequence
  Description of Artificial Sequence: Synthetic oligonucleotide
  Antisense strand to SEQ ID NO: 1929860
cauuaucaugcauagugac

SEQ ID NO: 1929862 - RNA, 19 nt, Artificial Sequence
  Description of Artificial Sequence: Synthetic oligonucleotide
  Sense strand starting at position 1907 of SEQ ID NO: 1879748
uuuagugcucucuaucaua

SEQ ID NO: 1929863 - RNA, 19 nt, Artificial Sequence
  Description of Artificial Sequence: Synthetic oligonucleotide
  Antisense strand to SEQ ID NO: 1929862
uaugauagagagcacuaaa

SEQ ID NO: 1929864 - RNA, 19 nt, Artificial Sequence
  Description of Artificial Sequence: Synthetic oligonucleotide
  Sense strand starting at position 2025 of SEQ ID NO: 1879748
ggagauucuccaggcuaau

SEQ ID NO: 1929865 - RNA, 19 nt, Artificial Sequence
  Description of Artificial Sequence: Synthetic oligonucleotide
  Antisense strand to SEQ ID NO: 1929864
auuagccuggagaaucucc

SEQ ID NO: 1929866 - RNA, 19 nt, Artificial Sequence
  Description of Artificial Sequence: Synthetic oligonucleotide
  Sense strand starting at position 2199 of SEQ ID NO: 1879748
ggauucaaggucugguagu

SEQ ID NO: 1929867 - RNA, 19 nt, Artificial Sequence
  Description of Artificial Sequence: Synthetic oligonucleotide
  Antisense strand to SEQ ID NO: 1929866
acuaccagaccuugaaucc

SEQ ID NO: 1929868 - RNA, 19 nt, Artificial Sequence
  Description of Artificial Sequence: Synthetic oligonucleotide
  Sense strand starting at position 2589 of SEQ ID NO: 1879748
augacauucucucugagau

SEQ ID NO: 1929869 - RNA, 19 nt, Artificial Sequence
  Description of Artificial Sequence: Synthetic oligonucleotide
  Antisense strand to SEQ ID NO: 1929868
aucucagagagaaugucau

SEQ ID NO: 1929870 - RNA, 19 nt, Artificial Sequence
  Description of Artificial Sequence: Synthetic oligonucleotide
  Sense strand starting at position 2590 of SEQ ID NO: 1879748
ugacauucucucugagauc

SEQ ID NO: 1929871 - RNA, 19 nt, Artificial Sequence
  Description of Artificial Sequence: Synthetic oligonucleotide
  Antisense strand to SEQ ID NO: 1929870
gaucucagagagaauguca

SEQ ID NO: 1929872 - RNA, 19 nt, Artificial Sequence
  Description of Artificial Sequence: Synthetic oligonucleotide
  Sense strand starting at position 2674 of SEQ ID NO: 1879748
uugacugaugugcaugaua

SEQ ID NO: 1929873 - RNA, 19 nt, Artificial Sequence
  Description of Artificial Sequence: Synthetic oligonucleotide
  Antisense strand to SEQ ID NO: 1929872
uaucaugcacaucagucaa

SEQ ID NO: 1929874 - RNA, 19 nt, Artificial Sequence
  Description of Artificial Sequence: Synthetic oligonucleotide
  Sense strand starting at position 2676 of SEQ ID NO: 1879748
gacugaugugcaugauagg

SEQ ID NO: 1929875 - RNA, 19 nt, Artificial Sequence
  Description of Artificial Sequence: Synthetic oligonucleotide
  Antisense strand to SEQ ID NO: 1929874
ccuaucaugcacaucaguc

SEQ ID NO: 1929876 - RNA, 19 nt, Artificial Sequence
  Description of Artificial Sequence: Synthetic oligonucleotide
  Sense strand starting at position 2713 of SEQ ID NO: 1879748
ggaggagucagucaaucuc

SEQ ID NO: 1929877 - RNA, 19 nt, Artificial Sequence
  Description of Artificial Sequence: Synthetic oligonucleotide
  Antisense strand to SEQ ID NO: 1929876
gagauugacugacuccucc

SEQ ID NO: 1929878 - RNA, 19 nt, Artificial Sequence
  Description of Artificial Sequence: Synthetic oligonucleotide
  Sense strand starting at position 2722 of SEQ ID NO: 1879748
agucaaucucagcaggcau

SEQ ID NO: 1929879 - RNA, 19 nt, Artificial Sequence
  Description of Artificial Sequence: Synthetic oligonucleotide
  Antisense strand to SEQ ID NO: 1929878
augccugcugagauugacu

SEQ ID NO: 1929880 - RNA, 19 nt, Artificial Sequence
  Description of Artificial Sequence: Synthetic oligonucleotide
  Sense strand starting at position 2784 of SEQ ID NO: 1879748
auaaguacuguguacucua

SEQ ID NO: 1929881 - RNA, 19 nt, Artificial Sequence
  Description of Artificial Sequence: Synthetic oligonucleotide
  Antisense strand to SEQ ID NO: 1929880
uagaguacacaguacuuau

SEQ ID NO: 1929882 - RNA, 19 nt, Artificial Sequence
  Description of Artificial Sequence: Synthetic oligonucleotide
  Sense strand starting at position 2787 of SEQ ID NO: 1879748
aguacuguguacucuacaa

SEQ ID NO: 1929883 - RNA, 19 nt, Artificial Sequence
  Description of Artificial Sequence: Synthetic oligonucleotide
  Antisense strand to SEQ ID NO: 1929882
uuguagaguacacaguacu

SEQ ID NO: 1929884 - RNA, 19 nt, Artificial Sequence
  Description of Artificial Sequence: Synthetic oligonucleotide
  Sense strand starting at position 2791 of SEQ ID NO: 1879748
cuguguacucuacaagugu

SEQ ID NO: 1929885 - RNA, 19 nt, Artificial Sequence
  Description of Artificial Sequence: Synthetic oligonucleotide
  Antisense strand to SEQ ID NO: 1929884
acacuuguagaguacacag

SEQ ID NO: 1929886 - RNA, 19 nt, Artificial Sequence
  Description of Artificial Sequence: Synthetic oligonucleotide
  Sense strand starting at position 3023 of SEQ ID NO: 1879748
agguaaauauauccaguua

SEQ ID NO: 1929887 - RNA, 19 nt, Artificial Sequence
  Description of Artificial Sequence: Synthetic oligonucleotide
  Antisense strand to SEQ ID NO: 1929886
uaacuggauauauuuaccu

SEQ ID NO: 1929888 - RNA, 19 nt, Artificial Sequence
  Description of Artificial Sequence: Synthetic oligonucleotide
  Sense strand starting at position 3098 of SEQ ID NO: 1879748
ccaacuggccagcaaauau

SEQ ID NO: 1929889 - RNA, 19 nt, Artificial Sequence
  Description of Artificial Sequence: Synthetic oligonucleotide
  Antisense strand to SEQ ID NO: 1929888
auauuugcuggccaguugg

SEQ ID NO: 1929890 - RNA, 19 nt, Artificial Sequence
  Description of Artificial Sequence: Synthetic oligonucleotide
  Sense strand starting at position 3193 of SEQ ID NO: 1879748
ccauucugaccugaauugu

SEQ ID NO: 1929891 - RNA, 19 nt, Artificial Sequence
  Description of Artificial Sequence: Synthetic oligonucleotide
  Antisense strand to SEQ ID NO: 1929890
acaauucaggucagaaugg

SEQ ID NO: 1929892 - RNA, 19 nt, Artificial Sequence
  Description of Artificial Sequence: Synthetic oligonucleotide
  Sense strand starting at position 3369 of SEQ ID NO: 1879748
gucgauauuucuguuguca

SEQ ID NO: 1929893 - RNA, 19 nt, Artificial Sequence
  Description of Artificial Sequence: Synthetic oligonucleotide
  Antisense strand to SEQ ID NO: 1929892
ugacaacagaaauaucgac

SEQ ID NO: 1929894 - RNA, 19 nt, Artificial Sequence
  Description of Artificial Sequence: Synthetic oligonucleotide
  Sense strand starting at position 3666 of SEQ ID NO: 1879748
ugucaaacuccuggcucaa

SEQ ID NO: 1929895 - RNA, 19 nt, Artificial Sequence
  Description of Artificial Sequence: Synthetic oligonucleotide
  Antisense strand to SEQ ID NO: 1929894
uugagccaggaguuugaca

SEQ ID NO: 1929896 - RNA, 19 nt, Artificial Sequence
  Description of Artificial Sequence: Synthetic oligonucleotide
  Sense strand starting at position 3759 of SEQ ID NO: 1879748
ugucaaauuucuuuguccu

SEQ ID NO: 1929897 - RNA, 19 nt, Artificial Sequence
  Description of Artificial Sequence: Synthetic oligonucleotide
  Antisense strand to SEQ ID NO: 1929896
aggacaaagaaauuugaca

SEQ ID NO: 1929898 - RNA, 19 nt, Artificial Sequence
  Description of Artificial Sequence: Synthetic oligonucleotide
  Sense strand starting at position 3760 of SEQ ID NO: 1879748
gucaaauuucuuuguccuu

SEQ ID NO: 1929899 - RNA, 19 nt, Artificial Sequence
  Description of Artificial Sequence: Synthetic oligonucleotide
  Antisense strand to SEQ ID NO: 1929898
aaggacaaagaaauuugac

SEQ ID NO: 1929900 - RNA, 19 nt, Artificial Sequence
  Description of Artificial Sequence: Synthetic oligonucleotide
  Sense strand starting at position 3860 of SEQ ID NO: 1879748
cagauuuggugucaaucag

SEQ ID NO: 1929901 - RNA, 19 nt, Artificial Sequence
  Description of Artificial Sequence: Synthetic oligonucleotide
  Antisense strand to SEQ ID NO: 1929900
cugauugacaccaaaucug

SEQ ID NO: 1929902 - RNA, 19 nt, Artificial Sequence
  Description of Artificial Sequence: Synthetic oligonucleotide
  Sense strand starting at position 3928 of SEQ ID NO: 1879748
ggauaccacuaucauagaa

SEQ ID NO: 1929903 - RNA, 19 nt, Artificial Sequence
  Description of Artificial Sequence: Synthetic oligonucleotide
  Antisense strand to SEQ ID NO: 1929902
uucuaugauagugguaucc

SEQ ID NO: 1929904 - RNA, 19 nt, Artificial Sequence
  Description of Artificial Sequence: Synthetic oligonucleotide
  Sense strand starting at position 129 of SEQ ID NO: 1879749
ccucucuagucucugacua

SEQ ID NO: 1929905 - RNA, 19 nt, Artificial Sequence
  Description of Artificial Sequence: Synthetic oligonucleotide
  Antisense strand to SEQ ID NO: 1929904
uagucagagacuagagagg

SEQ ID NO: 1929906 - RNA, 19 nt, Artificial Sequence
  Description of Artificial Sequence: Synthetic oligonucleotide
  Sense strand starting at position 141 of SEQ ID NO: 1879749
cugacuaccugcuuaguga

SEQ ID NO: 1929907 - RNA, 19 nt, Artificial Sequence
  Description of Artificial Sequence: Synthetic oligonucleotide
  Antisense strand to SEQ ID NO: 1929906
ucacuaagcagguagucag

SEQ ID NO: 1929908 - RNA, 19 nt, Artificial Sequence
  Description of Artificial Sequence: Synthetic oligonucleotide
  Sense strand starting at position 142 of SEQ ID NO: 1879749
ugacuaccugcuuagugau

SEQ ID NO: 1929909 - RNA, 19 nt, Artificial Sequence
  Description of Artificial Sequence: Synthetic oligonucleotide
  Antisense strand to SEQ ID NO: 1929908
aucacuaagcagguaguca

SEQ ID NO: 1929910 - RNA, 19 nt, Artificial Sequence
  Description of Artificial Sequence: Synthetic oligonucleotide
  Sense strand starting at position 382 of SEQ ID NO: 1879749
agaggcaugcaccauaauu

SEQ ID NO: 1929911 - RNA, 19 nt, Artificial Sequence
  Description of Artificial Sequence: Synthetic oligonucleotide
  Antisense strand to SEQ ID NO: 1929910
aauuauggugcaugccucu

SEQ ID NO: 1929912 - RNA, 19 nt, Artificial Sequence
  Description of Artificial Sequence: Synthetic oligonucleotide
  Sense strand starting at position 497 of SEQ ID NO: 1879749
gggcaaauguuagugccaa

SEQ ID NO: 1929913 - RNA, 19 nt, Artificial Sequence
  Description of Artificial Sequence: Synthetic oligonucleotide
  Antisense strand to SEQ ID NO: 1929912
uuggcacuaacauuugccc

SEQ ID NO: 1929914 - RNA, 19 nt, Artificial Sequence
  Description of Artificial Sequence: Synthetic oligonucleotide
  Sense strand starting at position 509 of SEQ ID NO: 1879749
gugccaaaugccugaugau

SEQ ID NO: 1929915 - RNA, 19 nt, Artificial Sequence
  Description of Artificial Sequence: Synthetic oligonucleotide
  Antisense strand to SEQ ID NO: 1929914
aucaucaggcauuuggcac

SEQ ID NO: 1929916 - RNA, 19 nt, Artificial Sequence
  Description of Artificial Sequence: Synthetic oligonucleotide
  Sense strand starting at position 621 of SEQ ID NO: 1879749
ugcagugcuccugaaagua

SEQ ID NO: 1929917 - RNA, 19 nt, Artificial Sequence
  Description of Artificial Sequence: Synthetic oligonucleotide
  Antisense strand to SEQ ID NO: 1929916
uacuuucaggagcacugca

SEQ ID NO: 1929918 - RNA, 19 nt, Artificial Sequence
  Description of Artificial Sequence: Synthetic oligonucleotide
  Sense strand starting at position 647 of SEQ ID NO: 1879749
ggcaauaaaugggagagau

SEQ ID NO: 1929919 - RNA, 19 nt, Artificial Sequence
  Description of Artificial Sequence: Synthetic oligonucleotide
  Antisense strand to SEQ ID NO: 1929918
aucucucccauuuauugcc

SEQ ID NO: 1929920 - RNA, 19 nt, Artificial Sequence
  Description of Artificial Sequence: Synthetic oligonucleotide
  Sense strand starting at position 659 of SEQ ID NO: 1879749
gagagaugggaugguguga

SEQ ID NO: 1929921 - RNA, 19 nt, Artificial Sequence
  Description of Artificial Sequence: Synthetic oligonucleotide
  Antisense strand to SEQ ID NO: 1929920
ucacaccaucccaucucuc

SEQ ID NO: 1929922 - RNA, 19 nt, Artificial Sequence
  Description of Artificial Sequence: Synthetic oligonucleotide
  Sense strand starting at position 678 of SEQ ID NO: 1879749
ggagaaauuuaugggcuga

SEQ ID NO: 1929923 - RNA, 19 nt, Artificial Sequence
  Description of Artificial Sequence: Synthetic oligonucleotide
  Antisense strand to SEQ ID NO: 1929922
ucagcccauaaauuucucc

SEQ ID NO: 1929924 - RNA, 19 nt, Artificial Sequence
  Description of Artificial Sequence: Synthetic oligonucleotide
  Sense strand starting at position 693 of SEQ ID NO: 1879749
cugaguuuaggacaaguuu

SEQ ID NO: 1929925 - RNA, 19 nt, Artificial Sequence
  Description of Artificial Sequence: Synthetic oligonucleotide
  Antisense strand to SEQ ID NO: 1929924
aaacuuguccuaaacucag

SEQ ID NO: 1929926 - RNA, 19 nt, Artificial Sequence
  Description of Artificial Sequence: Synthetic oligonucleotide
  Sense strand starting at position 905 of SEQ ID NO: 1879749
agguauuccucuccaagag

SEQ ID NO: 1929927 - RNA, 19 nt, Artificial Sequence
  Description of Artificial Sequence: Synthetic oligonucleotide
  Antisense strand to SEQ ID NO: 1929926
cucuuggagaggaauaccu

SEQ ID NO: 1929928 - RNA, 19 nt, Artificial Sequence
  Description of Artificial Sequence: Synthetic oligonucleotide
  Sense strand starting at position 1167 of SEQ ID NO: 1879749
aucacauaccgaugauuac

SEQ ID NO: 1929929 - RNA, 19 nt, Artificial Sequence
  Description of Artificial Sequence: Synthetic oligonucleotide
  Antisense strand to SEQ ID NO: 1929928
guaaucaucgguaugugau

SEQ ID NO: 1929930 - RNA, 19 nt, Artificial Sequence
  Description of Artificial Sequence: Synthetic oligonucleotide
  Sense strand starting at position 1284 of SEQ ID NO: 1879749
cugcuaaugggucaggauu

SEQ ID NO: 1929931 - RNA, 19 nt, Artificial Sequence
  Description of Artificial Sequence: Synthetic oligonucleotide
  Antisense strand to SEQ ID NO: 1929930
aauccugacccauuagcag

SEQ ID NO: 1929932 - RNA, 19 nt, Artificial Sequence
  Description of Artificial Sequence: Synthetic oligonucleotide
  Sense strand starting at position 1297 of SEQ ID NO: 1879749
aggauuucuuuauaaggua

SEQ ID NO: 1929933 - RNA, 19 nt, Artificial Sequence
  Description of Artificial Sequence: Synthetic oligonucleotide
  Antisense strand to SEQ ID NO: 1929932
uaccuuauaaagaaauccu

SEQ ID NO: 1929934 - RNA, 19 nt, Artificial Sequence
  Description of Artificial Sequence: Synthetic oligonucleotide
  Sense strand starting at position 1336 of SEQ ID NO: 1879749
uuuauugaugauugcacaa

SEQ ID NO: 1929935 - RNA, 19 nt, Artificial Sequence
  Description of Artificial Sequence: Synthetic oligonucleotide
  Antisense strand to SEQ ID NO: 1929934
uugugcaaucaucaauaaa

SEQ ID NO: 1929936 - RNA, 19 nt, Artificial Sequence
  Description of Artificial Sequence: Synthetic oligonucleotide
  Sense strand starting at position 1440 of SEQ ID NO: 1879749
uuauaugaagcucauggua

SEQ ID NO: 1929937 - RNA, 19 nt, Artificial Sequence
  Description of Artificial Sequence: Synthetic oligonucleotide
  Antisense strand to SEQ ID NO: 1929936
uaccaugagcuucauauaa

SEQ ID NO: 1929938 - RNA, 19 nt, Artificial Sequence
  Description of Artificial Sequence: Synthetic oligonucleotide
  Sense strand starting at position 1509 of SEQ ID NO: 1879749
ucuggaaagacuuggcauu

SEQ ID NO: 1929939 - RNA, 19 nt, Artificial Sequence
  Description of Artificial Sequence: Synthetic oligonucleotide
  Antisense strand to SEQ ID NO: 1929938
aaugccaagucuuuccaga

SEQ ID NO: 1929940 - RNA, 19 nt, Artificial Sequence
  Description of Artificial Sequence: Synthetic oligonucleotide
  Sense strand starting at position 1510 of SEQ ID NO: 1879749
cuggaaagacuuggcauua

SEQ ID NO: 1929941 - RNA, 19 nt, Artificial Sequence
  Description of Artificial Sequence: Synthetic oligonucleotide
  Antisense strand to SEQ ID NO: 1929940
uaaugccaagucuuuccag

SEQ ID NO: 1929942 - RNA, 19 nt, Artificial Sequence
  Description of Artificial Sequence: Synthetic oligonucleotide
  Sense strand starting at position 1511 of SEQ ID NO: 1879749
uggaaagacuuggcauuaa

SEQ ID NO: 1929943 - RNA, 19 nt, Artificial Sequence
  Description of Artificial Sequence: Synthetic oligonucleotide
  Antisense strand to SEQ ID NO: 1929942
uuaaugccaagucuuucca

SEQ ID NO: 1929944 - RNA, 19 nt, Artificial Sequence
  Description of Artificial Sequence: Synthetic oligonucleotide
  Sense strand starting at position 1523 of SEQ ID NO: 1879749
gcauuaaacuacuugagcu

SEQ ID NO: 1929945 - RNA, 19 nt, Artificial Sequence
  Description of Artificial Sequence: Synthetic oligonucleotide
  Antisense strand to SEQ ID NO: 1929944
agcucaaguaguuuaaugc

SEQ ID NO: 1929946 - RNA, 19 nt, Artificial Sequence
  Description of Artificial Sequence: Synthetic oligonucleotide
  Sense strand starting at position 1634 of SEQ ID NO: 1879749
ggagaaccucucuggccaa

SEQ ID NO: 1929947 - RNA, 19 nt, Artificial Sequence
  Description of Artificial Sequence: Synthetic oligonucleotide
  Antisense strand to SEQ ID NO: 1929946
uuggccagagagguucucc

SEQ ID NO: 1929948 - RNA, 19 nt, Artificial Sequence
  Description of Artificial Sequence: Synthetic oligonucleotide
  Sense strand starting at position 1641 of SEQ ID NO: 1879749
cucucuggccaagacaaau

SEQ ID NO: 1929949 - RNA, 19 nt, Artificial Sequence
  Description of Artificial Sequence: Synthetic oligonucleotide
  Antisense strand to SEQ ID NO: 1929948
auuugucuuggccagagag

SEQ ID NO: 1929950 - RNA, 19 nt, Artificial Sequence
  Description of Artificial Sequence: Synthetic oligonucleotide
  Sense strand starting at position 2042 of SEQ ID NO: 1879749
gggacucuccacugguuga

SEQ ID NO: 1929951 - RNA, 19 nt, Artificial Sequence
  Description of Artificial Sequence: Synthetic oligonucleotide
  Antisense strand to SEQ ID NO: 1929950
ucaaccaguggagaguccc

SEQ ID NO: 1929952 - RNA, 19 nt, Artificial Sequence
  Description of Artificial Sequence: Synthetic oligonucleotide
  Sense strand starting at position 2143 of SEQ ID NO: 1879749
accagagaguucccagacu

SEQ ID NO: 1929953 - RNA, 19 nt, Artificial Sequence
  Description of Artificial Sequence: Synthetic oligonucleotide
  Antisense strand to SEQ ID NO: 1929952
agucugggaacucucuggu

SEQ ID NO: 1929954 - RNA, 19 nt, Artificial Sequence
  Description of Artificial Sequence: Synthetic oligonucleotide
  Sense strand starting at position 2183 of SEQ ID NO: 1879749
uugcuuauaggagguuaaa

SEQ ID NO: 1929955 - RNA, 19 nt, Artificial Sequence
  Description of Artificial Sequence: Synthetic oligonucleotide
  Antisense strand to SEQ ID NO: 1929954
uuuaaccuccuauaagcaa

SEQ ID NO: 1929956 - RNA, 19 nt, Artificial Sequence
  Description of Artificial Sequence: Synthetic oligonucleotide
  Sense strand starting at position 2209 of SEQ ID NO: 1879749
agucuaagccaguagaaau

SEQ ID NO: 1929957 - RNA, 19 nt, Artificial Sequence
  Description of Artificial Sequence: Synthetic oligonucleotide
  Antisense strand to SEQ ID NO: 1929956
auuucuacuggcuuagacu

SEQ ID NO: 1929958 - RNA, 19 nt, Artificial Sequence
  Description of Artificial Sequence: Synthetic oligonucleotide
  Sense strand starting at position 2239 of SEQ ID NO: 1879749
gcuaaccucugaguacuua

SEQ ID NO: 1929959 - RNA, 19 nt, Artificial Sequence
  Description of Artificial Sequence: Synthetic oligonucleotide
  Antisense strand to SEQ ID NO: 1929958
uaaguacucagagguuagc

SEQ ID NO: 1929960 - RNA, 19 nt, Artificial Sequence
  Description of Artificial Sequence: Synthetic oligonucleotide
  Sense strand starting at position 2322 of SEQ ID NO: 1879749
uuaugagaagggugcaauu

SEQ ID NO: 1929961 - RNA, 19 nt, Artificial Sequence
  Description of Artificial Sequence: Synthetic oligonucleotide
  Antisense strand to SEQ ID NO: 1929960
aauugcacccuucucauaa

SEQ ID NO: 1929962 - RNA, 19 nt, Artificial Sequence
  Description of Artificial Sequence: Synthetic oligonucleotide
  Sense strand starting at position 2333 of SEQ ID NO: 1879749
gugcaauuauuaucccagu

SEQ ID NO: 1929963 - RNA, 19 nt, Artificial Sequence
  Description of Artificial Sequence: Synthetic oligonucleotide
  Antisense strand to SEQ ID NO: 1929962
acugggauaauaauugcac

SEQ ID NO: 1929964 - RNA, 19 nt, Artificial Sequence
  Description of Artificial Sequence: Synthetic oligonucleotide
  Sense strand starting at position 2396 of SEQ ID NO: 1879749
cuaagugagcuugggcaaa

SEQ ID NO: 1929965 - RNA, 19 nt, Artificial Sequence
  Description of Artificial Sequence: Synthetic oligonucleotide
  Antisense strand to SEQ ID NO: 1929964
uuugcccaagcucacuuag

SEQ ID NO: 1929966 - RNA, 19 nt, Artificial Sequence
  Description of Artificial Sequence: Synthetic oligonucleotide
  Sense strand starting at position 2429 of SEQ ID NO: 1879749
cugauuagagcccaccuua

SEQ ID NO: 1929967 - RNA, 19 nt, Artificial Sequence
  Description of Artificial Sequence: Synthetic oligonucleotide
  Antisense strand to SEQ ID NO: 1929966
uaaggugggcucuaaucag

SEQ ID NO: 1929968 - RNA, 19 nt, Artificial Sequence
  Description of Artificial Sequence: Synthetic oligonucleotide
  Sense strand starting at position 2437 of SEQ ID NO: 1879749
agcccaccuuagucagauu

SEQ ID NO: 1929969 - RNA, 19 nt, Artificial Sequence
  Description of Artificial Sequence: Synthetic oligonucleotide
  Antisense strand to SEQ ID NO: 1929968
aaucugacuaaggugggcu

SEQ ID NO: 1929970 - RNA, 19 nt, Artificial Sequence
  Description of Artificial Sequence: Synthetic oligonucleotide
  Sense strand starting at position 2448 of SEQ ID NO: 1879749
gucagauucccagagccau

SEQ ID NO: 1929971 - RNA, 19 nt, Artificial Sequence
  Description of Artificial Sequence: Synthetic oligonucleotide
  Antisense strand to SEQ ID NO: 1929970
auggcucugggaaucugac

SEQ ID NO: 1929972 - RNA, 19 nt, Artificial Sequence
  Description of Artificial Sequence: Synthetic oligonucleotide
  Sense strand starting at position 3013 of SEQ ID NO: 1879749
ugguuacuuccauggagca

SEQ ID NO: 1929973 - RNA, 19 nt, Artificial Sequence
  Description of Artificial Sequence: Synthetic oligonucleotide
  Antisense strand to SEQ ID NO: 1929972
ugcuccauggaaguaacca

SEQ ID NO: 1929974 - RNA, 19 nt, Artificial Sequence
  Description of Artificial Sequence: Synthetic oligonucleotide
  Sense strand starting at position 3015 of SEQ ID NO: 1879749
guuacuuccauggagcaga

SEQ ID NO: 1929975 - RNA, 19 nt, Artificial Sequence
  Description of Artificial Sequence: Synthetic oligonucleotide
  Antisense strand to SEQ ID NO: 1929974
ucugcuccauggaaguaac

SEQ ID NO: 1929976 - RNA, 19 nt, Artificial Sequence
  Description of Artificial Sequence: Synthetic oligonucleotide
  Sense strand starting at position 3167 of SEQ ID NO: 1879749
gagugaaacuccuuugaua

SEQ ID NO: 1929977 - RNA, 19 nt, Artificial Sequence
  Description of Artificial Sequence: Synthetic oligonucleotide
  Antisense strand to SEQ ID NO: 1929976
uaucaaaggaguuucacuc

SEQ ID NO: 1929978 - RNA, 19 nt, Artificial Sequence
  Description of Artificial Sequence: Synthetic oligonucleotide
  Sense strand starting at position 3169 of SEQ ID NO: 1879749
gugaaacuccuuugauaaa

SEQ ID NO: 1929979 - RNA, 19 nt, Artificial Sequence
  Description of Artificial Sequence: Synthetic oligonucleotide
  Antisense strand to SEQ ID NO: 1929978
uuuaucaaaggaguuucac

SEQ ID NO: 1929980 - RNA, 19 nt, Artificial Sequence
  Description of Artificial Sequence: Synthetic oligonucleotide
  Sense strand starting at position 3701 of SEQ ID NO: 1879749
gugaaaggaucccuugagu

SEQ ID NO: 1929981 - RNA, 19 nt, Artificial Sequence
  Description of Artificial Sequence: Synthetic oligonucleotide
  Antisense strand to SEQ ID NO: 1929980
acucaagggauccuuucac

SEQ ID NO: 1929982 - RNA, 19 nt, Artificial Sequence
  Description of Artificial Sequence: Synthetic oligonucleotide
  Sense strand starting at position 3948 of SEQ ID NO: 1879749
acacuugggucuuuggaga

SEQ ID NO: 1929983 - RNA, 19 nt, Artificial Sequence
  Description of Artificial Sequence: Synthetic oligonucleotide
  Antisense strand to SEQ ID NO: 1929982
ucuccaaagacccaagugu

SEQ ID NO: 1929984 - RNA, 19 nt, Artificial Sequence
  Description of Artificial Sequence: Synthetic oligonucleotide
  Sense strand starting at position 55 of SEQ ID NO: 1879750
uguguaguugcucuacgua

SEQ ID NO: 1929985 - RNA, 19 nt, Artificial Sequence
  Description of Artificial Sequence: Synthetic oligonucleotide
  Antisense strand to SEQ ID NO: 1929984
uacguagagcaacuacaca

SEQ ID NO: 1929986 - RNA, 19 nt, Artificial Sequence
  Description of Artificial Sequence: Synthetic oligonucleotide
  Sense strand starting at position 127 of SEQ ID NO: 1879750
ggguaugcuacugguauuu

SEQ ID NO: 1929987 - RNA, 19 nt, Artificial Sequence
  Description of Artificial Sequence: Synthetic oligonucleotide
  Antisense strand to SEQ ID NO: 1929986
aaauaccaguagcauaccc

SEQ ID NO: 1929988 - RNA, 19 nt, Artificial Sequence
  Description of Artificial Sequence: Synthetic oligonucleotide
  Sense strand starting at position 222 of SEQ ID NO: 1879750
acagcaacauuguuaagaa

SEQ ID NO: 1929989 - RNA, 19 nt, Artificial Sequence
  Description of Artificial Sequence: Synthetic oligonucleotide
  Antisense strand to SEQ ID NO: 1929988
uucuuaacaauguugcugu

SEQ ID NO: 1929990 - RNA, 19 nt, Artificial Sequence
  Description of Artificial Sequence: Synthetic oligonucleotide
  Sense strand starting at position 1034 of SEQ ID NO: 1879750
ggccgaggauggucuuuau

SEQ ID NO: 1929991 - RNA, 19 nt, Artificial Sequence
  Description of Artificial Sequence: Synthetic oligonucleotide
  Antisense strand to SEQ ID NO: 1929990
auaaagaccauccucggcc

SEQ ID NO: 1929992 - RNA, 19 nt, Artificial Sequence
  Description of Artificial Sequence: Synthetic oligonucleotide
  Sense strand starting at position 1037 of SEQ ID NO: 1879750
cgaggauggucuuuaucuc

SEQ ID NO: 1929993 - RNA, 19 nt, Artificial Sequence
  Description of Artificial Sequence: Synthetic oligonucleotide
  Antisense strand to SEQ ID NO: 1929992
gagauaaagaccauccucg

SEQ ID NO: 1929994 - RNA, 19 nt, Artificial Sequence
  Description of Artificial Sequence: Synthetic oligonucleotide
  Sense strand starting at position 1038 of SEQ ID NO: 1879750
gaggauggucuuuaucucu

SEQ ID NO: 1929995 - RNA, 19 nt, Artificial Sequence
  Description of Artificial Sequence: Synthetic oligonucleotide
  Antisense strand to SEQ ID NO: 1929994
agagauaaagaccauccuc

SEQ ID NO: 1929996 - RNA, 19 nt, Artificial Sequence
  Description of Artificial Sequence: Synthetic oligonucleotide
  Sense strand starting at position 1830 of SEQ ID NO: 1879750
ugaacaaccuauuaaagga

SEQ ID NO: 1929997 - RNA, 19 nt, Artificial Sequence
  Description of Artificial Sequence: Synthetic oligonucleotide
  Antisense strand to SEQ ID NO: 1929996
uccuuuaauagguuguuca

SEQ ID NO: 1929998 - RNA, 19 nt, Artificial Sequence
  Description of Artificial Sequence: Synthetic oligonucleotide
  Sense strand starting at position 1954 of SEQ ID NO: 1879750
gggucacacugcucacaaa

SEQ ID NO: 1929999 - RNA, 19 nt, Artificial Sequence
  Description of Artificial Sequence: Synthetic oligonucleotide
  Antisense strand to SEQ ID NO: 1929998
uuugugagcagugugaccc

SEQ ID NO: 1930000 - RNA, 19 nt, Artificial Sequence
  Description of Artificial Sequence: Synthetic oligonucleotide
  Sense strand starting at position 1973 of SEQ ID NO: 1879750
gguagugcuccacaucuga

SEQ ID NO: 1930001 - RNA, 19 nt, Artificial Sequence
  Description of Artificial Sequence: Synthetic oligonucleotide
  Antisense strand to SEQ ID NO: 1930000
ucagauguggagcacuacc

SEQ ID NO: 1930002 - RNA, 19 nt, Artificial Sequence
  Description of Artificial Sequence: Synthetic oligonucleotide
  Sense strand starting at position 2058 of SEQ ID NO: 1879750
ggcuaugacuuauugagag

SEQ ID NO: 1930003 - RNA, 19 nt, Artificial Sequence
  Description of Artificial Sequence: Synthetic oligonucleotide
  Antisense strand to SEQ ID NO: 1930002
cucucaauaagucauagcc

SEQ ID NO: 1930004 - RNA, 19 nt, Artificial Sequence
  Description of Artificial Sequence: Synthetic oligonucleotide
  Sense strand starting at position 2105 of SEQ ID NO: 1879750
gcaauaggucaggguaaag

SEQ ID NO: 1930005 - RNA, 19 nt, Artificial Sequence
  Description of Artificial Sequence: Synthetic oligonucleotide
  Antisense strand to SEQ ID NO: 1930004
cuuuacccugaccuauugc

SEQ ID NO: 1930006 - RNA, 19 nt, Artificial Sequence
  Description of Artificial Sequence: Synthetic oligonucleotide
  Sense strand starting at position 2216 of SEQ ID NO: 1879750
aaguauaccgauugacuca

SEQ ID NO: 1930007 - RNA, 19 nt, Artificial Sequence
  Description of Artificial Sequence: Synthetic oligonucleotide
  Antisense strand to SEQ ID NO: 1930006
ugagucaaucgguauacuu

SEQ ID NO: 1930008 - RNA, 19 nt, Artificial Sequence
  Description of Artificial Sequence: Synthetic oligonucleotide
  Sense strand starting at position 2238 of SEQ ID NO: 1879750
ucuauagaucugggcaaau

SEQ ID NO: 1930009 - RNA, 19 nt, Artificial Sequence
  Description of Artificial Sequence: Synthetic oligonucleotide
  Antisense strand to SEQ ID NO: 1930008
auuugcccagaucuauaga

SEQ ID NO: 1930010 - RNA, 19 nt, Artificial Sequence
  Description of Artificial Sequence: Synthetic oligonucleotide
  Sense strand starting at position 2502 of SEQ ID NO: 1879750
ucaggagcccuacauguau

SEQ ID NO: 1930011 - RNA, 19 nt, Artificial Sequence
  Description of Artificial Sequence: Synthetic oligonucleotide
  Antisense strand to SEQ ID NO: 1930010
auacauguagggcuccuga

SEQ ID NO: 1930012 - RNA, 19 nt, Artificial Sequence
  Description of Artificial Sequence: Synthetic oligonucleotide
  Sense strand starting at position 2558 of SEQ ID NO: 1879750
aguguauuaucacuaauga

SEQ ID NO: 1930013 - RNA, 19 nt, Artificial Sequence
  Description of Artificial Sequence: Synthetic oligonucleotide
  Antisense strand to SEQ ID NO: 1930012
ucauuagugauaauacacu

SEQ ID NO: 1930014 - RNA, 19 nt, Artificial Sequence
  Description of Artificial Sequence: Synthetic oligonucleotide
  Sense strand starting at position 2559 of SEQ ID NO: 1879750
guguauuaucacuaaugau

SEQ ID NO: 1930015 - RNA, 19 nt, Artificial Sequence
  Description of Artificial Sequence: Synthetic oligonucleotide
  Antisense strand to SEQ ID NO: 1930014
aucauuagugauaauacac

SEQ ID NO: 1930016 - RNA, 19 nt, Artificial Sequence
  Description of Artificial Sequence: Synthetic oligonucleotide
  Sense strand starting at position 3139 of SEQ ID NO: 1879750
augggcuucuucuuugaau

SEQ ID NO: 1930017 - RNA, 19 nt, Artificial Sequence
  Description of Artificial Sequence: Synthetic oligonucleotide
  Antisense strand to SEQ ID NO: 1930016
auucaaagaagaagcccau

SEQ ID NO: 1930018 - RNA, 19 nt, Artificial Sequence
  Description of Artificial Sequence: Synthetic oligonucleotide
  Sense strand starting at position 3140 of SEQ ID NO: 1879750
ugggcuucuucuuugaaua

SEQ ID NO: 1930019 - RNA, 19 nt, Artificial Sequence
  Description of Artificial Sequence: Synthetic oligonucleotide
  Antisense strand to SEQ ID NO: 1930018
uauucaaagaagaagccca

SEQ ID NO: 1930020 - RNA, 19 nt, Artificial Sequence
  Description of Artificial Sequence: Synthetic oligonucleotide
  Sense strand starting at position 3141 of SEQ ID NO: 1879750
gggcuucuucuuugaauau

SEQ ID NO: 1930021 - RNA, 19 nt, Artificial Sequence
  Description of Artificial Sequence: Synthetic oligonucleotide
  Antisense strand to SEQ ID NO: 1930020
auauucaaagaagaagccc

SEQ ID NO: 1930022 - RNA, 19 nt, Artificial Sequence
  Description of Artificial Sequence: Synthetic oligonucleotide
  Sense strand starting at position 3362 of SEQ ID NO: 1879750
ucaucaaucugggcugaug

SEQ ID NO: 1930023 - RNA, 19 nt, Artificial Sequence
  Description of Artificial Sequence: Synthetic oligonucleotide
  Antisense strand to SEQ ID NO: 1930022
caucagcccagauugauga

SEQ ID NO: 1930024 - RNA, 19 nt, Artificial Sequence
  Description of Artificial Sequence: Synthetic oligonucleotide
  Sense strand starting at position 3402 of SEQ ID NO: 1879750
aggccuuucguagacgaca

SEQ ID NO: 1930025 - RNA, 19 nt, Artificial Sequence
  Description of Artificial Sequence: Synthetic oligonucleotide
  Antisense strand to SEQ ID NO: 1930024
ugucgucuacgaaaggccu

SEQ ID NO: 1930026 - RNA, 19 nt, Artificial Sequence
  Description of Artificial Sequence: Synthetic oligonucleotide
  Sense strand starting at position 3407 of SEQ ID NO: 1879750
uuucguagacgacaaacau

SEQ ID NO: 1930027 - RNA, 19 nt, Artificial Sequence
  Description of Artificial Sequence: Synthetic oligonucleotide
  Antisense strand to SEQ ID NO: 1930026
auguuugucgucuacgaaa

SEQ ID NO: 1930028 - RNA, 19 nt, Artificial Sequence
  Description of Artificial Sequence: Synthetic oligonucleotide
  Sense strand starting at position 3446 of SEQ ID NO: 1879750
cgcccauaguacuucugaa

SEQ ID NO: 1930029 - RNA, 19 nt, Artificial Sequence
  Description of Artificial Sequence: Synthetic oligonucleotide
  Antisense strand to SEQ ID NO: 1930028
uucagaaguacuaugggcg

SEQ ID NO: 1930030 - RNA, 19 nt, Artificial Sequence
  Description of Artificial Sequence: Synthetic oligonucleotide
  Sense strand starting at position 3476 of SEQ ID NO: 1879750
aagaaaucauguuugguuc

SEQ ID NO: 1930031 - RNA, 19 nt, Artificial Sequence
  Description of Artificial Sequence: Synthetic oligonucleotide
  Antisense strand to SEQ ID NO: 1930030
gaaccaaacaugauuucuu

SEQ ID NO: 1930032 - RNA, 19 nt, Artificial Sequence
  Description of Artificial Sequence: Synthetic oligonucleotide
  Sense strand starting at position 3484 of SEQ ID NO: 1879750
auguuugguucucucaaug

SEQ ID NO: 1930033 - RNA, 19 nt, Artificial Sequence
  Description of Artificial Sequence: Synthetic oligonucleotide
  Antisense strand to SEQ ID NO: 1930032
cauugagagaaccaaacau

SEQ ID NO: 1930034 - RNA, 19 nt, Artificial Sequence
  Description of Artificial Sequence: Synthetic oligonucleotide
  Sense strand starting at position 3494 of SEQ ID NO: 1879750
cucucaauguggcuuaaca

SEQ ID NO: 1930035 - RNA, 19 nt, Artificial Sequence
  Description of Artificial Sequence: Synthetic oligonucleotide
  Antisense strand to SEQ ID NO: 1930034
uguuaagccacauugagag

SEQ ID NO: 1930036 - RNA, 19 nt, Artificial Sequence
  Description of Artificial Sequence: Synthetic oligonucleotide
  Sense strand starting at position 3496 of SEQ ID NO: 1879750
cucaauguggcuuaacaau

SEQ ID NO: 1930037 - RNA, 19 nt, Artificial Sequence
  Description of Artificial Sequence: Synthetic oligonucleotide
  Antisense strand to SEQ ID NO: 1930036
auuguuaagccacauugag

SEQ ID NO: 1930038 - RNA, 19 nt, Artificial Sequence
  Description of Artificial Sequence: Synthetic oligonucleotide
  Sense strand starting at position 3587 of SEQ ID NO: 1879750
ucaaauauauggccagaua

SEQ ID NO: 1930039 - RNA, 19 nt, Artificial Sequence
  Description of Artificial Sequence: Synthetic oligonucleotide
  Antisense strand to SEQ ID NO: 1930038
uaucuggccauauauuuga

SEQ ID NO: 1930040 - RNA, 19 nt, Artificial Sequence
  Description of Artificial Sequence: Synthetic oligonucleotide
  Sense strand starting at position 3590 of SEQ ID NO: 1879750
aauauauggccagauaguu

SEQ ID NO: 1930041 - RNA, 19 nt, Artificial Sequence
  Description of Artificial Sequence: Synthetic oligonucleotide
  Antisense strand to SEQ ID NO: 1930040
aacuaucuggccauauauu

SEQ ID NO: 1930042 - RNA, 19 nt, Artificial Sequence
  Description of Artificial Sequence: Synthetic oligonucleotide
  Sense strand starting at position 3598 of SEQ ID NO: 1879750
gccagauaguugguaacaa

SEQ ID NO: 1930043 - RNA, 19 nt, Artificial Sequence
  Description of Artificial Sequence: Synthetic oligonucleotide
  Antisense strand to SEQ ID NO: 1930042
uuguuaccaacuaucuggc

SEQ ID NO: 1930044 - RNA, 19 nt, Artificial Sequence
  Description of Artificial Sequence: Synthetic oligonucleotide
  Sense strand starting at position 3641 of SEQ ID NO: 1879750
aaguuagaaucugcauguu

SEQ ID NO: 1930045 - RNA, 19 nt, Artificial Sequence
  Description of Artificial Sequence: Synthetic oligonucleotide
  Antisense strand to SEQ ID NO: 1930044
aacaugcagauucuaacuu

SEQ ID NO: 1930046 - RNA, 19 nt, Artificial Sequence
  Description of Artificial Sequence: Synthetic oligonucleotide
  Sense strand starting at position 3644 of SEQ ID NO: 1879750
uuagaaucugcauguuauu

SEQ ID NO: 1930047 - RNA, 19 nt, Artificial Sequence
  Description of Artificial Sequence: Synthetic oligonucleotide
  Antisense strand to SEQ ID NO: 1930046
aauaacaugcagauucuaa

SEQ ID NO: 1930048 - RNA, 19 nt, Artificial Sequence
  Description of Artificial Sequence: Synthetic oligonucleotide
  Sense strand starting at position 3670 of SEQ ID NO: 1879750
uugcucaacugaucuguca

SEQ ID NO: 1930049 - RNA, 19 nt, Artificial Sequence
  Description of Artificial Sequence: Synthetic oligonucleotide
  Antisense strand to SEQ ID NO: 1930048
ugacagaucaguugagcaa

SEQ ID NO: 1930050 - RNA, 19 nt, Artificial Sequence
  Description of Artificial Sequence: Synthetic oligonucleotide
  Sense strand starting at position 3765 of SEQ ID NO: 1879750
cauaauguacuguagaagu

SEQ ID NO: 1930051 - RNA, 19 nt, Artificial Sequence
  Description of Artificial Sequence: Synthetic oligonucleotide
  Antisense strand to SEQ ID NO: 1930050
acuucuacaguacauuaug

SEQ ID NO: 1930052 - RNA, 19 nt, Artificial Sequence
  Description of Artificial Sequence: Synthetic oligonucleotide
  Sense strand starting at position 3803 of SEQ ID NO: 1879750
uguggauaucugugacaga

SEQ ID NO: 1930053 - RNA, 19 nt, Artificial Sequence
  Description of Artificial Sequence: Synthetic oligonucleotide
  Antisense strand to SEQ ID NO: 1930052
ucugucacagauauccaca

SEQ ID NO: 1930054 - RNA, 19 nt, Artificial Sequence
  Description of Artificial Sequence: Synthetic oligonucleotide
  Sense strand starting at position 3816 of SEQ ID NO: 1879750
gacagaucuacagguguug

SEQ ID NO: 1930055 - RNA, 19 nt, Artificial Sequence
  Description of Artificial Sequence: Synthetic oligonucleotide
  Antisense strand to SEQ ID NO: 1930054
caacaccuguagaucuguc

SEQ ID NO: 1930056 - RNA, 19 nt, Artificial Sequence
  Description of Artificial Sequence: Synthetic oligonucleotide
  Sense strand starting at position 3822 of SEQ ID NO: 1879750
ucuacagguguugaaucua

SEQ ID NO: 1930057 - RNA, 19 nt, Artificial Sequence
  Description of Artificial Sequence: Synthetic oligonucleotide
  Antisense strand to SEQ ID NO: 1930056
uagauucaacaccuguaga

SEQ ID NO: 1930058 - RNA, 19 nt, Artificial Sequence
  Description of Artificial Sequence: Synthetic oligonucleotide
  Sense strand starting at position 3830 of SEQ ID NO: 1879750
uguugaaucuauguggaag

SEQ ID NO: 1930059 - RNA, 19 nt, Artificial Sequence
  Description of Artificial Sequence: Synthetic oligonucleotide
  Antisense strand to SEQ ID NO: 1930058
cuuccacauagauucaaca

SEQ ID NO: 1930060 - RNA, 19 nt, Artificial Sequence
  Description of Artificial Sequence: Synthetic oligonucleotide
  Sense strand starting at position 3850 of SEQ ID NO: 1879750
uggguuucaguaggaagaa

SEQ ID NO: 1930061 - RNA, 19 nt, Artificial Sequence
  Description of Artificial Sequence: Synthetic oligonucleotide
  Antisense strand to SEQ ID NO: 1930060
uucuuccuacugaaaccca

SEQ ID NO: 1930062 - RNA, 19 nt, Artificial Sequence
  Description of Artificial Sequence: Synthetic oligonucleotide
  Sense strand starting at position 3862 of SEQ ID NO: 1879750
ggaagaauguuacaauuua

SEQ ID NO: 1930063 - RNA, 19 nt, Artificial Sequence
  Description of Artificial Sequence: Synthetic oligonucleotide
  Antisense strand to SEQ ID NO: 1930062
uaaauuguaacauucuucc

SEQ ID NO: 1930064 - RNA, 19 nt, Artificial Sequence
  Description of Artificial Sequence: Synthetic oligonucleotide
  Sense strand starting at position 147 of SEQ ID NO: 1879751
uuuaaugaggcuugaaagu

SEQ ID NO: 1930065 - RNA, 19 nt, Artificial Sequence
  Description of Artificial Sequence: Synthetic oligonucleotide
  Antisense strand to SEQ ID NO: 1930064
acuuucaagccucauuaaa

SEQ ID NO: 1930066 - RNA, 19 nt, Artificial Sequence
  Description of Artificial Sequence: Synthetic oligonucleotide
  Sense strand starting at position 184 of SEQ ID NO: 1879751
auccauauugagggcuuau

SEQ ID NO: 1930067 - RNA, 19 nt, Artificial Sequence
  Description of Artificial Sequence: Synthetic oligonucleotide
  Antisense strand to SEQ ID NO: 1930066
auaagcccucaauauggau

SEQ ID NO: 1930068 - RNA, 19 nt, Artificial Sequence
  Description of Artificial Sequence: Synthetic oligonucleotide
  Sense strand starting at position 411 of SEQ ID NO: 1879751
auacguguuccuuaaagag

SEQ ID NO: 1930069 - RNA, 19 nt, Artificial Sequence
  Description of Artificial Sequence: Synthetic oligonucleotide
  Antisense strand to SEQ ID NO: 1930068
cucuuuaaggaacacguau

SEQ ID NO: 1930070 - RNA, 19 nt, Artificial Sequence
  Description of Artificial Sequence: Synthetic oligonucleotide
  Sense strand starting at position 978 of SEQ ID NO: 1879751
guguaacagaaguagucaa

SEQ ID NO: 1930071 - RNA, 19 nt, Artificial Sequence
  Description of Artificial Sequence: Synthetic oligonucleotide
  Antisense strand to SEQ ID NO: 1930070
uugacuacuucuguuacac

SEQ ID NO: 1930072 - RNA, 19 nt, Artificial Sequence
  Description of Artificial Sequence: Synthetic oligonucleotide
  Sense strand starting at position 985 of SEQ ID NO: 1879751
agaaguagucaauaugcuu

SEQ ID NO: 1930073 - RNA, 19 nt, Artificial Sequence
  Description of Artificial Sequence: Synthetic oligonucleotide
  Antisense strand to SEQ ID NO: 1930072
aagcauauugacuacuucu

SEQ ID NO: 1930074 - RNA, 19 nt, Artificial Sequence
  Description of Artificial Sequence: Synthetic oligonucleotide
  Sense strand starting at position 1055 of SEQ ID NO: 1879751
gaggaacucggcuaucauu

SEQ ID NO: 1930075 - RNA, 19 nt, Artificial Sequence
  Description of Artificial Sequence: Synthetic oligonucleotide
  Antisense strand to SEQ ID NO: 1930074
aaugauagccgaguuccuc

SEQ ID NO: 1930076 - RNA, 19 nt, Artificial Sequence
  Description of Artificial Sequence: Synthetic oligonucleotide
  Sense strand starting at position 1322 of SEQ ID NO: 1879751
gguauuuaaucucuugcuu

SEQ ID NO: 1930077 - RNA, 19 nt, Artificial Sequence
  Description of Artificial Sequence: Synthetic oligonucleotide
  Antisense strand to SEQ ID NO: 1930076
aagcaagagauuaaauacc

SEQ ID NO: 1930078 - RNA, 19 nt, Artificial Sequence
  Description of Artificial Sequence: Synthetic oligonucleotide
  Sense strand starting at position 1353 of SEQ ID NO: 1879751
aagagaacuugacccuagu

SEQ ID NO: 1930079 - RNA, 19 nt, Artificial Sequence
  Description of Artificial Sequence: Synthetic oligonucleotide
  Antisense strand to SEQ ID NO: 1930078
acuagggucaaguucucuu

SEQ ID NO: 1930080 - RNA, 19 nt, Artificial Sequence
  Description of Artificial Sequence: Synthetic oligonucleotide
  Sense strand starting at position 1366 of SEQ ID NO: 1879751
ccuaguucccaguauucca

SEQ ID NO: 1930081 - RNA, 19 nt, Artificial Sequence
  Description of Artificial Sequence: Synthetic oligonucleotide
  Antisense strand to SEQ ID NO: 1930080
uggaauacugggaacuagg

SEQ ID NO: 1930082 - RNA, 19 nt, Artificial Sequence
  Description of Artificial Sequence: Synthetic oligonucleotide
  Sense strand starting at position 1496 of SEQ ID NO: 1879751
gccucaaagguggauaacu

SEQ ID NO: 1930083 - RNA, 19 nt, Artificial Sequence
  Description of Artificial Sequence: Synthetic oligonucleotide
  Antisense strand to SEQ ID NO: 1930082
aguuauccaccuuugaggc

SEQ ID NO: 1930084 - RNA, 19 nt, Artificial Sequence
  Description of Artificial Sequence: Synthetic oligonucleotide
  Sense strand starting at position 1505 of SEQ ID NO: 1879751
guggauaacugauuauggu

SEQ ID NO: 1930085 - RNA, 19 nt, Artificial Sequence
  Description of Artificial Sequence: Synthetic oligonucleotide
  Antisense strand to SEQ ID NO: 1930084
accauaaucaguuauccac

SEQ ID NO: 1930086 - RNA, 19 nt, Artificial Sequence
  Description of Artificial Sequence: Synthetic oligonucleotide
  Sense strand starting at position 1511 of SEQ ID NO: 1879751
aacugauuaugguuugaag

SEQ ID NO: 1930087 - RNA, 19 nt, Artificial Sequence
  Description of Artificial Sequence: Synthetic oligonucleotide
  Antisense strand to SEQ ID NO: 1930086
cuucaaaccauaaucaguu

SEQ ID NO: 1930088 - RNA, 19 nt, Artificial Sequence
  Description of Artificial Sequence: Synthetic oligonucleotide
  Sense strand starting at position 1513 of SEQ ID NO: 1879751
cugauuaugguuugaagau

SEQ ID NO: 1930089 - RNA, 19 nt, Artificial Sequence
  Description of Artificial Sequence: Synthetic oligonucleotide
  Antisense strand to SEQ ID NO: 1930088
aucuucaaaccauaaucag

SEQ ID NO: 1930090 - RNA, 19 nt, Artificial Sequence
  Description of Artificial Sequence: Synthetic oligonucleotide
  Sense strand starting at position 1560 of SEQ ID NO: 1879751
aaaugagugaugugguuua

SEQ ID NO: 1930091 - RNA, 19 nt, Artificial Sequence
  Description of Artificial Sequence: Synthetic oligonucleotide
  Antisense strand to SEQ ID NO: 1930090
uaaaccacaucacucauuu

SEQ ID NO: 1930092 - RNA, 19 nt, Artificial Sequence
  Description of Artificial Sequence: Synthetic oligonucleotide
  Sense strand starting at position 1807 of SEQ ID NO: 1879751
agguaauggcagcaaucaa

SEQ ID NO: 1930093 - RNA, 19 nt, Artificial Sequence
  Description of Artificial Sequence: Synthetic oligonucleotide
  Antisense strand to SEQ ID NO: 1930092
uugauugcugccauuaccu

SEQ ID NO: 1930094 - RNA, 19 nt, Artificial Sequence
  Description of Artificial Sequence: Synthetic oligonucleotide
  Sense strand starting at position 1904 of SEQ ID NO: 1879751
ccuuguugaagguaguaau

SEQ ID NO: 1930095 - RNA, 19 nt, Artificial Sequence
  Description of Artificial Sequence: Synthetic oligonucleotide
  Antisense strand to SEQ ID NO: 1930094
auuacuaccuucaacaagg

SEQ ID NO: 1930096 - RNA, 19 nt, Artificial Sequence
  Description of Artificial Sequence: Synthetic oligonucleotide
  Sense strand starting at position 2080 of SEQ ID NO: 1879751
agaauugcuucuccucaag

SEQ ID NO: 1930097 - RNA, 19 nt, Artificial Sequence
  Description of Artificial Sequence: Synthetic oligonucleotide
  Antisense strand to SEQ ID NO: 1930096
cuugaggagaagcaauucu

SEQ ID NO: 1930098 - RNA, 19 nt, Artificial Sequence
  Description of Artificial Sequence: Synthetic oligonucleotide
  Sense strand starting at position 2091 of SEQ ID NO: 1879751
uccucaagccuggagucau

SEQ ID NO: 1930099 - RNA, 19 nt, Artificial Sequence
  Description of Artificial Sequence: Synthetic oligonucleotide
  Antisense strand to SEQ ID NO: 1930098
augacuccaggcuugagga

SEQ ID NO: 1930100 - RNA, 19 nt, Artificial Sequence
  Description of Artificial Sequence: Synthetic oligonucleotide
  Sense strand starting at position 2104 of SEQ ID NO: 1879751
agucauuucuauguuccuu

SEQ ID NO: 1930101 - RNA, 19 nt, Artificial Sequence
  Description of Artificial Sequence: Synthetic oligonucleotide
  Antisense strand to SEQ ID NO: 1930100
aaggaacauagaaaugacu

SEQ ID NO: 1930102 - RNA, 19 nt, Artificial Sequence
  Description of Artificial Sequence: Synthetic oligonucleotide
  Sense strand starting at position 2161 of SEQ ID NO: 1879751
aggcaucuugacuaauuau

SEQ ID NO: 1930103 - RNA, 19 nt, Artificial Sequence
  Description of Artificial Sequence: Synthetic oligonucleotide
  Antisense strand to SEQ ID NO: 1930102
auaauuagucaagaugccu

SEQ ID NO: 1930104 - RNA, 19 nt, Artificial Sequence
  Description of Artificial Sequence: Synthetic oligonucleotide
  Sense strand starting at position 2185 of SEQ ID NO: 1879751
acaugucaauuugagaucu

SEQ ID NO: 1930105 - RNA, 19 nt, Artificial Sequence
  Description of Artificial Sequence: Synthetic oligonucleotide
  Antisense strand to SEQ ID NO: 1930104
agaucucaaauugacaugu

SEQ ID NO: 1930106 - RNA, 19 nt, Artificial Sequence
  Description of Artificial Sequence: Synthetic oligonucleotide
  Sense strand starting at position 2187 of SEQ ID NO: 1879751
augucaauuugagaucuca

SEQ ID NO: 1930107 - RNA, 19 nt, Artificial Sequence
  Description of Artificial Sequence: Synthetic oligonucleotide
  Antisense strand to SEQ ID NO: 1930106
ugagaucucaaauugacau

SEQ ID NO: 1930108 - RNA, 19 nt, Artificial Sequence
  Description of Artificial Sequence: Synthetic oligonucleotide
  Sense strand starting at position 2315 of SEQ ID NO: 1879751
auuggucucucaccugaaa

SEQ ID NO: 1930109 - RNA, 19 nt, Artificial Sequence
  Description of Artificial Sequence: Synthetic oligonucleotide
  Antisense strand to SEQ ID NO: 1930108
uuucaggugagagaccaau

SEQ ID NO: 1930110 - RNA, 19 nt, Artificial Sequence
  Description of Artificial Sequence: Synthetic oligonucleotide
  Sense strand starting at position 2512 of SEQ ID NO: 1879751
uguguaagacaugacuguu

SEQ ID NO: 1930111 - RNA, 19 nt, Artificial Sequence
  Description of Artificial Sequence: Synthetic oligonucleotide
  Antisense strand to SEQ ID NO: 1930110
aacagucaugucuuacaca

SEQ ID NO: 1930112 - RNA, 19 nt, Artificial Sequence
  Description of Artificial Sequence: Synthetic oligonucleotide
  Sense strand starting at position 2515 of SEQ ID NO: 1879751
guaagacaugacuguucua

SEQ ID NO: 1930113 - RNA, 19 nt, Artificial Sequence
  Description of Artificial Sequence: Synthetic oligonucleotide
  Antisense strand to SEQ ID NO: 1930112
uagaacagucaugucuuac

SEQ ID NO: 1930114 - RNA, 19 nt, Artificial Sequence
  Description of Artificial Sequence: Synthetic oligonucleotide
  Sense strand starting at position 2518 of SEQ ID NO: 1879751
agacaugacuguucuaucu

SEQ ID NO: 1930115 - RNA, 19 nt, Artificial Sequence
  Description of Artificial Sequence: Synthetic oligonucleotide
  Antisense strand to SEQ ID NO: 1930114
agauagaacagucaugucu

SEQ ID NO: 1930116 - RNA, 19 nt, Artificial Sequence
  Description of Artificial Sequence: Synthetic oligonucleotide
  Sense strand starting at position 2528 of SEQ ID NO: 1879751
guucuaucugcacaggaag

SEQ ID NO: 1930117 - RNA, 19 nt, Artificial Sequence
  Description of Artificial Sequence: Synthetic oligonucleotide
  Antisense strand to SEQ ID NO: 1930116
cuuccugugcagauagaac

SEQ ID NO: 1930118 - RNA, 19 nt, Artificial Sequence
  Description of Artificial Sequence: Synthetic oligonucleotide
  Sense strand starting at position 2869 of SEQ ID NO: 1879751
ucguuacuaguuuacuaaa

SEQ ID NO: 1930119 - RNA, 19 nt, Artificial Sequence
  Description of Artificial Sequence: Synthetic oligonucleotide
  Antisense strand to SEQ ID NO: 1930118
uuuaguaaacuaguaacga

SEQ ID NO: 1930120 - RNA, 19 nt, Artificial Sequence
  Description of Artificial Sequence: Synthetic oligonucleotide
  Sense strand starting at position 3053 of SEQ ID NO: 1879751
guccaaaugauauguagag

SEQ ID NO: 1930121 - RNA, 19 nt, Artificial Sequence
  Description of Artificial Sequence: Synthetic oligonucleotide
  Antisense strand to SEQ ID NO: 1930120
cucuacauaucauuuggac

SEQ ID NO: 1930122 - RNA, 19 nt, Artificial Sequence
  Description of Artificial Sequence: Synthetic oligonucleotide
  Sense strand starting at position 3062 of SEQ ID NO: 1879751
auauguagagauuaagugu

SEQ ID NO: 1930123 - RNA, 19 nt, Artificial Sequence
  Description of Artificial Sequence: Synthetic oligonucleotide
  Antisense strand to SEQ ID NO: 1930122
acacuuaaucucuacauau

SEQ ID NO: 1930124 - RNA, 19 nt, Artificial Sequence
  Description of Artificial Sequence: Synthetic oligonucleotide
  Sense strand starting at position 3065 of SEQ ID NO: 1879751
uguagagauuaaguguuua

SEQ ID NO: 1930125 - RNA, 19 nt, Artificial Sequence
  Description of Artificial Sequence: Synthetic oligonucleotide
  Antisense strand to SEQ ID NO: 1930124
uaaacacuuaaucucuaca

SEQ ID NO: 1930126 - RNA, 19 nt, Artificial Sequence
  Description of Artificial Sequence: Synthetic oligonucleotide
  Sense strand starting at position 3069 of SEQ ID NO: 1879751
gagauuaaguguuuaauuc

SEQ ID NO: 1930127 - RNA, 19 nt, Artificial Sequence
  Description of Artificial Sequence: Synthetic oligonucleotide
  Antisense strand to SEQ ID NO: 1930126
gaauuaaacacuuaaucuc

SEQ ID NO: 1930128 - RNA, 19 nt, Artificial Sequence
  Description of Artificial Sequence: Synthetic oligonucleotide
  Sense strand starting at position 3141 of SEQ ID NO: 1879751
aucugcaaagacugaguua

SEQ ID NO: 1930129 - RNA, 19 nt, Artificial Sequence
  Description of Artificial Sequence: Synthetic oligonucleotide
  Antisense strand to SEQ ID NO: 1930128
uaacucagucuuugcagau

SEQ ID NO: 1930130 - RNA, 19 nt, Artificial Sequence
  Description of Artificial Sequence: Synthetic oligonucleotide
  Sense strand starting at position 3387 of SEQ ID NO: 1879751
gucccugaucuaugggauu

SEQ ID NO: 1930131 - RNA, 19 nt, Artificial Sequence
  Description of Artificial Sequence: Synthetic oligonucleotide
  Antisense strand to SEQ ID NO: 1930130
aaucccauagaucagggac

SEQ ID NO: 1930132 - RNA, 19 nt, Artificial Sequence
  Description of Artificial Sequence: Synthetic oligonucleotide
  Sense strand starting at position 3389 of SEQ ID NO: 1879751
cccugaucuaugggauuag

SEQ ID NO: 1930133 - RNA, 19 nt, Artificial Sequence
  Description of Artificial Sequence: Synthetic oligonucleotide
  Antisense strand to SEQ ID NO: 1930132
cuaaucccauagaucaggg

SEQ ID NO: 1930134 - RNA, 19 nt, Artificial Sequence
  Description of Artificial Sequence: Synthetic oligonucleotide
  Sense strand starting at position 3446 of SEQ ID NO: 1879751
aggaaucccucagauuuaa

SEQ ID NO: 1930135 - RNA, 19 nt, Artificial Sequence
  Description of Artificial Sequence: Synthetic oligonucleotide
  Antisense strand to SEQ ID NO: 1930134
uuaaaucugagggauuccu

SEQ ID NO: 1930136 - RNA, 19 nt, Artificial Sequence
  Description of Artificial Sequence: Synthetic oligonucleotide
  Sense strand starting at position 3543 of SEQ ID NO: 1879751
augggcuaugcucagaacu

SEQ ID NO: 1930137 - RNA, 19 nt, Artificial Sequence
  Description of Artificial Sequence: Synthetic oligonucleotide
  Antisense strand to SEQ ID NO: 1930136
aguucugagcauagcccau

SEQ ID NO: 1930138 - RNA, 19 nt, Artificial Sequence
  Description of Artificial Sequence: Synthetic oligonucleotide
  Sense strand starting at position 3553 of SEQ ID NO: 1879751
cucagaacugagcaucuua

SEQ ID NO: 1930139 - RNA, 19 nt, Artificial Sequence
  Description of Artificial Sequence: Synthetic oligonucleotide
  Antisense strand to SEQ ID NO: 1930138
uaagaugcucaguucugag

SEQ ID NO: 1930140 - RNA, 19 nt, Artificial Sequence
  Description of Artificial Sequence: Synthetic oligonucleotide
  Sense strand starting at position 3618 of SEQ ID NO: 1879751
ggacaaacaugugcaacau

SEQ ID NO: 1930141 - RNA, 19 nt, Artificial Sequence
  Description of Artificial Sequence: Synthetic oligonucleotide
  Antisense strand to SEQ ID NO: 1930140
auguugcacauguuugucc

SEQ ID NO: 1930142 - RNA, 19 nt, Artificial Sequence
  Description of Artificial Sequence: Synthetic oligonucleotide
  Sense strand starting at position 3904 of SEQ ID NO: 1879751
uacgguauuucuguaacug

SEQ ID NO: 1930143 - RNA, 19 nt, Artificial Sequence
  Description of Artificial Sequence: Synthetic oligonucleotide
  Antisense strand to SEQ ID NO: 1930142
caguuacagaaauaccgua

SEQ ID NO: 1930144 - RNA, 19 nt, Artificial Sequence
  Description of Artificial Sequence: Synthetic oligonucleotide
  Sense strand starting at position 119 of SEQ ID NO: 1879752
ucuacagaacuguguuacu

SEQ ID NO: 1930145 - RNA, 19 nt, Artificial Sequence
  Description of Artificial Sequence: Synthetic oligonucleotide
  Antisense strand to SEQ ID NO: 1930144
aguaacacaguucuguaga

SEQ ID NO: 1930146 - RNA, 19 nt, Artificial Sequence
  Description of Artificial Sequence: Synthetic oligonucleotide
  Sense strand starting at position 130 of SEQ ID NO: 1879752
guguuacuucccuaacuaa

SEQ ID NO: 1930147 - RNA, 19 nt, Artificial Sequence
  Description of Artificial Sequence: Synthetic oligonucleotide
  Antisense strand to SEQ ID NO: 1930146
uuaguuagggaaguaacac

SEQ ID NO: 1930148 - RNA, 19 nt, Artificial Sequence
  Description of Artificial Sequence: Synthetic oligonucleotide
  Sense strand starting at position 177 of SEQ ID NO: 1879752
cucacuaaacugugggaaa

SEQ ID NO: 1930149 - RNA, 19 nt, Artificial Sequence
  Description of Artificial Sequence: Synthetic oligonucleotide
  Antisense strand to SEQ ID NO: 1930148
uuucccacaguuuagugag

SEQ ID NO: 1930150 - RNA, 19 nt, Artificial Sequence
  Description of Artificial Sequence: Synthetic oligonucleotide
  Sense strand starting at position 288 of SEQ ID NO: 1879752
caugauuugcuguacguag

SEQ ID NO: 1930151 - RNA, 19 nt, Artificial Sequence
  Description of Artificial Sequence: Synthetic oligonucleotide
  Antisense strand to SEQ ID NO: 1930150
cuacguacagcaaaucaug

SEQ ID NO: 1930152 - RNA, 19 nt, Artificial Sequence
  Description of Artificial Sequence: Synthetic oligonucleotide
  Sense strand starting at position 290 of SEQ ID NO: 1879752
ugauuugcuguacguagau

SEQ ID NO: 1930153 - RNA, 19 nt, Artificial Sequence
  Description of Artificial Sequence: Synthetic oligonucleotide
  Antisense strand to SEQ ID NO: 1930152
aucuacguacagcaaauca

SEQ ID NO: 1930154 - RNA, 19 nt, Artificial Sequence
  Description of Artificial Sequence: Synthetic oligonucleotide
  Sense strand starting at position 297 of SEQ ID NO: 1879752
cuguacguagauugaucaa

SEQ ID NO: 1930155 - RNA, 19 nt, Artificial Sequence
  Description of Artificial Sequence: Synthetic oligonucleotide
  Antisense strand to SEQ ID NO: 1930154
uugaucaaucuacguacag

SEQ ID NO: 1930156 - RNA, 19 nt, Artificial Sequence
  Description of Artificial Sequence: Synthetic oligonucleotide
  Sense strand starting at position 300 of SEQ ID NO: 1879752
uacguagauugaucaauau

SEQ ID NO: 1930157 - RNA, 19 nt, Artificial Sequence
  Description of Artificial Sequence: Synthetic oligonucleotide
  Antisense strand to SEQ ID NO: 1930156
auauugaucaaucuacgua

SEQ ID NO: 1930158 - RNA, 19 nt, Artificial Sequence
  Description of Artificial Sequence: Synthetic oligonucleotide
  Sense strand starting at position 570 of SEQ ID NO: 1879752
cuuuacaacuuagugagau

SEQ ID NO: 1930159 - RNA, 19 nt, Artificial Sequence
  Description of Artificial Sequence: Synthetic oligonucleotide
  Antisense strand to SEQ ID NO: 1930158
aucucacuaaguuguaaag

SEQ ID NO: 1930160 - RNA, 19 nt, Artificial Sequence
  Description of Artificial Sequence: Synthetic oligonucleotide
  Sense strand starting at position 615 of SEQ ID NO: 1879752
ggagguuagcaguaaugga

SEQ ID NO: 1930161 - RNA, 19 nt, Artificial Sequence
  Description of Artificial Sequence: Synthetic oligonucleotide
  Antisense strand to SEQ ID NO: 1930160
uccauuacugcuaaccucc

SEQ ID NO: 1930162 - RNA, 19 nt, Artificial Sequence
  Description of Artificial Sequence: Synthetic oligonucleotide
  Sense strand starting at position 619 of SEQ ID NO: 1879752
guuagcaguaauggaaauu

SEQ ID NO: 1930163 - RNA, 19 nt, Artificial Sequence
  Description of Artificial Sequence: Synthetic oligonucleotide
  Antisense strand to SEQ ID NO: 1930162
aauuuccauuacugcuaac

SEQ ID NO: 1930164 - RNA, 19 nt, Artificial Sequence
  Description of Artificial Sequence: Synthetic oligonucleotide
  Sense strand starting at position 688 of SEQ ID NO: 1879752
ucucccagcgaucauagua

SEQ ID NO: 1930165 - RNA, 19 nt, Artificial Sequence
  Description of Artificial Sequence: Synthetic oligonucleotide
  Antisense strand to SEQ ID NO: 1930164
uacuaugaucgcugggaga

SEQ ID NO: 1930166 - RNA, 19 nt, Artificial Sequence
  Description of Artificial Sequence: Synthetic oligonucleotide
  Sense strand starting at position 706 of SEQ ID NO: 1879752
acucgugugcaggauuaga

SEQ ID NO: 1930167 - RNA, 19 nt, Artificial Sequence
  Description of Artificial Sequence: Synthetic oligonucleotide
  Antisense strand to SEQ ID NO: 1930166
ucuaauccugcacacgagu

SEQ ID NO: 1930168 - RNA, 19 nt, Artificial Sequence
  Description of Artificial Sequence: Synthetic oligonucleotide
  Sense strand starting at position 719 of SEQ ID NO: 1879752
auuagaaaguucucuggca

SEQ ID NO: 1930169 - RNA, 19 nt, Artificial Sequence
  Description of Artificial Sequence: Synthetic oligonucleotide
  Antisense strand to SEQ ID NO: 1930168
ugccagagaacuuucuaau

SEQ ID NO: 1930170 - RNA, 19 nt, Artificial Sequence
  Description of Artificial Sequence: Synthetic oligonucleotide
  Sense strand starting at position 721 of SEQ ID NO: 1879752
uagaaaguucucuggcaca

SEQ ID NO: 1930171 - RNA, 19 nt, Artificial Sequence
  Description of Artificial Sequence: Synthetic oligonucleotide
  Antisense strand to SEQ ID NO: 1930170
ugugccagagaacuuucua

SEQ ID NO: 1930172 - RNA, 19 nt, Artificial Sequence
  Description of Artificial Sequence: Synthetic oligonucleotide
  Sense strand starting at position 739 of SEQ ID NO: 1879752
agaagcaccuuucugauau

SEQ ID NO: 1930173 - RNA, 19 nt, Artificial Sequence
  Description of Artificial Sequence: Synthetic oligonucleotide
  Antisense strand to SEQ ID NO: 1930172
auaucagaaaggugcuucu

SEQ ID NO: 1930174 - RNA, 19 nt, Artificial Sequence
  Description of Artificial Sequence: Synthetic oligonucleotide
  Sense strand starting at position 1110 of SEQ ID NO: 1879752
cgagauuucugccuaucca

SEQ ID NO: 1930175 - RNA, 19 nt, Artificial Sequence
  Description of Artificial Sequence: Synthetic oligonucleotide
  Antisense strand to SEQ ID NO: 1930174
uggauaggcagaaaucucg

SEQ ID NO: 1930176 - RNA, 19 nt, Artificial Sequence
  Description of Artificial Sequence: Synthetic oligonucleotide
  Sense strand starting at position 1253 of SEQ ID NO: 1879752
uccggagacccucaccaau

SEQ ID NO: 1930177 - RNA, 19 nt, Artificial Sequence
  Description of Artificial Sequence: Synthetic oligonucleotide
  Antisense strand to SEQ ID NO: 1930176
auuggugagggucuccgga

SEQ ID NO: 1930178 - RNA, 19 nt, Artificial Sequence
  Description of Artificial Sequence: Synthetic oligonucleotide
  Sense strand starting at position 1295 of SEQ ID NO: 1879752
caggcaauugccuaaagga

SEQ ID NO: 1930179 - RNA, 19 nt, Artificial Sequence
  Description of Artificial Sequence: Synthetic oligonucleotide
  Antisense strand to SEQ ID NO: 1930178
uccuuuaggcaauugccug

SEQ ID NO: 1930180 - RNA, 19 nt, Artificial Sequence
  Description of Artificial Sequence: Synthetic oligonucleotide
  Sense strand starting at position 1411 of SEQ ID NO: 1879752
ggcucuaggcauuaggaua

SEQ ID NO: 1930181 - RNA, 19 nt, Artificial Sequence
  Description of Artificial Sequence: Synthetic oligonucleotide
  Antisense strand to SEQ ID NO: 1930180
uauccuaaugccuagagcc

SEQ ID NO: 1930182 - RNA, 19 nt, Artificial Sequence
  Description of Artificial Sequence: Synthetic oligonucleotide
  Sense strand starting at position 1494 of SEQ ID NO: 1879752
gccagaguucuauggaucu

SEQ ID NO: 1930183 - RNA, 19 nt, Artificial Sequence
  Description of Artificial Sequence: Synthetic oligonucleotide
  Antisense strand to SEQ ID NO: 1930182
agauccauagaacucuggc

SEQ ID NO: 1930184 - RNA, 19 nt, Artificial Sequence
  Description of Artificial Sequence: Synthetic oligonucleotide
  Sense strand starting at position 1543 of SEQ ID NO: 1879752
cuaagaguugcuggagaaa

SEQ ID NO: 1930185 - RNA, 19 nt, Artificial Sequence
  Description of Artificial Sequence: Synthetic oligonucleotide
  Antisense strand to SEQ ID NO: 1930184
uuucuccagcaacucuuag

SEQ ID NO: 1930186 - RNA, 19 nt, Artificial Sequence
  Description of Artificial Sequence: Synthetic oligonucleotide
  Sense strand starting at position 1560 of SEQ ID NO: 1879752
aauuacaaugcaugaguga

SEQ ID NO: 1930187 - RNA, 19 nt, Artificial Sequence
  Description of Artificial Sequence: Synthetic oligonucleotide
  Antisense strand to SEQ ID NO: 1930186
ucacucaugcauuguaauu

SEQ ID NO: 1930188 - RNA, 19 nt, Artificial Sequence
  Description of Artificial Sequence: Synthetic oligonucleotide
  Sense strand starting at position 1573 of SEQ ID NO: 1879752
gagugacuauucucagcau

SEQ ID NO: 1930189 - RNA, 19 nt, Artificial Sequence
  Description of Artificial Sequence: Synthetic oligonucleotide
  Antisense strand to SEQ ID NO: 1930188
augcugagaauagucacuc

SEQ ID NO: 1930190 - RNA, 19 nt, Artificial Sequence
  Description of Artificial Sequence: Synthetic oligonucleotide
  Sense strand starting at position 1673 of SEQ ID NO: 1879752
gaaggagguugccuaguaa

SEQ ID NO: 1930191 - RNA, 19 nt, Artificial Sequence
  Description of Artificial Sequence: Synthetic oligonucleotide
  Antisense strand to SEQ ID NO: 1930190
uuacuaggcaaccuccuuc

SEQ ID NO: 1930192 - RNA, 19 nt, Artificial Sequence
  Description of Artificial Sequence: Synthetic oligonucleotide
  Sense strand starting at position 1809 of SEQ ID NO: 1879752
ccuuuaaaccaguauguau

SEQ ID NO: 1930193 - RNA, 19 nt, Artificial Sequence
  Description of Artificial Sequence: Synthetic oligonucleotide
  Antisense strand to SEQ ID NO: 1930192
auacauacugguuuaaagg

SEQ ID NO: 1930194 - RNA, 19 nt, Artificial Sequence
  Description of Artificial Sequence: Synthetic oligonucleotide
  Sense strand starting at position 1872 of SEQ ID NO: 1879752
aucuaagugccucauagaa

SEQ ID NO: 1930195 - RNA, 19 nt, Artificial Sequence
  Description of Artificial Sequence: Synthetic oligonucleotide
  Antisense strand to SEQ ID NO: 1930194
uucuaugaggcacuuagau

SEQ ID NO: 1930196 - RNA, 19 nt, Artificial Sequence
  Description of Artificial Sequence: Synthetic oligonucleotide
  Sense strand starting at position 2358 of SEQ ID NO: 1879752
gggcuaggcauguauaaca

SEQ ID NO: 1930197 - RNA, 19 nt, Artificial Sequence
  Description of Artificial Sequence: Synthetic oligonucleotide
  Antisense strand to SEQ ID NO: 1930196
uguuauacaugccuagccc

SEQ ID NO: 1930198 - RNA, 19 nt, Artificial Sequence
  Description of Artificial Sequence: Synthetic oligonucleotide
  Sense strand starting at position 2416 of SEQ ID NO: 1879752
accauuagguuucuauacu

SEQ ID NO: 1930199 - RNA, 19 nt, Artificial Sequence
  Description of Artificial Sequence: Synthetic oligonucleotide
  Antisense strand to SEQ ID NO: 1930198
aguauagaaaccuaauggu

SEQ ID NO: 1930200 - RNA, 19 nt, Artificial Sequence
  Description of Artificial Sequence: Synthetic oligonucleotide
  Sense strand starting at position 2422 of SEQ ID NO: 1879752
agguuucuauacuuccauu

SEQ ID NO: 1930201 - RNA, 19 nt, Artificial Sequence
  Description of Artificial Sequence: Synthetic oligonucleotide
  Antisense strand to SEQ ID NO: 1930200
aauggaaguauagaaaccu

SEQ ID NO: 1930202 - RNA, 19 nt, Artificial Sequence
  Description of Artificial Sequence: Synthetic oligonucleotide
  Sense strand starting at position 2448 of SEQ ID NO: 1879752
ugauaaagcugaguucuca

SEQ ID NO: 1930203 - RNA, 19 nt, Artificial Sequence
  Description of Artificial Sequence: Synthetic oligonucleotide
  Antisense strand to SEQ ID NO: 1930202
ugagaacucagcuuuauca

SEQ ID NO: 1930204 - RNA, 19 nt, Artificial Sequence
  Description of Artificial Sequence: Synthetic oligonucleotide
  Sense strand starting at position 2480 of SEQ ID NO: 1879752
agaagaauuugcuauccac

SEQ ID NO: 1930205 - RNA, 19 nt, Artificial Sequence
  Description of Artificial Sequence: Synthetic oligonucleotide
  Antisense strand to SEQ ID NO: 1930204
guggauagcaaauucuucu

SEQ ID NO: 1930206 - RNA, 19 nt, Artificial Sequence
  Description of Artificial Sequence: Synthetic oligonucleotide
  Sense strand starting at position 2486 of SEQ ID NO: 1879752
auuugcuauccacgagcaa

SEQ ID NO: 1930207 - RNA, 19 nt, Artificial Sequence
  Description of Artificial Sequence: Synthetic oligonucleotide
  Antisense strand to SEQ ID NO: 1930206
uugcucguggauagcaaau

SEQ ID NO: 1930208 - RNA, 19 nt, Artificial Sequence
  Description of Artificial Sequence: Synthetic oligonucleotide
  Sense strand starting at position 2558 of SEQ ID NO: 1879752
ggcagacaguuguuaaauu

SEQ ID NO: 1930209 - RNA, 19 nt, Artificial Sequence
  Description of Artificial Sequence: Synthetic oligonucleotide
  Antisense strand to SEQ ID NO: 1930208
aauuuaacaacugucugcc

SEQ ID NO: 1930210 - RNA, 19 nt, Artificial Sequence
  Description of Artificial Sequence: Synthetic oligonucleotide
  Sense strand starting at position 2695 of SEQ ID NO: 1879752
ggaugucuccugcauuauc

SEQ ID NO: 1930211 - RNA, 19 nt, Artificial Sequence
  Description of Artificial Sequence: Synthetic oligonucleotide
  Antisense strand to SEQ ID NO: 1930210
gauaaugcaggagacaucc

SEQ ID NO: 1930212 - RNA, 19 nt, Artificial Sequence
  Description of Artificial Sequence: Synthetic oligonucleotide
  Sense strand starting at position 2744 of SEQ ID NO: 1879752
gcaaacuaggaauguuuaa

SEQ ID NO: 1930213 - RNA, 19 nt, Artificial Sequence
  Description of Artificial Sequence: Synthetic oligonucleotide
  Antisense strand to SEQ ID NO: 1930212
uuaaacauuccuaguuugc

SEQ ID NO: 1930214 - RNA, 19 nt, Artificial Sequence
  Description of Artificial Sequence: Synthetic oligonucleotide
  Sense strand starting at position 3024 of SEQ ID NO: 1879752
gcauuagaucccuagguga

SEQ ID NO: 1930215 - RNA, 19 nt, Artificial Sequence
  Description of Artificial Sequence: Synthetic oligonucleotide
  Antisense strand to SEQ ID NO: 1930214
ucaccuagggaucuaaugc

SEQ ID NO: 1930216 - RNA, 19 nt, Artificial Sequence
  Description of Artificial Sequence: Synthetic oligonucleotide
  Sense strand starting at position 3026 of SEQ ID NO: 1879752
auuagaucccuaggugaug

SEQ ID NO: 1930217 - RNA, 19 nt, Artificial Sequence
  Description of Artificial Sequence: Synthetic oligonucleotide
  Antisense strand to SEQ ID NO: 1930216
caucaccuagggaucuaau

SEQ ID NO: 1930218 - RNA, 19 nt, Artificial Sequence
  Description of Artificial Sequence: Synthetic oligonucleotide
  Sense strand starting at position 3306 of SEQ ID NO: 1879752
gauauuuagugcucgcuuc

SEQ ID NO: 1930219 - RNA, 19 nt, Artificial Sequence
  Description of Artificial Sequence: Synthetic oligonucleotide
  Antisense strand to SEQ ID NO: 1930218
gaagcgagcacuaaauauc

SEQ ID NO: 1930220 - RNA, 19 nt, Artificial Sequence
  Description of Artificial Sequence: Synthetic oligonucleotide
  Sense strand starting at position 3379 of SEQ ID NO: 1879752
uuguaauuccuguaacucu

SEQ ID NO: 1930221 - RNA, 19 nt, Artificial Sequence
  Description of Artificial Sequence: Synthetic oligonucleotide
  Antisense strand to SEQ ID NO: 1930220
agaguuacaggaauuacaa

SEQ ID NO: 1930222 - RNA, 19 nt, Artificial Sequence
  Description of Artificial Sequence: Synthetic oligonucleotide
  Sense strand starting at position 3443 of SEQ ID NO: 1879752
caaucugucugucuagaag

SEQ ID NO: 1930223 - RNA, 19 nt, Artificial Sequence
  Description of Artificial Sequence: Synthetic oligonucleotide
  Antisense strand to SEQ ID NO: 1930222
cuucuagacagacagauug

SEQ ID NO: 1930224 - RNA, 19 nt, Artificial Sequence
  Description of Artificial Sequence: Synthetic oligonucleotide
  Sense strand starting at position 352 of SEQ ID NO: 1879753
uguacuauacuggguacaa

SEQ ID NO: 1930225 - RNA, 19 nt, Artificial Sequence
  Description of Artificial Sequence: Synthetic oligonucleotide
  Antisense strand to SEQ ID NO: 1930224
uuguacccaguauaguaca

SEQ ID NO: 1930226 - RNA, 19 nt, Artificial Sequence
  Description of Artificial Sequence: Synthetic oligonucleotide
  Sense strand starting at position 353 of SEQ ID NO: 1879753
guacuauacuggguacaaa

SEQ ID NO: 1930227 - RNA, 19 nt, Artificial Sequence
  Description of Artificial Sequence: Synthetic oligonucleotide
  Antisense strand to SEQ ID NO: 1930226
uuuguacccaguauaguac

SEQ ID NO: 1930228 - RNA, 19 nt, Artificial Sequence
  Description of Artificial Sequence: Synthetic oligonucleotide
  Sense strand starting at position 428 of SEQ ID NO: 1879753
ugagauaucagucagcagu

SEQ ID NO: 1930229 - RNA, 19 nt, Artificial Sequence
  Description of Artificial Sequence: Synthetic oligonucleotide
  Antisense strand to SEQ ID NO: 1930228
acugcugacugauaucuca

SEQ ID NO: 1930230 - RNA, 19 nt, Artificial Sequence
  Description of Artificial Sequence: Synthetic oligonucleotide
  Sense strand starting at position 431 of SEQ ID NO: 1879753
gauaucagucagcaguagu

SEQ ID NO: 1930231 - RNA, 19 nt, Artificial Sequence
  Description of Artificial Sequence: Synthetic oligonucleotide
  Antisense strand to SEQ ID NO: 1930230
acuacugcugacugauauc

SEQ ID NO: 1930232 - RNA, 19 nt, Artificial Sequence
  Description of Artificial Sequence: Synthetic oligonucleotide
  Sense strand starting at position 494 of SEQ ID NO: 1879753
guccaagagccuuaacuga

SEQ ID NO: 1930233 - RNA, 19 nt, Artificial Sequence
  Description of Artificial Sequence: Synthetic oligonucleotide
  Antisense strand to SEQ ID NO: 1930232
ucaguuaaggcucuuggac

SEQ ID NO: 1930234 - RNA, 19 nt, Artificial Sequence
  Description of Artificial Sequence: Synthetic oligonucleotide
  Sense strand starting at position 543 of SEQ ID NO: 1879753
uuugcuucccuagaaagga

SEQ ID NO: 1930235 - RNA, 19 nt, Artificial Sequence
  Description of Artificial Sequence: Synthetic oligonucleotide
  Antisense strand to SEQ ID NO: 1930234
uccuuucuagggaagcaaa

SEQ ID NO: 1930236 - RNA, 19 nt, Artificial Sequence
  Description of Artificial Sequence: Synthetic oligonucleotide
  Sense strand starting at position 627 of SEQ ID NO: 1879753
gauauuaaaucagagggaa

SEQ ID NO: 1930237 - RNA, 19 nt, Artificial Sequence
  Description of Artificial Sequence: Synthetic oligonucleotide
  Antisense strand to SEQ ID NO: 1930236
uucccucugauuuaauauc

SEQ ID NO: 1930238 - RNA, 19 nt, Artificial Sequence
  Description of Artificial Sequence: Synthetic oligonucleotide
  Sense strand starting at position 671 of SEQ ID NO: 1879753
ggauucugcuuuccaaaca

SEQ ID NO: 1930239 - RNA, 19 nt, Artificial Sequence
  Description of Artificial Sequence: Synthetic oligonucleotide
  Antisense strand to SEQ ID NO: 1930238
uguuuggaaagcagaaucc

SEQ ID NO: 1930240 - RNA, 19 nt, Artificial Sequence
  Description of Artificial Sequence: Synthetic oligonucleotide
  Sense strand starting at position 777 of SEQ ID NO: 1879753
gaagaaguauuguuccuau

SEQ ID NO: 1930241 - RNA, 19 nt, Artificial Sequence
  Description of Artificial Sequence: Synthetic oligonucleotide
  Antisense strand to SEQ ID NO: 1930240
auaggaacaauacuucuuc

SEQ ID NO: 1930242 - RNA, 19 nt, Artificial Sequence
  Description of Artificial Sequence: Synthetic oligonucleotide
  Sense strand starting at position 780 of SEQ ID NO: 1879753
gaaguauuguuccuaugga

SEQ ID NO: 1930243 - RNA, 19 nt, Artificial Sequence
  Description of Artificial Sequence: Synthetic oligonucleotide
  Antisense strand to SEQ ID NO: 1930242
uccauaggaacaauacuuc

SEQ ID NO: 1930244 - RNA, 19 nt, Artificial Sequence
  Description of Artificial Sequence: Synthetic oligonucleotide
  Sense strand starting at position 802 of SEQ ID NO: 1879753
gugcuagaaacuugcaaga

SEQ ID NO: 1930245 - RNA, 19 nt, Artificial Sequence
  Description of Artificial Sequence: Synthetic oligonucleotide
  Antisense strand to SEQ ID NO: 1930244
ucuugcaaguuucuagcac

SEQ ID NO: 1930246 - RNA, 19 nt, Artificial Sequence
  Description of Artificial Sequence: Synthetic oligonucleotide
  Sense strand starting at position 1441 of SEQ ID NO: 1879753
uuacuacaguuggucaaau

SEQ ID NO: 1930247 - RNA, 19 nt, Artificial Sequence
  Description of Artificial Sequence: Synthetic oligonucleotide
  Antisense strand to SEQ ID NO: 1930246
auuugaccaacuguaguaa

SEQ ID NO: 1930248 - RNA, 19 nt, Artificial Sequence
  Description of Artificial Sequence: Synthetic oligonucleotide
  Sense strand starting at position 1522 of SEQ ID NO: 1879753
caguuaugcgauuaggaug

SEQ ID NO: 1930249 - RNA, 19 nt, Artificial Sequence
  Description of Artificial Sequence: Synthetic oligonucleotide
  Antisense strand to SEQ ID NO: 1930248
cauccuaaucgcauaacug

SEQ ID NO: 1930250 - RNA, 19 nt, Artificial Sequence
  Description of Artificial Sequence: Synthetic oligonucleotide
  Sense strand starting at position 1542 of SEQ ID NO: 1879753
ugacuucugguuugcagaa

SEQ ID NO: 1930251 - RNA, 19 nt, Artificial Sequence
  Description of Artificial Sequence: Synthetic oligonucleotide
  Antisense strand to SEQ ID NO: 1930250
uucugcaaaccagaaguca

SEQ ID NO: 1930252 - RNA, 19 nt, Artificial Sequence
  Description of Artificial Sequence: Synthetic oligonucleotide
  Sense strand starting at position 1543 of SEQ ID NO: 1879753
gacuucugguuugcagaaa

SEQ ID NO: 1930253 - RNA, 19 nt, Artificial Sequence
  Description of Artificial Sequence: Synthetic oligonucleotide
  Antisense strand to SEQ ID NO: 1930252
uuucugcaaaccagaaguc

SEQ ID NO: 1930254 - RNA, 19 nt, Artificial Sequence
  Description of Artificial Sequence: Synthetic oligonucleotide
  Sense strand starting at position 1581 of SEQ ID NO: 1879753
cagucauuauuugaaggaa

SEQ ID NO: 1930255 - RNA, 19 nt, Artificial Sequence
  Description of Artificial Sequence: Synthetic oligonucleotide
  Antisense strand to SEQ ID NO: 1930254
uuccuucaaauaaugacug

SEQ ID NO: 1930256 - RNA, 19 nt, Artificial Sequence
  Description of Artificial Sequence: Synthetic oligonucleotide
  Sense strand starting at position 1732 of SEQ ID NO: 1879753
ugucauauccaugaagcua

SEQ ID NO: 1930257 - RNA, 19 nt, Artificial Sequence
  Description of Artificial Sequence: Synthetic oligonucleotide
  Antisense strand to SEQ ID NO: 1930256
uagcuucauggauaugaca

SEQ ID NO: 1930258 - RNA, 19 nt, Artificial Sequence
  Description of Artificial Sequence: Synthetic oligonucleotide
  Sense strand starting at position 1876 of SEQ ID NO: 1879753
gcagucuuccaggaggagu

SEQ ID NO: 1930259 - RNA, 19 nt, Artificial Sequence
  Description of Artificial Sequence: Synthetic oligonucleotide
  Antisense strand to SEQ ID NO: 1930258
acuccuccuggaagacugc

SEQ ID NO: 1930260 - RNA, 19 nt, Artificial Sequence
  Description of Artificial Sequence: Synthetic oligonucleotide
  Sense strand starting at position 1907 of SEQ ID NO: 1879753
caguuucuagaaugagaac

SEQ ID NO: 1930261 - RNA, 19 nt, Artificial Sequence
  Description of Artificial Sequence: Synthetic oligonucleotide
  Antisense strand to SEQ ID NO: 1930260
guucucauucuagaaacug

SEQ ID NO: 1930262 - RNA, 19 nt, Artificial Sequence
  Description of Artificial Sequence: Synthetic oligonucleotide
  Sense strand starting at position 2035 of SEQ ID NO: 1879753
acauuauacucuuuagguc

SEQ ID NO: 1930263 - RNA, 19 nt, Artificial Sequence
  Description of Artificial Sequence: Synthetic oligonucleotide
  Antisense strand to SEQ ID NO: 1930262
gaccuaaagaguauaaugu

SEQ ID NO: 1930264 - RNA, 19 nt, Artificial Sequence
  Description of Artificial Sequence: Synthetic oligonucleotide
  Sense strand starting at position 2048 of SEQ ID NO: 1879753
uaggucaagcugcauaauu

SEQ ID NO: 1930265 - RNA, 19 nt, Artificial Sequence
  Description of Artificial Sequence: Synthetic oligonucleotide
  Antisense strand to SEQ ID NO: 1930264
aauuaugcagcuugaccua

SEQ ID NO: 1930266 - RNA, 19 nt, Artificial Sequence
  Description of Artificial Sequence: Synthetic oligonucleotide
  Sense strand starting at position 2221 of SEQ ID NO: 1879753
acacguuaccuaugaagac

SEQ ID NO: 1930267 - RNA, 19 nt, Artificial Sequence
  Description of Artificial Sequence: Synthetic oligonucleotide
  Antisense strand to SEQ ID NO: 1930266
gucuucauagguaacgugu

SEQ ID NO: 1930268 - RNA, 19 nt, Artificial Sequence
  Description of Artificial Sequence: Synthetic oligonucleotide
  Sense strand starting at position 2588 of SEQ ID NO: 1879753
uagaaacagugagaagaau

SEQ ID NO: 1930269 - RNA, 19 nt, Artificial Sequence
  Description of Artificial Sequence: Synthetic oligonucleotide
  Antisense strand to SEQ ID NO: 1930268
auucuucucacuguuucua

SEQ ID NO: 1930270 - RNA, 19 nt, Artificial Sequence
  Description of Artificial Sequence: Synthetic oligonucleotide
  Sense strand starting at position 2600 of SEQ ID NO: 1879753
gaagaauguccuggagucu

SEQ ID NO: 1930271 - RNA, 19 nt, Artificial Sequence
  Description of Artificial Sequence: Synthetic oligonucleotide
  Antisense strand to SEQ ID NO: 1930270
agacuccaggacauucuuc

SEQ ID NO: 1930272 - RNA, 19 nt, Artificial Sequence
  Description of Artificial Sequence: Synthetic oligonucleotide
  Sense strand starting at position 2601 of SEQ ID NO: 1879753
aagaauguccuggagucuu

SEQ ID NO: 1930273 - RNA, 19 nt, Artificial Sequence
  Description of Artificial Sequence: Synthetic oligonucleotide
  Antisense strand to SEQ ID NO: 1930272
aagacuccaggacauucuu

SEQ ID NO: 1930274 - RNA, 19 nt, Artificial Sequence
  Description of Artificial Sequence: Synthetic oligonucleotide
  Sense strand starting at position 2612 of SEQ ID NO: 1879753
ggagucuuccuugaggguu

SEQ ID NO: 1930275 - RNA, 19 nt, Artificial Sequence
  Description of Artificial Sequence: Synthetic oligonucleotide
  Antisense strand to SEQ ID NO: 1930274
aacccucaaggaagacucc

SEQ ID NO: 1930276 - RNA, 19 nt, Artificial Sequence
  Description of Artificial Sequence: Synthetic oligonucleotide
  Sense strand starting at position 2618 of SEQ ID NO: 1879753
uuccuugaggguuacucua

SEQ ID NO: 1930277 - RNA, 19 nt, Artificial Sequence
  Description of Artificial Sequence: Synthetic oligonucleotide
  Antisense strand to SEQ ID NO: 1930276
uagaguaacccucaaggaa

SEQ ID NO: 1930278 - RNA, 19 nt, Artificial Sequence
  Description of Artificial Sequence: Synthetic oligonucleotide
  Sense strand starting at position 2620 of SEQ ID NO: 1879753
ccuugaggguuacucuaau

SEQ ID NO: 1930279 - RNA, 19 nt, Artificial Sequence
  Description of Artificial Sequence: Synthetic oligonucleotide
  Antisense strand to SEQ ID NO: 1930278
auuagaguaacccucaagg

SEQ ID NO: 1930280 - RNA, 19 nt, Artificial Sequence
  Description of Artificial Sequence: Synthetic oligonucleotide
  Sense strand starting at position 2955 of SEQ ID NO: 1879753
uguggaagucuggagaagu

SEQ ID NO: 1930281 - RNA, 19 nt, Artificial Sequence
  Description of Artificial Sequence: Synthetic oligonucleotide
  Antisense strand to SEQ ID NO: 1930280
acuucuccagacuuccaca

SEQ ID NO: 1930282 - RNA, 19 nt, Artificial Sequence
  Description of Artificial Sequence: Synthetic oligonucleotide
  Sense strand starting at position 3038 of SEQ ID NO: 1879753
aucaguacuccucaggcaa

SEQ ID NO: 1930283 - RNA, 19 nt, Artificial Sequence
  Description of Artificial Sequence: Synthetic oligonucleotide
  Antisense strand to SEQ ID NO: 1930282
uugccugaggaguacugau

SEQ ID NO: 1930284 - RNA, 19 nt, Artificial Sequence
  Description of Artificial Sequence: Synthetic oligonucleotide
  Sense strand starting at position 3051 of SEQ ID NO: 1879753
aggcaaucuguccaucaac

SEQ ID NO: 1930285 - RNA, 19 nt, Artificial Sequence
  Description of Artificial Sequence: Synthetic oligonucleotide
  Antisense strand to SEQ ID NO: 1930284
guugauggacagauugccu

SEQ ID NO: 1930286 - RNA, 19 nt, Artificial Sequence
  Description of Artificial Sequence: Synthetic oligonucleotide
  Sense strand starting at position 3362 of SEQ ID NO: 1879753
augagauacugugccugau

SEQ ID NO: 1930287 - RNA, 19 nt, Artificial Sequence
  Description of Artificial Sequence: Synthetic oligonucleotide
  Antisense strand to SEQ ID NO: 1930286
aucaggcacaguaucucau

SEQ ID NO: 1930288 - RNA, 19 nt, Artificial Sequence
  Description of Artificial Sequence: Synthetic oligonucleotide
  Sense strand starting at position 3364 of SEQ ID NO: 1879753
gagauacugugccugaucu

SEQ ID NO: 1930289 - RNA, 19 nt, Artificial Sequence
  Description of Artificial Sequence: Synthetic oligonucleotide
  Antisense strand to SEQ ID NO: 1930288
agaucaggcacaguaucuc

SEQ ID NO: 1930290 - RNA, 19 nt, Artificial Sequence
  Description of Artificial Sequence: Synthetic oligonucleotide
  Sense strand starting at position 3365 of SEQ ID NO: 1879753
agauacugugccugaucua

SEQ ID NO: 1930291 - RNA, 19 nt, Artificial Sequence
  Description of Artificial Sequence: Synthetic oligonucleotide
  Antisense strand to SEQ ID NO: 1930290
uagaucaggcacaguaucu

SEQ ID NO: 1930292 - RNA, 19 nt, Artificial Sequence
  Description of Artificial Sequence: Synthetic oligonucleotide
  Sense strand starting at position 3366 of SEQ ID NO: 1879753
gauacugugccugaucuau

SEQ ID NO: 1930293 - RNA, 19 nt, Artificial Sequence
  Description of Artificial Sequence: Synthetic oligonucleotide
  Antisense strand to SEQ ID NO: 1930292
auagaucaggcacaguauc

SEQ ID NO: 1930294 - RNA, 19 nt, Artificial Sequence
  Description of Artificial Sequence: Synthetic oligonucleotide
  Sense strand starting at position 3405 of SEQ ID NO: 1879753
uuacacaaguuguuauuga

SEQ ID NO: 1930295 - RNA, 19 nt, Artificial Sequence
  Description of Artificial Sequence: Synthetic oligonucleotide
  Antisense strand to SEQ ID NO: 1930294
ucaauaacaacuuguguaa

SEQ ID NO: 1930296 - RNA, 19 nt, Artificial Sequence
  Description of Artificial Sequence: Synthetic oligonucleotide
  Sense strand starting at position 3440 of SEQ ID NO: 1879753
uguaaucuacagugaugua

SEQ ID NO: 1930297 - RNA, 19 nt, Artificial Sequence
  Description of Artificial Sequence: Synthetic oligonucleotide
  Antisense strand to SEQ ID NO: 1930296
uacaucacuguagauuaca

SEQ ID NO: 1930298 - RNA, 19 nt, Artificial Sequence
  Description of Artificial Sequence: Synthetic oligonucleotide
  Sense strand starting at position 3441 of SEQ ID NO: 1879753
guaaucuacagugauguac

SEQ ID NO: 1930299 - RNA, 19 nt, Artificial Sequence
  Description of Artificial Sequence: Synthetic oligonucleotide
  Antisense strand to SEQ ID NO: 1930298
guacaucacuguagauuac

SEQ ID NO: 1930300 - RNA, 19 nt, Artificial Sequence
  Description of Artificial Sequence: Synthetic oligonucleotide
  Sense strand starting at position 3524 of SEQ ID NO: 1879753
ccugaauuacucugauaag

SEQ ID NO: 1930301 - RNA, 19 nt, Artificial Sequence
  Description of Artificial Sequence: Synthetic oligonucleotide
  Antisense strand to SEQ ID NO: 1930300
cuuaucagaguaauucagg

SEQ ID NO: 1930302 - RNA, 19 nt, Artificial Sequence
  Description of Artificial Sequence: Synthetic oligonucleotide
  Sense strand starting at position 3602 of SEQ ID NO: 1879753
gaacuugaaccucguaagu

SEQ ID NO: 1930303 - RNA, 19 nt, Artificial Sequence
  Description of Artificial Sequence: Synthetic oligonucleotide
  Antisense strand to SEQ ID NO: 1930302
acuuacgagguucaaguuc

SEQ ID NO: 1930304 - RNA, 19 nt, Artificial Sequence
  Description of Artificial Sequence: Synthetic oligonucleotide
  Sense strand starting at position 50 of SEQ ID NO: 1879754
gcaggguuaggcgaagaga

SEQ ID NO: 1930305 - RNA, 19 nt, Artificial Sequence
  Description of Artificial Sequence: Synthetic oligonucleotide
  Antisense strand to SEQ ID NO: 1930304
ucucuucgccuaacccugc

SEQ ID NO: 1930306 - RNA, 19 nt, Artificial Sequence
  Description of Artificial Sequence: Synthetic oligonucleotide
  Sense strand starting at position 93 of SEQ ID NO: 1879754
uggacuuggagauguggau

SEQ ID NO: 1930307 - RNA, 19 nt, Artificial Sequence
  Description of Artificial Sequence: Synthetic oligonucleotide
  Antisense strand to SEQ ID NO: 1930306
auccacaucuccaagucca

SEQ ID NO: 1930308 - RNA, 19 nt, Artificial Sequence
  Description of Artificial Sequence: Synthetic oligonucleotide
  Sense strand starting at position 158 of SEQ ID NO: 1879754
gcagaaaugagccagugga

SEQ ID NO: 1930309 - RNA, 19 nt, Artificial Sequence
  Description of Artificial Sequence: Synthetic oligonucleotide
  Antisense strand to SEQ ID NO: 1930308
uccacuggcucauuucugc

SEQ ID NO: 1930310 - RNA, 19 nt, Artificial Sequence
  Description of Artificial Sequence: Synthetic oligonucleotide
  Sense strand starting at position 255 of SEQ ID NO: 1879754
ggguuuaaagaauguguuu

SEQ ID NO: 1930311 - RNA, 19 nt, Artificial Sequence
  Description of Artificial Sequence: Synthetic oligonucleotide
  Antisense strand to SEQ ID NO: 1930310
aaacacauucuuuaaaccc

SEQ ID NO: 1930312 - RNA, 19 nt, Artificial Sequence
  Description of Artificial Sequence: Synthetic oligonucleotide
  Sense strand starting at position 398 of SEQ ID NO: 1879754
cacagauucccagggccua

SEQ ID NO: 1930313 - RNA, 19 nt, Artificial Sequence
  Description of Artificial Sequence: Synthetic oligonucleotide
  Antisense strand to SEQ ID NO: 1930312
uaggcccugggaaucugug

SEQ ID NO: 1930314 - RNA, 19 nt, Artificial Sequence
  Description of Artificial Sequence: Synthetic oligonucleotide
  Sense strand starting at position 817 of SEQ ID NO: 1879754
gugcaucaaugacucugaa

SEQ ID NO: 1930315 - RNA, 19 nt, Artificial Sequence
  Description of Artificial Sequence: Synthetic oligonucleotide
  Antisense strand to SEQ ID NO: 1930314
uucagagucauugaugcac

SEQ ID NO: 1930316 - RNA, 19 nt, Artificial Sequence
  Description of Artificial Sequence: Synthetic oligonucleotide
  Sense strand starting at position 960 of SEQ ID NO: 1879754
gccagacgucuguaaacaa

SEQ ID NO: 1930317 - RNA, 19 nt, Artificial Sequence
  Description of Artificial Sequence: Synthetic oligonucleotide
  Antisense strand to SEQ ID NO: 1930316
uuguuuacagacgucuggc

SEQ ID NO: 1930318 - RNA, 19 nt, Artificial Sequence
  Description of Artificial Sequence: Synthetic oligonucleotide
  Sense strand starting at position 1023 of SEQ ID NO: 1879754
ugagcucuaacguggaaua

SEQ ID NO: 1930319 - RNA, 19 nt, Artificial Sequence
  Description of Artificial Sequence: Synthetic oligonucleotide
  Antisense strand to SEQ ID NO: 1930318
uauuccacguuagagcuca

SEQ ID NO: 1930320 - RNA, 19 nt, Artificial Sequence
  Description of Artificial Sequence: Synthetic oligonucleotide
  Sense strand starting at position 1024 of SEQ ID NO: 1879754
gagcucuaacguggaauau

SEQ ID NO: 1930321 - RNA, 19 nt, Artificial Sequence
  Description of Artificial Sequence: Synthetic oligonucleotide
  Antisense strand to SEQ ID NO: 1930320
auauuccacguuagagcuc

SEQ ID NO: 1930322 - RNA, 19 nt, Artificial Sequence
  Description of Artificial Sequence: Synthetic oligonucleotide
  Sense strand starting at position 1025 of SEQ ID NO: 1879754
agcucuaacguggaauauu

SEQ ID NO: 1930323 - RNA, 19 nt, Artificial Sequence
  Description of Artificial Sequence: Synthetic oligonucleotide
  Antisense strand to SEQ ID NO: 1930322
aauauuccacguuagagcu

SEQ ID NO: 1930324 - RNA, 19 nt, Artificial Sequence
  Description of Artificial Sequence: Synthetic oligonucleotide
  Sense strand starting at position 1028 of SEQ ID NO: 1879754
ucuaacguggaauauuaua

SEQ ID NO: 1930325 - RNA, 19 nt, Artificial Sequence
  Description of Artificial Sequence: Synthetic oligonucleotide
  Antisense strand to SEQ ID NO: 1930324
uauaauauuccacguuaga

SEQ ID NO: 1930326 - RNA, 19 nt, Artificial Sequence
  Description of Artificial Sequence: Synthetic oligonucleotide
  Sense strand starting at position 1134 of SEQ ID NO: 1879754
ggaggugauucuccaggua

SEQ ID NO: 1930327 - RNA, 19 nt, Artificial Sequence
  Description of Artificial Sequence: Synthetic oligonucleotide
  Antisense strand to SEQ ID NO: 1930326
uaccuggagaaucaccucc

SEQ ID NO: 1930328 - RNA, 19 nt, Artificial Sequence
  Description of Artificial Sequence: Synthetic oligonucleotide
  Sense strand starting at position 1137 of SEQ ID NO: 1879754
ggugauucuccagguagaa

SEQ ID NO: 1930329 - RNA, 19 nt, Artificial Sequence
  Description of Artificial Sequence: Synthetic oligonucleotide
  Antisense strand to SEQ ID NO: 1930328
uucuaccuggagaaucacc

SEQ ID NO: 1930330 - RNA, 19 nt, Artificial Sequence
  Description of Artificial Sequence: Synthetic oligonucleotide
  Sense strand starting at position 1366 of SEQ ID NO: 1879754
gugcuuauugucuuuguca

SEQ ID NO: 1930331 - RNA, 19 nt, Artificial Sequence
  Description of Artificial Sequence: Synthetic oligonucleotide
  Antisense strand to SEQ ID NO: 1930330
ugacaaagacaauaagcac

SEQ ID NO: 1930332 - RNA, 19 nt, Artificial Sequence
  Description of Artificial Sequence: Synthetic oligonucleotide
  Sense strand starting at position 1435 of SEQ ID NO: 1879754
uggugaugaucuucagaga

SEQ ID NO: 1930333 - RNA, 19 nt, Artificial Sequence
  Description of Artificial Sequence: Synthetic oligonucleotide
  Antisense strand to SEQ ID NO: 1930332
ucucugaagaucaucacca

SEQ ID NO: 1930334 - RNA, 19 nt, Artificial Sequence
  Description of Artificial Sequence: Synthetic oligonucleotide
  Sense strand starting at position 1498 of SEQ ID NO: 1879754
ucagaaagguuugcaauga

SEQ ID NO: 1930335 - RNA, 19 nt, Artificial Sequence
  Description of Artificial Sequence: Synthetic oligonucleotide
  Antisense strand to SEQ ID NO: 1930334
ucauugcaaaccuuucuga

SEQ ID NO: 1930336 - RNA, 19 nt, Artificial Sequence
  Description of Artificial Sequence: Synthetic oligonucleotide
  Sense strand starting at position 1502 of SEQ ID NO: 1879754
aaagguuugcaaugaggua

SEQ ID NO: 1930337 - RNA, 19 nt, Artificial Sequence
  Description of Artificial Sequence: Synthetic oligonucleotide
  Antisense strand to SEQ ID NO: 1930336
uaccucauugcaaaccuuu

SEQ ID NO: 1930338 - RNA, 19 nt, Artificial Sequence
  Description of Artificial Sequence: Synthetic oligonucleotide
  Sense strand starting at position 1746 of SEQ ID NO: 1879754
ugaugaagagguugcagua

SEQ ID NO: 1930339 - RNA, 19 nt, Artificial Sequence
  Description of Artificial Sequence: Synthetic oligonucleotide
  Antisense strand to SEQ ID NO: 1930338
uacugcaaccucuucauca

SEQ ID NO: 1930340 - RNA, 19 nt, Artificial Sequence
  Description of Artificial Sequence: Synthetic oligonucleotide
  Sense strand starting at position 1910 of SEQ ID NO: 1879754
ccaggcuuucuccagcaaa

SEQ ID NO: 1930341 - RNA, 19 nt, Artificial Sequence
  Description of Artificial Sequence: Synthetic oligonucleotide
  Antisense strand to SEQ ID NO: 1930340
uuugcuggagaaagccugg

SEQ ID NO: 1930342 - RNA, 19 nt, Artificial Sequence
  Description of Artificial Sequence: Synthetic oligonucleotide
  Sense strand starting at position 1913 of SEQ ID NO: 1879754
ggcuuucuccagcaaacca

SEQ ID NO: 1930343 - RNA, 19 nt, Artificial Sequence
  Description of Artificial Sequence: Synthetic oligonucleotide
  Antisense strand to SEQ ID NO: 1930342
ugguuugcuggagaaagcc

SEQ ID NO: 1930344 - RNA, 19 nt, Artificial Sequence
  Description of Artificial Sequence: Synthetic oligonucleotide
  Sense strand starting at position 1988 of SEQ ID NO: 1879754
uucccauuucccuguuaug

SEQ ID NO: 1930345 - RNA, 19 nt, Artificial Sequence
  Description of Artificial Sequence: Synthetic oligonucleotide
  Antisense strand to SEQ ID NO: 1930344
cauaacagggaaaugggaa

SEQ ID NO: 1930346 - RNA, 19 nt, Artificial Sequence
  Description of Artificial Sequence: Synthetic oligonucleotide
  Sense strand starting at position 2044 of SEQ ID NO: 1879754
gugggaauaacgugaacug

SEQ ID NO: 1930347 - RNA, 19 nt, Artificial Sequence
  Description of Artificial Sequence: Synthetic oligonucleotide
  Antisense strand to SEQ ID NO: 1930346
caguucacguuauucccac

SEQ ID NO: 1930348 - RNA, 19 nt, Artificial Sequence
  Description of Artificial Sequence: Synthetic oligonucleotide
  Sense strand starting at position 2066 of SEQ ID NO: 1879754
ugcugagugccugaggaua

SEQ ID NO: 1930349 - RNA, 19 nt, Artificial Sequence
  Description of Artificial Sequence: Synthetic oligonucleotide
  Antisense strand to SEQ ID NO: 1930348
uauccucaggcacucagca

SEQ ID NO: 1930350 - RNA, 19 nt, Artificial Sequence
  Description of Artificial Sequence: Synthetic oligonucleotide
  Sense strand starting at position 2098 of SEQ ID NO: 1879754
gauguaaagugccugaaag

SEQ ID NO: 1930351 - RNA, 19 nt, Artificial Sequence
  Description of Artificial Sequence: Synthetic oligonucleotide
  Antisense strand to SEQ ID NO: 1930350
cuuucaggcacuuuacauc

SEQ ID NO: 1930352 - RNA, 19 nt, Artificial Sequence
  Description of Artificial Sequence: Synthetic oligonucleotide
  Sense strand starting at position 2114 of SEQ ID NO: 1879754
aaguuaauggcauggaauc

SEQ ID NO: 1930353 - RNA, 19 nt, Artificial Sequence
  Description of Artificial Sequence: Synthetic oligonucleotide
  Antisense strand to SEQ ID NO: 1930352
gauuccaugccauuaacuu

SEQ ID NO: 1930354 - RNA, 19 nt, Artificial Sequence
  Description of Artificial Sequence: Synthetic oligonucleotide
  Sense strand starting at position 2115 of SEQ ID NO: 1879754
aguuaauggcauggaauca

SEQ ID NO: 1930355 - RNA, 19 nt, Artificial Sequence
  Description of Artificial Sequence: Synthetic oligonucleotide
  Antisense strand to SEQ ID NO: 1930354
ugauuccaugccauuaacu

SEQ ID NO: 1930356 - RNA, 19 nt, Artificial Sequence
  Description of Artificial Sequence: Synthetic oligonucleotide
  Sense strand starting at position 2405 of SEQ ID NO: 1879754
cuugccuuccuagagaacu

SEQ ID NO: 1930357 - RNA, 19 nt, Artificial Sequence
  Description of Artificial Sequence: Synthetic oligonucleotide
  Antisense strand to SEQ ID NO: 1930356
aguucucuaggaaggcaag

SEQ ID NO: 1930358 - RNA, 19 nt, Artificial Sequence
  Description of Artificial Sequence: Synthetic oligonucleotide
  Sense strand starting at position 2498 of SEQ ID NO: 1879754
gcuugacacuugguacaug

SEQ ID NO: 1930359 - RNA, 19 nt, Artificial Sequence
  Description of Artificial Sequence: Synthetic oligonucleotide
  Antisense strand to SEQ ID NO: 1930358
cauguaccaagugucaagc

SEQ ID NO: 1930360 - RNA, 19 nt, Artificial Sequence
  Description of Artificial Sequence: Synthetic oligonucleotide
  Sense strand starting at position 2507 of SEQ ID NO: 1879754
uugguacaugcucaauaag

SEQ ID NO: 1930361 - RNA, 19 nt, Artificial Sequence
  Description of Artificial Sequence: Synthetic oligonucleotide
  Antisense strand to SEQ ID NO: 1930360
cuuauugagcauguaccaa

SEQ ID NO: 1930362 - RNA, 19 nt, Artificial Sequence
  Description of Artificial Sequence: Synthetic oligonucleotide
  Sense strand starting at position 2522 of SEQ ID NO: 1879754
uaaguauuuccugguugca

SEQ ID NO: 1930363 - RNA, 19 nt, Artificial Sequence
  Description of Artificial Sequence: Synthetic oligonucleotide
  Antisense strand to SEQ ID NO: 1930362
ugcaaccaggaaauacuua

SEQ ID NO: 1930364 - RNA, 19 nt, Artificial Sequence
  Description of Artificial Sequence: Synthetic oligonucleotide
  Sense strand starting at position 2524 of SEQ ID NO: 1879754
aguauuuccugguugcauu

SEQ ID NO: 1930365 - RNA, 19 nt, Artificial Sequence
  Description of Artificial Sequence: Synthetic oligonucleotide
  Antisense strand to SEQ ID NO: 1930364
aaugcaaccaggaaauacu

SEQ ID NO: 1930366 - RNA, 19 nt, Artificial Sequence
  Description of Artificial Sequence: Synthetic oligonucleotide
  Sense strand starting at position 2525 of SEQ ID NO: 1879754
guauuuccugguugcauua

SEQ ID NO: 1930367 - RNA, 19 nt, Artificial Sequence
  Description of Artificial Sequence: Synthetic oligonucleotide
  Antisense strand to SEQ ID NO: 1930366
uaaugcaaccaggaaauac

SEQ ID NO: 1930368 - RNA, 19 nt, Artificial Sequence
  Description of Artificial Sequence: Synthetic oligonucleotide
  Sense strand starting at position 2583 of SEQ ID NO: 1879754
cucuguacccagugggaga

SEQ ID NO: 1930369 - RNA, 19 nt, Artificial Sequence
  Description of Artificial Sequence: Synthetic oligonucleotide
  Antisense strand to SEQ ID NO: 1930368
ucucccacuggguacagag

SEQ ID NO: 1930370 - RNA, 19 nt, Artificial Sequence
  Description of Artificial Sequence: Synthetic oligonucleotide
  Sense strand starting at position 2873 of SEQ ID NO: 1879754
ccuccuucuccggaggaca

SEQ ID NO: 1930371 - RNA, 19 nt, Artificial Sequence
  Description of Artificial Sequence: Synthetic oligonucleotide
  Antisense strand to SEQ ID NO: 1930370
uguccuccggagaaggagg

SEQ ID NO: 1930372 - RNA, 19 nt, Artificial Sequence
  Description of Artificial Sequence: Synthetic oligonucleotide
  Sense strand starting at position 2985 of SEQ ID NO: 1879754
ggauuuaucgugugccaga

SEQ ID NO: 1930373 - RNA, 19 nt, Artificial Sequence
  Description of Artificial Sequence: Synthetic oligonucleotide
  Antisense strand to SEQ ID NO: 1930372
ucuggcacacgauaaaucc

SEQ ID NO: 1930374 - RNA, 19 nt, Artificial Sequence
  Description of Artificial Sequence: Synthetic oligonucleotide
  Sense strand starting at position 2986 of SEQ ID NO: 1879754
gauuuaucgugugccagac

SEQ ID NO: 1930375 - RNA, 19 nt, Artificial Sequence
  Description of Artificial Sequence: Synthetic oligonucleotide
  Antisense strand to SEQ ID NO: 1930374
gucuggcacacgauaaauc

SEQ ID NO: 1930376 - RNA, 19 nt, Artificial Sequence
  Description of Artificial Sequence: Synthetic oligonucleotide
  Sense strand starting at position 3334 of SEQ ID NO: 1879754
ggcaacugagaucauuguu

SEQ ID NO: 1930377 - RNA, 19 nt, Artificial Sequence
  Description of Artificial Sequence: Synthetic oligonucleotide
  Antisense strand to SEQ ID NO: 1930376
aacaaugaucucaguugcc

SEQ ID NO: 1930378 - RNA, 19 nt, Artificial Sequence
  Description of Artificial Sequence: Synthetic oligonucleotide
  Sense strand starting at position 3339 of SEQ ID NO: 1879754
cugagaucauuguuuggga

SEQ ID NO: 1930379 - RNA, 19 nt, Artificial Sequence
  Description of Artificial Sequence: Synthetic oligonucleotide
  Antisense strand to SEQ ID NO: 1930378
ucccaaacaaugaucucag

SEQ ID NO: 1930380 - RNA, 19 nt, Artificial Sequence
  Description of Artificial Sequence: Synthetic oligonucleotide
  Sense strand starting at position 3341 of SEQ ID NO: 1879754
gagaucauuguuugggagu

SEQ ID NO: 1930381 - RNA, 19 nt, Artificial Sequence
  Description of Artificial Sequence: Synthetic oligonucleotide
  Antisense strand to SEQ ID NO: 1930380
acucccaaacaaugaucuc

SEQ ID NO: 1930382 - RNA, 19 nt, Artificial Sequence
  Description of Artificial Sequence: Synthetic oligonucleotide
  Sense strand starting at position 3518 of SEQ ID NO: 1879754
ggcauaaugcaagaguucu

SEQ ID NO: 1930383 - RNA, 19 nt, Artificial Sequence
  Description of Artificial Sequence: Synthetic oligonucleotide
  Antisense strand to SEQ ID NO: 1930382
agaacucuugcauuaugcc

SEQ ID NO: 1930384 - RNA, 19 nt, Artificial Sequence
  Description of Artificial Sequence: Synthetic oligonucleotide
  Sense strand starting at position 43 of SEQ ID NO: 1879755
ggaagaggccagugauucu

SEQ ID NO: 1930385 - RNA, 19 nt, Artificial Sequence
  Description of Artificial Sequence: Synthetic oligonucleotide
  Antisense strand to SEQ ID NO: 1930384
agaaucacuggccucuucc

SEQ ID NO: 1930386 - RNA, 19 nt, Artificial Sequence
  Description of Artificial Sequence: Synthetic oligonucleotide
  Sense strand starting at position 159 of SEQ ID NO: 1879755
aggucuccagcuuaaacuu

SEQ ID NO: 1930387 - RNA, 19 nt, Artificial Sequence
  Description of Artificial Sequence: Synthetic oligonucleotide
  Antisense strand to SEQ ID NO: 1930386
aaguuuaagcuggagaccu

SEQ ID NO: 1930388 - RNA, 19 nt, Artificial Sequence
  Description of Artificial Sequence: Synthetic oligonucleotide
  Sense strand starting at position 177 of SEQ ID NO: 1879755
uaaagaaucucgcuggcuu

SEQ ID NO: 1930389 - RNA, 19 nt, Artificial Sequence
  Description of Artificial Sequence: Synthetic oligonucleotide
  Antisense strand to SEQ ID NO: 1930388
aagccagcgagauucuuua

SEQ ID NO: 1930390 - RNA, 19 nt, Artificial Sequence
  Description of Artificial Sequence: Synthetic oligonucleotide
  Sense strand starting at position 178 of SEQ ID NO: 1879755
aaagaaucucgcuggcuuu

SEQ ID NO: 1930391 - RNA, 19 nt, Artificial Sequence
  Description of Artificial Sequence: Synthetic oligonucleotide
  Antisense strand to SEQ ID NO: 1930390
aaagccagcgagauucuuu

SEQ ID NO: 1930392 - RNA, 19 nt, Artificial Sequence
  Description of Artificial Sequence: Synthetic oligonucleotide
  Sense strand starting at position 189 of SEQ ID NO: 1879755
cuggcuuugucucuaagaa

SEQ ID NO: 1930393 - RNA, 19 nt, Artificial Sequence
  Description of Artificial Sequence: Synthetic oligonucleotide
  Antisense strand to SEQ ID NO: 1930392
uucuuagagacaaagccag

SEQ ID NO: 1930394 - RNA, 19 nt, Artificial Sequence
  Description of Artificial Sequence: Synthetic oligonucleotide
  Sense strand starting at position 190 of SEQ ID NO: 1879755
uggcuuugucucuaagaag

SEQ ID NO: 1930395 - RNA, 19 nt, Artificial Sequence
  Description of Artificial Sequence: Synthetic oligonucleotide
  Antisense strand to SEQ ID NO: 1930394
cuucuuagagacaaagcca

SEQ ID NO: 1930396 - RNA, 19 nt, Artificial Sequence
  Description of Artificial Sequence: Synthetic oligonucleotide
  Sense strand starting at position 246 of SEQ ID NO: 1879755
gugacagacugcucugaca

SEQ ID NO: 1930397 - RNA, 19 nt, Artificial Sequence
  Description of Artificial Sequence: Synthetic oligonucleotide
  Antisense strand to SEQ ID NO: 1930396
ugucagagcagucugucac

SEQ ID NO: 1930398 - RNA, 19 nt, Artificial Sequence
  Description of Artificial Sequence: Synthetic oligonucleotide
  Sense strand starting at position 253 of SEQ ID NO: 1879755
acugcucugacagguuaga

SEQ ID NO: 1930399 - RNA, 19 nt, Artificial Sequence
  Description of Artificial Sequence: Synthetic oligonucleotide
  Antisense strand to SEQ ID NO: 1930398
ucuaaccugucagagcagu

SEQ ID NO: 1930400 - RNA, 19 nt, Artificial Sequence
  Description of Artificial Sequence: Synthetic oligonucleotide
  Sense strand starting at position 387 of SEQ ID NO: 1879755
gggagugagggucaucagu

SEQ ID NO: 1930401 - RNA, 19 nt, Artificial Sequence
  Description of Artificial Sequence: Synthetic oligonucleotide
  Antisense strand to SEQ ID NO: 1930400
acugaugacccucacuccc

SEQ ID NO: 1930402 - RNA, 19 nt, Artificial Sequence
  Description of Artificial Sequence: Synthetic oligonucleotide
  Sense strand starting at position 393 of SEQ ID NO: 1879755
gagggucaucagugcacaa

SEQ ID NO: 1930403 - RNA, 19 nt, Artificial Sequence
  Description of Artificial Sequence: Synthetic oligonucleotide
  Antisense strand to SEQ ID NO: 1930402
uugugcacugaugacccuc

SEQ ID NO: 1930404 - RNA, 19 nt, Artificial Sequence
  Description of Artificial Sequence: Synthetic oligonucleotide
  Sense strand starting at position 395 of SEQ ID NO: 1879755
gggucaucagugcacaaau

SEQ ID NO: 1930405 - RNA, 19 nt, Artificial Sequence
  Description of Artificial Sequence: Synthetic oligonucleotide
  Antisense strand to SEQ ID NO: 1930404
auuugugcacugaugaccc

SEQ ID NO: 1930406 - RNA, 19 nt, Artificial Sequence
  Description of Artificial Sequence: Synthetic oligonucleotide
  Sense strand starting at position 397 of SEQ ID NO: 1879755
gucaucagugcacaaauga

SEQ ID NO: 1930407 - RNA, 19 nt, Artificial Sequence
  Description of Artificial Sequence: Synthetic oligonucleotide
  Antisense strand to SEQ ID NO: 1930406
ucauuugugcacugaugac

SEQ ID NO: 1930408 - RNA, 19 nt, Artificial Sequence
  Description of Artificial Sequence: Synthetic oligonucleotide
  Sense strand starting at position 418 of SEQ ID NO: 1879755
cugacaaauuuagaaagca

SEQ ID NO: 1930409 - RNA, 19 nt, Artificial Sequence
  Description of Artificial Sequence: Synthetic oligonucleotide
  Antisense strand to SEQ ID NO: 1930408
ugcuuucuaaauuugucag

SEQ ID NO: 1930410 - RNA, 19 nt, Artificial Sequence
  Description of Artificial Sequence: Synthetic oligonucleotide
  Sense strand starting at position 464 of SEQ ID NO: 1879755
gcagucauggucuagagca

SEQ ID NO: 1930411 - RNA, 19 nt, Artificial Sequence
  Description of Artificial Sequence: Synthetic oligonucleotide
  Antisense strand to SEQ ID NO: 1930410
ugcucuagaccaugacugc

SEQ ID NO: 1930412 - RNA, 19 nt, Artificial Sequence
  Description of Artificial Sequence: Synthetic oligonucleotide
  Sense strand starting at position 482 of SEQ ID NO: 1879755
aucgcuuuccaacagaaag

SEQ ID NO: 1930413 - RNA, 19 nt, Artificial Sequence
  Description of Artificial Sequence: Synthetic oligonucleotide
  Antisense strand to SEQ ID NO: 1930412
cuuucuguuggaaagcgau

SEQ ID NO: 1930414 - RNA, 19 nt, Artificial Sequence
  Description of Artificial Sequence: Synthetic oligonucleotide
  Sense strand starting at position 2224 of SEQ ID NO: 1879755
ggugcaaucucaguuuauu

SEQ ID NO: 1930415 - RNA, 19 nt, Artificial Sequence
  Description of Artificial Sequence: Synthetic oligonucleotide
  Antisense strand to SEQ ID NO: 1930414
aauaaacugagauugcacc

SEQ ID NO: 1930416 - RNA, 19 nt, Artificial Sequence
  Description of Artificial Sequence: Synthetic oligonucleotide
  Sense strand starting at position 2493 of SEQ ID NO: 1879755
gguucagaaucggugugua

SEQ ID NO: 1930417 - RNA, 19 nt, Artificial Sequence
  Description of Artificial Sequence: Synthetic oligonucleotide
  Antisense strand to SEQ ID NO: 1930416
uacacaccgauucugaacc

SEQ ID NO: 1930418 - RNA, 19 nt, Artificial Sequence
  Description of Artificial Sequence: Synthetic oligonucleotide
  Sense strand starting at position 2496 of SEQ ID NO: 1879755
ucagaaucgguguguauuu

SEQ ID NO: 1930419 - RNA, 19 nt, Artificial Sequence
  Description of Artificial Sequence: Synthetic oligonucleotide
  Antisense strand to SEQ ID NO: 1930418
aaauacacaccgauucuga

SEQ ID NO: 1930420 - RNA, 19 nt, Artificial Sequence
  Description of Artificial Sequence: Synthetic oligonucleotide
  Sense strand starting at position 2595 of SEQ ID NO: 1879755
acgguacaagucuagaaua

SEQ ID NO: 1930421 - RNA, 19 nt, Artificial Sequence
  Description of Artificial Sequence: Synthetic oligonucleotide
  Antisense strand to SEQ ID NO: 1930420
uauucuagacuuguaccgu

SEQ ID NO: 1930422 - RNA, 19 nt, Artificial Sequence
  Description of Artificial Sequence: Synthetic oligonucleotide
  Sense strand starting at position 2607 of SEQ ID NO: 1879755
uagaauauggcaugagcga

SEQ ID NO: 1930423 - RNA, 19 nt, Artificial Sequence
  Description of Artificial Sequence: Synthetic oligonucleotide
  Antisense strand to SEQ ID NO: 1930422
ucgcucaugccauauucua

SEQ ID NO: 1930424 - RNA, 19 nt, Artificial Sequence
  Description of Artificial Sequence: Synthetic oligonucleotide
  Sense strand starting at position 2608 of SEQ ID NO: 1879755
agaauauggcaugagcgaa

SEQ ID NO: 1930425 - RNA, 19 nt, Artificial Sequence
  Description of Artificial Sequence: Synthetic oligonucleotide
  Antisense strand to SEQ ID NO: 1930424
uucgcucaugccauauucu

SEQ ID NO: 1930426 - RNA, 19 nt, Artificial Sequence
  Description of Artificial Sequence: Synthetic oligonucleotide
  Sense strand starting at position 2642 of SEQ ID NO: 1879755
gagcuuaucuacccagagu

SEQ ID NO: 1930427 - RNA, 19 nt, Artificial Sequence
  Description of Artificial Sequence: Synthetic oligonucleotide
  Antisense strand to SEQ ID NO: 1930426
acucuggguagauaagcuc

SEQ ID NO: 1930428 - RNA, 19 nt, Artificial Sequence
  Description of Artificial Sequence: Synthetic oligonucleotide
  Sense strand starting at position 2668 of SEQ ID NO: 1879755
gagagacucugccuugaag

SEQ ID NO: 1930429 - RNA, 19 nt, Artificial Sequence
  Description of Artificial Sequence: Synthetic oligonucleotide
  Antisense strand to SEQ ID NO: 1930428
cuucaaggcagagucucuc

SEQ ID NO: 1930430 - RNA, 19 nt, Artificial Sequence
  Description of Artificial Sequence: Synthetic oligonucleotide
  Sense strand starting at position 2670 of SEQ ID NO: 1879755
gagacucugccuugaagug

SEQ ID NO: 1930431 - RNA, 19 nt, Artificial Sequence
  Description of Artificial Sequence: Synthetic oligonucleotide
  Antisense strand to SEQ ID NO: 1930430
cacuucaaggcagagucuc

SEQ ID NO: 1930432 - RNA, 19 nt, Artificial Sequence
  Description of Artificial Sequence: Synthetic oligonucleotide
  Sense strand starting at position 2679 of SEQ ID NO: 1879755
ccuugaagugggcacauau

SEQ ID NO: 1930433 - RNA, 19 nt, Artificial Sequence
  Description of Artificial Sequence: Synthetic oligonucleotide
  Antisense strand to SEQ ID NO: 1930432
auaugugcccacuucaagg

SEQ ID NO: 1930434 - RNA, 19 nt, Artificial Sequence
  Description of Artificial Sequence: Synthetic oligonucleotide
  Sense strand starting at position 2688 of SEQ ID NO: 1879755
gggcacauaugauagaaga

SEQ ID NO: 1930435 - RNA, 19 nt, Artificial Sequence
  Description of Artificial Sequence: Synthetic oligonucleotide
  Antisense strand to SEQ ID NO: 1930434
ucuucuaucauaugugccc

SEQ ID NO: 1930436 - RNA, 19 nt, Artificial Sequence
  Description of Artificial Sequence: Synthetic oligonucleotide
  Sense strand starting at position 2714 of SEQ ID NO: 1879755
gggagcagguaugaauaaa

SEQ ID NO: 1930437 - RNA, 19 nt, Artificial Sequence
  Description of Artificial Sequence: Synthetic oligonucleotide
  Antisense strand to SEQ ID NO: 1930436
uuuauucauaccugcuccc

SEQ ID NO: 1930438 - RNA, 19 nt, Artificial Sequence
  Description of Artificial Sequence: Synthetic oligonucleotide
  Sense strand starting at position 2760 of SEQ ID NO: 1879755
uuauaagagucagucccuu

SEQ ID NO: 1930439 - RNA, 19 nt, Artificial Sequence
  Description of Artificial Sequence: Synthetic oligonucleotide
  Antisense strand to SEQ ID NO: 1930438
aagggacugacucuuauaa

SEQ ID NO: 1930440 - RNA, 19 nt, Artificial Sequence
  Description of Artificial Sequence: Synthetic oligonucleotide
  Sense strand starting at position 2834 of SEQ ID NO: 1879755
ugaguaaacugagaauuga

SEQ ID NO: 1930441 - RNA, 19 nt, Artificial Sequence
  Description of Artificial Sequence: Synthetic oligonucleotide
  Antisense strand to SEQ ID NO: 1930440
ucaauucucaguuuacuca

SEQ ID NO: 1930442 - RNA, 19 nt, Artificial Sequence
  Description of Artificial Sequence: Synthetic oligonucleotide
  Sense strand starting at position 2851 of SEQ ID NO: 1879755
gaggucucuaauggcgaua

SEQ ID NO: 1930443 - RNA, 19 nt, Artificial Sequence
  Description of Artificial Sequence: Synthetic oligonucleotide
  Antisense strand to SEQ ID NO: 1930442
uaucgccauuagagaccuc

SEQ ID NO: 1930444 - RNA, 19 nt, Artificial Sequence
  Description of Artificial Sequence: Synthetic oligonucleotide
  Sense strand starting at position 2854 of SEQ ID NO: 1879755
gucucuaauggcgauaucu

SEQ ID NO: 1930445 - RNA, 19 nt, Artificial Sequence
  Description of Artificial Sequence: Synthetic oligonucleotide
  Antisense strand to SEQ ID NO: 1930444
agauaucgccauuagagac

SEQ ID NO: 1930446 - RNA, 19 nt, Artificial Sequence
  Description of Artificial Sequence: Synthetic oligonucleotide
  Sense strand starting at position 2856 of SEQ ID NO: 1879755
cucuaauggcgauaucuua

SEQ ID NO: 1930447 - RNA, 19 nt, Artificial Sequence
  Description of Artificial Sequence: Synthetic oligonucleotide
  Antisense strand to SEQ ID NO: 1930446
uaagauaucgccauuagag

SEQ ID NO: 1930448 - RNA, 19 nt, Artificial Sequence
  Description of Artificial Sequence: Synthetic oligonucleotide
  Sense strand starting at position 3101 of SEQ ID NO: 1879755
agccaacuauacuuggaaa

SEQ ID NO: 1930449 - RNA, 19 nt, Artificial Sequence
  Description of Artificial Sequence: Synthetic oligonucleotide
  Antisense strand to SEQ ID NO: 1930448
uuuccaaguauaguuggcu

SEQ ID NO: 1930450 - RNA, 19 nt, Artificial Sequence
  Description of Artificial Sequence: Synthetic oligonucleotide
  Sense strand starting at position 3498 of SEQ ID NO: 1879755
acaagaauaguaugcuaug

SEQ ID NO: 1930451 - RNA, 19 nt, Artificial Sequence
  Description of Artificial Sequence: Synthetic oligonucleotide
  Antisense strand to SEQ ID NO: 1930450
cauagcauacuauucuugu

SEQ ID NO: 1930452 - RNA, 19 nt, Artificial Sequence
  Description of Artificial Sequence: Synthetic oligonucleotide
  Sense strand starting at position 3499 of SEQ ID NO: 1879755
caagaauaguaugcuauga

SEQ ID NO: 1930453 - RNA, 19 nt, Artificial Sequence
  Description of Artificial Sequence: Synthetic oligonucleotide
  Antisense strand to SEQ ID NO: 1930452
ucauagcauacuauucuug

SEQ ID NO: 1930454 - RNA, 19 nt, Artificial Sequence
  Description of Artificial Sequence: Synthetic oligonucleotide
  Sense strand starting at position 3501 of SEQ ID NO: 1879755
agaauaguaugcuaugaga

SEQ ID NO: 1930455 - RNA, 19 nt, Artificial Sequence
  Description of Artificial Sequence: Synthetic oligonucleotide
  Antisense strand to SEQ ID NO: 1930454
ucucauagcauacuauucu

SEQ ID NO: 1930456 - RNA, 19 nt, Artificial Sequence
  Description of Artificial Sequence: Synthetic oligonucleotide
  Sense strand starting at position 3503 of SEQ ID NO: 1879755
aauaguaugcuaugagaaa

SEQ ID NO: 1930457 - RNA, 19 nt, Artificial Sequence
  Description of Artificial Sequence: Synthetic oligonucleotide
  Antisense strand to SEQ ID NO: 1930456
uuucucauagcauacuauu

SEQ ID NO: 1930458 - RNA, 19 nt, Artificial Sequence
  Description of Artificial Sequence: Synthetic oligonucleotide
  Sense strand starting at position 3597 of SEQ ID NO: 1879755
agauaaaguugaggaaauc

SEQ ID NO: 1930459 - RNA, 19 nt, Artificial Sequence
  Description of Artificial Sequence: Synthetic oligonucleotide
  Antisense strand to SEQ ID NO: 1930458
gauuuccucaacuuuaucu

SEQ ID NO: 1930460 - RNA, 19 nt, Artificial Sequence
  Description of Artificial Sequence: Synthetic oligonucleotide
  Sense strand starting at position 3704 of SEQ ID NO: 1879755
ggucuaccaucugaugaac

SEQ ID NO: 1930461 - RNA, 19 nt, Artificial Sequence
  Description of Artificial Sequence: Synthetic oligonucleotide
  Antisense strand to SEQ ID NO: 1930460
guucaucagaugguagacc

SEQ ID NO: 1930462 - RNA, 19 nt, Artificial Sequence
  Description of Artificial Sequence: Synthetic oligonucleotide
  Sense strand starting at position 3805 of SEQ ID NO: 1879755
guacucaaaucuccagguu

SEQ ID NO: 1930463 - RNA, 19 nt, Artificial Sequence
  Description of Artificial Sequence: Synthetic oligonucleotide
  Antisense strand to SEQ ID NO: 1930462
aaccuggagauuugaguac

SEQ ID NO: 1930464 - RNA, 19 nt, Artificial Sequence
  Description of Artificial Sequence: Synthetic oligonucleotide
  Sense strand starting at position 42 of SEQ ID NO: 1879756
agagcccuauccucugaau

SEQ ID NO: 1930465 - RNA, 19 nt, Artificial Sequence
  Description of Artificial Sequence: Synthetic oligonucleotide
  Antisense strand to SEQ ID NO: 1930464
auucagaggauagggcucu

SEQ ID NO: 1930466 - RNA, 19 nt, Artificial Sequence
  Description of Artificial Sequence: Synthetic oligonucleotide
  Sense strand starting at position 57 of SEQ ID NO: 1879756
gaauacuccuguuuauggu

SEQ ID NO: 1930467 - RNA, 19 nt, Artificial Sequence
  Description of Artificial Sequence: Synthetic oligonucleotide
  Antisense strand to SEQ ID NO: 1930466
accauaaacaggaguauuc

SEQ ID NO: 1930468 - RNA, 19 nt, Artificial Sequence
  Description of Artificial Sequence: Synthetic oligonucleotide
  Sense strand starting at position 247 of SEQ ID NO: 1879756
uuggauuagucagacucua

SEQ ID NO: 1930469 - RNA, 19 nt, Artificial Sequence
  Description of Artificial Sequence: Synthetic oligonucleotide
  Antisense strand to SEQ ID NO: 1930468
uagagucugacuaauccaa

SEQ ID NO: 1930470 - RNA, 19 nt, Artificial Sequence
  Description of Artificial Sequence: Synthetic oligonucleotide
  Sense strand starting at position 1330 of SEQ ID NO: 1879756
gcaaacaugcuaugaauau

SEQ ID NO: 1930471 - RNA, 19 nt, Artificial Sequence
  Description of Artificial Sequence: Synthetic oligonucleotide
  Antisense strand to SEQ ID NO: 1930470
auauucauagcauguuugc

SEQ ID NO: 1930472 - RNA, 19 nt, Artificial Sequence
  Description of Artificial Sequence: Synthetic oligonucleotide
  Sense strand starting at position 1349 of SEQ ID NO: 1879756
agcuauuaugaauguugca

SEQ ID NO: 1930473 - RNA, 19 nt, Artificial Sequence
  Description of Artificial Sequence: Synthetic oligonucleotide
  Antisense strand to SEQ ID NO: 1930472
ugcaacauucauaauagcu

SEQ ID NO: 1930474 - RNA, 19 nt, Artificial Sequence
  Description of Artificial Sequence: Synthetic oligonucleotide
  Sense strand starting at position 1362 of SEQ ID NO: 1879756
guugcaaauuauguuacua

SEQ ID NO: 1930475 - RNA, 19 nt, Artificial Sequence
  Description of Artificial Sequence: Synthetic oligonucleotide
  Antisense strand to SEQ ID NO: 1930474
uaguaacauaauuugcaac

SEQ ID NO: 1930476 - RNA, 19 nt, Artificial Sequence
  Description of Artificial Sequence: Synthetic oligonucleotide
  Sense strand starting at position 1364 of SEQ ID NO: 1879756
ugcaaauuauguuacuaga

SEQ ID NO: 1930477 - RNA, 19 nt, Artificial Sequence
  Description of Artificial Sequence: Synthetic oligonucleotide
  Antisense strand to SEQ ID NO: 1930476
ucuaguaacauaauuugca

SEQ ID NO: 1930478 - RNA, 19 nt, Artificial Sequence
  Description of Artificial Sequence: Synthetic oligonucleotide
  Sense strand starting at position 1827 of SEQ ID NO: 1879756
aucucuauuugugaagcua

SEQ ID NO: 1930479 - RNA, 19 nt, Artificial Sequence
  Description of Artificial Sequence: Synthetic oligonucleotide
  Antisense strand to SEQ ID NO: 1930478
uagcuucacaaauagagau

SEQ ID NO: 1930480 - RNA, 19 nt, Artificial Sequence
  Description of Artificial Sequence: Synthetic oligonucleotide
  Sense strand starting at position 1838 of SEQ ID NO: 1879756
ugaagcuauuauucugaaa

SEQ ID NO: 1930481 - RNA, 19 nt, Artificial Sequence
  Description of Artificial Sequence: Synthetic oligonucleotide
  Antisense strand to SEQ ID NO: 1930480
uuucagaauaauagcuuca

SEQ ID NO: 1930482 - RNA, 19 nt, Artificial Sequence
  Description of Artificial Sequence: Synthetic oligonucleotide
  Sense strand starting at position 1865 of SEQ ID NO: 1879756
aucucuuuccuggguuaga

SEQ ID NO: 1930483 - RNA, 19 nt, Artificial Sequence
  Description of Artificial Sequence: Synthetic oligonucleotide
  Antisense strand to SEQ ID NO: 1930482
ucuaacccaggaaagagau

SEQ ID NO: 1930484 - RNA, 19 nt, Artificial Sequence
  Description of Artificial Sequence: Synthetic oligonucleotide
  Sense strand starting at position 1866 of SEQ ID NO: 1879756
ucucuuuccuggguuagau

SEQ ID NO: 1930485 - RNA, 19 nt, Artificial Sequence
  Description of Artificial Sequence: Synthetic oligonucleotide
  Antisense strand to SEQ ID NO: 1930484
aucuaacccaggaaagaga

SEQ ID NO: 1930486 - RNA, 19 nt, Artificial Sequence
  Description of Artificial Sequence: Synthetic oligonucleotide
  Sense strand starting at position 1897 of SEQ ID NO: 1879756
ucucgcuuugcuuucuaau

SEQ ID NO: 1930487 - RNA, 19 nt, Artificial Sequence
  Description of Artificial Sequence: Synthetic oligonucleotide
  Antisense strand to SEQ ID NO: 1930486
auuagaaagcaaagcgaga

SEQ ID NO: 1930488 - RNA, 19 nt, Artificial Sequence
  Description of Artificial Sequence: Synthetic oligonucleotide
  Sense strand starting at position 1898 of SEQ ID NO: 1879756
cucgcuuugcuuucuaauc

SEQ ID NO: 1930489 - RNA, 19 nt, Artificial Sequence
  Description of Artificial Sequence: Synthetic oligonucleotide
  Antisense strand to SEQ ID NO: 1930488
gauuagaaagcaaagcgag

SEQ ID NO: 1930490 - RNA, 19 nt, Artificial Sequence
  Description of Artificial Sequence: Synthetic oligonucleotide
  Sense strand starting at position 1899 of SEQ ID NO: 1879756
ucgcuuugcuuucuaaucu

SEQ ID NO: 1930491 - RNA, 19 nt, Artificial Sequence
  Description of Artificial Sequence: Synthetic oligonucleotide
  Antisense strand to SEQ ID NO: 1930490
agauuagaaagcaaagcga

SEQ ID NO: 1930492 - RNA, 19 nt, Artificial Sequence
  Description of Artificial Sequence: Synthetic oligonucleotide
  Sense strand starting at position 1906 of SEQ ID NO: 1879756
gcuuucuaaucuuucugga

SEQ ID NO: 1930493 - RNA, 19 nt, Artificial Sequence
  Description of Artificial Sequence: Synthetic oligonucleotide
  Antisense strand to SEQ ID NO: 1930492
uccagaaagauuagaaagc

SEQ ID NO: 1930494 - RNA, 19 nt, Artificial Sequence
  Description of Artificial Sequence: Synthetic oligonucleotide
  Sense strand starting at position 1911 of SEQ ID NO: 1879756
cuaaucuuucuggagcgua

SEQ ID NO: 1930495 - RNA, 19 nt, Artificial Sequence
  Description of Artificial Sequence: Synthetic oligonucleotide
  Antisense strand to SEQ ID NO: 1930494
uacgcuccagaaagauuag

SEQ ID NO: 1930496 - RNA, 19 nt, Artificial Sequence
  Description of Artificial Sequence: Synthetic oligonucleotide
  Sense strand starting at position 1989 of SEQ ID NO: 1879756
uugagaauaugcuccagua

SEQ ID NO: 1930497 - RNA, 19 nt, Artificial Sequence
  Description of Artificial Sequence: Synthetic oligonucleotide
  Antisense strand to SEQ ID NO: 1930496
uacuggagcauauucucaa

SEQ ID NO: 1930498 - RNA, 19 nt, Artificial Sequence
  Description of Artificial Sequence: Synthetic oligonucleotide
  Sense strand starting at position 2001 of SEQ ID NO: 1879756
uccaguaggauucguggga

SEQ ID NO: 1930499 - RNA, 19 nt, Artificial Sequence
  Description of Artificial Sequence: Synthetic oligonucleotide
  Antisense strand to SEQ ID NO: 1930498
ucccacgaauccuacugga

SEQ ID NO: 1930500 - RNA, 19 nt, Artificial Sequence
  Description of Artificial Sequence: Synthetic oligonucleotide
  Sense strand starting at position 2004 of SEQ ID NO: 1879756
aguaggauucgugggagau

SEQ ID NO: 1930501 - RNA, 19 nt, Artificial Sequence
  Description of Artificial Sequence: Synthetic oligonucleotide
  Antisense strand to SEQ ID NO: 1930500
aucucccacgaauccuacu

SEQ ID NO: 1930502 - RNA, 19 nt, Artificial Sequence
  Description of Artificial Sequence: Synthetic oligonucleotide
  Sense strand starting at position 2005 of SEQ ID NO: 1879756
guaggauucgugggagauc

SEQ ID NO: 1930503 - RNA, 19 nt, Artificial Sequence
  Description of Artificial Sequence: Synthetic oligonucleotide
  Antisense strand to SEQ ID NO: 1930502
gaucucccacgaauccuac

SEQ ID NO: 1930504 - RNA, 19 nt, Artificial Sequence
  Description of Artificial Sequence: Synthetic oligonucleotide
  Sense strand starting at position 2006 of SEQ ID NO: 1879756
uaggauucgugggagauca

SEQ ID NO: 1930505 - RNA, 19 nt, Artificial Sequence
  Description of Artificial Sequence: Synthetic oligonucleotide
  Antisense strand to SEQ ID NO: 1930504
ugaucucccacgaauccua

SEQ ID NO: 1930506 - RNA, 19 nt, Artificial Sequence
  Description of Artificial Sequence: Synthetic oligonucleotide
  Sense strand starting at position 2018 of SEQ ID NO: 1879756
gagaucaaguaaguuugau

SEQ ID NO: 1930507 - RNA, 19 nt, Artificial Sequence
  Description of Artificial Sequence: Synthetic oligonucleotide
  Antisense strand to SEQ ID NO: 1930506
aucaaacuuacuugaucuc

SEQ ID NO: 1930508 - RNA, 19 nt, Artificial Sequence
  Description of Artificial Sequence: Synthetic oligonucleotide
  Sense strand starting at position 2026 of SEQ ID NO: 1879756
guaaguuugauaggcgcau

SEQ ID NO: 1930509 - RNA, 19 nt, Artificial Sequence
  Description of Artificial Sequence: Synthetic oligonucleotide
  Antisense strand to SEQ ID NO: 1930508
augcgccuaucaaacuuac

SEQ ID NO: 1930510 - RNA, 19 nt, Artificial Sequence
  Description of Artificial Sequence: Synthetic oligonucleotide
  Sense strand starting at position 2030 of SEQ ID NO: 1879756
guuugauaggcgcauggga

SEQ ID NO: 1930511 - RNA, 19 nt, Artificial Sequence
  Description of Artificial Sequence: Synthetic oligonucleotide
  Antisense strand to SEQ ID NO: 1930510
ucccaugcgccuaucaaac

SEQ ID NO: 1930512 - RNA, 19 nt, Artificial Sequence
  Description of Artificial Sequence: Synthetic oligonucleotide
  Sense strand starting at position 2053 of SEQ ID NO: 1879756
aaguaaguucgacgauguu

SEQ ID NO: 1930513 - RNA, 19 nt, Artificial Sequence
  Description of Artificial Sequence: Synthetic oligonucleotide
  Antisense strand to SEQ ID NO: 1930512
aacaucgucgaacuuacuu

SEQ ID NO: 1930514 - RNA, 19 nt, Artificial Sequence
  Description of Artificial Sequence: Synthetic oligonucleotide
  Sense strand starting at position 2200 of SEQ ID NO: 1879756
gaaagaucuuggcucacug

SEQ ID NO: 1930515 - RNA, 19 nt, Artificial Sequence
  Description of Artificial Sequence: Synthetic oligonucleotide
  Antisense strand to SEQ ID NO: 1930514
cagugagccaagaucuuuc

SEQ ID NO: 1930516 - RNA, 19 nt, Artificial Sequence
  Description of Artificial Sequence: Synthetic oligonucleotide
  Sense strand starting at position 2519 of SEQ ID NO: 1879756
aaagucugaggucauucua

SEQ ID NO: 1930517 - RNA, 19 nt, Artificial Sequence
  Description of Artificial Sequence: Synthetic oligonucleotide
  Antisense strand to SEQ ID NO: 1930516
uagaaugaccucagacuuu

SEQ ID NO: 1930518 - RNA, 19 nt, Artificial Sequence
  Description of Artificial Sequence: Synthetic oligonucleotide
  Sense strand starting at position 2527 of SEQ ID NO: 1879756
aggucauucuaauccuugu

SEQ ID NO: 1930519 - RNA, 19 nt, Artificial Sequence
  Description of Artificial Sequence: Synthetic oligonucleotide
  Antisense strand to SEQ ID NO: 1930518
acaaggauuagaaugaccu

SEQ ID NO: 1930520 - RNA, 19 nt, Artificial Sequence
  Description of Artificial Sequence: Synthetic oligonucleotide
  Sense strand starting at position 2573 of SEQ ID NO: 1879756
ucuagaagauguguaguau

SEQ ID NO: 1930521 - RNA, 19 nt, Artificial Sequence
  Description of Artificial Sequence: Synthetic oligonucleotide
  Antisense strand to SEQ ID NO: 1930520
auacuacacaucuucuaga

SEQ ID NO: 1930522 - RNA, 19 nt, Artificial Sequence
  Description of Artificial Sequence: Synthetic oligonucleotide
  Sense strand starting at position 2574 of SEQ ID NO: 1879756
cuagaagauguguaguaua

SEQ ID NO: 1930523 - RNA, 19 nt, Artificial Sequence
  Description of Artificial Sequence: Synthetic oligonucleotide
  Antisense strand to SEQ ID NO: 1930522
uauacuacacaucuucuag

SEQ ID NO: 1930524 - RNA, 19 nt, Artificial Sequence
  Description of Artificial Sequence: Synthetic oligonucleotide
  Sense strand starting at position 2577 of SEQ ID NO: 1879756
gaagauguguaguauauua

SEQ ID NO: 1930525 - RNA, 19 nt, Artificial Sequence
  Description of Artificial Sequence: Synthetic oligonucleotide
  Antisense strand to SEQ ID NO: 1930524
uaauauacuacacaucuuc

SEQ ID NO: 1930526 - RNA, 19 nt, Artificial Sequence
  Description of Artificial Sequence: Synthetic oligonucleotide
  Sense strand starting at position 2579 of SEQ ID NO: 1879756
agauguguaguauauuauc

SEQ ID NO: 1930527 - RNA, 19 nt, Artificial Sequence
  Description of Artificial Sequence: Synthetic oligonucleotide
  Antisense strand to SEQ ID NO: 1930526
gauaauauacuacacaucu

SEQ ID NO: 1930528 - RNA, 19 nt, Artificial Sequence
  Description of Artificial Sequence: Synthetic oligonucleotide
  Sense strand starting at position 2601 of SEQ ID NO: 1879756
ucccuaguacucuggaaug

SEQ ID NO: 1930529 - RNA, 19 nt, Artificial Sequence
  Description of Artificial Sequence: Synthetic oligonucleotide
  Antisense strand to SEQ ID NO: 1930528
cauuccagaguacuaggga

SEQ ID NO: 1930530 - RNA, 19 nt, Artificial Sequence
  Description of Artificial Sequence: Synthetic oligonucleotide
  Sense strand starting at position 2622 of SEQ ID NO: 1879756
cagugaugacaguaucuuu

SEQ ID NO: 1930531 - RNA, 19 nt, Artificial Sequence
  Description of Artificial Sequence: Synthetic oligonucleotide
  Antisense strand to SEQ ID NO: 1930530
aaagauacugucaucacug

SEQ ID NO: 1930532 - RNA, 19 nt, Artificial Sequence
  Description of Artificial Sequence: Synthetic oligonucleotide
  Sense strand starting at position 3042 of SEQ ID NO: 1879756
gcgcccggucaauaauauu

SEQ ID NO: 1930533 - RNA, 19 nt, Artificial Sequence
  Description of Artificial Sequence: Synthetic oligonucleotide
  Antisense strand to SEQ ID NO: 1930532
aauauuauugaccgggcgc

SEQ ID NO: 1930534 - RNA, 19 nt, Artificial Sequence
  Description of Artificial Sequence: Synthetic oligonucleotide
  Sense strand starting at position 3045 of SEQ ID NO: 1879756
cccggucaauaauauuuau

SEQ ID NO: 1930535 - RNA, 19 nt, Artificial Sequence
  Description of Artificial Sequence: Synthetic oligonucleotide
  Antisense strand to SEQ ID NO: 1930534
auaaauauuauugaccggg

SEQ ID NO: 1930536 - RNA, 19 nt, Artificial Sequence
  Description of Artificial Sequence: Synthetic oligonucleotide
  Sense strand starting at position 3398 of SEQ ID NO: 1879756
aaaggaucucgguguguug

SEQ ID NO: 1930537 - RNA, 19 nt, Artificial Sequence
  Description of Artificial Sequence: Synthetic oligonucleotide
  Antisense strand to SEQ ID NO: 1930536
caacacaccgagauccuuu

SEQ ID NO: 1930538 - RNA, 19 nt, Artificial Sequence
  Description of Artificial Sequence: Synthetic oligonucleotide
  Sense strand starting at position 3572 of SEQ ID NO: 1879756
cucacuauguugucaaggu

SEQ ID NO: 1930539 - RNA, 19 nt, Artificial Sequence
  Description of Artificial Sequence: Synthetic oligonucleotide
  Antisense strand to SEQ ID NO: 1930538
accuugacaacauagugag

SEQ ID NO: 1930540 - RNA, 19 nt, Artificial Sequence
  Description of Artificial Sequence: Synthetic oligonucleotide
  Sense strand starting at position 3669 of SEQ ID NO: 1879756
uaaauauucuuggccaggu

SEQ ID NO: 1930541 - RNA, 19 nt, Artificial Sequence
  Description of Artificial Sequence: Synthetic oligonucleotide
  Antisense strand to SEQ ID NO: 1930540
accuggccaagaauauuua

SEQ ID NO: 1930542 - RNA, 19 nt, Artificial Sequence
  Description of Artificial Sequence: Synthetic oligonucleotide
  Sense strand starting at position 3734 of SEQ ID NO: 1879756
gagagaucgcuugagguca

SEQ ID NO: 1930543 - RNA, 19 nt, Artificial Sequence
  Description of Artificial Sequence: Synthetic oligonucleotide
  Antisense strand to SEQ ID NO: 1930542
ugaccucaagcgaucucuc

SEQ ID NO: 1930544 - RNA, 19 nt, Artificial Sequence
  Description of Artificial Sequence: Synthetic oligonucleotide
  Sense strand starting at position 147 of SEQ ID NO: 1879757
aaaggauguugaccguuau

SEQ ID NO: 1930545 - RNA, 19 nt, Artificial Sequence
  Description of Artificial Sequence: Synthetic oligonucleotide
  Antisense strand to SEQ ID NO: 1930544
auaacggucaacauccuuu

SEQ ID NO: 1930546 - RNA, 19 nt, Artificial Sequence
  Description of Artificial Sequence: Synthetic oligonucleotide
  Sense strand starting at position 148 of SEQ ID NO: 1879757
aaggauguugaccguuauu

SEQ ID NO: 1930547 - RNA, 19 nt, Artificial Sequence
  Description of Artificial Sequence: Synthetic oligonucleotide
  Antisense strand to SEQ ID NO: 1930546
aauaacggucaacauccuu

SEQ ID NO: 1930548 - RNA, 19 nt, Artificial Sequence
  Description of Artificial Sequence: Synthetic oligonucleotide
  Sense strand starting at position 339 of SEQ ID NO: 1879757
aucugauauugaccuugca

SEQ ID NO: 1930549 - RNA, 19 nt, Artificial Sequence
  Description of Artificial Sequence: Synthetic oligonucleotide
  Antisense strand to SEQ ID NO: 1930548
ugcaaggucaauaucagau

SEQ ID NO: 1930550 - RNA, 19 nt, Artificial Sequence
  Description of Artificial Sequence: Synthetic oligonucleotide
  Sense strand starting at position 342 of SEQ ID NO: 1879757
ugauauugaccuugcacuu

SEQ ID NO: 1930551 - RNA, 19 nt, Artificial Sequence
  Description of Artificial Sequence: Synthetic oligonucleotide
  Antisense strand to SEQ ID NO: 1930550
aagugcaaggucaauauca

SEQ ID NO: 1930552 - RNA, 19 nt, Artificial Sequence
  Description of Artificial Sequence: Synthetic oligonucleotide
  Sense strand starting at position 383 of SEQ ID NO: 1879757
cugagauagcaguauagcu

SEQ ID NO: 1930553 - RNA, 19 nt, Artificial Sequence
  Description of Artificial Sequence: Synthetic oligonucleotide
  Antisense strand to SEQ ID NO: 1930552
agcuauacugcuaucucag

SEQ ID NO: 1930554 - RNA, 19 nt, Artificial Sequence
  Description of Artificial Sequence: Synthetic oligonucleotide
  Sense strand starting at position 418 of SEQ ID NO: 1879757
agguuacaauguucuauga

SEQ ID NO: 1930555 - RNA, 19 nt, Artificial Sequence
  Description of Artificial Sequence: Synthetic oligonucleotide
  Antisense strand to SEQ ID NO: 1930554
ucauagaacauuguaaccu

SEQ ID NO: 1930556 - RNA, 19 nt, Artificial Sequence
  Description of Artificial Sequence: Synthetic oligonucleotide
  Sense strand starting at position 1289 of SEQ ID NO: 1879757
agacuauaauugguaguuu

SEQ ID NO: 1930557 - RNA, 19 nt, Artificial Sequence
  Description of Artificial Sequence: Synthetic oligonucleotide
  Antisense strand to SEQ ID NO: 1930556
aaacuaccaauuauagucu

SEQ ID NO: 1930558 - RNA, 19 nt, Artificial Sequence
  Description of Artificial Sequence: Synthetic oligonucleotide
  Sense strand starting at position 1293 of SEQ ID NO: 1879757
uauaauugguaguuucuga

SEQ ID NO: 1930559 - RNA, 19 nt, Artificial Sequence
  Description of Artificial Sequence: Synthetic oligonucleotide
  Antisense strand to SEQ ID NO: 1930558
ucagaaacuaccaauuaua

SEQ ID NO: 1930560 - RNA, 19 nt, Artificial Sequence
  Description of Artificial Sequence: Synthetic oligonucleotide
  Sense strand starting at position 1312 of SEQ ID NO: 1879757
auuguugauugcuuccuua

SEQ ID NO: 1930561 - RNA, 19 nt, Artificial Sequence
  Description of Artificial Sequence: Synthetic oligonucleotide
  Antisense strand to SEQ ID NO: 1930560
uaaggaagcaaucaacaau

SEQ ID NO: 1930562 - RNA, 19 nt, Artificial Sequence
  Description of Artificial Sequence: Synthetic oligonucleotide
  Sense strand starting at position 1315 of SEQ ID NO: 1879757
guugauugcuuccuuaaag

SEQ ID NO: 1930563 - RNA, 19 nt, Artificial Sequence
  Description of Artificial Sequence: Synthetic oligonucleotide
  Antisense strand to SEQ ID NO: 1930562
cuuuaaggaagcaaucaac

SEQ ID NO: 1930564 - RNA, 19 nt, Artificial Sequence
  Description of Artificial Sequence: Synthetic oligonucleotide
  Sense strand starting at position 1316 of SEQ ID NO: 1879757
uugauugcuuccuuaaaga

SEQ ID NO: 1930565 - RNA, 19 nt, Artificial Sequence
  Description of Artificial Sequence: Synthetic oligonucleotide
  Antisense strand to SEQ ID NO: 1930564
ucuuuaaggaagcaaucaa

SEQ ID NO: 1930566 - RNA, 19 nt, Artificial Sequence
  Description of Artificial Sequence: Synthetic oligonucleotide
  Sense strand starting at position 1350 of SEQ ID NO: 1879757
gucacagugguagaguuaa

SEQ ID NO: 1930567 - RNA, 19 nt, Artificial Sequence
  Description of Artificial Sequence: Synthetic oligonucleotide
  Antisense strand to SEQ ID NO: 1930566
uuaacucuaccacugugac

SEQ ID NO: 1930568 - RNA, 19 nt, Artificial Sequence
  Description of Artificial Sequence: Synthetic oligonucleotide
  Sense strand starting at position 1415 of SEQ ID NO: 1879757
uuuaccuucuuugagaaga

SEQ ID NO: 1930569 - RNA, 19 nt, Artificial Sequence
  Description of Artificial Sequence: Synthetic oligonucleotide
  Antisense strand to SEQ ID NO: 1930568
ucuucucaaagaagguaaa

SEQ ID NO: 1930570 - RNA, 19 nt, Artificial Sequence
  Description of Artificial Sequence: Synthetic oligonucleotide
  Sense strand starting at position 1417 of SEQ ID NO: 1879757
uaccuucuuugagaagagu

SEQ ID NO: 1930571 - RNA, 19 nt, Artificial Sequence
  Description of Artificial Sequence: Synthetic oligonucleotide
  Antisense strand to SEQ ID NO: 1930570
acucuucucaaagaaggua

SEQ ID NO: 1930572 - RNA, 19 nt, Artificial Sequence
  Description of Artificial Sequence: Synthetic oligonucleotide
  Sense strand starting at position 1433 of SEQ ID NO: 1879757
aguaaagacuccuuguuua

SEQ ID NO: 1930573 - RNA, 19 nt, Artificial Sequence
  Description of Artificial Sequence: Synthetic oligonucleotide
  Antisense strand to SEQ ID NO: 1930572
uaaacaaggagucuuuacu

SEQ ID NO: 1930574 - RNA, 19 nt, Artificial Sequence
  Description of Artificial Sequence: Synthetic oligonucleotide
  Sense strand starting at position 1475 of SEQ ID NO: 1879757
augagagcagucugugaau

SEQ ID NO: 1930575 - RNA, 19 nt, Artificial Sequence
  Description of Artificial Sequence: Synthetic oligonucleotide
  Antisense strand to SEQ ID NO: 1930574
auucacagacugcucucau

SEQ ID NO: 1930576 - RNA, 19 nt, Artificial Sequence
  Description of Artificial Sequence: Synthetic oligonucleotide
  Sense strand starting at position 1501 of SEQ ID NO: 1879757
cuucuuuggucucuuuauu

SEQ ID NO: 1930577 - RNA, 19 nt, Artificial Sequence
  Description of Artificial Sequence: Synthetic oligonucleotide
  Antisense strand to SEQ ID NO: 1930576
aauaaagagaccaaagaag

SEQ ID NO: 1930578 - RNA, 19 nt, Artificial Sequence
  Description of Artificial Sequence: Synthetic oligonucleotide
  Sense strand starting at position 1525 of SEQ ID NO: 1879757
gauacauugcaauggguau

SEQ ID NO: 1930579 - RNA, 19 nt, Artificial Sequence
  Description of Artificial Sequence: Synthetic oligonucleotide
  Antisense strand to SEQ ID NO: 1930578
auacccauugcaauguauc

SEQ ID NO: 1930580 - RNA, 19 nt, Artificial Sequence
  Description of Artificial Sequence: Synthetic oligonucleotide
  Sense strand starting at position 1855 of SEQ ID NO: 1879757
agucuagaauugccaacau

SEQ ID NO: 1930581 - RNA, 19 nt, Artificial Sequence
  Description of Artificial Sequence: Synthetic oligonucleotide
  Antisense strand to SEQ ID NO: 1930580
auguuggcaauucuagacu

SEQ ID NO: 1930582 - RNA, 19 nt, Artificial Sequence
  Description of Artificial Sequence: Synthetic oligonucleotide
  Sense strand starting at position 2052 of SEQ ID NO: 1879757
ucagucagugccuguggaa

SEQ ID NO: 1930583 - RNA, 19 nt, Artificial Sequence
  Description of Artificial Sequence: Synthetic oligonucleotide
  Antisense strand to SEQ ID NO: 1930582
uuccacaggcacugacuga

SEQ ID NO: 1930584 - RNA, 19 nt, Artificial Sequence
  Description of Artificial Sequence: Synthetic oligonucleotide
  Sense strand starting at position 2212 of SEQ ID NO: 1879757
ugcaauucuugggcaaguu

SEQ ID NO: 1930585 - RNA, 19 nt, Artificial Sequence
  Description of Artificial Sequence: Synthetic oligonucleotide
  Antisense strand to SEQ ID NO: 1930584
aacuugcccaagaauugca

SEQ ID NO: 1930586 - RNA, 19 nt, Artificial Sequence
  Description of Artificial Sequence: Synthetic oligonucleotide
  Sense strand starting at position 2347 of SEQ ID NO: 1879757
agcucauaacucugugaga

SEQ ID NO: 1930587 - RNA, 19 nt, Artificial Sequence
  Description of Artificial Sequence: Synthetic oligonucleotide
  Antisense strand to SEQ ID NO: 1930586
ucucacagaguuaugagcu

SEQ ID NO: 1930588 - RNA, 19 nt, Artificial Sequence
  Description of Artificial Sequence: Synthetic oligonucleotide
  Sense strand starting at position 2348 of SEQ ID NO: 1879757
gcucauaacucugugagag

SEQ ID NO: 1930589 - RNA, 19 nt, Artificial Sequence
  Description of Artificial Sequence: Synthetic oligonucleotide
  Antisense strand to SEQ ID NO: 1930588
cucucacagaguuaugagc

SEQ ID NO: 1930590 - RNA, 19 nt, Artificial Sequence
  Description of Artificial Sequence: Synthetic oligonucleotide
  Sense strand starting at position 2349 of SEQ ID NO: 1879757
cucauaacucugugagagu

SEQ ID NO: 1930591 - RNA, 19 nt, Artificial Sequence
  Description of Artificial Sequence: Synthetic oligonucleotide
  Antisense strand to SEQ ID NO: 1930590
acucucacagaguuaugag

SEQ ID NO: 1930592 - RNA, 19 nt, Artificial Sequence
  Description of Artificial Sequence: Synthetic oligonucleotide
  Sense strand starting at position 2360 of SEQ ID NO: 1879757
gugagaguuucuccuucuu

SEQ ID NO: 1930593 - RNA, 19 nt, Artificial Sequence
  Description of Artificial Sequence: Synthetic oligonucleotide
  Antisense strand to SEQ ID NO: 1930592
aagaaggagaaacucucac

SEQ ID NO: 1930594 - RNA, 19 nt, Artificial Sequence
  Description of Artificial Sequence: Synthetic oligonucleotide
  Sense strand starting at position 2372 of SEQ ID NO: 1879757
ccuucuuccuacuagagga

SEQ ID NO: 1930595 - RNA, 19 nt, Artificial Sequence
  Description of Artificial Sequence: Synthetic oligonucleotide
  Antisense strand to SEQ ID NO: 1930594
uccucuaguaggaagaagg

SEQ ID NO: 1930596 - RNA, 19 nt, Artificial Sequence
  Description of Artificial Sequence: Synthetic oligonucleotide
  Sense strand starting at position 2441 of SEQ ID NO: 1879757
auagcucagccacaauaga

SEQ ID NO: 1930597 - RNA, 19 nt, Artificial Sequence
  Description of Artificial Sequence: Synthetic oligonucleotide
  Antisense strand to SEQ ID NO: 1930596
ucuauuguggcugagcuau

SEQ ID NO: 1930598 - RNA, 19 nt, Artificial Sequence
  Description of Artificial Sequence: Synthetic oligonucleotide
  Sense strand starting at position 2539 of SEQ ID NO: 1879757
ggaaccugcugucuugaaa

SEQ ID NO: 1930599 - RNA, 19 nt, Artificial Sequence
  Description of Artificial Sequence: Synthetic oligonucleotide
  Antisense strand to SEQ ID NO: 1930598
uuucaagacagcagguucc

SEQ ID NO: 1930600 - RNA, 19 nt, Artificial Sequence
  Description of Artificial Sequence: Synthetic oligonucleotide
  Sense strand starting at position 2922 of SEQ ID NO: 1879757
gaauaaacauuuggugguu

SEQ ID NO: 1930601 - RNA, 19 nt, Artificial Sequence
  Description of Artificial Sequence: Synthetic oligonucleotide
  Antisense strand to SEQ ID NO: 1930600
aaccaccaaauguuuauuc

SEQ ID NO: 1930602 - RNA, 19 nt, Artificial Sequence
  Description of Artificial Sequence: Synthetic oligonucleotide
  Sense strand starting at position 2989 of SEQ ID NO: 1879757
ucaggugugacucaguaca

SEQ ID NO: 1930603 - RNA, 19 nt, Artificial Sequence
  Description of Artificial Sequence: Synthetic oligonucleotide
  Antisense strand to SEQ ID NO: 1930602
uguacugagucacaccuga

SEQ ID NO: 1930604 - RNA, 19 nt, Artificial Sequence
  Description of Artificial Sequence: Synthetic oligonucleotide
  Sense strand starting at position 2991 of SEQ ID NO: 1879757
aggugugacucaguacauu

SEQ ID NO: 1930605 - RNA, 19 nt, Artificial Sequence
  Description of Artificial Sequence: Synthetic oligonucleotide
  Antisense strand to SEQ ID NO: 1930604
aauguacugagucacaccu

SEQ ID NO: 1930606 - RNA, 19 nt, Artificial Sequence
  Description of Artificial Sequence: Synthetic oligonucleotide
  Sense strand starting at position 3081 of SEQ ID NO: 1879757
ugucuuacagcuugaguac

SEQ ID NO: 1930607 - RNA, 19 nt, Artificial Sequence
  Description of Artificial Sequence: Synthetic oligonucleotide
  Antisense strand to SEQ ID NO: 1930606
guacucaagcuguaagaca

SEQ ID NO: 1930608 - RNA, 19 nt, Artificial Sequence
  Description of Artificial Sequence: Synthetic oligonucleotide
  Sense strand starting at position 3275 of SEQ ID NO: 1879757
uuuaaugaacauugguagu

SEQ ID NO: 1930609 - RNA, 19 nt, Artificial Sequence
  Description of Artificial Sequence: Synthetic oligonucleotide
  Antisense strand to SEQ ID NO: 1930608
acuaccaauguucauuaaa

SEQ ID NO: 1930610 - RNA, 19 nt, Artificial Sequence
  Description of Artificial Sequence: Synthetic oligonucleotide
  Sense strand starting at position 3288 of SEQ ID NO: 1879757
gguaguagcuagucaguau

SEQ ID NO: 1930611 - RNA, 19 nt, Artificial Sequence
  Description of Artificial Sequence: Synthetic oligonucleotide
  Antisense strand to SEQ ID NO: 1930610
auacugacuagcuacuacc

SEQ ID NO: 1930612 - RNA, 19 nt, Artificial Sequence
  Description of Artificial Sequence: Synthetic oligonucleotide
  Sense strand starting at position 3289 of SEQ ID NO: 1879757
guaguagcuagucaguauu

SEQ ID NO: 1930613 - RNA, 19 nt, Artificial Sequence
  Description of Artificial Sequence: Synthetic oligonucleotide
  Antisense strand to SEQ ID NO: 1930612
aauacugacuagcuacuac

SEQ ID NO: 1930614 - RNA, 19 nt, Artificial Sequence
  Description of Artificial Sequence: Synthetic oligonucleotide
  Sense strand starting at position 3338 of SEQ ID NO: 1879757
aagagagacucccucaguu

SEQ ID NO: 1930615 - RNA, 19 nt, Artificial Sequence
  Description of Artificial Sequence: Synthetic oligonucleotide
  Antisense strand to SEQ ID NO: 1930614
aacugagggagucucucuu

SEQ ID NO: 1930616 - RNA, 19 nt, Artificial Sequence
  Description of Artificial Sequence: Synthetic oligonucleotide
  Sense strand starting at position 3342 of SEQ ID NO: 1879757
gagacucccucaguuugaa

SEQ ID NO: 1930617 - RNA, 19 nt, Artificial Sequence
  Description of Artificial Sequence: Synthetic oligonucleotide
  Antisense strand to SEQ ID NO: 1930616
uucaaacugagggagucuc

SEQ ID NO: 1930618 - RNA, 19 nt, Artificial Sequence
  Description of Artificial Sequence: Synthetic oligonucleotide
  Sense strand starting at position 3762 of SEQ ID NO: 1879757
guagauuucuaagguuccu

SEQ ID NO: 1930619 - RNA, 19 nt, Artificial Sequence
  Description of Artificial Sequence: Synthetic oligonucleotide
  Antisense strand to SEQ ID NO: 1930618
aggaaccuuagaaaucuac

SEQ ID NO: 1930620 - RNA, 19 nt, Artificial Sequence
  Description of Artificial Sequence: Synthetic oligonucleotide
  Sense strand starting at position 3792 of SEQ ID NO: 1879757
cuggcuccugaauagaauu

SEQ ID NO: 1930621 - RNA, 19 nt, Artificial Sequence
  Description of Artificial Sequence: Synthetic oligonucleotide
  Antisense strand to SEQ ID NO: 1930620
aauucuauucaggagccag

SEQ ID NO: 1930622 - RNA, 19 nt, Artificial Sequence
  Description of Artificial Sequence: Synthetic oligonucleotide
  Sense strand starting at position 3860 of SEQ ID NO: 1879757
ccacaagccuggcugaauu

SEQ ID NO: 1930623 - RNA, 19 nt, Artificial Sequence
  Description of Artificial Sequence: Synthetic oligonucleotide
  Antisense strand to SEQ ID NO: 1930622
aauucagccaggcuugugg

SEQ ID NO: 1930624 - RNA, 19 nt, Artificial Sequence
  Description of Artificial Sequence: Synthetic oligonucleotide
  Sense strand starting at position 155 of SEQ ID NO: 1879758
uuauuuaguugucugaagu

SEQ ID NO: 1930625 - RNA, 19 nt, Artificial Sequence
  Description of Artificial Sequence: Synthetic oligonucleotide
  Antisense strand to SEQ ID NO: 1930624
acuucagacaacuaaauaa

SEQ ID NO: 1930626 - RNA, 19 nt, Artificial Sequence
  Description of Artificial Sequence: Synthetic oligonucleotide
  Sense strand starting at position 304 of SEQ ID NO: 1879758
aggaaauaguaugccuaau

SEQ ID NO: 1930627 - RNA, 19 nt, Artificial Sequence
  Description of Artificial Sequence: Synthetic oligonucleotide
  Antisense strand to SEQ ID NO: 1930626
auuaggcauacuauuuccu

SEQ ID NO: 1930628 - RNA, 19 nt, Artificial Sequence
  Description of Artificial Sequence: Synthetic oligonucleotide
  Sense strand starting at position 532 of SEQ ID NO: 1879758
augagagaguucuugguca

SEQ ID NO: 1930629 - RNA, 19 nt, Artificial Sequence
  Description of Artificial Sequence: Synthetic oligonucleotide
  Antisense strand to SEQ ID NO: 1930628
ugaccaagaacucucucau

SEQ ID NO: 1930630 - RNA, 19 nt, Artificial Sequence
  Description of Artificial Sequence: Synthetic oligonucleotide
  Sense strand starting at position 534 of SEQ ID NO: 1879758
gagagaguucuuggucauu

SEQ ID NO: 1930631 - RNA, 19 nt, Artificial Sequence
  Description of Artificial Sequence: Synthetic oligonucleotide
  Antisense strand to SEQ ID NO: 1930630
aaugaccaagaacucucuc

SEQ ID NO: 1930632 - RNA, 19 nt, Artificial Sequence
  Description of Artificial Sequence: Synthetic oligonucleotide
  Sense strand starting at position 643 of SEQ ID NO: 1879758
uuaaguggaagugguaaau

SEQ ID NO: 1930633 - RNA, 19 nt, Artificial Sequence
  Description of Artificial Sequence: Synthetic oligonucleotide
  Antisense strand to SEQ ID NO: 1930632
auuuaccacuuccacuuaa

SEQ ID NO: 1930634 - RNA, 19 nt, Artificial Sequence
  Description of Artificial Sequence: Synthetic oligonucleotide
  Sense strand starting at position 882 of SEQ ID NO: 1879758
aaggaaugguggccuuaau

SEQ ID NO: 1930635 - RNA, 19 nt, Artificial Sequence
  Description of Artificial Sequence: Synthetic oligonucleotide
  Antisense strand to SEQ ID NO: 1930634
auuaaggccaccauuccuu

SEQ ID NO: 1930636 - RNA, 19 nt, Artificial Sequence
  Description of Artificial Sequence: Synthetic oligonucleotide
  Sense strand starting at position 967 of SEQ ID NO: 1879758
ugugaaaugcgacaucaua

SEQ ID NO: 1930637 - RNA, 19 nt, Artificial Sequence
  Description of Artificial Sequence: Synthetic oligonucleotide
  Antisense strand to SEQ ID NO: 1930636
uaugaugucgcauuucaca

SEQ ID NO: 1930638 - RNA, 19 nt, Artificial Sequence
  Description of Artificial Sequence: Synthetic oligonucleotide
  Sense strand starting at position 1000 of SEQ ID NO: 1879758
aagguccuuguagauuauu

SEQ ID NO: 1930639 - RNA, 19 nt, Artificial Sequence
  Description of Artificial Sequence: Synthetic oligonucleotide
  Antisense strand to SEQ ID NO: 1930638
aauaaucuacaaggaccuu

SEQ ID NO: 1930640 - RNA, 19 nt, Artificial Sequence
  Description of Artificial Sequence: Synthetic oligonucleotide
  Sense strand starting at position 1168 of SEQ ID NO: 1879758
acaauuacuugugcgaaau

SEQ ID NO: 1930641 - RNA, 19 nt, Artificial Sequence
  Description of Artificial Sequence: Synthetic oligonucleotide
  Antisense strand to SEQ ID NO: 1930640
auuucgcacaaguaauugu

SEQ ID NO: 1930642 - RNA, 19 nt, Artificial Sequence
  Description of Artificial Sequence: Synthetic oligonucleotide
  Sense strand starting at position 1174 of SEQ ID NO: 1879758
acuugugcgaaaucgcuuu

SEQ ID NO: 1930643 - RNA, 19 nt, Artificial Sequence
  Description of Artificial Sequence: Synthetic oligonucleotide
  Antisense strand to SEQ ID NO: 1930642
aaagcgauuucgcacaagu

SEQ ID NO: 1930644 - RNA, 19 nt, Artificial Sequence
  Description of Artificial Sequence: Synthetic oligonucleotide
  Sense strand starting at position 1267 of SEQ ID NO: 1879758
cgguguugucguccacuuu

SEQ ID NO: 1930645 - RNA, 19 nt, Artificial Sequence
  Description of Artificial Sequence: Synthetic oligonucleotide
  Antisense strand to SEQ ID NO: 1930644
aaaguggacgacaacaccg

SEQ ID NO: 1930646 - RNA, 19 nt, Artificial Sequence
  Description of Artificial Sequence: Synthetic oligonucleotide
  Sense strand starting at position 1402 of SEQ ID NO: 1879758
ccugguaaacgguaaacau

SEQ ID NO: 1930647 - RNA, 19 nt, Artificial Sequence
  Description of Artificial Sequence: Synthetic oligonucleotide
  Antisense strand to SEQ ID NO: 1930646
auguuuaccguuuaccagg

SEQ ID NO: 1930648 - RNA, 19 nt, Artificial Sequence
  Description of Artificial Sequence: Synthetic oligonucleotide
  Sense strand starting at position 1423 of SEQ ID NO: 1879758
uugugucuugaguaaacau

SEQ ID NO: 1930649 - RNA, 19 nt, Artificial Sequence
  Description of Artificial Sequence: Synthetic oligonucleotide
  Antisense strand to SEQ ID NO: 1930648
auguuuacucaagacacaa

SEQ ID NO: 1930650 - RNA, 19 nt, Artificial Sequence
  Description of Artificial Sequence: Synthetic oligonucleotide
  Sense strand starting at position 1433 of SEQ ID NO: 1879758
aguaaacauuccuucggga

SEQ ID NO: 1930651 - RNA, 19 nt, Artificial Sequence
  Description of Artificial Sequence: Synthetic oligonucleotide
  Antisense strand to SEQ ID NO: 1930650
ucccgaaggaauguuuacu

SEQ ID NO: 1930652 - RNA, 19 nt, Artificial Sequence
  Description of Artificial Sequence: Synthetic oligonucleotide
  Sense strand starting at position 1486 of SEQ ID NO: 1879758
gagauaguuuaacuugaua

SEQ ID NO: 1930653 - RNA, 19 nt, Artificial Sequence
  Description of Artificial Sequence: Synthetic oligonucleotide
  Antisense strand to SEQ ID NO: 1930652
uaucaaguuaaacuaucuc

SEQ ID NO: 1930654 - RNA, 19 nt, Artificial Sequence
  Description of Artificial Sequence: Synthetic oligonucleotide
  Sense strand starting at position 1641 of SEQ ID NO: 1879758
uuguguguugcagcuauaa

SEQ ID NO: 1930655 - RNA, 19 nt, Artificial Sequence
  Description of Artificial Sequence: Synthetic oligonucleotide
  Antisense strand to SEQ ID NO: 1930654
uuauagcugcaacacacaa

SEQ ID NO: 1930656 - RNA, 19 nt, Artificial Sequence
  Description of Artificial Sequence: Synthetic oligonucleotide
  Sense strand starting at position 1711 of SEQ ID NO: 1879758
cagcaaaugguacaugauu

SEQ ID NO: 1930657 - RNA, 19 nt, Artificial Sequence
  Description of Artificial Sequence: Synthetic oligonucleotide
  Antisense strand to SEQ ID NO: 1930656
aaucauguaccauuugcug

SEQ ID NO: 1930658 - RNA, 19 nt, Artificial Sequence
  Description of Artificial Sequence: Synthetic oligonucleotide
  Sense strand starting at position 1881 of SEQ ID NO: 1879758
ccugauccuuuguuacuua

SEQ ID NO: 1930659 - RNA, 19 nt, Artificial Sequence
  Description of Artificial Sequence: Synthetic oligonucleotide
  Antisense strand to SEQ ID NO: 1930658
uaaguaacaaaggaucagg

SEQ ID NO: 1930660 - RNA, 19 nt, Artificial Sequence
  Description of Artificial Sequence: Synthetic oligonucleotide
  Sense strand starting at position 1912 of SEQ ID NO: 1879758
cucauauuuccgcgcauag

SEQ ID NO: 1930661 - RNA, 19 nt, Artificial Sequence
  Description of Artificial Sequence: Synthetic oligonucleotide
  Antisense strand to SEQ ID NO: 1930660
cuaugcgcggaaauaugag

SEQ ID NO: 1930662 - RNA, 19 nt, Artificial Sequence
  Description of Artificial Sequence: Synthetic oligonucleotide
  Sense strand starting at position 1914 of SEQ ID NO: 1879758
cauauuuccgcgcauagca

SEQ ID NO: 1930663 - RNA, 19 nt, Artificial Sequence
  Description of Artificial Sequence: Synthetic oligonucleotide
  Antisense strand to SEQ ID NO: 1930662
ugcuaugcgcggaaauaug

SEQ ID NO: 1930664 - RNA, 19 nt, Artificial Sequence
  Description of Artificial Sequence: Synthetic oligonucleotide
  Sense strand starting at position 2074 of SEQ ID NO: 1879758
aguucuuacccuugaacga

SEQ ID NO: 1930665 - RNA, 19 nt, Artificial Sequence
  Description of Artificial Sequence: Synthetic oligonucleotide
  Antisense strand to SEQ ID NO: 1930664
ucguucaaggguaagaacu

SEQ ID NO: 1930666 - RNA, 19 nt, Artificial Sequence
  Description of Artificial Sequence: Synthetic oligonucleotide
  Sense strand starting at position 2161 of SEQ ID NO: 1879758
cugccagcgguuguuuaaa

SEQ ID NO: 1930667 - RNA, 19 nt, Artificial Sequence
  Description of Artificial Sequence: Synthetic oligonucleotide
  Antisense strand to SEQ ID NO: 1930666
uuuaaacaaccgcuggcag

SEQ ID NO: 1930668 - RNA, 19 nt, Artificial Sequence
  Description of Artificial Sequence: Synthetic oligonucleotide
  Sense strand starting at position 2336 of SEQ ID NO: 1879758
cugaaacccuuguuugaug

SEQ ID NO: 1930669 - RNA, 19 nt, Artificial Sequence
  Description of Artificial Sequence: Synthetic oligonucleotide
  Antisense strand to SEQ ID NO: 1930668
caucaaacaaggguuucag

SEQ ID NO: 1930670 - RNA, 19 nt, Artificial Sequence
  Description of Artificial Sequence: Synthetic oligonucleotide
  Sense strand starting at position 2338 of SEQ ID NO: 1879758
gaaacccuuguuugauguu

SEQ ID NO: 1930671 - RNA, 19 nt, Artificial Sequence
  Description of Artificial Sequence: Synthetic oligonucleotide
  Antisense strand to SEQ ID NO: 1930670
aacaucaaacaaggguuuc

SEQ ID NO: 1930672 - RNA, 19 nt, Artificial Sequence
  Description of Artificial Sequence: Synthetic oligonucleotide
  Sense strand starting at position 2626 of SEQ ID NO: 1879758
gagcguucucaggaccaag

SEQ ID NO: 1930673 - RNA, 19 nt, Artificial Sequence
  Description of Artificial Sequence: Synthetic oligonucleotide
  Antisense strand to SEQ ID NO: 1930672
cuugguccugagaacgcuc

SEQ ID NO: 1930674 - RNA, 19 nt, Artificial Sequence
  Description of Artificial Sequence: Synthetic oligonucleotide
  Sense strand starting at position 2913 of SEQ ID NO: 1879758
gucgaaucucgagaagcug

SEQ ID NO: 1930675 - RNA, 19 nt, Artificial Sequence
  Description of Artificial Sequence: Synthetic oligonucleotide
  Antisense strand to SEQ ID NO: 1930674
cagcuucucgagauucgac

SEQ ID NO: 1930676 - RNA, 19 nt, Artificial Sequence
  Description of Artificial Sequence: Synthetic oligonucleotide
  Sense strand starting at position 3050 of SEQ ID NO: 1879758
agaguuauauuugagguua

SEQ ID NO: 1930677 - RNA, 19 nt, Artificial Sequence
  Description of Artificial Sequence: Synthetic oligonucleotide
  Antisense strand to SEQ ID NO: 1930676
uaaccucaaauauaacucu

SEQ ID NO: 1930678 - RNA, 19 nt, Artificial Sequence
  Description of Artificial Sequence: Synthetic oligonucleotide
  Sense strand starting at position 3081 of SEQ ID NO: 1879758
gguuuauagggugagucuu

SEQ ID NO: 1930679 - RNA, 19 nt, Artificial Sequence
  Description of Artificial Sequence: Synthetic oligonucleotide
  Antisense strand to SEQ ID NO: 1930678
aagacucacccuauaaacc

SEQ ID NO: 1930680 - RNA, 19 nt, Artificial Sequence
  Description of Artificial Sequence: Synthetic oligonucleotide
  Sense strand starting at position 3094 of SEQ ID NO: 1879758
agucuugguagugagaaca

SEQ ID NO: 1930681 - RNA, 19 nt, Artificial Sequence
  Description of Artificial Sequence: Synthetic oligonucleotide
  Antisense strand to SEQ ID NO: 1930680
uguucucacuaccaagacu

SEQ ID NO: 1930682 - RNA, 19 nt, Artificial Sequence
  Description of Artificial Sequence: Synthetic oligonucleotide
  Sense strand starting at position 3120 of SEQ ID NO: 1879758
cugacaugagugugugaga

SEQ ID NO: 1930683 - RNA, 19 nt, Artificial Sequence
  Description of Artificial Sequence: Synthetic oligonucleotide
  Antisense strand to SEQ ID NO: 1930682
ucucacacacucaugucag

SEQ ID NO: 1930684 - RNA, 19 nt, Artificial Sequence
  Description of Artificial Sequence: Synthetic oligonucleotide
  Sense strand starting at position 3131 of SEQ ID NO: 1879758
gugugagagguggguauuu

SEQ ID NO: 1930685 - RNA, 19 nt, Artificial Sequence
  Description of Artificial Sequence: Synthetic oligonucleotide
  Antisense strand to SEQ ID NO: 1930684
aaauacccaccucucacac

SEQ ID NO: 1930686 - RNA, 19 nt, Artificial Sequence
  Description of Artificial Sequence: Synthetic oligonucleotide
  Sense strand starting at position 3151 of SEQ ID NO: 1879758
uaacgugagucccuugaga

SEQ ID NO: 1930687 - RNA, 19 nt, Artificial Sequence
  Description of Artificial Sequence: Synthetic oligonucleotide
  Antisense strand to SEQ ID NO: 1930686
ucucaagggacucacguua

SEQ ID NO: 1930688 - RNA, 19 nt, Artificial Sequence
  Description of Artificial Sequence: Synthetic oligonucleotide
  Sense strand starting at position 3153 of SEQ ID NO: 1879758
acgugagucccuugagaaa

SEQ ID NO: 1930689 - RNA, 19 nt, Artificial Sequence
  Description of Artificial Sequence: Synthetic oligonucleotide
  Antisense strand to SEQ ID NO: 1930688
uuucucaagggacucacgu

SEQ ID NO: 1930690 - RNA, 19 nt, Artificial Sequence
  Description of Artificial Sequence: Synthetic oligonucleotide
  Sense strand starting at position 3182 of SEQ ID NO: 1879758
ggguaugugaucugaaaga

SEQ ID NO: 1930691 - RNA, 19 nt, Artificial Sequence
  Description of Artificial Sequence: Synthetic oligonucleotide
  Antisense strand to SEQ ID NO: 1930690
ucuuucagaucacauaccc

SEQ ID NO: 1930692 - RNA, 19 nt, Artificial Sequence
  Description of Artificial Sequence: Synthetic oligonucleotide
  Sense strand starting at position 3251 of SEQ ID NO: 1879758
guacaagcugcagaauaaa

SEQ ID NO: 1930693 - RNA, 19 nt, Artificial Sequence
  Description of Artificial Sequence: Synthetic oligonucleotide
  Antisense strand to SEQ ID NO: 1930692
uuuauucugcagcuuguac

SEQ ID NO: 1930694 - RNA, 19 nt, Artificial Sequence
  Description of Artificial Sequence: Synthetic oligonucleotide
  Sense strand starting at position 3510 of SEQ ID NO: 1879758
uacagaauuaggugaguug

SEQ ID NO: 1930695 - RNA, 19 nt, Artificial Sequence
  Description of Artificial Sequence: Synthetic oligonucleotide
  Antisense strand to SEQ ID NO: 1930694
caacucaccuaauucugua

SEQ ID NO: 1930696 - RNA, 19 nt, Artificial Sequence
  Description of Artificial Sequence: Synthetic oligonucleotide
  Sense strand starting at position 3592 of SEQ ID NO: 1879758
uggcuucugcacgaagaaa

SEQ ID NO: 1930697 - RNA, 19 nt, Artificial Sequence
  Description of Artificial Sequence: Synthetic oligonucleotide
  Antisense strand to SEQ ID NO: 1930696
uuucuucgugcagaagcca

SEQ ID NO: 1930698 - RNA, 19 nt, Artificial Sequence
  Description of Artificial Sequence: Synthetic oligonucleotide
  Sense strand starting at position 3674 of SEQ ID NO: 1879758
uuagguaugaaagguggau

SEQ ID NO: 1930699 - RNA, 19 nt, Artificial Sequence
  Description of Artificial Sequence: Synthetic oligonucleotide
  Antisense strand to SEQ ID NO: 1930698
auccaccuuucauaccuaa

SEQ ID NO: 1930700 - RNA, 19 nt, Artificial Sequence
  Description of Artificial Sequence: Synthetic oligonucleotide
  Sense strand starting at position 3907 of SEQ ID NO: 1879758
cuaugcuuccacuauccga

SEQ ID NO: 1930701 - RNA, 19 nt, Artificial Sequence
  Description of Artificial Sequence: Synthetic oligonucleotide
  Antisense strand to SEQ ID NO: 1930700
ucggauaguggaagcauag

SEQ ID NO: 1930702 - RNA, 19 nt, Artificial Sequence
  Description of Artificial Sequence: Synthetic oligonucleotide
  Sense strand starting at position 3961 of SEQ ID NO: 1879758
cucccauuagugcaagaug

SEQ ID NO: 1930703 - RNA, 19 nt, Artificial Sequence
  Description of Artificial Sequence: Synthetic oligonucleotide
  Antisense strand to SEQ ID NO: 1930702
caucuugcacuaaugggag

SEQ ID NO: 1930704 - RNA, 19 nt, Artificial Sequence
  Description of Artificial Sequence: Synthetic oligonucleotide
  Sense strand starting at position 143 of SEQ ID NO: 1879759
ugaggucaaggaugaguua

SEQ ID NO: 1930705 - RNA, 19 nt, Artificial Sequence
  Description of Artificial Sequence: Synthetic oligonucleotide
  Antisense strand to SEQ ID NO: 1930704
uaacucauccuugaccuca

SEQ ID NO: 1930706 - RNA, 19 nt, Artificial Sequence
  Description of Artificial Sequence: Synthetic oligonucleotide
  Sense strand starting at position 150 of SEQ ID NO: 1879759
aaggaugaguuagcaaaua

SEQ ID NO: 1930707 - RNA, 19 nt, Artificial Sequence
  Description of Artificial Sequence: Synthetic oligonucleotide
  Antisense strand to SEQ ID NO: 1930706
uauuugcuaacucauccuu

SEQ ID NO: 1930708 - RNA, 19 nt, Artificial Sequence
  Description of Artificial Sequence: Synthetic oligonucleotide
  Sense strand starting at position 155 of SEQ ID NO: 1879759
ugaguuagcaaauagugaa

SEQ ID NO: 1930709 - RNA, 19 nt, Artificial Sequence
  Description of Artificial Sequence: Synthetic oligonucleotide
  Antisense strand to SEQ ID NO: 1930708
uucacuauuugcuaacuca

SEQ ID NO: 1930710 - RNA, 19 nt, Artificial Sequence
  Description of Artificial Sequence: Synthetic oligonucleotide
  Sense strand starting at position 218 of SEQ ID NO: 1879759
ggaguuugggcauaccuga

SEQ ID NO: 1930711 - RNA, 19 nt, Artificial Sequence
  Description of Artificial Sequence: Synthetic oligonucleotide
  Antisense strand to SEQ ID NO: 1930710
ucagguaugcccaaacucc

SEQ ID NO: 1930712 - RNA, 19 nt, Artificial Sequence
  Description of Artificial Sequence: Synthetic oligonucleotide
  Sense strand starting at position 360 of SEQ ID NO: 1879759
aucaaauauuggucucaga

SEQ ID NO: 1930713 - RNA, 19 nt, Artificial Sequence
  Description of Artificial Sequence: Synthetic oligonucleotide
  Antisense strand to SEQ ID NO: 1930712
ucugagaccaauauuugau

SEQ ID NO: 1930714 - RNA, 19 nt, Artificial Sequence
  Description of Artificial Sequence: Synthetic oligonucleotide
  Sense strand starting at position 814 of SEQ ID NO: 1879759
agcaauaaggucuggagau

SEQ ID NO: 1930715 - RNA, 19 nt, Artificial Sequence
  Description of Artificial Sequence: Synthetic oligonucleotide
  Antisense strand to SEQ ID NO: 1930714
aucuccagaccuuauugcu

SEQ ID NO: 1930716 - RNA, 19 nt, Artificial Sequence
  Description of Artificial Sequence: Synthetic oligonucleotide
  Sense strand starting at position 1038 of SEQ ID NO: 1879759
ugagaagccucuuuacuuu

SEQ ID NO: 1930717 - RNA, 19 nt, Artificial Sequence
  Description of Artificial Sequence: Synthetic oligonucleotide
  Antisense strand to SEQ ID NO: 1930716
aaaguaaagaggcuucuca

SEQ ID NO: 1930718 - RNA, 19 nt, Artificial Sequence
  Description of Artificial Sequence: Synthetic oligonucleotide
  Sense strand starting at position 1060 of SEQ ID NO: 1879759
aaauaugguuucucuguga

SEQ ID NO: 1930719 - RNA, 19 nt, Artificial Sequence
  Description of Artificial Sequence: Synthetic oligonucleotide
  Antisense strand to SEQ ID NO: 1930718
ucacagagaaaccauauuu

SEQ ID NO: 1930720 - RNA, 19 nt, Artificial Sequence
  Description of Artificial Sequence: Synthetic oligonucleotide
  Sense strand starting at position 1063 of SEQ ID NO: 1879759
uaugguuucucugugacau

SEQ ID NO: 1930721 - RNA, 19 nt, Artificial Sequence
  Description of Artificial Sequence: Synthetic oligonucleotide
  Antisense strand to SEQ ID NO: 1930720
augucacagagaaaccaua

SEQ ID NO: 1930722 - RNA, 19 nt, Artificial Sequence
  Description of Artificial Sequence: Synthetic oligonucleotide
  Sense strand starting at position 1064 of SEQ ID NO: 1879759
augguuucucugugacauu

SEQ ID NO: 1930723 - RNA, 19 nt, Artificial Sequence
  Description of Artificial Sequence: Synthetic oligonucleotide
  Antisense strand to SEQ ID NO: 1930722
aaugucacagagaaaccau

SEQ ID NO: 1930724 - RNA, 19 nt, Artificial Sequence
  Description of Artificial Sequence: Synthetic oligonucleotide
  Sense strand starting at position 1101 of SEQ ID NO: 1879759
agcggaaugcuacauuaca

SEQ ID NO: 1930725 - RNA, 19 nt, Artificial Sequence
  Description of Artificial Sequence: Synthetic oligonucleotide
  Antisense strand to SEQ ID NO: 1930724
uguaauguagcauuccgcu

SEQ ID NO: 1930726 - RNA, 19 nt, Artificial Sequence
  Description of Artificial Sequence: Synthetic oligonucleotide
  Sense strand starting at position 1109 of SEQ ID NO: 1879759
gcuacauuacaaggauaag

SEQ ID NO: 1930727 - RNA, 19 nt, Artificial Sequence
  Description of Artificial Sequence: Synthetic oligonucleotide
  Antisense strand to SEQ ID NO: 1930726
cuuauccuuguaauguagc

SEQ ID NO: 1930728 - RNA, 19 nt, Artificial Sequence
  Description of Artificial Sequence: Synthetic oligonucleotide
  Sense strand starting at position 1478 of SEQ ID NO: 1879759
gaaggaguucccgagccuu

SEQ ID NO: 1930729 - RNA, 19 nt, Artificial Sequence
  Description of Artificial Sequence: Synthetic oligonucleotide
  Antisense strand to SEQ ID NO: 1930728
aaggcucgggaacuccuuc

SEQ ID NO: 1930730 - RNA, 19 nt, Artificial Sequence
  Description of Artificial Sequence: Synthetic oligonucleotide
  Sense strand starting at position 1739 of SEQ ID NO: 1879759
gggaaacucgauugcauaa

SEQ ID NO: 1930731 - RNA, 19 nt, Artificial Sequence
  Description of Artificial Sequence: Synthetic oligonucleotide
  Antisense strand to SEQ ID NO: 1930730
uuaugcaaucgaguuuccc

SEQ ID NO: 1930732 - RNA, 19 nt, Artificial Sequence
  Description of Artificial Sequence: Synthetic oligonucleotide
  Sense strand starting at position 1809 of SEQ ID NO: 1879759
aagaauacgcuguacucua

SEQ ID NO: 1930733 - RNA, 19 nt, Artificial Sequence
  Description of Artificial Sequence: Synthetic oligonucleotide
  Antisense strand to SEQ ID NO: 1930732
uagaguacagcguauucuu

SEQ ID NO: 1930734 - RNA, 19 nt, Artificial Sequence
  Description of Artificial Sequence: Synthetic oligonucleotide
  Sense strand starting at position 1854 of SEQ ID NO: 1879759
ugugucuuggacguguuau

SEQ ID NO: 1930735 - RNA, 19 nt, Artificial Sequence
  Description of Artificial Sequence: Synthetic oligonucleotide
  Antisense strand to SEQ ID NO: 1930734
auaacacguccaagacaca

SEQ ID NO: 1930736 - RNA, 19 nt, Artificial Sequence
  Description of Artificial Sequence: Synthetic oligonucleotide
  Sense strand starting at position 1879 of SEQ ID NO: 1879759
aguggaaggcugggaaaua

SEQ ID NO: 1930737 - RNA, 19 nt, Artificial Sequence
  Description of Artificial Sequence: Synthetic oligonucleotide
  Antisense strand to SEQ ID NO: 1930736
uauuucccagccuuccacu

SEQ ID NO: 1930738 - RNA, 19 nt, Artificial Sequence
  Description of Artificial Sequence: Synthetic oligonucleotide
  Sense strand starting at position 2013 of SEQ ID NO: 1879759
cagagauugguccaugguc

SEQ ID NO: 1930739 - RNA, 19 nt, Artificial Sequence
  Description of Artificial Sequence: Synthetic oligonucleotide
  Antisense strand to SEQ ID NO: 1930738
gaccauggaccaaucucug

SEQ ID NO: 1930740 - RNA, 19 nt, Artificial Sequence
  Description of Artificial Sequence: Synthetic oligonucleotide
  Sense strand starting at position 2015 of SEQ ID NO: 1879759
gagauugguccauggucuc

SEQ ID NO: 1930741 - RNA, 19 nt, Artificial Sequence
  Description of Artificial Sequence: Synthetic oligonucleotide
  Antisense strand to SEQ ID NO: 1930740
gagaccauggaccaaucuc

SEQ ID NO: 1930742 - RNA, 19 nt, Artificial Sequence
  Description of Artificial Sequence: Synthetic oligonucleotide
  Sense strand starting at position 2366 of SEQ ID NO: 1879759
uuacuugucuuggcugaaa

SEQ ID NO: 1930743 - RNA, 19 nt, Artificial Sequence
  Description of Artificial Sequence: Synthetic oligonucleotide
  Antisense strand to SEQ ID NO: 1930742
uuucagccaagacaaguaa

SEQ ID NO: 1930744 - RNA, 19 nt, Artificial Sequence
  Description of Artificial Sequence: Synthetic oligonucleotide
  Sense strand starting at position 2368 of SEQ ID NO: 1879759
acuugucuuggcugaaaug

SEQ ID NO: 1930745 - RNA, 19 nt, Artificial Sequence
  Description of Artificial Sequence: Synthetic oligonucleotide
  Antisense strand to SEQ ID NO: 1930744
cauuucagccaagacaagu

SEQ ID NO: 1930746 - RNA, 19 nt, Artificial Sequence
  Description of Artificial Sequence: Synthetic oligonucleotide
  Sense strand starting at position 2377 of SEQ ID NO: 1879759
ggcugaaaugcgcugcgau

SEQ ID NO: 1930747 - RNA, 19 nt, Artificial Sequence
  Description of Artificial Sequence: Synthetic oligonucleotide
  Antisense strand to SEQ ID NO: 1930746
aucgcagcgcauuucagcc

SEQ ID NO: 1930748 - RNA, 19 nt, Artificial Sequence
  Description of Artificial Sequence: Synthetic oligonucleotide
  Sense strand starting at position 2435 of SEQ ID NO: 1879759
ggguccaguuucccuauua

SEQ ID NO: 1930749 - RNA, 19 nt, Artificial Sequence
  Description of Artificial Sequence: Synthetic oligonucleotide
  Antisense strand to SEQ ID NO: 1930748
uaauagggaaacuggaccc

SEQ ID NO: 1930750 - RNA, 19 nt, Artificial Sequence
  Description of Artificial Sequence: Synthetic oligonucleotide
  Sense strand starting at position 2501 of SEQ ID NO: 1879759
gacaacuucuuguuugaug

SEQ ID NO: 1930751 - RNA, 19 nt, Artificial Sequence
  Description of Artificial Sequence: Synthetic oligonucleotide
  Antisense strand to SEQ ID NO: 1930750
caucaaacaagaaguuguc

SEQ ID NO: 1930752 - RNA, 19 nt, Artificial Sequence
  Description of Artificial Sequence: Synthetic oligonucleotide
  Sense strand starting at position 2502 of SEQ ID NO: 1879759
acaacuucuuguuugaugu

SEQ ID NO: 1930753 - RNA, 19 nt, Artificial Sequence
  Description of Artificial Sequence: Synthetic oligonucleotide
  Antisense strand to SEQ ID NO: 1930752
acaucaaacaagaaguugu

SEQ ID NO: 1930754 - RNA, 19 nt, Artificial Sequence
  Description of Artificial Sequence: Synthetic oligonucleotide
  Sense strand starting at position 2792 of SEQ ID NO: 1879759
agaaguaucuaauuggucu

SEQ ID NO: 1930755 - RNA, 19 nt, Artificial Sequence
  Description of Artificial Sequence: Synthetic oligonucleotide
  Antisense strand to SEQ ID NO: 1930754
agaccaauuagauacuucu

SEQ ID NO: 1930756 - RNA, 19 nt, Artificial Sequence
  Description of Artificial Sequence: Synthetic oligonucleotide
  Sense strand starting at position 2815 of SEQ ID NO: 1879759
ccugcauugcaugaauacu

SEQ ID NO: 1930757 - RNA, 19 nt, Artificial Sequence
  Description of Artificial Sequence: Synthetic oligonucleotide
  Antisense strand to SEQ ID NO: 1930756
aguauucaugcaaugcagg

SEQ ID NO: 1930758 - RNA, 19 nt, Artificial Sequence
  Description of Artificial Sequence: Synthetic oligonucleotide
  Sense strand starting at position 2893 of SEQ ID NO: 1879759
agcauuucccaggguaugu

SEQ ID NO: 1930759 - RNA, 19 nt, Artificial Sequence
  Description of Artificial Sequence: Synthetic oligonucleotide
  Antisense strand to SEQ ID NO: 1930758
acauacccugggaaaugcu

SEQ ID NO: 1930760 - RNA, 19 nt, Artificial Sequence
  Description of Artificial Sequence: Synthetic oligonucleotide
  Sense strand starting at position 3254 of SEQ ID NO: 1879759
aguagaauccugcauccaa

SEQ ID NO: 1930761 - RNA, 19 nt, Artificial Sequence
  Description of Artificial Sequence: Synthetic oligonucleotide
  Antisense strand to SEQ ID NO: 1930760
uuggaugcaggauucuacu

SEQ ID NO: 1930762 - RNA, 19 nt, Artificial Sequence
  Description of Artificial Sequence: Synthetic oligonucleotide
  Sense strand starting at position 3299 of SEQ ID NO: 1879759
acugaauuauuggcucaug

SEQ ID NO: 1930763 - RNA, 19 nt, Artificial Sequence
  Description of Artificial Sequence: Synthetic oligonucleotide
  Antisense strand to SEQ ID NO: 1930762
caugagccaauaauucagu

SEQ ID NO: 1930764 - RNA, 19 nt, Artificial Sequence
  Description of Artificial Sequence: Synthetic oligonucleotide
  Sense strand starting at position 3300 of SEQ ID NO: 1879759
cugaauuauuggcucaugu

SEQ ID NO: 1930765 - RNA, 19 nt, Artificial Sequence
  Description of Artificial Sequence: Synthetic oligonucleotide
  Antisense strand to SEQ ID NO: 1930764
acaugagccaauaauucag

SEQ ID NO: 1930766 - RNA, 19 nt, Artificial Sequence
  Description of Artificial Sequence: Synthetic oligonucleotide
  Sense strand starting at position 3302 of SEQ ID NO: 1879759
gaauuauuggcucauguuc

SEQ ID NO: 1930767 - RNA, 19 nt, Artificial Sequence
  Description of Artificial Sequence: Synthetic oligonucleotide
  Antisense strand to SEQ ID NO: 1930766
gaacaugagccaauaauuc

SEQ ID NO: 1930768 - RNA, 19 nt, Artificial Sequence
  Description of Artificial Sequence: Synthetic oligonucleotide
  Sense strand starting at position 3311 of SEQ ID NO: 1879759
gcucauguuccgucuguuu

SEQ ID NO: 1930769 - RNA, 19 nt, Artificial Sequence
  Description of Artificial Sequence: Synthetic oligonucleotide
  Antisense strand to SEQ ID NO: 1930768
aaacagacggaacaugagc

SEQ ID NO: 1930770 - RNA, 19 nt, Artificial Sequence
  Description of Artificial Sequence: Synthetic oligonucleotide
  Sense strand starting at position 3415 of SEQ ID NO: 1879759
ucucauuauugugucauua

SEQ ID NO: 1930771 - RNA, 19 nt, Artificial Sequence
  Description of Artificial Sequence: Synthetic oligonucleotide
  Antisense strand to SEQ ID NO: 1930770
uaaugacacaauaaugaga

SEQ ID NO: 1930772 - RNA, 19 nt, Artificial Sequence
  Description of Artificial Sequence: Synthetic oligonucleotide
  Sense strand starting at position 3520 of SEQ ID NO: 1879759
uccaaucccuguuugguaa

SEQ ID NO: 1930773 - RNA, 19 nt, Artificial Sequence
  Description of Artificial Sequence: Synthetic oligonucleotide
  Antisense strand to SEQ ID NO: 1930772
uuaccaaacagggauugga

SEQ ID NO: 1930774 - RNA, 19 nt, Artificial Sequence
  Description of Artificial Sequence: Synthetic oligonucleotide
  Sense strand starting at position 3521 of SEQ ID NO: 1879759
ccaaucccuguuugguaau

SEQ ID NO: 1930775 - RNA, 19 nt, Artificial Sequence
  Description of Artificial Sequence: Synthetic oligonucleotide
  Antisense strand to SEQ ID NO: 1930774
auuaccaaacagggauugg

SEQ ID NO: 1930776 - RNA, 19 nt, Artificial Sequence
  Description of Artificial Sequence: Synthetic oligonucleotide
  Sense strand starting at position 3550 of SEQ ID NO: 1879759
uaaucugcucugugagacu

SEQ ID NO: 1930777 - RNA, 19 nt, Artificial Sequence
  Description of Artificial Sequence: Synthetic oligonucleotide
  Antisense strand to SEQ ID NO: 1930776
agucucacagagcagauua

SEQ ID NO: 1930778 - RNA, 19 nt, Artificial Sequence
  Description of Artificial Sequence: Synthetic oligonucleotide
  Sense strand starting at position 3682 of SEQ ID NO: 1879759
gggcccaauaguugucaau

SEQ ID NO: 1930779 - RNA, 19 nt, Artificial Sequence
  Description of Artificial Sequence: Synthetic oligonucleotide
  Antisense strand to SEQ ID NO: 1930778
auugacaacuauugggccc

SEQ ID NO: 1930780 - RNA, 19 nt, Artificial Sequence
  Description of Artificial Sequence: Synthetic oligonucleotide
  Sense strand starting at position 3776 of SEQ ID NO: 1879759
auaggaagucuuggcuuua

SEQ ID NO: 1930781 - RNA, 19 nt, Artificial Sequence
  Description of Artificial Sequence: Synthetic oligonucleotide
  Antisense strand to SEQ ID NO: 1930780
uaaagccaagacuuccuau

SEQ ID NO: 1930782 - RNA, 19 nt, Artificial Sequence
  Description of Artificial Sequence: Synthetic oligonucleotide
  Sense strand starting at position 3777 of SEQ ID NO: 1879759
uaggaagucuuggcuuuaa

SEQ ID NO: 1930783 - RNA, 19 nt, Artificial Sequence
  Description of Artificial Sequence: Synthetic oligonucleotide
  Antisense strand to SEQ ID NO: 1930782
uuaaagccaagacuuccua

SEQ ID NO: 1930784 - RNA, 19 nt, Artificial Sequence
  Description of Artificial Sequence: Synthetic oligonucleotide
  Sense strand starting at position 183 of SEQ ID NO: 1879760
ggaugacuguauguugaaa

SEQ ID NO: 1930785 - RNA, 19 nt, Artificial Sequence
  Description of Artificial Sequence: Synthetic oligonucleotide
  Antisense strand to SEQ ID NO: 1930784
uuucaacauacagucaucc

SEQ ID NO: 1930786 - RNA, 19 nt, Artificial Sequence
  Description of Artificial Sequence: Synthetic oligonucleotide
  Sense strand starting at position 302 of SEQ ID NO: 1879760
ggcucaguggcucaaacuu

SEQ ID NO: 1930787 - RNA, 19 nt, Artificial Sequence
  Description of Artificial Sequence: Synthetic oligonucleotide
  Antisense strand to SEQ ID NO: 1930786
aaguuugagccacugagcc

SEQ ID NO: 1930788 - RNA, 19 nt, Artificial Sequence
  Description of Artificial Sequence: Synthetic oligonucleotide
  Sense strand starting at position 655 of SEQ ID NO: 1879760
gucucucaugaaugacuua

SEQ ID NO: 1930789 - RNA, 19 nt, Artificial Sequence
  Description of Artificial Sequence: Synthetic oligonucleotide
  Antisense strand to SEQ ID NO: 1930788
uaagucauucaugagagac

SEQ ID NO: 1930790 - RNA, 19 nt, Artificial Sequence
  Description of Artificial Sequence: Synthetic oligonucleotide
  Sense strand starting at position 847 of SEQ ID NO: 1879760
gaggccuuccuagaaguga

SEQ ID NO: 1930791 - RNA, 19 nt, Artificial Sequence
  Description of Artificial Sequence: Synthetic oligonucleotide
  Antisense strand to SEQ ID NO: 1930790
ucacuucuaggaaggccuc

SEQ ID NO: 1930792 - RNA, 19 nt, Artificial Sequence
  Description of Artificial Sequence: Synthetic oligonucleotide
  Sense strand starting at position 887 of SEQ ID NO: 1879760
uccuguaaagccugaugaa

SEQ ID NO: 1930793 - RNA, 19 nt, Artificial Sequence
  Description of Artificial Sequence: Synthetic oligonucleotide
  Antisense strand to SEQ ID NO: 1930792
uucaucaggcuuuacagga

SEQ ID NO: 1930794 - RNA, 19 nt, Artificial Sequence
  Description of Artificial Sequence: Synthetic oligonucleotide
  Sense strand starting at position 888 of SEQ ID NO: 1879760
ccuguaaagccugaugaac

SEQ ID NO: 1930795 - RNA, 19 nt, Artificial Sequence
  Description of Artificial Sequence: Synthetic oligonucleotide
  Antisense strand to SEQ ID NO: 1930794
guucaucaggcuuuacagg

SEQ ID NO: 1930796 - RNA, 19 nt, Artificial Sequence
  Description of Artificial Sequence: Synthetic oligonucleotide
  Sense strand starting at position 1198 of SEQ ID NO: 1879760
uaaggacugagucguauag

SEQ ID NO: 1930797 - RNA, 19 nt, Artificial Sequence
  Description of Artificial Sequence: Synthetic oligonucleotide
  Antisense strand to SEQ ID NO: 1930796
cuauacgacucaguccuua

SEQ ID NO: 1930798 - RNA, 19 nt, Artificial Sequence
  Description of Artificial Sequence: Synthetic oligonucleotide
  Sense strand starting at position 1202 of SEQ ID NO: 1879760
gacugagucguauaggcuu

SEQ ID NO: 1930799 - RNA, 19 nt, Artificial Sequence
  Description of Artificial Sequence: Synthetic oligonucleotide
  Antisense strand to SEQ ID NO: 1930798
aagccuauacgacucaguc

SEQ ID NO: 1930800 - RNA, 19 nt, Artificial Sequence
  Description of Artificial Sequence: Synthetic oligonucleotide
  Sense strand starting at position 1335 of SEQ ID NO: 1879760
agagaucucuaucugagca

SEQ ID NO: 1930801 - RNA, 19 nt, Artificial Sequence
  Description of Artificial Sequence: Synthetic oligonucleotide
  Antisense strand to SEQ ID NO: 1930800
ugcucagauagagaucucu

SEQ ID NO: 1930802 - RNA, 19 nt, Artificial Sequence
  Description of Artificial Sequence: Synthetic oligonucleotide
  Sense strand starting at position 1645 of SEQ ID NO: 1879760
acgaaaugacccugacagu

SEQ ID NO: 1930803 - RNA, 19 nt, Artificial Sequence
  Description of Artificial Sequence: Synthetic oligonucleotide
  Antisense strand to SEQ ID NO: 1930802
acugucagggucauuucgu

SEQ ID NO: 1930804 - RNA, 19 nt, Artificial Sequence
  Description of Artificial Sequence: Synthetic oligonucleotide
  Sense strand starting at position 1785 of SEQ ID NO: 1879760
aaaggaacucccuggguua

SEQ ID NO: 1930805 - RNA, 19 nt, Artificial Sequence
  Description of Artificial Sequence: Synthetic oligonucleotide
  Antisense strand to SEQ ID NO: 1930804
uaacccagggaguuccuuu

SEQ ID NO: 1930806 - RNA, 19 nt, Artificial Sequence
  Description of Artificial Sequence: Synthetic oligonucleotide
  Sense strand starting at position 1786 of SEQ ID NO: 1879760
aaggaacucccuggguuau

SEQ ID NO: 1930807 - RNA, 19 nt, Artificial Sequence
  Description of Artificial Sequence: Synthetic oligonucleotide
  Antisense strand to SEQ ID NO: 1930806
auaacccagggaguuccuu

SEQ ID NO: 1930808 - RNA, 19 nt, Artificial Sequence
  Description of Artificial Sequence: Synthetic oligonucleotide
  Sense strand starting at position 1798 of SEQ ID NO: 1879760
ggguuaugcacagauucuu

SEQ ID NO: 1930809 - RNA, 19 nt, Artificial Sequence
  Description of Artificial Sequence: Synthetic oligonucleotide
  Antisense strand to SEQ ID NO: 1930808
aagaaucugugcauaaccc

SEQ ID NO: 1930810 - RNA, 19 nt, Artificial Sequence
  Description of Artificial Sequence: Synthetic oligonucleotide
  Sense strand starting at position 1905 of SEQ ID NO: 1879760
uuuguucccugcuuuauuu

SEQ ID NO: 1930811 - RNA, 19 nt, Artificial Sequence
  Description of Artificial Sequence: Synthetic oligonucleotide
  Antisense strand to SEQ ID NO: 1930810
aaauaaagcagggaacaaa

SEQ ID NO: 1930812 - RNA, 19 nt, Artificial Sequence
  Description of Artificial Sequence: Synthetic oligonucleotide
  Sense strand starting at position 2068 of SEQ ID NO: 1879760
gguuauccuucugcagaaa

SEQ ID NO: 1930813 - RNA, 19 nt, Artificial Sequence
  Description of Artificial Sequence: Synthetic oligonucleotide
  Antisense strand to SEQ ID NO: 1930812
uuucugcagaaggauaacc

SEQ ID NO: 1930814 - RNA, 19 nt, Artificial Sequence
  Description of Artificial Sequence: Synthetic oligonucleotide
  Sense strand starting at position 2069 of SEQ ID NO: 1879760
guuauccuucugcagaaac

SEQ ID NO: 1930815 - RNA, 19 nt, Artificial Sequence
  Description of Artificial Sequence: Synthetic oligonucleotide
  Antisense strand to SEQ ID NO: 1930814
guuucugcagaaggauaac

SEQ ID NO: 1930816 - RNA, 19 nt, Artificial Sequence
  Description of Artificial Sequence: Synthetic oligonucleotide
  Sense strand starting at position 2445 of SEQ ID NO: 1879760
agcacugaguggguuauua

SEQ ID NO: 1930817 - RNA, 19 nt, Artificial Sequence
  Description of Artificial Sequence: Synthetic oligonucleotide
  Antisense strand to SEQ ID NO: 1930816
uaauaacccacucagugcu

SEQ ID NO: 1930818 - RNA, 19 nt, Artificial Sequence
  Description of Artificial Sequence: Synthetic oligonucleotide
  Sense strand starting at position 2447 of SEQ ID NO: 1879760
cacugaguggguuauuaau

SEQ ID NO: 1930819 - RNA, 19 nt, Artificial Sequence
  Description of Artificial Sequence: Synthetic oligonucleotide
  Antisense strand to SEQ ID NO: 1930818
auuaauaacccacucagug

SEQ ID NO: 1930820 - RNA, 19 nt, Artificial Sequence
  Description of Artificial Sequence: Synthetic oligonucleotide
  Sense strand starting at position 2449 of SEQ ID NO: 1879760
cugaguggguuauuaauuc

SEQ ID NO: 1930821 - RNA, 19 nt, Artificial Sequence
  Description of Artificial Sequence: Synthetic oligonucleotide
  Antisense strand to SEQ ID NO: 1930820
gaauuaauaacccacucag

SEQ ID NO: 1930822 - RNA, 19 nt, Artificial Sequence
  Description of Artificial Sequence: Synthetic oligonucleotide
  Sense strand starting at position 2624 of SEQ ID NO: 1879760
gggauaagguguuuaaacc

SEQ ID NO: 1930823 - RNA, 19 nt, Artificial Sequence
  Description of Artificial Sequence: Synthetic oligonucleotide
  Antisense strand to SEQ ID NO: 1930822
gguuuaaacaccuuauccc

SEQ ID NO: 1930824 - RNA, 19 nt, Artificial Sequence
  Description of Artificial Sequence: Synthetic oligonucleotide
  Sense strand starting at position 2632 of SEQ ID NO: 1879760
guguuuaaaccuugaauca

SEQ ID NO: 1930825 - RNA, 19 nt, Artificial Sequence
  Description of Artificial Sequence: Synthetic oligonucleotide
  Antisense strand to SEQ ID NO: 1930824
ugauucaagguuuaaacac

SEQ ID NO: 1930826 - RNA, 19 nt, Artificial Sequence
  Description of Artificial Sequence: Synthetic oligonucleotide
  Sense strand starting at position 2690 of SEQ ID NO: 1879760
acauuaaggcuuuaagggu

SEQ ID NO: 1930827 - RNA, 19 nt, Artificial Sequence
  Description of Artificial Sequence: Synthetic oligonucleotide
  Antisense strand to SEQ ID NO: 1930826
acccuuaaagccuuaaugu

SEQ ID NO: 1930828 - RNA, 19 nt, Artificial Sequence
  Description of Artificial Sequence: Synthetic oligonucleotide
  Sense strand starting at position 2764 of SEQ ID NO: 1879760
ccuggaugguaucuguaaa

SEQ ID NO: 1930829 - RNA, 19 nt, Artificial Sequence
  Description of Artificial Sequence: Synthetic oligonucleotide
  Antisense strand to SEQ ID NO: 1930828
uuuacagauaccauccagg

SEQ ID NO: 1930830 - RNA, 19 nt, Artificial Sequence
  Description of Artificial Sequence: Synthetic oligonucleotide
  Sense strand starting at position 2792 of SEQ ID NO: 1879760
acuggauucucacagauuu

SEQ ID NO: 1930831 - RNA, 19 nt, Artificial Sequence
  Description of Artificial Sequence: Synthetic oligonucleotide
  Antisense strand to SEQ ID NO: 1930830
aaaucugugagaauccagu

SEQ ID NO: 1930832 - RNA, 19 nt, Artificial Sequence
  Description of Artificial Sequence: Synthetic oligonucleotide
  Sense strand starting at position 2940 of SEQ ID NO: 1879760
cucauaauucuuugcagga

SEQ ID NO: 1930833 - RNA, 19 nt, Artificial Sequence
  Description of Artificial Sequence: Synthetic oligonucleotide
  Antisense strand to SEQ ID NO: 1930832
uccugcaaagaauuaugag

SEQ ID NO: 1930834 - RNA, 19 nt, Artificial Sequence
  Description of Artificial Sequence: Synthetic oligonucleotide
  Sense strand starting at position 2941 of SEQ ID NO: 1879760
ucauaauucuuugcaggaa

SEQ ID NO: 1930835 - RNA, 19 nt, Artificial Sequence
  Description of Artificial Sequence: Synthetic oligonucleotide
  Antisense strand to SEQ ID NO: 1930834
uuccugcaaagaauuauga

SEQ ID NO: 1930836 - RNA, 19 nt, Artificial Sequence
  Description of Artificial Sequence: Synthetic oligonucleotide
  Sense strand starting at position 3015 of SEQ ID NO: 1879760
gugcuuggaguucauagaa

SEQ ID NO: 1930837 - RNA, 19 nt, Artificial Sequence
  Description of Artificial Sequence: Synthetic oligonucleotide
  Antisense strand to SEQ ID NO: 1930836
uucuaugaacuccaagcac

SEQ ID NO: 1930838 - RNA, 19 nt, Artificial Sequence
  Description of Artificial Sequence: Synthetic oligonucleotide
  Sense strand starting at position 3039 of SEQ ID NO: 1879760
cuacucaggcuuugauacu

SEQ ID NO: 1930839 - RNA, 19 nt, Artificial Sequence
  Description of Artificial Sequence: Synthetic oligonucleotide
  Antisense strand to SEQ ID NO: 1930838
aguaucaaagccugaguag

SEQ ID NO: 1930840 - RNA, 19 nt, Artificial Sequence
  Description of Artificial Sequence: Synthetic oligonucleotide
  Sense strand starting at position 3172 of SEQ ID NO: 1879760
gggaacugucccgaacagu

SEQ ID NO: 1930841 - RNA, 19 nt, Artificial Sequence
  Description of Artificial Sequence: Synthetic oligonucleotide
  Antisense strand to SEQ ID NO: 1930840
acuguucgggacaguuccc

SEQ ID NO: 1930842 - RNA, 19 nt, Artificial Sequence
  Description of Artificial Sequence: Synthetic oligonucleotide
  Sense strand starting at position 3181 of SEQ ID NO: 1879760
cccgaacagugaccgaaua

SEQ ID NO: 1930843 - RNA, 19 nt, Artificial Sequence
  Description of Artificial Sequence: Synthetic oligonucleotide
  Antisense strand to SEQ ID NO: 1930842
uauucggucacuguucggg

SEQ ID NO: 1930844 - RNA, 19 nt, Artificial Sequence
  Description of Artificial Sequence: Synthetic oligonucleotide
  Sense strand starting at position 3182 of SEQ ID NO: 1879760
ccgaacagugaccgaauau

SEQ ID NO: 1930845 - RNA, 19 nt, Artificial Sequence
  Description of Artificial Sequence: Synthetic oligonucleotide
  Antisense strand to SEQ ID NO: 1930844
auauucggucacuguucgg

SEQ ID NO: 1930846 - RNA, 19 nt, Artificial Sequence
  Description of Artificial Sequence: Synthetic oligonucleotide
  Sense strand starting at position 3183 of SEQ ID NO: 1879760
cgaacagugaccgaauaua

SEQ ID NO: 1930847 - RNA, 19 nt, Artificial Sequence
  Description of Artificial Sequence: Synthetic oligonucleotide
  Antisense strand to SEQ ID NO: 1930846
uauauucggucacuguucg

SEQ ID NO: 1930848 - RNA, 19 nt, Artificial Sequence
  Description of Artificial Sequence: Synthetic oligonucleotide
  Sense strand starting at position 3361 of SEQ ID NO: 1879760
gagugauucccugacccuc

SEQ ID NO: 1930849 - RNA, 19 nt, Artificial Sequence
  Description of Artificial Sequence: Synthetic oligonucleotide
  Antisense strand to SEQ ID NO: 1930848
gagggucagggaaucacuc

SEQ ID NO: 1930850 - RNA, 19 nt, Artificial Sequence
  Description of Artificial Sequence: Synthetic oligonucleotide
  Sense strand starting at position 3485 of SEQ ID NO: 1879760
guaugucucccuugauaca

SEQ ID NO: 1930851 - RNA, 19 nt, Artificial Sequence
  Description of Artificial Sequence: Synthetic oligonucleotide
  Antisense strand to SEQ ID NO: 1930850
uguaucaagggagacauac

SEQ ID NO: 1930852 - RNA, 19 nt, Artificial Sequence
  Description of Artificial Sequence: Synthetic oligonucleotide
  Sense strand starting at position 3684 of SEQ ID NO: 1879760
gaagacuuguguucuaauc

SEQ ID NO: 1930853 - RNA, 19 nt, Artificial Sequence
  Description of Artificial Sequence: Synthetic oligonucleotide
  Antisense strand to SEQ ID NO: 1930852
gauuagaacacaagucuuc

SEQ ID NO: 1930854 - RNA, 19 nt, Artificial Sequence
  Description of Artificial Sequence: Synthetic oligonucleotide
  Sense strand starting at position 3756 of SEQ ID NO: 1879760
acgucuuaugcguucaaug

SEQ ID NO: 1930855 - RNA, 19 nt, Artificial Sequence
  Description of Artificial Sequence: Synthetic oligonucleotide
  Antisense strand to SEQ ID NO: 1930854
cauugaacgcauaagacgu

SEQ ID NO: 1930856 - RNA, 19 nt, Artificial Sequence
  Description of Artificial Sequence: Synthetic oligonucleotide
  Sense strand starting at position 3757 of SEQ ID NO: 1879760
cgucuuaugcguucaaugu

SEQ ID NO: 1930857 - RNA, 19 nt, Artificial Sequence
  Description of Artificial Sequence: Synthetic oligonucleotide
  Antisense strand to SEQ ID NO: 1930856
acauugaacgcauaagacg

SEQ ID NO: 1930858 - RNA, 19 nt, Artificial Sequence
  Description of Artificial Sequence: Synthetic oligonucleotide
  Sense strand starting at position 3812 of SEQ ID NO: 1879760
cacuaugcagucuagagaa

SEQ ID NO: 1930859 - RNA, 19 nt, Artificial Sequence
  Description of Artificial Sequence: Synthetic oligonucleotide
  Antisense strand to SEQ ID NO: 1930858
uucucuagacugcauagug

SEQ ID NO: 1930860 - RNA, 19 nt, Artificial Sequence
  Description of Artificial Sequence: Synthetic oligonucleotide
  Sense strand starting at position 3848 of SEQ ID NO: 1879760
aggauauagucagugaaug

SEQ ID NO: 1930861 - RNA, 19 nt, Artificial Sequence
  Description of Artificial Sequence: Synthetic oligonucleotide
  Antisense strand to SEQ ID NO: 1930860
cauucacugacuauauccu

SEQ ID NO: 1930862 - RNA, 19 nt, Artificial Sequence
  Description of Artificial Sequence: Synthetic oligonucleotide
  Sense strand starting at position 3849 of SEQ ID NO: 1879760
ggauauagucagugaaugg

SEQ ID NO: 1930863 - RNA, 19 nt, Artificial Sequence
  Description of Artificial Sequence: Synthetic oligonucleotide
  Antisense strand to SEQ ID NO: 1930862
ccauucacugacuauaucc

SEQ ID NO: 1930864 - RNA, 19 nt, Artificial Sequence
  Description of Artificial Sequence: Synthetic oligonucleotide
  Sense strand starting at position 519 of SEQ ID NO: 1879761
gggugaagugugcgaagaa

SEQ ID NO: 1930865 - RNA, 19 nt, Artificial Sequence
  Description of Artificial Sequence: Synthetic oligonucleotide
  Antisense strand to SEQ ID NO: 1930864
uucuucgcacacuucaccc

SEQ ID NO: 1930866 - RNA, 19 nt, Artificial Sequence
  Description of Artificial Sequence: Synthetic oligonucleotide
  Sense strand starting at position 552 of SEQ ID NO: 1879761
guaaguuuaggaggaucaa

SEQ ID NO: 1930867 - RNA, 19 nt, Artificial Sequence
  Description of Artificial Sequence: Synthetic oligonucleotide
  Antisense strand to SEQ ID NO: 1930866
uugauccuccuaaacuuac

SEQ ID NO: 1930868 - RNA, 19 nt, Artificial Sequence
  Description of Artificial Sequence: Synthetic oligonucleotide
  Sense strand starting at position 562 of SEQ ID NO: 1879761
gaggaucaaucuccucagu

SEQ ID NO: 1930869 - RNA, 19 nt, Artificial Sequence
  Description of Artificial Sequence: Synthetic oligonucleotide
  Antisense strand to SEQ ID NO: 1930868
acugaggagauugauccuc

SEQ ID NO: 1930870 - RNA, 19 nt, Artificial Sequence
  Description of Artificial Sequence: Synthetic oligonucleotide
  Sense strand starting at position 564 of SEQ ID NO: 1879761
ggaucaaucuccucaguua

SEQ ID NO: 1930871 - RNA, 19 nt, Artificial Sequence
  Description of Artificial Sequence: Synthetic oligonucleotide
  Antisense strand to SEQ ID NO: 1930870
uaacugaggagauugaucc

SEQ ID NO: 1930872 - RNA, 19 nt, Artificial Sequence
  Description of Artificial Sequence: Synthetic oligonucleotide
  Sense strand starting at position 601 of SEQ ID NO: 1879761
uaagcaggauuagucaaau

SEQ ID NO: 1930873 - RNA, 19 nt, Artificial Sequence
  Description of Artificial Sequence: Synthetic oligonucleotide
  Antisense strand to SEQ ID NO: 1930872
auuugacuaauccugcuua

SEQ ID NO: 1930874 - RNA, 19 nt, Artificial Sequence
  Description of Artificial Sequence: Synthetic oligonucleotide
  Sense strand starting at position 639 of SEQ ID NO: 1879761
ccaguuaagcuguggcaaa

SEQ ID NO: 1930875 - RNA, 19 nt, Artificial Sequence
  Description of Artificial Sequence: Synthetic oligonucleotide
  Antisense strand to SEQ ID NO: 1930874
uuugccacagcuuaacugg

SEQ ID NO: 1930876 - RNA, 19 nt, Artificial Sequence
  Description of Artificial Sequence: Synthetic oligonucleotide
  Sense strand starting at position 676 of SEQ ID NO: 1879761
gggacuaggccagauguca

SEQ ID NO: 1930877 - RNA, 19 nt, Artificial Sequence
  Description of Artificial Sequence: Synthetic oligonucleotide
  Antisense strand to SEQ ID NO: 1930876
ugacaucuggccuaguccc

SEQ ID NO: 1930878 - RNA, 19 nt, Artificial Sequence
  Description of Artificial Sequence: Synthetic oligonucleotide
  Sense strand starting at position 730 of SEQ ID NO: 1879761
gacaguggugaugagcaau

SEQ ID NO: 1930879 - RNA, 19 nt, Artificial Sequence
  Description of Artificial Sequence: Synthetic oligonucleotide
  Antisense strand to SEQ ID NO: 1930878
auugcucaucaccacuguc

SEQ ID NO: 1930880 - RNA, 19 nt, Artificial Sequence
  Description of Artificial Sequence: Synthetic oligonucleotide
  Sense strand starting at position 863 of SEQ ID NO: 1879761
gggcuaugcuaauuuagug

SEQ ID NO: 1930881 - RNA, 19 nt, Artificial Sequence
  Description of Artificial Sequence: Synthetic oligonucleotide
  Antisense strand to SEQ ID NO: 1930880
cacuaaauuagcauagccc

SEQ ID NO: 1930882 - RNA, 19 nt, Artificial Sequence
  Description of Artificial Sequence: Synthetic oligonucleotide
  Sense strand starting at position 872 of SEQ ID NO: 1879761
uaauuuagugagugguucu

SEQ ID NO: 1930883 - RNA, 19 nt, Artificial Sequence
  Description of Artificial Sequence: Synthetic oligonucleotide
  Antisense strand to SEQ ID NO: 1930882
agaaccacucacuaaauua

SEQ ID NO: 1930884 - RNA, 19 nt, Artificial Sequence
  Description of Artificial Sequence: Synthetic oligonucleotide
  Sense strand starting at position 875 of SEQ ID NO: 1879761
uuuagugagugguucuaca

SEQ ID NO: 1930885 - RNA, 19 nt, Artificial Sequence
  Description of Artificial Sequence: Synthetic oligonucleotide
  Antisense strand to SEQ ID NO: 1930884
uguagaaccacucacuaaa

SEQ ID NO: 1930886 - RNA, 19 nt, Artificial Sequence
  Description of Artificial Sequence: Synthetic oligonucleotide
  Sense strand starting at position 907 of SEQ ID NO: 1879761
gagugaccucccuggaaga

SEQ ID NO: 1930887 - RNA, 19 nt, Artificial Sequence
  Description of Artificial Sequence: Synthetic oligonucleotide
  Antisense strand to SEQ ID NO: 1930886
ucuuccagggaggucacuc

SEQ ID NO: 1930888 - RNA, 19 nt, Artificial Sequence
  Description of Artificial Sequence: Synthetic oligonucleotide
  Sense strand starting at position 908 of SEQ ID NO: 1879761
agugaccucccuggaagaa

SEQ ID NO: 1930889 - RNA, 19 nt, Artificial Sequence
  Description of Artificial Sequence: Synthetic oligonucleotide
  Antisense strand to SEQ ID NO: 1930888
uucuuccagggaggucacu

SEQ ID NO: 1930890 - RNA, 19 nt, Artificial Sequence
  Description of Artificial Sequence: Synthetic oligonucleotide
  Sense strand starting at position 1115 of SEQ ID NO: 1879761
cagacuuugguugggcaaa

SEQ ID NO: 1930891 - RNA, 19 nt, Artificial Sequence
  Description of Artificial Sequence: Synthetic oligonucleotide
  Antisense strand to SEQ ID NO: 1930890
uuugcccaaccaaagucug

SEQ ID NO: 1930892 - RNA, 19 nt, Artificial Sequence
  Description of Artificial Sequence: Synthetic oligonucleotide
  Sense strand starting at position 1189 of SEQ ID NO: 1879761
ccagucagcagggauaacu

SEQ ID NO: 1930893 - RNA, 19 nt, Artificial Sequence
  Description of Artificial Sequence: Synthetic oligonucleotide
  Antisense strand to SEQ ID NO: 1930892
aguuaucccugcugacugg

SEQ ID NO: 1930894 - RNA, 19 nt, Artificial Sequence
  Description of Artificial Sequence: Synthetic oligonucleotide
  Sense strand starting at position 1379 of SEQ ID NO: 1879761
ugaggacuuuccuucucca

SEQ ID NO: 1930895 - RNA, 19 nt, Artificial Sequence
  Description of Artificial Sequence: Synthetic oligonucleotide
  Antisense strand to SEQ ID NO: 1930894
uggagaaggaaaguccuca

SEQ ID NO: 1930896 - RNA, 19 nt, Artificial Sequence
  Description of Artificial Sequence: Synthetic oligonucleotide
  Sense strand starting at position 1429 of SEQ ID NO: 1879761
uaggaauguuaugauuuag

SEQ ID NO: 1930897 - RNA, 19 nt, Artificial Sequence
  Description of Artificial Sequence: Synthetic oligonucleotide
  Antisense strand to SEQ ID NO: 1930896
cuaaaucauaacauuccua

SEQ ID NO: 1930898 - RNA, 19 nt, Artificial Sequence
  Description of Artificial Sequence: Synthetic oligonucleotide
  Sense strand starting at position 1437 of SEQ ID NO: 1879761
uuaugauuuaguuguccgu

SEQ ID NO: 1930899 - RNA, 19 nt, Artificial Sequence
  Description of Artificial Sequence: Synthetic oligonucleotide
  Antisense strand to SEQ ID NO: 1930898
acggacaacuaaaucauaa

SEQ ID NO: 1930900 - RNA, 19 nt, Artificial Sequence
  Description of Artificial Sequence: Synthetic oligonucleotide
  Sense strand starting at position 1440 of SEQ ID NO: 1879761
ugauuuaguuguccguaca

SEQ ID NO: 1930901 - RNA, 19 nt, Artificial Sequence
  Description of Artificial Sequence: Synthetic oligonucleotide
  Antisense strand to SEQ ID NO: 1930900
uguacggacaacuaaauca

SEQ ID NO: 1930902 - RNA, 19 nt, Artificial Sequence
  Description of Artificial Sequence: Synthetic oligonucleotide
  Sense strand starting at position 1441 of SEQ ID NO: 1879761
gauuuaguuguccguacau

SEQ ID NO: 1930903 - RNA, 19 nt, Artificial Sequence
  Description of Artificial Sequence: Synthetic oligonucleotide
  Antisense strand to SEQ ID NO: 1930902
auguacggacaacuaaauc

SEQ ID NO: 1930904 - RNA, 19 nt, Artificial Sequence
  Description of Artificial Sequence: Synthetic oligonucleotide
  Sense strand starting at position 1443 of SEQ ID NO: 1879761
uuuaguuguccguacauuu

SEQ ID NO: 1930905 - RNA, 19 nt, Artificial Sequence
  Description of Artificial Sequence: Synthetic oligonucleotide
  Antisense strand to SEQ ID NO: 1930904
aaauguacggacaacuaaa

SEQ ID NO: 1930906 - RNA, 19 nt, Artificial Sequence
  Description of Artificial Sequence: Synthetic oligonucleotide
  Sense strand starting at position 1500 of SEQ ID NO: 1879761
ggagcuguaaucggcaaca

SEQ ID NO: 1930907 - RNA, 19 nt, Artificial Sequence
  Description of Artificial Sequence: Synthetic oligonucleotide
  Antisense strand to SEQ ID NO: 1930906
uguugccgauuacagcucc

SEQ ID NO: 1930908 - RNA, 19 nt, Artificial Sequence
  Description of Artificial Sequence: Synthetic oligonucleotide
  Sense strand starting at position 1502 of SEQ ID NO: 1879761
agcuguaaucggcaacaug

SEQ ID NO: 1930909 - RNA, 19 nt, Artificial Sequence
  Description of Artificial Sequence: Synthetic oligonucleotide
  Antisense strand to SEQ ID NO: 1930908
cauguugccgauuacagcu

SEQ ID NO: 1930910 - RNA, 19 nt, Artificial Sequence
  Description of Artificial Sequence: Synthetic oligonucleotide
  Sense strand starting at position 1575 of SEQ ID NO: 1879761
auagcagccgaucaguaau

SEQ ID NO: 1930911 - RNA, 19 nt, Artificial Sequence
  Description of Artificial Sequence: Synthetic oligonucleotide
  Antisense strand to SEQ ID NO: 1930910
auuacugaucggcugcuau

SEQ ID NO: 1930912 - RNA, 19 nt, Artificial Sequence
  Description of Artificial Sequence: Synthetic oligonucleotide
  Sense strand starting at position 1582 of SEQ ID NO: 1879761
ccgaucaguaauggugaaa

SEQ ID NO: 1930913 - RNA, 19 nt, Artificial Sequence
  Description of Artificial Sequence: Synthetic oligonucleotide
  Antisense strand to SEQ ID NO: 1930912
uuucaccauuacugaucgg

SEQ ID NO: 1930914 - RNA, 19 nt, Artificial Sequence
  Description of Artificial Sequence: Synthetic oligonucleotide
  Sense strand starting at position 1593 of SEQ ID NO: 1879761
uggugaaauagaugagcuu

SEQ ID NO: 1930915 - RNA, 19 nt, Artificial Sequence
  Description of Artificial Sequence: Synthetic oligonucleotide
  Antisense strand to SEQ ID NO: 1930914
aagcucaucuauuucacca

SEQ ID NO: 1930916 - RNA, 19 nt, Artificial Sequence
  Description of Artificial Sequence: Synthetic oligonucleotide
  Sense strand starting at position 2370 of SEQ ID NO: 1879761
agguccugaaugugaacau

SEQ ID NO: 1930917 - RNA, 19 nt, Artificial Sequence
  Description of Artificial Sequence: Synthetic oligonucleotide
  Antisense strand to SEQ ID NO: 1930916
auguucacauucaggaccu

SEQ ID NO: 1930918 - RNA, 19 nt, Artificial Sequence
  Description of Artificial Sequence: Synthetic oligonucleotide
  Sense strand starting at position 2387 of SEQ ID NO: 1879761
aucacugguccugggcaaa

SEQ ID NO: 1930919 - RNA, 19 nt, Artificial Sequence
  Description of Artificial Sequence: Synthetic oligonucleotide
  Antisense strand to SEQ ID NO: 1930918
uuugcccaggaccagugau

SEQ ID NO: 1930920 - RNA, 19 nt, Artificial Sequence
  Description of Artificial Sequence: Synthetic oligonucleotide
  Sense strand starting at position 2547 of SEQ ID NO: 1879761
gcagcauucgaggucuugu

SEQ ID NO: 1930921 - RNA, 19 nt, Artificial Sequence
  Description of Artificial Sequence: Synthetic oligonucleotide
  Antisense strand to SEQ ID NO: 1930920
acaagaccucgaaugcugc

SEQ ID NO: 1930922 - RNA, 19 nt, Artificial Sequence
  Description of Artificial Sequence: Synthetic oligonucleotide
  Sense strand starting at position 2703 of SEQ ID NO: 1879761
agacacaauuuaugaauga

SEQ ID NO: 1930923 - RNA, 19 nt, Artificial Sequence
  Description of Artificial Sequence: Synthetic oligonucleotide
  Antisense strand to SEQ ID NO: 1930922
ucauucauaaauugugucu

SEQ ID NO: 1930924 - RNA, 19 nt, Artificial Sequence
  Description of Artificial Sequence: Synthetic oligonucleotide
  Sense strand starting at position 2756 of SEQ ID NO: 1879761
agccacaccguuuguuuaa

SEQ ID NO: 1930925 - RNA, 19 nt, Artificial Sequence
  Description of Artificial Sequence: Synthetic oligonucleotide
  Antisense strand to SEQ ID NO: 1930924
uuaaacaaacgguguggcu

SEQ ID NO: 1930926 - RNA, 19 nt, Artificial Sequence
  Description of Artificial Sequence: Synthetic oligonucleotide
  Sense strand starting at position 2757 of SEQ ID NO: 1879761
gccacaccguuuguuuaau

SEQ ID NO: 1930927 - RNA, 19 nt, Artificial Sequence
  Description of Artificial Sequence: Synthetic oligonucleotide
  Antisense strand to SEQ ID NO: 1930926
auuaaacaaacgguguggc

SEQ ID NO: 1930928 - RNA, 19 nt, Artificial Sequence
  Description of Artificial Sequence: Synthetic oligonucleotide
  Sense strand starting at position 3056 of SEQ ID NO: 1879761
gccuauaugcuauaggaaa

SEQ ID NO: 1930929 - RNA, 19 nt, Artificial Sequence
  Description of Artificial Sequence: Synthetic oligonucleotide
  Antisense strand to SEQ ID NO: 1930928
uuuccuauagcauauaggc

SEQ ID NO: 1930930 - RNA, 19 nt, Artificial Sequence
  Description of Artificial Sequence: Synthetic oligonucleotide
  Sense strand starting at position 3073 of SEQ ID NO: 1879761
aaggaaugugacggacauu

SEQ ID NO: 1930931 - RNA, 19 nt, Artificial Sequence
  Description of Artificial Sequence: Synthetic oligonucleotide
  Antisense strand to SEQ ID NO: 1930930
aauguccgucacauuccuu

SEQ ID NO: 1930932 - RNA, 19 nt, Artificial Sequence
  Description of Artificial Sequence: Synthetic oligonucleotide
  Sense strand starting at position 3723 of SEQ ID NO: 1879761
gcacaugaauaucagauau

SEQ ID NO: 1930933 - RNA, 19 nt, Artificial Sequence
  Description of Artificial Sequence: Synthetic oligonucleotide
  Antisense strand to SEQ ID NO: 1930932
auaucugauauucaugugc

SEQ ID NO: 1930934 - RNA, 19 nt, Artificial Sequence
  Description of Artificial Sequence: Synthetic oligonucleotide
  Sense strand starting at position 3752 of SEQ ID NO: 1879761
ggaucaaccucagggaauu

SEQ ID NO: 1930935 - RNA, 19 nt, Artificial Sequence
  Description of Artificial Sequence: Synthetic oligonucleotide
  Antisense strand to SEQ ID NO: 1930934
aauucccugagguugaucc

SEQ ID NO: 1930936 - RNA, 19 nt, Artificial Sequence
  Description of Artificial Sequence: Synthetic oligonucleotide
  Sense strand starting at position 3811 of SEQ ID NO: 1879761
gaagaaugauaagggaaag

SEQ ID NO: 1930937 - RNA, 19 nt, Artificial Sequence
  Description of Artificial Sequence: Synthetic oligonucleotide
  Antisense strand to SEQ ID NO: 1930936
cuuucccuuaucauucuuc

SEQ ID NO: 1930938 - RNA, 19 nt, Artificial Sequence
  Description of Artificial Sequence: Synthetic oligonucleotide
  Sense strand starting at position 3825 of SEQ ID NO: 1879761
gaaagaaaguuggagaaau

SEQ ID NO: 1930939 - RNA, 19 nt, Artificial Sequence
  Description of Artificial Sequence: Synthetic oligonucleotide
  Antisense strand to SEQ ID NO: 1930938
auuucuccaacuuucuuuc

SEQ ID NO: 1930940 - RNA, 19 nt, Artificial Sequence
  Description of Artificial Sequence: Synthetic oligonucleotide
  Sense strand starting at position 3863 of SEQ ID NO: 1879761
aggcucacucauggaaacu

SEQ ID NO: 1930941 - RNA, 19 nt, Artificial Sequence
  Description of Artificial Sequence: Synthetic oligonucleotide
  Antisense strand to SEQ ID NO: 1930940
aguuuccaugagugagccu

SEQ ID NO: 1930942 - RNA, 19 nt, Artificial Sequence
  Description of Artificial Sequence: Synthetic oligonucleotide
  Sense strand starting at position 3933 of SEQ ID NO: 1879761
ccagguuugcagugguuca

SEQ ID NO: 1930943 - RNA, 19 nt, Artificial Sequence
  Description of Artificial Sequence: Synthetic oligonucleotide
  Antisense strand to SEQ ID NO: 1930942
ugaaccacugcaaaccugg

SEQ ID NO: 1930944 - RNA, 19 nt, Artificial Sequence
  Description of Artificial Sequence: Synthetic oligonucleotide
  Sense strand starting at position 55 of SEQ ID NO: 1879762
acuauugugaaacgguaau

SEQ ID NO: 1930945 - RNA, 19 nt, Artificial Sequence
  Description of Artificial Sequence: Synthetic oligonucleotide
  Antisense strand to SEQ ID NO: 1930944
auuaccguuucacaauagu

SEQ ID NO: 1930946 - RNA, 19 nt, Artificial Sequence
  Description of Artificial Sequence: Synthetic oligonucleotide
  Sense strand starting at position 177 of SEQ ID NO: 1879762
ccuugaaugggaugugacu

SEQ ID NO: 1930947 - RNA, 19 nt, Artificial Sequence
  Description of Artificial Sequence: Synthetic oligonucleotide
  Antisense strand to SEQ ID NO: 1930946
agucacaucccauucaagg

SEQ ID NO: 1930948 - RNA, 19 nt, Artificial Sequence
  Description of Artificial Sequence: Synthetic oligonucleotide
  Sense strand starting at position 183 of SEQ ID NO: 1879762
augggaugugacugccaua

SEQ ID NO: 1930949 - RNA, 19 nt, Artificial Sequence
  Description of Artificial Sequence: Synthetic oligonucleotide
  Antisense strand to SEQ ID NO: 1930948
uauggcagucacaucccau

SEQ ID NO: 1930950 - RNA, 19 nt, Artificial Sequence
  Description of Artificial Sequence: Synthetic oligonucleotide
  Sense strand starting at position 233 of SEQ ID NO: 1879762
gguuauuuauuugaccuuu

SEQ ID NO: 1930951 - RNA, 19 nt, Artificial Sequence
  Description of Artificial Sequence: Synthetic oligonucleotide
  Antisense strand to SEQ ID NO: 1930950
aaaggucaaauaaauaacc

SEQ ID NO: 1930952 - RNA, 19 nt, Artificial Sequence
  Description of Artificial Sequence: Synthetic oligonucleotide
  Sense strand starting at position 279 of SEQ ID NO: 1879762
gaucauaacugugcaagca

SEQ ID NO: 1930953 - RNA, 19 nt, Artificial Sequence
  Description of Artificial Sequence: Synthetic oligonucleotide
  Antisense strand to SEQ ID NO: 1930952
ugcuugcacaguuaugauc

SEQ ID NO: 1930954 - RNA, 19 nt, Artificial Sequence
  Description of Artificial Sequence: Synthetic oligonucleotide
  Sense strand starting at position 280 of SEQ ID NO: 1879762
aucauaacugugcaagcau

SEQ ID NO: 1930955 - RNA, 19 nt, Artificial Sequence
  Description of Artificial Sequence: Synthetic oligonucleotide
  Antisense strand to SEQ ID NO: 1930954
augcuugcacaguuaugau

SEQ ID NO: 1930956 - RNA, 19 nt, Artificial Sequence
  Description of Artificial Sequence: Synthetic oligonucleotide
  Sense strand starting at position 345 of SEQ ID NO: 1879762
gagucugggcucuggagaa

SEQ ID NO: 1930957 - RNA, 19 nt, Artificial Sequence
  Description of Artificial Sequence: Synthetic oligonucleotide
  Antisense strand to SEQ ID NO: 1930956
uucuccagagcccagacuc

SEQ ID NO: 1930958 - RNA, 19 nt, Artificial Sequence
  Description of Artificial Sequence: Synthetic oligonucleotide
  Sense strand starting at position 366 of SEQ ID NO: 1879762
ggaagaauaugcccuuccu

SEQ ID NO: 1930959 - RNA, 19 nt, Artificial Sequence
  Description of Artificial Sequence: Synthetic oligonucleotide
  Antisense strand to SEQ ID NO: 1930958
aggaagggcauauucuucc

SEQ ID NO: 1930960 - RNA, 19 nt, Artificial Sequence
  Description of Artificial Sequence: Synthetic oligonucleotide
  Sense strand starting at position 451 of SEQ ID NO: 1879762
uaaugauaugcgcauuagu

SEQ ID NO: 1930961 - RNA, 19 nt, Artificial Sequence
  Description of Artificial Sequence: Synthetic oligonucleotide
  Antisense strand to SEQ ID NO: 1930960
acuaaugcgcauaucauua

SEQ ID NO: 1930962 - RNA, 19 nt, Artificial Sequence
  Description of Artificial Sequence: Synthetic oligonucleotide
  Sense strand starting at position 484 of SEQ ID NO: 1879762
uuucuugggaaguguuuau

SEQ ID NO: 1930963 - RNA, 19 nt, Artificial Sequence
  Description of Artificial Sequence: Synthetic oligonucleotide
  Antisense strand to SEQ ID NO: 1930962
auaaacacuucccaagaaa

SEQ ID NO: 1930964 - RNA, 19 nt, Artificial Sequence
  Description of Artificial Sequence: Synthetic oligonucleotide
  Sense strand starting at position 488 of SEQ ID NO: 1879762
uugggaaguguuuauacuc

SEQ ID NO: 1930965 - RNA, 19 nt, Artificial Sequence
  Description of Artificial Sequence: Synthetic oligonucleotide
  Antisense strand to SEQ ID NO: 1930964
gaguauaaacacuucccaa

SEQ ID NO: 1930966 - RNA, 19 nt, Artificial Sequence
  Description of Artificial Sequence: Synthetic oligonucleotide
  Sense strand starting at position 507 of SEQ ID NO: 1879762
uugcaacagccugauaagu

SEQ ID NO: 1930967 - RNA, 19 nt, Artificial Sequence
  Description of Artificial Sequence: Synthetic oligonucleotide
  Antisense strand to SEQ ID NO: 1930966
acuuaucaggcuguugcaa

SEQ ID NO: 1930968 - RNA, 19 nt, Artificial Sequence
  Description of Artificial Sequence: Synthetic oligonucleotide
  Sense strand starting at position 556 of SEQ ID NO: 1879762
auagauaaccgguguccuu

SEQ ID NO: 1930969 - RNA, 19 nt, Artificial Sequence
  Description of Artificial Sequence: Synthetic oligonucleotide
  Antisense strand to SEQ ID NO: 1930968
aaggacaccgguuaucuau

SEQ ID NO: 1930970 - RNA, 19 nt, Artificial Sequence
  Description of Artificial Sequence: Synthetic oligonucleotide
  Sense strand starting at position 609 of SEQ ID NO: 1879762
ugcuaagggucaucugaca

SEQ ID NO: 1930971 - RNA, 19 nt, Artificial Sequence
  Description of Artificial Sequence: Synthetic oligonucleotide
  Antisense strand to SEQ ID NO: 1930970
ugucagaugacccuuagca

SEQ ID NO: 1930972 - RNA, 19 nt, Artificial Sequence
  Description of Artificial Sequence: Synthetic oligonucleotide
  Sense strand starting at position 640 of SEQ ID NO: 1879762
gucacuuggcuugacuuau

SEQ ID NO: 1930973 - RNA, 19 nt, Artificial Sequence
  Description of Artificial Sequence: Synthetic oligonucleotide
  Antisense strand to SEQ ID NO: 1930972
auaagucaagccaagugac

SEQ ID NO: 1930974 - RNA, 19 nt, Artificial Sequence
  Description of Artificial Sequence: Synthetic oligonucleotide
  Sense strand starting at position 686 of SEQ ID NO: 1879762
caguaaagauagcuguuaa

SEQ ID NO: 1930975 - RNA, 19 nt, Artificial Sequence
  Description of Artificial Sequence: Synthetic oligonucleotide
  Antisense strand to SEQ ID NO: 1930974
uuaacagcuaucuuuacug

SEQ ID NO: 1930976 - RNA, 19 nt, Artificial Sequence
  Description of Artificial Sequence: Synthetic oligonucleotide
  Sense strand starting at position 737 of SEQ ID NO: 1879762
uugucuaguagagaugcaa

SEQ ID NO: 1930977 - RNA, 19 nt, Artificial Sequence
  Description of Artificial Sequence: Synthetic oligonucleotide
  Antisense strand to SEQ ID NO: 1930976
uugcaucucuacuagacaa

SEQ ID NO: 1930978 - RNA, 19 nt, Artificial Sequence
  Description of Artificial Sequence: Synthetic oligonucleotide
  Sense strand starting at position 893 of SEQ ID NO: 1879762
cuccauauauagguauaca

SEQ ID NO: 1930979 - RNA, 19 nt, Artificial Sequence
  Description of Artificial Sequence: Synthetic oligonucleotide
  Antisense strand to SEQ ID NO: 1930978
uguauaccuauauauggag

SEQ ID NO: 1930980 - RNA, 19 nt, Artificial Sequence
  Description of Artificial Sequence: Synthetic oligonucleotide
  Sense strand starting at position 1238 of SEQ ID NO: 1879762
acgcaaugcagucaaagaa

SEQ ID NO: 1930981 - RNA, 19 nt, Artificial Sequence
  Description of Artificial Sequence: Synthetic oligonucleotide
  Antisense strand to SEQ ID NO: 1930980
uucuuugacugcauugcgu

SEQ ID NO: 1930982 - RNA, 19 nt, Artificial Sequence
  Description of Artificial Sequence: Synthetic oligonucleotide
  Sense strand starting at position 1751 of SEQ ID NO: 1879762
ggugcaugcgugccuguaa

SEQ ID NO: 1930983 - RNA, 19 nt, Artificial Sequence
  Description of Artificial Sequence: Synthetic oligonucleotide
  Antisense strand to SEQ ID NO: 1930982
uuacaggcacgcaugcacc

SEQ ID NO: 1930984 - RNA, 19 nt, Artificial Sequence
  Description of Artificial Sequence: Synthetic oligonucleotide
  Sense strand starting at position 1973 of SEQ ID NO: 1879762
cucccucaucuugguagau

SEQ ID NO: 1930985 - RNA, 19 nt, Artificial Sequence
  Description of Artificial Sequence: Synthetic oligonucleotide
  Antisense strand to SEQ ID NO: 1930984
aucuaccaagaugagggag

SEQ ID NO: 1930986 - RNA, 19 nt, Artificial Sequence
  Description of Artificial Sequence: Synthetic oligonucleotide
  Sense strand starting at position 2006 of SEQ ID NO: 1879762
ucagaaagaugagauaacu

SEQ ID NO: 1930987 - RNA, 19 nt, Artificial Sequence
  Description of Artificial Sequence: Synthetic oligonucleotide
  Antisense strand to SEQ ID NO: 1930986
aguuaucucaucuuucuga

SEQ ID NO: 1930988 - RNA, 19 nt, Artificial Sequence
  Description of Artificial Sequence: Synthetic oligonucleotide
  Sense strand starting at position 2016 of SEQ ID NO: 1879762
gagauaacuugcccagggu

SEQ ID NO: 1930989 - RNA, 19 nt, Artificial Sequence
  Description of Artificial Sequence: Synthetic oligonucleotide
  Antisense strand to SEQ ID NO: 1930988
acccugggcaaguuaucuc

SEQ ID NO: 1930990 - RNA, 19 nt, Artificial Sequence
  Description of Artificial Sequence: Synthetic oligonucleotide
  Sense strand starting at position 2030 of SEQ ID NO: 1879762
agggucacacugugaguua

SEQ ID NO: 1930991 - RNA, 19 nt, Artificial Sequence
  Description of Artificial Sequence: Synthetic oligonucleotide
  Antisense strand to SEQ ID NO: 1930990
uaacucacagugugacccu

SEQ ID NO: 1930992 - RNA, 19 nt, Artificial Sequence
  Description of Artificial Sequence: Synthetic oligonucleotide
  Sense strand starting at position 2088 of SEQ ID NO: 1879762
uucugaauccagggagcau

SEQ ID NO: 1930993 - RNA, 19 nt, Artificial Sequence
  Description of Artificial Sequence: Synthetic oligonucleotide
  Antisense strand to SEQ ID NO: 1930992
augcucccuggauucagaa

SEQ ID NO: 1930994 - RNA, 19 nt, Artificial Sequence
  Description of Artificial Sequence: Synthetic oligonucleotide
  Sense strand starting at position 2189 of SEQ ID NO: 1879762
gccacacaagauugcaaau

SEQ ID NO: 1930995 - RNA, 19 nt, Artificial Sequence
  Description of Artificial Sequence: Synthetic oligonucleotide
  Antisense strand to SEQ ID NO: 1930994
auuugcaaucuuguguggc

SEQ ID NO: 1930996 - RNA, 19 nt, Artificial Sequence
  Description of Artificial Sequence: Synthetic oligonucleotide
  Sense strand starting at position 2455 of SEQ ID NO: 1879762
aagcauucucaggguccaa

SEQ ID NO: 1930997 - RNA, 19 nt, Artificial Sequence
  Description of Artificial Sequence: Synthetic oligonucleotide
  Antisense strand to SEQ ID NO: 1930996
uuggacccugagaaugcuu

SEQ ID NO: 1930998 - RNA, 19 nt, Artificial Sequence
  Description of Artificial Sequence: Synthetic oligonucleotide
  Sense strand starting at position 2510 of SEQ ID NO: 1879762
ugagcaucccaucaguuaa

SEQ ID NO: 1930999 - RNA, 19 nt, Artificial Sequence
  Description of Artificial Sequence: Synthetic oligonucleotide
  Antisense strand to SEQ ID NO: 1930998
uuaacugaugggaugcuca

SEQ ID NO: 1931000 - RNA, 19 nt, Artificial Sequence
  Description of Artificial Sequence: Synthetic oligonucleotide
  Sense strand starting at position 2562 of SEQ ID NO: 1879762
agcagcaauugucucuaga

SEQ ID NO: 1931001 - RNA, 19 nt, Artificial Sequence
  Description of Artificial Sequence: Synthetic oligonucleotide
  Antisense strand to SEQ ID NO: 1931000
ucuagagacaauugcugcu

SEQ ID NO: 1931002 - RNA, 19 nt, Artificial Sequence
  Description of Artificial Sequence: Synthetic oligonucleotide
  Sense strand starting at position 2564 of SEQ ID NO: 1879762
cagcaauugucucuagaug

SEQ ID NO: 1931003 - RNA, 19 nt, Artificial Sequence
  Description of Artificial Sequence: Synthetic oligonucleotide
  Antisense strand to SEQ ID NO: 1931002
caucuagagacaauugcug

SEQ ID NO: 1931004 - RNA, 19 nt, Artificial Sequence
  Description of Artificial Sequence: Synthetic oligonucleotide
  Sense strand starting at position 2569 of SEQ ID NO: 1879762
auugucucuagaugguaga

SEQ ID NO: 1931005 - RNA, 19 nt, Artificial Sequence
  Description of Artificial Sequence: Synthetic oligonucleotide
  Antisense strand to SEQ ID NO: 1931004
ucuaccaucuagagacaau

SEQ ID NO: 1931006 - RNA, 19 nt, Artificial Sequence
  Description of Artificial Sequence: Synthetic oligonucleotide
  Sense strand starting at position 2570 of SEQ ID NO: 1879762
uugucucuagaugguagaa

SEQ ID NO: 1931007 - RNA, 19 nt, Artificial Sequence
  Description of Artificial Sequence: Synthetic oligonucleotide
  Antisense strand to SEQ ID NO: 1931006
uucuaccaucuagagacaa

SEQ ID NO: 1931008 - RNA, 19 nt, Artificial Sequence
  Description of Artificial Sequence: Synthetic oligonucleotide
  Sense strand starting at position 2634 of SEQ ID NO: 1879762
gaugguguuacaggaucuu

SEQ ID NO: 1931009 - RNA, 19 nt, Artificial Sequence
  Description of Artificial Sequence: Synthetic oligonucleotide
  Antisense strand to SEQ ID NO: 1931008
aagauccuguaacaccauc

SEQ ID NO: 1931010 - RNA, 19 nt, Artificial Sequence
  Description of Artificial Sequence: Synthetic oligonucleotide
  Sense strand starting at position 2801 of SEQ ID NO: 1879762
gcaagucaggcauggaaca

SEQ ID NO: 1931011 - RNA, 19 nt, Artificial Sequence
  Description of Artificial Sequence: Synthetic oligonucleotide
  Antisense strand to SEQ ID NO: 1931010
uguuccaugccugacuugc

SEQ ID NO: 1931012 - RNA, 19 nt, Artificial Sequence
  Description of Artificial Sequence: Synthetic oligonucleotide
  Sense strand starting at position 2931 of SEQ ID NO: 1879762
agagguuguggcuagacca

SEQ ID NO: 1931013 - RNA, 19 nt, Artificial Sequence
  Description of Artificial Sequence: Synthetic oligonucleotide
  Antisense strand to SEQ ID NO: 1931012
uggucuagccacaaccucu

SEQ ID NO: 1931014 - RNA, 19 nt, Artificial Sequence
  Description of Artificial Sequence: Synthetic oligonucleotide
  Sense strand starting at position 3264 of SEQ ID NO: 1879762
aggagcuuuacugagcgau

SEQ ID NO: 1931015 - RNA, 19 nt, Artificial Sequence
  Description of Artificial Sequence: Synthetic oligonucleotide
  Antisense strand to SEQ ID NO: 1931014
aucgcucaguaaagcuccu

SEQ ID NO: 1931016 - RNA, 19 nt, Artificial Sequence
  Description of Artificial Sequence: Synthetic oligonucleotide
  Sense strand starting at position 3266 of SEQ ID NO: 1879762
gagcuuuacugagcgauag

SEQ ID NO: 1931017 - RNA, 19 nt, Artificial Sequence
  Description of Artificial Sequence: Synthetic oligonucleotide
  Antisense strand to SEQ ID NO: 1931016
cuaucgcucaguaaagcuc

SEQ ID NO: 1931018 - RNA, 19 nt, Artificial Sequence
  Description of Artificial Sequence: Synthetic oligonucleotide
  Sense strand starting at position 3267 of SEQ ID NO: 1879762
agcuuuacugagcgauaga

SEQ ID NO: 1931019 - RNA, 19 nt, Artificial Sequence
  Description of Artificial Sequence: Synthetic oligonucleotide
  Antisense strand to SEQ ID NO: 1931018
ucuaucgcucaguaaagcu

SEQ ID NO: 1931020 - RNA, 19 nt, Artificial Sequence
  Description of Artificial Sequence: Synthetic oligonucleotide
  Sense strand starting at position 3268 of SEQ ID NO: 1879762
gcuuuacugagcgauagaa

SEQ ID NO: 1931021 - RNA, 19 nt, Artificial Sequence
  Description of Artificial Sequence: Synthetic oligonucleotide
  Antisense strand to SEQ ID NO: 1931020
uucuaucgcucaguaaagc

SEQ ID NO: 1931022 - RNA, 19 nt, Artificial Sequence
  Description of Artificial Sequence: Synthetic oligonucleotide
  Sense strand starting at position 3270 of SEQ ID NO: 1879762
uuuacugagcgauagaaca

SEQ ID NO: 1931023 - RNA, 19 nt, Artificial Sequence
  Description of Artificial Sequence: Synthetic oligonucleotide
  Antisense strand to SEQ ID NO: 1931022
uguucuaucgcucaguaaa

SEQ ID NO: 1931024 - RNA, 19 nt, Artificial Sequence
  Description of Artificial Sequence: Synthetic oligonucleotide
  Sense strand starting at position 89 of SEQ ID NO: 1879763
gcucaucaucucugaggua

SEQ ID NO: 1931025 - RNA, 19 nt, Artificial Sequence
  Description of Artificial Sequence: Synthetic oligonucleotide
  Antisense strand to SEQ ID NO: 1931024
uaccucagagaugaugagc

SEQ ID NO: 1931026 - RNA, 19 nt, Artificial Sequence
  Description of Artificial Sequence: Synthetic oligonucleotide
  Sense strand starting at position 90 of SEQ ID NO: 1879763
cucaucaucucugagguau

SEQ ID NO: 1931027 - RNA, 19 nt, Artificial Sequence
  Description of Artificial Sequence: Synthetic oligonucleotide
  Antisense strand to SEQ ID NO: 1931026
auaccucagagaugaugag

SEQ ID NO: 1931028 - RNA, 19 nt, Artificial Sequence
  Description of Artificial Sequence: Synthetic oligonucleotide
  Sense strand starting at position 112 of SEQ ID NO: 1879763
ugauaagauuaacagccaa

SEQ ID NO: 1931029 - RNA, 19 nt, Artificial Sequence
  Description of Artificial Sequence: Synthetic oligonucleotide
  Antisense strand to SEQ ID NO: 1931028
uuggcuguuaaucuuauca

SEQ ID NO: 1931030 - RNA, 19 nt, Artificial Sequence
  Description of Artificial Sequence: Synthetic oligonucleotide
  Sense strand starting at position 307 of SEQ ID NO: 1879763
acagucaugucauagauau

SEQ ID NO: 1931031 - RNA, 19 nt, Artificial Sequence
  Description of Artificial Sequence: Synthetic oligonucleotide
  Antisense strand to SEQ ID NO: 1931030
auaucuaugacaugacugu

SEQ ID NO: 1931032 - RNA, 19 nt, Artificial Sequence
  Description of Artificial Sequence: Synthetic oligonucleotide
  Sense strand starting at position 478 of SEQ ID NO: 1879763
cccaucuuagucuguguua

SEQ ID NO: 1931033 - RNA, 19 nt, Artificial Sequence
  Description of Artificial Sequence: Synthetic oligonucleotide
  Antisense strand to SEQ ID NO: 1931032
uaacacagacuaagauggg

SEQ ID NO: 1931034 - RNA, 19 nt, Artificial Sequence
  Description of Artificial Sequence: Synthetic oligonucleotide
  Sense strand starting at position 480 of SEQ ID NO: 1879763
caucuuagucuguguuacu

SEQ ID NO: 1931035 - RNA, 19 nt, Artificial Sequence
  Description of Artificial Sequence: Synthetic oligonucleotide
  Antisense strand to SEQ ID NO: 1931034
aguaacacagacuaagaug

SEQ ID NO: 1931036 - RNA, 19 nt, Artificial Sequence
  Description of Artificial Sequence: Synthetic oligonucleotide
  Sense strand starting at position 481 of SEQ ID NO: 1879763
aucuuagucuguguuacua

SEQ ID NO: 1931037 - RNA, 19 nt, Artificial Sequence
  Description of Artificial Sequence: Synthetic oligonucleotide
  Antisense strand to SEQ ID NO: 1931036
uaguaacacagacuaagau

SEQ ID NO: 1931038 - RNA, 19 nt, Artificial Sequence
  Description of Artificial Sequence: Synthetic oligonucleotide
  Sense strand starting at position 547 of SEQ ID NO: 1879763
guucauuugucucacgguu

SEQ ID NO: 1931039 - RNA, 19 nt, Artificial Sequence
  Description of Artificial Sequence: Synthetic oligonucleotide
  Antisense strand to SEQ ID NO: 1931038
aaccgugagacaaaugaac

SEQ ID NO: 1931040 - RNA, 19 nt, Artificial Sequence
  Description of Artificial Sequence: Synthetic oligonucleotide
  Sense strand starting at position 575 of SEQ ID NO: 1879763
gcacaagaaucauggcauu

SEQ ID NO: 1931041 - RNA, 19 nt, Artificial Sequence
  Description of Artificial Sequence: Synthetic oligonucleotide
  Antisense strand to SEQ ID NO: 1931040
aaugccaugauucuugugc

SEQ ID NO: 1931042 - RNA, 19 nt, Artificial Sequence
  Description of Artificial Sequence: Synthetic oligonucleotide
  Sense strand starting at position 623 of SEQ ID NO: 1879763
ugauuccacuuauggcaga

SEQ ID NO: 1931043 - RNA, 19 nt, Artificial Sequence
  Description of Artificial Sequence: Synthetic oligonucleotide
  Antisense strand to SEQ ID NO: 1931042
ucugccauaaguggaauca

SEQ ID NO: 1931044 - RNA, 19 nt, Artificial Sequence
  Description of Artificial Sequence: Synthetic oligonucleotide
  Sense strand starting at position 645 of SEQ ID NO: 1879763
ugaagaggagcugguauau

SEQ ID NO: 1931045 - RNA, 19 nt, Artificial Sequence
  Description of Artificial Sequence: Synthetic oligonucleotide
  Antisense strand to SEQ ID NO: 1931044
auauaccagcuccucuuca

SEQ ID NO: 1931046 - RNA, 19 nt, Artificial Sequence
  Description of Artificial Sequence: Synthetic oligonucleotide
  Sense strand starting at position 651 of SEQ ID NO: 1879763
ggagcugguauaugcauau

SEQ ID NO: 1931047 - RNA, 19 nt, Artificial Sequence
  Description of Artificial Sequence: Synthetic oligonucleotide
  Antisense strand to SEQ ID NO: 1931046
auaugcauauaccagcucc

SEQ ID NO: 1931048 - RNA, 19 nt, Artificial Sequence
  Description of Artificial Sequence: Synthetic oligonucleotide
  Sense strand starting at position 655 of SEQ ID NO: 1879763
cugguauaugcauaucaua

SEQ ID NO: 1931049 - RNA, 19 nt, Artificial Sequence
  Description of Artificial Sequence: Synthetic oligonucleotide
  Antisense strand to SEQ ID NO: 1931048
uaugauaugcauauaccag

SEQ ID NO: 1931050 - RNA, 19 nt, Artificial Sequence
  Description of Artificial Sequence: Synthetic oligonucleotide
  Sense strand starting at position 665 of SEQ ID NO: 1879763
cauaucauauggugagaga

SEQ ID NO: 1931051 - RNA, 19 nt, Artificial Sequence
  Description of Artificial Sequence: Synthetic oligonucleotide
  Antisense strand to SEQ ID NO: 1931050
ucucucaccauaugauaug

SEQ ID NO: 1931052 - RNA, 19 nt, Artificial Sequence
  Description of Artificial Sequence: Synthetic oligonucleotide
  Sense strand starting at position 757 of SEQ ID NO: 1879763
aacucacucucgugagaau

SEQ ID NO: 1931053 - RNA, 19 nt, Artificial Sequence
  Description of Artificial Sequence: Synthetic oligonucleotide
  Antisense strand to SEQ ID NO: 1931052
auucucacgagagugaguu

SEQ ID NO: 1931054 - RNA, 19 nt, Artificial Sequence
  Description of Artificial Sequence: Synthetic oligonucleotide
  Sense strand starting at position 1282 of SEQ ID NO: 1879763
aggugcuggcucuguucaa

SEQ ID NO: 1931055 - RNA, 19 nt, Artificial Sequence
  Description of Artificial Sequence: Synthetic oligonucleotide
  Antisense strand to SEQ ID NO: 1931054
uugaacagagccagcaccu

SEQ ID NO: 1931056 - RNA, 19 nt, Artificial Sequence
  Description of Artificial Sequence: Synthetic oligonucleotide
  Sense strand starting at position 1534 of SEQ ID NO: 1879763
uuagcucuguuuguguuau

SEQ ID NO: 1931057 - RNA, 19 nt, Artificial Sequence
  Description of Artificial Sequence: Synthetic oligonucleotide
  Antisense strand to SEQ ID NO: 1931056
auaacacaaacagagcuaa

SEQ ID NO: 1931058 - RNA, 19 nt, Artificial Sequence
  Description of Artificial Sequence: Synthetic oligonucleotide
  Sense strand starting at position 1875 of SEQ ID NO: 1879763
gagugcaucccucagcaga

SEQ ID NO: 1931059 - RNA, 19 nt, Artificial Sequence
  Description of Artificial Sequence: Synthetic oligonucleotide
  Antisense strand to SEQ ID NO: 1931058
ucugcugagggaugcacuc

SEQ ID NO: 1931060 - RNA, 19 nt, Artificial Sequence
  Description of Artificial Sequence: Synthetic oligonucleotide
  Sense strand starting at position 1877 of SEQ ID NO: 1879763
gugcaucccucagcagaga

SEQ ID NO: 1931061 - RNA, 19 nt, Artificial Sequence
  Description of Artificial Sequence: Synthetic oligonucleotide
  Antisense strand to SEQ ID NO: 1931060
ucucugcugagggaugcac

SEQ ID NO: 1931062 - RNA, 19 nt, Artificial Sequence
  Description of Artificial Sequence: Synthetic oligonucleotide
  Sense strand starting at position 1997 of SEQ ID NO: 1879763
gcagguaguccugacgagu

SEQ ID NO: 1931063 - RNA, 19 nt, Artificial Sequence
  Description of Artificial Sequence: Synthetic oligonucleotide
  Antisense strand to SEQ ID NO: 1931062
acucgucaggacuaccugc

SEQ ID NO: 1931064 - RNA, 19 nt, Artificial Sequence
  Description of Artificial Sequence: Synthetic oligonucleotide
  Sense strand starting at position 2065 of SEQ ID NO: 1879763
gcagguuguccagaugagu

SEQ ID NO: 1931065 - RNA, 19 nt, Artificial Sequence
  Description of Artificial Sequence: Synthetic oligonucleotide
  Antisense strand to SEQ ID NO: 1931064
acucaucuggacaaccugc

SEQ ID NO: 1931066 - RNA, 19 nt, Artificial Sequence
  Description of Artificial Sequence: Synthetic oligonucleotide
  Sense strand starting at position 2205 of SEQ ID NO: 1879763
gcaggucauacugacaagu

SEQ ID NO: 1931067 - RNA, 19 nt, Artificial Sequence
  Description of Artificial Sequence: Synthetic oligonucleotide
  Antisense strand to SEQ ID NO: 1931066
acuugucaguaugaccugc

SEQ ID NO: 1931068 - RNA, 19 nt, Artificial Sequence
  Description of Artificial Sequence: Synthetic oligonucleotide
  Sense strand starting at position 2207 of SEQ ID NO: 1879763
aggucauacugacaaguag

SEQ ID NO: 1931069 - RNA, 19 nt, Artificial Sequence
  Description of Artificial Sequence: Synthetic oligonucleotide
  Antisense strand to SEQ ID NO: 1931068
cuacuugucaguaugaccu

SEQ ID NO: 1931070 - RNA, 19 nt, Artificial Sequence
  Description of Artificial Sequence: Synthetic oligonucleotide
  Sense strand starting at position 2266 of SEQ ID NO: 1879763
uccugacaucuguaugagu

SEQ ID NO: 1931071 - RNA, 19 nt, Artificial Sequence
  Description of Artificial Sequence: Synthetic oligonucleotide
  Antisense strand to SEQ ID NO: 1931070
acucauacagaugucagga

SEQ ID NO: 1931072 - RNA, 19 nt, Artificial Sequence
  Description of Artificial Sequence: Synthetic oligonucleotide
  Sense strand starting at position 2277 of SEQ ID NO: 1879763
guaugagucuagcuaggua

SEQ ID NO: 1931073 - RNA, 19 nt, Artificial Sequence
  Description of Artificial Sequence: Synthetic oligonucleotide
  Antisense strand to SEQ ID NO: 1931072
uaccuagcuagacucauac

SEQ ID NO: 1931074 - RNA, 19 nt, Artificial Sequence
  Description of Artificial Sequence: Synthetic oligonucleotide
  Sense strand starting at position 2280 of SEQ ID NO: 1879763
ugagucuagcuagguaaca

SEQ ID NO: 1931075 - RNA, 19 nt, Artificial Sequence
  Description of Artificial Sequence: Synthetic oligonucleotide
  Antisense strand to SEQ ID NO: 1931074
uguuaccuagcuagacuca

SEQ ID NO: 1931076 - RNA, 19 nt, Artificial Sequence
  Description of Artificial Sequence: Synthetic oligonucleotide
  Sense strand starting at position 2281 of SEQ ID NO: 1879763
gagucuagcuagguaacau

SEQ ID NO: 1931077 - RNA, 19 nt, Artificial Sequence
  Description of Artificial Sequence: Synthetic oligonucleotide
  Antisense strand to SEQ ID NO: 1931076
auguuaccuagcuagacuc

SEQ ID NO: 1931078 - RNA, 19 nt, Artificial Sequence
  Description of Artificial Sequence: Synthetic oligonucleotide
  Sense strand starting at position 2321 of SEQ ID NO: 1879763
gaagaaguguguucugauu

SEQ ID NO: 1931079 - RNA, 19 nt, Artificial Sequence
  Description of Artificial Sequence: Synthetic oligonucleotide
  Antisense strand to SEQ ID NO: 1931078
aaucagaacacacuucuuc

SEQ ID NO: 1931080 - RNA, 19 nt, Artificial Sequence
  Description of Artificial Sequence: Synthetic oligonucleotide
  Sense strand starting at position 2327 of SEQ ID NO: 1879763
guguguucugauuggccca

SEQ ID NO: 1931081 - RNA, 19 nt, Artificial Sequence
  Description of Artificial Sequence: Synthetic oligonucleotide
  Antisense strand to SEQ ID NO: 1931080
ugggccaaucagaacacac

SEQ ID NO: 1931082 - RNA, 19 nt, Artificial Sequence
  Description of Artificial Sequence: Synthetic oligonucleotide
  Sense strand starting at position 2459 of SEQ ID NO: 1879763
gguugcguuucacugggaa

SEQ ID NO: 1931083 - RNA, 19 nt, Artificial Sequence
  Description of Artificial Sequence: Synthetic oligonucleotide
  Antisense strand to SEQ ID NO: 1931082
uucccagugaaacgcaacc

SEQ ID NO: 1931084 - RNA, 19 nt, Artificial Sequence
  Description of Artificial Sequence: Synthetic oligonucleotide
  Sense strand starting at position 2677 of SEQ ID NO: 1879763
ugcccugagugcuugggua

SEQ ID NO: 1931085 - RNA, 19 nt, Artificial Sequence
  Description of Artificial Sequence: Synthetic oligonucleotide
  Antisense strand to SEQ ID NO: 1931084
uacccaagcacucagggca

SEQ ID NO: 1931086 - RNA, 19 nt, Artificial Sequence
  Description of Artificial Sequence: Synthetic oligonucleotide
  Sense strand starting at position 3071 of SEQ ID NO: 1879763
acagucuuccuccaugaag

SEQ ID NO: 1931087 - RNA, 19 nt, Artificial Sequence
  Description of Artificial Sequence: Synthetic oligonucleotide
  Antisense strand to SEQ ID NO: 1931086
cuucauggaggaagacugu

SEQ ID NO: 1931088 - RNA, 19 nt, Artificial Sequence
  Description of Artificial Sequence: Synthetic oligonucleotide
  Sense strand starting at position 3095 of SEQ ID NO: 1879763
ucauaugcucuagaaguua

SEQ ID NO: 1931089 - RNA, 19 nt, Artificial Sequence
  Description of Artificial Sequence: Synthetic oligonucleotide
  Antisense strand to SEQ ID NO: 1931088
uaacuucuagagcauauga

SEQ ID NO: 1931090 - RNA, 19 nt, Artificial Sequence
  Description of Artificial Sequence: Synthetic oligonucleotide
  Sense strand starting at position 3106 of SEQ ID NO: 1879763
agaaguuacuccuccauga

SEQ ID NO: 1931091 - RNA, 19 nt, Artificial Sequence
  Description of Artificial Sequence: Synthetic oligonucleotide
  Antisense strand to SEQ ID NO: 1931090
ucauggaggaguaacuucu

SEQ ID NO: 1931092 - RNA, 19 nt, Artificial Sequence
  Description of Artificial Sequence: Synthetic oligonucleotide
  Sense strand starting at position 3351 of SEQ ID NO: 1879763
gccauaccaccucgaacau

SEQ ID NO: 1931093 - RNA, 19 nt, Artificial Sequence
  Description of Artificial Sequence: Synthetic oligonucleotide
  Antisense strand to SEQ ID NO: 1931092
auguucgaggugguauggc

SEQ ID NO: 1931094 - RNA, 19 nt, Artificial Sequence
  Description of Artificial Sequence: Synthetic oligonucleotide
  Sense strand starting at position 3834 of SEQ ID NO: 1879763
agacuuuauugagcagaag

SEQ ID NO: 1931095 - RNA, 19 nt, Artificial Sequence
  Description of Artificial Sequence: Synthetic oligonucleotide
  Antisense strand to SEQ ID NO: 1931094
cuucugcucaauaaagucu

SEQ ID NO: 1931096 - RNA, 19 nt, Artificial Sequence
  Description of Artificial Sequence: Synthetic oligonucleotide
  Sense strand starting at position 3966 of SEQ ID NO: 1879763
ccaauaugugcauaaugag

SEQ ID NO: 1931097 - RNA, 19 nt, Artificial Sequence
  Description of Artificial Sequence: Synthetic oligonucleotide
  Antisense strand to SEQ ID NO: 1931096
cucauuaugcacauauugg

SEQ ID NO: 1931098 - RNA, 19 nt, Artificial Sequence
  Description of Artificial Sequence: Synthetic oligonucleotide
  Sense strand starting at position 3969 of SEQ ID NO: 1879763
auaugugcauaaugagagu

SEQ ID NO: 1931099 - RNA, 19 nt, Artificial Sequence
  Description of Artificial Sequence: Synthetic oligonucleotide
  Antisense strand to SEQ ID NO: 1931098
acucucauuaugcacauau

SEQ ID NO: 1931100 - RNA, 19 nt, Artificial Sequence
  Description of Artificial Sequence: Synthetic oligonucleotide
  Sense strand starting at position 3972 of SEQ ID NO: 1879763
ugugcauaaugagaguacu

SEQ ID NO: 1931101 - RNA, 19 nt, Artificial Sequence
  Description of Artificial Sequence: Synthetic oligonucleotide
  Antisense strand to SEQ ID NO: 1931100
aguacucucauuaugcaca

SEQ ID NO: 1931102 - RNA, 19 nt, Artificial Sequence
  Description of Artificial Sequence: Synthetic oligonucleotide
  Sense strand starting at position 3978 of SEQ ID NO: 1879763
uaaugagaguacuagaaga

SEQ ID NO: 1931103 - RNA, 19 nt, Artificial Sequence
  Description of Artificial Sequence: Synthetic oligonucleotide
  Antisense strand to SEQ ID NO: 1931102
ucuucuaguacucucauua

SEQ ID NO: 1931104 - RNA, 19 nt, Artificial Sequence
  Description of Artificial Sequence: Synthetic oligonucleotide
  Sense strand starting at position 191 of SEQ ID NO: 1879764
agucccucucaauauaagu

SEQ ID NO: 1931105 - RNA, 19 nt, Artificial Sequence
  Description of Artificial Sequence: Synthetic oligonucleotide
  Antisense strand to SEQ ID NO: 1931104
acuuauauugagagggacu

SEQ ID NO: 1931106 - RNA, 19 nt, Artificial Sequence
  Description of Artificial Sequence: Synthetic oligonucleotide
  Sense strand starting at position 247 of SEQ ID NO: 1879764
cuaguagagugacuaauga

SEQ ID NO: 1931107 - RNA, 19 nt, Artificial Sequence
  Description of Artificial Sequence: Synthetic oligonucleotide
  Antisense strand to SEQ ID NO: 1931106
ucauuagucacucuacuag

SEQ ID NO: 1931108 - RNA, 19 nt, Artificial Sequence
  Description of Artificial Sequence: Synthetic oligonucleotide
  Sense strand starting at position 269 of SEQ ID NO: 1879764
ccucuuugacaaugugaua

SEQ ID NO: 1931109 - RNA, 19 nt, Artificial Sequence
  Description of Artificial Sequence: Synthetic oligonucleotide
  Antisense strand to SEQ ID NO: 1931108
uaucacauugucaaagagg

SEQ ID NO: 1931110 - RNA, 19 nt, Artificial Sequence
  Description of Artificial Sequence: Synthetic oligonucleotide
  Sense strand starting at position 312 of SEQ ID NO: 1879764
gggagaaagccaugugacu

SEQ ID NO: 1931111 - RNA, 19 nt, Artificial Sequence
  Description of Artificial Sequence: Synthetic oligonucleotide
  Antisense strand to SEQ ID NO: 1931110
agucacauggcuuucuccc

SEQ ID NO: 1931112 - RNA, 19 nt, Artificial Sequence
  Description of Artificial Sequence: Synthetic oligonucleotide
  Sense strand starting at position 318 of SEQ ID NO: 1879764
aagccaugugacuagcuaa

SEQ ID NO: 1931113 - RNA, 19 nt, Artificial Sequence
  Description of Artificial Sequence: Synthetic oligonucleotide
  Antisense strand to SEQ ID NO: 1931112
uuagcuagucacauggcuu

SEQ ID NO: 1931114 - RNA, 19 nt, Artificial Sequence
  Description of Artificial Sequence: Synthetic oligonucleotide
  Sense strand starting at position 363 of SEQ ID NO: 1879764
uucuaaaugcucuagagua

SEQ ID NO: 1931115 - RNA, 19 nt, Artificial Sequence
  Description of Artificial Sequence: Synthetic oligonucleotide
  Antisense strand to SEQ ID NO: 1931114
uacucuagagcauuuagaa

SEQ ID NO: 1931116 - RNA, 19 nt, Artificial Sequence
  Description of Artificial Sequence: Synthetic oligonucleotide
  Sense strand starting at position 370 of SEQ ID NO: 1879764
ugcucuagaguaggaauau

SEQ ID NO: 1931117 - RNA, 19 nt, Artificial Sequence
  Description of Artificial Sequence: Synthetic oligonucleotide
  Antisense strand to SEQ ID NO: 1931116
auauuccuacucuagagca

SEQ ID NO: 1931118 - RNA, 19 nt, Artificial Sequence
  Description of Artificial Sequence: Synthetic oligonucleotide
  Sense strand starting at position 599 of SEQ ID NO: 1879764
auauguuaaguuugacauc

SEQ ID NO: 1931119 - RNA, 19 nt, Artificial Sequence
  Description of Artificial Sequence: Synthetic oligonucleotide
  Antisense strand to SEQ ID NO: 1931118
gaugucaaacuuaacauau

SEQ ID NO: 1931120 - RNA, 19 nt, Artificial Sequence
  Description of Artificial Sequence: Synthetic oligonucleotide
  Sense strand starting at position 608 of SEQ ID NO: 1879764
guuugacaucuagguagaa

SEQ ID NO: 1931121 - RNA, 19 nt, Artificial Sequence
  Description of Artificial Sequence: Synthetic oligonucleotide
  Antisense strand to SEQ ID NO: 1931120
uucuaccuagaugucaaac

SEQ ID NO: 1931122 - RNA, 19 nt, Artificial Sequence
  Description of Artificial Sequence: Synthetic oligonucleotide
  Sense strand starting at position 609 of SEQ ID NO: 1879764
uuugacaucuagguagaaa

SEQ ID NO: 1931123 - RNA, 19 nt, Artificial Sequence
  Description of Artificial Sequence: Synthetic oligonucleotide
  Antisense strand to SEQ ID NO: 1931122
uuucuaccuagaugucaaa

SEQ ID NO: 1931124 - RNA, 19 nt, Artificial Sequence
  Description of Artificial Sequence: Synthetic oligonucleotide
  Sense strand starting at position 646 of SEQ ID NO: 1879764
gagaaaugaguaugaggcu

SEQ ID NO: 1931125 - RNA, 19 nt, Artificial Sequence
  Description of Artificial Sequence: Synthetic oligonucleotide
  Antisense strand to SEQ ID NO: 1931124
agccucauacucauuucuc

SEQ ID NO: 1931126 - RNA, 19 nt, Artificial Sequence
  Description of Artificial Sequence: Synthetic oligonucleotide
  Sense strand starting at position 878 of SEQ ID NO: 1879764
ucuugaacucuacgaaaca

SEQ ID NO: 1931127 - RNA, 19 nt, Artificial Sequence
  Description of Artificial Sequence: Synthetic oligonucleotide
  Antisense strand to SEQ ID NO: 1931126
uguuucguagaguucaaga

SEQ ID NO: 1931128 - RNA, 19 nt, Artificial Sequence
  Description of Artificial Sequence: Synthetic oligonucleotide
  Sense strand starting at position 970 of SEQ ID NO: 1879764
guccaauucguauacuuga

SEQ ID NO: 1931129 - RNA, 19 nt, Artificial Sequence
  Description of Artificial Sequence: Synthetic oligonucleotide
  Antisense strand to SEQ ID NO: 1931128
ucaaguauacgaauuggac

SEQ ID NO: 1931130 - RNA, 19 nt, Artificial Sequence
  Description of Artificial Sequence: Synthetic oligonucleotide
  Sense strand starting at position 986 of SEQ ID NO: 1879764
ugauaccucuacuugaaug

SEQ ID NO: 1931131 - RNA, 19 nt, Artificial Sequence
  Description of Artificial Sequence: Synthetic oligonucleotide
  Antisense strand to SEQ ID NO: 1931130
cauucaaguagagguauca

SEQ ID NO: 1931132 - RNA, 19 nt, Artificial Sequence
  Description of Artificial Sequence: Synthetic oligonucleotide
  Sense strand starting at position 1014 of SEQ ID NO: 1879764
gucagaaguuaaccuguaa

SEQ ID NO: 1931133 - RNA, 19 nt, Artificial Sequence
  Description of Artificial Sequence: Synthetic oligonucleotide
  Antisense strand to SEQ ID NO: 1931132
uuacagguuaacuucugac

SEQ ID NO: 1931134 - RNA, 19 nt, Artificial Sequence
  Description of Artificial Sequence: Synthetic oligonucleotide
  Sense strand starting at position 1257 of SEQ ID NO: 1879764
ucauucucucuugggugaa

SEQ ID NO: 1931135 - RNA, 19 nt, Artificial Sequence
  Description of Artificial Sequence: Synthetic oligonucleotide
  Antisense strand to SEQ ID NO: 1931134
uucacccaagagagaauga

SEQ ID NO: 1931136 - RNA, 19 nt, Artificial Sequence
  Description of Artificial Sequence: Synthetic oligonucleotide
  Sense strand starting at position 1259 of SEQ ID NO: 1879764
auucucucuugggugaauu

SEQ ID NO: 1931137 - RNA, 19 nt, Artificial Sequence
  Description of Artificial Sequence: Synthetic oligonucleotide
  Antisense strand to SEQ ID NO: 1931136
aauucacccaagagagaau

SEQ ID NO: 1931138 - RNA, 19 nt, Artificial Sequence
  Description of Artificial Sequence: Synthetic oligonucleotide
  Sense strand starting at position 1260 of SEQ ID NO: 1879764
uucucucuugggugaauua

SEQ ID NO: 1931139 - RNA, 19 nt, Artificial Sequence
  Description of Artificial Sequence: Synthetic oligonucleotide
  Antisense strand to SEQ ID NO: 1931138
uaauucacccaagagagaa

SEQ ID NO: 1931140 - RNA, 19 nt, Artificial Sequence
  Description of Artificial Sequence: Synthetic oligonucleotide
  Sense strand starting at position 1261 of SEQ ID NO: 1879764
ucucucuugggugaauuau

SEQ ID NO: 1931141 - RNA, 19 nt, Artificial Sequence
  Description of Artificial Sequence: Synthetic oligonucleotide
  Antisense strand to SEQ ID NO: 1931140
auaauucacccaagagaga

SEQ ID NO: 1931142 - RNA, 19 nt, Artificial Sequence
  Description of Artificial Sequence: Synthetic oligonucleotide
  Sense strand starting at position 1267 of SEQ ID NO: 1879764
uugggugaauuauugcaau

SEQ ID NO: 1931143 - RNA, 19 nt, Artificial Sequence
  Description of Artificial Sequence: Synthetic oligonucleotide
  Antisense strand to SEQ ID NO: 1931142
auugcaauaauucacccaa

SEQ ID NO: 1931144 - RNA, 19 nt, Artificial Sequence
  Description of Artificial Sequence: Synthetic oligonucleotide
  Sense strand starting at position 1366 of SEQ ID NO: 1879764
agaauccaucagugacauc

SEQ ID NO: 1931145 - RNA, 19 nt, Artificial Sequence
  Description of Artificial Sequence: Synthetic oligonucleotide
  Antisense strand to SEQ ID NO: 1931144
gaugucacugauggauucu

SEQ ID NO: 1931146 - RNA, 19 nt, Artificial Sequence
  Description of Artificial Sequence: Synthetic oligonucleotide
  Sense strand starting at position 1414 of SEQ ID NO: 1879764
uuaucccuacgugaucuaa

SEQ ID NO: 1931147 - RNA, 19 nt, Artificial Sequence
  Description of Artificial Sequence: Synthetic oligonucleotide
  Antisense strand to SEQ ID NO: 1931146
uuagaucacguagggauaa

SEQ ID NO: 1931148 - RNA, 19 nt, Artificial Sequence
  Description of Artificial Sequence: Synthetic oligonucleotide
  Sense strand starting at position 1638 of SEQ ID NO: 1879764
aaugucauguccuuggaga

SEQ ID NO: 1931149 - RNA, 19 nt, Artificial Sequence
  Description of Artificial Sequence: Synthetic oligonucleotide
  Antisense strand to SEQ ID NO: 1931148
ucuccaaggacaugacauu

SEQ ID NO: 1931150 - RNA, 19 nt, Artificial Sequence
  Description of Artificial Sequence: Synthetic oligonucleotide
  Sense strand starting at position 1639 of SEQ ID NO: 1879764
augucauguccuuggagag

SEQ ID NO: 1931151 - RNA, 19 nt, Artificial Sequence
  Description of Artificial Sequence: Synthetic oligonucleotide
  Antisense strand to SEQ ID NO: 1931150
cucuccaaggacaugacau

SEQ ID NO: 1931152 - RNA, 19 nt, Artificial Sequence
  Description of Artificial Sequence: Synthetic oligonucleotide
  Sense strand starting at position 1727 of SEQ ID NO: 1879764
caugaugcccacuaagagu

SEQ ID NO: 1931153 - RNA, 19 nt, Artificial Sequence
  Description of Artificial Sequence: Synthetic oligonucleotide
  Antisense strand to SEQ ID NO: 1931152
acucuuagugggcaucaug

SEQ ID NO: 1931154 - RNA, 19 nt, Artificial Sequence
  Description of Artificial Sequence: Synthetic oligonucleotide
  Sense strand starting at position 1735 of SEQ ID NO: 1879764
ccacuaagaguuugauauu

SEQ ID NO: 1931155 - RNA, 19 nt, Artificial Sequence
  Description of Artificial Sequence: Synthetic oligonucleotide
  Antisense strand to SEQ ID NO: 1931154
aauaucaaacucuuagugg

SEQ ID NO: 1931156 - RNA, 19 nt, Artificial Sequence
  Description of Artificial Sequence: Synthetic oligonucleotide
  Sense strand starting at position 2096 of SEQ ID NO: 1879764
cugaaauguuuaccaauag

SEQ ID NO: 1931157 - RNA, 19 nt, Artificial Sequence
  Description of Artificial Sequence: Synthetic oligonucleotide
  Antisense strand to SEQ ID NO: 1931156
cuauugguaaacauuucag

SEQ ID NO: 1931158 - RNA, 19 nt, Artificial Sequence
  Description of Artificial Sequence: Synthetic oligonucleotide
  Sense strand starting at position 2125 of SEQ ID NO: 1879764
cagaguauuccauguaaga

SEQ ID NO: 1931159 - RNA, 19 nt, Artificial Sequence
  Description of Artificial Sequence: Synthetic oligonucleotide
  Antisense strand to SEQ ID NO: 1931158
ucuuacauggaauacucug

SEQ ID NO: 1931160 - RNA, 19 nt, Artificial Sequence
  Description of Artificial Sequence: Synthetic oligonucleotide
  Sense strand starting at position 2138 of SEQ ID NO: 1879764
guaagagcuaugcaguaaa

SEQ ID NO: 1931161 - RNA, 19 nt, Artificial Sequence
  Description of Artificial Sequence: Synthetic oligonucleotide
  Antisense strand to SEQ ID NO: 1931160
uuuacugcauagcucuuac

SEQ ID NO: 1931162 - RNA, 19 nt, Artificial Sequence
  Description of Artificial Sequence: Synthetic oligonucleotide
  Sense strand starting at position 2141 of SEQ ID NO: 1879764
agagcuaugcaguaaauag

SEQ ID NO: 1931163 - RNA, 19 nt, Artificial Sequence
  Description of Artificial Sequence: Synthetic oligonucleotide
  Antisense strand to SEQ ID NO: 1931162
cuauuuacugcauagcucu

SEQ ID NO: 1931164 - RNA, 19 nt, Artificial Sequence
  Description of Artificial Sequence: Synthetic oligonucleotide
  Sense strand starting at position 2175 of SEQ ID NO: 1879764
gucagauauccuuagccuc

SEQ ID NO: 1931165 - RNA, 19 nt, Artificial Sequence
  Description of Artificial Sequence: Synthetic oligonucleotide
  Antisense strand to SEQ ID NO: 1931164
gaggcuaaggauaucugac

SEQ ID NO: 1931166 - RNA, 19 nt, Artificial Sequence
  Description of Artificial Sequence: Synthetic oligonucleotide
  Sense strand starting at position 2243 of SEQ ID NO: 1879764
ccaguuugcauagaaugag

SEQ ID NO: 1931167 - RNA, 19 nt, Artificial Sequence
  Description of Artificial Sequence: Synthetic oligonucleotide
  Antisense strand to SEQ ID NO: 1931166
cucauucuaugcaaacugg

SEQ ID NO: 1931168 - RNA, 19 nt, Artificial Sequence
  Description of Artificial Sequence: Synthetic oligonucleotide
  Sense strand starting at position 2338 of SEQ ID NO: 1879764
uggugugcuggagaaacaa

SEQ ID NO: 1931169 - RNA, 19 nt, Artificial Sequence
  Description of Artificial Sequence: Synthetic oligonucleotide
  Antisense strand to SEQ ID NO: 1931168
uuguuucuccagcacacca

SEQ ID NO: 1931170 - RNA, 19 nt, Artificial Sequence
  Description of Artificial Sequence: Synthetic oligonucleotide
  Sense strand starting at position 2482 of SEQ ID NO: 1879764
aacagagaagcaugucuuu

SEQ ID NO: 1931171 - RNA, 19 nt, Artificial Sequence
  Description of Artificial Sequence: Synthetic oligonucleotide
  Antisense strand to SEQ ID NO: 1931170
aaagacaugcuucucuguu

SEQ ID NO: 1931172 - RNA, 19 nt, Artificial Sequence
  Description of Artificial Sequence: Synthetic oligonucleotide
  Sense strand starting at position 2485 of SEQ ID NO: 1879764
agagaagcaugucuuuaca

SEQ ID NO: 1931173 - RNA, 19 nt, Artificial Sequence
  Description of Artificial Sequence: Synthetic oligonucleotide
  Antisense strand to SEQ ID NO: 1931172
uguaaagacaugcuucucu

SEQ ID NO: 1931174 - RNA, 19 nt, Artificial Sequence
  Description of Artificial Sequence: Synthetic oligonucleotide
  Sense strand starting at position 2717 of SEQ ID NO: 1879764
acacuugaccaagguuaca

SEQ ID NO: 1931175 - RNA, 19 nt, Artificial Sequence
  Description of Artificial Sequence: Synthetic oligonucleotide
  Antisense strand to SEQ ID NO: 1931174
uguaaccuuggucaagugu

SEQ ID NO: 1931176 - RNA, 19 nt, Artificial Sequence
  Description of Artificial Sequence: Synthetic oligonucleotide
  Sense strand starting at position 2791 of SEQ ID NO: 1879764
uuagucaaacagugaguga

SEQ ID NO: 1931177 - RNA, 19 nt, Artificial Sequence
  Description of Artificial Sequence: Synthetic oligonucleotide
  Antisense strand to SEQ ID NO: 1931176
ucacucacuguuugacuaa

SEQ ID NO: 1931178 - RNA, 19 nt, Artificial Sequence
  Description of Artificial Sequence: Synthetic oligonucleotide
  Sense strand starting at position 2795 of SEQ ID NO: 1879764
ucaaacagugagugacuua

SEQ ID NO: 1931179 - RNA, 19 nt, Artificial Sequence
  Description of Artificial Sequence: Synthetic oligonucleotide
  Antisense strand to SEQ ID NO: 1931178
uaagucacucacuguuuga

SEQ ID NO: 1931180 - RNA, 19 nt, Artificial Sequence
  Description of Artificial Sequence: Synthetic oligonucleotide
  Sense strand starting at position 3186 of SEQ ID NO: 1879764
gauauaugccuaugaugau

SEQ ID NO: 1931181 - RNA, 19 nt, Artificial Sequence
  Description of Artificial Sequence: Synthetic oligonucleotide
  Antisense strand to SEQ ID NO: 1931180
aucaucauaggcauauauc

SEQ ID NO: 1931182 - RNA, 19 nt, Artificial Sequence
  Description of Artificial Sequence: Synthetic oligonucleotide
  Sense strand starting at position 3192 of SEQ ID NO: 1879764
ugccuaugaugaucugaau

SEQ ID NO: 1931183 - RNA, 19 nt, Artificial Sequence
  Description of Artificial Sequence: Synthetic oligonucleotide
  Antisense strand to SEQ ID NO: 1931182
auucagaucaucauaggca

SEQ ID NO: 1931184 - RNA, 19 nt, Artificial Sequence
  Description of Artificial Sequence: Synthetic oligonucleotide
  Sense strand starting at position 16 of SEQ ID NO: 1879765
ugggccauuaucgaagaau

SEQ ID NO: 1931185 - RNA, 19 nt, Artificial Sequence
  Description of Artificial Sequence: Synthetic oligonucleotide
  Antisense strand to SEQ ID NO: 1931184
auucuucgauaauggccca

SEQ ID NO: 1931186 - RNA, 19 nt, Artificial Sequence
  Description of Artificial Sequence: Synthetic oligonucleotide
  Sense strand starting at position 673 of SEQ ID NO: 1879765
cguugacuauucucuacaa

SEQ ID NO: 1931187 - RNA, 19 nt, Artificial Sequence
  Description of Artificial Sequence: Synthetic oligonucleotide
  Antisense strand to SEQ ID NO: 1931186
uuguagagaauagucaacg

SEQ ID NO: 1931188 - RNA, 19 nt, Artificial Sequence
  Description of Artificial Sequence: Synthetic oligonucleotide
  Sense strand starting at position 717 of SEQ ID NO: 1879765
ccuauuauucggcgcauga

SEQ ID NO: 1931189 - RNA, 19 nt, Artificial Sequence
  Description of Artificial Sequence: Synthetic oligonucleotide
  Antisense strand to SEQ ID NO: 1931188
ucaugcgccgaauaauagg

SEQ ID NO: 1931190 - RNA, 19 nt, Artificial Sequence
  Description of Artificial Sequence: Synthetic oligonucleotide
  Sense strand starting at position 791 of SEQ ID NO: 1879765
caggcaaccuucuagguaa

SEQ ID NO: 1931191 - RNA, 19 nt, Artificial Sequence
  Description of Artificial Sequence: Synthetic oligonucleotide
  Antisense strand to SEQ ID NO: 1931190
uuaccuagaagguugccug

SEQ ID NO: 1931192 - RNA, 19 nt, Artificial Sequence
  Description of Artificial Sequence: Synthetic oligonucleotide
  Sense strand starting at position 838 of SEQ ID NO: 1879765
gcccaugcauuuguaauaa

SEQ ID NO: 1931193 - RNA, 19 nt, Artificial Sequence
  Description of Artificial Sequence: Synthetic oligonucleotide
  Antisense strand to SEQ ID NO: 1931192
uuauuacaaaugcaugggc

SEQ ID NO: 1931194 - RNA, 19 nt, Artificial Sequence
  Description of Artificial Sequence: Synthetic oligonucleotide
  Sense strand starting at position 875 of SEQ ID NO: 1879765
ccaucauaaucggaggcuu

SEQ ID NO: 1931195 - RNA, 19 nt, Artificial Sequence
  Description of Artificial Sequence: Synthetic oligonucleotide
  Antisense strand to SEQ ID NO: 1931194
aagccuccgauuaugaugg

SEQ ID NO: 1931196 - RNA, 19 nt, Artificial Sequence
  Description of Artificial Sequence: Synthetic oligonucleotide
  Sense strand starting at position 1119 of SEQ ID NO: 1879765
agguaucuccucuaucuua

SEQ ID NO: 1931197 - RNA, 19 nt, Artificial Sequence
  Description of Artificial Sequence: Synthetic oligonucleotide
  Antisense strand to SEQ ID NO: 1931196
uaagauagaggagauaccu

SEQ ID NO: 1931198 - RNA, 19 nt, Artificial Sequence
  Description of Artificial Sequence: Synthetic oligonucleotide
  Sense strand starting at position 1127 of SEQ ID NO: 1879765
ccucuaucuuaggagccau

SEQ ID NO: 1931199 - RNA, 19 nt, Artificial Sequence
  Description of Artificial Sequence: Synthetic oligonucleotide
  Antisense strand to SEQ ID NO: 1931198
auggcuccuaagauagagg

SEQ ID NO: 1931200 - RNA, 19 nt, Artificial Sequence
  Description of Artificial Sequence: Synthetic oligonucleotide
  Sense strand starting at position 1209 of SEQ ID NO: 1879765
uuucgucugauccguccua

SEQ ID NO: 1931201 - RNA, 19 nt, Artificial Sequence
  Description of Artificial Sequence: Synthetic oligonucleotide
  Antisense strand to SEQ ID NO: 1931200
uaggacggaucagacgaaa

SEQ ID NO: 1931202 - RNA, 19 nt, Artificial Sequence
  Description of Artificial Sequence: Synthetic oligonucleotide
  Sense strand starting at position 1210 of SEQ ID NO: 1879765
uucgucugauccguccuaa

SEQ ID NO: 1931203 - RNA, 19 nt, Artificial Sequence
  Description of Artificial Sequence: Synthetic oligonucleotide
  Antisense strand to SEQ ID NO: 1931202
uuaggacggaucagacgaa

SEQ ID NO: 1931204 - RNA, 19 nt, Artificial Sequence
  Description of Artificial Sequence: Synthetic oligonucleotide
  Sense strand starting at position 1372 of SEQ ID NO: 1879765
uucggucacccugaaguuu

SEQ ID NO: 1931205 - RNA, 19 nt, Artificial Sequence
  Description of Artificial Sequence: Synthetic oligonucleotide
  Antisense strand to SEQ ID NO: 1931204
aaacuucagggugaccgaa

SEQ ID NO: 1931206 - RNA, 19 nt, Artificial Sequence
  Description of Artificial Sequence: Synthetic oligonucleotide
  Sense strand starting at position 1432 of SEQ ID NO: 1879765
guaacuuacuacuccggga

SEQ ID NO: 1931207 - RNA, 19 nt, Artificial Sequence
  Description of Artificial Sequence: Synthetic oligonucleotide
  Antisense strand to SEQ ID NO: 1931206
ucccggaguaguaaguuac

SEQ ID NO: 1931208 - RNA, 19 nt, Artificial Sequence
  Description of Artificial Sequence: Synthetic oligonucleotide
  Sense strand starting at position 1511 of SEQ ID NO: 1879765
ggguuuaucgugugagcac

SEQ ID NO: 1931209 - RNA, 19 nt, Artificial Sequence
  Description of Artificial Sequence: Synthetic oligonucleotide
  Antisense strand to SEQ ID NO: 1931208
gugcucacacgauaaaccc

SEQ ID NO: 1931210 - RNA, 19 nt, Artificial Sequence
  Description of Artificial Sequence: Synthetic oligonucleotide
  Sense strand starting at position 1717 of SEQ ID NO: 1879765
ccugacuggcauuguauua

SEQ ID NO: 1931211 - RNA, 19 nt, Artificial Sequence
  Description of Artificial Sequence: Synthetic oligonucleotide
  Antisense strand to SEQ ID NO: 1931210
uaauacaaugccagucagg

SEQ ID NO: 1931212 - RNA, 19 nt, Artificial Sequence
  Description of Artificial Sequence: Synthetic oligonucleotide
  Sense strand starting at position 1813 of SEQ ID NO: 1879765
agcuguauuugccaucaua

SEQ ID NO: 1931213 - RNA, 19 nt, Artificial Sequence
  Description of Artificial Sequence: Synthetic oligonucleotide
  Antisense strand to SEQ ID NO: 1931212
uaugauggcaaauacagcu

SEQ ID NO: 1931214 - RNA, 19 nt, Artificial Sequence
  Description of Artificial Sequence: Synthetic oligonucleotide
  Sense strand starting at position 1920 of SEQ ID NO: 1879765
gcguaaaucuaacuuucuu

SEQ ID NO: 1931215 - RNA, 19 nt, Artificial Sequence
  Description of Artificial Sequence: Synthetic oligonucleotide
  Antisense strand to SEQ ID NO: 1931214
aagaaaguuagauuuacgc

SEQ ID NO: 1931216 - RNA, 19 nt, Artificial Sequence
  Description of Artificial Sequence: Synthetic oligonucleotide
  Sense strand starting at position 1982 of SEQ ID NO: 1879765
ucggacuaucccgaugcau

SEQ ID NO: 1931217 - RNA, 19 nt, Artificial Sequence
  Description of Artificial Sequence: Synthetic oligonucleotide
  Antisense strand to SEQ ID NO: 1931216
augcaucgggauaguccga

SEQ ID NO: 1931218 - RNA, 19 nt, Artificial Sequence
  Description of Artificial Sequence: Synthetic oligonucleotide
  Sense strand starting at position 1984 of SEQ ID NO: 1879765
ggacuaucccgaugcauac

SEQ ID NO: 1931219 - RNA, 19 nt, Artificial Sequence
  Description of Artificial Sequence: Synthetic oligonucleotide
  Antisense strand to SEQ ID NO: 1931218
guaugcaucgggauagucc

SEQ ID NO: 1931220 - RNA, 19 nt, Artificial Sequence
  Description of Artificial Sequence: Synthetic oligonucleotide
  Sense strand starting at position 2103 of SEQ ID NO: 1879765
aaguccuaauaguagaaga

SEQ ID NO: 1931221 - RNA, 19 nt, Artificial Sequence
  Description of Artificial Sequence: Synthetic oligonucleotide
  Antisense strand to SEQ ID NO: 1931220
ucuucuacuauuaggacuu

SEQ ID NO: 1931222 - RNA, 19 nt, Artificial Sequence
  Description of Artificial Sequence: Synthetic oligonucleotide
  Sense strand starting at position 2394 of SEQ ID NO: 1879765
agaagagcuuaucaucuuu

SEQ ID NO: 1931223 - RNA, 19 nt, Artificial Sequence
  Description of Artificial Sequence: Synthetic oligonucleotide
  Antisense strand to SEQ ID NO: 1931222
aaagaugauaagcucuucu

SEQ ID NO: 1931224 - RNA, 19 nt, Artificial Sequence
  Description of Artificial Sequence: Synthetic oligonucleotide
  Sense strand starting at position 2508 of SEQ ID NO: 1879765
cucagacgcucaggaaaua

SEQ ID NO: 1931225 - RNA, 19 nt, Artificial Sequence
  Description of Artificial Sequence: Synthetic oligonucleotide
  Antisense strand to SEQ ID NO: 1931224
uauuuccugagcgucugag

SEQ ID NO: 1931226 - RNA, 19 nt, Artificial Sequence
  Description of Artificial Sequence: Synthetic oligonucleotide
  Sense strand starting at position 2520 of SEQ ID NO: 1879765
ggaaauagaaaccgucuga

SEQ ID NO: 1931227 - RNA, 19 nt, Artificial Sequence
  Description of Artificial Sequence: Synthetic oligonucleotide
  Antisense strand to SEQ ID NO: 1931226
ucagacgguuucuauuucc

SEQ ID NO: 1931228 - RNA, 19 nt, Artificial Sequence
  Description of Artificial Sequence: Synthetic oligonucleotide
  Sense strand starting at position 2524 of SEQ ID NO: 1879765
auagaaaccgucugaacua

SEQ ID NO: 1931229 - RNA, 19 nt, Artificial Sequence
  Description of Artificial Sequence: Synthetic oligonucleotide
  Antisense strand to SEQ ID NO: 1931228
uaguucagacgguuucuau

SEQ ID NO: 1931230 - RNA, 19 nt, Artificial Sequence
  Description of Artificial Sequence: Synthetic oligonucleotide
  Sense strand starting at position 2525 of SEQ ID NO: 1879765
uagaaaccgucugaacuau

SEQ ID NO: 1931231 - RNA, 19 nt, Artificial Sequence
  Description of Artificial Sequence: Synthetic oligonucleotide
  Antisense strand to SEQ ID NO: 1931230
auaguucagacgguuucua

SEQ ID NO: 1931232 - RNA, 19 nt, Artificial Sequence
  Description of Artificial Sequence: Synthetic oligonucleotide
  Sense strand starting at position 2644 of SEQ ID NO: 1879765
ggccaucaaugguacugaa

SEQ ID NO: 1931233 - RNA, 19 nt, Artificial Sequence
  Description of Artificial Sequence: Synthetic oligonucleotide
  Antisense strand to SEQ ID NO: 1931232
uucaguaccauugauggcc

SEQ ID NO: 1931234 - RNA, 19 nt, Artificial Sequence
  Description of Artificial Sequence: Synthetic oligonucleotide
  Sense strand starting at position 2745 of SEQ ID NO: 1879765
acuccuugacguugacaau

SEQ ID NO: 1931235 - RNA, 19 nt, Artificial Sequence
  Description of Artificial Sequence: Synthetic oligonucleotide
  Antisense strand to SEQ ID NO: 1931234
auugucaacgucaaggagu

SEQ ID NO: 1931236 - RNA, 19 nt, Artificial Sequence
  Description of Artificial Sequence: Synthetic oligonucleotide
  Sense strand starting at position 2756 of SEQ ID NO: 1879765
uugacaaucgaguaguacu

SEQ ID NO: 1931237 - RNA, 19 nt, Artificial Sequence
  Description of Artificial Sequence: Synthetic oligonucleotide
  Antisense strand to SEQ ID NO: 1931236
aguacuacucgauugucaa

SEQ ID NO: 1931238 - RNA, 19 nt, Artificial Sequence
  Description of Artificial Sequence: Synthetic oligonucleotide
  Sense strand starting at position 2766 of SEQ ID NO: 1879765
aguaguacucccgguugaa

SEQ ID NO: 1931239 - RNA, 19 nt, Artificial Sequence
  Description of Artificial Sequence: Synthetic oligonucleotide
  Antisense strand to SEQ ID NO: 1931238
uucaaccgggaguacuacu

SEQ ID NO: 1931240 - RNA, 19 nt, Artificial Sequence
  Description of Artificial Sequence: Synthetic oligonucleotide
  Sense strand starting at position 2863 of SEQ ID NO: 1879765
gcaauucccggacgucuaa

SEQ ID NO: 1931241 - RNA, 19 nt, Artificial Sequence
  Description of Artificial Sequence: Synthetic oligonucleotide
  Antisense strand to SEQ ID NO: 1931240
uuagacguccgggaauugc

SEQ ID NO: 1931242 - RNA, 19 nt, Artificial Sequence
  Description of Artificial Sequence: Synthetic oligonucleotide
  Sense strand starting at position 2922 of SEQ ID NO: 1879765
cggccaaugcucugaaauc

SEQ ID NO: 1931243 - RNA, 19 nt, Artificial Sequence
  Description of Artificial Sequence: Synthetic oligonucleotide
  Antisense strand to SEQ ID NO: 1931242
gauuucagagcauuggccg

SEQ ID NO: 1931244 - RNA, 19 nt, Artificial Sequence
  Description of Artificial Sequence: Synthetic oligonucleotide
  Sense strand starting at position 2923 of SEQ ID NO: 1879765
ggccaaugcucugaaaucu

SEQ ID NO: 1931245 - RNA, 19 nt, Artificial Sequence
  Description of Artificial Sequence: Synthetic oligonucleotide
  Antisense strand to SEQ ID NO: 1931244
agauuucagagcauuggcc

SEQ ID NO: 1931246 - RNA, 19 nt, Artificial Sequence
  Description of Artificial Sequence: Synthetic oligonucleotide
  Sense strand starting at position 2931 of SEQ ID NO: 1879765
cucugaaaucuguggagca

SEQ ID NO: 1931247 - RNA, 19 nt, Artificial Sequence
  Description of Artificial Sequence: Synthetic oligonucleotide
  Antisense strand to SEQ ID NO: 1931246
ugcuccacagauuucagag

SEQ ID NO: 1931248 - RNA, 19 nt, Artificial Sequence
  Description of Artificial Sequence: Synthetic oligonucleotide
  Sense strand starting at position 2932 of SEQ ID NO: 1879765
ucugaaaucuguggagcaa

SEQ ID NO: 1931249 - RNA, 19 nt, Artificial Sequence
  Description of Artificial Sequence: Synthetic oligonucleotide
  Antisense strand to SEQ ID NO: 1931248
uugcuccacagauuucaga

SEQ ID NO: 1931250 - RNA, 19 nt, Artificial Sequence
  Description of Artificial Sequence: Synthetic oligonucleotide
  Sense strand starting at position 2963 of SEQ ID NO: 1879765
cccaucguccuagaauuaa

SEQ ID NO: 1931251 - RNA, 19 nt, Artificial Sequence
  Description of Artificial Sequence: Synthetic oligonucleotide
  Antisense strand to SEQ ID NO: 1931250
uuaauucuaggacgauggg

SEQ ID NO: 1931252 - RNA, 19 nt, Artificial Sequence
  Description of Artificial Sequence: Synthetic oligonucleotide
  Sense strand starting at position 3130 of SEQ ID NO: 1879765
acuaaauacuaccguauga

SEQ ID NO: 1931253 - RNA, 19 nt, Artificial Sequence
  Description of Artificial Sequence: Synthetic oligonucleotide
  Antisense strand to SEQ ID NO: 1931252
ucauacgguaguauuuagu

SEQ ID NO: 1931254 - RNA, 19 nt, Artificial Sequence
  Description of Artificial Sequence: Synthetic oligonucleotide
  Sense strand starting at position 3475 of SEQ ID NO: 1879765
ggacgaaccugaucucuua

SEQ ID NO: 1931255 - RNA, 19 nt, Artificial Sequence
  Description of Artificial Sequence: Synthetic oligonucleotide
  Antisense strand to SEQ ID NO: 1931254
uaagagaucagguucgucc

SEQ ID NO: 1931256 - RNA, 19 nt, Artificial Sequence
  Description of Artificial Sequence: Synthetic oligonucleotide
  Sense strand starting at position 3627 of SEQ ID NO: 1879765
aggcuuucgcucuaagauu

SEQ ID NO: 1931257 - RNA, 19 nt, Artificial Sequence
  Description of Artificial Sequence: Synthetic oligonucleotide
  Antisense strand to SEQ ID NO: 1931256
aaucuuagagcgaaagccu

SEQ ID NO: 1931258 - RNA, 19 nt, Artificial Sequence
  Description of Artificial Sequence: Synthetic oligonucleotide
  Sense strand starting at position 3698 of SEQ ID NO: 1879765
cuauacuaguuauuaucga

SEQ ID NO: 1931259 - RNA, 19 nt, Artificial Sequence
  Description of Artificial Sequence: Synthetic oligonucleotide
  Antisense strand to SEQ ID NO: 1931258
ucgauaauaacuaguauag

SEQ ID NO: 1931260 - RNA, 19 nt, Artificial Sequence
  Description of Artificial Sequence: Synthetic oligonucleotide
  Sense strand starting at position 3756 of SEQ ID NO: 1879765
acgccuaaccgcuaacauu

SEQ ID NO: 1931261 - RNA, 19 nt, Artificial Sequence
  Description of Artificial Sequence: Synthetic oligonucleotide
  Antisense strand to SEQ ID NO: 1931260
aauguuagcgguuaggcgu

SEQ ID NO: 1931262 - RNA, 19 nt, Artificial Sequence
  Description of Artificial Sequence: Synthetic oligonucleotide
  Sense strand starting at position 3887 of SEQ ID NO: 1879765
uagaaaucgcugucgccuu

SEQ ID NO: 1931263 - RNA, 19 nt, Artificial Sequence
  Description of Artificial Sequence: Synthetic oligonucleotide
  Antisense strand to SEQ ID NO: 1931262
aaggcgacagcgauuucua

SEQ ID NO: 1931264 - RNA, 19 nt, Artificial Sequence
  Description of Artificial Sequence: Synthetic oligonucleotide
  Sense strand starting at position 954 of SEQ ID NO: 1879766
gcugaaaugucuccaccca

SEQ ID NO: 1931265 - RNA, 19 nt, Artificial Sequence
  Description of Artificial Sequence: Synthetic oligonucleotide
  Antisense strand to SEQ ID NO: 1931264
uggguggagacauuucagc

SEQ ID NO: 1931266 - RNA, 19 nt, Artificial Sequence
  Description of Artificial Sequence: Synthetic oligonucleotide
  Sense strand starting at position 1349 of SEQ ID NO: 1879766
gggagucucggcggaacuu

SEQ ID NO: 1931267 - RNA, 19 nt, Artificial Sequence
  Description of Artificial Sequence: Synthetic oligonucleotide
  Antisense strand to SEQ ID NO: 1931266
aaguuccgccgagacuccc

SEQ ID NO: 1931268 - RNA, 19 nt, Artificial Sequence
  Description of Artificial Sequence: Synthetic oligonucleotide
  Sense strand starting at position 1350 of SEQ ID NO: 1879766
ggagucucggcggaacuua

SEQ ID NO: 1931269 - RNA, 19 nt, Artificial Sequence
  Description of Artificial Sequence: Synthetic oligonucleotide
  Antisense strand to SEQ ID NO: 1931268
uaaguuccgccgagacucc

SEQ ID NO: 1931270 - RNA, 19 nt, Artificial Sequence
  Description of Artificial Sequence: Synthetic oligonucleotide
  Sense strand starting at position 1392 of SEQ ID NO: 1879766
ggcagugcguguucagagu

SEQ ID NO: 1931271 - RNA, 19 nt, Artificial Sequence
  Description of Artificial Sequence: Synthetic oligonucleotide
  Antisense strand to SEQ ID NO: 1931270
acucugaacacgcacugcc

SEQ ID NO: 1931272 - RNA, 19 nt, Artificial Sequence
  Description of Artificial Sequence: Synthetic oligonucleotide
  Sense strand starting at position 1398 of SEQ ID NO: 1879766
gcguguucagaguguggaa

SEQ ID NO: 1931273 - RNA, 19 nt, Artificial Sequence
  Description of Artificial Sequence: Synthetic oligonucleotide
  Antisense strand to SEQ ID NO: 1931272
uuccacacucugaacacgc

SEQ ID NO: 1931274 - RNA, 19 nt, Artificial Sequence
  Description of Artificial Sequence: Synthetic oligonucleotide
  Sense strand starting at position 1400 of SEQ ID NO: 1879766
guguucagaguguggaaca

SEQ ID NO: 1931275 - RNA, 19 nt, Artificial Sequence
  Description of Artificial Sequence: Synthetic oligonucleotide
  Antisense strand to SEQ ID NO: 1931274
uguuccacacucugaacac

SEQ ID NO: 1931276 - RNA, 19 nt, Artificial Sequence
  Description of Artificial Sequence: Synthetic oligonucleotide
  Sense strand starting at position 1707 of SEQ ID NO: 1879766
gcgccuuccgcagaaacuu

SEQ ID NO: 1931277 - RNA, 19 nt, Artificial Sequence
  Description of Artificial Sequence: Synthetic oligonucleotide
  Antisense strand to SEQ ID NO: 1931276
aaguuucugcggaaggcgc

SEQ ID NO: 1931278 - RNA, 19 nt, Artificial Sequence
  Description of Artificial Sequence: Synthetic oligonucleotide
  Sense strand starting at position 1731 of SEQ ID NO: 1879766
ccacguauuuguccuugau

SEQ ID NO: 1931279 - RNA, 19 nt, Artificial Sequence
  Description of Artificial Sequence: Synthetic oligonucleotide
  Antisense strand to SEQ ID NO: 1931278
aucaaggacaaauacgugg

SEQ ID NO: 1931280 - RNA, 19 nt, Artificial Sequence
  Description of Artificial Sequence: Synthetic oligonucleotide
  Sense strand starting at position 1734 of SEQ ID NO: 1879766
cguauuuguccuugaucca

SEQ ID NO: 1931281 - RNA, 19 nt, Artificial Sequence
  Description of Artificial Sequence: Synthetic oligonucleotide
  Antisense strand to SEQ ID NO: 1931280
uggaucaaggacaaauacg

SEQ ID NO: 1931282 - RNA, 19 nt, Artificial Sequence
  Description of Artificial Sequence: Synthetic oligonucleotide
  Sense strand starting at position 1885 of SEQ ID NO: 1879766
cacacugggccucauagau

SEQ ID NO: 1931283 - RNA, 19 nt, Artificial Sequence
  Description of Artificial Sequence: Synthetic oligonucleotide
  Antisense strand to SEQ ID NO: 1931282
aucuaugaggcccagugug

SEQ ID NO: 1931284 - RNA, 19 nt, Artificial Sequence
  Description of Artificial Sequence: Synthetic oligonucleotide
  Sense strand starting at position 494 of SEQ ID NO: 1879767
acgggaaccucgguaagaa

SEQ ID NO: 1931285 - RNA, 19 nt, Artificial Sequence
  Description of Artificial Sequence: Synthetic oligonucleotide
  Antisense strand to SEQ ID NO: 1931284
uucuuaccgagguucccgu

SEQ ID NO: 1931286 - RNA, 19 nt, Artificial Sequence
  Description of Artificial Sequence: Synthetic oligonucleotide
  Sense strand starting at position 495 of SEQ ID NO: 1879767
cgggaaccucgguaagaaa

SEQ ID NO: 1931287 - RNA, 19 nt, Artificial Sequence
  Description of Artificial Sequence: Synthetic oligonucleotide
  Antisense strand to SEQ ID NO: 1931286
uuucuuaccgagguucccg

SEQ ID NO: 1931288 - RNA, 19 nt, Artificial Sequence
  Description of Artificial Sequence: Synthetic oligonucleotide
  Sense strand starting at position 521 of SEQ ID NO: 1879767
acgagaagcuccugucaug

SEQ ID NO: 1931289 - RNA, 19 nt, Artificial Sequence
  Description of Artificial Sequence: Synthetic oligonucleotide
  Antisense strand to SEQ ID NO: 1931288
caugacaggagcuucucgu

SEQ ID NO: 1931290 - RNA, 19 nt, Artificial Sequence
  Description of Artificial Sequence: Synthetic oligonucleotide
  Sense strand starting at position 1322 of SEQ ID NO: 1879767
ucagcagagaugugaggaa

SEQ ID NO: 1931291 - RNA, 19 nt, Artificial Sequence
  Description of Artificial Sequence: Synthetic oligonucleotide
  Antisense strand to SEQ ID NO: 1931290
uuccucacaucucugcuga

SEQ ID NO: 1931292 - RNA, 19 nt, Artificial Sequence
  Description of Artificial Sequence: Synthetic oligonucleotide
  Sense strand starting at position 1400 of SEQ ID NO: 1879767
gaggaauguugauaccugu

SEQ ID NO: 1931293 - RNA, 19 nt, Artificial Sequence
  Description of Artificial Sequence: Synthetic oligonucleotide
  Antisense strand to SEQ ID NO: 1931292
acagguaucaacauuccuc

SEQ ID NO: 1931294 - RNA, 19 nt, Artificial Sequence
  Description of Artificial Sequence: Synthetic oligonucleotide
  Sense strand starting at position 1403 of SEQ ID NO: 1879767
gaauguugauaccuguguu

SEQ ID NO: 1931295 - RNA, 19 nt, Artificial Sequence
  Description of Artificial Sequence: Synthetic oligonucleotide
  Antisense strand to SEQ ID NO: 1931294
aacacagguaucaacauuc

SEQ ID NO: 1931296 - RNA, 19 nt, Artificial Sequence
  Description of Artificial Sequence: Synthetic oligonucleotide
  Sense strand starting at position 1406 of SEQ ID NO: 1879767
uguugauaccuguguugac

SEQ ID NO: 1931297 - RNA, 19 nt, Artificial Sequence
  Description of Artificial Sequence: Synthetic oligonucleotide
  Antisense strand to SEQ ID NO: 1931296
gucaacacagguaucaaca

SEQ ID NO: 1931298 - RNA, 19 nt, Artificial Sequence
  Description of Artificial Sequence: Synthetic oligonucleotide
  Sense strand starting at position 1771 of SEQ ID NO: 1879767
agggcuugcucugaggaca

SEQ ID NO: 1931299 - RNA, 19 nt, Artificial Sequence
  Description of Artificial Sequence: Synthetic oligonucleotide
  Antisense strand to SEQ ID NO: 1931298
uguccucagagcaagcccu

SEQ ID NO: 1931300 - RNA, 19 nt, Artificial Sequence
  Description of Artificial Sequence: Synthetic oligonucleotide
  Sense strand starting at position 2335 of SEQ ID NO: 1879767
ccgcgugugcgcugaauga

SEQ ID NO: 1931301 - RNA, 19 nt, Artificial Sequence
  Description of Artificial Sequence: Synthetic oligonucleotide
  Antisense strand to SEQ ID NO: 1931300
ucauucagcgcacacgcgg

SEQ ID NO: 1931302 - RNA, 19 nt, Artificial Sequence
  Description of Artificial Sequence: Synthetic oligonucleotide
  Sense strand starting at position 2337 of SEQ ID NO: 1879767
gcgugugcgcugaaugaca

SEQ ID NO: 1931303 - RNA, 19 nt, Artificial Sequence
  Description of Artificial Sequence: Synthetic oligonucleotide
  Antisense strand to SEQ ID NO: 1931302
ugucauucagcgcacacgc

SEQ ID NO: 1931304 - RNA, 19 nt, Artificial Sequence
  Description of Artificial Sequence: Synthetic oligonucleotide
  Sense strand starting at position 2344 of SEQ ID NO: 1879767
cgcugaaugacauguacuc

SEQ ID NO: 1931305 - RNA, 19 nt, Artificial Sequence
  Description of Artificial Sequence: Synthetic oligonucleotide
  Antisense strand to SEQ ID NO: 1931304
gaguacaugucauucagcg

SEQ ID NO: 1931306 - RNA, 19 nt, Artificial Sequence
  Description of Artificial Sequence: Synthetic oligonucleotide
  Sense strand starting at position 2960 of SEQ ID NO: 1879767
cggcccauuuccggaagau

SEQ ID NO: 1931307 - RNA, 19 nt, Artificial Sequence
  Description of Artificial Sequence: Synthetic oligonucleotide
  Antisense strand to SEQ ID NO: 1931306
aucuuccggaaaugggccg

SEQ ID NO: 1931308 - RNA, 19 nt, Artificial Sequence
  Description of Artificial Sequence: Synthetic oligonucleotide
  Sense strand starting at position 3002 of SEQ ID NO: 1879767
gcauuccuggcguggcaaa

SEQ ID NO: 1931309 - RNA, 19 nt, Artificial Sequence
  Description of Artificial Sequence: Synthetic oligonucleotide
  Antisense strand to SEQ ID NO: 1931308
uuugccacgccaggaaugc

SEQ ID NO: 1931310 - RNA, 19 nt, Artificial Sequence
  Description of Artificial Sequence: Synthetic oligonucleotide
  Sense strand starting at position 3170 of SEQ ID NO: 1879767
gguccuggguugucagcaa

SEQ ID NO: 1931311 - RNA, 19 nt, Artificial Sequence
  Description of Artificial Sequence: Synthetic oligonucleotide
  Antisense strand to SEQ ID NO: 1931310
uugcugacaacccaggacc

SEQ ID NO: 1931312 - RNA, 19 nt, Artificial Sequence
  Description of Artificial Sequence: Synthetic oligonucleotide
  Sense strand starting at position 3204 of SEQ ID NO: 1879767
ccuugaugugcuugaacuc

SEQ ID NO: 1931313 - RNA, 19 nt, Artificial Sequence
  Description of Artificial Sequence: Synthetic oligonucleotide
  Antisense strand to SEQ ID NO: 1931312
gaguucaagcacaucaagg

SEQ ID NO: 1931314 - RNA, 19 nt, Artificial Sequence
  Description of Artificial Sequence: Synthetic oligonucleotide
  Sense strand starting at position 3225 of SEQ ID NO: 1879767
acauguuccucugcacgaa

SEQ ID NO: 1931315 - RNA, 19 nt, Artificial Sequence
  Description of Artificial Sequence: Synthetic oligonucleotide
  Antisense strand to SEQ ID NO: 1931314
uucgugcagaggaacaugu

SEQ ID NO: 1931316 - RNA, 19 nt, Artificial Sequence
  Description of Artificial Sequence: Synthetic oligonucleotide
  Sense strand starting at position 3226 of SEQ ID NO: 1879767
cauguuccucugcacgaaa

SEQ ID NO: 1931317 - RNA, 19 nt, Artificial Sequence
  Description of Artificial Sequence: Synthetic oligonucleotide
  Antisense strand to SEQ ID NO: 1931316
uuucgugcagaggaacaug

SEQ ID NO: 1931318 - RNA, 19 nt, Artificial Sequence
  Description of Artificial Sequence: Synthetic oligonucleotide
  Sense strand starting at position 3228 of SEQ ID NO: 1879767
uguuccucugcacgaaagu

SEQ ID NO: 1931319 - RNA, 19 nt, Artificial Sequence
  Description of Artificial Sequence: Synthetic oligonucleotide
  Antisense strand to SEQ ID NO: 1931318
acuuucgugcagaggaaca

SEQ ID NO: 1931320 - RNA, 19 nt, Artificial Sequence
  Description of Artificial Sequence: Synthetic oligonucleotide
  Sense strand starting at position 3237 of SEQ ID NO: 1879767
gcacgaaagucuugcggau

SEQ ID NO: 1931321 - RNA, 19 nt, Artificial Sequence
  Description of Artificial Sequence: Synthetic oligonucleotide
  Antisense strand to SEQ ID NO: 1931320
auccgcaagacuuucgugc

SEQ ID NO: 1931322 - RNA, 19 nt, Artificial Sequence
  Description of Artificial Sequence: Synthetic oligonucleotide
  Sense strand starting at position 3239 of SEQ ID NO: 1879767
acgaaagucuugcggaucu

SEQ ID NO: 1931323 - RNA, 19 nt, Artificial Sequence
  Description of Artificial Sequence: Synthetic oligonucleotide
  Antisense strand to SEQ ID NO: 1931322
agauccgcaagacuuucgu

SEQ ID NO: 1931324 - RNA, 19 nt, Artificial Sequence
  Description of Artificial Sequence: Synthetic oligonucleotide
  Sense strand starting at position 3273 of SEQ ID NO: 1879767
ggaugaacagcuuguagua

SEQ ID NO: 1931325 - RNA, 19 nt, Artificial Sequence
  Description of Artificial Sequence: Synthetic oligonucleotide
  Antisense strand to SEQ ID NO: 1931324
uacuacaagcuguucaucc

SEQ ID NO: 1931326 - RNA, 19 nt, Artificial Sequence
  Description of Artificial Sequence: Synthetic oligonucleotide
  Sense strand starting at position 3481 of SEQ ID NO: 1879767
gcgaccacuugucccauua

SEQ ID NO: 1931327 - RNA, 19 nt, Artificial Sequence
  Description of Artificial Sequence: Synthetic oligonucleotide
  Antisense strand to SEQ ID NO: 1931326
uaaugggacaaguggucgc

SEQ ID NO: 1931328 - RNA, 19 nt, Artificial Sequence
  Description of Artificial Sequence: Synthetic oligonucleotide
  Sense strand starting at position 236 of SEQ ID NO: 1879768
gugugcucucgggcagauu

SEQ ID NO: 1931329 - RNA, 19 nt, Artificial Sequence
  Description of Artificial Sequence: Synthetic oligonucleotide
  Antisense strand to SEQ ID NO: 1931328
aaucugcccgagagcacac

SEQ ID NO: 1931330 - RNA, 19 nt, Artificial Sequence
  Description of Artificial Sequence: Synthetic oligonucleotide
  Sense strand starting at position 272 of SEQ ID NO: 1879768
cuuccucuccuguagaaag

SEQ ID NO: 1931331 - RNA, 19 nt, Artificial Sequence
  Description of Artificial Sequence: Synthetic oligonucleotide
  Antisense strand to SEQ ID NO: 1931330
cuuucuacaggagaggaag

SEQ ID NO: 1931332 - RNA, 19 nt, Artificial Sequence
  Description of Artificial Sequence: Synthetic oligonucleotide
  Sense strand starting at position 344 of SEQ ID NO: 1879768
gcucacaggaagcaugaua

SEQ ID NO: 1931333 - RNA, 19 nt, Artificial Sequence
  Description of Artificial Sequence: Synthetic oligonucleotide
  Antisense strand to SEQ ID NO: 1931332
uaucaugcuuccugugagc

SEQ ID NO: 1931334 - RNA, 19 nt, Artificial Sequence
  Description of Artificial Sequence: Synthetic oligonucleotide
  Sense strand starting at position 439 of SEQ ID NO: 1879768
ugcuccugacugugaacaa

SEQ ID NO: 1931335 - RNA, 19 nt, Artificial Sequence
  Description of Artificial Sequence: Synthetic oligonucleotide
  Antisense strand to SEQ ID NO: 1931334
uuguucacagucaggagca

SEQ ID NO: 1931336 - RNA, 19 nt, Artificial Sequence
  Description of Artificial Sequence: Synthetic oligonucleotide
  Sense strand starting at position 450 of SEQ ID NO: 1879768
gugaacaacuuauuaugca

SEQ ID NO: 1931337 - RNA, 19 nt, Artificial Sequence
  Description of Artificial Sequence: Synthetic oligonucleotide
  Antisense strand to SEQ ID NO: 1931336
ugcauaauaaguuguucac

SEQ ID NO: 1931338 - RNA, 19 nt, Artificial Sequence
  Description of Artificial Sequence: Synthetic oligonucleotide
  Sense strand starting at position 489 of SEQ ID NO: 1879768
gcuccuuagcuacacaaga

SEQ ID NO: 1931339 - RNA, 19 nt, Artificial Sequence
  Description of Artificial Sequence: Synthetic oligonucleotide
  Antisense strand to SEQ ID NO: 1931338
ucuuguguagcuaaggagc

SEQ ID NO: 1931340 - RNA, 19 nt, Artificial Sequence
  Description of Artificial Sequence: Synthetic oligonucleotide
  Sense strand starting at position 540 of SEQ ID NO: 1879768
gggcaaacccaguggugaa

SEQ ID NO: 1931341 - RNA, 19 nt, Artificial Sequence
  Description of Artificial Sequence: Synthetic oligonucleotide
  Antisense strand to SEQ ID NO: 1931340
uucaccacuggguuugccc

SEQ ID NO: 1931342 - RNA, 19 nt, Artificial Sequence
  Description of Artificial Sequence: Synthetic oligonucleotide
  Sense strand starting at position 541 of SEQ ID NO: 1879768
ggcaaacccaguggugaau

SEQ ID NO: 1931343 - RNA, 19 nt, Artificial Sequence
  Description of Artificial Sequence: Synthetic oligonucleotide
  Antisense strand to SEQ ID NO: 1931342
auucaccacuggguuugcc

SEQ ID NO: 1931344 - RNA, 19 nt, Artificial Sequence
  Description of Artificial Sequence: Synthetic oligonucleotide
  Sense strand starting at position 695 of SEQ ID NO: 1879768
cuggguaguccuugaugaa

SEQ ID NO: 1931345 - RNA, 19 nt, Artificial Sequence
  Description of Artificial Sequence: Synthetic oligonucleotide
  Antisense strand to SEQ ID NO: 1931344
uucaucaaggacuacccag

SEQ ID NO: 1931346 - RNA, 19 nt, Artificial Sequence
  Description of Artificial Sequence: Synthetic oligonucleotide
  Sense strand starting at position 696 of SEQ ID NO: 1879768
uggguaguccuugaugaag

SEQ ID NO: 1931347 - RNA, 19 nt, Artificial Sequence
  Description of Artificial Sequence: Synthetic oligonucleotide
  Antisense strand to SEQ ID NO: 1931346
cuucaucaaggacuaccca

SEQ ID NO: 1931348 - RNA, 19 nt, Artificial Sequence
  Description of Artificial Sequence: Synthetic oligonucleotide
  Sense strand starting at position 734 of SEQ ID NO: 1879768
gcuggucaggcgagaugua

SEQ ID NO: 1931349 - RNA, 19 nt, Artificial Sequence
  Description of Artificial Sequence: Synthetic oligonucleotide
  Antisense strand to SEQ ID NO: 1931348
uacaucucgccugaccagc

SEQ ID NO: 1931350 - RNA, 19 nt, Artificial Sequence
  Description of Artificial Sequence: Synthetic oligonucleotide
  Sense strand starting at position 773 of SEQ ID NO: 1879768
acuugaaguccaggucaua

SEQ ID NO: 1931351 - RNA, 19 nt, Artificial Sequence
  Description of Artificial Sequence: Synthetic oligonucleotide
  Antisense strand to SEQ ID NO: 1931350
uaugaccuggacuucaagu

SEQ ID NO: 1931352 - RNA, 19 nt, Artificial Sequence
  Description of Artificial Sequence: Synthetic oligonucleotide
  Sense strand starting at position 833 of SEQ ID NO: 1879768
cgaugaccaccuuaucagu

SEQ ID NO: 1931353 - RNA, 19 nt, Artificial Sequence
  Description of Artificial Sequence: Synthetic oligonucleotide
  Antisense strand to SEQ ID NO: 1931352
acugauaagguggucaucg

SEQ ID NO: 1931354 - RNA, 19 nt, Artificial Sequence
  Description of Artificial Sequence: Synthetic oligonucleotide
  Sense strand starting at position 1067 of SEQ ID NO: 1879768
gaguucuuggugcauacaa

SEQ ID NO: 1931355 - RNA, 19 nt, Artificial Sequence
  Description of Artificial Sequence: Synthetic oligonucleotide
  Antisense strand to SEQ ID NO: 1931354
uuguaugcaccaagaacuc

SEQ ID NO: 1931356 - RNA, 19 nt, Artificial Sequence
  Description of Artificial Sequence: Synthetic oligonucleotide
  Sense strand starting at position 1163 of SEQ ID NO: 1879768
agcuguccuggccaagaua

SEQ ID NO: 1931357 - RNA, 19 nt, Artificial Sequence
  Description of Artificial Sequence: Synthetic oligonucleotide
  Antisense strand to SEQ ID NO: 1931356
uaucuuggccaggacagcu

SEQ ID NO: 1931358 - RNA, 19 nt, Artificial Sequence
  Description of Artificial Sequence: Synthetic oligonucleotide
  Sense strand starting at position 1187 of SEQ ID NO: 1879768
acaguaagcagcugagauc

SEQ ID NO: 1931359 - RNA, 19 nt, Artificial Sequence
  Description of Artificial Sequence: Synthetic oligonucleotide
  Antisense strand to SEQ ID NO: 1931358
gaucucagcugcuuacugu

SEQ ID NO: 1931360 - RNA, 19 nt, Artificial Sequence
  Description of Artificial Sequence: Synthetic oligonucleotide
  Sense strand starting at position 1561 of SEQ ID NO: 1879768
gggucuugaucuuuacaaa

SEQ ID NO: 1931361 - RNA, 19 nt, Artificial Sequence
  Description of Artificial Sequence: Synthetic oligonucleotide
  Antisense strand to SEQ ID NO: 1931360
uuuguaaagaucaagaccc

SEQ ID NO: 1931362 - RNA, 19 nt, Artificial Sequence
  Description of Artificial Sequence: Synthetic oligonucleotide
  Sense strand starting at position 1562 of SEQ ID NO: 1879768
ggucuugaucuuuacaaac

SEQ ID NO: 1931363 - RNA, 19 nt, Artificial Sequence
  Description of Artificial Sequence: Synthetic oligonucleotide
  Antisense strand to SEQ ID NO: 1931362
guuuguaaagaucaagacc

SEQ ID NO: 1931364 - RNA, 19 nt, Artificial Sequence
  Description of Artificial Sequence: Synthetic oligonucleotide
  Sense strand starting at position 1592 of SEQ ID NO: 1879768
agaauagauuuccacagug

SEQ ID NO: 1931365 - RNA, 19 nt, Artificial Sequence
  Description of Artificial Sequence: Synthetic oligonucleotide
  Antisense strand to SEQ ID NO: 1931364
cacuguggaaaucuauucu

SEQ ID NO: 1931366 - RNA, 19 nt, Artificial Sequence
  Description of Artificial Sequence: Synthetic oligonucleotide
  Sense strand starting at position 1679 of SEQ ID NO: 1879768
gcgccuuuaccuucuuuau

SEQ ID NO: 1931367 - RNA, 19 nt, Artificial Sequence
  Description of Artificial Sequence: Synthetic oligonucleotide
  Antisense strand to SEQ ID NO: 1931366
auaaagaagguaaaggcgc

SEQ ID NO: 1931368 - RNA, 19 nt, Artificial Sequence
  Description of Artificial Sequence: Synthetic oligonucleotide
  Sense strand starting at position 1692 of SEQ ID NO: 1879768
cuuuauucuccaggauguu

SEQ ID NO: 1931369 - RNA, 19 nt, Artificial Sequence
  Description of Artificial Sequence: Synthetic oligonucleotide
  Antisense strand to SEQ ID NO: 1931368
aacauccuggagaauaaag

SEQ ID NO: 1931370 - RNA, 19 nt, Artificial Sequence
  Description of Artificial Sequence: Synthetic oligonucleotide
  Sense strand starting at position 1787 of SEQ ID NO: 1879768
ugguaaaccucugcuccaa

SEQ ID NO: 1931371 - RNA, 19 nt, Artificial Sequence
  Description of Artificial Sequence: Synthetic oligonucleotide
  Antisense strand to SEQ ID NO: 1931370
uuggagcagagguuuacca

SEQ ID NO: 1931372 - RNA, 19 nt, Artificial Sequence
  Description of Artificial Sequence: Synthetic oligonucleotide
  Sense strand starting at position 2016 of SEQ ID NO: 1879768
aagacuugcuucuugagga

SEQ ID NO: 1931373 - RNA, 19 nt, Artificial Sequence
  Description of Artificial Sequence: Synthetic oligonucleotide
  Antisense strand to SEQ ID NO: 1931372
uccucaagaagcaagucuu

SEQ ID NO: 1931374 - RNA, 19 nt, Artificial Sequence
  Description of Artificial Sequence: Synthetic oligonucleotide
  Sense strand starting at position 2057 of SEQ ID NO: 1879768
gugaaaugcucaccagguc

SEQ ID NO: 1931375 - RNA, 19 nt, Artificial Sequence
  Description of Artificial Sequence: Synthetic oligonucleotide
  Antisense strand to SEQ ID NO: 1931374
gaccuggugagcauuucac

SEQ ID NO: 1931376 - RNA, 19 nt, Artificial Sequence
  Description of Artificial Sequence: Synthetic oligonucleotide
  Sense strand starting at position 2121 of SEQ ID NO: 1879768
ccuagaggcuggucucaaa

SEQ ID NO: 1931377 - RNA, 19 nt, Artificial Sequence
  Description of Artificial Sequence: Synthetic oligonucleotide
  Antisense strand to SEQ ID NO: 1931376
uuugagaccagccucuagg

SEQ ID NO: 1931378 - RNA, 19 nt, Artificial Sequence
  Description of Artificial Sequence: Synthetic oligonucleotide
  Sense strand starting at position 2420 of SEQ ID NO: 1879768
gggagagucacauguguua

SEQ ID NO: 1931379 - RNA, 19 nt, Artificial Sequence
  Description of Artificial Sequence: Synthetic oligonucleotide
  Antisense strand to SEQ ID NO: 1931378
uaacacaugugacucuccc

SEQ ID NO: 1931380 - RNA, 19 nt, Artificial Sequence
  Description of Artificial Sequence: Synthetic oligonucleotide
  Sense strand starting at position 2535 of SEQ ID NO: 1879768
gcaggaugacuucagaguu

SEQ ID NO: 1931381 - RNA, 19 nt, Artificial Sequence
  Description of Artificial Sequence: Synthetic oligonucleotide
  Antisense strand to SEQ ID NO: 1931380
aacucugaagucauccugc

SEQ ID NO: 1931382 - RNA, 19 nt, Artificial Sequence
  Description of Artificial Sequence: Synthetic oligonucleotide
  Sense strand starting at position 2648 of SEQ ID NO: 1879768
gcaccaaacuuagcuagaa

SEQ ID NO: 1931383 - RNA, 19 nt, Artificial Sequence
  Description of Artificial Sequence: Synthetic oligonucleotide
  Antisense strand to SEQ ID NO: 1931382
uucuagcuaaguuuggugc

SEQ ID NO: 1931384 - RNA, 19 nt, Artificial Sequence
  Description of Artificial Sequence: Synthetic oligonucleotide
  Sense strand starting at position 2736 of SEQ ID NO: 1879768
gguuguauucugcaccauc

SEQ ID NO: 1931385 - RNA, 19 nt, Artificial Sequence
  Description of Artificial Sequence: Synthetic oligonucleotide
  Antisense strand to SEQ ID NO: 1931384
gauggugcagaauacaacc

SEQ ID NO: 1931386 - RNA, 19 nt, Artificial Sequence
  Description of Artificial Sequence: Synthetic oligonucleotide
  Sense strand starting at position 2799 of SEQ ID NO: 1879768
auagcauucuauguggacu

SEQ ID NO: 1931387 - RNA, 19 nt, Artificial Sequence
  Description of Artificial Sequence: Synthetic oligonucleotide
  Antisense strand to SEQ ID NO: 1931386
aguccacauagaaugcuau

SEQ ID NO: 1931388 - RNA, 19 nt, Artificial Sequence
  Description of Artificial Sequence: Synthetic oligonucleotide
  Sense strand starting at position 2896 of SEQ ID NO: 1879768
agcucuucugaguaaccaa

SEQ ID NO: 1931389 - RNA, 19 nt, Artificial Sequence
  Description of Artificial Sequence: Synthetic oligonucleotide
  Antisense strand to SEQ ID NO: 1931388
uugguuacucagaagagcu

SEQ ID NO: 1931390 - RNA, 19 nt, Artificial Sequence
  Description of Artificial Sequence: Synthetic oligonucleotide
  Sense strand starting at position 3295 of SEQ ID NO: 1879768
uguagcucaucacuaagau

SEQ ID NO: 1931391 - RNA, 19 nt, Artificial Sequence
  Description of Artificial Sequence: Synthetic oligonucleotide
  Antisense strand to SEQ ID NO: 1931390
aucuuagugaugagcuaca

SEQ ID NO: 1931392 - RNA, 19 nt, Artificial Sequence
  Description of Artificial Sequence: Synthetic oligonucleotide
  Sense strand starting at position 3296 of SEQ ID NO: 1879768
guagcucaucacuaagauc

SEQ ID NO: 1931393 - RNA, 19 nt, Artificial Sequence
  Description of Artificial Sequence: Synthetic oligonucleotide
  Antisense strand to SEQ ID NO: 1931392
gaucuuagugaugagcuac

SEQ ID NO: 1931394 - RNA, 19 nt, Artificial Sequence
  Description of Artificial Sequence: Synthetic oligonucleotide
  Sense strand starting at position 3317 of SEQ ID NO: 1879768
gggccucuuccugaaaggu

SEQ ID NO: 1931395 - RNA, 19 nt, Artificial Sequence
  Description of Artificial Sequence: Synthetic oligonucleotide
  Antisense strand to SEQ ID NO: 1931394
accuuucaggaagaggccc

SEQ ID NO: 1931396 - RNA, 19 nt, Artificial Sequence
  Description of Artificial Sequence: Synthetic oligonucleotide
  Sense strand starting at position 3424 of SEQ ID NO: 1879768
aucaucaguuugucaaucu

SEQ ID NO: 1931397 - RNA, 19 nt, Artificial Sequence
  Description of Artificial Sequence: Synthetic oligonucleotide
  Antisense strand to SEQ ID NO: 1931396
agauugacaaacugaugau

SEQ ID NO: 1931398 - RNA, 19 nt, Artificial Sequence
  Description of Artificial Sequence: Synthetic oligonucleotide
  Sense strand starting at position 3652 of SEQ ID NO: 1879768
cuuugaugguuaucaggca

SEQ ID NO: 1931399 - RNA, 19 nt, Artificial Sequence
  Description of Artificial Sequence: Synthetic oligonucleotide
  Antisense strand to SEQ ID NO: 1931398
ugccugauaaccaucaaag

SEQ ID NO: 1931400 - RNA, 19 nt, Artificial Sequence
  Description of Artificial Sequence: Synthetic oligonucleotide
  Sense strand starting at position 3728 of SEQ ID NO: 1879768
uuaauagucuacccaggga

SEQ ID NO: 1931401 - RNA, 19 nt, Artificial Sequence
  Description of Artificial Sequence: Synthetic oligonucleotide
  Antisense strand to SEQ ID NO: 1931400
ucccuggguagacuauuaa

SEQ ID NO: 1931402 - RNA, 19 nt, Artificial Sequence
  Description of Artificial Sequence: Synthetic oligonucleotide
  Sense strand starting at position 3782 of SEQ ID NO: 1879768
guaugugcuauguagacca

SEQ ID NO: 1931403 - RNA, 19 nt, Artificial Sequence
  Description of Artificial Sequence: Synthetic oligonucleotide
  Antisense strand to SEQ ID NO: 1931402
uggucuacauagcacauac

SEQ ID NO: 1931404 - RNA, 19 nt, Artificial Sequence
  Description of Artificial Sequence: Synthetic oligonucleotide
  Sense strand starting at position 3948 of SEQ ID NO: 1879768
augauuucugcagguaguc

SEQ ID NO: 1931405 - RNA, 19 nt, Artificial Sequence
  Description of Artificial Sequence: Synthetic oligonucleotide
  Antisense strand to SEQ ID NO: 1931404
gacuaccugcagaaaucau

SEQ ID NO: 1931406 - RNA, 19 nt, Artificial Sequence
  Description of Artificial Sequence: Synthetic oligonucleotide
  Sense strand starting at position 3977 of SEQ ID NO: 1879768
uagcaaagcgucuaaugau

SEQ ID NO: 1931407 - RNA, 19 nt, Artificial Sequence
  Description of Artificial Sequence: Synthetic oligonucleotide
  Antisense strand to SEQ ID NO: 1931406
aucauuagacgcuuugcua

SEQ ID NO: 1931408 - RNA, 19 nt, Artificial Sequence
  Description of Artificial Sequence: Synthetic oligonucleotide
  Sense strand starting at position 16 of SEQ ID NO: 1879769
ugugucuacccacaagacu

SEQ ID NO: 1931409 - RNA, 19 nt, Artificial Sequence
  Description of Artificial Sequence: Synthetic oligonucleotide
  Antisense strand to SEQ ID NO: 1931408
agucuuguggguagacaca

SEQ ID NO: 1931410 - RNA, 19 nt, Artificial Sequence
  Description of Artificial Sequence: Synthetic oligonucleotide
  Sense strand starting at position 48 of SEQ ID NO: 1879769
ccuuucuuauccuggcaga

SEQ ID NO: 1931411 - RNA, 19 nt, Artificial Sequence
  Description of Artificial Sequence: Synthetic oligonucleotide
  Antisense strand to SEQ ID NO: 1931410
ucugccaggauaagaaagg

SEQ ID NO: 1931412 - RNA, 19 nt, Artificial Sequence
  Description of Artificial Sequence: Synthetic oligonucleotide
  Sense strand starting at position 82 of SEQ ID NO: 1879769
ggcccugagagcugaaaug

SEQ ID NO: 1931413 - RNA, 19 nt, Artificial Sequence
  Description of Artificial Sequence: Synthetic oligonucleotide
  Antisense strand to SEQ ID NO: 1931412
cauuucagcucucagggcc

SEQ ID NO: 1931414 - RNA, 19 nt, Artificial Sequence
  Description of Artificial Sequence: Synthetic oligonucleotide
  Sense strand starting at position 133 of SEQ ID NO: 1879769
caggguacuuccugcugua

SEQ ID NO: 1931415 - RNA, 19 nt, Artificial Sequence
  Description of Artificial Sequence: Synthetic oligonucleotide
  Antisense strand to SEQ ID NO: 1931414
uacagcaggaaguacccug

SEQ ID NO: 1931416 - RNA, 19 nt, Artificial Sequence
  Description of Artificial Sequence: Synthetic oligonucleotide
  Sense strand starting at position 214 of SEQ ID NO: 1879769
ugaggauggcgcuguuaug

SEQ ID NO: 1931417 - RNA, 19 nt, Artificial Sequence
  Description of Artificial Sequence: Synthetic oligonucleotide
  Antisense strand to SEQ ID NO: 1931416
cauaacagcgccauccuca

SEQ ID NO: 1931418 - RNA, 19 nt, Artificial Sequence
  Description of Artificial Sequence: Synthetic oligonucleotide
  Sense strand starting at position 878 of SEQ ID NO: 1879769
acaggugugggugauggaa

SEQ ID NO: 1931419 - RNA, 19 nt, Artificial Sequence
  Description of Artificial Sequence: Synthetic oligonucleotide
  Antisense strand to SEQ ID NO: 1931418
uuccaucacccacaccugu

SEQ ID NO: 1931420 - RNA, 19 nt, Artificial Sequence
  Description of Artificial Sequence: Synthetic oligonucleotide
  Sense strand starting at position 880 of SEQ ID NO: 1879769
aggugugggugauggaaga

SEQ ID NO: 1931421 - RNA, 19 nt, Artificial Sequence
  Description of Artificial Sequence: Synthetic oligonucleotide
  Antisense strand to SEQ ID NO: 1931420
ucuuccaucacccacaccu

SEQ ID NO: 1931422 - RNA, 19 nt, Artificial Sequence
  Description of Artificial Sequence: Synthetic oligonucleotide
  Sense strand starting at position 905 of SEQ ID NO: 1879769
ggcugugcuccagagacuu

SEQ ID NO: 1931423 - RNA, 19 nt, Artificial Sequence
  Description of Artificial Sequence: Synthetic oligonucleotide
  Antisense strand to SEQ ID NO: 1931422
aagucucuggagcacagcc

SEQ ID NO: 1931424 - RNA, 19 nt, Artificial Sequence
  Description of Artificial Sequence: Synthetic oligonucleotide
  Sense strand starting at position 2309 of SEQ ID NO: 1879769
gucugucuacccugaugca

SEQ ID NO: 1931425 - RNA, 19 nt, Artificial Sequence
  Description of Artificial Sequence: Synthetic oligonucleotide
  Antisense strand to SEQ ID NO: 1931424
ugcaucaggguagacagac

SEQ ID NO: 1931426 - RNA, 19 nt, Artificial Sequence
  Description of Artificial Sequence: Synthetic oligonucleotide
  Sense strand starting at position 2362 of SEQ ID NO: 1879769
cccuuaugacagggcuaga

SEQ ID NO: 1931427 - RNA, 19 nt, Artificial Sequence
  Description of Artificial Sequence: Synthetic oligonucleotide
  Antisense strand to SEQ ID NO: 1931426
ucuagcccugucauaaggg

SEQ ID NO: 1931428 - RNA, 19 nt, Artificial Sequence
  Description of Artificial Sequence: Synthetic oligonucleotide
  Sense strand starting at position 2426 of SEQ ID NO: 1879769
uaaugaggcuuacacugua

SEQ ID NO: 1931429 - RNA, 19 nt, Artificial Sequence
  Description of Artificial Sequence: Synthetic oligonucleotide
  Antisense strand to SEQ ID NO: 1931428
uacaguguaagccucauua

SEQ ID NO: 1931430 - RNA, 19 nt, Artificial Sequence
  Description of Artificial Sequence: Synthetic oligonucleotide
  Sense strand starting at position 2446 of SEQ ID NO: 1879769
gguggcaagagaugaacua

SEQ ID NO: 1931431 - RNA, 19 nt, Artificial Sequence
  Description of Artificial Sequence: Synthetic oligonucleotide
  Antisense strand to SEQ ID NO: 1931430
uaguucaucucuugccacc

SEQ ID NO: 1931432 - RNA, 19 nt, Artificial Sequence
  Description of Artificial Sequence: Synthetic oligonucleotide
  Sense strand starting at position 2504 of SEQ ID NO: 1879769
gcugauaccugccagaaag

SEQ ID NO: 1931433 - RNA, 19 nt, Artificial Sequence
  Description of Artificial Sequence: Synthetic oligonucleotide
  Antisense strand to SEQ ID NO: 1931432
cuuucuggcagguaucagc

SEQ ID NO: 1931434 - RNA, 19 nt, Artificial Sequence
  Description of Artificial Sequence: Synthetic oligonucleotide
  Sense strand starting at position 2573 of SEQ ID NO: 1879769
ggccucuccgagugagaug

SEQ ID NO: 1931435 - RNA, 19 nt, Artificial Sequence
  Description of Artificial Sequence: Synthetic oligonucleotide
  Antisense strand to SEQ ID NO: 1931434
caucucacucggagaggcc

SEQ ID NO: 1931436 - RNA, 19 nt, Artificial Sequence
  Description of Artificial Sequence: Synthetic oligonucleotide
  Sense strand starting at position 2584 of SEQ ID NO: 1879769
gugagaugacccugagcag

SEQ ID NO: 1931437 - RNA, 19 nt, Artificial Sequence
  Description of Artificial Sequence: Synthetic oligonucleotide
  Antisense strand to SEQ ID NO: 1931436
cugcucagggucaucucac

SEQ ID NO: 1931438 - RNA, 19 nt, Artificial Sequence
  Description of Artificial Sequence: Synthetic oligonucleotide
  Sense strand starting at position 2862 of SEQ ID NO: 1879769
agaggcaucgguuaggauu

SEQ ID NO: 1931439 - RNA, 19 nt, Artificial Sequence
  Description of Artificial Sequence: Synthetic oligonucleotide
  Antisense strand to SEQ ID NO: 1931438
aauccuaaccgaugccucu

SEQ ID NO: 1931440 - RNA, 19 nt, Artificial Sequence
  Description of Artificial Sequence: Synthetic oligonucleotide
  Sense strand starting at position 2918 of SEQ ID NO: 1879769
ugauucgacuuaggauguu

SEQ ID NO: 1931441 - RNA, 19 nt, Artificial Sequence
  Description of Artificial Sequence: Synthetic oligonucleotide
  Antisense strand to SEQ ID NO: 1931440
aacauccuaagucgaauca

SEQ ID NO: 1931442 - RNA, 19 nt, Artificial Sequence
  Description of Artificial Sequence: Synthetic oligonucleotide
  Sense strand starting at position 2955 of SEQ ID NO: 1879769
gacagaaucucaccguguu

SEQ ID NO: 1931443 - RNA, 19 nt, Artificial Sequence
  Description of Artificial Sequence: Synthetic oligonucleotide
  Antisense strand to SEQ ID NO: 1931442
aacacggugagauucuguc

SEQ ID NO: 1931444 - RNA, 19 nt, Artificial Sequence
  Description of Artificial Sequence: Synthetic oligonucleotide
  Sense strand starting at position 3242 of SEQ ID NO: 1879769
ucaacuuauguugggugua

SEQ ID NO: 1931445 - RNA, 19 nt, Artificial Sequence
  Description of Artificial Sequence: Synthetic oligonucleotide
  Antisense strand to SEQ ID NO: 1931444
uacacccaacauaaguuga

SEQ ID NO: 1931446 - RNA, 19 nt, Artificial Sequence
  Description of Artificial Sequence: Synthetic oligonucleotide
  Sense strand starting at position 3243 of SEQ ID NO: 1879769
caacuuauguuggguguau

SEQ ID NO: 1931447 - RNA, 19 nt, Artificial Sequence
  Description of Artificial Sequence: Synthetic oligonucleotide
  Antisense strand to SEQ ID NO: 1931446
auacacccaacauaaguug

SEQ ID NO: 1931448 - RNA, 19 nt, Artificial Sequence
  Description of Artificial Sequence: Synthetic oligonucleotide
  Sense strand starting at position 3245 of SEQ ID NO: 1879769
acuuauguuggguguauca

SEQ ID NO: 1931449 - RNA, 19 nt, Artificial Sequence
  Description of Artificial Sequence: Synthetic oligonucleotide
  Antisense strand to SEQ ID NO: 1931448
ugauacacccaacauaagu

SEQ ID NO: 1931450 - RNA, 19 nt, Artificial Sequence
  Description of Artificial Sequence: Synthetic oligonucleotide
  Sense strand starting at position 3252 of SEQ ID NO: 1879769
uuggguguaucaggaugua

SEQ ID NO: 1931451 - RNA, 19 nt, Artificial Sequence
  Description of Artificial Sequence: Synthetic oligonucleotide
  Antisense strand to SEQ ID NO: 1931450
uacauccugauacacccaa

SEQ ID NO: 1931452 - RNA, 19 nt, Artificial Sequence
  Description of Artificial Sequence: Synthetic oligonucleotide
  Sense strand starting at position 3265 of SEQ ID NO: 1879769
gauguagcuggaugguaaa

SEQ ID NO: 1931453 - RNA, 19 nt, Artificial Sequence
  Description of Artificial Sequence: Synthetic oligonucleotide
  Antisense strand to SEQ ID NO: 1931452
uuuaccauccagcuacauc

SEQ ID NO: 1931454 - RNA, 19 nt, Artificial Sequence
  Description of Artificial Sequence: Synthetic oligonucleotide
  Sense strand starting at position 3277 of SEQ ID NO: 1879769
ugguaaauccagcaaguuu

SEQ ID NO: 1931455 - RNA, 19 nt, Artificial Sequence
  Description of Artificial Sequence: Synthetic oligonucleotide
  Antisense strand to SEQ ID NO: 1931454
aaacuugcuggauuuacca

SEQ ID NO: 1931456 - RNA, 19 nt, Artificial Sequence
  Description of Artificial Sequence: Synthetic oligonucleotide
  Sense strand starting at position 3290 of SEQ ID NO: 1879769
aaguuuauggccugaccua

SEQ ID NO: 1931457 - RNA, 19 nt, Artificial Sequence
  Description of Artificial Sequence: Synthetic oligonucleotide
  Antisense strand to SEQ ID NO: 1931456
uaggucaggccauaaacuu

SEQ ID NO: 1931458 - RNA, 19 nt, Artificial Sequence
  Description of Artificial Sequence: Synthetic oligonucleotide
  Sense strand starting at position 3291 of SEQ ID NO: 1879769
aguuuauggccugaccuau

SEQ ID NO: 1931459 - RNA, 19 nt, Artificial Sequence
  Description of Artificial Sequence: Synthetic oligonucleotide
  Antisense strand to SEQ ID NO: 1931458
auaggucaggccauaaacu

SEQ ID NO: 1931460 - RNA, 19 nt, Artificial Sequence
  Description of Artificial Sequence: Synthetic oligonucleotide
  Sense strand starting at position 3312 of SEQ ID NO: 1879769
aguauuuggaguugccauu

SEQ ID NO: 1931461 - RNA, 19 nt, Artificial Sequence
  Description of Artificial Sequence: Synthetic oligonucleotide
  Antisense strand to SEQ ID NO: 1931460
aauggcaacuccaaauacu

SEQ ID NO: 1931462 - RNA, 19 nt, Artificial Sequence
  Description of Artificial Sequence: Synthetic oligonucleotide
  Sense strand starting at position 3322 of SEQ ID NO: 1879769
guugccauuuauggagaca

SEQ ID NO: 1931463 - RNA, 19 nt, Artificial Sequence
  Description of Artificial Sequence: Synthetic oligonucleotide
  Antisense strand to SEQ ID NO: 1931462
ugucuccauaaauggcaac

SEQ ID NO: 1931464 - RNA, 19 nt, Artificial Sequence
  Description of Artificial Sequence: Synthetic oligonucleotide
  Sense strand starting at position 3378 of SEQ ID NO: 1879769
gaccuugauuucggacaga

SEQ ID NO: 1931465 - RNA, 19 nt, Artificial Sequence
  Description of Artificial Sequence: Synthetic oligonucleotide
  Antisense strand to SEQ ID NO: 1931464
ucuguccgaaaucaagguc

SEQ ID NO: 1931466 - RNA, 19 nt, Artificial Sequence
  Description of Artificial Sequence: Synthetic oligonucleotide
  Sense strand starting at position 3460 of SEQ ID NO: 1879769
agaggugcgggcuagagau

SEQ ID NO: 1931467 - RNA, 19 nt, Artificial Sequence
  Description of Artificial Sequence: Synthetic oligonucleotide
  Antisense strand to SEQ ID NO: 1931466
aucucuagcccgcaccucu

SEQ ID NO: 1931468 - RNA, 19 nt, Artificial Sequence
  Description of Artificial Sequence: Synthetic oligonucleotide
  Sense strand starting at position 3466 of SEQ ID NO: 1879769
gcgggcuagagauacaaau

SEQ ID NO: 1931469 - RNA, 19 nt, Artificial Sequence
  Description of Artificial Sequence: Synthetic oligonucleotide
  Antisense strand to SEQ ID NO: 1931468
auuuguaucucuagcccgc

SEQ ID NO: 1931470 - RNA, 19 nt, Artificial Sequence
  Description of Artificial Sequence: Synthetic oligonucleotide
  Sense strand starting at position 3514 of SEQ ID NO: 1879769
cagcguuugggagaucaua

SEQ ID NO: 1931471 - RNA, 19 nt, Artificial Sequence
  Description of Artificial Sequence: Synthetic oligonucleotide
  Antisense strand to SEQ ID NO: 1931470
uaugaucucccaaacgcug

SEQ ID NO: 1931472 - RNA, 19 nt, Artificial Sequence
  Description of Artificial Sequence: Synthetic oligonucleotide
  Sense strand starting at position 3580 of SEQ ID NO: 1879769
ggguguagcagucagaaca

SEQ ID NO: 1931473 - RNA, 19 nt, Artificial Sequence
  Description of Artificial Sequence: Synthetic oligonucleotide
  Antisense strand to SEQ ID NO: 1931472
uguucugacugcuacaccc

SEQ ID NO: 1931474 - RNA, 19 nt, Artificial Sequence
  Description of Artificial Sequence: Synthetic oligonucleotide
  Sense strand starting at position 3682 of SEQ ID NO: 1879769
gggagaaagugcuucagga

SEQ ID NO: 1931475 - RNA, 19 nt, Artificial Sequence
  Description of Artificial Sequence: Synthetic oligonucleotide
  Antisense strand to SEQ ID NO: 1931474
uccugaagcacuuucuccc

SEQ ID NO: 1931476 - RNA, 19 nt, Artificial Sequence
  Description of Artificial Sequence: Synthetic oligonucleotide
  Sense strand starting at position 3788 of SEQ ID NO: 1879769
aacugagggccauguugau

SEQ ID NO: 1931477 - RNA, 19 nt, Artificial Sequence
  Description of Artificial Sequence: Synthetic oligonucleotide
  Antisense strand to SEQ ID NO: 1931476
aucaacauggcccucaguu

SEQ ID NO: 1931478 - RNA, 19 nt, Artificial Sequence
  Description of Artificial Sequence: Synthetic oligonucleotide
  Sense strand starting at position 3794 of SEQ ID NO: 1879769
gggccauguugaugaaaug

SEQ ID NO: 1931479 - RNA, 19 nt, Artificial Sequence
  Description of Artificial Sequence: Synthetic oligonucleotide
  Antisense strand to SEQ ID NO: 1931478
cauuucaucaacauggccc

SEQ ID NO: 1931480 - RNA, 19 nt, Artificial Sequence
  Description of Artificial Sequence: Synthetic oligonucleotide
  Sense strand starting at position 153 of SEQ ID NO: 1879770
cagggagaauaguauuuga

SEQ ID NO: 1931481 - RNA, 19 nt, Artificial Sequence
  Description of Artificial Sequence: Synthetic oligonucleotide
  Antisense strand to SEQ ID NO: 1931480
ucaaauacuauucucccug

SEQ ID NO: 1931482 - RNA, 19 nt, Artificial Sequence
  Description of Artificial Sequence: Synthetic oligonucleotide
  Sense strand starting at position 233 of SEQ ID NO: 1879770
gcgccauuuauugggcacu

SEQ ID NO: 1931483 - RNA, 19 nt, Artificial Sequence
  Description of Artificial Sequence: Synthetic oligonucleotide
  Antisense strand to SEQ ID NO: 1931482
agugcccaauaaauggcgc

SEQ ID NO: 1931484 - RNA, 19 nt, Artificial Sequence
  Description of Artificial Sequence: Synthetic oligonucleotide
  Sense strand starting at position 235 of SEQ ID NO: 1879770
gccauuuauugggcacuua

SEQ ID NO: 1931485 - RNA, 19 nt, Artificial Sequence
  Description of Artificial Sequence: Synthetic oligonucleotide
  Antisense strand to SEQ ID NO: 1931484
uaagugcccaauaaauggc

SEQ ID NO: 1931486 - RNA, 19 nt, Artificial Sequence
  Description of Artificial Sequence: Synthetic oligonucleotide
  Sense strand starting at position 290 of SEQ ID NO: 1879770
cuuuguccucacugcagaa

SEQ ID NO: 1931487 - RNA, 19 nt, Artificial Sequence
  Description of Artificial Sequence: Synthetic oligonucleotide
  Antisense strand to SEQ ID NO: 1931486
uucugcagugaggacaaag

SEQ ID NO: 1931488 - RNA, 19 nt, Artificial Sequence
  Description of Artificial Sequence: Synthetic oligonucleotide
  Sense strand starting at position 420 of SEQ ID NO: 1879770
uggcaugagcucuagacca

SEQ ID NO: 1931489 - RNA, 19 nt, Artificial Sequence
  Description of Artificial Sequence: Synthetic oligonucleotide
  Antisense strand to SEQ ID NO: 1931488
uggucuagagcucaugcca

SEQ ID NO: 1931490 - RNA, 19 nt, Artificial Sequence
  Description of Artificial Sequence: Synthetic oligonucleotide
  Sense strand starting at position 422 of SEQ ID NO: 1879770
gcaugagcucuagaccagu

SEQ ID NO: 1931491 - RNA, 19 nt, Artificial Sequence
  Description of Artificial Sequence: Synthetic oligonucleotide
  Antisense strand to SEQ ID NO: 1931490
acuggucuagagcucaugc

SEQ ID NO: 1931492 - RNA, 19 nt, Artificial Sequence
  Description of Artificial Sequence: Synthetic oligonucleotide
  Sense strand starting at position 483 of SEQ ID NO: 1879770
gugggaccucccuauuacu

SEQ ID NO: 1931493 - RNA, 19 nt, Artificial Sequence
  Description of Artificial Sequence: Synthetic oligonucleotide
  Antisense strand to SEQ ID NO: 1931492
aguaauagggaggucccac

SEQ ID NO: 1931494 - RNA, 19 nt, Artificial Sequence
  Description of Artificial Sequence: Synthetic oligonucleotide
  Sense strand starting at position 924 of SEQ ID NO: 1879770
gagaacauuucugaagguc

SEQ ID NO: 1931495 - RNA, 19 nt, Artificial Sequence
  Description of Artificial Sequence: Synthetic oligonucleotide
  Antisense strand to SEQ ID NO: 1931494
gaccuucagaaauguucuc

SEQ ID NO: 1931496 - RNA, 19 nt, Artificial Sequence
  Description of Artificial Sequence: Synthetic oligonucleotide
  Sense strand starting at position 1170 of SEQ ID NO: 1879770
ucugguaguuuccuauaag

SEQ ID NO: 1931497 - RNA, 19 nt, Artificial Sequence
  Description of Artificial Sequence: Synthetic oligonucleotide
  Antisense strand to SEQ ID NO: 1931496
cuuauaggaaacuaccaga

SEQ ID NO: 1931498 - RNA, 19 nt, Artificial Sequence
  Description of Artificial Sequence: Synthetic oligonucleotide
  Sense strand starting at position 1251 of SEQ ID NO: 1879770
cagguaagacagcgucaaa

SEQ ID NO: 1931499 - RNA, 19 nt, Artificial Sequence
  Description of Artificial Sequence: Synthetic oligonucleotide
  Antisense strand to SEQ ID NO: 1931498
uuugacgcugucuuaccug

SEQ ID NO: 1931500 - RNA, 19 nt, Artificial Sequence
  Description of Artificial Sequence: Synthetic oligonucleotide
  Sense strand starting at position 1275 of SEQ ID NO: 1879770
gguagaggcuccuugguga

SEQ ID NO: 1931501 - RNA, 19 nt, Artificial Sequence
  Description of Artificial Sequence: Synthetic oligonucleotide
  Antisense strand to SEQ ID NO: 1931500
ucaccaaggagccucuacc

SEQ ID NO: 1931502 - RNA, 19 nt, Artificial Sequence
  Description of Artificial Sequence: Synthetic oligonucleotide
  Sense strand starting at position 1513 of SEQ ID NO: 1879770
acuggauugcugggcucaa

SEQ ID NO: 1931503 - RNA, 19 nt, Artificial Sequence
  Description of Artificial Sequence: Synthetic oligonucleotide
  Antisense strand to SEQ ID NO: 1931502
uugagcccagcaauccagu

SEQ ID NO: 1931504 - RNA, 19 nt, Artificial Sequence
  Description of Artificial Sequence: Synthetic oligonucleotide
  Sense strand starting at position 1655 of SEQ ID NO: 1879770
ugagaaggcuggucucaag

SEQ ID NO: 1931505 - RNA, 19 nt, Artificial Sequence
  Description of Artificial Sequence: Synthetic oligonucleotide
  Antisense strand to SEQ ID NO: 1931504
cuugagaccagccuucuca

SEQ ID NO: 1931506 - RNA, 19 nt, Artificial Sequence
  Description of Artificial Sequence: Synthetic oligonucleotide
  Sense strand starting at position 1699 of SEQ ID NO: 1879770
cucucaugcccuggaacau

SEQ ID NO: 1931507 - RNA, 19 nt, Artificial Sequence
  Description of Artificial Sequence: Synthetic oligonucleotide
  Antisense strand to SEQ ID NO: 1931506
auguuccagggcaugagag

SEQ ID NO: 1931508 - RNA, 19 nt, Artificial Sequence
  Description of Artificial Sequence: Synthetic oligonucleotide
  Sense strand starting at position 1783 of SEQ ID NO: 1879770
gggucaggcucuccaugaa

SEQ ID NO: 1931509 - RNA, 19 nt, Artificial Sequence
  Description of Artificial Sequence: Synthetic oligonucleotide
  Antisense strand to SEQ ID NO: 1931508
uucauggagagccugaccc

SEQ ID NO: 1931510 - RNA, 19 nt, Artificial Sequence
  Description of Artificial Sequence: Synthetic oligonucleotide
  Sense strand starting at position 2284 of SEQ ID NO: 1879770
ggguguugauguguuggga

SEQ ID NO: 1931511 - RNA, 19 nt, Artificial Sequence
  Description of Artificial Sequence: Synthetic oligonucleotide
  Antisense strand to SEQ ID NO: 1931510
ucccaacacaucaacaccc

SEQ ID NO: 1931512 - RNA, 19 nt, Artificial Sequence
  Description of Artificial Sequence: Synthetic oligonucleotide
  Sense strand starting at position 2287 of SEQ ID NO: 1879770
uguugauguguugggacuu

SEQ ID NO: 1931513 - RNA, 19 nt, Artificial Sequence
  Description of Artificial Sequence: Synthetic oligonucleotide
  Antisense strand to SEQ ID NO: 1931512
aagucccaacacaucaaca

SEQ ID NO: 1931514 - RNA, 19 nt, Artificial Sequence
  Description of Artificial Sequence: Synthetic oligonucleotide
  Sense strand starting at position 2356 of SEQ ID NO: 1879770
cggcauuguucaccaggau

SEQ ID NO: 1931515 - RNA, 19 nt, Artificial Sequence
  Description of Artificial Sequence: Synthetic oligonucleotide
  Antisense strand to SEQ ID NO: 1931514
auccuggugaacaaugccg

SEQ ID NO: 1931516 - RNA, 19 nt, Artificial Sequence
  Description of Artificial Sequence: Synthetic oligonucleotide
  Sense strand starting at position 2357 of SEQ ID NO: 1879770
ggcauuguucaccaggaug

SEQ ID NO: 1931517 - RNA, 19 nt, Artificial Sequence
  Description of Artificial Sequence: Synthetic oligonucleotide
  Antisense strand to SEQ ID NO: 1931516
cauccuggugaacaaugcc

SEQ ID NO: 1931518 - RNA, 19 nt, Artificial Sequence
  Description of Artificial Sequence: Synthetic oligonucleotide
  Sense strand starting at position 2435 of SEQ ID NO: 1879770
gggccaacgauauauguuu

SEQ ID NO: 1931519 - RNA, 19 nt, Artificial Sequence
  Description of Artificial Sequence: Synthetic oligonucleotide
  Antisense strand to SEQ ID NO: 1931518
aaacauauaucguuggccc

SEQ ID NO: 1931520 - RNA, 19 nt, Artificial Sequence
  Description of Artificial Sequence: Synthetic oligonucleotide
  Sense strand starting at position 2662 of SEQ ID NO: 1879770
aggcuaaucuuguucugac

SEQ ID NO: 1931521 - RNA, 19 nt, Artificial Sequence
  Description of Artificial Sequence: Synthetic oligonucleotide
  Antisense strand to SEQ ID NO: 1931520
gucagaacaagauuagccu

SEQ ID NO: 1931522 - RNA, 19 nt, Artificial Sequence
  Description of Artificial Sequence: Synthetic oligonucleotide
  Sense strand starting at position 2671 of SEQ ID NO: 1879770
uuguucugaccucaaguga

SEQ ID NO: 1931523 - RNA, 19 nt, Artificial Sequence
  Description of Artificial Sequence: Synthetic oligonucleotide
  Antisense strand to SEQ ID NO: 1931522
ucacuugaggucagaacaa

SEQ ID NO: 1931524 - RNA, 19 nt, Artificial Sequence
  Description of Artificial Sequence: Synthetic oligonucleotide
  Sense strand starting at position 2766 of SEQ ID NO: 1879770
agggauauggcuuacuccu

SEQ ID NO: 1931525 - RNA, 19 nt, Artificial Sequence
  Description of Artificial Sequence: Synthetic oligonucleotide
  Antisense strand to SEQ ID NO: 1931524
aggaguaagccauaucccu

SEQ ID NO: 1931526 - RNA, 19 nt, Artificial Sequence
  Description of Artificial Sequence: Synthetic oligonucleotide
  Sense strand starting at position 2768 of SEQ ID NO: 1879770
ggauauggcuuacuccuaa

SEQ ID NO: 1931527 - RNA, 19 nt, Artificial Sequence
  Description of Artificial Sequence: Synthetic oligonucleotide
  Antisense strand to SEQ ID NO: 1931526
uuaggaguaagccauaucc

SEQ ID NO: 1931528 - RNA, 19 nt, Artificial Sequence
  Description of Artificial Sequence: Synthetic oligonucleotide
  Sense strand starting at position 2780 of SEQ ID NO: 1879770
cuccuaagugaacgaguaa

SEQ ID NO: 1931529 - RNA, 19 nt, Artificial Sequence
  Description of Artificial Sequence: Synthetic oligonucleotide
  Antisense strand to SEQ ID NO: 1931528
uuacucguucacuuaggag

SEQ ID NO: 1931530 - RNA, 19 nt, Artificial Sequence
  Description of Artificial Sequence: Synthetic oligonucleotide
  Sense strand starting at position 2781 of SEQ ID NO: 1879770
uccuaagugaacgaguaau

SEQ ID NO: 1931531 - RNA, 19 nt, Artificial Sequence
  Description of Artificial Sequence: Synthetic oligonucleotide
  Antisense strand to SEQ ID NO: 1931530
auuacucguucacuuagga

SEQ ID NO: 1931532 - RNA, 19 nt, Artificial Sequence
  Description of Artificial Sequence: Synthetic oligonucleotide
  Sense strand starting at position 2803 of SEQ ID NO: 1879770
ugaguccauuuaugaucaa

SEQ ID NO: 1931533 - RNA, 19 nt, Artificial Sequence
  Description of Artificial Sequence: Synthetic oligonucleotide
  Antisense strand to SEQ ID NO: 1931532
uugaucauaaauggacuca

SEQ ID NO: 1931534 - RNA, 19 nt, Artificial Sequence
  Description of Artificial Sequence: Synthetic oligonucleotide
  Sense strand starting at position 2893 of SEQ ID NO: 1879770
ccaguuauccugcauacau

SEQ ID NO: 1931535 - RNA, 19 nt, Artificial Sequence
  Description of Artificial Sequence: Synthetic oligonucleotide
  Antisense strand to SEQ ID NO: 1931534
auguaugcaggauaacugg

SEQ ID NO: 1931536 - RNA, 19 nt, Artificial Sequence
  Description of Artificial Sequence: Synthetic oligonucleotide
  Sense strand starting at position 2895 of SEQ ID NO: 1879770
aguuauccugcauacauag

SEQ ID NO: 1931537 - RNA, 19 nt, Artificial Sequence
  Description of Artificial Sequence: Synthetic oligonucleotide
  Antisense strand to SEQ ID NO: 1931536
cuauguaugcaggauaacu

SEQ ID NO: 1931538 - RNA, 19 nt, Artificial Sequence
  Description of Artificial Sequence: Synthetic oligonucleotide
  Sense strand starting at position 3040 of SEQ ID NO: 1879770
agaaauaauuuauggcaca

SEQ ID NO: 1931539 - RNA, 19 nt, Artificial Sequence
  Description of Artificial Sequence: Synthetic oligonucleotide
  Antisense strand to SEQ ID NO: 1931538
ugugccauaaauuauuucu

SEQ ID NO: 1931540 - RNA, 19 nt, Artificial Sequence
  Description of Artificial Sequence: Synthetic oligonucleotide
  Sense strand starting at position 3092 of SEQ ID NO: 1879770
augaguuuacugcgacaua

SEQ ID NO: 1931541 - RNA, 19 nt, Artificial Sequence
  Description of Artificial Sequence: Synthetic oligonucleotide
  Antisense strand to SEQ ID NO: 1931540
uaugucgcaguaaacucau

SEQ ID NO: 1931542 - RNA, 19 nt, Artificial Sequence
  Description of Artificial Sequence: Synthetic oligonucleotide
  Sense strand starting at position 3161 of SEQ ID NO: 1879770
cuuggaggucacugauaua

SEQ ID NO: 1931543 - RNA, 19 nt, Artificial Sequence
  Description of Artificial Sequence: Synthetic oligonucleotide
  Antisense strand to SEQ ID NO: 1931542
uauaucagugaccuccaag

SEQ ID NO: 1931544 - RNA, 19 nt, Artificial Sequence
  Description of Artificial Sequence: Synthetic oligonucleotide
  Sense strand starting at position 3164 of SEQ ID NO: 1879770
ggaggucacugauauauuu

SEQ ID NO: 1931545 - RNA, 19 nt, Artificial Sequence
  Description of Artificial Sequence: Synthetic oligonucleotide
  Antisense strand to SEQ ID NO: 1931544
aaauauaucagugaccucc

SEQ ID NO: 1931546 - RNA, 19 nt, Artificial Sequence
  Description of Artificial Sequence: Synthetic oligonucleotide
  Sense strand starting at position 3243 of SEQ ID NO: 1879770
cgccacaguccuggagaga

SEQ ID NO: 1931547 - RNA, 19 nt, Artificial Sequence
  Description of Artificial Sequence: Synthetic oligonucleotide
  Antisense strand to SEQ ID NO: 1931546
ucucuccaggacuguggcg

SEQ ID NO: 1931548 - RNA, 19 nt, Artificial Sequence
  Description of Artificial Sequence: Synthetic oligonucleotide
  Sense strand starting at position 3271 of SEQ ID NO: 1879770
ggucuacauuuccaaggga

SEQ ID NO: 1931549 - RNA, 19 nt, Artificial Sequence
  Description of Artificial Sequence: Synthetic oligonucleotide
  Antisense strand to SEQ ID NO: 1931548
ucccuuggaaauguagacc

SEQ ID NO: 1931550 - RNA, 19 nt, Artificial Sequence
  Description of Artificial Sequence: Synthetic oligonucleotide
  Sense strand starting at position 3297 of SEQ ID NO: 1879770
augauuacgccuguuacgu

SEQ ID NO: 1931551 - RNA, 19 nt, Artificial Sequence
  Description of Artificial Sequence: Synthetic oligonucleotide
  Antisense strand to SEQ ID NO: 1931550
acguaacaggcguaaucau

SEQ ID NO: 1931552 - RNA, 19 nt, Artificial Sequence
  Description of Artificial Sequence: Synthetic oligonucleotide
  Sense strand starting at position 3298 of SEQ ID NO: 1879770
ugauuacgccuguuacgua

SEQ ID NO: 1931553 - RNA, 19 nt, Artificial Sequence
  Description of Artificial Sequence: Synthetic oligonucleotide
  Antisense strand to SEQ ID NO: 1931552
uacguaacaggcguaauca

SEQ ID NO: 1931554 - RNA, 19 nt, Artificial Sequence
  Description of Artificial Sequence: Synthetic oligonucleotide
  Sense strand starting at position 3664 of SEQ ID NO: 1879770
cgcagaacaaauggucauu

SEQ ID NO: 1931555 - RNA, 19 nt, Artificial Sequence
  Description of Artificial Sequence: Synthetic oligonucleotide
  Antisense strand to SEQ ID NO: 1931554
aaugaccauuuguucugcg

SEQ ID NO: 1931556 - RNA, 19 nt, Artificial Sequence
  Description of Artificial Sequence: Synthetic oligonucleotide
  Sense strand starting at position 3670 of SEQ ID NO: 1879770
acaaauggucauuaagcca

SEQ ID NO: 1931557 - RNA, 19 nt, Artificial Sequence
  Description of Artificial Sequence: Synthetic oligonucleotide
  Antisense strand to SEQ ID NO: 1931556
uggcuuaaugaccauuugu

SEQ ID NO: 1931558 - RNA, 19 nt, Artificial Sequence
  Description of Artificial Sequence: Synthetic oligonucleotide
  Sense strand starting at position 3677 of SEQ ID NO: 1879770
gucauuaagccacagugau

SEQ ID NO: 1931559 - RNA, 19 nt, Artificial Sequence
  Description of Artificial Sequence: Synthetic oligonucleotide
  Antisense strand to SEQ ID NO: 1931558
aucacuguggcuuaaugac

SEQ ID NO: 1931560 - RNA, 19 nt, Artificial Sequence
  Description of Artificial Sequence: Synthetic oligonucleotide
  Sense strand starting at position 442 of SEQ ID NO: 1879771
uggagucacugauccaguu

SEQ ID NO: 1931561 - RNA, 19 nt, Artificial Sequence
  Description of Artificial Sequence: Synthetic oligonucleotide
  Antisense strand to SEQ ID NO: 1931560
aacuggaucagugacucca

SEQ ID NO: 1931562 - RNA, 19 nt, Artificial Sequence
  Description of Artificial Sequence: Synthetic oligonucleotide
  Sense strand starting at position 855 of SEQ ID NO: 1879771
gaaucuugccucugggaag

SEQ ID NO: 1931563 - RNA, 19 nt, Artificial Sequence
  Description of Artificial Sequence: Synthetic oligonucleotide
  Antisense strand to SEQ ID NO: 1931562
cuucccagaggcaagauuc

SEQ ID NO: 1931564 - RNA, 19 nt, Artificial Sequence
  Description of Artificial Sequence: Synthetic oligonucleotide
  Sense strand starting at position 986 of SEQ ID NO: 1879771
cucugcugucaucaagauc

SEQ ID NO: 1931565 - RNA, 19 nt, Artificial Sequence
  Description of Artificial Sequence: Synthetic oligonucleotide
  Antisense strand to SEQ ID NO: 1931564
gaucuugaugacagcagag

SEQ ID NO: 1931566 - RNA, 19 nt, Artificial Sequence
  Description of Artificial Sequence: Synthetic oligonucleotide
  Sense strand starting at position 1047 of SEQ ID NO: 1879771
ggucacauuucugagaaag

SEQ ID NO: 1931567 - RNA, 19 nt, Artificial Sequence
  Description of Artificial Sequence: Synthetic oligonucleotide
  Antisense strand to SEQ ID NO: 1931566
cuuucucagaaaugugacc

SEQ ID NO: 1931568 - RNA, 19 nt, Artificial Sequence
  Description of Artificial Sequence: Synthetic oligonucleotide
  Sense strand starting at position 1049 of SEQ ID NO: 1879771
ucacauuucugagaaagag

SEQ ID NO: 1931569 - RNA, 19 nt, Artificial Sequence
  Description of Artificial Sequence: Synthetic oligonucleotide
  Antisense strand to SEQ ID NO: 1931568
cucuuucucagaaauguga

SEQ ID NO: 1931570 - RNA, 19 nt, Artificial Sequence
  Description of Artificial Sequence: Synthetic oligonucleotide
  Sense strand starting at position 1282 of SEQ ID NO: 1879771
acaaacucgcuuugaugga

SEQ ID NO: 1931571 - RNA, 19 nt, Artificial Sequence
  Description of Artificial Sequence: Synthetic oligonucleotide
  Antisense strand to SEQ ID NO: 1931570
uccaucaaagcgaguuugu

SEQ ID NO: 1931572 - RNA, 19 nt, Artificial Sequence
  Description of Artificial Sequence: Synthetic oligonucleotide
  Sense strand starting at position 1378 of SEQ ID NO: 1879771
cucaguuuccaaggaagag

SEQ ID NO: 1931573 - RNA, 19 nt, Artificial Sequence
  Description of Artificial Sequence: Synthetic oligonucleotide
  Antisense strand to SEQ ID NO: 1931572
cucuuccuuggaaacugag

SEQ ID NO: 1931574 - RNA, 19 nt, Artificial Sequence
  Description of Artificial Sequence: Synthetic oligonucleotide
  Sense strand starting at position 1534 of SEQ ID NO: 1879771
cgacaaaugccauaucuga

SEQ ID NO: 1931575 - RNA, 19 nt, Artificial Sequence
  Description of Artificial Sequence: Synthetic oligonucleotide
  Antisense strand to SEQ ID NO: 1931574
ucagauauggcauuugucg

SEQ ID NO: 1931576 - RNA, 19 nt, Artificial Sequence
  Description of Artificial Sequence: Synthetic oligonucleotide
  Sense strand starting at position 1577 of SEQ ID NO: 1879771
ccuugacucccucaguagu

SEQ ID NO: 1931577 - RNA, 19 nt, Artificial Sequence
  Description of Artificial Sequence: Synthetic oligonucleotide
  Antisense strand to SEQ ID NO: 1931576
acuacugagggagucaagg

SEQ ID NO: 1931578 - RNA, 19 nt, Artificial Sequence
  Description of Artificial Sequence: Synthetic oligonucleotide
  Sense strand starting at position 1903 of SEQ ID NO: 1879771
agugauggucagggugaaa

SEQ ID NO: 1931579 - RNA, 19 nt, Artificial Sequence
  Description of Artificial Sequence: Synthetic oligonucleotide
  Antisense strand to SEQ ID NO: 1931578
uuucacccugaccaucacu

SEQ ID NO: 1931580 - RNA, 19 nt, Artificial Sequence
  Description of Artificial Sequence: Synthetic oligonucleotide
  Sense strand starting at position 2241 of SEQ ID NO: 1879771
ggagcaggauggguauauu

SEQ ID NO: 1931581 - RNA, 19 nt, Artificial Sequence
  Description of Artificial Sequence: Synthetic oligonucleotide
  Antisense strand to SEQ ID NO: 1931580
aauauacccauccugcucc

SEQ ID NO: 1931582 - RNA, 19 nt, Artificial Sequence
  Description of Artificial Sequence: Synthetic oligonucleotide
  Sense strand starting at position 2244 of SEQ ID NO: 1879771
gcaggauggguauauucua

SEQ ID NO: 1931583 - RNA, 19 nt, Artificial Sequence
  Description of Artificial Sequence: Synthetic oligonucleotide
  Antisense strand to SEQ ID NO: 1931582
uagaauauacccauccugc

SEQ ID NO: 1931584 - RNA, 19 nt, Artificial Sequence
  Description of Artificial Sequence: Synthetic oligonucleotide
  Sense strand starting at position 2265 of SEQ ID NO: 1879771
uucugaaaguaauugguga

SEQ ID NO: 1931585 - RNA, 19 nt, Artificial Sequence
  Description of Artificial Sequence: Synthetic oligonucleotide
  Antisense strand to SEQ ID NO: 1931584
ucaccaauuacuuucagaa

SEQ ID NO: 1931586 - RNA, 19 nt, Artificial Sequence
  Description of Artificial Sequence: Synthetic oligonucleotide
  Sense strand starting at position 2266 of SEQ ID NO: 1879771
ucugaaaguaauuggugau

SEQ ID NO: 1931587 - RNA, 19 nt, Artificial Sequence
  Description of Artificial Sequence: Synthetic oligonucleotide
  Antisense strand to SEQ ID NO: 1931586
aucaccaauuacuuucaga

SEQ ID NO: 1931588 - RNA, 19 nt, Artificial Sequence
  Description of Artificial Sequence: Synthetic oligonucleotide
  Sense strand starting at position 2267 of SEQ ID NO: 1879771
cugaaaguaauuggugauc

SEQ ID NO: 1931589 - RNA, 19 nt, Artificial Sequence
  Description of Artificial Sequence: Synthetic oligonucleotide
  Antisense strand to SEQ ID NO: 1931588
gaucaccaauuacuuucag

SEQ ID NO: 1931590 - RNA, 19 nt, Artificial Sequence
  Description of Artificial Sequence: Synthetic oligonucleotide
  Sense strand starting at position 2270 of SEQ ID NO: 1879771
aaaguaauuggugaucuuu

SEQ ID NO: 1931591 - RNA, 19 nt, Artificial Sequence
  Description of Artificial Sequence: Synthetic oligonucleotide
  Antisense strand to SEQ ID NO: 1931590
aaagaucaccaauuacuuu

SEQ ID NO: 1931592 - RNA, 19 nt, Artificial Sequence
  Description of Artificial Sequence: Synthetic oligonucleotide
  Sense strand starting at position 2276 of SEQ ID NO: 1879771
auuggugaucuuuguagaa

SEQ ID NO: 1931593 - RNA, 19 nt, Artificial Sequence
  Description of Artificial Sequence: Synthetic oligonucleotide
  Antisense strand to SEQ ID NO: 1931592
uucuacaaagaucaccaau

SEQ ID NO: 1931594 - RNA, 19 nt, Artificial Sequence
  Description of Artificial Sequence: Synthetic oligonucleotide
  Sense strand starting at position 2350 of SEQ ID NO: 1879771
guuccacuagcuggagaua

SEQ ID NO: 1931595 - RNA, 19 nt, Artificial Sequence
  Description of Artificial Sequence: Synthetic oligonucleotide
  Antisense strand to SEQ ID NO: 1931594
uaucuccagcuaguggaac

SEQ ID NO: 1931596 - RNA, 19 nt, Artificial Sequence
  Description of Artificial Sequence: Synthetic oligonucleotide
  Sense strand starting at position 2365 of SEQ ID NO: 1879771
gauagacaccguuaccauu

SEQ ID NO: 1931597 - RNA, 19 nt, Artificial Sequence
  Description of Artificial Sequence: Synthetic oligonucleotide
  Antisense strand to SEQ ID NO: 1931596
aaugguaacggugucuauc

SEQ ID NO: 1931598 - RNA, 19 nt, Artificial Sequence
  Description of Artificial Sequence: Synthetic oligonucleotide
  Sense strand starting at position 2608 of SEQ ID NO: 1879771
guauuuacaucguugcuaa

SEQ ID NO: 1931599 - RNA, 19 nt, Artificial Sequence
  Description of Artificial Sequence: Synthetic oligonucleotide
  Antisense strand to SEQ ID NO: 1931598
uuagcaacgauguaaauac

SEQ ID NO: 1931600 - RNA, 19 nt, Artificial Sequence
  Description of Artificial Sequence: Synthetic oligonucleotide
  Sense strand starting at position 2611 of SEQ ID NO: 1879771
uuuacaucguugcuaauuu

SEQ ID NO: 1931601 - RNA, 19 nt, Artificial Sequence
  Description of Artificial Sequence: Synthetic oligonucleotide
  Antisense strand to SEQ ID NO: 1931600
aaauuagcaacgauguaaa

SEQ ID NO: 1931602 - RNA, 19 nt, Artificial Sequence
  Description of Artificial Sequence: Synthetic oligonucleotide
  Sense strand starting at position 2619 of SEQ ID NO: 1879771
guugcuaauuucuuauuga

SEQ ID NO: 1931603 - RNA, 19 nt, Artificial Sequence
  Description of Artificial Sequence: Synthetic oligonucleotide
  Antisense strand to SEQ ID NO: 1931602
ucaauaagaaauuagcaac

SEQ ID NO: 1931604 - RNA, 19 nt, Artificial Sequence
  Description of Artificial Sequence: Synthetic oligonucleotide
  Sense strand starting at position 2622 of SEQ ID NO: 1879771
gcuaauuucuuauugaugu

SEQ ID NO: 1931605 - RNA, 19 nt, Artificial Sequence
  Description of Artificial Sequence: Synthetic oligonucleotide
  Antisense strand to SEQ ID NO: 1931604
acaucaauaagaaauuagc

SEQ ID NO: 1931606 - RNA, 19 nt, Artificial Sequence
  Description of Artificial Sequence: Synthetic oligonucleotide
  Sense strand starting at position 2834 of SEQ ID NO: 1879771
gugaccuucuguuuauaaa

SEQ ID NO: 1931607 - RNA, 19 nt, Artificial Sequence
  Description of Artificial Sequence: Synthetic oligonucleotide
  Antisense strand to SEQ ID NO: 1931606
uuuauaaacagaaggucac

SEQ ID NO: 1931608 - RNA, 19 nt, Artificial Sequence
  Description of Artificial Sequence: Synthetic oligonucleotide
  Sense strand starting at position 2873 of SEQ ID NO: 1879771
cuuauuuccuuagaagaga

SEQ ID NO: 1931609 - RNA, 19 nt, Artificial Sequence
  Description of Artificial Sequence: Synthetic oligonucleotide
  Antisense strand to SEQ ID NO: 1931608
ucucuucuaaggaaauaag

SEQ ID NO: 1931610 - RNA, 19 nt, Artificial Sequence
  Description of Artificial Sequence: Synthetic oligonucleotide
  Sense strand starting at position 2894 of SEQ ID NO: 1879771
ccaagaagcggugagugau

SEQ ID NO: 1931611 - RNA, 19 nt, Artificial Sequence
  Description of Artificial Sequence: Synthetic oligonucleotide
  Antisense strand to SEQ ID NO: 1931610
aucacucaccgcuucuugg

SEQ ID NO: 1931612 - RNA, 19 nt, Artificial Sequence
  Description of Artificial Sequence: Synthetic oligonucleotide
  Sense strand starting at position 2965 of SEQ ID NO: 1879771
ugagaugacucuccggaga

SEQ ID NO: 1931613 - RNA, 19 nt, Artificial Sequence
  Description of Artificial Sequence: Synthetic oligonucleotide
  Antisense strand to SEQ ID NO: 1931612
ucuccggagagucaucuca

SEQ ID NO: 1931614 - RNA, 19 nt, Artificial Sequence
  Description of Artificial Sequence: Synthetic oligonucleotide
  Sense strand starting at position 2978 of SEQ ID NO: 1879771
cggagagauuuagucguca

SEQ ID NO: 1931615 - RNA, 19 nt, Artificial Sequence
  Description of Artificial Sequence: Synthetic oligonucleotide
  Antisense strand to SEQ ID NO: 1931614
ugacgacuaaaucucuccg

SEQ ID NO: 1931616 - RNA, 19 nt, Artificial Sequence
  Description of Artificial Sequence: Synthetic oligonucleotide
  Sense strand starting at position 2982 of SEQ ID NO: 1879771
gagauuuagucgucacccu

SEQ ID NO: 1931617 - RNA, 19 nt, Artificial Sequence
  Description of Artificial Sequence: Synthetic oligonucleotide
  Antisense strand to SEQ ID NO: 1931616
agggugacgacuaaaucuc

SEQ ID NO: 1931618 - RNA, 19 nt, Artificial Sequence
  Description of Artificial Sequence: Synthetic oligonucleotide
  Sense strand starting at position 3025 of SEQ ID NO: 1879771
cagggaugugucuaucaag

SEQ ID NO: 1931619 - RNA, 19 nt, Artificial Sequence
  Description of Artificial Sequence: Synthetic oligonucleotide
  Antisense strand to SEQ ID NO: 1931618
cuugauagacacaucccug

SEQ ID NO: 1931620 - RNA, 19 nt, Artificial Sequence
  Description of Artificial Sequence: Synthetic oligonucleotide
  Sense strand starting at position 3237 of SEQ ID NO: 1879771
uguauuuguggccaucagu

SEQ ID NO: 1931621 - RNA, 19 nt, Artificial Sequence
  Description of Artificial Sequence: Synthetic oligonucleotide
  Antisense strand to SEQ ID NO: 1931620
acugauggccacaaauaca

SEQ ID NO: 1931622 - RNA, 19 nt, Artificial Sequence
  Description of Artificial Sequence: Synthetic oligonucleotide
  Sense strand starting at position 3354 of SEQ ID NO: 1879771
gguuucuccguguagaaag

SEQ ID NO: 1931623 - RNA, 19 nt, Artificial Sequence
  Description of Artificial Sequence: Synthetic oligonucleotide
  Antisense strand to SEQ ID NO: 1931622
cuuucuacacggagaaacc

SEQ ID NO: 1931624 - RNA, 19 nt, Artificial Sequence
  Description of Artificial Sequence: Synthetic oligonucleotide
  Sense strand starting at position 3416 of SEQ ID NO: 1879771
uacagugaauucucugaug

SEQ ID NO: 1931625 - RNA, 19 nt, Artificial Sequence
  Description of Artificial Sequence: Synthetic oligonucleotide
  Antisense strand to SEQ ID NO: 1931624
caucagagaauucacugua

SEQ ID NO: 1931626 - RNA, 19 nt, Artificial Sequence
  Description of Artificial Sequence: Synthetic oligonucleotide
  Sense strand starting at position 3418 of SEQ ID NO: 1879771
cagugaauucucugaugug

SEQ ID NO: 1931627 - RNA, 19 nt, Artificial Sequence
  Description of Artificial Sequence: Synthetic oligonucleotide
  Antisense strand to SEQ ID NO: 1931626
cacaucagagaauucacug

SEQ ID NO: 1931628 - RNA, 19 nt, Artificial Sequence
  Description of Artificial Sequence: Synthetic oligonucleotide
  Sense strand starting at position 3456 of SEQ ID NO: 1879771
ggguaagaguccuccucuc

SEQ ID NO: 1931629 - RNA, 19 nt, Artificial Sequence
  Description of Artificial Sequence: Synthetic oligonucleotide
  Antisense strand to SEQ ID NO: 1931628
gagaggaggacucuuaccc

SEQ ID NO: 1931630 - RNA, 19 nt, Artificial Sequence
  Description of Artificial Sequence: Synthetic oligonucleotide
  Sense strand starting at position 3499 of SEQ ID NO: 1879771
agccucaugcuuuaugaga

SEQ ID NO: 1931631 - RNA, 19 nt, Artificial Sequence
  Description of Artificial Sequence: Synthetic oligonucleotide
  Antisense strand to SEQ ID NO: 1931630
ucucauaaagcaugaggcu

SEQ ID NO: 1931632 - RNA, 19 nt, Artificial Sequence
  Description of Artificial Sequence: Synthetic oligonucleotide
  Sense strand starting at position 3787 of SEQ ID NO: 1879771
gguggagaccaguaucuca

SEQ ID NO: 1931633 - RNA, 19 nt, Artificial Sequence
  Description of Artificial Sequence: Synthetic oligonucleotide
  Antisense strand to SEQ ID NO: 1931632
ugagauacuggucuccacc

SEQ ID NO: 1931634 - RNA, 19 nt, Artificial Sequence
  Description of Artificial Sequence: Synthetic oligonucleotide
  Sense strand starting at position 3827 of SEQ ID NO: 1879771
guacuuguuagucaacuga

SEQ ID NO: 1931635 - RNA, 19 nt, Artificial Sequence
  Description of Artificial Sequence: Synthetic oligonucleotide
  Antisense strand to SEQ ID NO: 1931634
ucaguugacuaacaaguac

SEQ ID NO: 1931636 - RNA, 19 nt, Artificial Sequence
  Description of Artificial Sequence: Synthetic oligonucleotide
  Sense strand starting at position 3981 of SEQ ID NO: 1879771
ugucacuccagcugggaaa

SEQ ID NO: 1931637 - RNA, 19 nt, Artificial Sequence
  Description of Artificial Sequence: Synthetic oligonucleotide
  Antisense strand to SEQ ID NO: 1931636
uuucccagcuggagugaca

SEQ ID NO: 1931638 - RNA, 19 nt, Artificial Sequence
  Description of Artificial Sequence: Synthetic oligonucleotide
  Sense strand starting at position 3982 of SEQ ID NO: 1879771
gucacuccagcugggaaau

SEQ ID NO: 1931639 - RNA, 19 nt, Artificial Sequence
  Description of Artificial Sequence: Synthetic oligonucleotide
  Antisense strand to SEQ ID NO: 1931638
auuucccagcuggagugac

SEQ ID NO: 1931640 - RNA, 19 nt, Artificial Sequence
  Description of Artificial Sequence: Synthetic oligonucleotide
  Sense strand starting at position 73 of SEQ ID NO: 1879772
uggccucugcucgagagau

SEQ ID NO: 1931641 - RNA, 19 nt, Artificial Sequence
  Description of Artificial Sequence: Synthetic oligonucleotide
  Antisense strand to SEQ ID NO: 1931640
aucucucgagcagaggcca

SEQ ID NO: 1931642 - RNA, 19 nt, Artificial Sequence
  Description of Artificial Sequence: Synthetic oligonucleotide
  Sense strand starting at position 93 of SEQ ID NO: 1879772
ccauguugguucguagaga

SEQ ID NO: 1931643 - RNA, 19 nt, Artificial Sequence
  Description of Artificial Sequence: Synthetic oligonucleotide
  Antisense strand to SEQ ID NO: 1931642
ucucuacgaaccaacaugg

SEQ ID NO: 1931644 - RNA, 19 nt, Artificial Sequence
  Description of Artificial Sequence: Synthetic oligonucleotide
  Sense strand starting at position 156 of SEQ ID NO: 1879772
acggcucuaucucccaaau

SEQ ID NO: 1931645 - RNA, 19 nt, Artificial Sequence
  Description of Artificial Sequence: Synthetic oligonucleotide
  Antisense strand to SEQ ID NO: 1931644
auuugggagauagagccgu

SEQ ID NO: 1931646 - RNA, 19 nt, Artificial Sequence
  Description of Artificial Sequence: Synthetic oligonucleotide
  Sense strand starting at position 210 of SEQ ID NO: 1879772
cggucugauuucuccuaug

SEQ ID NO: 1931647 - RNA, 19 nt, Artificial Sequence
  Description of Artificial Sequence: Synthetic oligonucleotide
  Antisense strand to SEQ ID NO: 1931646
cauaggagaaaucagaccg

SEQ ID NO: 1931648 - RNA, 19 nt, Artificial Sequence
  Description of Artificial Sequence: Synthetic oligonucleotide
  Sense strand starting at position 221 of SEQ ID NO: 1879772
cuccuauguggugagcuau

SEQ ID NO: 1931649 - RNA, 19 nt, Artificial Sequence
  Description of Artificial Sequence: Synthetic oligonucleotide
  Antisense strand to SEQ ID NO: 1931648
auagcucaccacauaggag

SEQ ID NO: 1931650 - RNA, 19 nt, Artificial Sequence
  Description of Artificial Sequence: Synthetic oligonucleotide
  Sense strand starting at position 384 of SEQ ID NO: 1879772
gagggaacauacuugucau

SEQ ID NO: 1931651 - RNA, 19 nt, Artificial Sequence
  Description of Artificial Sequence: Synthetic oligonucleotide
  Antisense strand to SEQ ID NO: 1931650
augacaaguauguucccuc

SEQ ID NO: 1931652 - RNA, 19 nt, Artificial Sequence
  Description of Artificial Sequence: Synthetic oligonucleotide
  Sense strand starting at position 387 of SEQ ID NO: 1879772
ggaacauacuugucauuga

SEQ ID NO: 1931653 - RNA, 19 nt, Artificial Sequence
  Description of Artificial Sequence: Synthetic oligonucleotide
  Antisense strand to SEQ ID NO: 1931652
ucaaugacaaguauguucc

SEQ ID NO: 1931654 - RNA, 19 nt, Artificial Sequence
  Description of Artificial Sequence: Synthetic oligonucleotide
  Sense strand starting at position 390 of SEQ ID NO: 1879772
acauacuugucauugacga

SEQ ID NO: 1931655 - RNA, 19 nt, Artificial Sequence
  Description of Artificial Sequence: Synthetic oligonucleotide
  Antisense strand to SEQ ID NO: 1931654
ucgucaaugacaaguaugu

SEQ ID NO: 1931656 - RNA, 19 nt, Artificial Sequence
  Description of Artificial Sequence: Synthetic oligonucleotide
  Sense strand starting at position 391 of SEQ ID NO: 1879772
cauacuugucauugacgaa

SEQ ID NO: 1931657 - RNA, 19 nt, Artificial Sequence
  Description of Artificial Sequence: Synthetic oligonucleotide
  Antisense strand to SEQ ID NO: 1931656
uucgucaaugacaaguaug

SEQ ID NO: 1931658 - RNA, 19 nt, Artificial Sequence
  Description of Artificial Sequence: Synthetic oligonucleotide
  Sense strand starting at position 805 of SEQ ID NO: 1879772
acaguuugcugccugaaga

SEQ ID NO: 1931659 - RNA, 19 nt, Artificial Sequence
  Description of Artificial Sequence: Synthetic oligonucleotide
  Antisense strand to SEQ ID NO: 1931658
ucuucaggcagcaaacugu

SEQ ID NO: 1931660 - RNA, 19 nt, Artificial Sequence
  Description of Artificial Sequence: Synthetic oligonucleotide
  Sense strand starting at position 806 of SEQ ID NO: 1879772
caguuugcugccugaagac

SEQ ID NO: 1931661 - RNA, 19 nt, Artificial Sequence
  Description of Artificial Sequence: Synthetic oligonucleotide
  Antisense strand to SEQ ID NO: 1931660
gucuucaggcagcaaacug

SEQ ID NO: 1931662 - RNA, 19 nt, Artificial Sequence
  Description of Artificial Sequence: Synthetic oligonucleotide
  Sense strand starting at position 1008 of SEQ ID NO: 1879772
agaaguaucuuggcucugu

SEQ ID NO: 1931663 - RNA, 19 nt, Artificial Sequence
  Description of Artificial Sequence: Synthetic oligonucleotide
  Antisense strand to SEQ ID NO: 1931662
acagagccaagauacuucu

SEQ ID NO: 1931664 - RNA, 19 nt, Artificial Sequence
  Description of Artificial Sequence: Synthetic oligonucleotide
  Sense strand starting at position 1051 of SEQ ID NO: 1879772
gcuaaaucccaugguggga

SEQ ID NO: 1931665 - RNA, 19 nt, Artificial Sequence
  Description of Artificial Sequence: Synthetic oligonucleotide
  Antisense strand to SEQ ID NO: 1931664
ucccaccaugggauuuagc

SEQ ID NO: 1931666 - RNA, 19 nt, Artificial Sequence
  Description of Artificial Sequence: Synthetic oligonucleotide
  Sense strand starting at position 1193 of SEQ ID NO: 1879772
ucucaagacuucuagagaa

SEQ ID NO: 1931667 - RNA, 19 nt, Artificial Sequence
  Description of Artificial Sequence: Synthetic oligonucleotide
  Antisense strand to SEQ ID NO: 1931666
uucucuagaagucuugaga

SEQ ID NO: 1931668 - RNA, 19 nt, Artificial Sequence
  Description of Artificial Sequence: Synthetic oligonucleotide
  Sense strand starting at position 1242 of SEQ ID NO: 1879772
gggcucuugcaagaacagu

SEQ ID NO: 1931669 - RNA, 19 nt, Artificial Sequence
  Description of Artificial Sequence: Synthetic oligonucleotide
  Antisense strand to SEQ ID NO: 1931668
acuguucuugcaagagccc

SEQ ID NO: 1931670 - RNA, 19 nt, Artificial Sequence
  Description of Artificial Sequence: Synthetic oligonucleotide
  Sense strand starting at position 1301 of SEQ ID NO: 1879772
guacucuucucagcacuua

SEQ ID NO: 1931671 - RNA, 19 nt, Artificial Sequence
  Description of Artificial Sequence: Synthetic oligonucleotide
  Antisense strand to SEQ ID NO: 1931670
uaagugcugagaagaguac

SEQ ID NO: 1931672 - RNA, 19 nt, Artificial Sequence
  Description of Artificial Sequence: Synthetic oligonucleotide
  Sense strand starting at position 1510 of SEQ ID NO: 1879772
aggcuuaaccacuauguga

SEQ ID NO: 1931673 - RNA, 19 nt, Artificial Sequence
  Description of Artificial Sequence: Synthetic oligonucleotide
  Antisense strand to SEQ ID NO: 1931672
ucacauagugguuaagccu

SEQ ID NO: 1931674 - RNA, 19 nt, Artificial Sequence
  Description of Artificial Sequence: Synthetic oligonucleotide
  Sense strand starting at position 1512 of SEQ ID NO: 1879772
gcuuaaccacuaugugaua

SEQ ID NO: 1931675 - RNA, 19 nt, Artificial Sequence
  Description of Artificial Sequence: Synthetic oligonucleotide
  Antisense strand to SEQ ID NO: 1931674
uaucacauagugguuaagc

SEQ ID NO: 1931676 - RNA, 19 nt, Artificial Sequence
  Description of Artificial Sequence: Synthetic oligonucleotide
  Sense strand starting at position 1698 of SEQ ID NO: 1879772
gcuugaguucuagaaguug

SEQ ID NO: 1931677 - RNA, 19 nt, Artificial Sequence
  Description of Artificial Sequence: Synthetic oligonucleotide
  Antisense strand to SEQ ID NO: 1931676
caacuucuagaacucaagc

SEQ ID NO: 1931678 - RNA, 19 nt, Artificial Sequence
  Description of Artificial Sequence: Synthetic oligonucleotide
  Sense strand starting at position 1707 of SEQ ID NO: 1879772
cuagaaguuguaggucacu

SEQ ID NO: 1931679 - RNA, 19 nt, Artificial Sequence
  Description of Artificial Sequence: Synthetic oligonucleotide
  Antisense strand to SEQ ID NO: 1931678
agugaccuacaacuucuag

SEQ ID NO: 1931680 - RNA, 19 nt, Artificial Sequence
  Description of Artificial Sequence: Synthetic oligonucleotide
  Sense strand starting at position 2218 of SEQ ID NO: 1879772
gcuccaucuccugaaagug

SEQ ID NO: 1931681 - RNA, 19 nt, Artificial Sequence
  Description of Artificial Sequence: Synthetic oligonucleotide
  Antisense strand to SEQ ID NO: 1931680
cacuuucaggagauggagc

SEQ ID NO: 1931682 - RNA, 19 nt, Artificial Sequence
  Description of Artificial Sequence: Synthetic oligonucleotide
  Sense strand starting at position 2473 of SEQ ID NO: 1879772
aaaccagauuguuccggau

SEQ ID NO: 1931683 - RNA, 19 nt, Artificial Sequence
  Description of Artificial Sequence: Synthetic oligonucleotide
  Antisense strand to SEQ ID NO: 1931682
auccggaacaaucugguuu

SEQ ID NO: 1931684 - RNA, 19 nt, Artificial Sequence
  Description of Artificial Sequence: Synthetic oligonucleotide
  Sense strand starting at position 2477 of SEQ ID NO: 1879772
cagauuguuccggauuaaa

SEQ ID NO: 1931685 - RNA, 19 nt, Artificial Sequence
  Description of Artificial Sequence: Synthetic oligonucleotide
  Antisense strand to SEQ ID NO: 1931684
uuuaauccggaacaaucug

SEQ ID NO: 1931686 - RNA, 19 nt, Artificial Sequence
  Description of Artificial Sequence: Synthetic oligonucleotide
  Sense strand starting at position 2480 of SEQ ID NO: 1879772
auuguuccggauuaaaguu

SEQ ID NO: 1931687 - RNA, 19 nt, Artificial Sequence
  Description of Artificial Sequence: Synthetic oligonucleotide
  Antisense strand to SEQ ID NO: 1931686
aacuuuaauccggaacaau

SEQ ID NO: 1931688 - RNA, 19 nt, Artificial Sequence
  Description of Artificial Sequence: Synthetic oligonucleotide
  Sense strand starting at position 2925 of SEQ ID NO: 1879772
guggcuucaggccaaagau

SEQ ID NO: 1931689 - RNA, 19 nt, Artificial Sequence
  Description of Artificial Sequence: Synthetic oligonucleotide
  Antisense strand to SEQ ID NO: 1931688
aucuuuggccugaagccac

SEQ ID NO: 1931690 - RNA, 19 nt, Artificial Sequence
  Description of Artificial Sequence: Synthetic oligonucleotide
  Sense strand starting at position 2937 of SEQ ID NO: 1879772
caaagauggcccugcaaag

SEQ ID NO: 1931691 - RNA, 19 nt, Artificial Sequence
  Description of Artificial Sequence: Synthetic oligonucleotide
  Antisense strand to SEQ ID NO: 1931690
cuuugcagggccaucuuug

SEQ ID NO: 1931692 - RNA, 19 nt, Artificial Sequence
  Description of Artificial Sequence: Synthetic oligonucleotide
  Sense strand starting at position 3160 of SEQ ID NO: 1879772
gugggugucuuuaauggga

SEQ ID NO: 1931693 - RNA, 19 nt, Artificial Sequence
  Description of Artificial Sequence: Synthetic oligonucleotide
  Antisense strand to SEQ ID NO: 1931692
ucccauuaaagacacccac

SEQ ID NO: 1931694 - RNA, 19 nt, Artificial Sequence
  Description of Artificial Sequence: Synthetic oligonucleotide
  Sense strand starting at position 3286 of SEQ ID NO: 1879772
gucugaaggucucuaaauu

SEQ ID NO: 1931695 - RNA, 19 nt, Artificial Sequence
  Description of Artificial Sequence: Synthetic oligonucleotide
  Antisense strand to SEQ ID NO: 1931694
aauuuagagaccuucagac

SEQ ID NO: 1931696 - RNA, 19 nt, Artificial Sequence
  Description of Artificial Sequence: Synthetic oligonucleotide
  Sense strand starting at position 3397 of SEQ ID NO: 1879772
ugcugagagcugugaacca

SEQ ID NO: 1931697 - RNA, 19 nt, Artificial Sequence
  Description of Artificial Sequence: Synthetic oligonucleotide
  Antisense strand to SEQ ID NO: 1931696
ugguucacagcucucagca

SEQ ID NO: 1931698 - RNA, 19 nt, Artificial Sequence
  Description of Artificial Sequence: Synthetic oligonucleotide
  Sense strand starting at position 3409 of SEQ ID NO: 1879772
ugaaccaggcccuguuaua

SEQ ID NO: 1931699 - RNA, 19 nt, Artificial Sequence
  Description of Artificial Sequence: Synthetic oligonucleotide
  Antisense strand to SEQ ID NO: 1931698
uauaacagggccugguuca

SEQ ID NO: 1931700 - RNA, 19 nt, Artificial Sequence
  Description of Artificial Sequence: Synthetic oligonucleotide
  Sense strand starting at position 3421 of SEQ ID NO: 1879772
uguuauaagugucuaacac

SEQ ID NO: 1931701 - RNA, 19 nt, Artificial Sequence
  Description of Artificial Sequence: Synthetic oligonucleotide
  Antisense strand to SEQ ID NO: 1931700
guguuagacacuuauaaca

SEQ ID NO: 1931702 - RNA, 19 nt, Artificial Sequence
  Description of Artificial Sequence: Synthetic oligonucleotide
  Sense strand starting at position 3422 of SEQ ID NO: 1879772
guuauaagugucuaacacu

SEQ ID NO: 1931703 - RNA, 19 nt, Artificial Sequence
  Description of Artificial Sequence: Synthetic oligonucleotide
  Antisense strand to SEQ ID NO: 1931702
aguguuagacacuuauaac

SEQ ID NO: 1931704 - RNA, 19 nt, Artificial Sequence
  Description of Artificial Sequence: Synthetic oligonucleotide
  Sense strand starting at position 3428 of SEQ ID NO: 1879772
agugucuaacacugaauca

SEQ ID NO: 1931705 - RNA, 19 nt, Artificial Sequence
  Description of Artificial Sequence: Synthetic oligonucleotide
  Antisense strand to SEQ ID NO: 1931704
ugauucaguguuagacacu

SEQ ID NO: 1931706 - RNA, 19 nt, Artificial Sequence
  Description of Artificial Sequence: Synthetic oligonucleotide
  Sense strand starting at position 3439 of SEQ ID NO: 1879772
cugaaucaucagcaagcuu

SEQ ID NO: 1931707 - RNA, 19 nt, Artificial Sequence
  Description of Artificial Sequence: Synthetic oligonucleotide
  Antisense strand to SEQ ID NO: 1931706
aagcuugcugaugauucag

SEQ ID NO: 1931708 - RNA, 19 nt, Artificial Sequence
  Description of Artificial Sequence: Synthetic oligonucleotide
  Sense strand starting at position 3551 of SEQ ID NO: 1879772
agcaguuaacgguggaaga

SEQ ID NO: 1931709 - RNA, 19 nt, Artificial Sequence
  Description of Artificial Sequence: Synthetic oligonucleotide
  Antisense strand to SEQ ID NO: 1931708
ucuuccaccguuaacugcu

SEQ ID NO: 1931710 - RNA, 19 nt, Artificial Sequence
  Description of Artificial Sequence: Synthetic oligonucleotide
  Sense strand starting at position 3585 of SEQ ID NO: 1879772
ggccuaugcuuaucacuac

SEQ ID NO: 1931711 - RNA, 19 nt, Artificial Sequence
  Description of Artificial Sequence: Synthetic oligonucleotide
  Antisense strand to SEQ ID NO: 1931710
guagugauaagcauaggcc

SEQ ID NO: 1931712 - RNA, 19 nt, Artificial Sequence
  Description of Artificial Sequence: Synthetic oligonucleotide
  Sense strand starting at position 3646 of SEQ ID NO: 1879772
cccugaucgcagggaauga

SEQ ID NO: 1931713 - RNA, 19 nt, Artificial Sequence
  Description of Artificial Sequence: Synthetic oligonucleotide
  Antisense strand to SEQ ID NO: 1931712
ucauucccugcgaucaggg

SEQ ID NO: 1931714 - RNA, 19 nt, Artificial Sequence
  Description of Artificial Sequence: Synthetic oligonucleotide
  Sense strand starting at position 3727 of SEQ ID NO: 1879772
gcuugcuaccgugaaggaa

SEQ ID NO: 1931715 - RNA, 19 nt, Artificial Sequence
  Description of Artificial Sequence: Synthetic oligonucleotide
  Antisense strand to SEQ ID NO: 1931714
uuccuucacgguagcaagc

SEQ ID NO: 1931716 - RNA, 19 nt, Artificial Sequence
  Description of Artificial Sequence: Synthetic oligonucleotide
  Sense strand starting at position 3877 of SEQ ID NO: 1879772
ugaacaaaguguguuauga

SEQ ID NO: 1931717 - RNA, 19 nt, Artificial Sequence
  Description of Artificial Sequence: Synthetic oligonucleotide
  Antisense strand to SEQ ID NO: 1931716
ucauaacacacuuuguuca

SEQ ID NO: 1931718 - RNA, 19 nt, Artificial Sequence
  Description of Artificial Sequence: Synthetic oligonucleotide
  Sense strand starting at position 3886 of SEQ ID NO: 1879772
uguguuaugagagacaggu

SEQ ID NO: 1931719 - RNA, 19 nt, Artificial Sequence
  Description of Artificial Sequence: Synthetic oligonucleotide
  Antisense strand to SEQ ID NO: 1931718
accugucucucauaacaca

SEQ ID NO: 1931720 - RNA, 19 nt, Artificial Sequence
  Description of Artificial Sequence: Synthetic oligonucleotide
  Sense strand starting at position 134 of SEQ ID NO: 1879773
ggugguggcguuaaauucu

SEQ ID NO: 1931721 - RNA, 19 nt, Artificial Sequence
  Description of Artificial Sequence: Synthetic oligonucleotide
  Antisense strand to SEQ ID NO: 1931720
agaauuuaacgccaccacc

SEQ ID NO: 1931722 - RNA, 19 nt, Artificial Sequence
  Description of Artificial Sequence: Synthetic oligonucleotide
  Sense strand starting at position 163 of SEQ ID NO: 1879773
cgaacucuacugugaacua

SEQ ID NO: 1931723 - RNA, 19 nt, Artificial Sequence
  Description of Artificial Sequence: Synthetic oligonucleotide
  Antisense strand to SEQ ID NO: 1931722
uaguucacaguagaguucg

SEQ ID NO: 1931724 - RNA, 19 nt, Artificial Sequence
  Description of Artificial Sequence: Synthetic oligonucleotide
  Sense strand starting at position 172 of SEQ ID NO: 1879773
cugugaacuaugcauggaa

SEQ ID NO: 1931725 - RNA, 19 nt, Artificial Sequence
  Description of Artificial Sequence: Synthetic oligonucleotide
  Antisense strand to SEQ ID NO: 1931724
uuccaugcauaguucacag

SEQ ID NO: 1931726 - RNA, 19 nt, Artificial Sequence
  Description of Artificial Sequence: Synthetic oligonucleotide
  Sense strand starting at position 174 of SEQ ID NO: 1879773
gugaacuaugcauggaacu

SEQ ID NO: 1931727 - RNA, 19 nt, Artificial Sequence
  Description of Artificial Sequence: Synthetic oligonucleotide
  Antisense strand to SEQ ID NO: 1931726
aguuccaugcauaguucac

SEQ ID NO: 1931728 - RNA, 19 nt, Artificial Sequence
  Description of Artificial Sequence: Synthetic oligonucleotide
  Sense strand starting at position 175 of SEQ ID NO: 1879773
ugaacuaugcauggaacua

SEQ ID NO: 1931729 - RNA, 19 nt, Artificial Sequence
  Description of Artificial Sequence: Synthetic oligonucleotide
  Antisense strand to SEQ ID NO: 1931728
uaguuccaugcauaguuca

SEQ ID NO: 1931730 - RNA, 19 nt, Artificial Sequence
  Description of Artificial Sequence: Synthetic oligonucleotide
  Sense strand starting at position 303 of SEQ ID NO: 1879773
auugucauccacgaaacua

SEQ ID NO: 1931731 - RNA, 19 nt, Artificial Sequence
  Description of Artificial Sequence: Synthetic oligonucleotide
  Antisense strand to SEQ ID NO: 1931730
uaguuucguggaugacaau

SEQ ID NO: 1931732 - RNA, 19 nt, Artificial Sequence
  Description of Artificial Sequence: Synthetic oligonucleotide
  Sense strand starting at position 329 of SEQ ID NO: 1879773
gugccagaccgcuucuuua

SEQ ID NO: 1931733 - RNA, 19 nt, Artificial Sequence
  Description of Artificial Sequence: Synthetic oligonucleotide
  Antisense strand to SEQ ID NO: 1931732
uaaagaagcggucuggcac

SEQ ID NO: 1931734 - RNA, 19 nt, Artificial Sequence
  Description of Artificial Sequence: Synthetic oligonucleotide
  Sense strand starting at position 332 of SEQ ID NO: 1879773
ccagaccgcuucuuuaaau

SEQ ID NO: 1931735 - RNA, 19 nt, Artificial Sequence
  Description of Artificial Sequence: Synthetic oligonucleotide
  Antisense strand to SEQ ID NO: 1931734
auuuaaagaagcggucugg

SEQ ID NO: 1931736 - RNA, 19 nt, Artificial Sequence
  Description of Artificial Sequence: Synthetic oligonucleotide
  Sense strand starting at position 535 of SEQ ID NO: 1879773
ggcugaauguauguuggau

SEQ ID NO: 1931737 - RNA, 19 nt, Artificial Sequence
  Description of Artificial Sequence: Synthetic oligonucleotide
  Antisense strand to SEQ ID NO: 1931736
auccaacauacauucagcc

SEQ ID NO: 1931738 - RNA, 19 nt, Artificial Sequence
  Description of Artificial Sequence: Synthetic oligonucleotide
  Sense strand starting at position 682 of SEQ ID NO: 1879773
aguaauugucuacaaguuc

SEQ ID NO: 1931739 - RNA, 19 nt, Artificial Sequence
  Description of Artificial Sequence: Synthetic oligonucleotide
  Antisense strand to SEQ ID NO: 1931738
gaacuuguagacaauuacu

SEQ ID NO: 1931740 - RNA, 19 nt, Artificial Sequence
  Description of Artificial Sequence: Synthetic oligonucleotide
  Sense strand starting at position 695 of SEQ ID NO: 1879773
aaguucuagcacugacagu

SEQ ID NO: 1931741 - RNA, 19 nt, Artificial Sequence
  Description of Artificial Sequence: Synthetic oligonucleotide
  Antisense strand to SEQ ID NO: 1931740
acugucagugcuagaacuu

SEQ ID NO: 1931742 - RNA, 19 nt, Artificial Sequence
  Description of Artificial Sequence: Synthetic oligonucleotide
  Sense strand starting at position 868 of SEQ ID NO: 1879773
ugcaucuaauuggugguaa

SEQ ID NO: 1931743 - RNA, 19 nt, Artificial Sequence
  Description of Artificial Sequence: Synthetic oligonucleotide
  Antisense strand to SEQ ID NO: 1931742
uuaccaccaauuagaugca

SEQ ID NO: 1931744 - RNA, 19 nt, Artificial Sequence
  Description of Artificial Sequence: Synthetic oligonucleotide
  Sense strand starting at position 870 of SEQ ID NO: 1879773
caucuaauuggugguaacu

SEQ ID NO: 1931745 - RNA, 19 nt, Artificial Sequence
  Description of Artificial Sequence: Synthetic oligonucleotide
  Antisense strand to SEQ ID NO: 1931744
aguuaccaccaauuagaug

SEQ ID NO: 1931746 - RNA, 19 nt, Artificial Sequence
  Description of Artificial Sequence: Synthetic oligonucleotide
  Sense strand starting at position 887 of SEQ ID NO: 1879773
cuggcaugacucugaagua

SEQ ID NO: 1931747 - RNA, 19 nt, Artificial Sequence
  Description of Artificial Sequence: Synthetic oligonucleotide
  Antisense strand to SEQ ID NO: 1931746
uacuucagagucaugccag

SEQ ID NO: 1931748 - RNA, 19 nt, Artificial Sequence
  Description of Artificial Sequence: Synthetic oligonucleotide
  Sense strand starting at position 922 of SEQ ID NO: 1879773
gguaauaauuguccucuga

SEQ ID NO: 1931749 - RNA, 19 nt, Artificial Sequence
  Description of Artificial Sequence: Synthetic oligonucleotide
  Antisense strand to SEQ ID NO: 1931748
ucagaggacaauuauuacc

SEQ ID NO: 1931750 - RNA, 19 nt, Artificial Sequence
  Description of Artificial Sequence: Synthetic oligonucleotide
  Sense strand starting at position 985 of SEQ ID NO: 1879773
agcugaauaugcuuaagua

SEQ ID NO: 1931751 - RNA, 19 nt, Artificial Sequence
  Description of Artificial Sequence: Synthetic oligonucleotide
  Antisense strand to SEQ ID NO: 1931750
uacuuaagcauauucagcu

SEQ ID NO: 1931752 - RNA, 19 nt, Artificial Sequence
  Description of Artificial Sequence: Synthetic oligonucleotide
  Sense strand starting at position 986 of SEQ ID NO: 1879773
gcugaauaugcuuaaguac

SEQ ID NO: 1931753 - RNA, 19 nt, Artificial Sequence
  Description of Artificial Sequence: Synthetic oligonucleotide
  Antisense strand to SEQ ID NO: 1931752
guacuuaagcauauucagc

SEQ ID NO: 1931754 - RNA, 19 nt, Artificial Sequence
  Description of Artificial Sequence: Synthetic oligonucleotide
  Sense strand starting at position 1046 of SEQ ID NO: 1879773
ucugcaucugcagaucaga

SEQ ID NO: 1931755 - RNA, 19 nt, Artificial Sequence
  Description of Artificial Sequence: Synthetic oligonucleotide
  Antisense strand to SEQ ID NO: 1931754
ucugaucugcagaugcaga

SEQ ID NO: 1931756 - RNA, 19 nt, Artificial Sequence
  Description of Artificial Sequence: Synthetic oligonucleotide
  Sense strand starting at position 1105 of SEQ ID NO: 1879773
gggacuuugagcugaugga

SEQ ID NO: 1931757 - RNA, 19 nt, Artificial Sequence
  Description of Artificial Sequence: Synthetic oligonucleotide
  Antisense strand to SEQ ID NO: 1931756
uccaucagcucaaaguccc

SEQ ID NO: 1931758 - RNA, 19 nt, Artificial Sequence
  Description of Artificial Sequence: Synthetic oligonucleotide
  Sense strand starting at position 1157 of SEQ ID NO: 1879773
cuuggcgauagcugagaau

SEQ ID NO: 1931759 - RNA, 19 nt, Artificial Sequence
  Description of Artificial Sequence: Synthetic oligonucleotide
  Antisense strand to SEQ ID NO: 1931758
auucucagcuaucgccaag

SEQ ID NO: 1931760 - RNA, 19 nt, Artificial Sequence
  Description of Artificial Sequence: Synthetic oligonucleotide
  Sense strand starting at position 1168 of SEQ ID NO: 1879773
cugagaaucguaggacaaa

SEQ ID NO: 1931761 - RNA, 19 nt, Artificial Sequence
  Description of Artificial Sequence: Synthetic oligonucleotide
  Antisense strand to SEQ ID NO: 1931760
uuuguccuacgauucucag

SEQ ID NO: 1931762 - RNA, 19 nt, Artificial Sequence
  Description of Artificial Sequence: Synthetic oligonucleotide
  Sense strand starting at position 1188 of SEQ ID NO: 1879773
uguguaaugaggugaagga

SEQ ID NO: 1931763 - RNA, 19 nt, Artificial Sequence
  Description of Artificial Sequence: Synthetic oligonucleotide
  Antisense strand to SEQ ID NO: 1931762
uccuucaccucauuacaca

SEQ ID NO: 1931764 - RNA, 19 nt, Artificial Sequence
  Description of Artificial Sequence: Synthetic oligonucleotide
  Sense strand starting at position 1228 of SEQ ID NO: 1879773
accgccaaucaugaguuau

SEQ ID NO: 1931765 - RNA, 19 nt, Artificial Sequence
  Description of Artificial Sequence: Synthetic oligonucleotide
  Antisense strand to SEQ ID NO: 1931764
auaacucaugauuggcggu

SEQ ID NO: 1931766 - RNA, 19 nt, Artificial Sequence
  Description of Artificial Sequence: Synthetic oligonucleotide
  Sense strand starting at position 1329 of SEQ ID NO: 1879773
aaagaaauguagccguaua

SEQ ID NO: 1931767 - RNA, 19 nt, Artificial Sequence
  Description of Artificial Sequence: Synthetic oligonucleotide
  Antisense strand to SEQ ID NO: 1931766
uauacggcuacauuucuuu

SEQ ID NO: 1931768 - RNA, 19 nt, Artificial Sequence
  Description of Artificial Sequence: Synthetic oligonucleotide
  Sense strand starting at position 1426 of SEQ ID NO: 1879773
acgaaugucgauuauggau

SEQ ID NO: 1931769 - RNA, 19 nt, Artificial Sequence
  Description of Artificial Sequence: Synthetic oligonucleotide
  Antisense strand to SEQ ID NO: 1931768
auccauaaucgacauucgu

SEQ ID NO: 1931770 - RNA, 19 nt, Artificial Sequence
  Description of Artificial Sequence: Synthetic oligonucleotide
  Sense strand starting at position 1435 of SEQ ID NO: 1879773
gauuauggauucuuaugua

SEQ ID NO: 1931771 - RNA, 19 nt, Artificial Sequence
  Description of Artificial Sequence: Synthetic oligonucleotide
  Antisense strand to SEQ ID NO: 1931770
uacauaagaauccauaauc

SEQ ID NO: 1931772 - RNA, 19 nt, Artificial Sequence
  Description of Artificial Sequence: Synthetic oligonucleotide
  Sense strand starting at position 1723 of SEQ ID NO: 1879773
gcacaaggauccucaacuu

SEQ ID NO: 1931773 - RNA, 19 nt, Artificial Sequence
  Description of Artificial Sequence: Synthetic oligonucleotide
  Antisense strand to SEQ ID NO: 1931772
aaguugaggauccuugugc

SEQ ID NO: 1931774 - RNA, 19 nt, Artificial Sequence
  Description of Artificial Sequence: Synthetic oligonucleotide
  Sense strand starting at position 1786 of SEQ ID NO: 1879773
agucgucuucuggaucaac

SEQ ID NO: 1931775 - RNA, 19 nt, Artificial Sequence
  Description of Artificial Sequence: Synthetic oligonucleotide
  Antisense strand to SEQ ID NO: 1931774
guugauccagaagacgacu

SEQ ID NO: 1931776 - RNA, 19 nt, Artificial Sequence
  Description of Artificial Sequence: Synthetic oligonucleotide
  Sense strand starting at position 1973 of SEQ ID NO: 1879773
gaacucugaguuugucuuu

SEQ ID NO: 1931777 - RNA, 19 nt, Artificial Sequence
  Description of Artificial Sequence: Synthetic oligonucleotide
  Antisense strand to SEQ ID NO: 1931776
aaagacaaacucagaguuc

SEQ ID NO: 1931778 - RNA, 19 nt, Artificial Sequence
  Description of Artificial Sequence: Synthetic oligonucleotide
  Sense strand starting at position 1978 of SEQ ID NO: 1879773
cugaguuugucuuucccaa

SEQ ID NO: 1931779 - RNA, 19 nt, Artificial Sequence
  Description of Artificial Sequence: Synthetic oligonucleotide
  Antisense strand to SEQ ID NO: 1931778
uugggaaagacaaacucag

SEQ ID NO: 1931780 - RNA, 19 nt, Artificial Sequence
  Description of Artificial Sequence: Synthetic oligonucleotide
  Sense strand starting at position 2078 of SEQ ID NO: 1879773
ugcaucuuuccugggacaa

SEQ ID NO: 1931781 - RNA, 19 nt, Artificial Sequence
  Description of Artificial Sequence: Synthetic oligonucleotide
  Antisense strand to SEQ ID NO: 1931780
uugucccaggaaagaugca

SEQ ID NO: 1931782 - RNA, 19 nt, Artificial Sequence
  Description of Artificial Sequence: Synthetic oligonucleotide
  Sense strand starting at position 2079 of SEQ ID NO: 1879773
gcaucuuuccugggacaag

SEQ ID NO: 1931783 - RNA, 19 nt, Artificial Sequence
  Description of Artificial Sequence: Synthetic oligonucleotide
  Antisense strand to SEQ ID NO: 1931782
cuugucccaggaaagaugc

SEQ ID NO: 1931784 - RNA, 19 nt, Artificial Sequence
  Description of Artificial Sequence: Synthetic oligonucleotide
  Sense strand starting at position 2339 of SEQ ID NO: 1879773
accucucugucugugacaa

SEQ ID NO: 1931785 - RNA, 19 nt, Artificial Sequence
  Description of Artificial Sequence: Synthetic oligonucleotide
  Antisense strand to SEQ ID NO: 1931784
uugucacagacagagaggu

SEQ ID NO: 1931786 - RNA, 19 nt, Artificial Sequence
  Description of Artificial Sequence: Synthetic oligonucleotide
  Sense strand starting at position 3232 of SEQ ID NO: 1879773
ugguaugugccacauauaa

SEQ ID NO: 1931787 - RNA, 19 nt, Artificial Sequence
  Description of Artificial Sequence: Synthetic oligonucleotide
  Antisense strand to SEQ ID NO: 1931786
uuauauguggcacauacca

SEQ ID NO: 1931788 - RNA, 19 nt, Artificial Sequence
  Description of Artificial Sequence: Synthetic oligonucleotide
  Sense strand starting at position 3253 of SEQ ID NO: 1879773
ccauaaucccagcaugaug

SEQ ID NO: 1931789 - RNA, 19 nt, Artificial Sequence
  Description of Artificial Sequence: Synthetic oligonucleotide
  Antisense strand to SEQ ID NO: 1931788
caucaugcugggauuaugg

SEQ ID NO: 1931790 - RNA, 19 nt, Artificial Sequence
  Description of Artificial Sequence: Synthetic oligonucleotide
  Sense strand starting at position 3261 of SEQ ID NO: 1879773
ccagcaugaugauuggaaa

SEQ ID NO: 1931791 - RNA, 19 nt, Artificial Sequence
  Description of Artificial Sequence: Synthetic oligonucleotide
  Antisense strand to SEQ ID NO: 1931790
uuuccaaucaucaugcugg

SEQ ID NO: 1931792 - RNA, 19 nt, Artificial Sequence
  Description of Artificial Sequence: Synthetic oligonucleotide
  Sense strand starting at position 3329 of SEQ ID NO: 1879773
gaaauaaauggcgacuugu

SEQ ID NO: 1931793 - RNA, 19 nt, Artificial Sequence
  Description of Artificial Sequence: Synthetic oligonucleotide
  Antisense strand to SEQ ID NO: 1931792
acaagucgccauuuauuuc

SEQ ID NO: 1931794 - RNA, 19 nt, Artificial Sequence
  Description of Artificial Sequence: Synthetic oligonucleotide
  Sense strand starting at position 3482 of SEQ ID NO: 1879773
ugccuuugucaucaccaga

SEQ ID NO: 1931795 - RNA, 19 nt, Artificial Sequence
  Description of Artificial Sequence: Synthetic oligonucleotide
  Antisense strand to SEQ ID NO: 1931794
ucuggugaugacaaaggca

SEQ ID NO: 1931796 - RNA, 19 nt, Artificial Sequence
  Description of Artificial Sequence: Synthetic oligonucleotide
  Sense strand starting at position 3545 of SEQ ID NO: 1879773
ucauuauaucaccguuuga

SEQ ID NO: 1931797 - RNA, 19 nt, Artificial Sequence
  Description of Artificial Sequence: Synthetic oligonucleotide
  Antisense strand to SEQ ID NO: 1931796
ucaaacggugauauaauga

SEQ ID NO: 1931798 - RNA, 19 nt, Artificial Sequence
  Description of Artificial Sequence: Synthetic oligonucleotide
  Sense strand starting at position 3585 of SEQ ID NO: 1879773
uguaaacuuuaucccaagu

SEQ ID NO: 1931799 - RNA, 19 nt, Artificial Sequence
  Description of Artificial Sequence: Synthetic oligonucleotide
  Antisense strand to SEQ ID NO: 1931798
acuugggauaaaguuuaca

SEQ ID NO: 1931800 - RNA, 19 nt, Artificial Sequence
  Description of Artificial Sequence: Synthetic oligonucleotide
  Sense strand starting at position 195 of SEQ ID NO: 1879774
gcugcaucagcauucguau

SEQ ID NO: 1931801 - RNA, 19 nt, Artificial Sequence
  Description of Artificial Sequence: Synthetic oligonucleotide
  Antisense strand to SEQ ID NO: 1931800
auacgaaugcugaugcagc

SEQ ID NO: 1931802 - RNA, 19 nt, Artificial Sequence
  Description of Artificial Sequence: Synthetic oligonucleotide
  Sense strand starting at position 575 of SEQ ID NO: 1879774
agauauguccugugggagc

SEQ ID NO: 1931803 - RNA, 19 nt, Artificial Sequence
  Description of Artificial Sequence: Synthetic oligonucleotide
  Antisense strand to SEQ ID NO: 1931802
gcucccacaggacauaucu

SEQ ID NO: 1931804 - RNA, 19 nt, Artificial Sequence
  Description of Artificial Sequence: Synthetic oligonucleotide
  Sense strand starting at position 625 of SEQ ID NO: 1879774
gggcuaagcguguuguguu

SEQ ID NO: 1931805 - RNA, 19 nt, Artificial Sequence
  Description of Artificial Sequence: Synthetic oligonucleotide
  Antisense strand to SEQ ID NO: 1931804
aacacaacacgcuuagccc

SEQ ID NO: 1931806 - RNA, 19 nt, Artificial Sequence
  Description of Artificial Sequence: Synthetic oligonucleotide
  Sense strand starting at position 820 of SEQ ID NO: 1879774
cuggguccacagugacauu

SEQ ID NO: 1931807 - RNA, 19 nt, Artificial Sequence
  Description of Artificial Sequence: Synthetic oligonucleotide
  Antisense strand to SEQ ID NO: 1931806
aaugucacuguggacccag

SEQ ID NO: 1931808 - RNA, 19 nt, Artificial Sequence
  Description of Artificial Sequence: Synthetic oligonucleotide
  Sense strand starting at position 845 of SEQ ID NO: 1879774
gaccucuucugugugagga

SEQ ID NO: 1931809 - RNA, 19 nt, Artificial Sequence
  Description of Artificial Sequence: Synthetic oligonucleotide
  Antisense strand to SEQ ID NO: 1931808
uccucacacagaagagguc

SEQ ID NO: 1931810 - RNA, 19 nt, Artificial Sequence
  Description of Artificial Sequence: Synthetic oligonucleotide
  Sense strand starting at position 846 of SEQ ID NO: 1879774
accucuucugugugaggaa

SEQ ID NO: 1931811 - RNA, 19 nt, Artificial Sequence
  Description of Artificial Sequence: Synthetic oligonucleotide
  Antisense strand to SEQ ID NO: 1931810
uuccucacacagaagaggu

SEQ ID NO: 1931812 - RNA, 19 nt, Artificial Sequence
  Description of Artificial Sequence: Synthetic oligonucleotide
  Sense strand starting at position 1206 of SEQ ID NO: 1879774
uggccuugaccuuggcaau

SEQ ID NO: 1931813 - RNA, 19 nt, Artificial Sequence
  Description of Artificial Sequence: Synthetic oligonucleotide
  Antisense strand to SEQ ID NO: 1931812
auugccaaggucaaggcca

SEQ ID NO: 1931814 - RNA, 19 nt, Artificial Sequence
  Description of Artificial Sequence: Synthetic oligonucleotide
  Sense strand starting at position 1207 of SEQ ID NO: 1879774
ggccuugaccuuggcaaua

SEQ ID NO: 1931815 - RNA, 19 nt, Artificial Sequence
  Description of Artificial Sequence: Synthetic oligonucleotide
  Antisense strand to SEQ ID NO: 1931814
uauugccaaggucaaggcc

SEQ ID NO: 1931816 - RNA, 19 nt, Artificial Sequence
  Description of Artificial Sequence: Synthetic oligonucleotide
  Sense strand starting at position 1265 of SEQ ID NO: 1879774
uugcccuugguauaagagu

SEQ ID NO: 1931817 - RNA, 19 nt, Artificial Sequence
  Description of Artificial Sequence: Synthetic oligonucleotide
  Antisense strand to SEQ ID NO: 1931816
acucuuauaccaagggcaa

SEQ ID NO: 1931818 - RNA, 19 nt, Artificial Sequence
  Description of Artificial Sequence: Synthetic oligonucleotide
  Sense strand starting at position 1338 of SEQ ID NO: 1879774
ggugaauaaugacugggua

SEQ ID NO: 1931819 - RNA, 19 nt, Artificial Sequence
  Description of Artificial Sequence: Synthetic oligonucleotide
  Antisense strand to SEQ ID NO: 1931818
uacccagucauuauucacc

SEQ ID NO: 1931820 - RNA, 19 nt, Artificial Sequence
  Description of Artificial Sequence: Synthetic oligonucleotide
  Sense strand starting at position 1340 of SEQ ID NO: 1879774
ugaauaaugacuggguacu

SEQ ID NO: 1931821 - RNA, 19 nt, Artificial Sequence
  Description of Artificial Sequence: Synthetic oligonucleotide
  Antisense strand to SEQ ID NO: 1931820
aguacccagucauuauuca

SEQ ID NO: 1931822 - RNA, 19 nt, Artificial Sequence
  Description of Artificial Sequence: Synthetic oligonucleotide
  Sense strand starting at position 1359 of SEQ ID NO: 1879774
gguaguuacagcuggacau

SEQ ID NO: 1931823 - RNA, 19 nt, Artificial Sequence
  Description of Artificial Sequence: Synthetic oligonucleotide
  Antisense strand to SEQ ID NO: 1931822
auguccagcuguaacuacc

SEQ ID NO: 1931824 - RNA, 19 nt, Artificial Sequence
  Description of Artificial Sequence: Synthetic oligonucleotide
  Sense strand starting at position 1360 of SEQ ID NO: 1879774
guaguuacagcuggacaua

SEQ ID NO: 1931825 - RNA, 19 nt, Artificial Sequence
  Description of Artificial Sequence: Synthetic oligonucleotide
  Antisense strand to SEQ ID NO: 1931824
uauguccagcuguaacuac

SEQ ID NO: 1931826 - RNA, 19 nt, Artificial Sequence
  Description of Artificial Sequence: Synthetic oligonucleotide
  Sense strand starting at position 1361 of SEQ ID NO: 1879774
uaguuacagcuggacauaa

SEQ ID NO: 1931827 - RNA, 19 nt, Artificial Sequence
  Description of Artificial Sequence: Synthetic oligonucleotide
  Antisense strand to SEQ ID NO: 1931826
uuauguccagcuguaacua

SEQ ID NO: 1931828 - RNA, 19 nt, Artificial Sequence
  Description of Artificial Sequence: Synthetic oligonucleotide
  Sense strand starting at position 1377 of SEQ ID NO: 1879774
uaaaguaguacugggagau

SEQ ID NO: 1931829 - RNA, 19 nt, Artificial Sequence
  Description of Artificial Sequence: Synthetic oligonucleotide
  Antisense strand to SEQ ID NO: 1931828
aucucccaguacuacuuua

SEQ ID NO: 1931830 - RNA, 19 nt, Artificial Sequence
  Description of Artificial Sequence: Synthetic oligonucleotide
  Sense strand starting at position 1378 of SEQ ID NO: 1879774
aaaguaguacugggagaug

SEQ ID NO: 1931831 - RNA, 19 nt, Artificial Sequence
  Description of Artificial Sequence: Synthetic oligonucleotide
  Antisense strand to SEQ ID NO: 1931830
caucucccaguacuacuuu

SEQ ID NO: 1931832 - RNA, 19 nt, Artificial Sequence
  Description of Artificial Sequence: Synthetic oligonucleotide
  Sense strand starting at position 1575 of SEQ ID NO: 1879774
gaugguuauagguaaguca

SEQ ID NO: 1931833 - RNA, 19 nt, Artificial Sequence
  Description of Artificial Sequence: Synthetic oligonucleotide
  Antisense strand to SEQ ID NO: 1931832
ugacuuaccuauaaccauc

SEQ ID NO: 1931834 - RNA, 19 nt, Artificial Sequence
  Description of Artificial Sequence: Synthetic oligonucleotide
  Sense strand starting at position 1669 of SEQ ID NO: 1879774
ggcagauaauccguaguac

SEQ ID NO: 1931835 - RNA, 19 nt, Artificial Sequence
  Description of Artificial Sequence: Synthetic oligonucleotide
  Antisense strand to SEQ ID NO: 1931834
guacuacggauuaucugcc

SEQ ID NO: 1931836 - RNA, 19 nt, Artificial Sequence
  Description of Artificial Sequence: Synthetic oligonucleotide
  Sense strand starting at position 1670 of SEQ ID NO: 1879774
gcagauaauccguaguaca

SEQ ID NO: 1931837 - RNA, 19 nt, Artificial Sequence
  Description of Artificial Sequence: Synthetic oligonucleotide
  Antisense strand to SEQ ID NO: 1931836
uguacuacggauuaucugc

SEQ ID NO: 1931838 - RNA, 19 nt, Artificial Sequence
  Description of Artificial Sequence: Synthetic oligonucleotide
  Sense strand starting at position 1697 of SEQ ID NO: 1879774
augacaugcacggaagagu

SEQ ID NO: 1931839 - RNA, 19 nt, Artificial Sequence
  Description of Artificial Sequence: Synthetic oligonucleotide
  Antisense strand to SEQ ID NO: 1931838
acucuuccgugcaugucau

SEQ ID NO: 1931840 - RNA, 19 nt, Artificial Sequence
  Description of Artificial Sequence: Synthetic oligonucleotide
  Sense strand starting at position 1715 of SEQ ID NO: 1879774
uuuaucauggcauggaaag

SEQ ID NO: 1931841 - RNA, 19 nt, Artificial Sequence
  Description of Artificial Sequence: Synthetic oligonucleotide
  Antisense strand to SEQ ID NO: 1931840
cuuuccaugccaugauaaa

SEQ ID NO: 1931842 - RNA, 19 nt, Artificial Sequence
  Description of Artificial Sequence: Synthetic oligonucleotide
  Sense strand starting at position 1716 of SEQ ID NO: 1879774
uuaucauggcauggaaaga

SEQ ID NO: 1931843 - RNA, 19 nt, Artificial Sequence
  Description of Artificial Sequence: Synthetic oligonucleotide
  Antisense strand to SEQ ID NO: 1931842
ucuuuccaugccaugauaa

SEQ ID NO: 1931844 - RNA, 19 nt, Artificial Sequence
  Description of Artificial Sequence: Synthetic oligonucleotide
  Sense strand starting at position 1925 of SEQ ID NO: 1879774
aagaucaccugagagaaga

SEQ ID NO: 1931845 - RNA, 19 nt, Artificial Sequence
  Description of Artificial Sequence: Synthetic oligonucleotide
  Antisense strand to SEQ ID NO: 1931844
ucuucucucaggugaucuu

SEQ ID NO: 1931846 - RNA, 19 nt, Artificial Sequence
  Description of Artificial Sequence: Synthetic oligonucleotide
  Sense strand starting at position 2025 of SEQ ID NO: 1879774
uguccaucagcucaaugaa

SEQ ID NO: 1931847 - RNA, 19 nt, Artificial Sequence
  Description of Artificial Sequence: Synthetic oligonucleotide
  Antisense strand to SEQ ID NO: 1931846
uucauugagcugauggaca

SEQ ID NO: 1931848 - RNA, 19 nt, Artificial Sequence
  Description of Artificial Sequence: Synthetic oligonucleotide
  Sense strand starting at position 2070 of SEQ ID NO: 1879774
cccgaaccaucugcaagaa

SEQ ID NO: 1931849 - RNA, 19 nt, Artificial Sequence
  Description of Artificial Sequence: Synthetic oligonucleotide
  Antisense strand to SEQ ID NO: 1931848
uucuugcagaugguucggg

SEQ ID NO: 1931850 - RNA, 19 nt, Artificial Sequence
  Description of Artificial Sequence: Synthetic oligonucleotide
  Sense strand starting at position 2079 of SEQ ID NO: 1879774
ucugcaagaaguugggaua

SEQ ID NO: 1931851 - RNA, 19 nt, Artificial Sequence
  Description of Artificial Sequence: Synthetic oligonucleotide
  Antisense strand to SEQ ID NO: 1931850
uaucccaacuucuugcaga

SEQ ID NO: 1931852 - RNA, 19 nt, Artificial Sequence
  Description of Artificial Sequence: Synthetic oligonucleotide
  Sense strand starting at position 2390 of SEQ ID NO: 1879774
ggagaaaugccaugcucug

SEQ ID NO: 1931853 - RNA, 19 nt, Artificial Sequence
  Description of Artificial Sequence: Synthetic oligonucleotide
  Antisense strand to SEQ ID NO: 1931852
cagagcauggcauuucucc

SEQ ID NO: 1931854 - RNA, 19 nt, Artificial Sequence
  Description of Artificial Sequence: Synthetic oligonucleotide
  Sense strand starting at position 2424 of SEQ ID NO: 1879774
ccuuauccugcugacagaa

SEQ ID NO: 1931855 - RNA, 19 nt, Artificial Sequence
  Description of Artificial Sequence: Synthetic oligonucleotide
  Antisense strand to SEQ ID NO: 1931854
uucugucagcaggauaagg

SEQ ID NO: 1931856 - RNA, 19 nt, Artificial Sequence
  Description of Artificial Sequence: Synthetic oligonucleotide
  Sense strand starting at position 2549 of SEQ ID NO: 1879774
ccgauuagccaugaugcga

SEQ ID NO: 1931857 - RNA, 19 nt, Artificial Sequence
  Description of Artificial Sequence: Synthetic oligonucleotide
  Antisense strand to SEQ ID NO: 1931856
ucgcaucauggcuaaucgg

SEQ ID NO: 1931858 - RNA, 19 nt, Artificial Sequence
  Description of Artificial Sequence: Synthetic oligonucleotide
  Sense strand starting at position 3002 of SEQ ID NO: 1879774
ugccucauugcagaaagga

SEQ ID NO: 1931859 - RNA, 19 nt, Artificial Sequence
  Description of Artificial Sequence: Synthetic oligonucleotide
  Antisense strand to SEQ ID NO: 1931858
uccuuucugcaaugaggca

SEQ ID NO: 1931860 - RNA, 19 nt, Artificial Sequence
  Description of Artificial Sequence: Synthetic oligonucleotide
  Sense strand starting at position 3064 of SEQ ID NO: 1879774
ggcaguuugguugaggcau

SEQ ID NO: 1931861 - RNA, 19 nt, Artificial Sequence
  Description of Artificial Sequence: Synthetic oligonucleotide
  Antisense strand to SEQ ID NO: 1931860
augccucaaccaaacugcc

SEQ ID NO: 1931862 - RNA, 19 nt, Artificial Sequence
  Description of Artificial Sequence: Synthetic oligonucleotide
  Sense strand starting at position 3097 of SEQ ID NO: 1879774
uccugcuugccugggaaga

SEQ ID NO: 1931863 - RNA, 19 nt, Artificial Sequence
  Description of Artificial Sequence: Synthetic oligonucleotide
  Antisense strand to SEQ ID NO: 1931862
ucuucccaggcaagcagga

SEQ ID NO: 1931864 - RNA, 19 nt, Artificial Sequence
  Description of Artificial Sequence: Synthetic oligonucleotide
  Sense strand starting at position 3217 of SEQ ID NO: 1879774
ccaggucucuuacuggaga

SEQ ID NO: 1931865 - RNA, 19 nt, Artificial Sequence
  Description of Artificial Sequence: Synthetic oligonucleotide
  Antisense strand to SEQ ID NO: 1931864
ucuccaguaagagaccugg

SEQ ID NO: 1931866 - RNA, 19 nt, Artificial Sequence
  Description of Artificial Sequence: Synthetic oligonucleotide
  Sense strand starting at position 3219 of SEQ ID NO: 1879774
aggucucuuacuggagaau

SEQ ID NO: 1931867 - RNA, 19 nt, Artificial Sequence
  Description of Artificial Sequence: Synthetic oligonucleotide
  Antisense strand to SEQ ID NO: 1931866
auucuccaguaagagaccu

SEQ ID NO: 1931868 - RNA, 19 nt, Artificial Sequence
  Description of Artificial Sequence: Synthetic oligonucleotide
  Sense strand starting at position 3230 of SEQ ID NO: 1879774
uggagaaucuuaccuucuc

SEQ ID NO: 1931869 - RNA, 19 nt, Artificial Sequence
  Description of Artificial Sequence: Synthetic oligonucleotide
  Antisense strand to SEQ ID NO: 1931868
gagaagguaagauucucca

SEQ ID NO: 1931870 - RNA, 19 nt, Artificial Sequence
  Description of Artificial Sequence: Synthetic oligonucleotide
  Sense strand starting at position 3231 of SEQ ID NO: 1879774
ggagaaucuuaccuucuca

SEQ ID NO: 1931871 - RNA, 19 nt, Artificial Sequence
  Description of Artificial Sequence: Synthetic oligonucleotide
  Antisense strand to SEQ ID NO: 1931870
ugagaagguaagauucucc

SEQ ID NO: 1931872 - RNA, 19 nt, Artificial Sequence
  Description of Artificial Sequence: Synthetic oligonucleotide
  Sense strand starting at position 3317 of SEQ ID NO: 1879774
cuuucuucucuccagggau

SEQ ID NO: 1931873 - RNA, 19 nt, Artificial Sequence
  Description of Artificial Sequence: Synthetic oligonucleotide
  Antisense strand to SEQ ID NO: 1931872
aucccuggagagaagaaag

SEQ ID NO: 1931874 - RNA, 19 nt, Artificial Sequence
  Description of Artificial Sequence: Synthetic oligonucleotide
  Sense strand starting at position 3468 of SEQ ID NO: 1879774
agaaccuuauccucggauu

SEQ ID NO: 1931875 - RNA, 19 nt, Artificial Sequence
  Description of Artificial Sequence: Synthetic oligonucleotide
  Antisense strand to SEQ ID NO: 1931874
aauccgaggauaagguucu

SEQ ID NO: 1931876 - RNA, 19 nt, Artificial Sequence
  Description of Artificial Sequence: Synthetic oligonucleotide
  Sense strand starting at position 3506 of SEQ ID NO: 1879774
acacuuaugucccuacgau

SEQ ID NO: 1931877 - RNA, 19 nt, Artificial Sequence
  Description of Artificial Sequence: Synthetic oligonucleotide
  Antisense strand to SEQ ID NO: 1931876
aucguagggacauaagugu

SEQ ID NO: 1931878 - RNA, 19 nt, Artificial Sequence
  Description of Artificial Sequence: Synthetic oligonucleotide
  Sense strand starting at position 3841 of SEQ ID NO: 1879774
ccuagauucugagccagaa

SEQ ID NO: 1931879 - RNA, 19 nt, Artificial Sequence
  Description of Artificial Sequence: Synthetic oligonucleotide
  Antisense strand to SEQ ID NO: 1931878
uucuggcucagaaucuagg

SEQ ID NO: 1931880 - RNA, 19 nt, Artificial Sequence
  Description of Artificial Sequence: Synthetic oligonucleotide
  Sense strand starting at position 569 of SEQ ID NO: 1879775
aggaccgugucuccaaauu

SEQ ID NO: 1931881 - RNA, 19 nt, Artificial Sequence
  Description of Artificial Sequence: Synthetic oligonucleotide
  Antisense strand to SEQ ID NO: 1931880
aauuuggagacacgguccu

SEQ ID NO: 1931882 - RNA, 19 nt, Artificial Sequence
  Description of Artificial Sequence: Synthetic oligonucleotide
  Sense strand starting at position 626 of SEQ ID NO: 1879775
cugucugagcugcaucaga

SEQ ID NO: 1931883 - RNA, 19 nt, Artificial Sequence
  Description of Artificial Sequence: Synthetic oligonucleotide
  Antisense strand to SEQ ID NO: 1931882
ucugaugcagcucagacag

SEQ ID NO: 1931884 - RNA, 19 nt, Artificial Sequence
  Description of Artificial Sequence: Synthetic oligonucleotide
  Sense strand starting at position 827 of SEQ ID NO: 1879775
gugauccaucccgggauga

SEQ ID NO: 1931885 - RNA, 19 nt, Artificial Sequence
  Description of Artificial Sequence: Synthetic oligonucleotide
  Antisense strand to SEQ ID NO: 1931884
ucaucccgggauggaucac

SEQ ID NO: 1931886 - RNA, 19 nt, Artificial Sequence
  Description of Artificial Sequence: Synthetic oligonucleotide
  Sense strand starting at position 828 of SEQ ID NO: 1879775
ugauccaucccgggaugau

SEQ ID NO: 1931887 - RNA, 19 nt, Artificial Sequence
  Description of Artificial Sequence: Synthetic oligonucleotide
  Antisense strand to SEQ ID NO: 1931886
aucaucccgggauggauca

SEQ ID NO: 1931888 - RNA, 19 nt, Artificial Sequence
  Description of Artificial Sequence: Synthetic oligonucleotide
  Sense strand starting at position 896 of SEQ ID NO: 1879775
ggacucuccugagcucgaa

SEQ ID NO: 1931889 - RNA, 19 nt, Artificial Sequence
  Description of Artificial Sequence: Synthetic oligonucleotide
  Antisense strand to SEQ ID NO: 1931888
uucgagcucaggagagucc

SEQ ID NO: 1931890 - RNA, 19 nt, Artificial Sequence
  Description of Artificial Sequence: Synthetic oligonucleotide
  Sense strand starting at position 1198 of SEQ ID NO: 1879775
cuugaagucuucucuugua

SEQ ID NO: 1931891 - RNA, 19 nt, Artificial Sequence
  Description of Artificial Sequence: Synthetic oligonucleotide
  Antisense strand to SEQ ID NO: 1931890
uacaagagaagacuucaag

SEQ ID NO: 1931892 - RNA, 19 nt, Artificial Sequence
  Description of Artificial Sequence: Synthetic oligonucleotide
  Sense strand starting at position 1201 of SEQ ID NO: 1879775
gaagucuucucuuguaaug

SEQ ID NO: 1931893 - RNA, 19 nt, Artificial Sequence
  Description of Artificial Sequence: Synthetic oligonucleotide
  Antisense strand to SEQ ID NO: 1931892
cauuacaagagaagacuuc

SEQ ID NO: 1931894 - RNA, 19 nt, Artificial Sequence
  Description of Artificial Sequence: Synthetic oligonucleotide
  Sense strand starting at position 1387 of SEQ ID NO: 1879775
gagucaacagucugaaaug

SEQ ID NO: 1931895 - RNA, 19 nt, Artificial Sequence
  Description of Artificial Sequence: Synthetic oligonucleotide
  Antisense strand to SEQ ID NO: 1931894
cauuucagacuguugacuc

SEQ ID NO: 1931896 - RNA, 19 nt, Artificial Sequence
  Description of Artificial Sequence: Synthetic oligonucleotide
  Sense strand starting at position 1388 of SEQ ID NO: 1879775
agucaacagucugaaaugu

SEQ ID NO: 1931897 - RNA, 19 nt, Artificial Sequence
  Description of Artificial Sequence: Synthetic oligonucleotide
  Antisense strand to SEQ ID NO: 1931896
acauuucagacuguugacu

SEQ ID NO: 1931898 - RNA, 19 nt, Artificial Sequence
  Description of Artificial Sequence: Synthetic oligonucleotide
  Sense strand starting at position 1397 of SEQ ID NO: 1879775
ucugaaauguggccggaga

SEQ ID NO: 1931899 - RNA, 19 nt, Artificial Sequence
  Description of Artificial Sequence: Synthetic oligonucleotide
  Antisense strand to SEQ ID NO: 1931898
ucuccggccacauuucaga

SEQ ID NO: 1931900 - RNA, 19 nt, Artificial Sequence
  Description of Artificial Sequence: Synthetic oligonucleotide
  Sense strand starting at position 1524 of SEQ ID NO: 1879775
ugacaaaguucugacagcu

SEQ ID NO: 1931901 - RNA, 19 nt, Artificial Sequence
  Description of Artificial Sequence: Synthetic oligonucleotide
  Antisense strand to SEQ ID NO: 1931900
agcugucagaacuuuguca

SEQ ID NO: 1931902 - RNA, 19 nt, Artificial Sequence
  Description of Artificial Sequence: Synthetic oligonucleotide
  Sense strand starting at position 1589 of SEQ ID NO: 1879775
aggcuuguauucuugguga

SEQ ID NO: 1931903 - RNA, 19 nt, Artificial Sequence
  Description of Artificial Sequence: Synthetic oligonucleotide
  Antisense strand to SEQ ID NO: 1931902
ucaccaagaauacaagccu

SEQ ID NO: 1931904 - RNA, 19 nt, Artificial Sequence
  Description of Artificial Sequence: Synthetic oligonucleotide
  Sense strand starting at position 1592 of SEQ ID NO: 1879775
cuuguauucuuggugaguc

SEQ ID NO: 1931905 - RNA, 19 nt, Artificial Sequence
  Description of Artificial Sequence: Synthetic oligonucleotide
  Antisense strand to SEQ ID NO: 1931904
gacucaccaagaauacaag

SEQ ID NO: 1931906 - RNA, 19 nt, Artificial Sequence
  Description of Artificial Sequence: Synthetic oligonucleotide
  Sense strand starting at position 1594 of SEQ ID NO: 1879775
uguauucuuggugagucuu

SEQ ID NO: 1931907 - RNA, 19 nt, Artificial Sequence
  Description of Artificial Sequence: Synthetic oligonucleotide
  Antisense strand to SEQ ID NO: 1931906
aagacucaccaagaauaca

SEQ ID NO: 1931908 - RNA, 19 nt, Artificial Sequence
  Description of Artificial Sequence: Synthetic oligonucleotide
  Sense strand starting at position 1602 of SEQ ID NO: 1879775
uggugagucuuugagggca

SEQ ID NO: 1931909 - RNA, 19 nt, Artificial Sequence
  Description of Artificial Sequence: Synthetic oligonucleotide
  Antisense strand to SEQ ID NO: 1931908
ugcccucaaagacucacca

SEQ ID NO: 1931910 - RNA, 19 nt, Artificial Sequence
  Description of Artificial Sequence: Synthetic oligonucleotide
  Sense strand starting at position 1604 of SEQ ID NO: 1879775
gugagucuuugagggcaga

SEQ ID NO: 1931911 - RNA, 19 nt, Artificial Sequence
  Description of Artificial Sequence: Synthetic oligonucleotide
  Antisense strand to SEQ ID NO: 1931910
ucugcccucaaagacucac

SEQ ID NO: 1931912 - RNA, 19 nt, Artificial Sequence
  Description of Artificial Sequence: Synthetic oligonucleotide
  Sense strand starting at position 1617 of SEQ ID NO: 1879775
ggcagagcugcucagagaa

SEQ ID NO: 1931913 - RNA, 19 nt, Artificial Sequence
  Description of Artificial Sequence: Synthetic oligonucleotide
  Antisense strand to SEQ ID NO: 1931912
uucucugagcagcucugcc

SEQ ID NO: 1931914 - RNA, 19 nt, Artificial Sequence
  Description of Artificial Sequence: Synthetic oligonucleotide
  Sense strand starting at position 1674 of SEQ ID NO: 1879775
uuacauguaucuguguagu

SEQ ID NO: 1931915 - RNA, 19 nt, Artificial Sequence
  Description of Artificial Sequence: Synthetic oligonucleotide
  Antisense strand to SEQ ID NO: 1931914
acuacacagauacauguaa

SEQ ID NO: 1931916 - RNA, 19 nt, Artificial Sequence
  Description of Artificial Sequence: Synthetic oligonucleotide
  Sense strand starting at position 1719 of SEQ ID NO: 1879775
agcagagcuuguuugguca

SEQ ID NO: 1931917 - RNA, 19 nt, Artificial Sequence
  Description of Artificial Sequence: Synthetic oligonucleotide
  Antisense strand to SEQ ID NO: 1931916
ugaccaaacaagcucugcu

SEQ ID NO: 1931918 - RNA, 19 nt, Artificial Sequence
  Description of Artificial Sequence: Synthetic oligonucleotide
  Sense strand starting at position 1745 of SEQ ID NO: 1879775
gggcacaucuguuugguga

SEQ ID NO: 1931919 - RNA, 19 nt, Artificial Sequence
  Description of Artificial Sequence: Synthetic oligonucleotide
  Antisense strand to SEQ ID NO: 1931918
ucaccaaacagaugugccc

SEQ ID NO: 1931920 - RNA, 19 nt, Artificial Sequence
  Description of Artificial Sequence: Synthetic oligonucleotide
  Sense strand starting at position 1749 of SEQ ID NO: 1879775
acaucuguuuggugaggau

SEQ ID NO: 1931921 - RNA, 19 nt, Artificial Sequence
  Description of Artificial Sequence: Synthetic oligonucleotide
  Antisense strand to SEQ ID NO: 1931920
auccucaccaaacagaugu

SEQ ID NO: 1931922 - RNA, 19 nt, Artificial Sequence
  Description of Artificial Sequence: Synthetic oligonucleotide
  Sense strand starting at position 1762 of SEQ ID NO: 1879775
gaggauuucugcuguguuu

SEQ ID NO: 1931923 - RNA, 19 nt, Artificial Sequence
  Description of Artificial Sequence: Synthetic oligonucleotide
  Antisense strand to SEQ ID NO: 1931922
aaacacagcagaaauccuc

SEQ ID NO: 1931924 - RNA, 19 nt, Artificial Sequence
  Description of Artificial Sequence: Synthetic oligonucleotide
  Sense strand starting at position 2003 of SEQ ID NO: 1879775
aguggaauuccuggcaccu

SEQ ID NO: 1931925 - RNA, 19 nt, Artificial Sequence
  Description of Artificial Sequence: Synthetic oligonucleotide
  Antisense strand to SEQ ID NO: 1931924
aggugccaggaauuccacu

SEQ ID NO: 1931926 - RNA, 19 nt, Artificial Sequence
  Description of Artificial Sequence: Synthetic oligonucleotide
  Sense strand starting at position 2005 of SEQ ID NO: 1879775
uggaauuccuggcaccuau

SEQ ID NO: 1931927 - RNA, 19 nt, Artificial Sequence
  Description of Artificial Sequence: Synthetic oligonucleotide
  Antisense strand to SEQ ID NO: 1931926
auaggugccaggaauucca

SEQ ID NO: 1931928 - RNA, 19 nt, Artificial Sequence
  Description of Artificial Sequence: Synthetic oligonucleotide
  Sense strand starting at position 2483 of SEQ ID NO: 1879775
gagaguggugguuguagca

SEQ ID NO: 1931929 - RNA, 19 nt, Artificial Sequence
  Description of Artificial Sequence: Synthetic oligonucleotide
  Antisense strand to SEQ ID NO: 1931928
ugcuacaaccaccacucuc

SEQ ID NO: 1931930 - RNA, 19 nt, Artificial Sequence
  Description of Artificial Sequence: Synthetic oligonucleotide
  Sense strand starting at position 2532 of SEQ ID NO: 1879775
gggaaaugggcauguucaa

SEQ ID NO: 1931931 - RNA, 19 nt, Artificial Sequence
  Description of Artificial Sequence: Synthetic oligonucleotide
  Antisense strand to SEQ ID NO: 1931930
uugaacaugcccauuuccc

SEQ ID NO: 1931932 - RNA, 19 nt, Artificial Sequence
  Description of Artificial Sequence: Synthetic oligonucleotide
  Sense strand starting at position 2985 of SEQ ID NO: 1879775
cuccaaugucccugaggga

SEQ ID NO: 1931933 - RNA, 19 nt, Artificial Sequence
  Description of Artificial Sequence: Synthetic oligonucleotide
  Antisense strand to SEQ ID NO: 1931932
ucccucagggacauuggag

SEQ ID NO: 1931934 - RNA, 19 nt, Artificial Sequence
  Description of Artificial Sequence: Synthetic oligonucleotide
  Sense strand starting at position 2988 of SEQ ID NO: 1879775
caaugucccugagggauaa

SEQ ID NO: 1931935 - RNA, 19 nt, Artificial Sequence
  Description of Artificial Sequence: Synthetic oligonucleotide
  Antisense strand to SEQ ID NO: 1931934
uuaucccucagggacauug

SEQ ID NO: 1931936 - RNA, 19 nt, Artificial Sequence
  Description of Artificial Sequence: Synthetic oligonucleotide
  Sense strand starting at position 3104 of SEQ ID NO: 1879775
gggucugcuuuccuuagga

SEQ ID NO: 1931937 - RNA, 19 nt, Artificial Sequence
  Description of Artificial Sequence: Synthetic oligonucleotide
  Antisense strand to SEQ ID NO: 1931936
uccuaaggaaagcagaccc

SEQ ID NO: 1931938 - RNA, 19 nt, Artificial Sequence
  Description of Artificial Sequence: Synthetic oligonucleotide
  Sense strand starting at position 3126 of SEQ ID NO: 1879775
ccugcauuccuguggaaca

SEQ ID NO: 1931939 - RNA, 19 nt, Artificial Sequence
  Description of Artificial Sequence: Synthetic oligonucleotide
  Antisense strand to SEQ ID NO: 1931938
uguuccacaggaaugcagg

SEQ ID NO: 1931940 - RNA, 19 nt, Artificial Sequence
  Description of Artificial Sequence: Synthetic oligonucleotide
  Sense strand starting at position 3193 of SEQ ID NO: 1879775
gguccaaacucugguaaga

SEQ ID NO: 1931941 - RNA, 19 nt, Artificial Sequence
  Description of Artificial Sequence: Synthetic oligonucleotide
  Antisense strand to SEQ ID NO: 1931940
ucuuaccagaguuuggacc

SEQ ID NO: 1931942 - RNA, 19 nt, Artificial Sequence
  Description of Artificial Sequence: Synthetic oligonucleotide
  Sense strand starting at position 3195 of SEQ ID NO: 1879775
uccaaacucugguaagaaa

SEQ ID NO: 1931943 - RNA, 19 nt, Artificial Sequence
  Description of Artificial Sequence: Synthetic oligonucleotide
  Antisense strand to SEQ ID NO: 1931942
uuucuuaccagaguuugga

SEQ ID NO: 1931944 - RNA, 19 nt, Artificial Sequence
  Description of Artificial Sequence: Synthetic oligonucleotide
  Sense strand starting at position 3236 of SEQ ID NO: 1879775
ggacgugguaugugugaca

SEQ ID NO: 1931945 - RNA, 19 nt, Artificial Sequence
  Description of Artificial Sequence: Synthetic oligonucleotide
  Antisense strand to SEQ ID NO: 1931944
ugucacacauaccacgucc

SEQ ID NO: 1931946 - RNA, 19 nt, Artificial Sequence
  Description of Artificial Sequence: Synthetic oligonucleotide
  Sense strand starting at position 3241 of SEQ ID NO: 1879775
ugguaugugugacaugaga

SEQ ID NO: 1931947 - RNA, 19 nt, Artificial Sequence
  Description of Artificial Sequence: Synthetic oligonucleotide
  Antisense strand to SEQ ID NO: 1931946
ucucaugucacacauacca

SEQ ID NO: 1931948 - RNA, 19 nt, Artificial Sequence
  Description of Artificial Sequence: Synthetic oligonucleotide
  Sense strand starting at position 3243 of SEQ ID NO: 1879775
guaugugugacaugagaug

SEQ ID NO: 1931949 - RNA, 19 nt, Artificial Sequence
  Description of Artificial Sequence: Synthetic oligonucleotide
  Antisense strand to SEQ ID NO: 1931948
caucucaugucacacauac

SEQ ID NO: 1931950 - RNA, 19 nt, Artificial Sequence
  Description of Artificial Sequence: Synthetic oligonucleotide
  Sense strand starting at position 3362 of SEQ ID NO: 1879775
gggcacugaccuugguaaa

SEQ ID NO: 1931951 - RNA, 19 nt, Artificial Sequence
  Description of Artificial Sequence: Synthetic oligonucleotide
  Antisense strand to SEQ ID NO: 1931950
uuuaccaaggucagugccc

SEQ ID NO: 1931952 - RNA, 19 nt, Artificial Sequence
  Description of Artificial Sequence: Synthetic oligonucleotide
  Sense strand starting at position 3363 of SEQ ID NO: 1879775
ggcacugaccuugguaaau

SEQ ID NO: 1931953 - RNA, 19 nt, Artificial Sequence
  Description of Artificial Sequence: Synthetic oligonucleotide
  Antisense strand to SEQ ID NO: 1931952
auuuaccaaggucagugcc

SEQ ID NO: 1931954 - RNA, 19 nt, Artificial Sequence
  Description of Artificial Sequence: Synthetic oligonucleotide
  Sense strand starting at position 3365 of SEQ ID NO: 1879775
cacugaccuugguaaaugu

SEQ ID NO: 1931955 - RNA, 19 nt, Artificial Sequence
  Description of Artificial Sequence: Synthetic oligonucleotide
  Antisense strand to SEQ ID NO: 1931954
acauuuaccaaggucagug

SEQ ID NO: 1931956 - RNA, 19 nt, Artificial Sequence
  Description of Artificial Sequence: Synthetic oligonucleotide
  Sense strand starting at position 3651 of SEQ ID NO: 1879775
ccuccuuccgugggaagaa

SEQ ID NO: 1931957 - RNA, 19 nt, Artificial Sequence
  Description of Artificial Sequence: Synthetic oligonucleotide
  Antisense strand to SEQ ID NO: 1931956
uucuucccacggaaggagg

SEQ ID NO: 1931958 - RNA, 19 nt, Artificial Sequence
  Description of Artificial Sequence: Synthetic oligonucleotide
  Sense strand starting at position 3716 of SEQ ID NO: 1879775
cagaaugguuucuguggga

SEQ ID NO: 1931959 - RNA, 19 nt, Artificial Sequence
  Description of Artificial Sequence: Synthetic oligonucleotide
  Antisense strand to SEQ ID NO: 1931958
ucccacagaaaccauucug

SEQ ID NO: 1931960 - RNA, 19 nt, Artificial Sequence
  Description of Artificial Sequence: Synthetic oligonucleotide
  Sense strand starting at position 215 of SEQ ID NO: 1879776
ggaagucaucuuuggagua

SEQ ID NO: 1931961 - RNA, 19 nt, Artificial Sequence
  Description of Artificial Sequence: Synthetic oligonucleotide
  Antisense strand to SEQ ID NO: 1931960
uacuccaaagaugacuucc

SEQ ID NO: 1931962 - RNA, 19 nt, Artificial Sequence
  Description of Artificial Sequence: Synthetic oligonucleotide
  Sense strand starting at position 334 of SEQ ID NO: 1879776
gucuguuuggccgaaggga

SEQ ID NO: 1931963 - RNA, 19 nt, Artificial Sequence
  Description of Artificial Sequence: Synthetic oligonucleotide
  Antisense strand to SEQ ID NO: 1931962
ucccuucggccaaacagac

SEQ ID NO: 1931964 - RNA, 19 nt, Artificial Sequence
  Description of Artificial Sequence: Synthetic oligonucleotide
  Sense strand starting at position 389 of SEQ ID NO: 1879776
gaaauagagccauggguuu

SEQ ID NO: 1931965 - RNA, 19 nt, Artificial Sequence
  Description of Artificial Sequence: Synthetic oligonucleotide
  Antisense strand to SEQ ID NO: 1931964
aaacccauggcucuauuuc

SEQ ID NO: 1931966 - RNA, 19 nt, Artificial Sequence
  Description of Artificial Sequence: Synthetic oligonucleotide
  Sense strand starting at position 395 of SEQ ID NO: 1879776
gagccauggguuuggguaa

SEQ ID NO: 1931967 - RNA, 19 nt, Artificial Sequence
  Description of Artificial Sequence: Synthetic oligonucleotide
  Antisense strand to SEQ ID NO: 1931966
uuacccaaacccauggcuc

SEQ ID NO: 1931968 - RNA, 19 nt, Artificial Sequence
  Description of Artificial Sequence: Synthetic oligonucleotide
  Sense strand starting at position 642 of SEQ ID NO: 1879776
ggccuugucaggcagagau

SEQ ID NO: 1931969 - RNA, 19 nt, Artificial Sequence
  Description of Artificial Sequence: Synthetic oligonucleotide
  Antisense strand to SEQ ID NO: 1931968
aucucugccugacaaggcc

SEQ ID NO: 1931970 - RNA, 19 nt, Artificial Sequence
  Description of Artificial Sequence: Synthetic oligonucleotide
  Sense strand starting at position 644 of SEQ ID NO: 1879776
ccuugucaggcagagauga

SEQ ID NO: 1931971 - RNA, 19 nt, Artificial Sequence
  Description of Artificial Sequence: Synthetic oligonucleotide
  Antisense strand to SEQ ID NO: 1931970
ucaucucugccugacaagg

SEQ ID NO: 1931972 - RNA, 19 nt, Artificial Sequence
  Description of Artificial Sequence: Synthetic oligonucleotide
  Sense strand starting at position 783 of SEQ ID NO: 1879776
uuccauaauccagggaacu

SEQ ID NO: 1931973 - RNA, 19 nt, Artificial Sequence
  Description of Artificial Sequence: Synthetic oligonucleotide
  Antisense strand to SEQ ID NO: 1931972
aguucccuggauuauggaa

SEQ ID NO: 1931974 - RNA, 19 nt, Artificial Sequence
  Description of Artificial Sequence: Synthetic oligonucleotide
  Sense strand starting at position 784 of SEQ ID NO: 1879776
uccauaauccagggaacuc

SEQ ID NO: 1931975 - RNA, 19 nt, Artificial Sequence
  Description of Artificial Sequence: Synthetic oligonucleotide
  Antisense strand to SEQ ID NO: 1931974
gaguucccuggauuaugga

SEQ ID NO: 1931976 - RNA, 19 nt, Artificial Sequence
  Description of Artificial Sequence: Synthetic oligonucleotide
  Sense strand starting at position 810 of SEQ ID NO: 1879776
ggaaaugaugucugaccga

SEQ ID NO: 1931977 - RNA, 19 nt, Artificial Sequence
  Description of Artificial Sequence: Synthetic oligonucleotide
  Antisense strand to SEQ ID NO: 1931976
ucggucagacaucauuucc

SEQ ID NO: 1931978 - RNA, 19 nt, Artificial Sequence
  Description of Artificial Sequence: Synthetic oligonucleotide
  Sense strand starting at position 1059 of SEQ ID NO: 1879776
gccauagugcuaggaagaa

SEQ ID NO: 1931979 - RNA, 19 nt, Artificial Sequence
  Description of Artificial Sequence: Synthetic oligonucleotide
  Antisense strand to SEQ ID NO: 1931978
uucuuccuagcacuauggc

SEQ ID NO: 1931980 - RNA, 19 nt, Artificial Sequence
  Description of Artificial Sequence: Synthetic oligonucleotide
  Sense strand starting at position 1120 of SEQ ID NO: 1879776
cccagucacucaucucaga

SEQ ID NO: 1931981 - RNA, 19 nt, Artificial Sequence
  Description of Artificial Sequence: Synthetic oligonucleotide
  Antisense strand to SEQ ID NO: 1931980
ucugagaugagugacuggg

SEQ ID NO: 1931982 - RNA, 19 nt, Artificial Sequence
  Description of Artificial Sequence: Synthetic oligonucleotide
  Sense strand starting at position 1134 of SEQ ID NO: 1879776
ucagaaaugccguaugaga

SEQ ID NO: 1931983 - RNA, 19 nt, Artificial Sequence
  Description of Artificial Sequence: Synthetic oligonucleotide
  Antisense strand to SEQ ID NO: 1931982
ucucauacggcauuucuga

SEQ ID NO: 1931984 - RNA, 19 nt, Artificial Sequence
  Description of Artificial Sequence: Synthetic oligonucleotide
  Sense strand starting at position 1142 of SEQ ID NO: 1879776
gccguaugagagcaaucaa

SEQ ID NO: 1931985 - RNA, 19 nt, Artificial Sequence
  Description of Artificial Sequence: Synthetic oligonucleotide
  Antisense strand to SEQ ID NO: 1931984
uugauugcucucauacggc

SEQ ID NO: 1931986 - RNA, 19 nt, Artificial Sequence
  Description of Artificial Sequence: Synthetic oligonucleotide
  Sense strand starting at position 1176 of SEQ ID NO: 1879776
agguauucucuugagaagc

SEQ ID NO: 1931987 - RNA, 19 nt, Artificial Sequence
  Description of Artificial Sequence: Synthetic oligonucleotide
  Antisense strand to SEQ ID NO: 1931986
gcuucucaagagaauaccu

SEQ ID NO: 1931988 - RNA, 19 nt, Artificial Sequence
  Description of Artificial Sequence: Synthetic oligonucleotide
  Sense strand starting at position 1239 of SEQ ID NO: 1879776
cuuucccugccuugagaga

SEQ ID NO: 1931989 - RNA, 19 nt, Artificial Sequence
  Description of Artificial Sequence: Synthetic oligonucleotide
  Antisense strand to SEQ ID NO: 1931988
ucucucaaggcagggaaag

SEQ ID NO: 1931990 - RNA, 19 nt, Artificial Sequence
  Description of Artificial Sequence: Synthetic oligonucleotide
  Sense strand starting at position 1282 of SEQ ID NO: 1879776
ggcuuugugggcgucugaa

SEQ ID NO: 1931991 - RNA, 19 nt, Artificial Sequence
  Description of Artificial Sequence: Synthetic oligonucleotide
  Antisense strand to SEQ ID NO: 1931990
uucagacgcccacaaagcc

SEQ ID NO: 1931992 - RNA, 19 nt, Artificial Sequence
  Description of Artificial Sequence: Synthetic oligonucleotide
  Sense strand starting at position 1294 of SEQ ID NO: 1879776
gucugaaauguguggaaug

SEQ ID NO: 1931993 - RNA, 19 nt, Artificial Sequence
  Description of Artificial Sequence: Synthetic oligonucleotide
  Antisense strand to SEQ ID NO: 1931992
cauuccacacauuucagac

SEQ ID NO: 1931994 - RNA, 19 nt, Artificial Sequence
  Description of Artificial Sequence: Synthetic oligonucleotide
  Sense strand starting at position 1585 of SEQ ID NO: 1879776
accugacucucugucugaa

SEQ ID NO: 1931995 - RNA, 19 nt, Artificial Sequence
  Description of Artificial Sequence: Synthetic oligonucleotide
  Antisense strand to SEQ ID NO: 1931994
uucagacagagagucaggu

SEQ ID NO: 1931996 - RNA, 19 nt, Artificial Sequence
  Description of Artificial Sequence: Synthetic oligonucleotide
  Sense strand starting at position 1587 of SEQ ID NO: 1879776
cugacucucugucugaaga

SEQ ID NO: 1931997 - RNA, 19 nt, Artificial Sequence
  Description of Artificial Sequence: Synthetic oligonucleotide
  Antisense strand to SEQ ID NO: 1931996
ucuucagacagagagucag

SEQ ID NO: 1931998 - RNA, 19 nt, Artificial Sequence
  Description of Artificial Sequence: Synthetic oligonucleotide
  Sense strand starting at position 1588 of SEQ ID NO: 1879776
ugacucucugucugaagaa

SEQ ID NO: 1931999 - RNA, 19 nt, Artificial Sequence
  Description of Artificial Sequence: Synthetic oligonucleotide
  Antisense strand to SEQ ID NO: 1931998
uucuucagacagagaguca

SEQ ID NO: 1932000 - RNA, 19 nt, Artificial Sequence
  Description of Artificial Sequence: Synthetic oligonucleotide
  Sense strand starting at position 1788 of SEQ ID NO: 1879776
ucuuaugacccaugucaua

SEQ ID NO: 1932001 - RNA, 19 nt, Artificial Sequence
  Description of Artificial Sequence: Synthetic oligonucleotide
  Antisense strand to SEQ ID NO: 1932000
uaugacaugggucauaaga

SEQ ID NO: 1932002 - RNA, 19 nt, Artificial Sequence
  Description of Artificial Sequence: Synthetic oligonucleotide
  Sense strand starting at position 1798 of SEQ ID NO: 1879776
caugucauaccuuggaugu

SEQ ID NO: 1932003 - RNA, 19 nt, Artificial Sequence
  Description of Artificial Sequence: Synthetic oligonucleotide
  Antisense strand to SEQ ID NO: 1932002
acauccaagguaugacaug

SEQ ID NO: 1932004 - RNA, 19 nt, Artificial Sequence
  Description of Artificial Sequence: Synthetic oligonucleotide
  Sense strand starting at position 2043 of SEQ ID NO: 1879776
ccaggcuuuguccaaugau

SEQ ID NO: 1932005 - RNA, 19 nt, Artificial Sequence
  Description of Artificial Sequence: Synthetic oligonucleotide
  Antisense strand to SEQ ID NO: 1932004
aucauuggacaaagccugg

SEQ ID NO: 1932006 - RNA, 19 nt, Artificial Sequence
  Description of Artificial Sequence: Synthetic oligonucleotide
  Sense strand starting at position 2046 of SEQ ID NO: 1879776
ggcuuuguccaaugaucag

SEQ ID NO: 1932007 - RNA, 19 nt, Artificial Sequence
  Description of Artificial Sequence: Synthetic oligonucleotide
  Antisense strand to SEQ ID NO: 1932006
cugaucauuggacaaagcc

SEQ ID NO: 1932008 - RNA, 19 nt, Artificial Sequence
  Description of Artificial Sequence: Synthetic oligonucleotide
  Sense strand starting at position 2049 of SEQ ID NO: 1879776
uuuguccaaugaucagaaa

SEQ ID NO: 1932009 - RNA, 19 nt, Artificial Sequence
  Description of Artificial Sequence: Synthetic oligonucleotide
  Antisense strand to SEQ ID NO: 1932008
uuucugaucauuggacaaa

SEQ ID NO: 1932010 - RNA, 19 nt, Artificial Sequence
  Description of Artificial Sequence: Synthetic oligonucleotide
  Sense strand starting at position 2226 of SEQ ID NO: 1879776
agucaauaacuucgaccuu

SEQ ID NO: 1932011 - RNA, 19 nt, Artificial Sequence
  Description of Artificial Sequence: Synthetic oligonucleotide
  Antisense strand to SEQ ID NO: 1932010
aaggucgaaguuauugacu

SEQ ID NO: 1932012 - RNA, 19 nt, Artificial Sequence
  Description of Artificial Sequence: Synthetic oligonucleotide
  Sense strand starting at position 2245 of SEQ ID NO: 1879776
cuucuuauucucugaugga

SEQ ID NO: 1932013 - RNA, 19 nt, Artificial Sequence
  Description of Artificial Sequence: Synthetic oligonucleotide
  Antisense strand to SEQ ID NO: 1932012
uccaucagagaauaagaag

SEQ ID NO: 1932014 - RNA, 19 nt, Artificial Sequence
  Description of Artificial Sequence: Synthetic oligonucleotide
  Sense strand starting at position 2289 of SEQ ID NO: 1879776
ggaggccuguggguauuaa

SEQ ID NO: 1932015 - RNA, 19 nt, Artificial Sequence
  Description of Artificial Sequence: Synthetic oligonucleotide
  Antisense strand to SEQ ID NO: 1932014
uuaauacccacaggccucc

SEQ ID NO: 1932016 - RNA, 19 nt, Artificial Sequence
  Description of Artificial Sequence: Synthetic oligonucleotide
  Sense strand starting at position 2563 of SEQ ID NO: 1879776
gccagaguucuguaacuca

SEQ ID NO: 1932017 - RNA, 19 nt, Artificial Sequence
  Description of Artificial Sequence: Synthetic oligonucleotide
  Antisense strand to SEQ ID NO: 1932016
ugaguuacagaacucuggc

SEQ ID NO: 1932018 - RNA, 19 nt, Artificial Sequence
  Description of Artificial Sequence: Synthetic oligonucleotide
  Sense strand starting at position 2643 of SEQ ID NO: 1879776
cucugaguuguuggaauca

SEQ ID NO: 1932019 - RNA, 19 nt, Artificial Sequence
  Description of Artificial Sequence: Synthetic oligonucleotide
  Antisense strand to SEQ ID NO: 1932018
ugauuccaacaacucagag

SEQ ID NO: 1932020 - RNA, 19 nt, Artificial Sequence
  Description of Artificial Sequence: Synthetic oligonucleotide
  Sense strand starting at position 2973 of SEQ ID NO: 1879776
uguucuccacccugggaaa

SEQ ID NO: 1932021 - RNA, 19 nt, Artificial Sequence
  Description of Artificial Sequence: Synthetic oligonucleotide
  Antisense strand to SEQ ID NO: 1932020
uuucccaggguggagaaca

SEQ ID NO: 1932022 - RNA, 19 nt, Artificial Sequence
  Description of Artificial Sequence: Synthetic oligonucleotide
  Sense strand starting at position 3344 of SEQ ID NO: 1879776
uuacguguaguauaaggaa

SEQ ID NO: 1932023 - RNA, 19 nt, Artificial Sequence
  Description of Artificial Sequence: Synthetic oligonucleotide
  Antisense strand to SEQ ID NO: 1932022
uuccuuauacuacacguaa

SEQ ID NO: 1932024 - RNA, 19 nt, Artificial Sequence
  Description of Artificial Sequence: Synthetic oligonucleotide
  Sense strand starting at position 3414 of SEQ ID NO: 1879776
gucuuuggcuuucuaaaca

SEQ ID NO: 1932025 - RNA, 19 nt, Artificial Sequence
  Description of Artificial Sequence: Synthetic oligonucleotide
  Antisense strand to SEQ ID NO: 1932024
uguuuagaaagccaaagac

SEQ ID NO: 1932026 - RNA, 19 nt, Artificial Sequence
  Description of Artificial Sequence: Synthetic oligonucleotide
  Sense strand starting at position 3752 of SEQ ID NO: 1879776
ugggaagucagguaguugu

SEQ ID NO: 1932027 - RNA, 19 nt, Artificial Sequence
  Description of Artificial Sequence: Synthetic oligonucleotide
  Antisense strand to SEQ ID NO: 1932026
acaacuaccugacuuccca

SEQ ID NO: 1932028 - RNA, 19 nt, Artificial Sequence
  Description of Artificial Sequence: Synthetic oligonucleotide
  Sense strand starting at position 3755 of SEQ ID NO: 1879776
gaagucagguaguuguuau

SEQ ID NO: 1932029 - RNA, 19 nt, Artificial Sequence
  Description of Artificial Sequence: Synthetic oligonucleotide
  Antisense strand to SEQ ID NO: 1932028
auaacaacuaccugacuuc

SEQ ID NO: 1932030 - RNA, 19 nt, Artificial Sequence
  Description of Artificial Sequence: Synthetic oligonucleotide
  Sense strand starting at position 3763 of SEQ ID NO: 1879776
guaguuguuauaggugaua

SEQ ID NO: 1932031 - RNA, 19 nt, Artificial Sequence
  Description of Artificial Sequence: Synthetic oligonucleotide
  Antisense strand to SEQ ID NO: 1932030
uaucaccuauaacaacuac

SEQ ID NO: 1932032 - RNA, 19 nt, Artificial Sequence
  Description of Artificial Sequence: Synthetic oligonucleotide
  Sense strand starting at position 3765 of SEQ ID NO: 1879776
aguuguuauaggugauaua

SEQ ID NO: 1932033 - RNA, 19 nt, Artificial Sequence
  Description of Artificial Sequence: Synthetic oligonucleotide
  Antisense strand to SEQ ID NO: 1932032
uauaucaccuauaacaacu

SEQ ID NO: 1932034 - RNA, 19 nt, Artificial Sequence
  Description of Artificial Sequence: Synthetic oligonucleotide
  Sense strand starting at position 3766 of SEQ ID NO: 1879776
guuguuauaggugauauau

SEQ ID NO: 1932035 - RNA, 19 nt, Artificial Sequence
  Description of Artificial Sequence: Synthetic oligonucleotide
  Antisense strand to SEQ ID NO: 1932034
auauaucaccuauaacaac

SEQ ID NO: 1932036 - RNA, 19 nt, Artificial Sequence
  Description of Artificial Sequence: Synthetic oligonucleotide
  Sense strand starting at position 3860 of SEQ ID NO: 1879776
uuuccucauguguaaugau

SEQ ID NO: 1932037 - RNA, 19 nt, Artificial Sequence
  Description of Artificial Sequence: Synthetic oligonucleotide
  Antisense strand to SEQ ID NO: 1932036
aucauuacacaugaggaaa

SEQ ID NO: 1932038 - RNA, 19 nt, Artificial Sequence
  Description of Artificial Sequence: Synthetic oligonucleotide
  Sense strand starting at position 3926 of SEQ ID NO: 1879776
gagugucacuagccaauca

SEQ ID NO: 1932039 - RNA, 19 nt, Artificial Sequence
  Description of Artificial Sequence: Synthetic oligonucleotide
  Antisense strand to SEQ ID NO: 1932038
ugauuggcuagugacacuc

SEQ ID NO: 1932040 - RNA, 19 nt, Artificial Sequence
  Description of Artificial Sequence: Synthetic oligonucleotide
  Sense strand starting at position 212 of SEQ ID NO: 1879777
agcccuuguuuccuccaga

SEQ ID NO: 1932041 - RNA, 19 nt, Artificial Sequence
  Description of Artificial Sequence: Synthetic oligonucleotide
  Antisense strand to SEQ ID NO: 1932040
ucuggaggaaacaagggcu

SEQ ID NO: 1932042 - RNA, 19 nt, Artificial Sequence
  Description of Artificial Sequence: Synthetic oligonucleotide
  Sense strand starting at position 215 of SEQ ID NO: 1879777
ccuuguuuccuccagaggu

SEQ ID NO: 1932043 - RNA, 19 nt, Artificial Sequence
  Description of Artificial Sequence: Synthetic oligonucleotide
  Antisense strand to SEQ ID NO: 1932042
accucuggaggaaacaagg

SEQ ID NO: 1932044 - RNA, 19 nt, Artificial Sequence
  Description of Artificial Sequence: Synthetic oligonucleotide
  Sense strand starting at position 217 of SEQ ID NO: 1879777
uuguuuccuccagagguga

SEQ ID NO: 1932045 - RNA, 19 nt, Artificial Sequence
  Description of Artificial Sequence: Synthetic oligonucleotide
  Antisense strand to SEQ ID NO: 1932044
ucaccucuggaggaaacaa

SEQ ID NO: 1932046 - RNA, 19 nt, Artificial Sequence
  Description of Artificial Sequence: Synthetic oligonucleotide
  Sense strand starting at position 240 of SEQ ID NO: 1879777
ccugacugcuccuuguaag

SEQ ID NO: 1932047 - RNA, 19 nt, Artificial Sequence
  Description of Artificial Sequence: Synthetic oligonucleotide
  Antisense strand to SEQ ID NO: 1932046
cuuacaaggagcagucagg

SEQ ID NO: 1932048 - RNA, 19 nt, Artificial Sequence
  Description of Artificial Sequence: Synthetic oligonucleotide
  Sense strand starting at position 251 of SEQ ID NO: 1879777
cuuguaagccagugugauc

SEQ ID NO: 1932049 - RNA, 19 nt, Artificial Sequence
  Description of Artificial Sequence: Synthetic oligonucleotide
  Antisense strand to SEQ ID NO: 1932048
gaucacacuggcuuacaag

SEQ ID NO: 1932050 - RNA, 19 nt, Artificial Sequence
  Description of Artificial Sequence: Synthetic oligonucleotide
  Sense strand starting at position 311 of SEQ ID NO: 1879777
gaacucuugcagugggaac

SEQ ID NO: 1932051 - RNA, 19 nt, Artificial Sequence
  Description of Artificial Sequence: Synthetic oligonucleotide
  Antisense strand to SEQ ID NO: 1932050
guucccacugcaagaguuc

SEQ ID NO: 1932052 - RNA, 19 nt, Artificial Sequence
  Description of Artificial Sequence: Synthetic oligonucleotide
  Sense strand starting at position 483 of SEQ ID NO: 1879777
acagaaugauacguacaca

SEQ ID NO: 1932053 - RNA, 19 nt, Artificial Sequence
  Description of Artificial Sequence: Synthetic oligonucleotide
  Antisense strand to SEQ ID NO: 1932052
uguguacguaucauucugu

SEQ ID NO: 1932054 - RNA, 19 nt, Artificial Sequence
  Description of Artificial Sequence: Synthetic oligonucleotide
  Sense strand starting at position 519 of SEQ ID NO: 1879777
cacaguguuacguguagac

SEQ ID NO: 1932055 - RNA, 19 nt, Artificial Sequence
  Description of Artificial Sequence: Synthetic oligonucleotide
  Antisense strand to SEQ ID NO: 1932054
gucuacacguaacacugug

SEQ ID NO: 1932056 - RNA, 19 nt, Artificial Sequence
  Description of Artificial Sequence: Synthetic oligonucleotide
  Sense strand starting at position 521 of SEQ ID NO: 1879777
caguguuacguguagacca

SEQ ID NO: 1932057 - RNA, 19 nt, Artificial Sequence
  Description of Artificial Sequence: Synthetic oligonucleotide
  Antisense strand to SEQ ID NO: 1932056
uggucuacacguaacacug

SEQ ID NO: 1932058 - RNA, 19 nt, Artificial Sequence
  Description of Artificial Sequence: Synthetic oligonucleotide
  Sense strand starting at position 523 of SEQ ID NO: 1879777
guguuacguguagaccaaa

SEQ ID NO: 1932059 - RNA, 19 nt, Artificial Sequence
  Description of Artificial Sequence: Synthetic oligonucleotide
  Antisense strand to SEQ ID NO: 1932058
uuuggucuacacguaacac

SEQ ID NO: 1932060 - RNA, 19 nt, Artificial Sequence
  Description of Artificial Sequence: Synthetic oligonucleotide
  Sense strand starting at position 526 of SEQ ID NO: 1879777
uuacguguagaccaaaguu

SEQ ID NO: 1932061 - RNA, 19 nt, Artificial Sequence
  Description of Artificial Sequence: Synthetic oligonucleotide
  Antisense strand to SEQ ID NO: 1932060
aacuuuggucuacacguaa

SEQ ID NO: 1932062 - RNA, 19 nt, Artificial Sequence
  Description of Artificial Sequence: Synthetic oligonucleotide
  Sense strand starting at position 542 of SEQ ID NO: 1879777
guuucucagcuuuggaacu

SEQ ID NO: 1932063 - RNA, 19 nt, Artificial Sequence
  Description of Artificial Sequence: Synthetic oligonucleotide
  Antisense strand to SEQ ID NO: 1932062
aguuccaaagcugagaaac

SEQ ID NO: 1932064 - RNA, 19 nt, Artificial Sequence
  Description of Artificial Sequence: Synthetic oligonucleotide
  Sense strand starting at position 907 of SEQ ID NO: 1879777
auucuuugucaugggagcu

SEQ ID NO: 1932065 - RNA, 19 nt, Artificial Sequence
  Description of Artificial Sequence: Synthetic oligonucleotide
  Antisense strand to SEQ ID NO: 1932064
agcucccaugacaaagaau

SEQ ID NO: 1932066 - RNA, 19 nt, Artificial Sequence
  Description of Artificial Sequence: Synthetic oligonucleotide
  Sense strand starting at position 932 of SEQ ID NO: 1879777
ugcacuguagauuguuuaa

SEQ ID NO: 1932067 - RNA, 19 nt, Artificial Sequence
  Description of Artificial Sequence: Synthetic oligonucleotide
  Antisense strand to SEQ ID NO: 1932066
uuaaacaaucuacagugca

SEQ ID NO: 1932068 - RNA, 19 nt, Artificial Sequence
  Description of Artificial Sequence: Synthetic oligonucleotide
  Sense strand starting at position 935 of SEQ ID NO: 1879777
acuguagauuguuuaacag

SEQ ID NO: 1932069 - RNA, 19 nt, Artificial Sequence
  Description of Artificial Sequence: Synthetic oligonucleotide
  Antisense strand to SEQ ID NO: 1932068
cuguuaaacaaucuacagu

SEQ ID NO: 1932070 - RNA, 19 nt, Artificial Sequence
  Description of Artificial Sequence: Synthetic oligonucleotide
  Sense strand starting at position 989 of SEQ ID NO: 1879777
ggcacaauguucccuccau

SEQ ID NO: 1932071 - RNA, 19 nt, Artificial Sequence
  Description of Artificial Sequence: Synthetic oligonucleotide
  Antisense strand to SEQ ID NO: 1932070
auggagggaacauugugcc

SEQ ID NO: 1932072 - RNA, 19 nt, Artificial Sequence
  Description of Artificial Sequence: Synthetic oligonucleotide
  Sense strand starting at position 1082 of SEQ ID NO: 1879777
cuaguugagagucacugau

SEQ ID NO: 1932073 - RNA, 19 nt, Artificial Sequence
  Description of Artificial Sequence: Synthetic oligonucleotide
  Antisense strand to SEQ ID NO: 1932072
aucagugacucucaacuag

SEQ ID NO: 1932074 - RNA, 19 nt, Artificial Sequence
  Description of Artificial Sequence: Synthetic oligonucleotide
  Sense strand starting at position 1086 of SEQ ID NO: 1879777
uugagagucacugauguag

SEQ ID NO: 1932075 - RNA, 19 nt, Artificial Sequence
  Description of Artificial Sequence: Synthetic oligonucleotide
  Antisense strand to SEQ ID NO: 1932074
cuacaucagugacucucaa

SEQ ID NO: 1932076 - RNA, 19 nt, Artificial Sequence
  Description of Artificial Sequence: Synthetic oligonucleotide
  Sense strand starting at position 1234 of SEQ ID NO: 1879777
ggauacauccaguguuacu

SEQ ID NO: 1932077 - RNA, 19 nt, Artificial Sequence
  Description of Artificial Sequence: Synthetic oligonucleotide
  Antisense strand to SEQ ID NO: 1932076
aguaacacuggauguaucc

SEQ ID NO: 1932078 - RNA, 19 nt, Artificial Sequence
  Description of Artificial Sequence: Synthetic oligonucleotide
  Sense strand starting at position 1243 of SEQ ID NO: 1879777
caguguuacuuccucaguu

SEQ ID NO: 1932079 - RNA, 19 nt, Artificial Sequence
  Description of Artificial Sequence: Synthetic oligonucleotide
  Antisense strand to SEQ ID NO: 1932078
aacugaggaaguaacacug

SEQ ID NO: 1932080 - RNA, 19 nt, Artificial Sequence
  Description of Artificial Sequence: Synthetic oligonucleotide
  Sense strand starting at position 1244 of SEQ ID NO: 1879777
aguguuacuuccucaguuu

SEQ ID NO: 1932081 - RNA, 19 nt, Artificial Sequence
  Description of Artificial Sequence: Synthetic oligonucleotide
  Antisense strand to SEQ ID NO: 1932080
aaacugaggaaguaacacu

SEQ ID NO: 1932082 - RNA, 19 nt, Artificial Sequence
  Description of Artificial Sequence: Synthetic oligonucleotide
  Sense strand starting at position 1342 of SEQ ID NO: 1879777
aguccuaugccguggacuu

SEQ ID NO: 1932083 - RNA, 19 nt, Artificial Sequence
  Description of Artificial Sequence: Synthetic oligonucleotide
  Antisense strand to SEQ ID NO: 1932082
aaguccacggcauaggacu

SEQ ID NO: 1932084 - RNA, 19 nt, Artificial Sequence
  Description of Artificial Sequence: Synthetic oligonucleotide
  Sense strand starting at position 1354 of SEQ ID NO: 1879777
uggacuugaucauuccuca

SEQ ID NO: 1932085 - RNA, 19 nt, Artificial Sequence
  Description of Artificial Sequence: Synthetic oligonucleotide
  Antisense strand to SEQ ID NO: 1932084
ugaggaaugaucaagucca

SEQ ID NO: 1932086 - RNA, 19 nt, Artificial Sequence
  Description of Artificial Sequence: Synthetic oligonucleotide
  Sense strand starting at position 1467 of SEQ ID NO: 1879777
ucuccagcccuuuaggaaa

SEQ ID NO: 1932087 - RNA, 19 nt, Artificial Sequence
  Description of Artificial Sequence: Synthetic oligonucleotide
  Antisense strand to SEQ ID NO: 1932086
uuuccuaaagggcuggaga

SEQ ID NO: 1932088 - RNA, 19 nt, Artificial Sequence
  Description of Artificial Sequence: Synthetic oligonucleotide
  Sense strand starting at position 1486 of SEQ ID NO: 1879777
guggugagagagugaagau

SEQ ID NO: 1932089 - RNA, 19 nt, Artificial Sequence
  Description of Artificial Sequence: Synthetic oligonucleotide
  Antisense strand to SEQ ID NO: 1932088
aucuucacucucucaccac

SEQ ID NO: 1932090 - RNA, 19 nt, Artificial Sequence
  Description of Artificial Sequence: Synthetic oligonucleotide
  Sense strand starting at position 1489 of SEQ ID NO: 1879777
gugagagagugaagaugau

SEQ ID NO: 1932091 - RNA, 19 nt, Artificial Sequence
  Description of Artificial Sequence: Synthetic oligonucleotide
  Antisense strand to SEQ ID NO: 1932090
aucaucuucacucucucac

SEQ ID NO: 1932092 - RNA, 19 nt, Artificial Sequence
  Description of Artificial Sequence: Synthetic oligonucleotide
  Sense strand starting at position 1581 of SEQ ID NO: 1879777
cugucucaacgggaaugua

SEQ ID NO: 1932093 - RNA, 19 nt, Artificial Sequence
  Description of Artificial Sequence: Synthetic oligonucleotide
  Antisense strand to SEQ ID NO: 1932092
uacauucccguugagacag

SEQ ID NO: 1932094 - RNA, 19 nt, Artificial Sequence
  Description of Artificial Sequence: Synthetic oligonucleotide
  Sense strand starting at position 1708 of SEQ ID NO: 1879777
uggaguggcacaugaauca

SEQ ID NO: 1932095 - RNA, 19 nt, Artificial Sequence
  Description of Artificial Sequence: Synthetic oligonucleotide
  Antisense strand to SEQ ID NO: 1932094
ugauucaugugccacucca

SEQ ID NO: 1932096 - RNA, 19 nt, Artificial Sequence
  Description of Artificial Sequence: Synthetic oligonucleotide
  Sense strand starting at position 1744 of SEQ ID NO: 1879777
cucccagaggugugugauu

SEQ ID NO: 1932097 - RNA, 19 nt, Artificial Sequence
  Description of Artificial Sequence: Synthetic oligonucleotide
  Antisense strand to SEQ ID NO: 1932096
aaucacacaccucugggag

SEQ ID NO: 1932098 - RNA, 19 nt, Artificial Sequence
  Description of Artificial Sequence: Synthetic oligonucleotide
  Sense strand starting at position 2338 of SEQ ID NO: 1879777
agaccagagugguugggaa

SEQ ID NO: 1932099 - RNA, 19 nt, Artificial Sequence
  Description of Artificial Sequence: Synthetic oligonucleotide
  Antisense strand to SEQ ID NO: 1932098
uucccaaccacucuggucu

SEQ ID NO: 1932100 - RNA, 19 nt, Artificial Sequence
  Description of Artificial Sequence: Synthetic oligonucleotide
  Sense strand starting at position 2391 of SEQ ID NO: 1879777
gaagcuuggucagcagagu

SEQ ID NO: 1932101 - RNA, 19 nt, Artificial Sequence
  Description of Artificial Sequence: Synthetic oligonucleotide
  Antisense strand to SEQ ID NO: 1932100
acucugcugaccaagcuuc

SEQ ID NO: 1932102 - RNA, 19 nt, Artificial Sequence
  Description of Artificial Sequence: Synthetic oligonucleotide
  Sense strand starting at position 2456 of SEQ ID NO: 1879777
ugacucaucuacuccugua

SEQ ID NO: 1932103 - RNA, 19 nt, Artificial Sequence
  Description of Artificial Sequence: Synthetic oligonucleotide
  Antisense strand to SEQ ID NO: 1932102
uacaggaguagaugaguca

SEQ ID NO: 1932104 - RNA, 19 nt, Artificial Sequence
  Description of Artificial Sequence: Synthetic oligonucleotide
  Sense strand starting at position 2765 of SEQ ID NO: 1879777
gguaaguuugggugcugga

SEQ ID NO: 1932105 - RNA, 19 nt, Artificial Sequence
  Description of Artificial Sequence: Synthetic oligonucleotide
  Antisense strand to SEQ ID NO: 1932104
uccagcacccaaacuuacc

SEQ ID NO: 1932106 - RNA, 19 nt, Artificial Sequence
  Description of Artificial Sequence: Synthetic oligonucleotide
  Sense strand starting at position 3224 of SEQ ID NO: 1879777
ggagugacgucaguuagga

SEQ ID NO: 1932107 - RNA, 19 nt, Artificial Sequence
  Description of Artificial Sequence: Synthetic oligonucleotide
  Antisense strand to SEQ ID NO: 1932106
uccuaacugacgucacucc

SEQ ID NO: 1932108 - RNA, 19 nt, Artificial Sequence
  Description of Artificial Sequence: Synthetic oligonucleotide
  Sense strand starting at position 3300 of SEQ ID NO: 1879777
agagcaagagcggauauua

SEQ ID NO: 1932109 - RNA, 19 nt, Artificial Sequence
  Description of Artificial Sequence: Synthetic oligonucleotide
  Antisense strand to SEQ ID NO: 1932108
uaauauccgcucuugcucu

SEQ ID NO: 1932110 - RNA, 19 nt, Artificial Sequence
  Description of Artificial Sequence: Synthetic oligonucleotide
  Sense strand starting at position 3788 of SEQ ID NO: 1879777
agcgcauuccaggauaucu

SEQ ID NO: 1932111 - RNA, 19 nt, Artificial Sequence
  Description of Artificial Sequence: Synthetic oligonucleotide
  Antisense strand to SEQ ID NO: 1932110
agauauccuggaaugcgcu

SEQ ID NO: 1932112 - RNA, 19 nt, Artificial Sequence
  Description of Artificial Sequence: Synthetic oligonucleotide
  Sense strand starting at position 3890 of SEQ ID NO: 1879777
guuugcuguuccuugaaug

SEQ ID NO: 1932113 - RNA, 19 nt, Artificial Sequence
  Description of Artificial Sequence: Synthetic oligonucleotide
  Antisense strand to SEQ ID NO: 1932112
cauucaaggaacagcaaac

SEQ ID NO: 1932114 - RNA, 19 nt, Artificial Sequence
  Description of Artificial Sequence: Synthetic oligonucleotide
  Sense strand starting at position 3957 of SEQ ID NO: 1879777
ggauucuuguggcccacaa

SEQ ID NO: 1932115 - RNA, 19 nt, Artificial Sequence
  Description of Artificial Sequence: Synthetic oligonucleotide
  Antisense strand to SEQ ID NO: 1932114
uugugggccacaagaaucc

SEQ ID NO: 1932116 - RNA, 19 nt, Artificial Sequence
  Description of Artificial Sequence: Synthetic oligonucleotide
  Sense strand starting at position 3972 of SEQ ID NO: 1879777
acaacucugugccuugaga

SEQ ID NO: 1932117 - RNA, 19 nt, Artificial Sequence
  Description of Artificial Sequence: Synthetic oligonucleotide
  Antisense strand to SEQ ID NO: 1932116
ucucaaggcacagaguugu

SEQ ID NO: 1932118 - RNA, 19 nt, Artificial Sequence
  Description of Artificial Sequence: Synthetic oligonucleotide
  Sense strand starting at position 3974 of SEQ ID NO: 1879777
aacucugugccuugagaau

SEQ ID NO: 1932119 - RNA, 19 nt, Artificial Sequence
  Description of Artificial Sequence: Synthetic oligonucleotide
  Antisense strand to SEQ ID NO: 1932118
auucucaaggcacagaguu

SEQ ID NO: 1932120 - RNA, 19 nt, Artificial Sequence
  Description of Artificial Sequence: Synthetic oligonucleotide
  Sense strand starting at position 32 of SEQ ID NO: 1879778
ucaagagauugagaccaga

SEQ ID NO: 1932121 - RNA, 19 nt, Artificial Sequence
  Description of Artificial Sequence: Synthetic oligonucleotide
  Antisense strand to SEQ ID NO: 1932120
ucuggucucaaucucuuga

SEQ ID NO: 1932122 - RNA, 19 nt, Artificial Sequence
  Description of Artificial Sequence: Synthetic oligonucleotide
  Sense strand starting at position 191 of SEQ ID NO: 1879778
cggagaucucacuacugua

SEQ ID NO: 1932123 - RNA, 19 nt, Artificial Sequence
  Description of Artificial Sequence: Synthetic oligonucleotide
  Antisense strand to SEQ ID NO: 1932122
uacaguagugagaucuccg

SEQ ID NO: 1932124 - RNA, 19 nt, Artificial Sequence
  Description of Artificial Sequence: Synthetic oligonucleotide
  Sense strand starting at position 218 of SEQ ID NO: 1879778
uggcgacagagugagaauu

SEQ ID NO: 1932125 - RNA, 19 nt, Artificial Sequence
  Description of Artificial Sequence: Synthetic oligonucleotide
  Antisense strand to SEQ ID NO: 1932124
aauucucacucugucgcca

SEQ ID NO: 1932126 - RNA, 19 nt, Artificial Sequence
  Description of Artificial Sequence: Synthetic oligonucleotide
  Sense strand starting at position 744 of SEQ ID NO: 1879778
acuucuaaagguugggaau

SEQ ID NO: 1932127 - RNA, 19 nt, Artificial Sequence
  Description of Artificial Sequence: Synthetic oligonucleotide
  Antisense strand to SEQ ID NO: 1932126
auucccaaccuuuagaagu

SEQ ID NO: 1932128 - RNA, 19 nt, Artificial Sequence
  Description of Artificial Sequence: Synthetic oligonucleotide
  Sense strand starting at position 837 of SEQ ID NO: 1879778
ggaagucccucccuagagu

SEQ ID NO: 1932129 - RNA, 19 nt, Artificial Sequence
  Description of Artificial Sequence: Synthetic oligonucleotide
  Antisense strand to SEQ ID NO: 1932128
acucuagggagggacuucc

SEQ ID NO: 1932130 - RNA, 19 nt, Artificial Sequence
  Description of Artificial Sequence: Synthetic oligonucleotide
  Sense strand starting at position 838 of SEQ ID NO: 1879778
gaagucccucccuagaguu

SEQ ID NO: 1932131 - RNA, 19 nt, Artificial Sequence
  Description of Artificial Sequence: Synthetic oligonucleotide
  Antisense strand to SEQ ID NO: 1932130
aacucuagggagggacuuc

SEQ ID NO: 1932132 - RNA, 19 nt, Artificial Sequence
  Description of Artificial Sequence: Synthetic oligonucleotide
  Sense strand starting at position 1071 of SEQ ID NO: 1879778
ucucucgguccucaaaguu

SEQ ID NO: 1932133 - RNA, 19 nt, Artificial Sequence
  Description of Artificial Sequence: Synthetic oligonucleotide
  Antisense strand to SEQ ID NO: 1932132
aacuuugaggaccgagaga

SEQ ID NO: 1932134 - RNA, 19 nt, Artificial Sequence
  Description of Artificial Sequence: Synthetic oligonucleotide
  Sense strand starting at position 1079 of SEQ ID NO: 1879778
uccucaaaguuucgaugga

SEQ ID NO: 1932135 - RNA, 19 nt, Artificial Sequence
  Description of Artificial Sequence: Synthetic oligonucleotide
  Antisense strand to SEQ ID NO: 1932134
uccaucgaaacuuugagga

SEQ ID NO: 1932136 - RNA, 19 nt, Artificial Sequence
  Description of Artificial Sequence: Synthetic oligonucleotide
  Sense strand starting at position 1083 of SEQ ID NO: 1879778
caaaguuucgauggacaga

SEQ ID NO: 1932137 - RNA, 19 nt, Artificial Sequence
  Description of Artificial Sequence: Synthetic oligonucleotide
  Antisense strand to SEQ ID NO: 1932136
ucuguccaucgaaacuuug

SEQ ID NO: 1932138 - RNA, 19 nt, Artificial Sequence
  Description of Artificial Sequence: Synthetic oligonucleotide
  Sense strand starting at position 1103 of SEQ ID NO: 1879778
cgaguagugacagguagau

SEQ ID NO: 1932139 - RNA, 19 nt, Artificial Sequence
  Description of Artificial Sequence: Synthetic oligonucleotide
  Antisense strand to SEQ ID NO: 1932138
aucuaccugucacuacucg

SEQ ID NO: 1932140 - RNA, 19 nt, Artificial Sequence
  Description of Artificial Sequence: Synthetic oligonucleotide
  Sense strand starting at position 1182 of SEQ ID NO: 1879778
gacugaguagugugaagau

SEQ ID NO: 1932141 - RNA, 19 nt, Artificial Sequence
  Description of Artificial Sequence: Synthetic oligonucleotide
  Antisense strand to SEQ ID NO: 1932140
aucuucacacuacucaguc

SEQ ID NO: 1932142 - RNA, 19 nt, Artificial Sequence
  Description of Artificial Sequence: Synthetic oligonucleotide
  Sense strand starting at position 1202 of SEQ ID NO: 1879778
ggagguucugcuuggcuga

SEQ ID NO: 1932143 - RNA, 19 nt, Artificial Sequence
  Description of Artificial Sequence: Synthetic oligonucleotide
  Antisense strand to SEQ ID NO: 1932142
ucagccaagcagaaccucc

SEQ ID NO: 1932144 - RNA, 19 nt, Artificial Sequence
  Description of Artificial Sequence: Synthetic oligonucleotide
  Sense strand starting at position 1203 of SEQ ID NO: 1879778
gagguucugcuuggcugaa

SEQ ID NO: 1932145 - RNA, 19 nt, Artificial Sequence
  Description of Artificial Sequence: Synthetic oligonucleotide
  Antisense strand to SEQ ID NO: 1932144
uucagccaagcagaaccuc

SEQ ID NO: 1932146 - RNA, 19 nt, Artificial Sequence
  Description of Artificial Sequence: Synthetic oligonucleotide
  Sense strand starting at position 1383 of SEQ ID NO: 1879778
ucaguugacugauugcauu

SEQ ID NO: 1932147 - RNA, 19 nt, Artificial Sequence
  Description of Artificial Sequence: Synthetic oligonucleotide
  Antisense strand to SEQ ID NO: 1932146
aaugcaaucagucaacuga

SEQ ID NO: 1932148 - RNA, 19 nt, Artificial Sequence
  Description of Artificial Sequence: Synthetic oligonucleotide
  Sense strand starting at position 1774 of SEQ ID NO: 1879778
gcaguaaugccaguuccgu

SEQ ID NO: 1932149 - RNA, 19 nt, Artificial Sequence
  Description of Artificial Sequence: Synthetic oligonucleotide
  Antisense strand to SEQ ID NO: 1932148
acggaacuggcauuacugc

SEQ ID NO: 1932150 - RNA, 19 nt, Artificial Sequence
  Description of Artificial Sequence: Synthetic oligonucleotide
  Sense strand starting at position 2035 of SEQ ID NO: 1879778
cuuggauugggaggguauu

SEQ ID NO: 1932151 - RNA, 19 nt, Artificial Sequence
  Description of Artificial Sequence: Synthetic oligonucleotide
  Antisense strand to SEQ ID NO: 1932150
aauacccucccaauccaag

SEQ ID NO: 1932152 - RNA, 19 nt, Artificial Sequence
  Description of Artificial Sequence: Synthetic oligonucleotide
  Sense strand starting at position 2145 of SEQ ID NO: 1879778
accuguaggccauguagaa

SEQ ID NO: 1932153 - RNA, 19 nt, Artificial Sequence
  Description of Artificial Sequence: Synthetic oligonucleotide
  Antisense strand to SEQ ID NO: 1932152
uucuacauggccuacaggu

SEQ ID NO: 1932154 - RNA, 19 nt, Artificial Sequence
  Description of Artificial Sequence: Synthetic oligonucleotide
  Sense strand starting at position 2164 of SEQ ID NO: 1879778
guccauagagauugaccaa

SEQ ID NO: 1932155 - RNA, 19 nt, Artificial Sequence
  Description of Artificial Sequence: Synthetic oligonucleotide
  Antisense strand to SEQ ID NO: 1932154
uuggucaaucucuauggac

SEQ ID NO: 1932156 - RNA, 19 nt, Artificial Sequence
  Description of Artificial Sequence: Synthetic oligonucleotide
  Sense strand starting at position 2227 of SEQ ID NO: 1879778
ccagcuuuaggaugggaga

SEQ ID NO: 1932157 - RNA, 19 nt, Artificial Sequence
  Description of Artificial Sequence: Synthetic oligonucleotide
  Antisense strand to SEQ ID NO: 1932156
ucucccauccuaaagcugg

SEQ ID NO: 1932158 - RNA, 19 nt, Artificial Sequence
  Description of Artificial Sequence: Synthetic oligonucleotide
  Sense strand starting at position 2228 of SEQ ID NO: 1879778
cagcuuuaggaugggagaa

SEQ ID NO: 1932159 - RNA, 19 nt, Artificial Sequence
  Description of Artificial Sequence: Synthetic oligonucleotide
  Antisense strand to SEQ ID NO: 1932158
uucucccauccuaaagcug

SEQ ID NO: 1932160 - RNA, 19 nt, Artificial Sequence
  Description of Artificial Sequence: Synthetic oligonucleotide
  Sense strand starting at position 2230 of SEQ ID NO: 1879778
gcuuuaggaugggagaacu

SEQ ID NO: 1932161 - RNA, 19 nt, Artificial Sequence
  Description of Artificial Sequence: Synthetic oligonucleotide
  Antisense strand to SEQ ID NO: 1932160
aguucucccauccuaaagc

SEQ ID NO: 1932162 - RNA, 19 nt, Artificial Sequence
  Description of Artificial Sequence: Synthetic oligonucleotide
  Sense strand starting at position 2291 of SEQ ID NO: 1879778
cggagacauacuugaaugu

SEQ ID NO: 1932163 - RNA, 19 nt, Artificial Sequence
  Description of Artificial Sequence: Synthetic oligonucleotide
  Antisense strand to SEQ ID NO: 1932162
acauucaaguaugucuccg

SEQ ID NO: 1932164 - RNA, 19 nt, Artificial Sequence
  Description of Artificial Sequence: Synthetic oligonucleotide
  Sense strand starting at position 2295 of SEQ ID NO: 1879778
gacauacuugaauguagac

SEQ ID NO: 1932165 - RNA, 19 nt, Artificial Sequence
  Description of Artificial Sequence: Synthetic oligonucleotide
  Antisense strand to SEQ ID NO: 1932164
gucuacauucaaguauguc

SEQ ID NO: 1932166 - RNA, 19 nt, Artificial Sequence
  Description of Artificial Sequence: Synthetic oligonucleotide
  Sense strand starting at position 2339 of SEQ ID NO: 1879778
ggcucuaacuacucagacu

SEQ ID NO: 1932167 - RNA, 19 nt, Artificial Sequence
  Description of Artificial Sequence: Synthetic oligonucleotide
  Antisense strand to SEQ ID NO: 1932166
agucugaguaguuagagcc

SEQ ID NO: 1932168 - RNA, 19 nt, Artificial Sequence
  Description of Artificial Sequence: Synthetic oligonucleotide
  Sense strand starting at position 2503 of SEQ ID NO: 1879778
cagcuuuguguugaggauc

SEQ ID NO: 1932169 - RNA, 19 nt, Artificial Sequence
  Description of Artificial Sequence: Synthetic oligonucleotide
  Antisense strand to SEQ ID NO: 1932168
gauccucaacacaaagcug

SEQ ID NO: 1932170 - RNA, 19 nt, Artificial Sequence
  Description of Artificial Sequence: Synthetic oligonucleotide
  Sense strand starting at position 2598 of SEQ ID NO: 1879778
ugagucagcucugcagagu

SEQ ID NO: 1932171 - RNA, 19 nt, Artificial Sequence
  Description of Artificial Sequence: Synthetic oligonucleotide
  Antisense strand to SEQ ID NO: 1932170
acucugcagagcugacuca

SEQ ID NO: 1932172 - RNA, 19 nt, Artificial Sequence
  Description of Artificial Sequence: Synthetic oligonucleotide
  Sense strand starting at position 2641 of SEQ ID NO: 1879778
gccucaccaucuguugaga

SEQ ID NO: 1932173 - RNA, 19 nt, Artificial Sequence
  Description of Artificial Sequence: Synthetic oligonucleotide
  Antisense strand to SEQ ID NO: 1932172
ucucaacagauggugaggc

SEQ ID NO: 1932174 - RNA, 19 nt, Artificial Sequence
  Description of Artificial Sequence: Synthetic oligonucleotide
  Sense strand starting at position 2643 of SEQ ID NO: 1879778
cucaccaucuguugagaag

SEQ ID NO: 1932175 - RNA, 19 nt, Artificial Sequence
  Description of Artificial Sequence: Synthetic oligonucleotide
  Antisense strand to SEQ ID NO: 1932174
cuucucaacagauggugag

SEQ ID NO: 1932176 - RNA, 19 nt, Artificial Sequence
  Description of Artificial Sequence: Synthetic oligonucleotide
  Sense strand starting at position 3170 of SEQ ID NO: 1879778
ggccguuuaugguuuauag

SEQ ID NO: 1932177 - RNA, 19 nt, Artificial Sequence
  Description of Artificial Sequence: Synthetic oligonucleotide
  Antisense strand to SEQ ID NO: 1932176
cuauaaaccauaaacggcc

SEQ ID NO: 1932178 - RNA, 19 nt, Artificial Sequence
  Description of Artificial Sequence: Synthetic oligonucleotide
  Sense strand starting at position 3180 of SEQ ID NO: 1879778
gguuuauaggguuggcauc

SEQ ID NO: 1932179 - RNA, 19 nt, Artificial Sequence
  Description of Artificial Sequence: Synthetic oligonucleotide
  Antisense strand to SEQ ID NO: 1932178
gaugccaacccuauaaacc

SEQ ID NO: 1932180 - RNA, 19 nt, Artificial Sequence
  Description of Artificial Sequence: Synthetic oligonucleotide
  Sense strand starting at position 3196 of SEQ ID NO: 1879778
aucccacuugucuguguuu

SEQ ID NO: 1932181 - RNA, 19 nt, Artificial Sequence
  Description of Artificial Sequence: Synthetic oligonucleotide
  Antisense strand to SEQ ID NO: 1932180
aaacacagacaagugggau

SEQ ID NO: 1932182 - RNA, 19 nt, Artificial Sequence
  Description of Artificial Sequence: Synthetic oligonucleotide
  Sense strand starting at position 3198 of SEQ ID NO: 1879778
cccacuugucuguguuugu

SEQ ID NO: 1932183 - RNA, 19 nt, Artificial Sequence
  Description of Artificial Sequence: Synthetic oligonucleotide
  Antisense strand to SEQ ID NO: 1932182
acaaacacagacaaguggg

SEQ ID NO: 1932184 - RNA, 19 nt, Artificial Sequence
  Description of Artificial Sequence: Synthetic oligonucleotide
  Sense strand starting at position 3208 of SEQ ID NO: 1879778
uguguuuguccaugucuag

SEQ ID NO: 1932185 - RNA, 19 nt, Artificial Sequence
  Description of Artificial Sequence: Synthetic oligonucleotide
  Antisense strand to SEQ ID NO: 1932184
cuagacauggacaaacaca

SEQ ID NO: 1932186 - RNA, 19 nt, Artificial Sequence
  Description of Artificial Sequence: Synthetic oligonucleotide
  Sense strand starting at position 3209 of SEQ ID NO: 1879778
guguuuguccaugucuagu

SEQ ID NO: 1932187 - RNA, 19 nt, Artificial Sequence
  Description of Artificial Sequence: Synthetic oligonucleotide
  Antisense strand to SEQ ID NO: 1932186
acuagacauggacaaacac

SEQ ID NO: 1932188 - RNA, 19 nt, Artificial Sequence
  Description of Artificial Sequence: Synthetic oligonucleotide
  Sense strand starting at position 3215 of SEQ ID NO: 1879778
guccaugucuagucacaug

SEQ ID NO: 1932189 - RNA, 19 nt, Artificial Sequence
  Description of Artificial Sequence: Synthetic oligonucleotide
  Antisense strand to SEQ ID NO: 1932188
caugugacuagacauggac

SEQ ID NO: 1932190 - RNA, 19 nt, Artificial Sequence
  Description of Artificial Sequence: Synthetic oligonucleotide
  Sense strand starting at position 3223 of SEQ ID NO: 1879778
cuagucacauguccacauu

SEQ ID NO: 1932191 - RNA, 19 nt, Artificial Sequence
  Description of Artificial Sequence: Synthetic oligonucleotide
  Antisense strand to SEQ ID NO: 1932190
aauguggacaugugacuag

SEQ ID NO: 1932192 - RNA, 19 nt, Artificial Sequence
  Description of Artificial Sequence: Synthetic oligonucleotide
  Sense strand starting at position 3399 of SEQ ID NO: 1879778
uccucuucggccuggaaau

SEQ ID NO: 1932193 - RNA, 19 nt, Artificial Sequence
  Description of Artificial Sequence: Synthetic oligonucleotide
  Antisense strand to SEQ ID NO: 1932192
auuuccaggccgaagagga

SEQ ID NO: 1932194 - RNA, 19 nt, Artificial Sequence
  Description of Artificial Sequence: Synthetic oligonucleotide
  Sense strand starting at position 3417 of SEQ ID NO: 1879778
ugggucaucucagcaaaca

SEQ ID NO: 1932195 - RNA, 19 nt, Artificial Sequence
  Description of Artificial Sequence: Synthetic oligonucleotide
  Antisense strand to SEQ ID NO: 1932194
uguuugcugagaugaccca

SEQ ID NO: 1932196 - RNA, 19 nt, Artificial Sequence
  Description of Artificial Sequence: Synthetic oligonucleotide
  Sense strand starting at position 3585 of SEQ ID NO: 1879778
ggcaguguggcagacuuaa

SEQ ID NO: 1932197 - RNA, 19 nt, Artificial Sequence
  Description of Artificial Sequence: Synthetic oligonucleotide
  Antisense strand to SEQ ID NO: 1932196
uuaagucugccacacugcc

SEQ ID NO: 1932198 - RNA, 19 nt, Artificial Sequence
  Description of Artificial Sequence: Synthetic oligonucleotide
  Sense strand starting at position 3964 of SEQ ID NO: 1879778
cagguuguccaacaguguu

SEQ ID NO: 1932199 - RNA, 19 nt, Artificial Sequence
  Description of Artificial Sequence: Synthetic oligonucleotide
  Antisense strand to SEQ ID NO: 1932198
aacacuguuggacaaccug

SEQ ID NO: 1932200 - RNA, 19 nt, Artificial Sequence
  Description of Artificial Sequence: Synthetic oligonucleotide
  Sense strand starting at position 188 of SEQ ID NO: 1879779
aauagugugacacggacau

SEQ ID NO: 1932201 - RNA, 19 nt, Artificial Sequence
  Description of Artificial Sequence: Synthetic oligonucleotide
  Antisense strand to SEQ ID NO: 1932200
auguccgugucacacuauu

SEQ ID NO: 1932202 - RNA, 19 nt, Artificial Sequence
  Description of Artificial Sequence: Synthetic oligonucleotide
  Sense strand starting at position 190 of SEQ ID NO: 1879779
uagugugacacggacauaa

SEQ ID NO: 1932203 - RNA, 19 nt, Artificial Sequence
  Description of Artificial Sequence: Synthetic oligonucleotide
  Antisense strand to SEQ ID NO: 1932202
uuauguccgugucacacua

SEQ ID NO: 1932204 - RNA, 19 nt, Artificial Sequence
  Description of Artificial Sequence: Synthetic oligonucleotide
  Sense strand starting at position 299 of SEQ ID NO: 1879779
gacaguucuuaaucgggau

SEQ ID NO: 1932205 - RNA, 19 nt, Artificial Sequence
  Description of Artificial Sequence: Synthetic oligonucleotide
  Antisense strand to SEQ ID NO: 1932204
aucccgauuaagaacuguc

SEQ ID NO: 1932206 - RNA, 19 nt, Artificial Sequence
  Description of Artificial Sequence: Synthetic oligonucleotide
  Sense strand starting at position 332 of SEQ ID NO: 1879779
caaggaauccaguguuuga

SEQ ID NO: 1932207 - RNA, 19 nt, Artificial Sequence
  Description of Artificial Sequence: Synthetic oligonucleotide
  Antisense strand to SEQ ID NO: 1932206
ucaaacacuggauuccuug

SEQ ID NO: 1932208 - RNA, 19 nt, Artificial Sequence
  Description of Artificial Sequence: Synthetic oligonucleotide
  Sense strand starting at position 335 of SEQ ID NO: 1879779
ggaauccaguguuugacaa

SEQ ID NO: 1932209 - RNA, 19 nt, Artificial Sequence
  Description of Artificial Sequence: Synthetic oligonucleotide
  Antisense strand to SEQ ID NO: 1932208
uugucaaacacuggauucc

SEQ ID NO: 1932210 - RNA, 19 nt, Artificial Sequence
  Description of Artificial Sequence: Synthetic oligonucleotide
  Sense strand starting at position 336 of SEQ ID NO: 1879779
gaauccaguguuugacaau

SEQ ID NO: 1932211 - RNA, 19 nt, Artificial Sequence
  Description of Artificial Sequence: Synthetic oligonucleotide
  Antisense strand to SEQ ID NO: 1932210
auugucaaacacuggauuc

SEQ ID NO: 1932212 - RNA, 19 nt, Artificial Sequence
  Description of Artificial Sequence: Synthetic oligonucleotide
  Sense strand starting at position 342 of SEQ ID NO: 1879779
aguguuugacaaugaauau

SEQ ID NO: 1932213 - RNA, 19 nt, Artificial Sequence
  Description of Artificial Sequence: Synthetic oligonucleotide
  Antisense strand to SEQ ID NO: 1932212
auauucauugucaaacacu

SEQ ID NO: 1932214 - RNA, 19 nt, Artificial Sequence
  Description of Artificial Sequence: Synthetic oligonucleotide
  Sense strand starting at position 416 of SEQ ID NO: 1879779
uuugucauccuacagagau

SEQ ID NO: 1932215 - RNA, 19 nt, Artificial Sequence
  Description of Artificial Sequence: Synthetic oligonucleotide
  Antisense strand to SEQ ID NO: 1932214
aucucuguaggaugacaaa

SEQ ID NO: 1932216 - RNA, 19 nt, Artificial Sequence
  Description of Artificial Sequence: Synthetic oligonucleotide
  Sense strand starting at position 597 of SEQ ID NO: 1879779
gaaugaaaguucuuuguac

SEQ ID NO: 1932217 - RNA, 19 nt, Artificial Sequence
  Description of Artificial Sequence: Synthetic oligonucleotide
  Antisense strand to SEQ ID NO: 1932216
guacaaagaacuuucauuc

SEQ ID NO: 1932218 - RNA, 19 nt, Artificial Sequence
  Description of Artificial Sequence: Synthetic oligonucleotide
  Sense strand starting at position 599 of SEQ ID NO: 1879779
augaaaguucuuuguacuc

SEQ ID NO: 1932219 - RNA, 19 nt, Artificial Sequence
  Description of Artificial Sequence: Synthetic oligonucleotide
  Antisense strand to SEQ ID NO: 1932218
gaguacaaagaacuuucau

SEQ ID NO: 1932220 - RNA, 19 nt, Artificial Sequence
  Description of Artificial Sequence: Synthetic oligonucleotide
  Sense strand starting at position 633 of SEQ ID NO: 1879779
agaaucaauguugguaagu

SEQ ID NO: 1932221 - RNA, 19 nt, Artificial Sequence
  Description of Artificial Sequence: Synthetic oligonucleotide
  Antisense strand to SEQ ID NO: 1932220
acuuaccaacauugauucu

SEQ ID NO: 1932222 - RNA, 19 nt, Artificial Sequence
  Description of Artificial Sequence: Synthetic oligonucleotide
  Sense strand starting at position 634 of SEQ ID NO: 1879779
gaaucaauguugguaagua

SEQ ID NO: 1932223 - RNA, 19 nt, Artificial Sequence
  Description of Artificial Sequence: Synthetic oligonucleotide
  Antisense strand to SEQ ID NO: 1932222
uacuuaccaacauugauuc

SEQ ID NO: 1932224 - RNA, 19 nt, Artificial Sequence
  Description of Artificial Sequence: Synthetic oligonucleotide
  Sense strand starting at position 644 of SEQ ID NO: 1879779
ugguaaguaugccugauag

SEQ ID NO: 1932225 - RNA, 19 nt, Artificial Sequence
  Description of Artificial Sequence: Synthetic oligonucleotide
  Antisense strand to SEQ ID NO: 1932224
cuaucaggcauacuuacca

SEQ ID NO: 1932226 - RNA, 19 nt, Artificial Sequence
  Description of Artificial Sequence: Synthetic oligonucleotide
  Sense strand starting at position 646 of SEQ ID NO: 1879779
guaaguaugccugauaggu

SEQ ID NO: 1932227 - RNA, 19 nt, Artificial Sequence
  Description of Artificial Sequence: Synthetic oligonucleotide
  Antisense strand to SEQ ID NO: 1932226
accuaucaggcauacuuac

SEQ ID NO: 1932228 - RNA, 19 nt, Artificial Sequence
  Description of Artificial Sequence: Synthetic oligonucleotide
  Sense strand starting at position 662 of SEQ ID NO: 1879779
gguacugcugucuaccuaa

SEQ ID NO: 1932229 - RNA, 19 nt, Artificial Sequence
  Description of Artificial Sequence: Synthetic oligonucleotide
  Antisense strand to SEQ ID NO: 1932228
uuagguagacagcaguacc

SEQ ID NO: 1932230 - RNA, 19 nt, Artificial Sequence
  Description of Artificial Sequence: Synthetic oligonucleotide
  Sense strand starting at position 687 of SEQ ID NO: 1879779
cuggaaaguaaugggcuua

SEQ ID NO: 1932231 - RNA, 19 nt, Artificial Sequence
  Description of Artificial Sequence: Synthetic oligonucleotide
  Antisense strand to SEQ ID NO: 1932230
uaagcccauuacuuuccag

SEQ ID NO: 1932232 - RNA, 19 nt, Artificial Sequence
  Description of Artificial Sequence: Synthetic oligonucleotide
  Sense strand starting at position 688 of SEQ ID NO: 1879779
uggaaaguaaugggcuuau

SEQ ID NO: 1932233 - RNA, 19 nt, Artificial Sequence
  Description of Artificial Sequence: Synthetic oligonucleotide
  Antisense strand to SEQ ID NO: 1932232
auaagcccauuacuuucca

SEQ ID NO: 1932234 - RNA, 19 nt, Artificial Sequence
  Description of Artificial Sequence: Synthetic oligonucleotide
  Sense strand starting at position 789 of SEQ ID NO: 1879779
aguggauaauucuccaaug

SEQ ID NO: 1932235 - RNA, 19 nt, Artificial Sequence
  Description of Artificial Sequence: Synthetic oligonucleotide
  Antisense strand to SEQ ID NO: 1932234
cauuggagaauuauccacu

SEQ ID NO: 1932236 - RNA, 19 nt, Artificial Sequence
  Description of Artificial Sequence: Synthetic oligonucleotide
  Sense strand starting at position 790 of SEQ ID NO: 1879779
guggauaauucuccaauga

SEQ ID NO: 1932237 - RNA, 19 nt, Artificial Sequence
  Description of Artificial Sequence: Synthetic oligonucleotide
  Antisense strand to SEQ ID NO: 1932236
ucauuggagaauuauccac

SEQ ID NO: 1932238 - RNA, 19 nt, Artificial Sequence
  Description of Artificial Sequence: Synthetic oligonucleotide
  Sense strand starting at position 1048 of SEQ ID NO: 1879779
gguguuuauggucauaaca

SEQ ID NO: 1932239 - RNA, 19 nt, Artificial Sequence
  Description of Artificial Sequence: Synthetic oligonucleotide
  Antisense strand to SEQ ID NO: 1932238
uguuaugaccauaaacacc

SEQ ID NO: 1932240 - RNA, 19 nt, Artificial Sequence
  Description of Artificial Sequence: Synthetic oligonucleotide
  Sense strand starting at position 1094 of SEQ ID NO: 1879779
cuugaaugcuuucuaauga

SEQ ID NO: 1932241 - RNA, 19 nt, Artificial Sequence
  Description of Artificial Sequence: Synthetic oligonucleotide
  Antisense strand to SEQ ID NO: 1932240
ucauuagaaagcauucaag

SEQ ID NO: 1932242 - RNA, 19 nt, Artificial Sequence
  Description of Artificial Sequence: Synthetic oligonucleotide
  Sense strand starting at position 1191 of SEQ ID NO: 1879779
uguguugguaguuauagga

SEQ ID NO: 1932243 - RNA, 19 nt, Artificial Sequence
  Description of Artificial Sequence: Synthetic oligonucleotide
  Antisense strand to SEQ ID NO: 1932242
uccuauaacuaccaacaca

SEQ ID NO: 1932244 - RNA, 19 nt, Artificial Sequence
  Description of Artificial Sequence: Synthetic oligonucleotide
  Sense strand starting at position 1213 of SEQ ID NO: 1879779
aguugagauguuuaaguuu

SEQ ID NO: 1932245 - RNA, 19 nt, Artificial Sequence
  Description of Artificial Sequence: Synthetic oligonucleotide
  Antisense strand to SEQ ID NO: 1932244
aaacuuaaacaucucaacu

SEQ ID NO: 1932246 - RNA, 19 nt, Artificial Sequence
  Description of Artificial Sequence: Synthetic oligonucleotide
  Sense strand starting at position 1225 of SEQ ID NO: 1879779
uaaguuugagccuaagaua

SEQ ID NO: 1932247 - RNA, 19 nt, Artificial Sequence
  Description of Artificial Sequence: Synthetic oligonucleotide
  Antisense strand to SEQ ID NO: 1932246
uaucuuaggcucaaacuua

SEQ ID NO: 1932248 - RNA, 19 nt, Artificial Sequence
  Description of Artificial Sequence: Synthetic oligonucleotide
  Sense strand starting at position 1274 of SEQ ID NO: 1879779
ugcguaggaauauaaauaa

SEQ ID NO: 1932249 - RNA, 19 nt, Artificial Sequence
  Description of Artificial Sequence: Synthetic oligonucleotide
  Antisense strand to SEQ ID NO: 1932248
uuauuuauauuccuacgca

SEQ ID NO: 1932250 - RNA, 19 nt, Artificial Sequence
  Description of Artificial Sequence: Synthetic oligonucleotide
  Sense strand starting at position 1359 of SEQ ID NO: 1879779
guguuucuaggucacauua

SEQ ID NO: 1932251 - RNA, 19 nt, Artificial Sequence
  Description of Artificial Sequence: Synthetic oligonucleotide
  Antisense strand to SEQ ID NO: 1932250
uaaugugaccuagaaacac

SEQ ID NO: 1932252 - RNA, 19 nt, Artificial Sequence
  Description of Artificial Sequence: Synthetic oligonucleotide
  Sense strand starting at position 1369 of SEQ ID NO: 1879779
gucacauuaucccagauuu

SEQ ID NO: 1932253 - RNA, 19 nt, Artificial Sequence
  Description of Artificial Sequence: Synthetic oligonucleotide
  Antisense strand to SEQ ID NO: 1932252
aaaucugggauaaugugac

SEQ ID NO: 1932254 - RNA, 19 nt, Artificial Sequence
  Description of Artificial Sequence: Synthetic oligonucleotide
  Sense strand starting at position 1515 of SEQ ID NO: 1879779
gggaguugccuagaugauu

SEQ ID NO: 1932255 - RNA, 19 nt, Artificial Sequence
  Description of Artificial Sequence: Synthetic oligonucleotide
  Antisense strand to SEQ ID NO: 1932254
aaucaucuaggcaacuccc

SEQ ID NO: 1932256 - RNA, 19 nt, Artificial Sequence
  Description of Artificial Sequence: Synthetic oligonucleotide
  Sense strand starting at position 1520 of SEQ ID NO: 1879779
uugccuagaugauuccaga

SEQ ID NO: 1932257 - RNA, 19 nt, Artificial Sequence
  Description of Artificial Sequence: Synthetic oligonucleotide
  Antisense strand to SEQ ID NO: 1932256
ucuggaaucaucuaggcaa

SEQ ID NO: 1932258 - RNA, 19 nt, Artificial Sequence
  Description of Artificial Sequence: Synthetic oligonucleotide
  Sense strand starting at position 1601 of SEQ ID NO: 1879779
aagccaugucucuagcaug

SEQ ID NO: 1932259 - RNA, 19 nt, Artificial Sequence
  Description of Artificial Sequence: Synthetic oligonucleotide
  Antisense strand to SEQ ID NO: 1932258
caugcuagagacauggcuu

SEQ ID NO: 1932260 - RNA, 19 nt, Artificial Sequence
  Description of Artificial Sequence: Synthetic oligonucleotide
  Sense strand starting at position 1738 of SEQ ID NO: 1879779
uaauuaucacgcuagggua

SEQ ID NO: 1932261 - RNA, 19 nt, Artificial Sequence
  Description of Artificial Sequence: Synthetic oligonucleotide
  Antisense strand to SEQ ID NO: 1932260
uacccuagcgugauaauua

SEQ ID NO: 1932262 - RNA, 19 nt, Artificial Sequence
  Description of Artificial Sequence: Synthetic oligonucleotide
  Sense strand starting at position 2384 of SEQ ID NO: 1879779
guaugaugaaagcaaaugu

SEQ ID NO: 1932263 - RNA, 19 nt, Artificial Sequence
  Description of Artificial Sequence: Synthetic oligonucleotide
  Antisense strand to SEQ ID NO: 1932262
acauuugcuuucaucauac

SEQ ID NO: 1932264 - RNA, 19 nt, Artificial Sequence
  Description of Artificial Sequence: Synthetic oligonucleotide
  Sense strand starting at position 2533 of SEQ ID NO: 1879779
cuguacuacuaguuaaucu

SEQ ID NO: 1932265 - RNA, 19 nt, Artificial Sequence
  Description of Artificial Sequence: Synthetic oligonucleotide
  Antisense strand to SEQ ID NO: 1932264
agauuaacuaguaguacag

SEQ ID NO: 1932266 - RNA, 19 nt, Artificial Sequence
  Description of Artificial Sequence: Synthetic oligonucleotide
  Sense strand starting at position 3321 of SEQ ID NO: 1879779
cccuaagaucagugacucu

SEQ ID NO: 1932267 - RNA, 19 nt, Artificial Sequence
  Description of Artificial Sequence: Synthetic oligonucleotide
  Antisense strand to SEQ ID NO: 1932266
agagucacugaucuuaggg

SEQ ID NO: 1932268 - RNA, 19 nt, Artificial Sequence
  Description of Artificial Sequence: Synthetic oligonucleotide
  Sense strand starting at position 3479 of SEQ ID NO: 1879779
aucucuuaggcugaagcaa

SEQ ID NO: 1932269 - RNA, 19 nt, Artificial Sequence
  Description of Artificial Sequence: Synthetic oligonucleotide
  Antisense strand to SEQ ID NO: 1932268
uugcuucagccuaagagau

SEQ ID NO: 1932270 - RNA, 19 nt, Artificial Sequence
  Description of Artificial Sequence: Synthetic oligonucleotide
  Sense strand starting at position 3561 of SEQ ID NO: 1879779
uugauagucuagccacuaa

SEQ ID NO: 1932271 - RNA, 19 nt, Artificial Sequence
  Description of Artificial Sequence: Synthetic oligonucleotide
  Antisense strand to SEQ ID NO: 1932270
uuaguggcuagacuaucaa

SEQ ID NO: 1932272 - RNA, 19 nt, Artificial Sequence
  Description of Artificial Sequence: Synthetic oligonucleotide
  Sense strand starting at position 3774 of SEQ ID NO: 1879779
ugauaaacacaucguaagu

SEQ ID NO: 1932273 - RNA, 19 nt, Artificial Sequence
  Description of Artificial Sequence: Synthetic oligonucleotide
  Antisense strand to SEQ ID NO: 1932272
acuuacgauguguuuauca

SEQ ID NO: 1932274 - RNA, 19 nt, Artificial Sequence
  Description of Artificial Sequence: Synthetic oligonucleotide
  Sense strand starting at position 3874 of SEQ ID NO: 1879779
gaacacuuacauuagcgua

SEQ ID NO: 1932275 - RNA, 19 nt, Artificial Sequence
  Description of Artificial Sequence: Synthetic oligonucleotide
  Antisense strand to SEQ ID NO: 1932274
uacgcuaauguaaguguuc

SEQ ID NO: 1932276 - RNA, 19 nt, Artificial Sequence
  Description of Artificial Sequence: Synthetic oligonucleotide
  Sense strand starting at position 3876 of SEQ ID NO: 1879779
acacuuacauuagcguaaa

SEQ ID NO: 1932277 - RNA, 19 nt, Artificial Sequence
  Description of Artificial Sequence: Synthetic oligonucleotide
  Antisense strand to SEQ ID NO: 1932276
uuuacgcuaauguaagugu

SEQ ID NO: 1932278 - RNA, 19 nt, Artificial Sequence
  Description of Artificial Sequence: Synthetic oligonucleotide
  Sense strand starting at position 3879 of SEQ ID NO: 1879779
cuuacauuagcguaaaguu

SEQ ID NO: 1932279 - RNA, 19 nt, Artificial Sequence
  Description of Artificial Sequence: Synthetic oligonucleotide
  Antisense strand to SEQ ID NO: 1932278
aacuuuacgcuaauguaag

SEQ ID NO: 1932280 - RNA, 19 nt, Artificial Sequence
  Description of Artificial Sequence: Synthetic oligonucleotide
  Sense strand starting at position 31 of SEQ ID NO: 1879780
aauccagagccuugaggaa

SEQ ID NO: 1932281 - RNA, 19 nt, Artificial Sequence
  Description of Artificial Sequence: Synthetic oligonucleotide
  Antisense strand to SEQ ID NO: 1932280
uuccucaaggcucuggauu

SEQ ID NO: 1932282 - RNA, 19 nt, Artificial Sequence
  Description of Artificial Sequence: Synthetic oligonucleotide
  Sense strand starting at position 93 of SEQ ID NO: 1879780
ugacuuuaugcagagcaau

SEQ ID NO: 1932283 - RNA, 19 nt, Artificial Sequence
  Description of Artificial Sequence: Synthetic oligonucleotide
  Antisense strand to SEQ ID NO: 1932282
auugcucugcauaaaguca

SEQ ID NO: 1932284 - RNA, 19 nt, Artificial Sequence
  Description of Artificial Sequence: Synthetic oligonucleotide
  Sense strand starting at position 320 of SEQ ID NO: 1879780
uuguguuucccacaugaca

SEQ ID NO: 1932285 - RNA, 19 nt, Artificial Sequence
  Description of Artificial Sequence: Synthetic oligonucleotide
  Antisense strand to SEQ ID NO: 1932284
ugucaugugggaaacacaa

SEQ ID NO: 1932286 - RNA, 19 nt, Artificial Sequence
  Description of Artificial Sequence: Synthetic oligonucleotide
  Sense strand starting at position 401 of SEQ ID NO: 1879780
agcugaauugcagaaagca

SEQ ID NO: 1932287 - RNA, 19 nt, Artificial Sequence
  Description of Artificial Sequence: Synthetic oligonucleotide
  Antisense strand to SEQ ID NO: 1932286
ugcuuucugcaauucagcu

SEQ ID NO: 1932288 - RNA, 19 nt, Artificial Sequence
  Description of Artificial Sequence: Synthetic oligonucleotide
  Sense strand starting at position 518 of SEQ ID NO: 1879780
cccucugugccucagauga

SEQ ID NO: 1932289 - RNA, 19 nt, Artificial Sequence
  Description of Artificial Sequence: Synthetic oligonucleotide
  Antisense strand to SEQ ID NO: 1932288
ucaucugaggcacagaggg

SEQ ID NO: 1932290 - RNA, 19 nt, Artificial Sequence
  Description of Artificial Sequence: Synthetic oligonucleotide
  Sense strand starting at position 546 of SEQ ID NO: 1879780
gagcccugcccacaugauu

SEQ ID NO: 1932291 - RNA, 19 nt, Artificial Sequence
  Description of Artificial Sequence: Synthetic oligonucleotide
  Antisense strand to SEQ ID NO: 1932290
aaucaugugggcagggcuc

SEQ ID NO: 1932292 - RNA, 19 nt, Artificial Sequence
  Description of Artificial Sequence: Synthetic oligonucleotide
  Sense strand starting at position 811 of SEQ ID NO: 1879780
gggucacaccuguaauacu

SEQ ID NO: 1932293 - RNA, 19 nt, Artificial Sequence
  Description of Artificial Sequence: Synthetic oligonucleotide
  Antisense strand to SEQ ID NO: 1932292
aguauuacaggugugaccc

SEQ ID NO: 1932294 - RNA, 19 nt, Artificial Sequence
  Description of Artificial Sequence: Synthetic oligonucleotide
  Sense strand starting at position 1175 of SEQ ID NO: 1879780
ggugaauauuauguugacu

SEQ ID NO: 1932295 - RNA, 19 nt, Artificial Sequence
  Description of Artificial Sequence: Synthetic oligonucleotide
  Antisense strand to SEQ ID NO: 1932294
agucaacauaauauucacc

SEQ ID NO: 1932296 - RNA, 19 nt, Artificial Sequence
  Description of Artificial Sequence: Synthetic oligonucleotide
  Sense strand starting at position 1180 of SEQ ID NO: 1879780
auauuauguugacugagca

SEQ ID NO: 1932297 - RNA, 19 nt, Artificial Sequence
  Description of Artificial Sequence: Synthetic oligonucleotide
  Antisense strand to SEQ ID NO: 1932296
ugcucagucaacauaauau

SEQ ID NO: 1932298 - RNA, 19 nt, Artificial Sequence
  Description of Artificial Sequence: Synthetic oligonucleotide
  Sense strand starting at position 1215 of SEQ ID NO: 1879780
gguugagagcucuggauga

SEQ ID NO: 1932299 - RNA, 19 nt, Artificial Sequence
  Description of Artificial Sequence: Synthetic oligonucleotide
  Antisense strand to SEQ ID NO: 1932298
ucauccagagcucucaacc

SEQ ID NO: 1932300 - RNA, 19 nt, Artificial Sequence
  Description of Artificial Sequence: Synthetic oligonucleotide
  Sense strand starting at position 1217 of SEQ ID NO: 1879780
uugagagcucuggaugacu

SEQ ID NO: 1932301 - RNA, 19 nt, Artificial Sequence
  Description of Artificial Sequence: Synthetic oligonucleotide
  Antisense strand to SEQ ID NO: 1932300
agucauccagagcucucaa

SEQ ID NO: 1932302 - RNA, 19 nt, Artificial Sequence
  Description of Artificial Sequence: Synthetic oligonucleotide
  Sense strand starting at position 1236 of SEQ ID NO: 1879780
ggguucugugcgaacuguu

SEQ ID NO: 1932303 - RNA, 19 nt, Artificial Sequence
  Description of Artificial Sequence: Synthetic oligonucleotide
  Antisense strand to SEQ ID NO: 1932302
aacaguucgcacagaaccc

SEQ ID NO: 1932304 - RNA, 19 nt, Artificial Sequence
  Description of Artificial Sequence: Synthetic oligonucleotide
  Sense strand starting at position 1270 of SEQ ID NO: 1879780
uucugucaccuggguauua

SEQ ID NO: 1932305 - RNA, 19 nt, Artificial Sequence
  Description of Artificial Sequence: Synthetic oligonucleotide
  Antisense strand to SEQ ID NO: 1932304
uaauacccaggugacagaa

SEQ ID NO: 1932306 - RNA, 19 nt, Artificial Sequence
  Description of Artificial Sequence: Synthetic oligonucleotide
  Sense strand starting at position 1271 of SEQ ID NO: 1879780
ucugucaccuggguauuaa

SEQ ID NO: 1932307 - RNA, 19 nt, Artificial Sequence
  Description of Artificial Sequence: Synthetic oligonucleotide
  Antisense strand to SEQ ID NO: 1932306
uuaauacccaggugacaga

SEQ ID NO: 1932308 - RNA, 19 nt, Artificial Sequence
  Description of Artificial Sequence: Synthetic oligonucleotide
  Sense strand starting at position 1272 of SEQ ID NO: 1879780
cugucaccuggguauuaac

SEQ ID NO: 1932309 - RNA, 19 nt, Artificial Sequence
  Description of Artificial Sequence: Synthetic oligonucleotide
  Antisense strand to SEQ ID NO: 1932308
guuaauacccaggugacag

SEQ ID NO: 1932310 - RNA, 19 nt, Artificial Sequence
  Description of Artificial Sequence: Synthetic oligonucleotide
  Sense strand starting at position 1299 of SEQ ID NO: 1879780
gccuacuucccagaggagu

SEQ ID NO: 1932311 - RNA, 19 nt, Artificial Sequence
  Description of Artificial Sequence: Synthetic oligonucleotide
  Antisense strand to SEQ ID NO: 1932310
acuccucugggaaguaggc

SEQ ID NO: 1932312 - RNA, 19 nt, Artificial Sequence
  Description of Artificial Sequence: Synthetic oligonucleotide
  Sense strand starting at position 1372 of SEQ ID NO: 1879780
gagcuucggacuugagcaa

SEQ ID NO: 1932313 - RNA, 19 nt, Artificial Sequence
  Description of Artificial Sequence: Synthetic oligonucleotide
  Antisense strand to SEQ ID NO: 1932312
uugcucaaguccgaagcuc

SEQ ID NO: 1932314 - RNA, 19 nt, Artificial Sequence
  Description of Artificial Sequence: Synthetic oligonucleotide
  Sense strand starting at position 1403 of SEQ ID NO: 1879780
ugacuuuguccuugaggug

SEQ ID NO: 1932315 - RNA, 19 nt, Artificial Sequence
  Description of Artificial Sequence: Synthetic oligonucleotide
  Antisense strand to SEQ ID NO: 1932314
caccucaaggacaaaguca

SEQ ID NO: 1932316 - RNA, 19 nt, Artificial Sequence
  Description of Artificial Sequence: Synthetic oligonucleotide
  Sense strand starting at position 1573 of SEQ ID NO: 1879780
gggcaagcaucacuacuuu

SEQ ID NO: 1932317 - RNA, 19 nt, Artificial Sequence
  Description of Artificial Sequence: Synthetic oligonucleotide
  Antisense strand to SEQ ID NO: 1932316
aaaguagugaugcuugccc

SEQ ID NO: 1932318 - RNA, 19 nt, Artificial Sequence
  Description of Artificial Sequence: Synthetic oligonucleotide
  Sense strand starting at position 2053 of SEQ ID NO: 1879780
uaguuauaacgacaucuag

SEQ ID NO: 1932319 - RNA, 19 nt, Artificial Sequence
  Description of Artificial Sequence: Synthetic oligonucleotide
  Antisense strand to SEQ ID NO: 1932318
cuagaugucguuauaacua

SEQ ID NO: 1932320 - RNA, 19 nt, Artificial Sequence
  Description of Artificial Sequence: Synthetic oligonucleotide
  Sense strand starting at position 2077 of SEQ ID NO: 1879780
gugccguuucgaccgugaa

SEQ ID NO: 1932321 - RNA, 19 nt, Artificial Sequence
  Description of Artificial Sequence: Synthetic oligonucleotide
  Antisense strand to SEQ ID NO: 1932320
uucacggucgaaacggcac

SEQ ID NO: 1932322 - RNA, 19 nt, Artificial Sequence
  Description of Artificial Sequence: Synthetic oligonucleotide
  Sense strand starting at position 2079 of SEQ ID NO: 1879780
gccguuucgaccgugaaag

SEQ ID NO: 1932323 - RNA, 19 nt, Artificial Sequence
  Description of Artificial Sequence: Synthetic oligonucleotide
  Antisense strand to SEQ ID NO: 1932322
cuuucacggucgaaacggc

SEQ ID NO: 1932324 - RNA, 19 nt, Artificial Sequence
  Description of Artificial Sequence: Synthetic oligonucleotide
  Sense strand starting at position 2399 of SEQ ID NO: 1879780
cauaguaaguacucuggaa

SEQ ID NO: 1932325 - RNA, 19 nt, Artificial Sequence
  Description of Artificial Sequence: Synthetic oligonucleotide
  Antisense strand to SEQ ID NO: 1932324
uuccagaguacuuacuaug

SEQ ID NO: 1932326 - RNA, 19 nt, Artificial Sequence
  Description of Artificial Sequence: Synthetic oligonucleotide
  Sense strand starting at position 2401 of SEQ ID NO: 1879780
uaguaaguacucuggaauu

SEQ ID NO: 1932327 - RNA, 19 nt, Artificial Sequence
  Description of Artificial Sequence: Synthetic oligonucleotide
  Antisense strand to SEQ ID NO: 1932326
aauuccagaguacuuacua

SEQ ID NO: 1932328 - RNA, 19 nt, Artificial Sequence
  Description of Artificial Sequence: Synthetic oligonucleotide
  Sense strand starting at position 2403 of SEQ ID NO: 1879780
guaaguacucuggaauuau

SEQ ID NO: 1932329 - RNA, 19 nt, Artificial Sequence
  Description of Artificial Sequence: Synthetic oligonucleotide
  Antisense strand to SEQ ID NO: 1932328
auaauuccagaguacuuac

SEQ ID NO: 1932330 - RNA, 19 nt, Artificial Sequence
  Description of Artificial Sequence: Synthetic oligonucleotide
  Sense strand starting at position 2485 of SEQ ID NO: 1879780
ugcuaaaguccugaccaau

SEQ ID NO: 1932331 - RNA, 19 nt, Artificial Sequence
  Description of Artificial Sequence: Synthetic oligonucleotide
  Antisense strand to SEQ ID NO: 1932330
auuggucaggacuuuagca

SEQ ID NO: 1932332 - RNA, 19 nt, Artificial Sequence
  Description of Artificial Sequence: Synthetic oligonucleotide
  Sense strand starting at position 2516 of SEQ ID NO: 1879780
ggacgcggacuucaucaaa

SEQ ID NO: 1932333 - RNA, 19 nt, Artificial Sequence
  Description of Artificial Sequence: Synthetic oligonucleotide
  Antisense strand to SEQ ID NO: 1932332
uuugaugaaguccgcgucc

SEQ ID NO: 1932334 - RNA, 19 nt, Artificial Sequence
  Description of Artificial Sequence: Synthetic oligonucleotide
  Sense strand starting at position 2589 of SEQ ID NO: 1879780
aauggauugugucuuccau

SEQ ID NO: 1932335 - RNA, 19 nt, Artificial Sequence
  Description of Artificial Sequence: Synthetic oligonucleotide
  Antisense strand to SEQ ID NO: 1932334
auggaagacacaauccauu

SEQ ID NO: 1932336 - RNA, 19 nt, Artificial Sequence
  Description of Artificial Sequence: Synthetic oligonucleotide
  Sense strand starting at position 2591 of SEQ ID NO: 1879780
uggauugugucuuccauga

SEQ ID NO: 1932337 - RNA, 19 nt, Artificial Sequence
  Description of Artificial Sequence: Synthetic oligonucleotide
  Antisense strand to SEQ ID NO: 1932336
ucauggaagacacaaucca

SEQ ID NO: 1932338 - RNA, 19 nt, Artificial Sequence
  Description of Artificial Sequence: Synthetic oligonucleotide
  Sense strand starting at position 2596 of SEQ ID NO: 1879780
ugugucuuccaugacagga

SEQ ID NO: 1932339 - RNA, 19 nt, Artificial Sequence
  Description of Artificial Sequence: Synthetic oligonucleotide
  Antisense strand to SEQ ID NO: 1932338
uccugucauggaagacaca

SEQ ID NO: 1932340 - RNA, 19 nt, Artificial Sequence
  Description of Artificial Sequence: Synthetic oligonucleotide
  Sense strand starting at position 3102 of SEQ ID NO: 1879780
aaguuaagggucugacugu

SEQ ID NO: 1932341 - RNA, 19 nt, Artificial Sequence
  Description of Artificial Sequence: Synthetic oligonucleotide
  Antisense strand to SEQ ID NO: 1932340
acagucagacccuuaacuu

SEQ ID NO: 1932342 - RNA, 19 nt, Artificial Sequence
  Description of Artificial Sequence: Synthetic oligonucleotide
  Sense strand starting at position 3190 of SEQ ID NO: 1879780
gucauucuuguggaauaaa

SEQ ID NO: 1932343 - RNA, 19 nt, Artificial Sequence
  Description of Artificial Sequence: Synthetic oligonucleotide
  Antisense strand to SEQ ID NO: 1932342
uuuauuccacaagaaugac

SEQ ID NO: 1932344 - RNA, 19 nt, Artificial Sequence
  Description of Artificial Sequence: Synthetic oligonucleotide
  Sense strand starting at position 3211 of SEQ ID NO: 1879780
ccaggauucuggguuugcu

SEQ ID NO: 1932345 - RNA, 19 nt, Artificial Sequence
  Description of Artificial Sequence: Synthetic oligonucleotide
  Antisense strand to SEQ ID NO: 1932344
agcaaacccagaauccugg

SEQ ID NO: 1932346 - RNA, 19 nt, Artificial Sequence
  Description of Artificial Sequence: Synthetic oligonucleotide
  Sense strand starting at position 3291 of SEQ ID NO: 1879780
ccgagugucaaugagaucu

SEQ ID NO: 1932347 - RNA, 19 nt, Artificial Sequence
  Description of Artificial Sequence: Synthetic oligonucleotide
  Antisense strand to SEQ ID NO: 1932346
agaucucauugacacucgg

SEQ ID NO: 1932348 - RNA, 19 nt, Artificial Sequence
  Description of Artificial Sequence: Synthetic oligonucleotide
  Sense strand starting at position 3348 of SEQ ID NO: 1879780
cucugcuuaccuggaauga

SEQ ID NO: 1932349 - RNA, 19 nt, Artificial Sequence
  Description of Artificial Sequence: Synthetic oligonucleotide
  Antisense strand to SEQ ID NO: 1932348
ucauuccagguaagcagag

SEQ ID NO: 1932350 - RNA, 19 nt, Artificial Sequence
  Description of Artificial Sequence: Synthetic oligonucleotide
  Sense strand starting at position 3349 of SEQ ID NO: 1879780
ucugcuuaccuggaaugau

SEQ ID NO: 1932351 - RNA, 19 nt, Artificial Sequence
  Description of Artificial Sequence: Synthetic oligonucleotide
  Antisense strand to SEQ ID NO: 1932350
aucauuccagguaagcaga

SEQ ID NO: 1932352 - RNA, 19 nt, Artificial Sequence
  Description of Artificial Sequence: Synthetic oligonucleotide
  Sense strand starting at position 3475 of SEQ ID NO: 1879780
agggaaagcucuuuagacc

SEQ ID NO: 1932353 - RNA, 19 nt, Artificial Sequence
  Description of Artificial Sequence: Synthetic oligonucleotide
  Antisense strand to SEQ ID NO: 1932352
ggucuaaagagcuuucccu

SEQ ID NO: 1932354 - RNA, 19 nt, Artificial Sequence
  Description of Artificial Sequence: Synthetic oligonucleotide
  Sense strand starting at position 3625 of SEQ ID NO: 1879780
augugacuauaccuugaga

SEQ ID NO: 1932355 - RNA, 19 nt, Artificial Sequence
  Description of Artificial Sequence: Synthetic oligonucleotide
  Antisense strand to SEQ ID NO: 1932354
ucucaagguauagucacau

SEQ ID NO: 1932356 - RNA, 19 nt, Artificial Sequence
  Description of Artificial Sequence: Synthetic oligonucleotide
  Sense strand starting at position 3627 of SEQ ID NO: 1879780
gugacuauaccuugagaaa

SEQ ID NO: 1932357 - RNA, 19 nt, Artificial Sequence
  Description of Artificial Sequence: Synthetic oligonucleotide
  Antisense strand to SEQ ID NO: 1932356
uuucucaagguauagucac

SEQ ID NO: 1932358 - RNA, 19 nt, Artificial Sequence
  Description of Artificial Sequence: Synthetic oligonucleotide
  Sense strand starting at position 3879 of SEQ ID NO: 1879780
ccaagaagguguccagauc

SEQ ID NO: 1932359 - RNA, 19 nt, Artificial Sequence
  Description of Artificial Sequence: Synthetic oligonucleotide
  Antisense strand to SEQ ID NO: 1932358
gaucuggacaccuucuugg

SEQ ID NO: 1932360 - RNA, 19 nt, Artificial Sequence
  Description of Artificial Sequence: Synthetic oligonucleotide
  Sense strand starting at position 414 of SEQ ID NO: 1879781
cuaagagggucuucuuaag

SEQ ID NO: 1932361 - RNA, 19 nt, Artificial Sequence
  Description of Artificial Sequence: Synthetic oligonucleotide
  Antisense strand to SEQ ID NO: 1932360
cuuaagaagacccucuuag

SEQ ID NO: 1932362 - RNA, 19 nt, Artificial Sequence
  Description of Artificial Sequence: Synthetic oligonucleotide
  Sense strand starting at position 467 of SEQ ID NO: 1879781
gacuguagcucucugcaga

SEQ ID NO: 1932363 - RNA, 19 nt, Artificial Sequence
  Description of Artificial Sequence: Synthetic oligonucleotide
  Antisense strand to SEQ ID NO: 1932362
ucugcagagagcuacaguc

SEQ ID NO: 1932364 - RNA, 19 nt, Artificial Sequence
  Description of Artificial Sequence: Synthetic oligonucleotide
  Sense strand starting at position 470 of SEQ ID NO: 1879781
uguagcucucugcagacaa

SEQ ID NO: 1932365 - RNA, 19 nt, Artificial Sequence
  Description of Artificial Sequence: Synthetic oligonucleotide
  Antisense strand to SEQ ID NO: 1932364
uugucugcagagagcuaca

SEQ ID NO: 1932366 - RNA, 19 nt, Artificial Sequence
  Description of Artificial Sequence: Synthetic oligonucleotide
  Sense strand starting at position 532 of SEQ ID NO: 1879781
agcuuugagucuccacuau

SEQ ID NO: 1932367 - RNA, 19 nt, Artificial Sequence
  Description of Artificial Sequence: Synthetic oligonucleotide
  Antisense strand to SEQ ID NO: 1932366
auaguggagacucaaagcu

SEQ ID NO: 1932368 - RNA, 19 nt, Artificial Sequence
  Description of Artificial Sequence: Synthetic oligonucleotide
  Sense strand starting at position 662 of SEQ ID NO: 1879781
uaaguuaggguuugcuuau

SEQ ID NO: 1932369 - RNA, 19 nt, Artificial Sequence
  Description of Artificial Sequence: Synthetic oligonucleotide
  Antisense strand to SEQ ID NO: 1932368
auaagcaaacccuaacuua

SEQ ID NO: 1932370 - RNA, 19 nt, Artificial Sequence
  Description of Artificial Sequence: Synthetic oligonucleotide
  Sense strand starting at position 663 of SEQ ID NO: 1879781
aaguuaggguuugcuuauu

SEQ ID NO: 1932371 - RNA, 19 nt, Artificial Sequence
  Description of Artificial Sequence: Synthetic oligonucleotide
  Antisense strand to SEQ ID NO: 1932370
aauaagcaaacccuaacuu

SEQ ID NO: 1932372 - RNA, 19 nt, Artificial Sequence
  Description of Artificial Sequence: Synthetic oligonucleotide
  Sense strand starting at position 668 of SEQ ID NO: 1879781
aggguuugcuuauuuaucu

SEQ ID NO: 1932373 - RNA, 19 nt, Artificial Sequence
  Description of Artificial Sequence: Synthetic oligonucleotide
  Antisense strand to SEQ ID NO: 1932372
agauaaauaagcaaacccu

SEQ ID NO: 1932374 - RNA, 19 nt, Artificial Sequence
  Description of Artificial Sequence: Synthetic oligonucleotide
  Sense strand starting at position 702 of SEQ ID NO: 1879781
ccaagugguaucugugauc

SEQ ID NO: 1932375 - RNA, 19 nt, Artificial Sequence
  Description of Artificial Sequence: Synthetic oligonucleotide
  Antisense strand to SEQ ID NO: 1932374
gaucacagauaccacuugg

SEQ ID NO: 1932376 - RNA, 19 nt, Artificial Sequence
  Description of Artificial Sequence: Synthetic oligonucleotide
  Sense strand starting at position 713 of SEQ ID NO: 1879781
cugugaucacacgggaaga

SEQ ID NO: 1932377 - RNA, 19 nt, Artificial Sequence
  Description of Artificial Sequence: Synthetic oligonucleotide
  Antisense strand to SEQ ID NO: 1932376
ucuucccgugugaucacag

SEQ ID NO: 1932378 - RNA, 19 nt, Artificial Sequence
  Description of Artificial Sequence: Synthetic oligonucleotide
  Sense strand starting at position 737 of SEQ ID NO: 1879781
aggcuuuggagucauagau

SEQ ID NO: 1932379 - RNA, 19 nt, Artificial Sequence
  Description of Artificial Sequence: Synthetic oligonucleotide
  Antisense strand to SEQ ID NO: 1932378
aucuaugacuccaaagccu

SEQ ID NO: 1932380 - RNA, 19 nt, Artificial Sequence
  Description of Artificial Sequence: Synthetic oligonucleotide
  Sense strand starting at position 788 of SEQ ID NO: 1879781
acuguuugaccuugggaaa

SEQ ID NO: 1932381 - RNA, 19 nt, Artificial Sequence
  Description of Artificial Sequence: Synthetic oligonucleotide
  Antisense strand to SEQ ID NO: 1932380
uuucccaaggucaaacagu

SEQ ID NO: 1932382 - RNA, 19 nt, Artificial Sequence
  Description of Artificial Sequence: Synthetic oligonucleotide
  Sense strand starting at position 844 of SEQ ID NO: 1879781
aguuaauccugguuaucug

SEQ ID NO: 1932383 - RNA, 19 nt, Artificial Sequence
  Description of Artificial Sequence: Synthetic oligonucleotide
  Antisense strand to SEQ ID NO: 1932382
cagauaaccaggauuaacu

SEQ ID NO: 1932384 - RNA, 19 nt, Artificial Sequence
  Description of Artificial Sequence: Synthetic oligonucleotide
  Sense strand starting at position 845 of SEQ ID NO: 1879781
guuaauccugguuaucuga

SEQ ID NO: 1932385 - RNA, 19 nt, Artificial Sequence
  Description of Artificial Sequence: Synthetic oligonucleotide
  Antisense strand to SEQ ID NO: 1932384
ucagauaaccaggauuaac

SEQ ID NO: 1932386 - RNA, 19 nt, Artificial Sequence
  Description of Artificial Sequence: Synthetic oligonucleotide
  Sense strand starting at position 870 of SEQ ID NO: 1879781
gugagaauuaagugaagua

SEQ ID NO: 1932387 - RNA, 19 nt, Artificial Sequence
  Description of Artificial Sequence: Synthetic oligonucleotide
  Antisense strand to SEQ ID NO: 1932386
uacuucacuuaauucucac

SEQ ID NO: 1932388 - RNA, 19 nt, Artificial Sequence
  Description of Artificial Sequence: Synthetic oligonucleotide
  Sense strand starting at position 882 of SEQ ID NO: 1879781
ugaaguaaggcuugcaaac

SEQ ID NO: 1932389 - RNA, 19 nt, Artificial Sequence
  Description of Artificial Sequence: Synthetic oligonucleotide
  Antisense strand to SEQ ID NO: 1932388
guuugcaagccuuacuuca

SEQ ID NO: 1932390 - RNA, 19 nt, Artificial Sequence
  Description of Artificial Sequence: Synthetic oligonucleotide
  Sense strand starting at position 895 of SEQ ID NO: 1879781
gcaaacucuuagguaaaca

SEQ ID NO: 1932391 - RNA, 19 nt, Artificial Sequence
  Description of Artificial Sequence: Synthetic oligonucleotide
  Antisense strand to SEQ ID NO: 1932390
uguuuaccuaagaguuugc

SEQ ID NO: 1932392 - RNA, 19 nt, Artificial Sequence
  Description of Artificial Sequence: Synthetic oligonucleotide
  Sense strand starting at position 921 of SEQ ID NO: 1879781
cuaaguugugguuauuaac

SEQ ID NO: 1932393 - RNA, 19 nt, Artificial Sequence
  Description of Artificial Sequence: Synthetic oligonucleotide
  Antisense strand to SEQ ID NO: 1932392
guuaauaaccacaacuuag

SEQ ID NO: 1932394 - RNA, 19 nt, Artificial Sequence
  Description of Artificial Sequence: Synthetic oligonucleotide
  Sense strand starting at position 1091 of SEQ ID NO: 1879781
cugcauugaugagcagaga

SEQ ID NO: 1932395 - RNA, 19 nt, Artificial Sequence
  Description of Artificial Sequence: Synthetic oligonucleotide
  Antisense strand to SEQ ID NO: 1932394
ucucugcucaucaaugcag

SEQ ID NO: 1932396 - RNA, 19 nt, Artificial Sequence
  Description of Artificial Sequence: Synthetic oligonucleotide
  Sense strand starting at position 1166 of SEQ ID NO: 1879781
agcagacauuguccuuaag

SEQ ID NO: 1932397 - RNA, 19 nt, Artificial Sequence
  Description of Artificial Sequence: Synthetic oligonucleotide
  Antisense strand to SEQ ID NO: 1932396
cuuaaggacaaugucugcu

SEQ ID NO: 1932398 - RNA, 19 nt, Artificial Sequence
  Description of Artificial Sequence: Synthetic oligonucleotide
  Sense strand starting at position 1169 of SEQ ID NO: 1879781
agacauuguccuuaagcug

SEQ ID NO: 1932399 - RNA, 19 nt, Artificial Sequence
  Description of Artificial Sequence: Synthetic oligonucleotide
  Antisense strand to SEQ ID NO: 1932398
cagcuuaaggacaaugucu

SEQ ID NO: 1932400 - RNA, 19 nt, Artificial Sequence
  Description of Artificial Sequence: Synthetic oligonucleotide
  Sense strand starting at position 1494 of SEQ ID NO: 1879781
caugaaugccuguggagac

SEQ ID NO: 1932401 - RNA, 19 nt, Artificial Sequence
  Description of Artificial Sequence: Synthetic oligonucleotide
  Antisense strand to SEQ ID NO: 1932400
gucuccacaggcauucaug

SEQ ID NO: 1932402 - RNA, 19 nt, Artificial Sequence
  Description of Artificial Sequence: Synthetic oligonucleotide
  Sense strand starting at position 1555 of SEQ ID NO: 1879781
uaggucugcuuucugauga

SEQ ID NO: 1932403 - RNA, 19 nt, Artificial Sequence
  Description of Artificial Sequence: Synthetic oligonucleotide
  Antisense strand to SEQ ID NO: 1932402
ucaucagaaagcagaccua

SEQ ID NO: 1932404 - RNA, 19 nt, Artificial Sequence
  Description of Artificial Sequence: Synthetic oligonucleotide
  Sense strand starting at position 1560 of SEQ ID NO: 1879781
cugcuuucugaugacuaga

SEQ ID NO: 1932405 - RNA, 19 nt, Artificial Sequence
  Description of Artificial Sequence: Synthetic oligonucleotide
  Antisense strand to SEQ ID NO: 1932404
ucuagucaucagaaagcag

SEQ ID NO: 1932406 - RNA, 19 nt, Artificial Sequence
  Description of Artificial Sequence: Synthetic oligonucleotide
  Sense strand starting at position 1562 of SEQ ID NO: 1879781
gcuuucugaugacuagaac

SEQ ID NO: 1932407 - RNA, 19 nt, Artificial Sequence
  Description of Artificial Sequence: Synthetic oligonucleotide
  Antisense strand to SEQ ID NO: 1932406
guucuagucaucagaaagc

SEQ ID NO: 1932408 - RNA, 19 nt, Artificial Sequence
  Description of Artificial Sequence: Synthetic oligonucleotide
  Sense strand starting at position 2336 of SEQ ID NO: 1879781
ccagaugcagccuggaauu

SEQ ID NO: 1932409 - RNA, 19 nt, Artificial Sequence
  Description of Artificial Sequence: Synthetic oligonucleotide
  Antisense strand to SEQ ID NO: 1932408
aauuccaggcugcaucugg

SEQ ID NO: 1932410 - RNA, 19 nt, Artificial Sequence
  Description of Artificial Sequence: Synthetic oligonucleotide
  Sense strand starting at position 2347 of SEQ ID NO: 1879781
cuggaauucuuagcuuuau

SEQ ID NO: 1932411 - RNA, 19 nt, Artificial Sequence
  Description of Artificial Sequence: Synthetic oligonucleotide
  Antisense strand to SEQ ID NO: 1932410
auaaagcuaagaauuccag

SEQ ID NO: 1932412 - RNA, 19 nt, Artificial Sequence
  Description of Artificial Sequence: Synthetic oligonucleotide
  Sense strand starting at position 2348 of SEQ ID NO: 1879781
uggaauucuuagcuuuaug

SEQ ID NO: 1932413 - RNA, 19 nt, Artificial Sequence
  Description of Artificial Sequence: Synthetic oligonucleotide
  Antisense strand to SEQ ID NO: 1932412
cauaaagcuaagaauucca

SEQ ID NO: 1932414 - RNA, 19 nt, Artificial Sequence
  Description of Artificial Sequence: Synthetic oligonucleotide
  Sense strand starting at position 2359 of SEQ ID NO: 1879781
gcuuuaugcccucaggguu

SEQ ID NO: 1932415 - RNA, 19 nt, Artificial Sequence
  Description of Artificial Sequence: Synthetic oligonucleotide
  Antisense strand to SEQ ID NO: 1932414
aacccugagggcauaaagc

SEQ ID NO: 1932416 - RNA, 19 nt, Artificial Sequence
  Description of Artificial Sequence: Synthetic oligonucleotide
  Sense strand starting at position 2411 of SEQ ID NO: 1879781
guugcuacuggacaaguaa

SEQ ID NO: 1932417 - RNA, 19 nt, Artificial Sequence
  Description of Artificial Sequence: Synthetic oligonucleotide
  Antisense strand to SEQ ID NO: 1932416
uuacuuguccaguagcaac

SEQ ID NO: 1932418 - RNA, 19 nt, Artificial Sequence
  Description of Artificial Sequence: Synthetic oligonucleotide
  Sense strand starting at position 2516 of SEQ ID NO: 1879781
acuccucugccagguaaga

SEQ ID NO: 1932419 - RNA, 19 nt, Artificial Sequence
  Description of Artificial Sequence: Synthetic oligonucleotide
  Antisense strand to SEQ ID NO: 1932418
ucuuaccuggcagaggagu

SEQ ID NO: 1932420 - RNA, 19 nt, Artificial Sequence
  Description of Artificial Sequence: Synthetic oligonucleotide
  Sense strand starting at position 2558 of SEQ ID NO: 1879781
ggcaaagggaaaugcuaau

SEQ ID NO: 1932421 - RNA, 19 nt, Artificial Sequence
  Description of Artificial Sequence: Synthetic oligonucleotide
  Antisense strand to SEQ ID NO: 1932420
auuagcauuucccuuugcc

SEQ ID NO: 1932422 - RNA, 19 nt, Artificial Sequence
  Description of Artificial Sequence: Synthetic oligonucleotide
  Sense strand starting at position 2572 of SEQ ID NO: 1879781
cuaauaccuggucguuaaa

SEQ ID NO: 1932423 - RNA, 19 nt, Artificial Sequence
  Description of Artificial Sequence: Synthetic oligonucleotide
  Antisense strand to SEQ ID NO: 1932422
uuuaacgaccagguauuag

SEQ ID NO: 1932424 - RNA, 19 nt, Artificial Sequence
  Description of Artificial Sequence: Synthetic oligonucleotide
  Sense strand starting at position 2599 of SEQ ID NO: 1879781
ugagucaggcccuauccua

SEQ ID NO: 1932425 - RNA, 19 nt, Artificial Sequence
  Description of Artificial Sequence: Synthetic oligonucleotide
  Antisense strand to SEQ ID NO: 1932424
uaggauagggccugacuca

SEQ ID NO: 1932426 - RNA, 19 nt, Artificial Sequence
  Description of Artificial Sequence: Synthetic oligonucleotide
  Sense strand starting at position 2936 of SEQ ID NO: 1879781
caaaguggcugaguacuuu

SEQ ID NO: 1932427 - RNA, 19 nt, Artificial Sequence
  Description of Artificial Sequence: Synthetic oligonucleotide
  Antisense strand to SEQ ID NO: 1932426
aaaguacucagccacuuug

SEQ ID NO: 1932428 - RNA, 19 nt, Artificial Sequence
  Description of Artificial Sequence: Synthetic oligonucleotide
  Sense strand starting at position 2942 of SEQ ID NO: 1879781
ggcugaguacuuuaagguc

SEQ ID NO: 1932429 - RNA, 19 nt, Artificial Sequence
  Description of Artificial Sequence: Synthetic oligonucleotide
  Antisense strand to SEQ ID NO: 1932428
gaccuuaaaguacucagcc

SEQ ID NO: 1932430 - RNA, 19 nt, Artificial Sequence
  Description of Artificial Sequence: Synthetic oligonucleotide
  Sense strand starting at position 2948 of SEQ ID NO: 1879781
guacuuuaaggucauacaa

SEQ ID NO: 1932431 - RNA, 19 nt, Artificial Sequence
  Description of Artificial Sequence: Synthetic oligonucleotide
  Antisense strand to SEQ ID NO: 1932430
uuguaugaccuuaaaguac

SEQ ID NO: 1932432 - RNA, 19 nt, Artificial Sequence
  Description of Artificial Sequence: Synthetic oligonucleotide
  Sense strand starting at position 2961 of SEQ ID NO: 1879781
auacaacucgucuauuaag

SEQ ID NO: 1932433 - RNA, 19 nt, Artificial Sequence
  Description of Artificial Sequence: Synthetic oligonucleotide
  Antisense strand to SEQ ID NO: 1932432
cuuaauagacgaguuguau

SEQ ID NO: 1932434 - RNA, 19 nt, Artificial Sequence
  Description of Artificial Sequence: Synthetic oligonucleotide
  Sense strand starting at position 3266 of SEQ ID NO: 1879781
augaguauuuauuagguac

SEQ ID NO: 1932435 - RNA, 19 nt, Artificial Sequence
  Description of Artificial Sequence: Synthetic oligonucleotide
  Antisense strand to SEQ ID NO: 1932434
guaccuaauaaauacucau

SEQ ID NO: 1932436 - RNA, 19 nt, Artificial Sequence
  Description of Artificial Sequence: Synthetic oligonucleotide
  Sense strand starting at position 3391 of SEQ ID NO: 1879781
cauugagcugcccaagaga

SEQ ID NO: 1932437 - RNA, 19 nt, Artificial Sequence
  Description of Artificial Sequence: Synthetic oligonucleotide
  Antisense strand to SEQ ID NO: 1932436
ucucuugggcagcucaaug

SEQ ID NO: 1932438 - RNA, 19 nt, Artificial Sequence
  Description of Artificial Sequence: Synthetic oligonucleotide
  Sense strand starting at position 3412 of SEQ ID NO: 1879781
guggaaagauugucacguu

SEQ ID NO: 1932439 - RNA, 19 nt, Artificial Sequence
  Description of Artificial Sequence: Synthetic oligonucleotide
  Antisense strand to SEQ ID NO: 1932438
aacgugacaaucuuuccac

SEQ ID NO: 1932440 - RNA, 19 nt, Artificial Sequence
  Description of Artificial Sequence: Synthetic oligonucleotide
  Sense strand starting at position 273 of SEQ ID NO: 1879782
ucacaaccuccuggaguaa

SEQ ID NO: 1932441 - RNA, 19 nt, Artificial Sequence
  Description of Artificial Sequence: Synthetic oligonucleotide
  Antisense strand to SEQ ID NO: 1932440
uuacuccaggagguuguga

SEQ ID NO: 1932442 - RNA, 19 nt, Artificial Sequence
  Description of Artificial Sequence: Synthetic oligonucleotide
  Sense strand starting at position 392 of SEQ ID NO: 1879782
gagggaaucuugguugcuu

SEQ ID NO: 1932443 - RNA, 19 nt, Artificial Sequence
  Description of Artificial Sequence: Synthetic oligonucleotide
  Antisense strand to SEQ ID NO: 1932442
aagcaaccaagauucccuc

SEQ ID NO: 1932444 - RNA, 19 nt, Artificial Sequence
  Description of Artificial Sequence: Synthetic oligonucleotide
  Sense strand starting at position 393 of SEQ ID NO: 1879782
agggaaucuugguugcuuu

SEQ ID NO: 1932445 - RNA, 19 nt, Artificial Sequence
  Description of Artificial Sequence: Synthetic oligonucleotide
  Antisense strand to SEQ ID NO: 1932444
aaagcaaccaagauucccu

SEQ ID NO: 1932446 - RNA, 19 nt, Artificial Sequence
  Description of Artificial Sequence: Synthetic oligonucleotide
  Sense strand starting at position 626 of SEQ ID NO: 1879782
cggguuggucuugaacuga

SEQ ID NO: 1932447 - RNA, 19 nt, Artificial Sequence
  Description of Artificial Sequence: Synthetic oligonucleotide
  Antisense strand to SEQ ID NO: 1932446
ucaguucaagaccaacccg

SEQ ID NO: 1932448 - RNA, 19 nt, Artificial Sequence
  Description of Artificial Sequence: Synthetic oligonucleotide
  Sense strand starting at position 852 of SEQ ID NO: 1879782
gcaagagcugaggauagua

SEQ ID NO: 1932449 - RNA, 19 nt, Artificial Sequence
  Description of Artificial Sequence: Synthetic oligonucleotide
  Antisense strand to SEQ ID NO: 1932448
uacuauccucagcucuugc

SEQ ID NO: 1932450 - RNA, 19 nt, Artificial Sequence
  Description of Artificial Sequence: Synthetic oligonucleotide
  Sense strand starting at position 860 of SEQ ID NO: 1879782
ugaggauaguacuuccuuu

SEQ ID NO: 1932451 - RNA, 19 nt, Artificial Sequence
  Description of Artificial Sequence: Synthetic oligonucleotide
  Antisense strand to SEQ ID NO: 1932450
aaaggaaguacuauccuca

SEQ ID NO: 1932452 - RNA, 19 nt, Artificial Sequence
  Description of Artificial Sequence: Synthetic oligonucleotide
  Sense strand starting at position 864 of SEQ ID NO: 1879782
gauaguacuuccuuugggu

SEQ ID NO: 1932453 - RNA, 19 nt, Artificial Sequence
  Description of Artificial Sequence: Synthetic oligonucleotide
  Antisense strand to SEQ ID NO: 1932452
acccaaaggaaguacuauc

SEQ ID NO: 1932454 - RNA, 19 nt, Artificial Sequence
  Description of Artificial Sequence: Synthetic oligonucleotide
  Sense strand starting at position 866 of SEQ ID NO: 1879782
uaguacuuccuuuggguga

SEQ ID NO: 1932455 - RNA, 19 nt, Artificial Sequence
  Description of Artificial Sequence: Synthetic oligonucleotide
  Antisense strand to SEQ ID NO: 1932454
ucacccaaaggaaguacua

SEQ ID NO: 1932456 - RNA, 19 nt, Artificial Sequence
  Description of Artificial Sequence: Synthetic oligonucleotide
  Sense strand starting at position 879 of SEQ ID NO: 1879782
gggugacugugauacaaga

SEQ ID NO: 1932457 - RNA, 19 nt, Artificial Sequence
  Description of Artificial Sequence: Synthetic oligonucleotide
  Antisense strand to SEQ ID NO: 1932456
ucuuguaucacagucaccc

SEQ ID NO: 1932458 - RNA, 19 nt, Artificial Sequence
  Description of Artificial Sequence: Synthetic oligonucleotide
  Sense strand starting at position 947 of SEQ ID NO: 1879782
cugggaauuuccugacuga

SEQ ID NO: 1932459 - RNA, 19 nt, Artificial Sequence
  Description of Artificial Sequence: Synthetic oligonucleotide
  Antisense strand to SEQ ID NO: 1932458
ucagucaggaaauucccag

SEQ ID NO: 1932460 - RNA, 19 nt, Artificial Sequence
  Description of Artificial Sequence: Synthetic oligonucleotide
  Sense strand starting at position 968 of SEQ ID NO: 1879782
gaagcaucuugugcuauca

SEQ ID NO: 1932461 - RNA, 19 nt, Artificial Sequence
  Description of Artificial Sequence: Synthetic oligonucleotide
  Antisense strand to SEQ ID NO: 1932460
ugauagcacaagaugcuuc

SEQ ID NO: 1932462 - RNA, 19 nt, Artificial Sequence
  Description of Artificial Sequence: Synthetic oligonucleotide
  Sense strand starting at position 1354 of SEQ ID NO: 1879782
ggcucuuccugagugguau

SEQ ID NO: 1932463 - RNA, 19 nt, Artificial Sequence
  Description of Artificial Sequence: Synthetic oligonucleotide
  Antisense strand to SEQ ID NO: 1932462
auaccacucaggaagagcc

SEQ ID NO: 1932464 - RNA, 19 nt, Artificial Sequence
  Description of Artificial Sequence: Synthetic oligonucleotide
  Sense strand starting at position 1355 of SEQ ID NO: 1879782
gcucuuccugagugguauc

SEQ ID NO: 1932465 - RNA, 19 nt, Artificial Sequence
  Description of Artificial Sequence: Synthetic oligonucleotide
  Antisense strand to SEQ ID NO: 1932464
gauaccacucaggaagagc

SEQ ID NO: 1932466 - RNA, 19 nt, Artificial Sequence
  Description of Artificial Sequence: Synthetic oligonucleotide
  Sense strand starting at position 1404 of SEQ ID NO: 1879782
gugcucuucugaguuccau

SEQ ID NO: 1932467 - RNA, 19 nt, Artificial Sequence
  Description of Artificial Sequence: Synthetic oligonucleotide
  Antisense strand to SEQ ID NO: 1932466
auggaacucagaagagcac

SEQ ID NO: 1932468 - RNA, 19 nt, Artificial Sequence
  Description of Artificial Sequence: Synthetic oligonucleotide
  Sense strand starting at position 1421 of SEQ ID NO: 1879782
augggcugugcuagcgaau

SEQ ID NO: 1932469 - RNA, 19 nt, Artificial Sequence
  Description of Artificial Sequence: Synthetic oligonucleotide
  Antisense strand to SEQ ID NO: 1932468
auucgcuagcacagcccau

SEQ ID NO: 1932470 - RNA, 19 nt, Artificial Sequence
  Description of Artificial Sequence: Synthetic oligonucleotide
  Sense strand starting at position 1488 of SEQ ID NO: 1879782
ggaaguugugacuggcauc

SEQ ID NO: 1932471 - RNA, 19 nt, Artificial Sequence
  Description of Artificial Sequence: Synthetic oligonucleotide
  Antisense strand to SEQ ID NO: 1932470
gaugccagucacaacuucc

SEQ ID NO: 1932472 - RNA, 19 nt, Artificial Sequence
  Description of Artificial Sequence: Synthetic oligonucleotide
  Sense strand starting at position 1489 of SEQ ID NO: 1879782
gaaguugugacuggcaucu

SEQ ID NO: 1932473 - RNA, 19 nt, Artificial Sequence
  Description of Artificial Sequence: Synthetic oligonucleotide
  Antisense strand to SEQ ID NO: 1932472
agaugccagucacaacuuc

SEQ ID NO: 1932474 - RNA, 19 nt, Artificial Sequence
  Description of Artificial Sequence: Synthetic oligonucleotide
  Sense strand starting at position 1568 of SEQ ID NO: 1879782
uagugucagcacuggcaau

SEQ ID NO: 1932475 - RNA, 19 nt, Artificial Sequence
  Description of Artificial Sequence: Synthetic oligonucleotide
  Antisense strand to SEQ ID NO: 1932474
auugccagugcugacacua

SEQ ID NO: 1932476 - RNA, 19 nt, Artificial Sequence
  Description of Artificial Sequence: Synthetic oligonucleotide
  Sense strand starting at position 1618 of SEQ ID NO: 1879782
cccaauucguuuccagaag

SEQ ID NO: 1932477 - RNA, 19 nt, Artificial Sequence
  Description of Artificial Sequence: Synthetic oligonucleotide
  Antisense strand to SEQ ID NO: 1932476
cuucuggaaacgaauuggg

SEQ ID NO: 1932478 - RNA, 19 nt, Artificial Sequence
  Description of Artificial Sequence: Synthetic oligonucleotide
  Sense strand starting at position 1626 of SEQ ID NO: 1879782
guuuccagaaguugaagaa

SEQ ID NO: 1932479 - RNA, 19 nt, Artificial Sequence
  Description of Artificial Sequence: Synthetic oligonucleotide
  Antisense strand to SEQ ID NO: 1932478
uucuucaacuucuggaaac

SEQ ID NO: 1932480 - RNA, 19 nt, Artificial Sequence
  Description of Artificial Sequence: Synthetic oligonucleotide
  Sense strand starting at position 1638 of SEQ ID NO: 1879782
ugaagaauuguuuggugug

SEQ ID NO: 1932481 - RNA, 19 nt, Artificial Sequence
  Description of Artificial Sequence: Synthetic oligonucleotide
  Antisense strand to SEQ ID NO: 1932480
cacaccaaacaauucuuca

SEQ ID NO: 1932482 - RNA, 19 nt, Artificial Sequence
  Description of Artificial Sequence: Synthetic oligonucleotide
  Sense strand starting at position 1640 of SEQ ID NO: 1879782
aagaauuguuuggugugaa

SEQ ID NO: 1932483 - RNA, 19 nt, Artificial Sequence
  Description of Artificial Sequence: Synthetic oligonucleotide
  Antisense strand to SEQ ID NO: 1932482
uucacaccaaacaauucuu

SEQ ID NO: 1932484 - RNA, 19 nt, Artificial Sequence
  Description of Artificial Sequence: Synthetic oligonucleotide
  Sense strand starting at position 2541 of SEQ ID NO: 1879782
gugucacugccugauacgu

SEQ ID NO: 1932485 - RNA, 19 nt, Artificial Sequence
  Description of Artificial Sequence: Synthetic oligonucleotide
  Antisense strand to SEQ ID NO: 1932484
acguaucaggcagugacac

SEQ ID NO: 1932486 - RNA, 19 nt, Artificial Sequence
  Description of Artificial Sequence: Synthetic oligonucleotide
  Sense strand starting at position 2563 of SEQ ID NO: 1879782
agcaucugacuccauguua

SEQ ID NO: 1932487 - RNA, 19 nt, Artificial Sequence
  Description of Artificial Sequence: Synthetic oligonucleotide
  Antisense strand to SEQ ID NO: 1932486
uaacauggagucagaugcu

SEQ ID NO: 1932488 - RNA, 19 nt, Artificial Sequence
  Description of Artificial Sequence: Synthetic oligonucleotide
  Sense strand starting at position 2602 of SEQ ID NO: 1879782
ccgccaaauccguauguug

SEQ ID NO: 1932489 - RNA, 19 nt, Artificial Sequence
  Description of Artificial Sequence: Synthetic oligonucleotide
  Antisense strand to SEQ ID NO: 1932488
caacauacggauuuggcgg

SEQ ID NO: 1932490 - RNA, 19 nt, Artificial Sequence
  Description of Artificial Sequence: Synthetic oligonucleotide
  Sense strand starting at position 2604 of SEQ ID NO: 1879782
gccaaauccguauguugaa

SEQ ID NO: 1932491 - RNA, 19 nt, Artificial Sequence
  Description of Artificial Sequence: Synthetic oligonucleotide
  Antisense strand to SEQ ID NO: 1932490
uucaacauacggauuuggc

SEQ ID NO: 1932492 - RNA, 19 nt, Artificial Sequence
  Description of Artificial Sequence: Synthetic oligonucleotide
  Sense strand starting at position 2613 of SEQ ID NO: 1879782
guauguugaagccagaaac

SEQ ID NO: 1932493 - RNA, 19 nt, Artificial Sequence
  Description of Artificial Sequence: Synthetic oligonucleotide
  Antisense strand to SEQ ID NO: 1932492
guuucuggcuucaacauac

SEQ ID NO: 1932494 - RNA, 19 nt, Artificial Sequence
  Description of Artificial Sequence: Synthetic oligonucleotide
  Sense strand starting at position 2727 of SEQ ID NO: 1879782
acuugagucucauaagaag

SEQ ID NO: 1932495 - RNA, 19 nt, Artificial Sequence
  Description of Artificial Sequence: Synthetic oligonucleotide
  Antisense strand to SEQ ID NO: 1932494
cuucuuaugagacucaagu

SEQ ID NO: 1932496 - RNA, 19 nt, Artificial Sequence
  Description of Artificial Sequence: Synthetic oligonucleotide
  Sense strand starting at position 2945 of SEQ ID NO: 1879782
gcgugauacacccagguau

SEQ ID NO: 1932497 - RNA, 19 nt, Artificial Sequence
  Description of Artificial Sequence: Synthetic oligonucleotide
  Antisense strand to SEQ ID NO: 1932496
auaccuggguguaucacgc

SEQ ID NO: 1932498 - RNA, 19 nt, Artificial Sequence
  Description of Artificial Sequence: Synthetic oligonucleotide
  Sense strand starting at position 2947 of SEQ ID NO: 1879782
gugauacacccagguauug

SEQ ID NO: 1932499 - RNA, 19 nt, Artificial Sequence
  Description of Artificial Sequence: Synthetic oligonucleotide
  Antisense strand to SEQ ID NO: 1932498
caauaccuggguguaucac

SEQ ID NO: 1932500 - RNA, 19 nt, Artificial Sequence
  Description of Artificial Sequence: Synthetic oligonucleotide
  Sense strand starting at position 2962 of SEQ ID NO: 1879782
auuggaacaucagcucuua

SEQ ID NO: 1932501 - RNA, 19 nt, Artificial Sequence
  Description of Artificial Sequence: Synthetic oligonucleotide
  Antisense strand to SEQ ID NO: 1932500
uaagagcugauguuccaau

SEQ ID NO: 1932502 - RNA, 19 nt, Artificial Sequence
  Description of Artificial Sequence: Synthetic oligonucleotide
  Sense strand starting at position 2989 of SEQ ID NO: 1879782
ggucuuguaucucuuagag

SEQ ID NO: 1932503 - RNA, 19 nt, Artificial Sequence
  Description of Artificial Sequence: Synthetic oligonucleotide
  Antisense strand to SEQ ID NO: 1932502
cucuaagagauacaagacc

SEQ ID NO: 1932504 - RNA, 19 nt, Artificial Sequence
  Description of Artificial Sequence: Synthetic oligonucleotide
  Sense strand starting at position 3108 of SEQ ID NO: 1879782
ugcagaggucaguaagaca

SEQ ID NO: 1932505 - RNA, 19 nt, Artificial Sequence
  Description of Artificial Sequence: Synthetic oligonucleotide
  Antisense strand to SEQ ID NO: 1932504
ugucuuacugaccucugca

SEQ ID NO: 1932506 - RNA, 19 nt, Artificial Sequence
  Description of Artificial Sequence: Synthetic oligonucleotide
  Sense strand starting at position 3111 of SEQ ID NO: 1879782
agaggucaguaagacauaa

SEQ ID NO: 1932507 - RNA, 19 nt, Artificial Sequence
  Description of Artificial Sequence: Synthetic oligonucleotide
  Antisense strand to SEQ ID NO: 1932506
uuaugucuuacugaccucu

SEQ ID NO: 1932508 - RNA, 19 nt, Artificial Sequence
  Description of Artificial Sequence: Synthetic oligonucleotide
  Sense strand starting at position 3145 of SEQ ID NO: 1879782
ucccuacauguaggagaaa

SEQ ID NO: 1932509 - RNA, 19 nt, Artificial Sequence
  Description of Artificial Sequence: Synthetic oligonucleotide
  Antisense strand to SEQ ID NO: 1932508
uuucuccuacauguaggga

SEQ ID NO: 1932510 - RNA, 19 nt, Artificial Sequence
  Description of Artificial Sequence: Synthetic oligonucleotide
  Sense strand starting at position 3146 of SEQ ID NO: 1879782
cccuacauguaggagaaau

SEQ ID NO: 1932511 - RNA, 19 nt, Artificial Sequence
  Description of Artificial Sequence: Synthetic oligonucleotide
  Antisense strand to SEQ ID NO: 1932510
auuucuccuacauguaggg

SEQ ID NO: 1932512 - RNA, 19 nt, Artificial Sequence
  Description of Artificial Sequence: Synthetic oligonucleotide
  Sense strand starting at position 3181 of SEQ ID NO: 1879782
cacacauacggguaguuaa

SEQ ID NO: 1932513 - RNA, 19 nt, Artificial Sequence
  Description of Artificial Sequence: Synthetic oligonucleotide
  Antisense strand to SEQ ID NO: 1932512
uuaacuacccguaugugug

SEQ ID NO: 1932514 - RNA, 19 nt, Artificial Sequence
  Description of Artificial Sequence: Synthetic oligonucleotide
  Sense strand starting at position 3566 of SEQ ID NO: 1879782
agaagaauuuguugguaga

SEQ ID NO: 1932515 - RNA, 19 nt, Artificial Sequence
  Description of Artificial Sequence: Synthetic oligonucleotide
  Antisense strand to SEQ ID NO: 1932514
ucuaccaacaaauucuucu

SEQ ID NO: 1932516 - RNA, 19 nt, Artificial Sequence
  Description of Artificial Sequence: Synthetic oligonucleotide
  Sense strand starting at position 3569 of SEQ ID NO: 1879782
agaauuuguugguagacac

SEQ ID NO: 1932517 - RNA, 19 nt, Artificial Sequence
  Description of Artificial Sequence: Synthetic oligonucleotide
  Antisense strand to SEQ ID NO: 1932516
gugucuaccaacaaauucu

SEQ ID NO: 1932518 - RNA, 19 nt, Artificial Sequence
  Description of Artificial Sequence: Synthetic oligonucleotide
  Sense strand starting at position 3970 of SEQ ID NO: 1879782
gguggauuccugggaguca

SEQ ID NO: 1932519 - RNA, 19 nt, Artificial Sequence
  Description of Artificial Sequence: Synthetic oligonucleotide
  Antisense strand to SEQ ID NO: 1932518
ugacucccaggaauccacc

SEQ ID NO: 1932520 - RNA, 19 nt, Artificial Sequence
  Description of Artificial Sequence: Synthetic oligonucleotide
  Sense strand starting at position 174 of SEQ ID NO: 1879783
gggccugagaccugucaga

SEQ ID NO: 1932521 - RNA, 19 nt, Artificial Sequence
  Description of Artificial Sequence: Synthetic oligonucleotide
  Antisense strand to SEQ ID NO: 1932520
ucugacaggucucaggccc

SEQ ID NO: 1932522 - RNA, 19 nt, Artificial Sequence
  Description of Artificial Sequence: Synthetic oligonucleotide
  Sense strand starting at position 324 of SEQ ID NO: 1879783
agacauaacuccuguggaa

SEQ ID NO: 1932523 - RNA, 19 nt, Artificial Sequence
  Description of Artificial Sequence: Synthetic oligonucleotide
  Antisense strand to SEQ ID NO: 1932522
uuccacaggaguuaugucu

SEQ ID NO: 1932524 - RNA, 19 nt, Artificial Sequence
  Description of Artificial Sequence: Synthetic oligonucleotide
  Sense strand starting at position 681 of SEQ ID NO: 1879783
aggcucaucuuggugggaa

SEQ ID NO: 1932525 - RNA, 19 nt, Artificial Sequence
  Description of Artificial Sequence: Synthetic oligonucleotide
  Antisense strand to SEQ ID NO: 1932524
uucccaccaagaugagccu

SEQ ID NO: 1932526 - RNA, 19 nt, Artificial Sequence
  Description of Artificial Sequence: Synthetic oligonucleotide
  Sense strand starting at position 816 of SEQ ID NO: 1879783
ggagguaccaucuggauuc

SEQ ID NO: 1932527 - RNA, 19 nt, Artificial Sequence
  Description of Artificial Sequence: Synthetic oligonucleotide
  Antisense strand to SEQ ID NO: 1932526
gaauccagaugguaccucc

SEQ ID NO: 1932528 - RNA, 19 nt, Artificial Sequence
  Description of Artificial Sequence: Synthetic oligonucleotide
  Sense strand starting at position 828 of SEQ ID NO: 1879783
uggauucucuaggaaacca

SEQ ID NO: 1932529 - RNA, 19 nt, Artificial Sequence
  Description of Artificial Sequence: Synthetic oligonucleotide
  Antisense strand to SEQ ID NO: 1932528
ugguuuccuagagaaucca

SEQ ID NO: 1932530 - RNA, 19 nt, Artificial Sequence
  Description of Artificial Sequence: Synthetic oligonucleotide
  Sense strand starting at position 1427 of SEQ ID NO: 1879783
augguacuuucuguuucua

SEQ ID NO: 1932531 - RNA, 19 nt, Artificial Sequence
  Description of Artificial Sequence: Synthetic oligonucleotide
  Antisense strand to SEQ ID NO: 1932530
uagaaacagaaaguaccau

SEQ ID NO: 1932532 - RNA, 19 nt, Artificial Sequence
  Description of Artificial Sequence: Synthetic oligonucleotide
  Sense strand starting at position 1435 of SEQ ID NO: 1879783
uucuguuucuaugaaugua

SEQ ID NO: 1932533 - RNA, 19 nt, Artificial Sequence
  Description of Artificial Sequence: Synthetic oligonucleotide
  Antisense strand to SEQ ID NO: 1932532
uacauucauagaaacagaa

SEQ ID NO: 1932534 - RNA, 19 nt, Artificial Sequence
  Description of Artificial Sequence: Synthetic oligonucleotide
  Sense strand starting at position 1445 of SEQ ID NO: 1879783
augaauguaugaguggaau

SEQ ID NO: 1932535 - RNA, 19 nt, Artificial Sequence
  Description of Artificial Sequence: Synthetic oligonucleotide
  Antisense strand to SEQ ID NO: 1932534
auuccacucauacauucau

SEQ ID NO: 1932536 - RNA, 19 nt, Artificial Sequence
  Description of Artificial Sequence: Synthetic oligonucleotide
  Sense strand starting at position 1505 of SEQ ID NO: 1879783
acauaaugucaucaagguc

SEQ ID NO: 1932537 - RNA, 19 nt, Artificial Sequence
  Description of Artificial Sequence: Synthetic oligonucleotide
  Antisense strand to SEQ ID NO: 1932536
gaccuugaugacauuaugu

SEQ ID NO: 1932538 - RNA, 19 nt, Artificial Sequence
  Description of Artificial Sequence: Synthetic oligonucleotide
  Sense strand starting at position 1584 of SEQ ID NO: 1879783
uuagguaccucccacauuu

SEQ ID NO: 1932539 - RNA, 19 nt, Artificial Sequence
  Description of Artificial Sequence: Synthetic oligonucleotide
  Antisense strand to SEQ ID NO: 1932538
aaaugugggagguaccuaa

SEQ ID NO: 1932540 - RNA, 19 nt, Artificial Sequence
  Description of Artificial Sequence: Synthetic oligonucleotide
  Sense strand starting at position 1614 of SEQ ID NO: 1879783
uuaggauguuuccaccuuu

SEQ ID NO: 1932541 - RNA, 19 nt, Artificial Sequence
  Description of Artificial Sequence: Synthetic oligonucleotide
  Antisense strand to SEQ ID NO: 1932540
aaagguggaaacauccuaa

SEQ ID NO: 1932542 - RNA, 19 nt, Artificial Sequence
  Description of Artificial Sequence: Synthetic oligonucleotide
  Sense strand starting at position 1657 of SEQ ID NO: 1879783
ugaacauugguguacaauc

SEQ ID NO: 1932543 - RNA, 19 nt, Artificial Sequence
  Description of Artificial Sequence: Synthetic oligonucleotide
  Antisense strand to SEQ ID NO: 1932542
gauuguacaccaauguuca

SEQ ID NO: 1932544 - RNA, 19 nt, Artificial Sequence
  Description of Artificial Sequence: Synthetic oligonucleotide
  Sense strand starting at position 1711 of SEQ ID NO: 1879783
uggaaugauuagcaggagu

SEQ ID NO: 1932545 - RNA, 19 nt, Artificial Sequence
  Description of Artificial Sequence: Synthetic oligonucleotide
  Antisense strand to SEQ ID NO: 1932544
acuccugcuaaucauucca

SEQ ID NO: 1932546 - RNA, 19 nt, Artificial Sequence
  Description of Artificial Sequence: Synthetic oligonucleotide
  Sense strand starting at position 1713 of SEQ ID NO: 1879783
gaaugauuagcaggaguca

SEQ ID NO: 1932547 - RNA, 19 nt, Artificial Sequence
  Description of Artificial Sequence: Synthetic oligonucleotide
  Antisense strand to SEQ ID NO: 1932546
ugacuccugcuaaucauuc

SEQ ID NO: 1932548 - RNA, 19 nt, Artificial Sequence
  Description of Artificial Sequence: Synthetic oligonucleotide
  Sense strand starting at position 2137 of SEQ ID NO: 1879783
uacugauucuguccaucgu

SEQ ID NO: 1932549 - RNA, 19 nt, Artificial Sequence
  Description of Artificial Sequence: Synthetic oligonucleotide
  Antisense strand to SEQ ID NO: 1932548
acgauggacagaaucagua

SEQ ID NO: 1932550 - RNA, 19 nt, Artificial Sequence
  Description of Artificial Sequence: Synthetic oligonucleotide
  Sense strand starting at position 2242 of SEQ ID NO: 1879783
gggaccaaaucucuguuau

SEQ ID NO: 1932551 - RNA, 19 nt, Artificial Sequence
  Description of Artificial Sequence: Synthetic oligonucleotide
  Antisense strand to SEQ ID NO: 1932550
auaacagagauuugguccc

SEQ ID NO: 1932552 - RNA, 19 nt, Artificial Sequence
  Description of Artificial Sequence: Synthetic oligonucleotide
  Sense strand starting at position 2243 of SEQ ID NO: 1879783
ggaccaaaucucuguuauc

SEQ ID NO: 1932553 - RNA, 19 nt, Artificial Sequence
  Description of Artificial Sequence: Synthetic oligonucleotide
  Antisense strand to SEQ ID NO: 1932552
gauaacagagauuuggucc

SEQ ID NO: 1932554 - RNA, 19 nt, Artificial Sequence
  Description of Artificial Sequence: Synthetic oligonucleotide
  Sense strand starting at position 2256 of SEQ ID NO: 1879783
guuaucauguggccugauu

SEQ ID NO: 1932555 - RNA, 19 nt, Artificial Sequence
  Description of Artificial Sequence: Synthetic oligonucleotide
  Antisense strand to SEQ ID NO: 1932554
aaucaggccacaugauaac

SEQ ID NO: 1932556 - RNA, 19 nt, Artificial Sequence
  Description of Artificial Sequence: Synthetic oligonucleotide
  Sense strand starting at position 2508 of SEQ ID NO: 1879783
gggauuagcacauguccca

SEQ ID NO: 1932557 - RNA, 19 nt, Artificial Sequence
  Description of Artificial Sequence: Synthetic oligonucleotide
  Antisense strand to SEQ ID NO: 1932556
ugggacaugugcuaauccc

SEQ ID NO: 1932558 - RNA, 19 nt, Artificial Sequence
  Description of Artificial Sequence: Synthetic oligonucleotide
  Sense strand starting at position 2589 of SEQ ID NO: 1879783
cccagagauuagccugguu

SEQ ID NO: 1932559 - RNA, 19 nt, Artificial Sequence
  Description of Artificial Sequence: Synthetic oligonucleotide
  Antisense strand to SEQ ID NO: 1932558
aaccaggcuaaucucuggg

SEQ ID NO: 1932560 - RNA, 19 nt, Artificial Sequence
  Description of Artificial Sequence: Synthetic oligonucleotide
  Sense strand starting at position 2592 of SEQ ID NO: 1879783
agagauuagccugguugga

SEQ ID NO: 1932561 - RNA, 19 nt, Artificial Sequence
  Description of Artificial Sequence: Synthetic oligonucleotide
  Antisense strand to SEQ ID NO: 1932560
uccaaccaggcuaaucucu

SEQ ID NO: 1932562 - RNA, 19 nt, Artificial Sequence
  Description of Artificial Sequence: Synthetic oligonucleotide
  Sense strand starting at position 2671 of SEQ ID NO: 1879783
gugacaagauccugacacu

SEQ ID NO: 1932563 - RNA, 19 nt, Artificial Sequence
  Description of Artificial Sequence: Synthetic oligonucleotide
  Antisense strand to SEQ ID NO: 1932562
agugucaggaucuugucac

SEQ ID NO: 1932564 - RNA, 19 nt, Artificial Sequence
  Description of Artificial Sequence: Synthetic oligonucleotide
  Sense strand starting at position 2706 of SEQ ID NO: 1879783
gauggcuuguugucauuau

SEQ ID NO: 1932565 - RNA, 19 nt, Artificial Sequence
  Description of Artificial Sequence: Synthetic oligonucleotide
  Antisense strand to SEQ ID NO: 1932564
auaaugacaacaagccauc

SEQ ID NO: 1932566 - RNA, 19 nt, Artificial Sequence
  Description of Artificial Sequence: Synthetic oligonucleotide
  Sense strand starting at position 2710 of SEQ ID NO: 1879783
gcuuguugucauuauuaca

SEQ ID NO: 1932567 - RNA, 19 nt, Artificial Sequence
  Description of Artificial Sequence: Synthetic oligonucleotide
  Antisense strand to SEQ ID NO: 1932566
uguaauaaugacaacaagc

SEQ ID NO: 1932568 - RNA, 19 nt, Artificial Sequence
  Description of Artificial Sequence: Synthetic oligonucleotide
  Sense strand starting at position 2790 of SEQ ID NO: 1879783
auuggaaccuggucuguau

SEQ ID NO: 1932569 - RNA, 19 nt, Artificial Sequence
  Description of Artificial Sequence: Synthetic oligonucleotide
  Antisense strand to SEQ ID NO: 1932568
auacagaccagguuccaau

SEQ ID NO: 1932570 - RNA, 19 nt, Artificial Sequence
  Description of Artificial Sequence: Synthetic oligonucleotide
  Sense strand starting at position 2802 of SEQ ID NO: 1879783
ucuguauggcuccaauucu

SEQ ID NO: 1932571 - RNA, 19 nt, Artificial Sequence
  Description of Artificial Sequence: Synthetic oligonucleotide
  Antisense strand to SEQ ID NO: 1932570
agaauuggagccauacaga

SEQ ID NO: 1932572 - RNA, 19 nt, Artificial Sequence
  Description of Artificial Sequence: Synthetic oligonucleotide
  Sense strand starting at position 3123 of SEQ ID NO: 1879783
ggcuaccacucuugaauaa

SEQ ID NO: 1932573 - RNA, 19 nt, Artificial Sequence
  Description of Artificial Sequence: Synthetic oligonucleotide
  Antisense strand to SEQ ID NO: 1932572
uuauucaagagugguagcc

SEQ ID NO: 1932574 - RNA, 19 nt, Artificial Sequence
  Description of Artificial Sequence: Synthetic oligonucleotide
  Sense strand starting at position 3161 of SEQ ID NO: 1879783
cauacauucucgcaggaua

SEQ ID NO: 1932575 - RNA, 19 nt, Artificial Sequence
  Description of Artificial Sequence: Synthetic oligonucleotide
  Antisense strand to SEQ ID NO: 1932574
uauccugcgagaauguaug

SEQ ID NO: 1932576 - RNA, 19 nt, Artificial Sequence
  Description of Artificial Sequence: Synthetic oligonucleotide
  Sense strand starting at position 3164 of SEQ ID NO: 1879783
acauucucgcaggauaaau

SEQ ID NO: 1932577 - RNA, 19 nt, Artificial Sequence
  Description of Artificial Sequence: Synthetic oligonucleotide
  Antisense strand to SEQ ID NO: 1932576
auuuauccugcgagaaugu

SEQ ID NO: 1932578 - RNA, 19 nt, Artificial Sequence
  Description of Artificial Sequence: Synthetic oligonucleotide
  Sense strand starting at position 3242 of SEQ ID NO: 1879783
ucggauguuugccuuguua

SEQ ID NO: 1932579 - RNA, 19 nt, Artificial Sequence
  Description of Artificial Sequence: Synthetic oligonucleotide
  Antisense strand to SEQ ID NO: 1932578
uaacaaggcaaacauccga

SEQ ID NO: 1932580 - RNA, 19 nt, Artificial Sequence
  Description of Artificial Sequence: Synthetic oligonucleotide
  Sense strand starting at position 3244 of SEQ ID NO: 1879783
ggauguuugccuuguuacu

SEQ ID NO: 1932581 - RNA, 19 nt, Artificial Sequence
  Description of Artificial Sequence: Synthetic oligonucleotide
  Antisense strand to SEQ ID NO: 1932580
aguaacaaggcaaacaucc

SEQ ID NO: 1932582 - RNA, 19 nt, Artificial Sequence
  Description of Artificial Sequence: Synthetic oligonucleotide
  Sense strand starting at position 3349 of SEQ ID NO: 1879783
acaguaugagugugcuaca

SEQ ID NO: 1932583 - RNA, 19 nt, Artificial Sequence
  Description of Artificial Sequence: Synthetic oligonucleotide
  Antisense strand to SEQ ID NO: 1932582
uguagcacacucauacugu

SEQ ID NO: 1932584 - RNA, 19 nt, Artificial Sequence
  Description of Artificial Sequence: Synthetic oligonucleotide
  Sense strand starting at position 3354 of SEQ ID NO: 1879783
augagugugcuacacaaca

SEQ ID NO: 1932585 - RNA, 19 nt, Artificial Sequence
  Description of Artificial Sequence: Synthetic oligonucleotide
  Antisense strand to SEQ ID NO: 1932584
uguuguguagcacacucau

SEQ ID NO: 1932586 - RNA, 19 nt, Artificial Sequence
  Description of Artificial Sequence: Synthetic oligonucleotide
  Sense strand starting at position 3597 of SEQ ID NO: 1879783
gucaccuucugccuagaga

SEQ ID NO: 1932587 - RNA, 19 nt, Artificial Sequence
  Description of Artificial Sequence: Synthetic oligonucleotide
  Antisense strand to SEQ ID NO: 1932586
ucucuaggcagaaggugac

SEQ ID NO: 1932588 - RNA, 19 nt, Artificial Sequence
  Description of Artificial Sequence: Synthetic oligonucleotide
  Sense strand starting at position 3598 of SEQ ID NO: 1879783
ucaccuucugccuagagaa

SEQ ID NO: 1932589 - RNA, 19 nt, Artificial Sequence
  Description of Artificial Sequence: Synthetic oligonucleotide
  Antisense strand to SEQ ID NO: 1932588
uucucuaggcagaagguga

SEQ ID NO: 1932590 - RNA, 19 nt, Artificial Sequence
  Description of Artificial Sequence: Synthetic oligonucleotide
  Sense strand starting at position 3897 of SEQ ID NO: 1879783
gcaggucauucugcagaga

SEQ ID NO: 1932591 - RNA, 19 nt, Artificial Sequence
  Description of Artificial Sequence: Synthetic oligonucleotide
  Antisense strand to SEQ ID NO: 1932590
ucucugcagaaugaccugc

SEQ ID NO: 1932592 - RNA, 19 nt, Artificial Sequence
  Description of Artificial Sequence: Synthetic oligonucleotide
  Sense strand starting at position 3900 of SEQ ID NO: 1879783
ggucauucugcagagacaa

SEQ ID NO: 1932593 - RNA, 19 nt, Artificial Sequence
  Description of Artificial Sequence: Synthetic oligonucleotide
  Antisense strand to SEQ ID NO: 1932592
uugucucugcagaaugacc

SEQ ID NO: 1932594 - RNA, 19 nt, Artificial Sequence
  Description of Artificial Sequence: Synthetic oligonucleotide
  Sense strand starting at position 3968 of SEQ ID NO: 1879783
ggcauccaggcuugagauu

SEQ ID NO: 1932595 - RNA, 19 nt, Artificial Sequence
  Description of Artificial Sequence: Synthetic oligonucleotide
  Antisense strand to SEQ ID NO: 1932594
aaucucaagccuggaugcc

SEQ ID NO: 1932596 - RNA, 19 nt, Artificial Sequence
  Description of Artificial Sequence: Synthetic oligonucleotide
  Sense strand starting at position 3977 of SEQ ID NO: 1879783
gcuugagauugucccagga

SEQ ID NO: 1932597 - RNA, 19 nt, Artificial Sequence
  Description of Artificial Sequence: Synthetic oligonucleotide
  Antisense strand to SEQ ID NO: 1932596
uccugggacaaucucaagc

SEQ ID NO: 1932598 - RNA, 19 nt, Artificial Sequence
  Description of Artificial Sequence: Synthetic oligonucleotide
  Sense strand starting at position 3979 of SEQ ID NO: 1879783
uugagauugucccaggaaa

SEQ ID NO: 1932599 - RNA, 19 nt, Artificial Sequence
  Description of Artificial Sequence: Synthetic oligonucleotide
  Antisense strand to SEQ ID NO: 1932598
uuuccugggacaaucucaa

SEQ ID NO: 1932600 - RNA, 19 nt, Artificial Sequence
  Description of Artificial Sequence: Synthetic oligonucleotide
  Sense strand starting at position 419 of SEQ ID NO: 1879784
gcguguccugauccgaagu

SEQ ID NO: 1932601 - RNA, 19 nt, Artificial Sequence
  Description of Artificial Sequence: Synthetic oligonucleotide
  Antisense strand to SEQ ID NO: 1932600
acuucggaucaggacacgc

SEQ ID NO: 1932602 - RNA, 19 nt, Artificial Sequence
  Description of Artificial Sequence: Synthetic oligonucleotide
  Sense strand starting at position 554 of SEQ ID NO: 1879784
cacucacugcugcagagau

SEQ ID NO: 1932603 - RNA, 19 nt, Artificial Sequence
  Description of Artificial Sequence: Synthetic oligonucleotide
  Antisense strand to SEQ ID NO: 1932602
aucucugcagcagugagug

SEQ ID NO: 1932604 - RNA, 19 nt, Artificial Sequence
  Description of Artificial Sequence: Synthetic oligonucleotide
  Sense strand starting at position 585 of SEQ ID NO: 1879784
aguagcacugcucggagaa

SEQ ID NO: 1932605 - RNA, 19 nt, Artificial Sequence
  Description of Artificial Sequence: Synthetic oligonucleotide
  Antisense strand to SEQ ID NO: 1932604
uucuccgagcagugcuacu

SEQ ID NO: 1932606 - RNA, 19 nt, Artificial Sequence
  Description of Artificial Sequence: Synthetic oligonucleotide
  Sense strand starting at position 586 of SEQ ID NO: 1879784
guagcacugcucggagaag

SEQ ID NO: 1932607 - RNA, 19 nt, Artificial Sequence
  Description of Artificial Sequence: Synthetic oligonucleotide
  Antisense strand to SEQ ID NO: 1932606
cuucuccgagcagugcuac

SEQ ID NO: 1932608 - RNA, 19 nt, Artificial Sequence
  Description of Artificial Sequence: Synthetic oligonucleotide
  Sense strand starting at position 597 of SEQ ID NO: 1879784
cggagaaggugaucuuguu

SEQ ID NO: 1932609 - RNA, 19 nt, Artificial Sequence
  Description of Artificial Sequence: Synthetic oligonucleotide
  Antisense strand to SEQ ID NO: 1932608
aacaagaucaccuucuccg

SEQ ID NO: 1932610 - RNA, 19 nt, Artificial Sequence
  Description of Artificial Sequence: Synthetic oligonucleotide
  Sense strand starting at position 603 of SEQ ID NO: 1879784
aggugaucuuguugaccgu

SEQ ID NO: 1932611 - RNA, 19 nt, Artificial Sequence
  Description of Artificial Sequence: Synthetic oligonucleotide
  Antisense strand to SEQ ID NO: 1932610
acggucaacaagaucaccu

SEQ ID NO: 1932612 - RNA, 19 nt, Artificial Sequence
  Description of Artificial Sequence: Synthetic oligonucleotide
  Sense strand starting at position 820 of SEQ ID NO: 1879784
cggcauuggcgauggugau

SEQ ID NO: 1932613 - RNA, 19 nt, Artificial Sequence
  Description of Artificial Sequence: Synthetic oligonucleotide
  Antisense strand to SEQ ID NO: 1932612
aucaccaucgccaaugccg

SEQ ID NO: 1932614 - RNA, 19 nt, Artificial Sequence
  Description of Artificial Sequence: Synthetic oligonucleotide
  Sense strand starting at position 1168 of SEQ ID NO: 1879784
ucaggauccuaggcacaaa

SEQ ID NO: 1932615 - RNA, 19 nt, Artificial Sequence
  Description of Artificial Sequence: Synthetic oligonucleotide
  Antisense strand to SEQ ID NO: 1932614
uuugugccuaggauccuga

SEQ ID NO: 1932616 - RNA, 19 nt, Artificial Sequence
  Description of Artificial Sequence: Synthetic oligonucleotide
  Sense strand starting at position 1273 of SEQ ID NO: 1879784
caggcuguuagucguguua

SEQ ID NO: 1932617 - RNA, 19 nt, Artificial Sequence
  Description of Artificial Sequence: Synthetic oligonucleotide
  Antisense strand to SEQ ID NO: 1932616
uaacacgacuaacagccug

SEQ ID NO: 1932618 - RNA, 19 nt, Artificial Sequence
  Description of Artificial Sequence: Synthetic oligonucleotide
  Sense strand starting at position 1275 of SEQ ID NO: 1879784
ggcuguuagucguguuaau

SEQ ID NO: 1932619 - RNA, 19 nt, Artificial Sequence
  Description of Artificial Sequence: Synthetic oligonucleotide
  Antisense strand to SEQ ID NO: 1932618
auuaacacgacuaacagcc

SEQ ID NO: 1932620 - RNA, 19 nt, Artificial Sequence
  Description of Artificial Sequence: Synthetic oligonucleotide
  Sense strand starting at position 1276 of SEQ ID NO: 1879784
gcuguuagucguguuaaug

SEQ ID NO: 1932621 - RNA, 19 nt, Artificial Sequence
  Description of Artificial Sequence: Synthetic oligonucleotide
  Antisense strand to SEQ ID NO: 1932620
cauuaacacgacuaacagc

SEQ ID NO: 1932622 - RNA, 19 nt, Artificial Sequence
  Description of Artificial Sequence: Synthetic oligonucleotide
  Sense strand starting at position 1279 of SEQ ID NO: 1879784
guuagucguguuaauggca

SEQ ID NO: 1932623 - RNA, 19 nt, Artificial Sequence
  Description of Artificial Sequence: Synthetic oligonucleotide
  Antisense strand to SEQ ID NO: 1932622
ugccauuaacacgacuaac

SEQ ID NO: 1932624 - RNA, 19 nt, Artificial Sequence
  Description of Artificial Sequence: Synthetic oligonucleotide
  Sense strand starting at position 1286 of SEQ ID NO: 1879784
guguuaauggcaggaagca

SEQ ID NO: 1932625 - RNA, 19 nt, Artificial Sequence
  Description of Artificial Sequence: Synthetic oligonucleotide
  Antisense strand to SEQ ID NO: 1932624
ugcuuccugccauuaacac

SEQ ID NO: 1932626 - RNA, 19 nt, Artificial Sequence
  Description of Artificial Sequence: Synthetic oligonucleotide
  Sense strand starting at position 2065 of SEQ ID NO: 1879784
caucgucauugcucauguu

SEQ ID NO: 1932627 - RNA, 19 nt, Artificial Sequence
  Description of Artificial Sequence: Synthetic oligonucleotide
  Antisense strand to SEQ ID NO: 1932626
aacaugagcaaugacgaug

SEQ ID NO: 1932628 - RNA, 19 nt, Artificial Sequence
  Description of Artificial Sequence: Synthetic oligonucleotide
  Sense strand starting at position 2451 of SEQ ID NO: 1879784
cccagaaagugaugucuuu

SEQ ID NO: 1932629 - RNA, 19 nt, Artificial Sequence
  Description of Artificial Sequence: Synthetic oligonucleotide
  Antisense strand to SEQ ID NO: 1932628
aaagacaucacuuucuggg

SEQ ID NO: 1932630 - RNA, 19 nt, Artificial Sequence
  Description of Artificial Sequence: Synthetic oligonucleotide
  Sense strand starting at position 2460 of SEQ ID NO: 1879784
ugaugucuuucugcaggaa

SEQ ID NO: 1932631 - RNA, 19 nt, Artificial Sequence
  Description of Artificial Sequence: Synthetic oligonucleotide
  Antisense strand to SEQ ID NO: 1932630
uuccugcagaaagacauca

SEQ ID NO: 1932632 - RNA, 19 nt, Artificial Sequence
  Description of Artificial Sequence: Synthetic oligonucleotide
  Sense strand starting at position 2461 of SEQ ID NO: 1879784
gaugucuuucugcaggaag

SEQ ID NO: 1932633 - RNA, 19 nt, Artificial Sequence
  Description of Artificial Sequence: Synthetic oligonucleotide
  Antisense strand to SEQ ID NO: 1932632
cuuccugcagaaagacauc

SEQ ID NO: 1932634 - RNA, 19 nt, Artificial Sequence
  Description of Artificial Sequence: Synthetic oligonucleotide
  Sense strand starting at position 2463 of SEQ ID NO: 1879784
ugucuuucugcaggaagag

SEQ ID NO: 1932635 - RNA, 19 nt, Artificial Sequence
  Description of Artificial Sequence: Synthetic oligonucleotide
  Antisense strand to SEQ ID NO: 1932634
cucuuccugcagaaagaca

SEQ ID NO: 1932636 - RNA, 19 nt, Artificial Sequence
  Description of Artificial Sequence: Synthetic oligonucleotide
  Sense strand starting at position 2539 of SEQ ID NO: 1879784
ccauguugagcgugacagu

SEQ ID NO: 1932637 - RNA, 19 nt, Artificial Sequence
  Description of Artificial Sequence: Synthetic oligonucleotide
  Antisense strand to SEQ ID NO: 1932636
acugucacgcucaacaugg

SEQ ID NO: 1932638 - RNA, 19 nt, Artificial Sequence
  Description of Artificial Sequence: Synthetic oligonucleotide
  Sense strand starting at position 2557 of SEQ ID NO: 1879784
ugacgauguugagggacau

SEQ ID NO: 1932639 - RNA, 19 nt, Artificial Sequence
  Description of Artificial Sequence: Synthetic oligonucleotide
  Antisense strand to SEQ ID NO: 1932638
augucccucaacaucguca

SEQ ID NO: 1932640 - RNA, 19 nt, Artificial Sequence
  Description of Artificial Sequence: Synthetic oligonucleotide
  Sense strand starting at position 2584 of SEQ ID NO: 1879784
cgguuaugcugcugaagga

SEQ ID NO: 1932641 - RNA, 19 nt, Artificial Sequence
  Description of Artificial Sequence: Synthetic oligonucleotide
  Antisense strand to SEQ ID NO: 1932640
uccuucagcagcauaaccg

SEQ ID NO: 1932642 - RNA, 19 nt, Artificial Sequence
  Description of Artificial Sequence: Synthetic oligonucleotide
  Sense strand starting at position 2737 of SEQ ID NO: 1879784
ggcguuugugcuuccggau

SEQ ID NO: 1932643 - RNA, 19 nt, Artificial Sequence
  Description of Artificial Sequence: Synthetic oligonucleotide
  Antisense strand to SEQ ID NO: 1932642
auccggaagcacaaacgcc

SEQ ID NO: 1932644 - RNA, 19 nt, Artificial Sequence
  Description of Artificial Sequence: Synthetic oligonucleotide
  Sense strand starting at position 2743 of SEQ ID NO: 1879784
ugugcuuccggaugagucu

SEQ ID NO: 1932645 - RNA, 19 nt, Artificial Sequence
  Description of Artificial Sequence: Synthetic oligonucleotide
  Antisense strand to SEQ ID NO: 1932644
agacucauccggaagcaca

SEQ ID NO: 1932646 - RNA, 19 nt, Artificial Sequence
  Description of Artificial Sequence: Synthetic oligonucleotide
  Sense strand starting at position 2749 of SEQ ID NO: 1879784
uccggaugagucuggauga

SEQ ID NO: 1932647 - RNA, 19 nt, Artificial Sequence
  Description of Artificial Sequence: Synthetic oligonucleotide
  Antisense strand to SEQ ID NO: 1932646
ucauccagacucauccgga

SEQ ID NO: 1932648 - RNA, 19 nt, Artificial Sequence
  Description of Artificial Sequence: Synthetic oligonucleotide
  Sense strand starting at position 2861 of SEQ ID NO: 1879784
cccaauacugagugggaau

SEQ ID NO: 1932649 - RNA, 19 nt, Artificial Sequence
  Description of Artificial Sequence: Synthetic oligonucleotide
  Antisense strand to SEQ ID NO: 1932648
auucccacucaguauuggg

SEQ ID NO: 1932650 - RNA, 19 nt, Artificial Sequence
  Description of Artificial Sequence: Synthetic oligonucleotide
  Sense strand starting at position 2889 of SEQ ID NO: 1879784
aggccaggcuuguuccaaa

SEQ ID NO: 1932651 - RNA, 19 nt, Artificial Sequence
  Description of Artificial Sequence: Synthetic oligonucleotide
  Antisense strand to SEQ ID NO: 1932650
uuuggaacaagccuggccu

SEQ ID NO: 1932652 - RNA, 19 nt, Artificial Sequence
  Description of Artificial Sequence: Synthetic oligonucleotide
  Sense strand starting at position 2892 of SEQ ID NO: 1879784
ccaggcuuguuccaaagca

SEQ ID NO: 1932653 - RNA, 19 nt, Artificial Sequence
  Description of Artificial Sequence: Synthetic oligonucleotide
  Antisense strand to SEQ ID NO: 1932652
ugcuuuggaacaagccugg

SEQ ID NO: 1932654 - RNA, 19 nt, Artificial Sequence
  Description of Artificial Sequence: Synthetic oligonucleotide
  Sense strand starting at position 2944 of SEQ ID NO: 1879784
gcacacgugauaugcauau

SEQ ID NO: 1932655 - RNA, 19 nt, Artificial Sequence
  Description of Artificial Sequence: Synthetic oligonucleotide
  Antisense strand to SEQ ID NO: 1932654
auaugcauaucacgugugc

SEQ ID NO: 1932656 - RNA, 19 nt, Artificial Sequence
  Description of Artificial Sequence: Synthetic oligonucleotide
  Sense strand starting at position 2946 of SEQ ID NO: 1879784
acacgugauaugcauauga

SEQ ID NO: 1932657 - RNA, 19 nt, Artificial Sequence
  Description of Artificial Sequence: Synthetic oligonucleotide
  Antisense strand to SEQ ID NO: 1932656
ucauaugcauaucacgugu

SEQ ID NO: 1932658 - RNA, 19 nt, Artificial Sequence
  Description of Artificial Sequence: Synthetic oligonucleotide
  Sense strand starting at position 2948 of SEQ ID NO: 1879784
acgugauaugcauaugagc

SEQ ID NO: 1932659 - RNA, 19 nt, Artificial Sequence
  Description of Artificial Sequence: Synthetic oligonucleotide
  Antisense strand to SEQ ID NO: 1932658
gcucauaugcauaucacgu

SEQ ID NO: 1932660 - RNA, 19 nt, Artificial Sequence
  Description of Artificial Sequence: Synthetic oligonucleotide
  Sense strand starting at position 2950 of SEQ ID NO: 1879784
gugauaugcauaugagcac

SEQ ID NO: 1932661 - RNA, 19 nt, Artificial Sequence
  Description of Artificial Sequence: Synthetic oligonucleotide
  Antisense strand to SEQ ID NO: 1932660
gugcucauaugcauaucac

SEQ ID NO: 1932662 - RNA, 19 nt, Artificial Sequence
  Description of Artificial Sequence: Synthetic oligonucleotide
  Sense strand starting at position 3533 of SEQ ID NO: 1879784
acacgcgugcauugugaaa

SEQ ID NO: 1932663 - RNA, 19 nt, Artificial Sequence
  Description of Artificial Sequence: Synthetic oligonucleotide
  Antisense strand to SEQ ID NO: 1932662
uuucacaaugcacgcgugu

SEQ ID NO: 1932664 - RNA, 19 nt, Artificial Sequence
  Description of Artificial Sequence: Synthetic oligonucleotide
  Sense strand starting at position 3655 of SEQ ID NO: 1879784
acacauccgcaaugugaaa

SEQ ID NO: 1932665 - RNA, 19 nt, Artificial Sequence
  Description of Artificial Sequence: Synthetic oligonucleotide
  Antisense strand to SEQ ID NO: 1932664
uuucacauugcggaugugu

SEQ ID NO: 1932666 - RNA, 19 nt, Artificial Sequence
  Description of Artificial Sequence: Synthetic oligonucleotide
  Sense strand starting at position 3854 of SEQ ID NO: 1879784
acacacgugcaaugugaaa

SEQ ID NO: 1932667 - RNA, 19 nt, Artificial Sequence
  Description of Artificial Sequence: Synthetic oligonucleotide
  Antisense strand to SEQ ID NO: 1932666
uuucacauugcacgugugu

SEQ ID NO: 1932668 - RNA, 19 nt, Artificial Sequence
  Description of Artificial Sequence: Synthetic oligonucleotide
  Sense strand starting at position 3892 of SEQ ID NO: 1879784
gcacaucauguacagacau

SEQ ID NO: 1932669 - RNA, 19 nt, Artificial Sequence
  Description of Artificial Sequence: Synthetic oligonucleotide
  Antisense strand to SEQ ID NO: 1932668
augucuguacaugaugugc

SEQ ID NO: 1932670 - RNA, 19 nt, Artificial Sequence
  Description of Artificial Sequence: Synthetic oligonucleotide
  Sense strand starting at position 269 of SEQ ID NO: 1879793
ucauuaucuuuaugaggug

SEQ ID NO: 1932671 - RNA, 19 nt, Artificial Sequence
  Description of Artificial Sequence: Synthetic oligonucleotide
  Antisense strand to SEQ ID NO: 1932670
caccucauaaagauaauga

SEQ ID NO: 1932672 - RNA, 19 nt, Artificial Sequence
  Description of Artificial Sequence: Synthetic oligonucleotide
  Sense strand starting at position 270 of SEQ ID NO: 1879793
cauuaucuuuaugagguga

SEQ ID NO: 1932673 - RNA, 19 nt, Artificial Sequence
  Description of Artificial Sequence: Synthetic oligonucleotide
  Antisense strand to SEQ ID NO: 1932672
ucaccucauaaagauaaug

SEQ ID NO: 1932674 - RNA, 19 nt, Artificial Sequence
  Description of Artificial Sequence: Synthetic oligonucleotide
  Sense strand starting at position 272 of SEQ ID NO: 1879793
uuaucuuuaugaggugaau

SEQ ID NO: 1932675 - RNA, 19 nt, Artificial Sequence
  Description of Artificial Sequence: Synthetic oligonucleotide
  Antisense strand to SEQ ID NO: 1932674
auucaccucauaaagauaa

SEQ ID NO: 1932676 - RNA, 19 nt, Artificial Sequence
  Description of Artificial Sequence: Synthetic oligonucleotide
  Sense strand starting at position 286 of SEQ ID NO: 1879793
ugaauuuacugguaggaca

SEQ ID NO: 1932677 - RNA, 19 nt, Artificial Sequence
  Description of Artificial Sequence: Synthetic oligonucleotide
  Antisense strand to SEQ ID NO: 1932676
uguccuaccaguaaauuca

SEQ ID NO: 1932678 - RNA, 19 nt, Artificial Sequence
  Description of Artificial Sequence: Synthetic oligonucleotide
  Sense strand starting at position 308 of SEQ ID NO: 1879793
aggaauuaauagccucauu

SEQ ID NO: 1932679 - RNA, 19 nt, Artificial Sequence
  Description of Artificial Sequence: Synthetic oligonucleotide
  Antisense strand to SEQ ID NO: 1932678
aaugaggcuauuaauuccu

SEQ ID NO: 1932680 - RNA, 19 nt, Artificial Sequence
  Description of Artificial Sequence: Synthetic oligonucleotide
  Sense strand starting at position 549 of SEQ ID NO: 1879793
ucuucuuguccagaacagu

SEQ ID NO: 1932681 - RNA, 19 nt, Artificial Sequence
  Description of Artificial Sequence: Synthetic oligonucleotide
  Antisense strand to SEQ ID NO: 1932680
acuguucuggacaagaaga

SEQ ID NO: 1932682 - RNA, 19 nt, Artificial Sequence
  Description of Artificial Sequence: Synthetic oligonucleotide
  Sense strand starting at position 552 of SEQ ID NO: 1879793
ucuuguccagaacaguauu

SEQ ID NO: 1932683 - RNA, 19 nt, Artificial Sequence
  Description of Artificial Sequence: Synthetic oligonucleotide
  Antisense strand to SEQ ID NO: 1932682
aauacuguucuggacaaga

SEQ ID NO: 1932684 - RNA, 19 nt, Artificial Sequence
  Description of Artificial Sequence: Synthetic oligonucleotide
  Sense strand starting at position 912 of SEQ ID NO: 1879793
uuucccugugccugucaaa

SEQ ID NO: 1932685 - RNA, 19 nt, Artificial Sequence
  Description of Artificial Sequence: Synthetic oligonucleotide
  Antisense strand to SEQ ID NO: 1932684
uuugacaggcacagggaaa

SEQ ID NO: 1932686 - RNA, 19 nt, Artificial Sequence
  Description of Artificial Sequence: Synthetic oligonucleotide
  Sense strand starting at position 919 of SEQ ID NO: 1879793
gugccugucaaaugguguu

SEQ ID NO: 1932687 - RNA, 19 nt, Artificial Sequence
  Description of Artificial Sequence: Synthetic oligonucleotide
  Antisense strand to SEQ ID NO: 1932686
aacaccauuugacaggcac

SEQ ID NO: 1932688 - RNA, 19 nt, Artificial Sequence
  Description of Artificial Sequence: Synthetic oligonucleotide
  Sense strand starting at position 1427 of SEQ ID NO: 1879793
ccgagagacuuggucucaa

SEQ ID NO: 1932689 - RNA, 19 nt, Artificial Sequence
  Description of Artificial Sequence: Synthetic oligonucleotide
  Antisense strand to SEQ ID NO: 1932688
uugagaccaagucucucgg

SEQ ID NO: 1932690 - RNA, 19 nt, Artificial Sequence
  Description of Artificial Sequence: Synthetic oligonucleotide
  Sense strand starting at position 2000 of SEQ ID NO: 1879793
auggucuuuagcugacaga

SEQ ID NO: 1932691 - RNA, 19 nt, Artificial Sequence
  Description of Artificial Sequence: Synthetic oligonucleotide
  Antisense strand to SEQ ID NO: 1932690
ucugucagcuaaagaccau

SEQ ID NO: 1932692 - RNA, 19 nt, Artificial Sequence
  Description of Artificial Sequence: Synthetic oligonucleotide
  Sense strand starting at position 2001 of SEQ ID NO: 1879793
uggucuuuagcugacagaa

SEQ ID NO: 1932693 - RNA, 19 nt, Artificial Sequence
  Description of Artificial Sequence: Synthetic oligonucleotide
  Antisense strand to SEQ ID NO: 1932692
uucugucagcuaaagacca

SEQ ID NO: 1932694 - RNA, 19 nt, Artificial Sequence
  Description of Artificial Sequence: Synthetic oligonucleotide
  Sense strand starting at position 2003 of SEQ ID NO: 1879793
gucuuuagcugacagaaga

SEQ ID NO: 1932695 - RNA, 19 nt, Artificial Sequence
  Description of Artificial Sequence: Synthetic oligonucleotide
  Antisense strand to SEQ ID NO: 1932694
ucuucugucagcuaaagac

SEQ ID NO: 1932696 - RNA, 19 nt, Artificial Sequence
  Description of Artificial Sequence: Synthetic oligonucleotide
  Sense strand starting at position 2780 of SEQ ID NO: 1879793
aguguuuauucccacaaag

SEQ ID NO: 1932697 - RNA, 19 nt, Artificial Sequence
  Description of Artificial Sequence: Synthetic oligonucleotide
  Antisense strand to SEQ ID NO: 1932696
cuuugugggaauaaacacu

SEQ ID NO: 1932698 - RNA, 19 nt, Artificial Sequence
  Description of Artificial Sequence: Synthetic oligonucleotide
  Sense strand starting at position 2791 of SEQ ID NO: 1879793
ccacaaagauguccuggaa

SEQ ID NO: 1932699 - RNA, 19 nt, Artificial Sequence
  Description of Artificial Sequence: Synthetic oligonucleotide
  Antisense strand to SEQ ID NO: 1932698
uuccaggacaucuuugugg

SEQ ID NO: 1932700 - RNA, 19 nt, Artificial Sequence
  Description of Artificial Sequence: Synthetic oligonucleotide
  Sense strand starting at position 2942 of SEQ ID NO: 1879793
cccggauuguccuggaaag

SEQ ID NO: 1932701 - RNA, 19 nt, Artificial Sequence
  Description of Artificial Sequence: Synthetic oligonucleotide
  Antisense strand to SEQ ID NO: 1932700
cuuuccaggacaauccggg

SEQ ID NO: 1932702 - RNA, 19 nt, Artificial Sequence
  Description of Artificial Sequence: Synthetic oligonucleotide
  Sense strand starting at position 2943 of SEQ ID NO: 1879793
ccggauuguccuggaaaga

SEQ ID NO: 1932703 - RNA, 19 nt, Artificial Sequence
  Description of Artificial Sequence: Synthetic oligonucleotide
  Antisense strand to SEQ ID NO: 1932702
ucuuuccaggacaauccgg

SEQ ID NO: 1932704 - RNA, 19 nt, Artificial Sequence
  Description of Artificial Sequence: Synthetic oligonucleotide
  Sense strand starting at position 2961 of SEQ ID NO: 1879793
aggagaauugguuggguug

SEQ ID NO: 1932705 - RNA, 19 nt, Artificial Sequence
  Description of Artificial Sequence: Synthetic oligonucleotide
  Antisense strand to SEQ ID NO: 1932704
caacccaaccaauucuccu

SEQ ID NO: 1932706 - RNA, 19 nt, Artificial Sequence
  Description of Artificial Sequence: Synthetic oligonucleotide
  Sense strand starting at position 2963 of SEQ ID NO: 1879793
gagaauugguuggguugca

SEQ ID NO: 1932707 - RNA, 19 nt, Artificial Sequence
  Description of Artificial Sequence: Synthetic oligonucleotide
  Antisense strand to SEQ ID NO: 1932706
ugcaacccaaccaauucuc

SEQ ID NO: 1932708 - RNA, 19 nt, Artificial Sequence
  Description of Artificial Sequence: Synthetic oligonucleotide
  Sense strand starting at position 2982 of SEQ ID NO: 1879793
uccuaugaggugcaucaau

SEQ ID NO: 1932709 - RNA, 19 nt, Artificial Sequence
  Description of Artificial Sequence: Synthetic oligonucleotide
  Antisense strand to SEQ ID NO: 1932708
auugaugcaccucauagga

SEQ ID NO: 1932710 - RNA, 19 nt, Artificial Sequence
  Description of Artificial Sequence: Synthetic oligonucleotide
  Sense strand starting at position 2993 of SEQ ID NO: 1879793
gcaucaaucaccuggguga

SEQ ID NO: 1932711 - RNA, 19 nt, Artificial Sequence
  Description of Artificial Sequence: Synthetic oligonucleotide
  Antisense strand to SEQ ID NO: 1932710
ucacccaggugauugaugc

SEQ ID NO: 1932712 - RNA, 19 nt, Artificial Sequence
  Description of Artificial Sequence: Synthetic oligonucleotide
  Sense strand starting at position 2995 of SEQ ID NO: 1879793
aucaaucaccugggugaca

SEQ ID NO: 1932713 - RNA, 19 nt, Artificial Sequence
  Description of Artificial Sequence: Synthetic oligonucleotide
  Antisense strand to SEQ ID NO: 1932712
ugucacccaggugauugau

SEQ ID NO: 1932714 - RNA, 19 nt, Artificial Sequence
  Description of Artificial Sequence: Synthetic oligonucleotide
  Sense strand starting at position 3054 of SEQ ID NO: 1879793
aaucuagaguuauaggcaa

SEQ ID NO: 1932715 - RNA, 19 nt, Artificial Sequence
  Description of Artificial Sequence: Synthetic oligonucleotide
  Antisense strand to SEQ ID NO: 1932714
uugccuauaacucuagauu

SEQ ID NO: 1932716 - RNA, 19 nt, Artificial Sequence
  Description of Artificial Sequence: Synthetic oligonucleotide
  Sense strand starting at position 3056 of SEQ ID NO: 1879793
ucuagaguuauaggcaaag

SEQ ID NO: 1932717 - RNA, 19 nt, Artificial Sequence
  Description of Artificial Sequence: Synthetic oligonucleotide
  Antisense strand to SEQ ID NO: 1932716
cuuugccuauaacucuaga

SEQ ID NO: 1932718 - RNA, 19 nt, Artificial Sequence
  Description of Artificial Sequence: Synthetic oligonucleotide
  Sense strand starting at position 3104 of SEQ ID NO: 1879793
gauaucagguaacagauau

SEQ ID NO: 1932719 - RNA, 19 nt, Artificial Sequence
  Description of Artificial Sequence: Synthetic oligonucleotide
  Antisense strand to SEQ ID NO: 1932718
auaucuguuaccugauauc

SEQ ID NO: 1932720 - RNA, 19 nt, Artificial Sequence
  Description of Artificial Sequence: Synthetic oligonucleotide
  Sense strand starting at position 3137 of SEQ ID NO: 1879793
aagcucuaugcaugaaguu

SEQ ID NO: 1932721 - RNA, 19 nt, Artificial Sequence
  Description of Artificial Sequence: Synthetic oligonucleotide
  Antisense strand to SEQ ID NO: 1932720
aacuucaugcauagagcuu

SEQ ID NO: 1932722 - RNA, 19 nt, Artificial Sequence
  Description of Artificial Sequence: Synthetic oligonucleotide
  Sense strand starting at position 3138 of SEQ ID NO: 1879793
agcucuaugcaugaaguua

SEQ ID NO: 1932723 - RNA, 19 nt, Artificial Sequence
  Description of Artificial Sequence: Synthetic oligonucleotide
  Antisense strand to SEQ ID NO: 1932722
uaacuucaugcauagagcu

SEQ ID NO: 1932724 - RNA, 19 nt, Artificial Sequence
  Description of Artificial Sequence: Synthetic oligonucleotide
  Sense strand starting at position 3197 of SEQ ID NO: 1879793
aauaguaaugagggcgauu

SEQ ID NO: 1932725 - RNA, 19 nt, Artificial Sequence
  Description of Artificial Sequence: Synthetic oligonucleotide
  Antisense strand to SEQ ID NO: 1932724
aaucgcccucauuacuauu

SEQ ID NO: 1932726 - RNA, 19 nt, Artificial Sequence
  Description of Artificial Sequence: Synthetic oligonucleotide
  Sense strand starting at position 3199 of SEQ ID NO: 1879793
uaguaaugagggcgauuaa

SEQ ID NO: 1932727 - RNA, 19 nt, Artificial Sequence
  Description of Artificial Sequence: Synthetic oligonucleotide
  Antisense strand to SEQ ID NO: 1932726
uuaaucgcccucauuacua

SEQ ID NO: 1932728 - RNA, 19 nt, Artificial Sequence
  Description of Artificial Sequence: Synthetic oligonucleotide
  Sense strand starting at position 3200 of SEQ ID NO: 1879793
aguaaugagggcgauuaag

SEQ ID NO: 1932729 - RNA, 19 nt, Artificial Sequence
  Description of Artificial Sequence: Synthetic oligonucleotide
  Antisense strand to SEQ ID NO: 1932728
cuuaaucgcccucauuacu

SEQ ID NO: 1932730 - RNA, 19 nt, Artificial Sequence
  Description of Artificial Sequence: Synthetic oligonucleotide
  Sense strand starting at position 3223 of SEQ ID NO: 1879793
acuugaauuuaugaaagcu

SEQ ID NO: 1932731 - RNA, 19 nt, Artificial Sequence
  Description of Artificial Sequence: Synthetic oligonucleotide
  Antisense strand to SEQ ID NO: 1932730
agcuuucauaaauucaagu

SEQ ID NO: 1932732 - RNA, 19 nt, Artificial Sequence
  Description of Artificial Sequence: Synthetic oligonucleotide
  Sense strand starting at position 3297 of SEQ ID NO: 1879793
agugucuugcugugucaca

SEQ ID NO: 1932733 - RNA, 19 nt, Artificial Sequence
  Description of Artificial Sequence: Synthetic oligonucleotide
  Antisense strand to SEQ ID NO: 1932732
ugugacacagcaagacacu

SEQ ID NO: 1932734 - RNA, 19 nt, Artificial Sequence
  Description of Artificial Sequence: Synthetic oligonucleotide
  Sense strand starting at position 3330 of SEQ ID NO: 1879793
ugguuaagaucauggcuca

SEQ ID NO: 1932735 - RNA, 19 nt, Artificial Sequence
  Description of Artificial Sequence: Synthetic oligonucleotide
  Antisense strand to SEQ ID NO: 1932734
ugagccaugaucuuaacca

SEQ ID NO: 1932736 - RNA, 19 nt, Artificial Sequence
  Description of Artificial Sequence: Synthetic oligonucleotide
  Sense strand starting at position 3479 of SEQ ID NO: 1879793
aggagauacuaaugucaua

SEQ ID NO: 1932737 - RNA, 19 nt, Artificial Sequence
  Description of Artificial Sequence: Synthetic oligonucleotide
  Antisense strand to SEQ ID NO: 1932736
uaugacauuaguaucuccu

SEQ ID NO: 1932738 - RNA, 19 nt, Artificial Sequence
  Description of Artificial Sequence: Synthetic oligonucleotide
  Sense strand starting at position 3482 of SEQ ID NO: 1879793
agauacuaaugucauaguu

SEQ ID NO: 1932739 - RNA, 19 nt, Artificial Sequence
  Description of Artificial Sequence: Synthetic oligonucleotide
  Antisense strand to SEQ ID NO: 1932738
aacuaugacauuaguaucu

SEQ ID NO: 1932740 - RNA, 19 nt, Artificial Sequence
  Description of Artificial Sequence: Synthetic oligonucleotide
  Sense strand starting at position 3484 of SEQ ID NO: 1879793
auacuaaugucauaguuga

SEQ ID NO: 1932741 - RNA, 19 nt, Artificial Sequence
  Description of Artificial Sequence: Synthetic oligonucleotide
  Antisense strand to SEQ ID NO: 1932740
ucaacuaugacauuaguau

SEQ ID NO: 1932742 - RNA, 19 nt, Artificial Sequence
  Description of Artificial Sequence: Synthetic oligonucleotide
  Sense strand starting at position 3830 of SEQ ID NO: 1879793
uaggaaagccgguaugguu

SEQ ID NO: 1932743 - RNA, 19 nt, Artificial Sequence
  Description of Artificial Sequence: Synthetic oligonucleotide
  Antisense strand to SEQ ID NO: 1932742
aaccauaccggcuuuccua

SEQ ID NO: 1932744 - RNA, 19 nt, Artificial Sequence
  Description of Artificial Sequence: Synthetic oligonucleotide
  Sense strand starting at position 3839 of SEQ ID NO: 1879793
cgguaugguucuucuagga

SEQ ID NO: 1932745 - RNA, 19 nt, Artificial Sequence
  Description of Artificial Sequence: Synthetic oligonucleotide
  Antisense strand to SEQ ID NO: 1932744
uccuagaagaaccauaccg

SEQ ID NO: 1932746 - RNA, 19 nt, Artificial Sequence
  Description of Artificial Sequence: Synthetic oligonucleotide
  Sense strand starting at position 3843 of SEQ ID NO: 1879793
augguucuucuaggaauaa

SEQ ID NO: 1932747 - RNA, 19 nt, Artificial Sequence
  Description of Artificial Sequence: Synthetic oligonucleotide
  Antisense strand to SEQ ID NO: 1932746
uuauuccuagaagaaccau

SEQ ID NO: 1932748 - RNA, 19 nt, Artificial Sequence
  Description of Artificial Sequence: Synthetic oligonucleotide
  Sense strand starting at position 3844 of SEQ ID NO: 1879793
ugguucuucuaggaauaac

SEQ ID NO: 1932749 - RNA, 19 nt, Artificial Sequence
  Description of Artificial Sequence: Synthetic oligonucleotide
  Antisense strand to SEQ ID NO: 1932748
guuauuccuagaagaacca

SEQ ID NO: 1932750 - RNA, 19 nt, Artificial Sequence
  Description of Artificial Sequence: Synthetic oligonucleotide
  Sense strand starting at position 72 of SEQ ID NO: 1879794
gcaaauuucuucucugagu

SEQ ID NO: 1932751 - RNA, 19 nt, Artificial Sequence
  Description of Artificial Sequence: Synthetic oligonucleotide
  Antisense strand to SEQ ID NO: 1932750
acucagagaagaaauuugc

SEQ ID NO: 1932752 - RNA, 19 nt, Artificial Sequence
  Description of Artificial Sequence: Synthetic oligonucleotide
  Sense strand starting at position 100 of SEQ ID NO: 1879794
ugaugaucuuaguuugauc

SEQ ID NO: 1932753 - RNA, 19 nt, Artificial Sequence
  Description of Artificial Sequence: Synthetic oligonucleotide
  Antisense strand to SEQ ID NO: 1932752
gaucaaacuaagaucauca

SEQ ID NO: 1932754 - RNA, 19 nt, Artificial Sequence
  Description of Artificial Sequence: Synthetic oligonucleotide
  Sense strand starting at position 105 of SEQ ID NO: 1879794
aucuuaguuugauccuaug

SEQ ID NO: 1932755 - RNA, 19 nt, Artificial Sequence
  Description of Artificial Sequence: Synthetic oligonucleotide
  Antisense strand to SEQ ID NO: 1932754
cauaggaucaaacuaagau

SEQ ID NO: 1932756 - RNA, 19 nt, Artificial Sequence
  Description of Artificial Sequence: Synthetic oligonucleotide
  Sense strand starting at position 475 of SEQ ID NO: 1879794
ugguaagauuagucaaggu

SEQ ID NO: 1932757 - RNA, 19 nt, Artificial Sequence
  Description of Artificial Sequence: Synthetic oligonucleotide
  Antisense strand to SEQ ID NO: 1932756
accuugacuaaucuuacca

SEQ ID NO: 1932758 - RNA, 19 nt, Artificial Sequence
  Description of Artificial Sequence: Synthetic oligonucleotide
  Sense strand starting at position 479 of SEQ ID NO: 1879794
aagauuagucaagguuucu

SEQ ID NO: 1932759 - RNA, 19 nt, Artificial Sequence
  Description of Artificial Sequence: Synthetic oligonucleotide
  Antisense strand to SEQ ID NO: 1932758
agaaaccuugacuaaucuu

SEQ ID NO: 1932760 - RNA, 19 nt, Artificial Sequence
  Description of Artificial Sequence: Synthetic oligonucleotide
  Sense strand starting at position 488 of SEQ ID NO: 1879794
caagguuucuuggcagaca

SEQ ID NO: 1932761 - RNA, 19 nt, Artificial Sequence
  Description of Artificial Sequence: Synthetic oligonucleotide
  Antisense strand to SEQ ID NO: 1932760
ugucugccaagaaaccuug

SEQ ID NO: 1932762 - RNA, 19 nt, Artificial Sequence
  Description of Artificial Sequence: Synthetic oligonucleotide
  Sense strand starting at position 491 of SEQ ID NO: 1879794
gguuucuuggcagacaaac

SEQ ID NO: 1932763 - RNA, 19 nt, Artificial Sequence
  Description of Artificial Sequence: Synthetic oligonucleotide
  Antisense strand to SEQ ID NO: 1932762
guuugucugccaagaaacc

SEQ ID NO: 1932764 - RNA, 19 nt, Artificial Sequence
  Description of Artificial Sequence: Synthetic oligonucleotide
  Sense strand starting at position 838 of SEQ ID NO: 1879794
cuccucuuagguuaaaguu

SEQ ID NO: 1932765 - RNA, 19 nt, Artificial Sequence
  Description of Artificial Sequence: Synthetic oligonucleotide
  Antisense strand to SEQ ID NO: 1932764
aacuuuaaccuaagaggag

SEQ ID NO: 1932766 - RNA, 19 nt, Artificial Sequence
  Description of Artificial Sequence: Synthetic oligonucleotide
  Sense strand starting at position 847 of SEQ ID NO: 1879794
gguuaaaguucuuccagga

SEQ ID NO: 1932767 - RNA, 19 nt, Artificial Sequence
  Description of Artificial Sequence: Synthetic oligonucleotide
  Antisense strand to SEQ ID NO: 1932766
uccuggaagaacuuuaacc

SEQ ID NO: 1932768 - RNA, 19 nt, Artificial Sequence
  Description of Artificial Sequence: Synthetic oligonucleotide
  Sense strand starting at position 917 of SEQ ID NO: 1879794
ggaugcuaugcugaauuaa

SEQ ID NO: 1932769 - RNA, 19 nt, Artificial Sequence
  Description of Artificial Sequence: Synthetic oligonucleotide
  Antisense strand to SEQ ID NO: 1932768
uuaauucagcauagcaucc

SEQ ID NO: 1932770 - RNA, 19 nt, Artificial Sequence
  Description of Artificial Sequence: Synthetic oligonucleotide
  Sense strand starting at position 962 of SEQ ID NO: 1879794
uuggaauuaucucuauguu

SEQ ID NO: 1932771 - RNA, 19 nt, Artificial Sequence
  Description of Artificial Sequence: Synthetic oligonucleotide
  Antisense strand to SEQ ID NO: 1932770
aacauagagauaauuccaa

SEQ ID NO: 1932772 - RNA, 19 nt, Artificial Sequence
  Description of Artificial Sequence: Synthetic oligonucleotide
  Sense strand starting at position 963 of SEQ ID NO: 1879794
uggaauuaucucuauguuc

SEQ ID NO: 1932773 - RNA, 19 nt, Artificial Sequence
  Description of Artificial Sequence: Synthetic oligonucleotide
  Antisense strand to SEQ ID NO: 1932772
gaacauagagauaauucca

SEQ ID NO: 1932774 - RNA, 19 nt, Artificial Sequence
  Description of Artificial Sequence: Synthetic oligonucleotide
  Sense strand starting at position 993 of SEQ ID NO: 1879794
acuggauccuuuccugacu

SEQ ID NO: 1932775 - RNA, 19 nt, Artificial Sequence
  Description of Artificial Sequence: Synthetic oligonucleotide
  Antisense strand to SEQ ID NO: 1932774
agucaggaaaggauccagu

SEQ ID NO: 1932776 - RNA, 19 nt, Artificial Sequence
  Description of Artificial Sequence: Synthetic oligonucleotide
  Sense strand starting at position 994 of SEQ ID NO: 1879794
cuggauccuuuccugacua

SEQ ID NO: 1932777 - RNA, 19 nt, Artificial Sequence
  Description of Artificial Sequence: Synthetic oligonucleotide
  Antisense strand to SEQ ID NO: 1932776
uagucaggaaaggauccag

SEQ ID NO: 1932778 - RNA, 19 nt, Artificial Sequence
  Description of Artificial Sequence: Synthetic oligonucleotide
  Sense strand starting at position 996 of SEQ ID NO: 1879794
ggauccuuuccugacuagu

SEQ ID NO: 1932779 - RNA, 19 nt, Artificial Sequence
  Description of Artificial Sequence: Synthetic oligonucleotide
  Antisense strand to SEQ ID NO: 1932778
acuagucaggaaaggaucc

SEQ ID NO: 1932780 - RNA, 19 nt, Artificial Sequence
  Description of Artificial Sequence: Synthetic oligonucleotide
  Sense strand starting at position 999 of SEQ ID NO: 1879794
uccuuuccugacuaguuau

SEQ ID NO: 1932781 - RNA, 19 nt, Artificial Sequence
  Description of Artificial Sequence: Synthetic oligonucleotide
  Antisense strand to SEQ ID NO: 1932780
auaacuagucaggaaagga

SEQ ID NO: 1932782 - RNA, 19 nt, Artificial Sequence
  Description of Artificial Sequence: Synthetic oligonucleotide
  Sense strand starting at position 1118 of SEQ ID NO: 1879794
gguugaagcugaccacuau

SEQ ID NO: 1932783 - RNA, 19 nt, Artificial Sequence
  Description of Artificial Sequence: Synthetic oligonucleotide
  Antisense strand to SEQ ID NO: 1932782
auaguggucagcuucaacc

SEQ ID NO: 1932784 - RNA, 19 nt, Artificial Sequence
  Description of Artificial Sequence: Synthetic oligonucleotide
  Sense strand starting at position 1124 of SEQ ID NO: 1879794
agcugaccacuaugaagaa

SEQ ID NO: 1932785 - RNA, 19 nt, Artificial Sequence
  Description of Artificial Sequence: Synthetic oligonucleotide
  Antisense strand to SEQ ID NO: 1932784
uucuucauaguggucagcu

SEQ ID NO: 1932786 - RNA, 19 nt, Artificial Sequence
  Description of Artificial Sequence: Synthetic oligonucleotide
  Sense strand starting at position 1147 of SEQ ID NO: 1879794
auaagaauuugugagacau

SEQ ID NO: 1932787 - RNA, 19 nt, Artificial Sequence
  Description of Artificial Sequence: Synthetic oligonucleotide
  Antisense strand to SEQ ID NO: 1932786
augucucacaaauucuuau

SEQ ID NO: 1932788 - RNA, 19 nt, Artificial Sequence
  Description of Artificial Sequence: Synthetic oligonucleotide
  Sense strand starting at position 1149 of SEQ ID NO: 1879794
aagaauuugugagacauau

SEQ ID NO: 1932789 - RNA, 19 nt, Artificial Sequence
  Description of Artificial Sequence: Synthetic oligonucleotide
  Antisense strand to SEQ ID NO: 1932788
auaugucucacaaauucuu

SEQ ID NO: 1932790 - RNA, 19 nt, Artificial Sequence
  Description of Artificial Sequence: Synthetic oligonucleotide
  Sense strand starting at position 1302 of SEQ ID NO: 1879794
gcaucaaucugacuaaaga

SEQ ID NO: 1932791 - RNA, 19 nt, Artificial Sequence
  Description of Artificial Sequence: Synthetic oligonucleotide
  Antisense strand to SEQ ID NO: 1932790
ucuuuagucagauugaugc

SEQ ID NO: 1932792 - RNA, 19 nt, Artificial Sequence
  Description of Artificial Sequence: Synthetic oligonucleotide
  Sense strand starting at position 1343 of SEQ ID NO: 1879794
ucauaagauugauucggca

SEQ ID NO: 1932793 - RNA, 19 nt, Artificial Sequence
  Description of Artificial Sequence: Synthetic oligonucleotide
  Antisense strand to SEQ ID NO: 1932792
ugccgaaucaaucuuauga

SEQ ID NO: 1932794 - RNA, 19 nt, Artificial Sequence
  Description of Artificial Sequence: Synthetic oligonucleotide
  Sense strand starting at position 1347 of SEQ ID NO: 1879794
aagauugauucggcaccua

SEQ ID NO: 1932795 - RNA, 19 nt, Artificial Sequence
  Description of Artificial Sequence: Synthetic oligonucleotide
  Antisense strand to SEQ ID NO: 1932794
uaggugccgaaucaaucuu

SEQ ID NO: 1932796 - RNA, 19 nt, Artificial Sequence
  Description of Artificial Sequence: Synthetic oligonucleotide
  Sense strand starting at position 1851 of SEQ ID NO: 1879794
gaauucugguacucaaguu

SEQ ID NO: 1932797 - RNA, 19 nt, Artificial Sequence
  Description of Artificial Sequence: Synthetic oligonucleotide
  Antisense strand to SEQ ID NO: 1932796
aacuugaguaccagaauuc

SEQ ID NO: 1932798 - RNA, 19 nt, Artificial Sequence
  Description of Artificial Sequence: Synthetic oligonucleotide
  Sense strand starting at position 2101 of SEQ ID NO: 1879794
aggaaauaccuaugcucca

SEQ ID NO: 1932799 - RNA, 19 nt, Artificial Sequence
  Description of Artificial Sequence: Synthetic oligonucleotide
  Antisense strand to SEQ ID NO: 1932798
uggagcauagguauuuccu

SEQ ID NO: 1932800 - RNA, 19 nt, Artificial Sequence
  Description of Artificial Sequence: Synthetic oligonucleotide
  Sense strand starting at position 2102 of SEQ ID NO: 1879794
ggaaauaccuaugcuccaa

SEQ ID NO: 1932801 - RNA, 19 nt, Artificial Sequence
  Description of Artificial Sequence: Synthetic oligonucleotide
  Antisense strand to SEQ ID NO: 1932800
uuggagcauagguauuucc

SEQ ID NO: 1932802 - RNA, 19 nt, Artificial Sequence
  Description of Artificial Sequence: Synthetic oligonucleotide
  Sense strand starting at position 2392 of SEQ ID NO: 1879794
gcaguaauugucgcaggca

SEQ ID NO: 1932803 - RNA, 19 nt, Artificial Sequence
  Description of Artificial Sequence: Synthetic oligonucleotide
  Antisense strand to SEQ ID NO: 1932802
ugccugcgacaauuacugc

SEQ ID NO: 1932804 - RNA, 19 nt, Artificial Sequence
  Description of Artificial Sequence: Synthetic oligonucleotide
  Sense strand starting at position 2592 of SEQ ID NO: 1879794
uaauaagacguauggacau

SEQ ID NO: 1932805 - RNA, 19 nt, Artificial Sequence
  Description of Artificial Sequence: Synthetic oligonucleotide
  Antisense strand to SEQ ID NO: 1932804
auguccauacgucuuauua

SEQ ID NO: 1932806 - RNA, 19 nt, Artificial Sequence
  Description of Artificial Sequence: Synthetic oligonucleotide
  Sense strand starting at position 2733 of SEQ ID NO: 1879794
cuaugaaauacgugacuag

SEQ ID NO: 1932807 - RNA, 19 nt, Artificial Sequence
  Description of Artificial Sequence: Synthetic oligonucleotide
  Antisense strand to SEQ ID NO: 1932806
cuagucacguauuucauag

SEQ ID NO: 1932808 - RNA, 19 nt, Artificial Sequence
  Description of Artificial Sequence: Synthetic oligonucleotide
  Sense strand starting at position 2734 of SEQ ID NO: 1879794
uaugaaauacgugacuagu

SEQ ID NO: 1932809 - RNA, 19 nt, Artificial Sequence
  Description of Artificial Sequence: Synthetic oligonucleotide
  Antisense strand to SEQ ID NO: 1932808
acuagucacguauuucaua

SEQ ID NO: 1932810 - RNA, 19 nt, Artificial Sequence
  Description of Artificial Sequence: Synthetic oligonucleotide
  Sense strand starting at position 2744 of SEQ ID NO: 1879794
gugacuaguccucaucaaa

SEQ ID NO: 1932811 - RNA, 19 nt, Artificial Sequence
  Description of Artificial Sequence: Synthetic oligonucleotide
  Antisense strand to SEQ ID NO: 1932810
uuugaugaggacuagucac

SEQ ID NO: 1932812 - RNA, 19 nt, Artificial Sequence
  Description of Artificial Sequence: Synthetic oligonucleotide
  Sense strand starting at position 2853 of SEQ ID NO: 1879794
ucguucuuggaggacauaa

SEQ ID NO: 1932813 - RNA, 19 nt, Artificial Sequence
  Description of Artificial Sequence: Synthetic oligonucleotide
  Antisense strand to SEQ ID NO: 1932812
uuauguccuccaagaacga

SEQ ID NO: 1932814 - RNA, 19 nt, Artificial Sequence
  Description of Artificial Sequence: Synthetic oligonucleotide
  Sense strand starting at position 2915 of SEQ ID NO: 1879794
aguuuagcugagcauuaua

SEQ ID NO: 1932815 - RNA, 19 nt, Artificial Sequence
  Description of Artificial Sequence: Synthetic oligonucleotide
  Antisense strand to SEQ ID NO: 1932814
uauaaugcucagcuaaacu

SEQ ID NO: 1932816 - RNA, 19 nt, Artificial Sequence
  Description of Artificial Sequence: Synthetic oligonucleotide
  Sense strand starting at position 3132 of SEQ ID NO: 1879794
guggaaagcuccuugagau

SEQ ID NO: 1932817 - RNA, 19 nt, Artificial Sequence
  Description of Artificial Sequence: Synthetic oligonucleotide
  Antisense strand to SEQ ID NO: 1932816
aucucaaggagcuuuccac

SEQ ID NO: 1932818 - RNA, 19 nt, Artificial Sequence
  Description of Artificial Sequence: Synthetic oligonucleotide
  Sense strand starting at position 3133 of SEQ ID NO: 1879794
uggaaagcuccuugagauu

SEQ ID NO: 1932819 - RNA, 19 nt, Artificial Sequence
  Description of Artificial Sequence: Synthetic oligonucleotide
  Antisense strand to SEQ ID NO: 1932818
aaucucaaggagcuuucca

SEQ ID NO: 1932820 - RNA, 19 nt, Artificial Sequence
  Description of Artificial Sequence: Synthetic oligonucleotide
  Sense strand starting at position 3198 of SEQ ID NO: 1879794
ucagcuucugcgcuuaacu

SEQ ID NO: 1932821 - RNA, 19 nt, Artificial Sequence
  Description of Artificial Sequence: Synthetic oligonucleotide
  Antisense strand to SEQ ID NO: 1932820
aguuaagcgcagaagcuga

SEQ ID NO: 1932822 - RNA, 19 nt, Artificial Sequence
  Description of Artificial Sequence: Synthetic oligonucleotide
  Sense strand starting at position 3509 of SEQ ID NO: 1879794
agccuuauuuggcccauga

SEQ ID NO: 1932823 - RNA, 19 nt, Artificial Sequence
  Description of Artificial Sequence: Synthetic oligonucleotide
  Antisense strand to SEQ ID NO: 1932822
ucaugggccaaauaaggcu

SEQ ID NO: 1932824 - RNA, 19 nt, Artificial Sequence
  Description of Artificial Sequence: Synthetic oligonucleotide
  Sense strand starting at position 3611 of SEQ ID NO: 1879794
cuggcaugugcauaaauca

SEQ ID NO: 1932825 - RNA, 19 nt, Artificial Sequence
  Description of Artificial Sequence: Synthetic oligonucleotide
  Antisense strand to SEQ ID NO: 1932824
ugauuuaugcacaugccag

SEQ ID NO: 1932826 - RNA, 19 nt, Artificial Sequence
  Description of Artificial Sequence: Synthetic oligonucleotide
  Sense strand starting at position 3621 of SEQ ID NO: 1879794
cauaaaucacaaggcgaga

SEQ ID NO: 1932827 - RNA, 19 nt, Artificial Sequence
  Description of Artificial Sequence: Synthetic oligonucleotide
  Antisense strand to SEQ ID NO: 1932826
ucucgccuugugauuuaug

SEQ ID NO: 1932828 - RNA, 19 nt, Artificial Sequence
  Description of Artificial Sequence: Synthetic oligonucleotide
  Sense strand starting at position 3983 of SEQ ID NO: 1879794
uacucuuaagagugagguu

SEQ ID NO: 1932829 - RNA, 19 nt, Artificial Sequence
  Description of Artificial Sequence: Synthetic oligonucleotide
  Antisense strand to SEQ ID NO: 1932828
aaccucacucuuaagagua

SEQ ID NO: 1932830 - RNA, 19 nt, Artificial Sequence
  Description of Artificial Sequence: Synthetic oligonucleotide
  Sense strand starting at position 3 of SEQ ID NO: 1879795
ccuguacuuguguacaaua

SEQ ID NO: 1932831 - RNA, 19 nt, Artificial Sequence
  Description of Artificial Sequence: Synthetic oligonucleotide
  Antisense strand to SEQ ID NO: 1932830
uauuguacacaaguacagg

SEQ ID NO: 1932832 - RNA, 19 nt, Artificial Sequence
  Description of Artificial Sequence: Synthetic oligonucleotide
  Sense strand starting at position 5 of SEQ ID NO: 1879795
uguacuuguguacaauaau

SEQ ID NO: 1932833 - RNA, 19 nt, Artificial Sequence
  Description of Artificial Sequence: Synthetic oligonucleotide
  Antisense strand to SEQ ID NO: 1932832
auuauuguacacaaguaca

SEQ ID NO: 1932834 - RNA, 19 nt, Artificial Sequence
  Description of Artificial Sequence: Synthetic oligonucleotide
  Sense strand starting at position 90 of SEQ ID NO: 1879795
gcuauuagggacuguuaaa

SEQ ID NO: 1932835 - RNA, 19 nt, Artificial Sequence
  Description of Artificial Sequence: Synthetic oligonucleotide
  Antisense strand to SEQ ID NO: 1932834
uuuaacagucccuaauagc

SEQ ID NO: 1932836 - RNA, 19 nt, Artificial Sequence
  Description of Artificial Sequence: Synthetic oligonucleotide
  Sense strand starting at position 137 of SEQ ID NO: 1879795
gaggcagcucuacauauau

SEQ ID NO: 1932837 - RNA, 19 nt, Artificial Sequence
  Description of Artificial Sequence: Synthetic oligonucleotide
  Antisense strand to SEQ ID NO: 1932836
auauauguagagcugccuc

SEQ ID NO: 1932838 - RNA, 19 nt, Artificial Sequence
  Description of Artificial Sequence: Synthetic oligonucleotide
  Sense strand starting at position 232 of SEQ ID NO: 1879795
acgacauauuuaugacaaa

SEQ ID NO: 1932839 - RNA, 19 nt, Artificial Sequence
  Description of Artificial Sequence: Synthetic oligonucleotide
  Antisense strand to SEQ ID NO: 1932838
uuugucauaaauaugucgu

SEQ ID NO: 1932840 - RNA, 19 nt, Artificial Sequence
  Description of Artificial Sequence: Synthetic oligonucleotide
  Sense strand starting at position 319 of SEQ ID NO: 1879795
auggcuuguggagagaauu

SEQ ID NO: 1932841 - RNA, 19 nt, Artificial Sequence
  Description of Artificial Sequence: Synthetic oligonucleotide
  Antisense strand to SEQ ID NO: 1932840
aauucucuccacaagccau

SEQ ID NO: 1932842 - RNA, 19 nt, Artificial Sequence
  Description of Artificial Sequence: Synthetic oligonucleotide
  Sense strand starting at position 355 of SEQ ID NO: 1879795
gaauaacauggauguuuac

SEQ ID NO: 1932843 - RNA, 19 nt, Artificial Sequence
  Description of Artificial Sequence: Synthetic oligonucleotide
  Antisense strand to SEQ ID NO: 1932842
guaaacauccauguuauuc

SEQ ID NO: 1932844 - RNA, 19 nt, Artificial Sequence
  Description of Artificial Sequence: Synthetic oligonucleotide
  Sense strand starting at position 472 of SEQ ID NO: 1879795
ggauuuauuugcuaaccuu

SEQ ID NO: 1932845 - RNA, 19 nt, Artificial Sequence
  Description of Artificial Sequence: Synthetic oligonucleotide
  Antisense strand to SEQ ID NO: 1932844
aagguuagcaaauaaaucc

SEQ ID NO: 1932846 - RNA, 19 nt, Artificial Sequence
  Description of Artificial Sequence: Synthetic oligonucleotide
  Sense strand starting at position 497 of SEQ ID NO: 1879795
aguuaacaguugucagaaa

SEQ ID NO: 1932847 - RNA, 19 nt, Artificial Sequence
  Description of Artificial Sequence: Synthetic oligonucleotide
  Antisense strand to SEQ ID NO: 1932846
uuucugacaacuguuaacu

SEQ ID NO: 1932848 - RNA, 19 nt, Artificial Sequence
  Description of Artificial Sequence: Synthetic oligonucleotide
  Sense strand starting at position 565 of SEQ ID NO: 1879795
accucuuugcacuggaaua

SEQ ID NO: 1932849 - RNA, 19 nt, Artificial Sequence
  Description of Artificial Sequence: Synthetic oligonucleotide
  Antisense strand to SEQ ID NO: 1932848
uauuccagugcaaagaggu

SEQ ID NO: 1932850 - RNA, 19 nt, Artificial Sequence
  Description of Artificial Sequence: Synthetic oligonucleotide
  Sense strand starting at position 1092 of SEQ ID NO: 1879795
aguuaaaccguuuagcaaa

SEQ ID NO: 1932851 - RNA, 19 nt, Artificial Sequence
  Description of Artificial Sequence: Synthetic oligonucleotide
  Antisense strand to SEQ ID NO: 1932850
uuugcuaaacgguuuaacu

SEQ ID NO: 1932852 - RNA, 19 nt, Artificial Sequence
  Description of Artificial Sequence: Synthetic oligonucleotide
  Sense strand starting at position 2348 of SEQ ID NO: 1879795
cccgaagcccuuugaaaua

SEQ ID NO: 1932853 - RNA, 19 nt, Artificial Sequence
  Description of Artificial Sequence: Synthetic oligonucleotide
  Antisense strand to SEQ ID NO: 1932852
uauuucaaagggcuucggg

SEQ ID NO: 1932854 - RNA, 19 nt, Artificial Sequence
  Description of Artificial Sequence: Synthetic oligonucleotide
  Sense strand starting at position 2357 of SEQ ID NO: 1879795
cuuugaaauagacggucaa

SEQ ID NO: 1932855 - RNA, 19 nt, Artificial Sequence
  Description of Artificial Sequence: Synthetic oligonucleotide
  Antisense strand to SEQ ID NO: 1932854
uugaccgucuauuucaaag

SEQ ID NO: 1932856 - RNA, 19 nt, Artificial Sequence
  Description of Artificial Sequence: Synthetic oligonucleotide
  Sense strand starting at position 2358 of SEQ ID NO: 1879795
uuugaaauagacggucaaa

SEQ ID NO: 1932857 - RNA, 19 nt, Artificial Sequence
  Description of Artificial Sequence: Synthetic oligonucleotide
  Antisense strand to SEQ ID NO: 1932856
uuugaccgucuauuucaaa

SEQ ID NO: 1932858 - RNA, 19 nt, Artificial Sequence
  Description of Artificial Sequence: Synthetic oligonucleotide
  Sense strand starting at position 2592 of SEQ ID NO: 1879795
gccucaaaugcagaauagu

SEQ ID NO: 1932859 - RNA, 19 nt, Artificial Sequence
  Description of Artificial Sequence: Synthetic oligonucleotide
  Antisense strand to SEQ ID NO: 1932858
acuauucugcauuugaggc

SEQ ID NO: 1932860 - RNA, 19 nt, Artificial Sequence
  Description of Artificial Sequence: Synthetic oligonucleotide
  Sense strand starting at position 2647 of SEQ ID NO: 1879795
ggaagaguccaguguggua

SEQ ID NO: 1932861 - RNA, 19 nt, Artificial Sequence
  Description of Artificial Sequence: Synthetic oligonucleotide
  Antisense strand to SEQ ID NO: 1932860
uaccacacuggacucuucc

SEQ ID NO: 1932862 - RNA, 19 nt, Artificial Sequence
  Description of Artificial Sequence: Synthetic oligonucleotide
  Sense strand starting at position 2758 of SEQ ID NO: 1879795
gcagcuaagagagguuaaa

SEQ ID NO: 1932863 - RNA, 19 nt, Artificial Sequence
  Description of Artificial Sequence: Synthetic oligonucleotide
  Antisense strand to SEQ ID NO: 1932862
uuuaaccucucuuagcugc

SEQ ID NO: 1932864 - RNA, 19 nt, Artificial Sequence
  Description of Artificial Sequence: Synthetic oligonucleotide
  Sense strand starting at position 2807 of SEQ ID NO: 1879795
cguggagaacugugaugaa

SEQ ID NO: 1932865 - RNA, 19 nt, Artificial Sequence
  Description of Artificial Sequence: Synthetic oligonucleotide
  Antisense strand to SEQ ID NO: 1932864
uucaucacaguucuccacg

SEQ ID NO: 1932866 - RNA, 19 nt, Artificial Sequence
  Description of Artificial Sequence: Synthetic oligonucleotide
  Sense strand starting at position 2894 of SEQ ID NO: 1879795
ccagacuucugagucagag

SEQ ID NO: 1932867 - RNA, 19 nt, Artificial Sequence
  Description of Artificial Sequence: Synthetic oligonucleotide
  Antisense strand to SEQ ID NO: 1932866
cucugacucagaagucugg

SEQ ID NO: 1932868 - RNA, 19 nt, Artificial Sequence
  Description of Artificial Sequence: Synthetic oligonucleotide
  Sense strand starting at position 2933 of SEQ ID NO: 1879795
aagcaauagccagaguauc

SEQ ID NO: 1932869 - RNA, 19 nt, Artificial Sequence
  Description of Artificial Sequence: Synthetic oligonucleotide
  Antisense strand to SEQ ID NO: 1932868
gauacucuggcuauugcuu

SEQ ID NO: 1932870 - RNA, 19 nt, Artificial Sequence
  Description of Artificial Sequence: Synthetic oligonucleotide
  Sense strand starting at position 2979 of SEQ ID NO: 1879795
ccaguucucacaggaacga

SEQ ID NO: 1932871 - RNA, 19 nt, Artificial Sequence
  Description of Artificial Sequence: Synthetic oligonucleotide
  Antisense strand to SEQ ID NO: 1932870
ucguuccugugagaacugg

SEQ ID NO: 1932872 - RNA, 19 nt, Artificial Sequence
  Description of Artificial Sequence: Synthetic oligonucleotide
  Sense strand starting at position 3009 of SEQ ID NO: 1879795
ccagaugcaugcuuacaca

SEQ ID NO: 1932873 - RNA, 19 nt, Artificial Sequence
  Description of Artificial Sequence: Synthetic oligonucleotide
  Antisense strand to SEQ ID NO: 1932872
uguguaagcaugcaucugg

SEQ ID NO: 1932874 - RNA, 19 nt, Artificial Sequence
  Description of Artificial Sequence: Synthetic oligonucleotide
  Sense strand starting at position 3067 of SEQ ID NO: 1879795
gggaacccaccauguuaua

SEQ ID NO: 1932875 - RNA, 19 nt, Artificial Sequence
  Description of Artificial Sequence: Synthetic oligonucleotide
  Antisense strand to SEQ ID NO: 1932874
uauaacaugguggguuccc

SEQ ID NO: 1932876 - RNA, 19 nt, Artificial Sequence
  Description of Artificial Sequence: Synthetic oligonucleotide
  Sense strand starting at position 3076 of SEQ ID NO: 1879795
ccauguuauagugagcagu

SEQ ID NO: 1932877 - RNA, 19 nt, Artificial Sequence
  Description of Artificial Sequence: Synthetic oligonucleotide
  Antisense strand to SEQ ID NO: 1932876
acugcucacuauaacaugg

SEQ ID NO: 1932878 - RNA, 19 nt, Artificial Sequence
  Description of Artificial Sequence: Synthetic oligonucleotide
  Sense strand starting at position 3106 of SEQ ID NO: 1879795
cucuuuguuccauagggag

SEQ ID NO: 1932879 - RNA, 19 nt, Artificial Sequence
  Description of Artificial Sequence: Synthetic oligonucleotide
  Antisense strand to SEQ ID NO: 1932878
cucccuauggaacaaagag

SEQ ID NO: 1932880 - RNA, 19 nt, Artificial Sequence
  Description of Artificial Sequence: Synthetic oligonucleotide
  Sense strand starting at position 3210 of SEQ ID NO: 1879795
uuggcacaucuaggaagaa

SEQ ID NO: 1932881 - RNA, 19 nt, Artificial Sequence
  Description of Artificial Sequence: Synthetic oligonucleotide
  Antisense strand to SEQ ID NO: 1932880
uucuuccuagaugugccaa

SEQ ID NO: 1932882 - RNA, 19 nt, Artificial Sequence
  Description of Artificial Sequence: Synthetic oligonucleotide
  Sense strand starting at position 3234 of SEQ ID NO: 1879795
aaggaugcgaauugugaau

SEQ ID NO: 1932883 - RNA, 19 nt, Artificial Sequence
  Description of Artificial Sequence: Synthetic oligonucleotide
  Antisense strand to SEQ ID NO: 1932882
auucacaauucgcauccuu

SEQ ID NO: 1932884 - RNA, 19 nt, Artificial Sequence
  Description of Artificial Sequence: Synthetic oligonucleotide
  Sense strand starting at position 3248 of SEQ ID NO: 1879795
ugaaucgcuucuccaaaca

SEQ ID NO: 1932885 - RNA, 19 nt, Artificial Sequence
  Description of Artificial Sequence: Synthetic oligonucleotide
  Antisense strand to SEQ ID NO: 1932884
uguuuggagaagcgauuca

SEQ ID NO: 1932886 - RNA, 19 nt, Artificial Sequence
  Description of Artificial Sequence: Synthetic oligonucleotide
  Sense strand starting at position 3409 of SEQ ID NO: 1879795
auugcaugcagggagaauu

SEQ ID NO: 1932887 - RNA, 19 nt, Artificial Sequence
  Description of Artificial Sequence: Synthetic oligonucleotide
  Antisense strand to SEQ ID NO: 1932886
aauucucccugcaugcaau

SEQ ID NO: 1932888 - RNA, 19 nt, Artificial Sequence
  Description of Artificial Sequence: Synthetic oligonucleotide
  Sense strand starting at position 3631 of SEQ ID NO: 1879795
ggguauuggagccaaaucu

SEQ ID NO: 1932889 - RNA, 19 nt, Artificial Sequence
  Description of Artificial Sequence: Synthetic oligonucleotide
  Antisense strand to SEQ ID NO: 1932888
agauuuggcuccaauaccc

SEQ ID NO: 1932890 - RNA, 19 nt, Artificial Sequence
  Description of Artificial Sequence: Synthetic oligonucleotide
  Sense strand starting at position 3657 of SEQ ID NO: 1879795
ugaggagucauugacguga

SEQ ID NO: 1932891 - RNA, 19 nt, Artificial Sequence
  Description of Artificial Sequence: Synthetic oligonucleotide
  Antisense strand to SEQ ID NO: 1932890
ucacgucaaugacuccuca

SEQ ID NO: 1932892 - RNA, 19 nt, Artificial Sequence
  Description of Artificial Sequence: Synthetic oligonucleotide
  Sense strand starting at position 3661 of SEQ ID NO: 1879795
gagucauugacgugauuaa

SEQ ID NO: 1932893 - RNA, 19 nt, Artificial Sequence
  Description of Artificial Sequence: Synthetic oligonucleotide
  Antisense strand to SEQ ID NO: 1932892
uuaaucacgucaaugacuc

SEQ ID NO: 1932894 - RNA, 19 nt, Artificial Sequence
  Description of Artificial Sequence: Synthetic oligonucleotide
  Sense strand starting at position 3662 of SEQ ID NO: 1879795
agucauugacgugauuaag

SEQ ID NO: 1932895 - RNA, 19 nt, Artificial Sequence
  Description of Artificial Sequence: Synthetic oligonucleotide
  Antisense strand to SEQ ID NO: 1932894
cuuaaucacgucaaugacu

SEQ ID NO: 1932896 - RNA, 19 nt, Artificial Sequence
  Description of Artificial Sequence: Synthetic oligonucleotide
  Sense strand starting at position 3665 of SEQ ID NO: 1879795
cauugacgugauuaaguga

SEQ ID NO: 1932897 - RNA, 19 nt, Artificial Sequence
  Description of Artificial Sequence: Synthetic oligonucleotide
  Antisense strand to SEQ ID NO: 1932896
ucacuuaaucacgucaaug

SEQ ID NO: 1932898 - RNA, 19 nt, Artificial Sequence
  Description of Artificial Sequence: Synthetic oligonucleotide
  Sense strand starting at position 3670 of SEQ ID NO: 1879795
acgugauuaagugacaguu

SEQ ID NO: 1932899 - RNA, 19 nt, Artificial Sequence
  Description of Artificial Sequence: Synthetic oligonucleotide
  Antisense strand to SEQ ID NO: 1932898
aacugucacuuaaucacgu

SEQ ID NO: 1932900 - RNA, 19 nt, Artificial Sequence
  Description of Artificial Sequence: Synthetic oligonucleotide
  Sense strand starting at position 3676 of SEQ ID NO: 1879795
uuaagugacaguugagaug

SEQ ID NO: 1932901 - RNA, 19 nt, Artificial Sequence
  Description of Artificial Sequence: Synthetic oligonucleotide
  Antisense strand to SEQ ID NO: 1932900
caucucaacugucacuuaa

SEQ ID NO: 1932902 - RNA, 19 nt, Artificial Sequence
  Description of Artificial Sequence: Synthetic oligonucleotide
  Sense strand starting at position 3685 of SEQ ID NO: 1879795
aguugagaugcguauauaa

SEQ ID NO: 1932903 - RNA, 19 nt, Artificial Sequence
  Description of Artificial Sequence: Synthetic oligonucleotide
  Antisense strand to SEQ ID NO: 1932902
uuauauacgcaucucaacu

SEQ ID NO: 1932904 - RNA, 19 nt, Artificial Sequence
  Description of Artificial Sequence: Synthetic oligonucleotide
  Sense strand starting at position 3743 of SEQ ID NO: 1879795
uaaggaaagauguguaugu

SEQ ID NO: 1932905 - RNA, 19 nt, Artificial Sequence
  Description of Artificial Sequence: Synthetic oligonucleotide
  Antisense strand to SEQ ID NO: 1932904
acauacacaucuuuccuua

SEQ ID NO: 1932906 - RNA, 19 nt, Artificial Sequence
  Description of Artificial Sequence: Synthetic oligonucleotide
  Sense strand starting at position 3745 of SEQ ID NO: 1879795
aggaaagauguguaugugu

SEQ ID NO: 1932907 - RNA, 19 nt, Artificial Sequence
  Description of Artificial Sequence: Synthetic oligonucleotide
  Antisense strand to SEQ ID NO: 1932906
acacauacacaucuuuccu

SEQ ID NO: 1932908 - RNA, 19 nt, Artificial Sequence
  Description of Artificial Sequence: Synthetic oligonucleotide
  Sense strand starting at position 3857 of SEQ ID NO: 1879795
gauacaguguuagcagaca

SEQ ID NO: 1932909 - RNA, 19 nt, Artificial Sequence
  Description of Artificial Sequence: Synthetic oligonucleotide
  Antisense strand to SEQ ID NO: 1932908
ugucugcuaacacuguauc

SEQ ID NO: 1932910 - RNA, 19 nt, Artificial Sequence
  Description of Artificial Sequence: Synthetic oligonucleotide
  Sense strand starting at position 252 of SEQ ID NO: 1879796
uuucuauuaugcucauguu

SEQ ID NO: 1932911 - RNA, 19 nt, Artificial Sequence
  Description of Artificial Sequence: Synthetic oligonucleotide
  Antisense strand to SEQ ID NO: 1932910
aacaugagcauaauagaaa

SEQ ID NO: 1932912 - RNA, 19 nt, Artificial Sequence
  Description of Artificial Sequence: Synthetic oligonucleotide
  Sense strand starting at position 253 of SEQ ID NO: 1879796
uucuauuaugcucauguua

SEQ ID NO: 1932913 - RNA, 19 nt, Artificial Sequence
  Description of Artificial Sequence: Synthetic oligonucleotide
  Antisense strand to SEQ ID NO: 1932912
uaacaugagcauaauagaa

SEQ ID NO: 1932914 - RNA, 19 nt, Artificial Sequence
  Description of Artificial Sequence: Synthetic oligonucleotide
  Sense strand starting at position 492 of SEQ ID NO: 1879796
gcacaaacauaugcagauu

SEQ ID NO: 1932915 - RNA, 19 nt, Artificial Sequence
  Description of Artificial Sequence: Synthetic oligonucleotide
  Antisense strand to SEQ ID NO: 1932914
aaucugcauauguuugugc

SEQ ID NO: 1932916 - RNA, 19 nt, Artificial Sequence
  Description of Artificial Sequence: Synthetic oligonucleotide
  Sense strand starting at position 504 of SEQ ID NO: 1879796
gcagauuaauggcuacuau

SEQ ID NO: 1932917 - RNA, 19 nt, Artificial Sequence
  Description of Artificial Sequence: Synthetic oligonucleotide
  Antisense strand to SEQ ID NO: 1932916
auaguagccauuaaucugc

SEQ ID NO: 1932918 - RNA, 19 nt, Artificial Sequence
  Description of Artificial Sequence: Synthetic oligonucleotide
  Sense strand starting at position 1350 of SEQ ID NO: 1879796
ccaccucacccagggaauu

SEQ ID NO: 1932919 - RNA, 19 nt, Artificial Sequence
  Description of Artificial Sequence: Synthetic oligonucleotide
  Antisense strand to SEQ ID NO: 1932918
aauucccugggugaggugg

SEQ ID NO: 1932920 - RNA, 19 nt, Artificial Sequence
  Description of Artificial Sequence: Synthetic oligonucleotide
  Sense strand starting at position 1368 of SEQ ID NO: 1879796
uccuguauuucugauguuu

SEQ ID NO: 1932921 - RNA, 19 nt, Artificial Sequence
  Description of Artificial Sequence: Synthetic oligonucleotide
  Antisense strand to SEQ ID NO: 1932920
aaacaucagaaauacagga

SEQ ID NO: 1932922 - RNA, 19 nt, Artificial Sequence
  Description of Artificial Sequence: Synthetic oligonucleotide
  Sense strand starting at position 1462 of SEQ ID NO: 1879796
uccugauccguuggccuua

SEQ ID NO: 1932923 - RNA, 19 nt, Artificial Sequence
  Description of Artificial Sequence: Synthetic oligonucleotide
  Antisense strand to SEQ ID NO: 1932922
uaaggccaacggaucagga

SEQ ID NO: 1932924 - RNA, 19 nt, Artificial Sequence
  Description of Artificial Sequence: Synthetic oligonucleotide
  Sense strand starting at position 1467 of SEQ ID NO: 1879796
auccguuggccuuaacaua

SEQ ID NO: 1932925 - RNA, 19 nt, Artificial Sequence
  Description of Artificial Sequence: Synthetic oligonucleotide
  Antisense strand to SEQ ID NO: 1932924
uauguuaaggccaacggau

SEQ ID NO: 1932926 - RNA, 19 nt, Artificial Sequence
  Description of Artificial Sequence: Synthetic oligonucleotide
  Sense strand starting at position 1759 of SEQ ID NO: 1879796
ggucaucuggaucagcgaa

SEQ ID NO: 1932927 - RNA, 19 nt, Artificial Sequence
  Description of Artificial Sequence: Synthetic oligonucleotide
  Antisense strand to SEQ ID NO: 1932926
uucgcugauccagaugacc

SEQ ID NO: 1932928 - RNA, 19 nt, Artificial Sequence
  Description of Artificial Sequence: Synthetic oligonucleotide
  Sense strand starting at position 1802 of SEQ ID NO: 1879796
cgcugcagacuggaguaau

SEQ ID NO: 1932929 - RNA, 19 nt, Artificial Sequence
  Description of Artificial Sequence: Synthetic oligonucleotide
  Antisense strand to SEQ ID NO: 1932928
auuacuccagucugcagcg

SEQ ID NO: 1932930 - RNA, 19 nt, Artificial Sequence
  Description of Artificial Sequence: Synthetic oligonucleotide
  Sense strand starting at position 1855 of SEQ ID NO: 1879796
ggaauaauauucgcaucuu

SEQ ID NO: 1932931 - RNA, 19 nt, Artificial Sequence
  Description of Artificial Sequence: Synthetic oligonucleotide
  Antisense strand to SEQ ID NO: 1932930
aagaugcgaauauuauucc

SEQ ID NO: 1932932 - RNA, 19 nt, Artificial Sequence
  Description of Artificial Sequence: Synthetic oligonucleotide
  Sense strand starting at position 2160 of SEQ ID NO: 1879796
uuuggaaaucugcggaagu

SEQ ID NO: 1932933 - RNA, 19 nt, Artificial Sequence
  Description of Artificial Sequence: Synthetic oligonucleotide
  Antisense strand to SEQ ID NO: 1932932
acuuccgcagauuuccaaa

SEQ ID NO: 1932934 - RNA, 19 nt, Artificial Sequence
  Description of Artificial Sequence: Synthetic oligonucleotide
  Sense strand starting at position 2162 of SEQ ID NO: 1879796
uggaaaucugcggaaguaa

SEQ ID NO: 1932935 - RNA, 19 nt, Artificial Sequence
  Description of Artificial Sequence: Synthetic oligonucleotide
  Antisense strand to SEQ ID NO: 1932934
uuacuuccgcagauuucca

SEQ ID NO: 1932936 - RNA, 19 nt, Artificial Sequence
  Description of Artificial Sequence: Synthetic oligonucleotide
  Sense strand starting at position 2171 of SEQ ID NO: 1879796
gcggaaguaacauaucuag

SEQ ID NO: 1932937 - RNA, 19 nt, Artificial Sequence
  Description of Artificial Sequence: Synthetic oligonucleotide
  Antisense strand to SEQ ID NO: 1932936
cuagauauguuacuuccgc

SEQ ID NO: 1932938 - RNA, 19 nt, Artificial Sequence
  Description of Artificial Sequence: Synthetic oligonucleotide
  Sense strand starting at position 2190 of SEQ ID NO: 1879796
auagauaucucugaagauc

SEQ ID NO: 1932939 - RNA, 19 nt, Artificial Sequence
  Description of Artificial Sequence: Synthetic oligonucleotide
  Antisense strand to SEQ ID NO: 1932938
gaucuucagagauaucuau

SEQ ID NO: 1932940 - RNA, 19 nt, Artificial Sequence
  Description of Artificial Sequence: Synthetic oligonucleotide
  Sense strand starting at position 2198 of SEQ ID NO: 1879796
cucugaagaucucuaagca

SEQ ID NO: 1932941 - RNA, 19 nt, Artificial Sequence
  Description of Artificial Sequence: Synthetic oligonucleotide
  Antisense strand to SEQ ID NO: 1932940
ugcuuagagaucuucagag

SEQ ID NO: 1932942 - RNA, 19 nt, Artificial Sequence
  Description of Artificial Sequence: Synthetic oligonucleotide
  Sense strand starting at position 2225 of SEQ ID NO: 1879796
cuuuguguugagugacuca

SEQ ID NO: 1932943 - RNA, 19 nt, Artificial Sequence
  Description of Artificial Sequence: Synthetic oligonucleotide
  Antisense strand to SEQ ID NO: 1932942
ugagucacucaacacaaag

SEQ ID NO: 1932944 - RNA, 19 nt, Artificial Sequence
  Description of Artificial Sequence: Synthetic oligonucleotide
  Sense strand starting at position 2228 of SEQ ID NO: 1879796
uguguugagugacucaguu

SEQ ID NO: 1932945 - RNA, 19 nt, Artificial Sequence
  Description of Artificial Sequence: Synthetic oligonucleotide
  Antisense strand to SEQ ID NO: 1932944
aacugagucacucaacaca

SEQ ID NO: 1932946 - RNA, 19 nt, Artificial Sequence
  Description of Artificial Sequence: Synthetic oligonucleotide
  Sense strand starting at position 2230 of SEQ ID NO: 1879796
uguugagugacucaguuac

SEQ ID NO: 1932947 - RNA, 19 nt, Artificial Sequence
  Description of Artificial Sequence: Synthetic oligonucleotide
  Antisense strand to SEQ ID NO: 1932946
guaacugagucacucaaca

SEQ ID NO: 1932948 - RNA, 19 nt, Artificial Sequence
  Description of Artificial Sequence: Synthetic oligonucleotide
  Sense strand starting at position 2232 of SEQ ID NO: 1879796
uugagugacucaguuacua

SEQ ID NO: 1932949 - RNA, 19 nt, Artificial Sequence
  Description of Artificial Sequence: Synthetic oligonucleotide
  Antisense strand to SEQ ID NO: 1932948
uaguaacugagucacucaa

SEQ ID NO: 1932950 - RNA, 19 nt, Artificial Sequence
  Description of Artificial Sequence: Synthetic oligonucleotide
  Sense strand starting at position 2237 of SEQ ID NO: 1879796
ugacucaguuacuagaugu

SEQ ID NO: 1932951 - RNA, 19 nt, Artificial Sequence
  Description of Artificial Sequence: Synthetic oligonucleotide
  Antisense strand to SEQ ID NO: 1932950
acaucuaguaacugaguca

SEQ ID NO: 1932952 - RNA, 19 nt, Artificial Sequence
  Description of Artificial Sequence: Synthetic oligonucleotide
  Sense strand starting at position 2253 of SEQ ID NO: 1879796
ugugaaaccugucaacaug

SEQ ID NO: 1932953 - RNA, 19 nt, Artificial Sequence
  Description of Artificial Sequence: Synthetic oligonucleotide
  Antisense strand to SEQ ID NO: 1932952
cauguugacagguuucaca

SEQ ID NO: 1932954 - RNA, 19 nt, Artificial Sequence
  Description of Artificial Sequence: Synthetic oligonucleotide
  Sense strand starting at position 2263 of SEQ ID NO: 1879796
gucaacauguaacuuagaa

SEQ ID NO: 1932955 - RNA, 19 nt, Artificial Sequence
  Description of Artificial Sequence: Synthetic oligonucleotide
  Antisense strand to SEQ ID NO: 1932954
uucuaaguuacauguugac

SEQ ID NO: 1932956 - RNA, 19 nt, Artificial Sequence
  Description of Artificial Sequence: Synthetic oligonucleotide
  Sense strand starting at position 2459 of SEQ ID NO: 1879796
cucccaauacuuugggaaa

SEQ ID NO: 1932957 - RNA, 19 nt, Artificial Sequence
  Description of Artificial Sequence: Synthetic oligonucleotide
  Antisense strand to SEQ ID NO: 1932956
uuucccaaaguauugggag

SEQ ID NO: 1932958 - RNA, 19 nt, Artificial Sequence
  Description of Artificial Sequence: Synthetic oligonucleotide
  Sense strand starting at position 2687 of SEQ ID NO: 1879796
gcauaauuacaguaaguua

SEQ ID NO: 1932959 - RNA, 19 nt, Artificial Sequence
  Description of Artificial Sequence: Synthetic oligonucleotide
  Antisense strand to SEQ ID NO: 1932958
uaacuuacuguaauuaugc

SEQ ID NO: 1932960 - RNA, 19 nt, Artificial Sequence
  Description of Artificial Sequence: Synthetic oligonucleotide
  Sense strand starting at position 2821 of SEQ ID NO: 1879796
gcuaacauauuuggugaaa

SEQ ID NO: 1932961 - RNA, 19 nt, Artificial Sequence
  Description of Artificial Sequence: Synthetic oligonucleotide
  Antisense strand to SEQ ID NO: 1932960
uuucaccaaauauguuagc

SEQ ID NO: 1932962 - RNA, 19 nt, Artificial Sequence
  Description of Artificial Sequence: Synthetic oligonucleotide
  Sense strand starting at position 2830 of SEQ ID NO: 1879796
uuuggugaaacagauuguu

SEQ ID NO: 1932963 - RNA, 19 nt, Artificial Sequence
  Description of Artificial Sequence: Synthetic oligonucleotide
  Antisense strand to SEQ ID NO: 1932962
aacaaucuguuucaccaaa

SEQ ID NO: 1932964 - RNA, 19 nt, Artificial Sequence
  Description of Artificial Sequence: Synthetic oligonucleotide
  Sense strand starting at position 2889 of SEQ ID NO: 1879796
uagcauguaccuggcauaa

SEQ ID NO: 1932965 - RNA, 19 nt, Artificial Sequence
  Description of Artificial Sequence: Synthetic oligonucleotide
  Antisense strand to SEQ ID NO: 1932964
uuaugccagguacaugcua

SEQ ID NO: 1932966 - RNA, 19 nt, Artificial Sequence
  Description of Artificial Sequence: Synthetic oligonucleotide
  Sense strand starting at position 2906 of SEQ ID NO: 1879796
aaagucuagccauguguca

SEQ ID NO: 1932967 - RNA, 19 nt, Artificial Sequence
  Description of Artificial Sequence: Synthetic oligonucleotide
  Antisense strand to SEQ ID NO: 1932966
ugacacauggcuagacuuu

SEQ ID NO: 1932968 - RNA, 19 nt, Artificial Sequence
  Description of Artificial Sequence: Synthetic oligonucleotide
  Sense strand starting at position 2908 of SEQ ID NO: 1879796
agucuagccaugugucaga

SEQ ID NO: 1932969 - RNA, 19 nt, Artificial Sequence
  Description of Artificial Sequence: Synthetic oligonucleotide
  Antisense strand to SEQ ID NO: 1932968
ucugacacauggcuagacu

SEQ ID NO: 1932970 - RNA, 19 nt, Artificial Sequence
  Description of Artificial Sequence: Synthetic oligonucleotide
  Sense strand starting at position 3050 of SEQ ID NO: 1879796
uaaccuguucugugauguu

SEQ ID NO: 1932971 - RNA, 19 nt, Artificial Sequence
  Description of Artificial Sequence: Synthetic oligonucleotide
  Antisense strand to SEQ ID NO: 1932970
aacaucacagaacagguua

SEQ ID NO: 1932972 - RNA, 19 nt, Artificial Sequence
  Description of Artificial Sequence: Synthetic oligonucleotide
  Sense strand starting at position 3173 of SEQ ID NO: 1879796
gucuaucagucagcuuuga

SEQ ID NO: 1932973 - RNA, 19 nt, Artificial Sequence
  Description of Artificial Sequence: Synthetic oligonucleotide
  Antisense strand to SEQ ID NO: 1932972
ucaaagcugacugauagac

SEQ ID NO: 1932974 - RNA, 19 nt, Artificial Sequence
  Description of Artificial Sequence: Synthetic oligonucleotide
  Sense strand starting at position 3205 of SEQ ID NO: 1879796
aggcucugcaauugcuaga

SEQ ID NO: 1932975 - RNA, 19 nt, Artificial Sequence
  Description of Artificial Sequence: Synthetic oligonucleotide
  Antisense strand to SEQ ID NO: 1932974
ucuagcaauugcagagccu

SEQ ID NO: 1932976 - RNA, 19 nt, Artificial Sequence
  Description of Artificial Sequence: Synthetic oligonucleotide
  Sense strand starting at position 3446 of SEQ ID NO: 1879796
cuucuuaauuagguaaaug

SEQ ID NO: 1932977 - RNA, 19 nt, Artificial Sequence
  Description of Artificial Sequence: Synthetic oligonucleotide
  Antisense strand to SEQ ID NO: 1932976
cauuuaccuaauuaagaag

SEQ ID NO: 1932978 - RNA, 19 nt, Artificial Sequence
  Description of Artificial Sequence: Synthetic oligonucleotide
  Sense strand starting at position 3750 of SEQ ID NO: 1879796
ccgguaggauaauccauaa

SEQ ID NO: 1932979 - RNA, 19 nt, Artificial Sequence
  Description of Artificial Sequence: Synthetic oligonucleotide
  Antisense strand to SEQ ID NO: 1932978
uuauggauuauccuaccgg

SEQ ID NO: 1932980 - RNA, 19 nt, Artificial Sequence
  Description of Artificial Sequence: Synthetic oligonucleotide
  Sense strand starting at position 3777 of SEQ ID NO: 1879796
gucaauaucuuauaaggau

SEQ ID NO: 1932981 - RNA, 19 nt, Artificial Sequence
  Description of Artificial Sequence: Synthetic oligonucleotide
  Antisense strand to SEQ ID NO: 1932980
auccuuauaagauauugac

SEQ ID NO: 1932982 - RNA, 19 nt, Artificial Sequence
  Description of Artificial Sequence: Synthetic oligonucleotide
  Sense strand starting at position 3791 of SEQ ID NO: 1879796
aggauuauaucacacugag

SEQ ID NO: 1932983 - RNA, 19 nt, Artificial Sequence
  Description of Artificial Sequence: Synthetic oligonucleotide
  Antisense strand to SEQ ID NO: 1932982
cucagugugauauaauccu

SEQ ID NO: 1932984 - RNA, 19 nt, Artificial Sequence
  Description of Artificial Sequence: Synthetic oligonucleotide
  Sense strand starting at position 3794 of SEQ ID NO: 1879796
auuauaucacacugaguuc

SEQ ID NO: 1932985 - RNA, 19 nt, Artificial Sequence
  Description of Artificial Sequence: Synthetic oligonucleotide
  Antisense strand to SEQ ID NO: 1932984
gaacucagugugauauaau

SEQ ID NO: 1932986 - RNA, 19 nt, Artificial Sequence
  Description of Artificial Sequence: Synthetic oligonucleotide
  Sense strand starting at position 3825 of SEQ ID NO: 1879796
gguagcaucuaagccauuu

SEQ ID NO: 1932987 - RNA, 19 nt, Artificial Sequence
  Description of Artificial Sequence: Synthetic oligonucleotide
  Antisense strand to SEQ ID NO: 1932986
aaauggcuuagaugcuacc

SEQ ID NO: 1932988 - RNA, 19 nt, Artificial Sequence
  Description of Artificial Sequence: Synthetic oligonucleotide
  Sense strand starting at position 3951 of SEQ ID NO: 1879796
ucauuugucaaagguguuc

SEQ ID NO: 1932989 - RNA, 19 nt, Artificial Sequence
  Description of Artificial Sequence: Synthetic oligonucleotide
  Antisense strand to SEQ ID NO: 1932988
gaacaccuuugacaaauga

SEQ ID NO: 1932990 - RNA, 19 nt, Artificial Sequence
  Description of Artificial Sequence: Synthetic oligonucleotide
  Sense strand starting at position 2635 of SEQ ID NO: 1879806
guucguucucguuccggaa

SEQ ID NO: 1932991 - RNA, 19 nt, Artificial Sequence
  Description of Artificial Sequence: Synthetic oligonucleotide
  Antisense strand to SEQ ID NO: 1932990
uuccggaacgagaacgaac

SEQ ID NO: 1932992 - RNA, 19 nt, Artificial Sequence
  Description of Artificial Sequence: Synthetic oligonucleotide
  Sense strand starting at position 2936 of SEQ ID NO: 1879806
gcgagaacguuugagccuu

SEQ ID NO: 1932993 - RNA, 19 nt, Artificial Sequence
  Description of Artificial Sequence: Synthetic oligonucleotide
  Antisense strand to SEQ ID NO: 1932992
aaggcucaaacguucucgc

SEQ ID NO: 1932994 - RNA, 19 nt, Artificial Sequence
  Description of Artificial Sequence: Synthetic oligonucleotide
  Sense strand starting at position 2942 of SEQ ID NO: 1879806
acguuugagccuuagagag

SEQ ID NO: 1932995 - RNA, 19 nt, Artificial Sequence
  Description of Artificial Sequence: Synthetic oligonucleotide
  Antisense strand to SEQ ID NO: 1932994
cucucuaaggcucaaacgu

SEQ ID NO: 1932996 - RNA, 19 nt, Artificial Sequence
  Description of Artificial Sequence: Synthetic oligonucleotide
  Sense strand starting at position 2944 of SEQ ID NO: 1879806
guuugagccuuagagagga

SEQ ID NO: 1932997 - RNA, 19 nt, Artificial Sequence
  Description of Artificial Sequence: Synthetic oligonucleotide
  Antisense strand to SEQ ID NO: 1932996
uccucucuaaggcucaaac

SEQ ID NO: 1932998 - RNA, 19 nt, Artificial Sequence
  Description of Artificial Sequence: Synthetic oligonucleotide
  Sense strand starting at position 3017 of SEQ ID NO: 1879806
ggguuugagcugugccuga

SEQ ID NO: 1932999 - RNA, 19 nt, Artificial Sequence
  Description of Artificial Sequence: Synthetic oligonucleotide
  Antisense strand to SEQ ID NO: 1932998
ucaggcacagcucaaaccc

SEQ ID NO: 1933000 - RNA, 19 nt, Artificial Sequence
  Description of Artificial Sequence: Synthetic oligonucleotide
  Sense strand starting at position 3278 of SEQ ID NO: 1879806
gcguguccucgguacugga

SEQ ID NO: 1933001 - RNA, 19 nt, Artificial Sequence
  Description of Artificial Sequence: Synthetic oligonucleotide
  Antisense strand to SEQ ID NO: 1933000
uccaguaccgaggacacgc

SEQ ID NO: 1933002 - RNA, 19 nt, Artificial Sequence
  Description of Artificial Sequence: Synthetic oligonucleotide
  Sense strand starting at position 3368 of SEQ ID NO: 1879806
uguccuuccucccggguaa

SEQ ID NO: 1933003 - RNA, 19 nt, Artificial Sequence
  Description of Artificial Sequence: Synthetic oligonucleotide
  Antisense strand to SEQ ID NO: 1933002
uuacccgggaggaaggaca

SEQ ID NO: 1933004 - RNA, 19 nt, Artificial Sequence
  Description of Artificial Sequence: Synthetic oligonucleotide
  Sense strand starting at position 3369 of SEQ ID NO: 1879806
guccuuccucccggguaaa

SEQ ID NO: 1933005 - RNA, 19 nt, Artificial Sequence
  Description of Artificial Sequence: Synthetic oligonucleotide
  Antisense strand to SEQ ID NO: 1933004
uuuacccgggaggaaggac

SEQ ID NO: 1933006 - RNA, 19 nt, Artificial Sequence
  Description of Artificial Sequence: Synthetic oligonucleotide
  Sense strand starting at position 3463 of SEQ ID NO: 1879806
gguuuauaagguugcgacu

SEQ ID NO: 1933007 - RNA, 19 nt, Artificial Sequence
  Description of Artificial Sequence: Synthetic oligonucleotide
  Antisense strand to SEQ ID NO: 1933006
agucgcaaccuuauaaacc

SEQ ID NO: 1933008 - RNA, 19 nt, Artificial Sequence
  Description of Artificial Sequence: Synthetic oligonucleotide
  Sense strand starting at position 3496 of SEQ ID NO: 1879806
aauugaauugccuggugga

SEQ ID NO: 1933009 - RNA, 19 nt, Artificial Sequence
  Description of Artificial Sequence: Synthetic oligonucleotide
  Antisense strand to SEQ ID NO: 1933008
uccaccaggcaauucaauu

SEQ ID NO: 1933010 - RNA, 19 nt, Artificial Sequence
  Description of Artificial Sequence: Synthetic oligonucleotide
  Sense strand starting at position 3497 of SEQ ID NO: 1879806
auugaauugccugguggau

SEQ ID NO: 1933011 - RNA, 19 nt, Artificial Sequence
  Description of Artificial Sequence: Synthetic oligonucleotide
  Antisense strand to SEQ ID NO: 1933010
auccaccaggcaauucaau

SEQ ID NO: 1933012 - RNA, 19 nt, Artificial Sequence
  Description of Artificial Sequence: Synthetic oligonucleotide
  Sense strand starting at position 3553 of SEQ ID NO: 1879806
uggccugcaccuuagugau

SEQ ID NO: 1933013 - RNA, 19 nt, Artificial Sequence
  Description of Artificial Sequence: Synthetic oligonucleotide
  Antisense strand to SEQ ID NO: 1933012
aucacuaaggugcaggcca

SEQ ID NO: 1933014 - RNA, 19 nt, Artificial Sequence
  Description of Artificial Sequence: Synthetic oligonucleotide
  Sense strand starting at position 3577 of SEQ ID NO: 1879806
gcgugguguuucugcugga

SEQ ID NO: 1933015 - RNA, 19 nt, Artificial Sequence
  Description of Artificial Sequence: Synthetic oligonucleotide
  Antisense strand to SEQ ID NO: 1933014
uccagcagaaacaccacgc

SEQ ID NO: 1933016 - RNA, 19 nt, Artificial Sequence
  Description of Artificial Sequence: Synthetic oligonucleotide
  Sense strand starting at position 3621 of SEQ ID NO: 1879806
cauccugaauaguugugau

SEQ ID NO: 1933017 - RNA, 19 nt, Artificial Sequence
  Description of Artificial Sequence: Synthetic oligonucleotide
  Antisense strand to SEQ ID NO: 1933016
aucacaacuauucaggaug

SEQ ID NO: 1933018 - RNA, 19 nt, Artificial Sequence
  Description of Artificial Sequence: Synthetic oligonucleotide
  Sense strand starting at position 3624 of SEQ ID NO: 1879806
ccugaauaguugugauguu

SEQ ID NO: 1933019 - RNA, 19 nt, Artificial Sequence
  Description of Artificial Sequence: Synthetic oligonucleotide
  Antisense strand to SEQ ID NO: 1933018
aacaucacaacuauucagg

SEQ ID NO: 1933020 - RNA, 19 nt, Artificial Sequence
  Description of Artificial Sequence: Synthetic oligonucleotide
  Sense strand starting at position 3697 of SEQ ID NO: 1879806
ugggcuugggcgugugaaa

SEQ ID NO: 1933021 - RNA, 19 nt, Artificial Sequence
  Description of Artificial Sequence: Synthetic oligonucleotide
  Antisense strand to SEQ ID NO: 1933020
uuucacacgcccaagccca

SEQ ID NO: 1933022 - RNA, 19 nt, Artificial Sequence
  Description of Artificial Sequence: Synthetic oligonucleotide
  Sense strand starting at position 3723 of SEQ ID NO: 1879806
gcagauuuacggugcgguu

SEQ ID NO: 1933023 - RNA, 19 nt, Artificial Sequence
  Description of Artificial Sequence: Synthetic oligonucleotide
  Antisense strand to SEQ ID NO: 1933022
aaccgcaccguaaaucugc

SEQ ID NO: 1933024 - RNA, 19 nt, Artificial Sequence
  Description of Artificial Sequence: Synthetic oligonucleotide
  Sense strand starting at position 3817 of SEQ ID NO: 1879806
aguggcguuucaucuaagu

SEQ ID NO: 1933025 - RNA, 19 nt, Artificial Sequence
  Description of Artificial Sequence: Synthetic oligonucleotide
  Antisense strand to SEQ ID NO: 1933024
acuuagaugaaacgccacu

SEQ ID NO: 1933026 - RNA, 19 nt, Artificial Sequence
  Description of Artificial Sequence: Synthetic oligonucleotide
  Sense strand starting at position 69 of SEQ ID NO: 1879807
cacugaaugccaggagaca

SEQ ID NO: 1933027 - RNA, 19 nt, Artificial Sequence
  Description of Artificial Sequence: Synthetic oligonucleotide
  Antisense strand to SEQ ID NO: 1933026
ugucuccuggcauucagug

SEQ ID NO: 1933028 - RNA, 19 nt, Artificial Sequence
  Description of Artificial Sequence: Synthetic oligonucleotide
  Sense strand starting at position 87 of SEQ ID NO: 1879807
agaggugaaugguuacagu

SEQ ID NO: 1933029 - RNA, 19 nt, Artificial Sequence
  Description of Artificial Sequence: Synthetic oligonucleotide
  Antisense strand to SEQ ID NO: 1933028
acuguaaccauucaccucu

SEQ ID NO: 1933030 - RNA, 19 nt, Artificial Sequence
  Description of Artificial Sequence: Synthetic oligonucleotide
  Sense strand starting at position 528 of SEQ ID NO: 1879807
ccagucuuacagggaacaa

SEQ ID NO: 1933031 - RNA, 19 nt, Artificial Sequence
  Description of Artificial Sequence: Synthetic oligonucleotide
  Antisense strand to SEQ ID NO: 1933030
uuguucccuguaagacugg

SEQ ID NO: 1933032 - RNA, 19 nt, Artificial Sequence
  Description of Artificial Sequence: Synthetic oligonucleotide
  Sense strand starting at position 830 of SEQ ID NO: 1879807
uuggaugguccugggugaa

SEQ ID NO: 1933033 - RNA, 19 nt, Artificial Sequence
  Description of Artificial Sequence: Synthetic oligonucleotide
  Antisense strand to SEQ ID NO: 1933032
uucacccaggaccauccaa

SEQ ID NO: 1933034 - RNA, 19 nt, Artificial Sequence
  Description of Artificial Sequence: Synthetic oligonucleotide
  Sense strand starting at position 833 of SEQ ID NO: 1879807
gaugguccugggugaauuc

SEQ ID NO: 1933035 - RNA, 19 nt, Artificial Sequence
  Description of Artificial Sequence: Synthetic oligonucleotide
  Antisense strand to SEQ ID NO: 1933034
gaauucacccaggaccauc

SEQ ID NO: 1933036 - RNA, 19 nt, Artificial Sequence
  Description of Artificial Sequence: Synthetic oligonucleotide
  Sense strand starting at position 1146 of SEQ ID NO: 1879807
ggaacuggguuguuaacua

SEQ ID NO: 1933037 - RNA, 19 nt, Artificial Sequence
  Description of Artificial Sequence: Synthetic oligonucleotide
  Antisense strand to SEQ ID NO: 1933036
uaguuaacaacccaguucc

SEQ ID NO: 1933038 - RNA, 19 nt, Artificial Sequence
  Description of Artificial Sequence: Synthetic oligonucleotide
  Sense strand starting at position 1150 of SEQ ID NO: 1879807
cuggguuguuaacuaagga

SEQ ID NO: 1933039 - RNA, 19 nt, Artificial Sequence
  Description of Artificial Sequence: Synthetic oligonucleotide
  Antisense strand to SEQ ID NO: 1933038
uccuuaguuaacaacccag

SEQ ID NO: 1933040 - RNA, 19 nt, Artificial Sequence
  Description of Artificial Sequence: Synthetic oligonucleotide
  Sense strand starting at position 1510 of SEQ ID NO: 1879807
gcaugcuuaggagacauga

SEQ ID NO: 1933041 - RNA, 19 nt, Artificial Sequence
  Description of Artificial Sequence: Synthetic oligonucleotide
  Antisense strand to SEQ ID NO: 1933040
ucaugucuccuaagcaugc

SEQ ID NO: 1933042 - RNA, 19 nt, Artificial Sequence
  Description of Artificial Sequence: Synthetic oligonucleotide
  Sense strand starting at position 2022 of SEQ ID NO: 1879807
gugccuugucuuccugagu

SEQ ID NO: 1933043 - RNA, 19 nt, Artificial Sequence
  Description of Artificial Sequence: Synthetic oligonucleotide
  Antisense strand to SEQ ID NO: 1933042
acucaggaagacaaggcac

SEQ ID NO: 1933044 - RNA, 19 nt, Artificial Sequence
  Description of Artificial Sequence: Synthetic oligonucleotide
  Sense strand starting at position 2025 of SEQ ID NO: 1879807
ccuugucuuccugaguuau

SEQ ID NO: 1933045 - RNA, 19 nt, Artificial Sequence
  Description of Artificial Sequence: Synthetic oligonucleotide
  Antisense strand to SEQ ID NO: 1933044
auaacucaggaagacaagg

SEQ ID NO: 1933046 - RNA, 19 nt, Artificial Sequence
  Description of Artificial Sequence: Synthetic oligonucleotide
  Sense strand starting at position 2027 of SEQ ID NO: 1879807
uugucuuccugaguuauga

SEQ ID NO: 1933047 - RNA, 19 nt, Artificial Sequence
  Description of Artificial Sequence: Synthetic oligonucleotide
  Antisense strand to SEQ ID NO: 1933046
ucauaacucaggaagacaa

SEQ ID NO: 1933048 - RNA, 19 nt, Artificial Sequence
  Description of Artificial Sequence: Synthetic oligonucleotide
  Sense strand starting at position 2036 of SEQ ID NO: 1879807
ugaguuaugacauagcugu

SEQ ID NO: 1933049 - RNA, 19 nt, Artificial Sequence
  Description of Artificial Sequence: Synthetic oligonucleotide
  Antisense strand to SEQ ID NO: 1933048
acagcuaugucauaacuca

SEQ ID NO: 1933050 - RNA, 19 nt, Artificial Sequence
  Description of Artificial Sequence: Synthetic oligonucleotide
  Sense strand starting at position 2065 of SEQ ID NO: 1879807
cacccagugugguucugaa

SEQ ID NO: 1933051 - RNA, 19 nt, Artificial Sequence
  Description of Artificial Sequence: Synthetic oligonucleotide
  Antisense strand to SEQ ID NO: 1933050
uucagaaccacacugggug

SEQ ID NO: 1933052 - RNA, 19 nt, Artificial Sequence
  Description of Artificial Sequence: Synthetic oligonucleotide
  Sense strand starting at position 2086 of SEQ ID NO: 1879807
auuuaaucagcacgagucu

SEQ ID NO: 1933053 - RNA, 19 nt, Artificial Sequence
  Description of Artificial Sequence: Synthetic oligonucleotide
  Antisense strand to SEQ ID NO: 1933052
agacucgugcugauuaaau

SEQ ID NO: 1933054 - RNA, 19 nt, Artificial Sequence
  Description of Artificial Sequence: Synthetic oligonucleotide
  Sense strand starting at position 2099 of SEQ ID NO: 1879807
gagucuuaggccgacacca

SEQ ID NO: 1933055 - RNA, 19 nt, Artificial Sequence
  Description of Artificial Sequence: Synthetic oligonucleotide
  Antisense strand to SEQ ID NO: 1933054
uggugucggccuaagacuc

SEQ ID NO: 1933056 - RNA, 19 nt, Artificial Sequence
  Description of Artificial Sequence: Synthetic oligonucleotide
  Sense strand starting at position 2297 of SEQ ID NO: 1879807
acaagucuuagaggugaga

SEQ ID NO: 1933057 - RNA, 19 nt, Artificial Sequence
  Description of Artificial Sequence: Synthetic oligonucleotide
  Antisense strand to SEQ ID NO: 1933056
ucucaccucuaagacuugu

SEQ ID NO: 1933058 - RNA, 19 nt, Artificial Sequence
  Description of Artificial Sequence: Synthetic oligonucleotide
  Sense strand starting at position 2327 of SEQ ID NO: 1879807
cugguuuguuaccuccaua

SEQ ID NO: 1933059 - RNA, 19 nt, Artificial Sequence
  Description of Artificial Sequence: Synthetic oligonucleotide
  Antisense strand to SEQ ID NO: 1933058
uauggagguaacaaaccag

SEQ ID NO: 1933060 - RNA, 19 nt, Artificial Sequence
  Description of Artificial Sequence: Synthetic oligonucleotide
  Sense strand starting at position 2330 of SEQ ID NO: 1879807
guuuguuaccuccauagca

SEQ ID NO: 1933061 - RNA, 19 nt, Artificial Sequence
  Description of Artificial Sequence: Synthetic oligonucleotide
  Antisense strand to SEQ ID NO: 1933060
ugcuauggagguaacaaac

SEQ ID NO: 1933062 - RNA, 19 nt, Artificial Sequence
  Description of Artificial Sequence: Synthetic oligonucleotide
  Sense strand starting at position 2332 of SEQ ID NO: 1879807
uuguuaccuccauagcaca

SEQ ID NO: 1933063 - RNA, 19 nt, Artificial Sequence
  Description of Artificial Sequence: Synthetic oligonucleotide
  Antisense strand to SEQ ID NO: 1933062
ugugcuauggagguaacaa

SEQ ID NO: 1933064 - RNA, 19 nt, Artificial Sequence
  Description of Artificial Sequence: Synthetic oligonucleotide
  Sense strand starting at position 2485 of SEQ ID NO: 1879807
aucucucacugcuuaguga

SEQ ID NO: 1933065 - RNA, 19 nt, Artificial Sequence
  Description of Artificial Sequence: Synthetic oligonucleotide
  Antisense strand to SEQ ID NO: 1933064
ucacuaagcagugagagau

SEQ ID NO: 1933066 - RNA, 19 nt, Artificial Sequence
  Description of Artificial Sequence: Synthetic oligonucleotide
  Sense strand starting at position 2486 of SEQ ID NO: 1879807
ucucucacugcuuagugau

SEQ ID NO: 1933067 - RNA, 19 nt, Artificial Sequence
  Description of Artificial Sequence: Synthetic oligonucleotide
  Antisense strand to SEQ ID NO: 1933066
aucacuaagcagugagaga

SEQ ID NO: 1933068 - RNA, 19 nt, Artificial Sequence
  Description of Artificial Sequence: Synthetic oligonucleotide
  Sense strand starting at position 2499 of SEQ ID NO: 1879807
agugauguguccucacgag

SEQ ID NO: 1933069 - RNA, 19 nt, Artificial Sequence
  Description of Artificial Sequence: Synthetic oligonucleotide
  Antisense strand to SEQ ID NO: 1933068
cucgugaggacacaucacu

SEQ ID NO: 1933070 - RNA, 19 nt, Artificial Sequence
  Description of Artificial Sequence: Synthetic oligonucleotide
  Sense strand starting at position 2597 of SEQ ID NO: 1879807
auggcuguuccuggaguca

SEQ ID NO: 1933071 - RNA, 19 nt, Artificial Sequence
  Description of Artificial Sequence: Synthetic oligonucleotide
  Antisense strand to SEQ ID NO: 1933070
ugacuccaggaacagccau

SEQ ID NO: 1933072 - RNA, 19 nt, Artificial Sequence
  Description of Artificial Sequence: Synthetic oligonucleotide
  Sense strand starting at position 2648 of SEQ ID NO: 1879807
ggagccaucuguccaucua

SEQ ID NO: 1933073 - RNA, 19 nt, Artificial Sequence
  Description of Artificial Sequence: Synthetic oligonucleotide
  Antisense strand to SEQ ID NO: 1933072
uagauggacagauggcucc

SEQ ID NO: 1933074 - RNA, 19 nt, Artificial Sequence
  Description of Artificial Sequence: Synthetic oligonucleotide
  Sense strand starting at position 2752 of SEQ ID NO: 1879807
gcuccauauccuggaagag

SEQ ID NO: 1933075 - RNA, 19 nt, Artificial Sequence
  Description of Artificial Sequence: Synthetic oligonucleotide
  Antisense strand to SEQ ID NO: 1933074
cucuuccaggauauggagc

SEQ ID NO: 1933076 - RNA, 19 nt, Artificial Sequence
  Description of Artificial Sequence: Synthetic oligonucleotide
  Sense strand starting at position 2784 of SEQ ID NO: 1879807
gucugcucgaguccuucua

SEQ ID NO: 1933077 - RNA, 19 nt, Artificial Sequence
  Description of Artificial Sequence: Synthetic oligonucleotide
  Antisense strand to SEQ ID NO: 1933076
uagaaggacucgagcagac

SEQ ID NO: 1933078 - RNA, 19 nt, Artificial Sequence
  Description of Artificial Sequence: Synthetic oligonucleotide
  Sense strand starting at position 2844 of SEQ ID NO: 1879807
ggaggagggugugauuuaa

SEQ ID NO: 1933079 - RNA, 19 nt, Artificial Sequence
  Description of Artificial Sequence: Synthetic oligonucleotide
  Antisense strand to SEQ ID NO: 1933078
uuaaaucacacccuccucc

SEQ ID NO: 1933080 - RNA, 19 nt, Artificial Sequence
  Description of Artificial Sequence: Synthetic oligonucleotide
  Sense strand starting at position 2852 of SEQ ID NO: 1879807
gugugauuuaaggguggcu

SEQ ID NO: 1933081 - RNA, 19 nt, Artificial Sequence
  Description of Artificial Sequence: Synthetic oligonucleotide
  Antisense strand to SEQ ID NO: 1933080
agccacccuuaaaucacac

SEQ ID NO: 1933082 - RNA, 19 nt, Artificial Sequence
  Description of Artificial Sequence: Synthetic oligonucleotide
  Sense strand starting at position 3021 of SEQ ID NO: 1879807
uugagagugagcugcucaa

SEQ ID NO: 1933083 - RNA, 19 nt, Artificial Sequence
  Description of Artificial Sequence: Synthetic oligonucleotide
  Antisense strand to SEQ ID NO: 1933082
uugagcagcucacucucaa

SEQ ID NO: 1933084 - RNA, 19 nt, Artificial Sequence
  Description of Artificial Sequence: Synthetic oligonucleotide
  Sense strand starting at position 3025 of SEQ ID NO: 1879807
gagugagcugcucaauggu

SEQ ID NO: 1933085 - RNA, 19 nt, Artificial Sequence
  Description of Artificial Sequence: Synthetic oligonucleotide
  Antisense strand to SEQ ID NO: 1933084
accauugagcagcucacuc

SEQ ID NO: 1933086 - RNA, 19 nt, Artificial Sequence
  Description of Artificial Sequence: Synthetic oligonucleotide
  Sense strand starting at position 3033 of SEQ ID NO: 1879807
ugcucaaugguauggaaga

SEQ ID NO: 1933087 - RNA, 19 nt, Artificial Sequence
  Description of Artificial Sequence: Synthetic oligonucleotide
  Antisense strand to SEQ ID NO: 1933086
ucuuccauaccauugagca

SEQ ID NO: 1933088 - RNA, 19 nt, Artificial Sequence
  Description of Artificial Sequence: Synthetic oligonucleotide
  Sense strand starting at position 3195 of SEQ ID NO: 1879807
gaguggucggugcuugagu

SEQ ID NO: 1933089 - RNA, 19 nt, Artificial Sequence
  Description of Artificial Sequence: Synthetic oligonucleotide
  Antisense strand to SEQ ID NO: 1933088
acucaagcaccgaccacuc

SEQ ID NO: 1933090 - RNA, 19 nt, Artificial Sequence
  Description of Artificial Sequence: Synthetic oligonucleotide
  Sense strand starting at position 3354 of SEQ ID NO: 1879807
ggcaguccucuccagacaa

SEQ ID NO: 1933091 - RNA, 19 nt, Artificial Sequence
  Description of Artificial Sequence: Synthetic oligonucleotide
  Antisense strand to SEQ ID NO: 1933090
uugucuggagaggacugcc

SEQ ID NO: 1933092 - RNA, 19 nt, Artificial Sequence
  Description of Artificial Sequence: Synthetic oligonucleotide
  Sense strand starting at position 3473 of SEQ ID NO: 1879807
gggagaugcugagcgauga

SEQ ID NO: 1933093 - RNA, 19 nt, Artificial Sequence
  Description of Artificial Sequence: Synthetic oligonucleotide
  Antisense strand to SEQ ID NO: 1933092
ucaucgcucagcaucuccc

SEQ ID NO: 1933094 - RNA, 19 nt, Artificial Sequence
  Description of Artificial Sequence: Synthetic oligonucleotide
  Sense strand starting at position 3474 of SEQ ID NO: 1879807
ggagaugcugagcgaugaa

SEQ ID NO: 1933095 - RNA, 19 nt, Artificial Sequence
  Description of Artificial Sequence: Synthetic oligonucleotide
  Antisense strand to SEQ ID NO: 1933094
uucaucgcucagcaucucc

SEQ ID NO: 1933096 - RNA, 19 nt, Artificial Sequence
  Description of Artificial Sequence: Synthetic oligonucleotide
  Sense strand starting at position 3563 of SEQ ID NO: 1879807
aacagauugugagcugguu

SEQ ID NO: 1933097 - RNA, 19 nt, Artificial Sequence
  Description of Artificial Sequence: Synthetic oligonucleotide
  Antisense strand to SEQ ID NO: 1933096
aaccagcucacaaucuguu

SEQ ID NO: 1933098 - RNA, 19 nt, Artificial Sequence
  Description of Artificial Sequence: Synthetic oligonucleotide
  Sense strand starting at position 3631 of SEQ ID NO: 1879807
uccagcucuggaugaacua

SEQ ID NO: 1933099 - RNA, 19 nt, Artificial Sequence
  Description of Artificial Sequence: Synthetic oligonucleotide
  Antisense strand to SEQ ID NO: 1933098
uaguucauccagagcugga

SEQ ID NO: 1933100 - RNA, 19 nt, Artificial Sequence
  Description of Artificial Sequence: Synthetic oligonucleotide
  Sense strand starting at position 3858 of SEQ ID NO: 1879807
uugcauaucaggugaagga

SEQ ID NO: 1933101 - RNA, 19 nt, Artificial Sequence
  Description of Artificial Sequence: Synthetic oligonucleotide
  Antisense strand to SEQ ID NO: 1933100
uccuucaccugauaugcaa

SEQ ID NO: 1933102 - RNA, 19 nt, Artificial Sequence
  Description of Artificial Sequence: Synthetic oligonucleotide
  Sense strand starting at position 3931 of SEQ ID NO: 1879807
aggcauuuaucccugccau

SEQ ID NO: 1933103 - RNA, 19 nt, Artificial Sequence
  Description of Artificial Sequence: Synthetic oligonucleotide
  Antisense strand to SEQ ID NO: 1933102
auggcagggauaaaugccu

SEQ ID NO: 1933104 - RNA, 19 nt, Artificial Sequence
  Description of Artificial Sequence: Synthetic oligonucleotide
  Sense strand starting at position 3932 of SEQ ID NO: 1879807
ggcauuuaucccugccauu

SEQ ID NO: 1933105 - RNA, 19 nt, Artificial Sequence
  Description of Artificial Sequence: Synthetic oligonucleotide
  Antisense strand to SEQ ID NO: 1933104
aauggcagggauaaaugcc

SEQ ID NO: 1933106 - RNA, 19 nt, Artificial Sequence
  Description of Artificial Sequence: Synthetic oligonucleotide
  Sense strand starting at position 86 of SEQ ID NO: 1879808
agaggugccucaugcuuga

SEQ ID NO: 1933107 - RNA, 19 nt, Artificial Sequence
  Description of Artificial Sequence: Synthetic oligonucleotide
  Antisense strand to SEQ ID NO: 1933106
ucaagcaugaggcaccucu

SEQ ID NO: 1933108 - RNA, 19 nt, Artificial Sequence
  Description of Artificial Sequence: Synthetic oligonucleotide
  Sense strand starting at position 89 of SEQ ID NO: 1879808
ggugccucaugcuugagaa

SEQ ID NO: 1933109 - RNA, 19 nt, Artificial Sequence
  Description of Artificial Sequence: Synthetic oligonucleotide
  Antisense strand to SEQ ID NO: 1933108
uucucaagcaugaggcacc

SEQ ID NO: 1933110 - RNA, 19 nt, Artificial Sequence
  Description of Artificial Sequence: Synthetic oligonucleotide
  Sense strand starting at position 90 of SEQ ID NO: 1879808
gugccucaugcuugagaag

SEQ ID NO: 1933111 - RNA, 19 nt, Artificial Sequence
  Description of Artificial Sequence: Synthetic oligonucleotide
  Antisense strand to SEQ ID NO: 1933110
cuucucaagcaugaggcac

SEQ ID NO: 1933112 - RNA, 19 nt, Artificial Sequence
  Description of Artificial Sequence: Synthetic oligonucleotide
  Sense strand starting at position 108 of SEQ ID NO: 1879808
gggucucucugccaaggau

SEQ ID NO: 1933113 - RNA, 19 nt, Artificial Sequence
  Description of Artificial Sequence: Synthetic oligonucleotide
  Antisense strand to SEQ ID NO: 1933112
auccuuggcagagagaccc

SEQ ID NO: 1933114 - RNA, 19 nt, Artificial Sequence
  Description of Artificial Sequence: Synthetic oligonucleotide
  Sense strand starting at position 527 of SEQ ID NO: 1879808
ggcaguucuccaggaccca

SEQ ID NO: 1933115 - RNA, 19 nt, Artificial Sequence
  Description of Artificial Sequence: Synthetic oligonucleotide
  Antisense strand to SEQ ID NO: 1933114
uggguccuggagaacugcc

SEQ ID NO: 1933116 - RNA, 19 nt, Artificial Sequence
  Description of Artificial Sequence: Synthetic oligonucleotide
  Sense strand starting at position 555 of SEQ ID NO: 1879808
cccacugucggugagucaa

SEQ ID NO: 1933117 - RNA, 19 nt, Artificial Sequence
  Description of Artificial Sequence: Synthetic oligonucleotide
  Antisense strand to SEQ ID NO: 1933116
uugacucaccgacaguggg

SEQ ID NO: 1933118 - RNA, 19 nt, Artificial Sequence
  Description of Artificial Sequence: Synthetic oligonucleotide
  Sense strand starting at position 557 of SEQ ID NO: 1879808
cacugucggugagucaauu

SEQ ID NO: 1933119 - RNA, 19 nt, Artificial Sequence
  Description of Artificial Sequence: Synthetic oligonucleotide
  Antisense strand to SEQ ID NO: 1933118
aauugacucaccgacagug

SEQ ID NO: 1933120 - RNA, 19 nt, Artificial Sequence
  Description of Artificial Sequence: Synthetic oligonucleotide
  Sense strand starting at position 568 of SEQ ID NO: 1879808
agucaauucuagucugaca

SEQ ID NO: 1933121 - RNA, 19 nt, Artificial Sequence
  Description of Artificial Sequence: Synthetic oligonucleotide
  Antisense strand to SEQ ID NO: 1933120
ugucagacuagaauugacu

SEQ ID NO: 1933122 - RNA, 19 nt, Artificial Sequence
  Description of Artificial Sequence: Synthetic oligonucleotide
  Sense strand starting at position 846 of SEQ ID NO: 1879808
auacaaguucucugagccu

SEQ ID NO: 1933123 - RNA, 19 nt, Artificial Sequence
  Description of Artificial Sequence: Synthetic oligonucleotide
  Antisense strand to SEQ ID NO: 1933122
aggcucagagaacuuguau

SEQ ID NO: 1933124 - RNA, 19 nt, Artificial Sequence
  Description of Artificial Sequence: Synthetic oligonucleotide
  Sense strand starting at position 887 of SEQ ID NO: 1879808
gguuuaucuuaucuuacca

SEQ ID NO: 1933125 - RNA, 19 nt, Artificial Sequence
  Description of Artificial Sequence: Synthetic oligonucleotide
  Antisense strand to SEQ ID NO: 1933124
ugguaagauaagauaaacc

SEQ ID NO: 1933126 - RNA, 19 nt, Artificial Sequence
  Description of Artificial Sequence: Synthetic oligonucleotide
  Sense strand starting at position 933 of SEQ ID NO: 1879808
ggguuauccuauguuacca

SEQ ID NO: 1933127 - RNA, 19 nt, Artificial Sequence
  Description of Artificial Sequence: Synthetic oligonucleotide
  Antisense strand to SEQ ID NO: 1933126
ugguaacauaggauaaccc

SEQ ID NO: 1933128 - RNA, 19 nt, Artificial Sequence
  Description of Artificial Sequence: Synthetic oligonucleotide
  Sense strand starting at position 1015 of SEQ ID NO: 1879808
gggagugacguucauauug

SEQ ID NO: 1933129 - RNA, 19 nt, Artificial Sequence
  Description of Artificial Sequence: Synthetic oligonucleotide
  Antisense strand to SEQ ID NO: 1933128
caauaugaacgucacuccc

SEQ ID NO: 1933130 - RNA, 19 nt, Artificial Sequence
  Description of Artificial Sequence: Synthetic oligonucleotide
  Sense strand starting at position 1088 of SEQ ID NO: 1879808
ucauuugccuugcucgauu

SEQ ID NO: 1933131 - RNA, 19 nt, Artificial Sequence
  Description of Artificial Sequence: Synthetic oligonucleotide
  Antisense strand to SEQ ID NO: 1933130
aaucgagcaaggcaaauga

SEQ ID NO: 1933132 - RNA, 19 nt, Artificial Sequence
  Description of Artificial Sequence: Synthetic oligonucleotide
  Sense strand starting at position 1260 of SEQ ID NO: 1879808
gacacaggacccugguauu

SEQ ID NO: 1933133 - RNA, 19 nt, Artificial Sequence
  Description of Artificial Sequence: Synthetic oligonucleotide
  Antisense strand to SEQ ID NO: 1933132
aauaccaggguccuguguc

SEQ ID NO: 1933134 - RNA, 19 nt, Artificial Sequence
  Description of Artificial Sequence: Synthetic oligonucleotide
  Sense strand starting at position 1272 of SEQ ID NO: 1879808
ugguauuucuaagaaaucg

SEQ ID NO: 1933135 - RNA, 19 nt, Artificial Sequence
  Description of Artificial Sequence: Synthetic oligonucleotide
  Antisense strand to SEQ ID NO: 1933134
cgauuucuuagaaauacca

SEQ ID NO: 1933136 - RNA, 19 nt, Artificial Sequence
  Description of Artificial Sequence: Synthetic oligonucleotide
  Sense strand starting at position 1616 of SEQ ID NO: 1879808
gcgcgugucugaugcggau

SEQ ID NO: 1933137 - RNA, 19 nt, Artificial Sequence
  Description of Artificial Sequence: Synthetic oligonucleotide
  Antisense strand to SEQ ID NO: 1933136
auccgcaucagacacgcgc

SEQ ID NO: 1933138 - RNA, 19 nt, Artificial Sequence
  Description of Artificial Sequence: Synthetic oligonucleotide
  Sense strand starting at position 2305 of SEQ ID NO: 1879808
ccaagagaauucuagauca

SEQ ID NO: 1933139 - RNA, 19 nt, Artificial Sequence
  Description of Artificial Sequence: Synthetic oligonucleotide
  Antisense strand to SEQ ID NO: 1933138
ugaucuagaauucucuugg

SEQ ID NO: 1933140 - RNA, 19 nt, Artificial Sequence
  Description of Artificial Sequence: Synthetic oligonucleotide
  Sense strand starting at position 2502 of SEQ ID NO: 1879808
cugauuucuuuauagagau

SEQ ID NO: 1933141 - RNA, 19 nt, Artificial Sequence
  Description of Artificial Sequence: Synthetic oligonucleotide
  Antisense strand to SEQ ID NO: 1933140
aucucuauaaagaaaucag

SEQ ID NO: 1933142 - RNA, 19 nt, Artificial Sequence
  Description of Artificial Sequence: Synthetic oligonucleotide
  Sense strand starting at position 2679 of SEQ ID NO: 1879808
gggucuggaucucugaacu

SEQ ID NO: 1933143 - RNA, 19 nt, Artificial Sequence
  Description of Artificial Sequence: Synthetic oligonucleotide
  Antisense strand to SEQ ID NO: 1933142
aguucagagauccagaccc

SEQ ID NO: 1933144 - RNA, 19 nt, Artificial Sequence
  Description of Artificial Sequence: Synthetic oligonucleotide
  Sense strand starting at position 2746 of SEQ ID NO: 1879808
ugcagucuguacuuuauau

SEQ ID NO: 1933145 - RNA, 19 nt, Artificial Sequence
  Description of Artificial Sequence: Synthetic oligonucleotide
  Antisense strand to SEQ ID NO: 1933144
auauaaaguacagacugca

SEQ ID NO: 1933146 - RNA, 19 nt, Artificial Sequence
  Description of Artificial Sequence: Synthetic oligonucleotide
  Sense strand starting at position 2802 of SEQ ID NO: 1879808
uuuauaaaucuuggcuguu

SEQ ID NO: 1933147 - RNA, 19 nt, Artificial Sequence
  Description of Artificial Sequence: Synthetic oligonucleotide
  Antisense strand to SEQ ID NO: 1933146
aacagccaagauuuauaaa

SEQ ID NO: 1933148 - RNA, 19 nt, Artificial Sequence
  Description of Artificial Sequence: Synthetic oligonucleotide
  Sense strand starting at position 2864 of SEQ ID NO: 1879808
agccuucucacagggagaa

SEQ ID NO: 1933149 - RNA, 19 nt, Artificial Sequence
  Description of Artificial Sequence: Synthetic oligonucleotide
  Antisense strand to SEQ ID NO: 1933148
uucucccugugagaaggcu

SEQ ID NO: 1933150 - RNA, 19 nt, Artificial Sequence
  Description of Artificial Sequence: Synthetic oligonucleotide
  Sense strand starting at position 2876 of SEQ ID NO: 1879808
gggagaagacucugcacuu

SEQ ID NO: 1933151 - RNA, 19 nt, Artificial Sequence
  Description of Artificial Sequence: Synthetic oligonucleotide
  Antisense strand to SEQ ID NO: 1933150
aagugcagagucuucuccc

SEQ ID NO: 1933152 - RNA, 19 nt, Artificial Sequence
  Description of Artificial Sequence: Synthetic oligonucleotide
  Sense strand starting at position 3019 of SEQ ID NO: 1879808
ggauuuacaucaugaccga

SEQ ID NO: 1933153 - RNA, 19 nt, Artificial Sequence
  Description of Artificial Sequence: Synthetic oligonucleotide
  Antisense strand to SEQ ID NO: 1933152
ucggucaugauguaaaucc

SEQ ID NO: 1933154 - RNA, 19 nt, Artificial Sequence
  Description of Artificial Sequence: Synthetic oligonucleotide
  Sense strand starting at position 3314 of SEQ ID NO: 1879808
ggugcugagugcugaguga

SEQ ID NO: 1933155 - RNA, 19 nt, Artificial Sequence
  Description of Artificial Sequence: Synthetic oligonucleotide
  Antisense strand to SEQ ID NO: 1933154
ucacucagcacucagcacc

SEQ ID NO: 1933156 - RNA, 19 nt, Artificial Sequence
  Description of Artificial Sequence: Synthetic oligonucleotide
  Sense strand starting at position 3316 of SEQ ID NO: 1879808
ugcugagugcugagugaga

SEQ ID NO: 1933157 - RNA, 19 nt, Artificial Sequence
  Description of Artificial Sequence: Synthetic oligonucleotide
  Antisense strand to SEQ ID NO: 1933156
ucucacucagcacucagca

SEQ ID NO: 1933158 - RNA, 19 nt, Artificial Sequence
  Description of Artificial Sequence: Synthetic oligonucleotide
  Sense strand starting at position 3318 of SEQ ID NO: 1879808
cugagugcugagugagaaa

SEQ ID NO: 1933159 - RNA, 19 nt, Artificial Sequence
  Description of Artificial Sequence: Synthetic oligonucleotide
  Antisense strand to SEQ ID NO: 1933158
uuucucacucagcacucag

SEQ ID NO: 1933160 - RNA, 19 nt, Artificial Sequence
  Description of Artificial Sequence: Synthetic oligonucleotide
  Sense strand starting at position 3388 of SEQ ID NO: 1879808
ugggaaaucaccugguuuc

SEQ ID NO: 1933161 - RNA, 19 nt, Artificial Sequence
  Description of Artificial Sequence: Synthetic oligonucleotide
  Antisense strand to SEQ ID NO: 1933160
gaaaccaggugauuuccca

SEQ ID NO: 1933162 - RNA, 19 nt, Artificial Sequence
  Description of Artificial Sequence: Synthetic oligonucleotide
  Sense strand starting at position 3405 of SEQ ID NO: 1879808
uccacauguuucugugaca

SEQ ID NO: 1933163 - RNA, 19 nt, Artificial Sequence
  Description of Artificial Sequence: Synthetic oligonucleotide
  Antisense strand to SEQ ID NO: 1933162
ugucacagaaacaugugga

SEQ ID NO: 1933164 - RNA, 19 nt, Artificial Sequence
  Description of Artificial Sequence: Synthetic oligonucleotide
  Sense strand starting at position 3406 of SEQ ID NO: 1879808
ccacauguuucugugacau

SEQ ID NO: 1933165 - RNA, 19 nt, Artificial Sequence
  Description of Artificial Sequence: Synthetic oligonucleotide
  Antisense strand to SEQ ID NO: 1933164
augucacagaaacaugugg

SEQ ID NO: 1933166 - RNA, 19 nt, Artificial Sequence
  Description of Artificial Sequence: Synthetic oligonucleotide
  Sense strand starting at position 3495 of SEQ ID NO: 1879808
gagcucuucuggcccuuau

SEQ ID NO: 1933167 - RNA, 19 nt, Artificial Sequence
  Description of Artificial Sequence: Synthetic oligonucleotide
  Antisense strand to SEQ ID NO: 1933166
auaagggccagaagagcuc

SEQ ID NO: 1933168 - RNA, 19 nt, Artificial Sequence
  Description of Artificial Sequence: Synthetic oligonucleotide
  Sense strand starting at position 3499 of SEQ ID NO: 1879808
ucuucuggcccuuaugaga

SEQ ID NO: 1933169 - RNA, 19 nt, Artificial Sequence
  Description of Artificial Sequence: Synthetic oligonucleotide
  Antisense strand to SEQ ID NO: 1933168
ucucauaagggccagaaga

SEQ ID NO: 1933170 - RNA, 19 nt, Artificial Sequence
  Description of Artificial Sequence: Synthetic oligonucleotide
  Sense strand starting at position 3537 of SEQ ID NO: 1879808
aggacuccuugaucccuaa

SEQ ID NO: 1933171 - RNA, 19 nt, Artificial Sequence
  Description of Artificial Sequence: Synthetic oligonucleotide
  Antisense strand to SEQ ID NO: 1933170
uuagggaucaaggaguccu

SEQ ID NO: 1933172 - RNA, 19 nt, Artificial Sequence
  Description of Artificial Sequence: Synthetic oligonucleotide
  Sense strand starting at position 3601 of SEQ ID NO: 1879808
ggacaauaguucucucuag

SEQ ID NO: 1933173 - RNA, 19 nt, Artificial Sequence
  Description of Artificial Sequence: Synthetic oligonucleotide
  Antisense strand to SEQ ID NO: 1933172
cuagagagaacuauugucc

SEQ ID NO: 1933174 - RNA, 19 nt, Artificial Sequence
  Description of Artificial Sequence: Synthetic oligonucleotide
  Sense strand starting at position 3763 of SEQ ID NO: 1879808
gucccauccugggaacgaa

SEQ ID NO: 1933175 - RNA, 19 nt, Artificial Sequence
  Description of Artificial Sequence: Synthetic oligonucleotide
  Antisense strand to SEQ ID NO: 1933174
uucguucccaggaugggac

SEQ ID NO: 1933176 - RNA, 19 nt, Artificial Sequence
  Description of Artificial Sequence: Synthetic oligonucleotide
  Sense strand starting at position 3849 of SEQ ID NO: 1879808
ggcgacuucucucugaacu

SEQ ID NO: 1933177 - RNA, 19 nt, Artificial Sequence
  Description of Artificial Sequence: Synthetic oligonucleotide
  Antisense strand to SEQ ID NO: 1933176
aguucagagagaagucgcc

SEQ ID NO: 1933178 - RNA, 19 nt, Artificial Sequence
  Description of Artificial Sequence: Synthetic oligonucleotide
  Sense strand starting at position 3850 of SEQ ID NO: 1879808
gcgacuucucucugaacuc

SEQ ID NO: 1933179 - RNA, 19 nt, Artificial Sequence
  Description of Artificial Sequence: Synthetic oligonucleotide
  Antisense strand to SEQ ID NO: 1933178
gaguucagagagaagucgc

SEQ ID NO: 1933180 - RNA, 19 nt, Artificial Sequence
  Description of Artificial Sequence: Synthetic oligonucleotide
  Sense strand starting at position 3851 of SEQ ID NO: 1879808
cgacuucucucugaacucu

SEQ ID NO: 1933181 - RNA, 19 nt, Artificial Sequence
  Description of Artificial Sequence: Synthetic oligonucleotide
  Antisense strand to SEQ ID NO: 1933180
agaguucagagagaagucg

SEQ ID NO: 1933182 - RNA, 19 nt, Artificial Sequence
  Description of Artificial Sequence: Synthetic oligonucleotide
  Sense strand starting at position 3947 of SEQ ID NO: 1879808
agccaaaguugucacccau

SEQ ID NO: 1933183 - RNA, 19 nt, Artificial Sequence
  Description of Artificial Sequence: Synthetic oligonucleotide
  Antisense strand to SEQ ID NO: 1933182
augggugacaacuuuggcu

SEQ ID NO: 1933184 - RNA, 19 nt, Artificial Sequence
  Description of Artificial Sequence: Synthetic oligonucleotide
  Sense strand starting at position 181 of SEQ ID NO: 1879809
ugaacucauuuguuuguuu

SEQ ID NO: 1933185 - RNA, 19 nt, Artificial Sequence
  Description of Artificial Sequence: Synthetic oligonucleotide
  Antisense strand to SEQ ID NO: 1933184
aaacaaacaaaugaguuca

SEQ ID NO: 1933186 - RNA, 19 nt, Artificial Sequence
  Description of Artificial Sequence: Synthetic oligonucleotide
  Sense strand starting at position 281 of SEQ ID NO: 1879809
ugacaaauggacugagugu

SEQ ID NO: 1933187 - RNA, 19 nt, Artificial Sequence
  Description of Artificial Sequence: Synthetic oligonucleotide
  Antisense strand to SEQ ID NO: 1933186
acacucaguccauuuguca

SEQ ID NO: 1933188 - RNA, 19 nt, Artificial Sequence
  Description of Artificial Sequence: Synthetic oligonucleotide
  Sense strand starting at position 303 of SEQ ID NO: 1879809
ccuuucuuagacugagaca

SEQ ID NO: 1933189 - RNA, 19 nt, Artificial Sequence
  Description of Artificial Sequence: Synthetic oligonucleotide
  Antisense strand to SEQ ID NO: 1933188
ugucucagucuaagaaagg

SEQ ID NO: 1933190 - RNA, 19 nt, Artificial Sequence
  Description of Artificial Sequence: Synthetic oligonucleotide
  Sense strand starting at position 380 of SEQ ID NO: 1879809
ggaacuacauugcuuagaa

SEQ ID NO: 1933191 - RNA, 19 nt, Artificial Sequence
  Description of Artificial Sequence: Synthetic oligonucleotide
  Antisense strand to SEQ ID NO: 1933190
uucuaagcaauguaguucc

SEQ ID NO: 1933192 - RNA, 19 nt, Artificial Sequence
  Description of Artificial Sequence: Synthetic oligonucleotide
  Sense strand starting at position 719 of SEQ ID NO: 1879809
aagagauccuugucuaaag

SEQ ID NO: 1933193 - RNA, 19 nt, Artificial Sequence
  Description of Artificial Sequence: Synthetic oligonucleotide
  Antisense strand to SEQ ID NO: 1933192
cuuuagacaaggaucucuu

SEQ ID NO: 1933194 - RNA, 19 nt, Artificial Sequence
  Description of Artificial Sequence: Synthetic oligonucleotide
  Sense strand starting at position 920 of SEQ ID NO: 1879809
auuucuacuuaugaagaga

SEQ ID NO: 1933195 - RNA, 19 nt, Artificial Sequence
  Description of Artificial Sequence: Synthetic oligonucleotide
  Antisense strand to SEQ ID NO: 1933194
ucucuucauaaguagaaau

SEQ ID NO: 1933196 - RNA, 19 nt, Artificial Sequence
  Description of Artificial Sequence: Synthetic oligonucleotide
  Sense strand starting at position 995 of SEQ ID NO: 1879809
uguaauucccuacauguau

SEQ ID NO: 1933197 - RNA, 19 nt, Artificial Sequence
  Description of Artificial Sequence: Synthetic oligonucleotide
  Antisense strand to SEQ ID NO: 1933196
auacauguagggaauuaca

SEQ ID NO: 1933198 - RNA, 19 nt, Artificial Sequence
  Description of Artificial Sequence: Synthetic oligonucleotide
  Sense strand starting at position 1133 of SEQ ID NO: 1879809
acauucuuugcccaaagga

SEQ ID NO: 1933199 - RNA, 19 nt, Artificial Sequence
  Description of Artificial Sequence: Synthetic oligonucleotide
  Antisense strand to SEQ ID NO: 1933198
uccuuugggcaaagaaugu

SEQ ID NO: 1933200 - RNA, 19 nt, Artificial Sequence
  Description of Artificial Sequence: Synthetic oligonucleotide
  Sense strand starting at position 1288 of SEQ ID NO: 1879809
cacucuagugguuaugaga

SEQ ID NO: 1933201 - RNA, 19 nt, Artificial Sequence
  Description of Artificial Sequence: Synthetic oligonucleotide
  Antisense strand to SEQ ID NO: 1933200
ucucauaaccacuagagug

SEQ ID NO: 1933202 - RNA, 19 nt, Artificial Sequence
  Description of Artificial Sequence: Synthetic oligonucleotide
  Sense strand starting at position 1435 of SEQ ID NO: 1879809
cgauucuagcaccauacau

SEQ ID NO: 1933203 - RNA, 19 nt, Artificial Sequence
  Description of Artificial Sequence: Synthetic oligonucleotide
  Antisense strand to SEQ ID NO: 1933202
auguauggugcuagaaucg

SEQ ID NO: 1933204 - RNA, 19 nt, Artificial Sequence
  Description of Artificial Sequence: Synthetic oligonucleotide
  Sense strand starting at position 1547 of SEQ ID NO: 1879809
gguuuaugcacuuacugag

SEQ ID NO: 1933205 - RNA, 19 nt, Artificial Sequence
  Description of Artificial Sequence: Synthetic oligonucleotide
  Antisense strand to SEQ ID NO: 1933204
cucaguaagugcauaaacc

SEQ ID NO: 1933206 - RNA, 19 nt, Artificial Sequence
  Description of Artificial Sequence: Synthetic oligonucleotide
  Sense strand starting at position 2036 of SEQ ID NO: 1879809
gucucuaggcaacagagau

SEQ ID NO: 1933207 - RNA, 19 nt, Artificial Sequence
  Description of Artificial Sequence: Synthetic oligonucleotide
  Antisense strand to SEQ ID NO: 1933206
aucucuguugccuagagac

SEQ ID NO: 1933208 - RNA, 19 nt, Artificial Sequence
  Description of Artificial Sequence: Synthetic oligonucleotide
  Sense strand starting at position 2256 of SEQ ID NO: 1879809
cagugucuuguacagaaua

SEQ ID NO: 1933209 - RNA, 19 nt, Artificial Sequence
  Description of Artificial Sequence: Synthetic oligonucleotide
  Antisense strand to SEQ ID NO: 1933208
uauucuguacaagacacug

SEQ ID NO: 1933210 - RNA, 19 nt, Artificial Sequence
  Description of Artificial Sequence: Synthetic oligonucleotide
  Sense strand starting at position 2258 of SEQ ID NO: 1879809
gugucuuguacagaauaga

SEQ ID NO: 1933211 - RNA, 19 nt, Artificial Sequence
  Description of Artificial Sequence: Synthetic oligonucleotide
  Antisense strand to SEQ ID NO: 1933210
ucuauucuguacaagacac

SEQ ID NO: 1933212 - RNA, 19 nt, Artificial Sequence
  Description of Artificial Sequence: Synthetic oligonucleotide
  Sense strand starting at position 2322 of SEQ ID NO: 1879809
ugaucaaugauuggaguca

SEQ ID NO: 1933213 - RNA, 19 nt, Artificial Sequence
  Description of Artificial Sequence: Synthetic oligonucleotide
  Antisense strand to SEQ ID NO: 1933212
ugacuccaaucauugauca

SEQ ID NO: 1933214 - RNA, 19 nt, Artificial Sequence
  Description of Artificial Sequence: Synthetic oligonucleotide
  Sense strand starting at position 2458 of SEQ ID NO: 1879809
augacauuccuguagccau

SEQ ID NO: 1933215 - RNA, 19 nt, Artificial Sequence
  Description of Artificial Sequence: Synthetic oligonucleotide
  Antisense strand to SEQ ID NO: 1933214
auggcuacaggaaugucau

SEQ ID NO: 1933216 - RNA, 19 nt, Artificial Sequence
  Description of Artificial Sequence: Synthetic oligonucleotide
  Sense strand starting at position 2696 of SEQ ID NO: 1879809
gugaguaaauaccuuaaag

SEQ ID NO: 1933217 - RNA, 19 nt, Artificial Sequence
  Description of Artificial Sequence: Synthetic oligonucleotide
  Antisense strand to SEQ ID NO: 1933216
cuuuaagguauuuacucac

SEQ ID NO: 1933218 - RNA, 19 nt, Artificial Sequence
  Description of Artificial Sequence: Synthetic oligonucleotide
  Sense strand starting at position 2782 of SEQ ID NO: 1879809
gagaauguacguggcauuu

SEQ ID NO: 1933219 - RNA, 19 nt, Artificial Sequence
  Description of Artificial Sequence: Synthetic oligonucleotide
  Antisense strand to SEQ ID NO: 1933218
aaaugccacguacauucuc

SEQ ID NO: 1933220 - RNA, 19 nt, Artificial Sequence
  Description of Artificial Sequence: Synthetic oligonucleotide
  Sense strand starting at position 2802 of SEQ ID NO: 1879809
agauaucaaguugguaaua

SEQ ID NO: 1933221 - RNA, 19 nt, Artificial Sequence
  Description of Artificial Sequence: Synthetic oligonucleotide
  Antisense strand to SEQ ID NO: 1933220
uauuaccaacuugauaucu

SEQ ID NO: 1933222 - RNA, 19 nt, Artificial Sequence
  Description of Artificial Sequence: Synthetic oligonucleotide
  Sense strand starting at position 2803 of SEQ ID NO: 1879809
gauaucaaguugguaauaa

SEQ ID NO: 1933223 - RNA, 19 nt, Artificial Sequence
  Description of Artificial Sequence: Synthetic oligonucleotide
  Antisense strand to SEQ ID NO: 1933222
uuauuaccaacuugauauc

SEQ ID NO: 1933224 - RNA, 19 nt, Artificial Sequence
  Description of Artificial Sequence: Synthetic oligonucleotide
  Sense strand starting at position 2932 of SEQ ID NO: 1879809
uaaggacuugcucaaagua

SEQ ID NO: 1933225 - RNA, 19 nt, Artificial Sequence
  Description of Artificial Sequence: Synthetic oligonucleotide
  Antisense strand to SEQ ID NO: 1933224
uacuuugagcaaguccuua

SEQ ID NO: 1933226 - RNA, 19 nt, Artificial Sequence
  Description of Artificial Sequence: Synthetic oligonucleotide
  Sense strand starting at position 2965 of SEQ ID NO: 1879809
aguggagagcuuuaucaau

SEQ ID NO: 1933227 - RNA, 19 nt, Artificial Sequence
  Description of Artificial Sequence: Synthetic oligonucleotide
  Antisense strand to SEQ ID NO: 1933226
auugauaaagcucuccacu

SEQ ID NO: 1933228 - RNA, 19 nt, Artificial Sequence
  Description of Artificial Sequence: Synthetic oligonucleotide
  Sense strand starting at position 2967 of SEQ ID NO: 1879809
uggagagcuuuaucaauug

SEQ ID NO: 1933229 - RNA, 19 nt, Artificial Sequence
  Description of Artificial Sequence: Synthetic oligonucleotide
  Antisense strand to SEQ ID NO: 1933228
caauugauaaagcucucca

SEQ ID NO: 1933230 - RNA, 19 nt, Artificial Sequence
  Description of Artificial Sequence: Synthetic oligonucleotide
  Sense strand starting at position 3001 of SEQ ID NO: 1879809
uugauauauguccaguaug

SEQ ID NO: 1933231 - RNA, 19 nt, Artificial Sequence
  Description of Artificial Sequence: Synthetic oligonucleotide
  Antisense strand to SEQ ID NO: 1933230
cauacuggacauauaucaa

SEQ ID NO: 1933232 - RNA, 19 nt, Artificial Sequence
  Description of Artificial Sequence: Synthetic oligonucleotide
  Sense strand starting at position 3054 of SEQ ID NO: 1879809
cagaaauggcuccaugguu

SEQ ID NO: 1933233 - RNA, 19 nt, Artificial Sequence
  Description of Artificial Sequence: Synthetic oligonucleotide
  Antisense strand to SEQ ID NO: 1933232
aaccauggagccauuucug

SEQ ID NO: 1933234 - RNA, 19 nt, Artificial Sequence
  Description of Artificial Sequence: Synthetic oligonucleotide
  Sense strand starting at position 3078 of SEQ ID NO: 1879809
gugcucuggcugccuaaau

SEQ ID NO: 1933235 - RNA, 19 nt, Artificial Sequence
  Description of Artificial Sequence: Synthetic oligonucleotide
  Antisense strand to SEQ ID NO: 1933234
auuuaggcagccagagcac

SEQ ID NO: 1933236 - RNA, 19 nt, Artificial Sequence
  Description of Artificial Sequence: Synthetic oligonucleotide
  Sense strand starting at position 3115 of SEQ ID NO: 1879809
guuguucugauggaauuag

SEQ ID NO: 1933237 - RNA, 19 nt, Artificial Sequence
  Description of Artificial Sequence: Synthetic oligonucleotide
  Antisense strand to SEQ ID NO: 1933236
cuaauuccaucagaacaac

SEQ ID NO: 1933238 - RNA, 19 nt, Artificial Sequence
  Description of Artificial Sequence: Synthetic oligonucleotide
  Sense strand starting at position 3193 of SEQ ID NO: 1879809
aguuacuuccugcaagaag

SEQ ID NO: 1933239 - RNA, 19 nt, Artificial Sequence
  Description of Artificial Sequence: Synthetic oligonucleotide
  Antisense strand to SEQ ID NO: 1933238
cuucuugcaggaaguaacu

SEQ ID NO: 1933240 - RNA, 19 nt, Artificial Sequence
  Description of Artificial Sequence: Synthetic oligonucleotide
  Sense strand starting at position 3318 of SEQ ID NO: 1879809
gguaauuuccugugaguuc

SEQ ID NO: 1933241 - RNA, 19 nt, Artificial Sequence
  Description of Artificial Sequence: Synthetic oligonucleotide
  Antisense strand to SEQ ID NO: 1933240
gaacucacaggaaauuacc

SEQ ID NO: 1933242 - RNA, 19 nt, Artificial Sequence
  Description of Artificial Sequence: Synthetic oligonucleotide
  Sense strand starting at position 3675 of SEQ ID NO: 1879809
aacuauuggcuguaugaca

SEQ ID NO: 1933243 - RNA, 19 nt, Artificial Sequence
  Description of Artificial Sequence: Synthetic oligonucleotide
  Antisense strand to SEQ ID NO: 1933242
ugucauacagccaauaguu

SEQ ID NO: 1933244 - RNA, 19 nt, Artificial Sequence
  Description of Artificial Sequence: Synthetic oligonucleotide
  Sense strand starting at position 3750 of SEQ ID NO: 1879809
agcugugagaacuggauaa

SEQ ID NO: 1933245 - RNA, 19 nt, Artificial Sequence
  Description of Artificial Sequence: Synthetic oligonucleotide
  Antisense strand to SEQ ID NO: 1933244
uuauccaguucucacagcu

SEQ ID NO: 1933246 - RNA, 19 nt, Artificial Sequence
  Description of Artificial Sequence: Synthetic oligonucleotide
  Sense strand starting at position 3762 of SEQ ID NO: 1879809
uggauaagauugcuuagga

SEQ ID NO: 1933247 - RNA, 19 nt, Artificial Sequence
  Description of Artificial Sequence: Synthetic oligonucleotide
  Antisense strand to SEQ ID NO: 1933246
uccuaagcaaucuuaucca

SEQ ID NO: 1933248 - RNA, 19 nt, Artificial Sequence
  Description of Artificial Sequence: Synthetic oligonucleotide
  Sense strand starting at position 3763 of SEQ ID NO: 1879809
ggauaagauugcuuaggau

SEQ ID NO: 1933249 - RNA, 19 nt, Artificial Sequence
  Description of Artificial Sequence: Synthetic oligonucleotide
  Antisense strand to SEQ ID NO: 1933248
auccuaagcaaucuuaucc

SEQ ID NO: 1933250 - RNA, 19 nt, Artificial Sequence
  Description of Artificial Sequence: Synthetic oligonucleotide
  Sense strand starting at position 3776 of SEQ ID NO: 1879809
uaggauagugucugacaga

SEQ ID NO: 1933251 - RNA, 19 nt, Artificial Sequence
  Description of Artificial Sequence: Synthetic oligonucleotide
  Antisense strand to SEQ ID NO: 1933250
ucugucagacacuauccua

SEQ ID NO: 1933252 - RNA, 19 nt, Artificial Sequence
  Description of Artificial Sequence: Synthetic oligonucleotide
  Sense strand starting at position 3781 of SEQ ID NO: 1879809
uagugucugacagaguaag

SEQ ID NO: 1933253 - RNA, 19 nt, Artificial Sequence
  Description of Artificial Sequence: Synthetic oligonucleotide
  Antisense strand to SEQ ID NO: 1933252
cuuacucugucagacacua

SEQ ID NO: 1933254 - RNA, 19 nt, Artificial Sequence
  Description of Artificial Sequence: Synthetic oligonucleotide
  Sense strand starting at position 3866 of SEQ ID NO: 1879809
gaugacaagcaaugugaaa

SEQ ID NO: 1933255 - RNA, 19 nt, Artificial Sequence
  Description of Artificial Sequence: Synthetic oligonucleotide
  Antisense strand to SEQ ID NO: 1933254
uuucacauugcuugucauc

SEQ ID NO: 1933256 - RNA, 19 nt, Artificial Sequence
  Description of Artificial Sequence: Synthetic oligonucleotide
  Sense strand starting at position 3887 of SEQ ID NO: 1879809
guaccauuauaaguacaau

SEQ ID NO: 1933257 - RNA, 19 nt, Artificial Sequence
  Description of Artificial Sequence: Synthetic oligonucleotide
  Antisense strand to SEQ ID NO: 1933256
auuguacuuauaaugguac

SEQ ID NO: 1933258 - RNA, 19 nt, Artificial Sequence
  Description of Artificial Sequence: Synthetic oligonucleotide
  Sense strand starting at position 3898 of SEQ ID NO: 1879809
aguacaauguaaguggaau

SEQ ID NO: 1933259 - RNA, 19 nt, Artificial Sequence
  Description of Artificial Sequence: Synthetic oligonucleotide
  Antisense strand to SEQ ID NO: 1933258
auuccacuuacauuguacu

SEQ ID NO: 1933260 - RNA, 19 nt, Artificial Sequence
  Description of Artificial Sequence: Synthetic oligonucleotide
  Sense strand starting at position 3899 of SEQ ID NO: 1879809
guacaauguaaguggaaua

SEQ ID NO: 1933261 - RNA, 19 nt, Artificial Sequence
  Description of Artificial Sequence: Synthetic oligonucleotide
  Antisense strand to SEQ ID NO: 1933260
uauuccacuuacauuguac

SEQ ID NO: 1933262 - RNA, 19 nt, Artificial Sequence
  Description of Artificial Sequence: Synthetic oligonucleotide
  Sense strand starting at position 3935 of SEQ ID NO: 1879809
uuucuacaccuuugaggaa

SEQ ID NO: 1933263 - RNA, 19 nt, Artificial Sequence
  Description of Artificial Sequence: Synthetic oligonucleotide
  Antisense strand to SEQ ID NO: 1933262
uuccucaaagguguagaaa

SEQ ID NO: 1933264 - RNA, 19 nt, Artificial Sequence
  Description of Artificial Sequence: Synthetic oligonucleotide
  Sense strand starting at position 314 of SEQ ID NO: 1879810
ccauauucugaugguauaa

SEQ ID NO: 1933265 - RNA, 19 nt, Artificial Sequence
  Description of Artificial Sequence: Synthetic oligonucleotide
  Antisense strand to SEQ ID NO: 1933264
uuauaccaucagaauaugg

SEQ ID NO: 1933266 - RNA, 19 nt, Artificial Sequence
  Description of Artificial Sequence: Synthetic oligonucleotide
  Sense strand starting at position 518 of SEQ ID NO: 1879810
ucuauagauuugcaugaau

SEQ ID NO: 1933267 - RNA, 19 nt, Artificial Sequence
  Description of Artificial Sequence: Synthetic oligonucleotide
  Antisense strand to SEQ ID NO: 1933266
auucaugcaaaucuauaga

SEQ ID NO: 1933268 - RNA, 19 nt, Artificial Sequence
  Description of Artificial Sequence: Synthetic oligonucleotide
  Sense strand starting at position 607 of SEQ ID NO: 1879810
auuauaguaucugcaugaa

SEQ ID NO: 1933269 - RNA, 19 nt, Artificial Sequence
  Description of Artificial Sequence: Synthetic oligonucleotide
  Antisense strand to SEQ ID NO: 1933268
uucaugcagauacuauaau

SEQ ID NO: 1933270 - RNA, 19 nt, Artificial Sequence
  Description of Artificial Sequence: Synthetic oligonucleotide
  Sense strand starting at position 642 of SEQ ID NO: 1879810
cuaaguagaugggaauuua

SEQ ID NO: 1933271 - RNA, 19 nt, Artificial Sequence
  Description of Artificial Sequence: Synthetic oligonucleotide
  Antisense strand to SEQ ID NO: 1933270
uaaauucccaucuacuuag

SEQ ID NO: 1933272 - RNA, 19 nt, Artificial Sequence
  Description of Artificial Sequence: Synthetic oligonucleotide
  Sense strand starting at position 986 of SEQ ID NO: 1879810
acuagauaugcuuauaacg

SEQ ID NO: 1933273 - RNA, 19 nt, Artificial Sequence
  Description of Artificial Sequence: Synthetic oligonucleotide
  Antisense strand to SEQ ID NO: 1933272
cguuauaagcauaucuagu

SEQ ID NO: 1933274 - RNA, 19 nt, Artificial Sequence
  Description of Artificial Sequence: Synthetic oligonucleotide
  Sense strand starting at position 1014 of SEQ ID NO: 1879810
uagguauaauggcuuuaaa

SEQ ID NO: 1933275 - RNA, 19 nt, Artificial Sequence
  Description of Artificial Sequence: Synthetic oligonucleotide
  Antisense strand to SEQ ID NO: 1933274
uuuaaagccauuauaccua

SEQ ID NO: 1933276 - RNA, 19 nt, Artificial Sequence
  Description of Artificial Sequence: Synthetic oligonucleotide
  Sense strand starting at position 1113 of SEQ ID NO: 1879810
aaaguuuguugagcacaua

SEQ ID NO: 1933277 - RNA, 19 nt, Artificial Sequence
  Description of Artificial Sequence: Synthetic oligonucleotide
  Antisense strand to SEQ ID NO: 1933276
uaugugcucaacaaacuuu

SEQ ID NO: 1933278 - RNA, 19 nt, Artificial Sequence
  Description of Artificial Sequence: Synthetic oligonucleotide
  Sense strand starting at position 1114 of SEQ ID NO: 1879810
aaguuuguugagcacauaa

SEQ ID NO: 1933279 - RNA, 19 nt, Artificial Sequence
  Description of Artificial Sequence: Synthetic oligonucleotide
  Antisense strand to SEQ ID NO: 1933278
uuaugugcucaacaaacuu

SEQ ID NO: 1933280 - RNA, 19 nt, Artificial Sequence
  Description of Artificial Sequence: Synthetic oligonucleotide
  Sense strand starting at position 1116 of SEQ ID NO: 1879810
guuuguugagcacauaaau

SEQ ID NO: 1933281 - RNA, 19 nt, Artificial Sequence
  Description of Artificial Sequence: Synthetic oligonucleotide
  Antisense strand to SEQ ID NO: 1933280
auuuaugugcucaacaaac

SEQ ID NO: 1933282 - RNA, 19 nt, Artificial Sequence
  Description of Artificial Sequence: Synthetic oligonucleotide
  Sense strand starting at position 1151 of SEQ ID NO: 1879810
caggguggauguuuaacua

SEQ ID NO: 1933283 - RNA, 19 nt, Artificial Sequence
  Description of Artificial Sequence: Synthetic oligonucleotide
  Antisense strand to SEQ ID NO: 1933282
uaguuaaacauccacccug

SEQ ID NO: 1933284 - RNA, 19 nt, Artificial Sequence
  Description of Artificial Sequence: Synthetic oligonucleotide
  Sense strand starting at position 1238 of SEQ ID NO: 1879810
cuaauaaagccguaauugu

SEQ ID NO: 1933285 - RNA, 19 nt, Artificial Sequence
  Description of Artificial Sequence: Synthetic oligonucleotide
  Antisense strand to SEQ ID NO: 1933284
acaauuacggcuuuauuag

SEQ ID NO: 1933286 - RNA, 19 nt, Artificial Sequence
  Description of Artificial Sequence: Synthetic oligonucleotide
  Sense strand starting at position 1366 of SEQ ID NO: 1879810
acugauaggguuuacugua

SEQ ID NO: 1933287 - RNA, 19 nt, Artificial Sequence
  Description of Artificial Sequence: Synthetic oligonucleotide
  Antisense strand to SEQ ID NO: 1933286
uacaguaaacccuaucagu

SEQ ID NO: 1933288 - RNA, 19 nt, Artificial Sequence
  Description of Artificial Sequence: Synthetic oligonucleotide
  Sense strand starting at position 1371 of SEQ ID NO: 1879810
uaggguuuacuguauauua

SEQ ID NO: 1933289 - RNA, 19 nt, Artificial Sequence
  Description of Artificial Sequence: Synthetic oligonucleotide
  Antisense strand to SEQ ID NO: 1933288
uaauauacaguaaacccua

SEQ ID NO: 1933290 - RNA, 19 nt, Artificial Sequence
  Description of Artificial Sequence: Synthetic oligonucleotide
  Sense strand starting at position 1373 of SEQ ID NO: 1879810
ggguuuacuguauauuauu

SEQ ID NO: 1933291 - RNA, 19 nt, Artificial Sequence
  Description of Artificial Sequence: Synthetic oligonucleotide
  Antisense strand to SEQ ID NO: 1933290
aauaauauacaguaaaccc

SEQ ID NO: 1933292 - RNA, 19 nt, Artificial Sequence
  Description of Artificial Sequence: Synthetic oligonucleotide
  Sense strand starting at position 1401 of SEQ ID NO: 1879810
cuaguaucaucaguucuca

SEQ ID NO: 1933293 - RNA, 19 nt, Artificial Sequence
  Description of Artificial Sequence: Synthetic oligonucleotide
  Antisense strand to SEQ ID NO: 1933292
ugagaacugaugauacuag

SEQ ID NO: 1933294 - RNA, 19 nt, Artificial Sequence
  Description of Artificial Sequence: Synthetic oligonucleotide
  Sense strand starting at position 1423 of SEQ ID NO: 1879810
gccuuuaauuuggccauua

SEQ ID NO: 1933295 - RNA, 19 nt, Artificial Sequence
  Description of Artificial Sequence: Synthetic oligonucleotide
  Antisense strand to SEQ ID NO: 1933294
uaauggccaaauuaaaggc

SEQ ID NO: 1933296 - RNA, 19 nt, Artificial Sequence
  Description of Artificial Sequence: Synthetic oligonucleotide
  Sense strand starting at position 1515 of SEQ ID NO: 1879810
cacuuucguggagauguga

SEQ ID NO: 1933297 - RNA, 19 nt, Artificial Sequence
  Description of Artificial Sequence: Synthetic oligonucleotide
  Antisense strand to SEQ ID NO: 1933296
ucacaucuccacgaaagug

SEQ ID NO: 1933298 - RNA, 19 nt, Artificial Sequence
  Description of Artificial Sequence: Synthetic oligonucleotide
  Sense strand starting at position 1582 of SEQ ID NO: 1879810
ccagacucuuucccugaga

SEQ ID NO: 1933299 - RNA, 19 nt, Artificial Sequence
  Description of Artificial Sequence: Synthetic oligonucleotide
  Antisense strand to SEQ ID NO: 1933298
ucucagggaaagagucugg

SEQ ID NO: 1933300 - RNA, 19 nt, Artificial Sequence
  Description of Artificial Sequence: Synthetic oligonucleotide
  Sense strand starting at position 1584 of SEQ ID NO: 1879810
agacucuuucccugagaca

SEQ ID NO: 1933301 - RNA, 19 nt, Artificial Sequence
  Description of Artificial Sequence: Synthetic oligonucleotide
  Antisense strand to SEQ ID NO: 1933300
ugucucagggaaagagucu

SEQ ID NO: 1933302 - RNA, 19 nt, Artificial Sequence
  Description of Artificial Sequence: Synthetic oligonucleotide
  Sense strand starting at position 1632 of SEQ ID NO: 1879810
uggcauucuugaucaggaa

SEQ ID NO: 1933303 - RNA, 19 nt, Artificial Sequence
  Description of Artificial Sequence: Synthetic oligonucleotide
  Antisense strand to SEQ ID NO: 1933302
uuccugaucaagaaugcca

SEQ ID NO: 1933304 - RNA, 19 nt, Artificial Sequence
  Description of Artificial Sequence: Synthetic oligonucleotide
  Sense strand starting at position 1833 of SEQ ID NO: 1879810
uaggcauugagcuaggaga

SEQ ID NO: 1933305 - RNA, 19 nt, Artificial Sequence
  Description of Artificial Sequence: Synthetic oligonucleotide
  Antisense strand to SEQ ID NO: 1933304
ucuccuagcucaaugccua

SEQ ID NO: 1933306 - RNA, 19 nt, Artificial Sequence
  Description of Artificial Sequence: Synthetic oligonucleotide
  Sense strand starting at position 1851 of SEQ ID NO: 1879810
aaggcuauguggcuacuaa

SEQ ID NO: 1933307 - RNA, 19 nt, Artificial Sequence
  Description of Artificial Sequence: Synthetic oligonucleotide
  Antisense strand to SEQ ID NO: 1933306
uuaguagccacauagccuu

SEQ ID NO: 1933308 - RNA, 19 nt, Artificial Sequence
  Description of Artificial Sequence: Synthetic oligonucleotide
  Sense strand starting at position 1885 of SEQ ID NO: 1879810
ccauauucugaugguauau

SEQ ID NO: 1933309 - RNA, 19 nt, Artificial Sequence
  Description of Artificial Sequence: Synthetic oligonucleotide
  Antisense strand to SEQ ID NO: 1933308
auauaccaucagaauaugg

SEQ ID NO: 1933310 - RNA, 19 nt, Artificial Sequence
  Description of Artificial Sequence: Synthetic oligonucleotide
  Sense strand starting at position 2142 of SEQ ID NO: 1879810
cccuuuccgucauuugaac

SEQ ID NO: 1933311 - RNA, 19 nt, Artificial Sequence
  Description of Artificial Sequence: Synthetic oligonucleotide
  Antisense strand to SEQ ID NO: 1933310
guucaaaugacggaaaggg

SEQ ID NO: 1933312 - RNA, 19 nt, Artificial Sequence
  Description of Artificial Sequence: Synthetic oligonucleotide
  Sense strand starting at position 2337 of SEQ ID NO: 1879810
aucuuuaugucuguauaac

SEQ ID NO: 1933313 - RNA, 19 nt, Artificial Sequence
  Description of Artificial Sequence: Synthetic oligonucleotide
  Antisense strand to SEQ ID NO: 1933312
guuauacagacauaaagau

SEQ ID NO: 1933314 - RNA, 19 nt, Artificial Sequence
  Description of Artificial Sequence: Synthetic oligonucleotide
  Sense strand starting at position 2338 of SEQ ID NO: 1879810
ucuuuaugucuguauaacu

SEQ ID NO: 1933315 - RNA, 19 nt, Artificial Sequence
  Description of Artificial Sequence: Synthetic oligonucleotide
  Antisense strand to SEQ ID NO: 1933314
aguuauacagacauaaaga

SEQ ID NO: 1933316 - RNA, 19 nt, Artificial Sequence
  Description of Artificial Sequence: Synthetic oligonucleotide
  Sense strand starting at position 2442 of SEQ ID NO: 1879810
agaguaaccuuauuagauu

SEQ ID NO: 1933317 - RNA, 19 nt, Artificial Sequence
  Description of Artificial Sequence: Synthetic oligonucleotide
  Antisense strand to SEQ ID NO: 1933316
aaucuaauaagguuacucu

SEQ ID NO: 1933318 - RNA, 19 nt, Artificial Sequence
  Description of Artificial Sequence: Synthetic oligonucleotide
  Sense strand starting at position 2783 of SEQ ID NO: 1879810
agagauacuuagguuugua

SEQ ID NO: 1933319 - RNA, 19 nt, Artificial Sequence
  Description of Artificial Sequence: Synthetic oligonucleotide
  Antisense strand to SEQ ID NO: 1933318
uacaaaccuaaguaucucu

SEQ ID NO: 1933320 - RNA, 19 nt, Artificial Sequence
  Description of Artificial Sequence: Synthetic oligonucleotide
  Sense strand starting at position 2786 of SEQ ID NO: 1879810
gauacuuagguuuguauac

SEQ ID NO: 1933321 - RNA, 19 nt, Artificial Sequence
  Description of Artificial Sequence: Synthetic oligonucleotide
  Antisense strand to SEQ ID NO: 1933320
guauacaaaccuaaguauc

SEQ ID NO: 1933322 - RNA, 19 nt, Artificial Sequence
  Description of Artificial Sequence: Synthetic oligonucleotide
  Sense strand starting at position 2793 of SEQ ID NO: 1879810
agguuuguauacuuaugau

SEQ ID NO: 1933323 - RNA, 19 nt, Artificial Sequence
  Description of Artificial Sequence: Synthetic oligonucleotide
  Antisense strand to SEQ ID NO: 1933322
aucauaaguauacaaaccu

SEQ ID NO: 1933324 - RNA, 19 nt, Artificial Sequence
  Description of Artificial Sequence: Synthetic oligonucleotide
  Sense strand starting at position 2990 of SEQ ID NO: 1879810
gcccuuuccuaaguaugaa

SEQ ID NO: 1933325 - RNA, 19 nt, Artificial Sequence
  Description of Artificial Sequence: Synthetic oligonucleotide
  Antisense strand to SEQ ID NO: 1933324
uucauacuuaggaaagggc

SEQ ID NO: 1933326 - RNA, 19 nt, Artificial Sequence
  Description of Artificial Sequence: Synthetic oligonucleotide
  Sense strand starting at position 3238 of SEQ ID NO: 1879810
uuagaaucauaacaugaga

SEQ ID NO: 1933327 - RNA, 19 nt, Artificial Sequence
  Description of Artificial Sequence: Synthetic oligonucleotide
  Antisense strand to SEQ ID NO: 1933326
ucucauguuaugauucuaa

SEQ ID NO: 1933328 - RNA, 19 nt, Artificial Sequence
  Description of Artificial Sequence: Synthetic oligonucleotide
  Sense strand starting at position 3354 of SEQ ID NO: 1879810
ggaaucacucagugcucua

SEQ ID NO: 1933329 - RNA, 19 nt, Artificial Sequence
  Description of Artificial Sequence: Synthetic oligonucleotide
  Antisense strand to SEQ ID NO: 1933328
uagagcacugagugauucc

SEQ ID NO: 1933330 - RNA, 19 nt, Artificial Sequence
  Description of Artificial Sequence: Synthetic oligonucleotide
  Sense strand starting at position 3433 of SEQ ID NO: 1879810
ccacuugagcuuugaagac

SEQ ID NO: 1933331 - RNA, 19 nt, Artificial Sequence
  Description of Artificial Sequence: Synthetic oligonucleotide
  Antisense strand to SEQ ID NO: 1933330
gucuucaaagcucaagugg

SEQ ID NO: 1933332 - RNA, 19 nt, Artificial Sequence
  Description of Artificial Sequence: Synthetic oligonucleotide
  Sense strand starting at position 3466 of SEQ ID NO: 1879810
uuugcagaucaaugucacu

SEQ ID NO: 1933333 - RNA, 19 nt, Artificial Sequence
  Description of Artificial Sequence: Synthetic oligonucleotide
  Antisense strand to SEQ ID NO: 1933332
agugacauugaucugcaaa

SEQ ID NO: 1933334 - RNA, 19 nt, Artificial Sequence
  Description of Artificial Sequence: Synthetic oligonucleotide
  Sense strand starting at position 3586 of SEQ ID NO: 1879810
cccagaauauggucacuca

SEQ ID NO: 1933335 - RNA, 19 nt, Artificial Sequence
  Description of Artificial Sequence: Synthetic oligonucleotide
  Antisense strand to SEQ ID NO: 1933334
ugagugaccauauucuggg

SEQ ID NO: 1933336 - RNA, 19 nt, Artificial Sequence
  Description of Artificial Sequence: Synthetic oligonucleotide
  Sense strand starting at position 3597 of SEQ ID NO: 1879810
gucacucaaccacaguauu

SEQ ID NO: 1933337 - RNA, 19 nt, Artificial Sequence
  Description of Artificial Sequence: Synthetic oligonucleotide
  Antisense strand to SEQ ID NO: 1933336
aauacugugguugagugac

SEQ ID NO: 1933338 - RNA, 19 nt, Artificial Sequence
  Description of Artificial Sequence: Synthetic oligonucleotide
  Sense strand starting at position 3610 of SEQ ID NO: 1879810
aguauuccugcugagggau

SEQ ID NO: 1933339 - RNA, 19 nt, Artificial Sequence
  Description of Artificial Sequence: Synthetic oligonucleotide
  Antisense strand to SEQ ID NO: 1933338
aucccucagcaggaauacu

SEQ ID NO: 1933340 - RNA, 19 nt, Artificial Sequence
  Description of Artificial Sequence: Synthetic oligonucleotide
  Sense strand starting at position 3613 of SEQ ID NO: 1879810
auuccugcugagggauuaa

SEQ ID NO: 1933341 - RNA, 19 nt, Artificial Sequence
  Description of Artificial Sequence: Synthetic oligonucleotide
  Antisense strand to SEQ ID NO: 1933340
uuaaucccucagcaggaau

SEQ ID NO: 1933342 - RNA, 19 nt, Artificial Sequence
  Description of Artificial Sequence: Synthetic oligonucleotide
  Sense strand starting at position 3645 of SEQ ID NO: 1879810
gcuggaagacccugaugaa

SEQ ID NO: 1933343 - RNA, 19 nt, Artificial Sequence
  Description of Artificial Sequence: Synthetic oligonucleotide
  Antisense strand to SEQ ID NO: 1933342
uucaucagggucuuccagc

SEQ ID NO: 1933344 - RNA, 19 nt, Artificial Sequence
  Description of Artificial Sequence: Synthetic oligonucleotide
  Sense strand starting at position 432 of SEQ ID NO: 1879811
ccugguguuugucauggau

SEQ ID NO: 1933345 - RNA, 19 nt, Artificial Sequence
  Description of Artificial Sequence: Synthetic oligonucleotide
  Antisense strand to SEQ ID NO: 1933344
auccaugacaaacaccagg

SEQ ID NO: 1933346 - RNA, 19 nt, Artificial Sequence
  Description of Artificial Sequence: Synthetic oligonucleotide
  Sense strand starting at position 696 of SEQ ID NO: 1879811
cuagacuucucagcagugu

SEQ ID NO: 1933347 - RNA, 19 nt, Artificial Sequence
  Description of Artificial Sequence: Synthetic oligonucleotide
  Antisense strand to SEQ ID NO: 1933346
acacugcugagaagucuag

SEQ ID NO: 1933348 - RNA, 19 nt, Artificial Sequence
  Description of Artificial Sequence: Synthetic oligonucleotide
  Sense strand starting at position 704 of SEQ ID NO: 1879811
cucagcaguguguaggaua

SEQ ID NO: 1933349 - RNA, 19 nt, Artificial Sequence
  Description of Artificial Sequence: Synthetic oligonucleotide
  Antisense strand to SEQ ID NO: 1933348
uauccuacacacugcugag

SEQ ID NO: 1933350 - RNA, 19 nt, Artificial Sequence
  Description of Artificial Sequence: Synthetic oligonucleotide
  Sense strand starting at position 847 of SEQ ID NO: 1879811
gacaucacuuuguccgcaa

SEQ ID NO: 1933351 - RNA, 19 nt, Artificial Sequence
  Description of Artificial Sequence: Synthetic oligonucleotide
  Antisense strand to SEQ ID NO: 1933350
uugcggacaaagugauguc

SEQ ID NO: 1933352 - RNA, 19 nt, Artificial Sequence
  Description of Artificial Sequence: Synthetic oligonucleotide
  Sense strand starting at position 848 of SEQ ID NO: 1879811
acaucacuuuguccgcaau

SEQ ID NO: 1933353 - RNA, 19 nt, Artificial Sequence
  Description of Artificial Sequence: Synthetic oligonucleotide
  Antisense strand to SEQ ID NO: 1933352
auugcggacaaagugaugu

SEQ ID NO: 1933354 - RNA, 19 nt, Artificial Sequence
  Description of Artificial Sequence: Synthetic oligonucleotide
  Sense strand starting at position 851 of SEQ ID NO: 1879811
ucacuuuguccgcaauuga

SEQ ID NO: 1933355 - RNA, 19 nt, Artificial Sequence
  Description of Artificial Sequence: Synthetic oligonucleotide
  Antisense strand to SEQ ID NO: 1933354
ucaauugcggacaaaguga

SEQ ID NO: 1933356 - RNA, 19 nt, Artificial Sequence
  Description of Artificial Sequence: Synthetic oligonucleotide
  Sense strand starting at position 862 of SEQ ID NO: 1879811
gcaauugacccuugucauu

SEQ ID NO: 1933357 - RNA, 19 nt, Artificial Sequence
  Description of Artificial Sequence: Synthetic oligonucleotide
  Antisense strand to SEQ ID NO: 1933356
aaugacaagggucaauugc

SEQ ID NO: 1933358 - RNA, 19 nt, Artificial Sequence
  Description of Artificial Sequence: Synthetic oligonucleotide
  Sense strand starting at position 935 of SEQ ID NO: 1879811
uguccauaugucugaagcu

SEQ ID NO: 1933359 - RNA, 19 nt, Artificial Sequence
  Description of Artificial Sequence: Synthetic oligonucleotide
  Antisense strand to SEQ ID NO: 1933358
agcuucagacauauggaca

SEQ ID NO: 1933360 - RNA, 19 nt, Artificial Sequence
  Description of Artificial Sequence: Synthetic oligonucleotide
  Sense strand starting at position 936 of SEQ ID NO: 1879811
guccauaugucugaagcuu

SEQ ID NO: 1933361 - RNA, 19 nt, Artificial Sequence
  Description of Artificial Sequence: Synthetic oligonucleotide
  Antisense strand to SEQ ID NO: 1933360
aagcuucagacauauggac

SEQ ID NO: 1933362 - RNA, 19 nt, Artificial Sequence
  Description of Artificial Sequence: Synthetic oligonucleotide
  Sense strand starting at position 1041 of SEQ ID NO: 1879811
cccugagcgucucuagaga

SEQ ID NO: 1933363 - RNA, 19 nt, Artificial Sequence
  Description of Artificial Sequence: Synthetic oligonucleotide
  Antisense strand to SEQ ID NO: 1933362
ucucuagagacgcucaggg

SEQ ID NO: 1933364 - RNA, 19 nt, Artificial Sequence
  Description of Artificial Sequence: Synthetic oligonucleotide
  Sense strand starting at position 1799 of SEQ ID NO: 1879811
cagaaugauguggagucuu

SEQ ID NO: 1933365 - RNA, 19 nt, Artificial Sequence
  Description of Artificial Sequence: Synthetic oligonucleotide
  Antisense strand to SEQ ID NO: 1933364
aagacuccacaucauucug

SEQ ID NO: 1933366 - RNA, 19 nt, Artificial Sequence
  Description of Artificial Sequence: Synthetic oligonucleotide
  Sense strand starting at position 1807 of SEQ ID NO: 1879811
uguggagucuuaagagagg

SEQ ID NO: 1933367 - RNA, 19 nt, Artificial Sequence
  Description of Artificial Sequence: Synthetic oligonucleotide
  Antisense strand to SEQ ID NO: 1933366
ccucucuuaagacuccaca

SEQ ID NO: 1933368 - RNA, 19 nt, Artificial Sequence
  Description of Artificial Sequence: Synthetic oligonucleotide
  Sense strand starting at position 2804 of SEQ ID NO: 1879811
aaaguauuuccgggccagu

SEQ ID NO: 1933369 - RNA, 19 nt, Artificial Sequence
  Description of Artificial Sequence: Synthetic oligonucleotide
  Antisense strand to SEQ ID NO: 1933368
acuggcccggaaauacuuu

SEQ ID NO: 1933370 - RNA, 19 nt, Artificial Sequence
  Description of Artificial Sequence: Synthetic oligonucleotide
  Sense strand starting at position 2815 of SEQ ID NO: 1879811
gggccagugcuggagaguu

SEQ ID NO: 1933371 - RNA, 19 nt, Artificial Sequence
  Description of Artificial Sequence: Synthetic oligonucleotide
  Antisense strand to SEQ ID NO: 1933370
aacucuccagcacuggccc

SEQ ID NO: 1933372 - RNA, 19 nt, Artificial Sequence
  Description of Artificial Sequence: Synthetic oligonucleotide
  Sense strand starting at position 3189 of SEQ ID NO: 1879811
caccuuugaugugguaaag

SEQ ID NO: 1933373 - RNA, 19 nt, Artificial Sequence
  Description of Artificial Sequence: Synthetic oligonucleotide
  Antisense strand to SEQ ID NO: 1933372
cuuuaccacaucaaaggug

SEQ ID NO: 1933374 - RNA, 19 nt, Artificial Sequence
  Description of Artificial Sequence: Synthetic oligonucleotide
  Sense strand starting at position 3200 of SEQ ID NO: 1879811
ugguaaagauggcuucaga

SEQ ID NO: 1933375 - RNA, 19 nt, Artificial Sequence
  Description of Artificial Sequence: Synthetic oligonucleotide
  Antisense strand to SEQ ID NO: 1933374
ucugaagccaucuuuacca

SEQ ID NO: 1933376 - RNA, 19 nt, Artificial Sequence
  Description of Artificial Sequence: Synthetic oligonucleotide
  Sense strand starting at position 3260 of SEQ ID NO: 1879811
cugugugucaguuugcuau

SEQ ID NO: 1933377 - RNA, 19 nt, Artificial Sequence
  Description of Artificial Sequence: Synthetic oligonucleotide
  Antisense strand to SEQ ID NO: 1933376
auagcaaacugacacacag

SEQ ID NO: 1933378 - RNA, 19 nt, Artificial Sequence
  Description of Artificial Sequence: Synthetic oligonucleotide
  Sense strand starting at position 3266 of SEQ ID NO: 1879811
gucaguuugcuauaccucu

SEQ ID NO: 1933379 - RNA, 19 nt, Artificial Sequence
  Description of Artificial Sequence: Synthetic oligonucleotide
  Antisense strand to SEQ ID NO: 1933378
agagguauagcaaacugac

SEQ ID NO: 1933380 - RNA, 19 nt, Artificial Sequence
  Description of Artificial Sequence: Synthetic oligonucleotide
  Sense strand starting at position 3274 of SEQ ID NO: 1879811
gcuauaccucucugagcca

SEQ ID NO: 1933381 - RNA, 19 nt, Artificial Sequence
  Description of Artificial Sequence: Synthetic oligonucleotide
  Antisense strand to SEQ ID NO: 1933380
uggcucagagagguauagc

SEQ ID NO: 1933382 - RNA, 19 nt, Artificial Sequence
  Description of Artificial Sequence: Synthetic oligonucleotide
  Sense strand starting at position 3335 of SEQ ID NO: 1879811
caggaauuaugugagaaac

SEQ ID NO: 1933383 - RNA, 19 nt, Artificial Sequence
  Description of Artificial Sequence: Synthetic oligonucleotide
  Antisense strand to SEQ ID NO: 1933382
guuucucacauaauuccug

SEQ ID NO: 1933384 - RNA, 19 nt, Artificial Sequence
  Description of Artificial Sequence: Synthetic oligonucleotide
  Sense strand starting at position 3400 of SEQ ID NO: 1879811
cuuagcggauuaucuguaa

SEQ ID NO: 1933385 - RNA, 19 nt, Artificial Sequence
  Description of Artificial Sequence: Synthetic oligonucleotide
  Antisense strand to SEQ ID NO: 1933384
uuacagauaauccgcuaag

SEQ ID NO: 1933386 - RNA, 19 nt, Artificial Sequence
  Description of Artificial Sequence: Synthetic oligonucleotide
  Sense strand starting at position 3419 of SEQ ID NO: 1879811
aaugaugucuaucucagga

SEQ ID NO: 1933387 - RNA, 19 nt, Artificial Sequence
  Description of Artificial Sequence: Synthetic oligonucleotide
  Antisense strand to SEQ ID NO: 1933386
uccugagauagacaucauu

SEQ ID NO: 1933388 - RNA, 19 nt, Artificial Sequence
  Description of Artificial Sequence: Synthetic oligonucleotide
  Sense strand starting at position 3421 of SEQ ID NO: 1879811
ugaugucuaucucaggauu

SEQ ID NO: 1933389 - RNA, 19 nt, Artificial Sequence
  Description of Artificial Sequence: Synthetic oligonucleotide
  Antisense strand to SEQ ID NO: 1933388
aauccugagauagacauca

SEQ ID NO: 1933390 - RNA, 19 nt, Artificial Sequence
  Description of Artificial Sequence: Synthetic oligonucleotide
  Sense strand starting at position 3424 of SEQ ID NO: 1879811
ugucuaucucaggauugca

SEQ ID NO: 1933391 - RNA, 19 nt, Artificial Sequence
  Description of Artificial Sequence: Synthetic oligonucleotide
  Antisense strand to SEQ ID NO: 1933390
ugcaauccugagauagaca

SEQ ID NO: 1933392 - RNA, 19 nt, Artificial Sequence
  Description of Artificial Sequence: Synthetic oligonucleotide
  Sense strand starting at position 3427 of SEQ ID NO: 1879811
cuaucucaggauugcaaga

SEQ ID NO: 1933393 - RNA, 19 nt, Artificial Sequence
  Description of Artificial Sequence: Synthetic oligonucleotide
  Antisense strand to SEQ ID NO: 1933392
ucuugcaauccugagauag

SEQ ID NO: 1933394 - RNA, 19 nt, Artificial Sequence
  Description of Artificial Sequence: Synthetic oligonucleotide
  Sense strand starting at position 3538 of SEQ ID NO: 1879811
ucugcuguauucgacacaa

SEQ ID NO: 1933395 - RNA, 19 nt, Artificial Sequence
  Description of Artificial Sequence: Synthetic oligonucleotide
  Antisense strand to SEQ ID NO: 1933394
uugugucgaauacagcaga

SEQ ID NO: 1933396 - RNA, 19 nt, Artificial Sequence
  Description of Artificial Sequence: Synthetic oligonucleotide
  Sense strand starting at position 3540 of SEQ ID NO: 1879811
ugcuguauucgacacaauu

SEQ ID NO: 1933397 - RNA, 19 nt, Artificial Sequence
  Description of Artificial Sequence: Synthetic oligonucleotide
  Antisense strand to SEQ ID NO: 1933396
aauugugucgaauacagca

SEQ ID NO: 1933398 - RNA, 19 nt, Artificial Sequence
  Description of Artificial Sequence: Synthetic oligonucleotide
  Sense strand starting at position 3573 of SEQ ID NO: 1879811
uuuauugagugacuacuga

SEQ ID NO: 1933399 - RNA, 19 nt, Artificial Sequence
  Description of Artificial Sequence: Synthetic oligonucleotide
  Antisense strand to SEQ ID NO: 1933398
ucaguagucacucaauaaa

SEQ ID NO: 1933400 - RNA, 19 nt, Artificial Sequence
  Description of Artificial Sequence: Synthetic oligonucleotide
  Sense strand starting at position 3623 of SEQ ID NO: 1879811
gauccagaguuagcugaga

SEQ ID NO: 1933401 - RNA, 19 nt, Artificial Sequence
  Description of Artificial Sequence: Synthetic oligonucleotide
  Antisense strand to SEQ ID NO: 1933400
ucucagcuaacucuggauc

SEQ ID NO: 1933402 - RNA, 19 nt, Artificial Sequence
  Description of Artificial Sequence: Synthetic oligonucleotide
  Sense strand starting at position 3625 of SEQ ID NO: 1879811
uccagaguuagcugagaaa

SEQ ID NO: 1933403 - RNA, 19 nt, Artificial Sequence
  Description of Artificial Sequence: Synthetic oligonucleotide
  Antisense strand to SEQ ID NO: 1933402
uuucucagcuaacucugga

SEQ ID NO: 1933404 - RNA, 19 nt, Artificial Sequence
  Description of Artificial Sequence: Synthetic oligonucleotide
  Sense strand starting at position 3628 of SEQ ID NO: 1879811
agaguuagcugagaaauuc

SEQ ID NO: 1933405 - RNA, 19 nt, Artificial Sequence
  Description of Artificial Sequence: Synthetic oligonucleotide
  Antisense strand to SEQ ID NO: 1933404
gaauuucucagcuaacucu

SEQ ID NO: 1933406 - RNA, 19 nt, Artificial Sequence
  Description of Artificial Sequence: Synthetic oligonucleotide
  Sense strand starting at position 3658 of SEQ ID NO: 1879811
aucuaaaccuuauggugaa

SEQ ID NO: 1933407 - RNA, 19 nt, Artificial Sequence
  Description of Artificial Sequence: Synthetic oligonucleotide
  Antisense strand to SEQ ID NO: 1933406
uucaccauaagguuuagau

SEQ ID NO: 1933408 - RNA, 19 nt, Artificial Sequence
  Description of Artificial Sequence: Synthetic oligonucleotide
  Sense strand starting at position 3659 of SEQ ID NO: 1879811
ucuaaaccuuauggugaaa

SEQ ID NO: 1933409 - RNA, 19 nt, Artificial Sequence
  Description of Artificial Sequence: Synthetic oligonucleotide
  Antisense strand to SEQ ID NO: 1933408
uuucaccauaagguuuaga

SEQ ID NO: 1933410 - RNA, 19 nt, Artificial Sequence
  Description of Artificial Sequence: Synthetic oligonucleotide
  Sense strand starting at position 3661 of SEQ ID NO: 1879811
uaaaccuuauggugaaaga

SEQ ID NO: 1933411 - RNA, 19 nt, Artificial Sequence
  Description of Artificial Sequence: Synthetic oligonucleotide
  Antisense strand to SEQ ID NO: 1933410
ucuuucaccauaagguuua

SEQ ID NO: 1933412 - RNA, 19 nt, Artificial Sequence
  Description of Artificial Sequence: Synthetic oligonucleotide
  Sense strand starting at position 3713 of SEQ ID NO: 1879811
agggaucuaguucggcaaa

SEQ ID NO: 1933413 - RNA, 19 nt, Artificial Sequence
  Description of Artificial Sequence: Synthetic oligonucleotide
  Antisense strand to SEQ ID NO: 1933412
uuugccgaacuagaucccu

SEQ ID NO: 1933414 - RNA, 19 nt, Artificial Sequence
  Description of Artificial Sequence: Synthetic oligonucleotide
  Sense strand starting at position 3715 of SEQ ID NO: 1879811
ggaucuaguucggcaaaua

SEQ ID NO: 1933415 - RNA, 19 nt, Artificial Sequence
  Description of Artificial Sequence: Synthetic oligonucleotide
  Antisense strand to SEQ ID NO: 1933414
uauuugccgaacuagaucc

SEQ ID NO: 1933416 - RNA, 19 nt, Artificial Sequence
  Description of Artificial Sequence: Synthetic oligonucleotide
  Sense strand starting at position 3716 of SEQ ID NO: 1879811
gaucuaguucggcaaauau

SEQ ID NO: 1933417 - RNA, 19 nt, Artificial Sequence
  Description of Artificial Sequence: Synthetic oligonucleotide
  Antisense strand to SEQ ID NO: 1933416
auauuugccgaacuagauc

SEQ ID NO: 1933418 - RNA, 19 nt, Artificial Sequence
  Description of Artificial Sequence: Synthetic oligonucleotide
  Sense strand starting at position 3726 of SEQ ID NO: 1879811
ggcaaauauucccugggca

SEQ ID NO: 1933419 - RNA, 19 nt, Artificial Sequence
  Description of Artificial Sequence: Synthetic oligonucleotide
  Antisense strand to SEQ ID NO: 1933418
ugcccagggaauauuugcc

SEQ ID NO: 1933420 - RNA, 19 nt, Artificial Sequence
  Description of Artificial Sequence: Synthetic oligonucleotide
  Sense strand starting at position 3727 of SEQ ID NO: 1879811
gcaaauauucccugggcac

SEQ ID NO: 1933421 - RNA, 19 nt, Artificial Sequence
  Description of Artificial Sequence: Synthetic oligonucleotide
  Antisense strand to SEQ ID NO: 1933420
gugcccagggaauauuugc

SEQ ID NO: 1933422 - RNA, 19 nt, Artificial Sequence
  Description of Artificial Sequence: Synthetic oligonucleotide
  Sense strand starting at position 3797 of SEQ ID NO: 1879811
ggagcacauucccagaaau

SEQ ID NO: 1933423 - RNA, 19 nt, Artificial Sequence
  Description of Artificial Sequence: Synthetic oligonucleotide
  Antisense strand to SEQ ID NO: 1933422
auuucugggaaugugcucc

SEQ ID NO: 1933424 - RNA, 19 nt, Artificial Sequence
  Description of Artificial Sequence: Synthetic oligonucleotide
  Sense strand starting at position 317 of SEQ ID NO: 1879812
cgugguuccucaucaguaa

SEQ ID NO: 1933425 - RNA, 19 nt, Artificial Sequence
  Description of Artificial Sequence: Synthetic oligonucleotide
  Antisense strand to SEQ ID NO: 1933424
uuacugaugaggaaccacg

SEQ ID NO: 1933426 - RNA, 19 nt, Artificial Sequence
  Description of Artificial Sequence: Synthetic oligonucleotide
  Sense strand starting at position 318 of SEQ ID NO: 1879812
gugguuccucaucaguaaa

SEQ ID NO: 1933427 - RNA, 19 nt, Artificial Sequence
  Description of Artificial Sequence: Synthetic oligonucleotide
  Antisense strand to SEQ ID NO: 1933426
uuuacugaugaggaaccac

SEQ ID NO: 1933428 - RNA, 19 nt, Artificial Sequence
  Description of Artificial Sequence: Synthetic oligonucleotide
  Sense strand starting at position 349 of SEQ ID NO: 1879812
augacuaucucacaguguu

SEQ ID NO: 1933429 - RNA, 19 nt, Artificial Sequence
  Description of Artificial Sequence: Synthetic oligonucleotide
  Antisense strand to SEQ ID NO: 1933428
aacacugugagauagucau

SEQ ID NO: 1933430 - RNA, 19 nt, Artificial Sequence
  Description of Artificial Sequence: Synthetic oligonucleotide
  Sense strand starting at position 352 of SEQ ID NO: 1879812
acuaucucacaguguugaa

SEQ ID NO: 1933431 - RNA, 19 nt, Artificial Sequence
  Description of Artificial Sequence: Synthetic oligonucleotide
  Antisense strand to SEQ ID NO: 1933430
uucaacacugugagauagu

SEQ ID NO: 1933432 - RNA, 19 nt, Artificial Sequence
  Description of Artificial Sequence: Synthetic oligonucleotide
  Sense strand starting at position 355 of SEQ ID NO: 1879812
aucucacaguguugaaaga

SEQ ID NO: 1933433 - RNA, 19 nt, Artificial Sequence
  Description of Artificial Sequence: Synthetic oligonucleotide
  Antisense strand to SEQ ID NO: 1933432
ucuuucaacacugugagau

SEQ ID NO: 1933434 - RNA, 19 nt, Artificial Sequence
  Description of Artificial Sequence: Synthetic oligonucleotide
  Sense strand starting at position 356 of SEQ ID NO: 1879812
ucucacaguguugaaagau

SEQ ID NO: 1933435 - RNA, 19 nt, Artificial Sequence
  Description of Artificial Sequence: Synthetic oligonucleotide
  Antisense strand to SEQ ID NO: 1933434
aucuuucaacacugugaga

SEQ ID NO: 1933436 - RNA, 19 nt, Artificial Sequence
  Description of Artificial Sequence: Synthetic oligonucleotide
  Sense strand starting at position 410 of SEQ ID NO: 1879812
aguguuaggaauuauuagu

SEQ ID NO: 1933437 - RNA, 19 nt, Artificial Sequence
  Description of Artificial Sequence: Synthetic oligonucleotide
  Antisense strand to SEQ ID NO: 1933436
acuaauaauuccuaacacu

SEQ ID NO: 1933438 - RNA, 19 nt, Artificial Sequence
  Description of Artificial Sequence: Synthetic oligonucleotide
  Sense strand starting at position 420 of SEQ ID NO: 1879812
auuauuaguccucgccuaa

SEQ ID NO: 1933439 - RNA, 19 nt, Artificial Sequence
  Description of Artificial Sequence: Synthetic oligonucleotide
  Antisense strand to SEQ ID NO: 1933438
uuaggcgaggacuaauaau

SEQ ID NO: 1933440 - RNA, 19 nt, Artificial Sequence
  Description of Artificial Sequence: Synthetic oligonucleotide
  Sense strand starting at position 500 of SEQ ID NO: 1879812
ccaaauggcugagaaagua

SEQ ID NO: 1933441 - RNA, 19 nt, Artificial Sequence
  Description of Artificial Sequence: Synthetic oligonucleotide
  Antisense strand to SEQ ID NO: 1933440
uacuuucucagccauuugg

SEQ ID NO: 1933442 - RNA, 19 nt, Artificial Sequence
  Description of Artificial Sequence: Synthetic oligonucleotide
  Sense strand starting at position 602 of SEQ ID NO: 1879812
gaguuuggauucuccaaua

SEQ ID NO: 1933443 - RNA, 19 nt, Artificial Sequence
  Description of Artificial Sequence: Synthetic oligonucleotide
  Antisense strand to SEQ ID NO: 1933442
uauuggagaauccaaacuc

SEQ ID NO: 1933444 - RNA, 19 nt, Artificial Sequence
  Description of Artificial Sequence: Synthetic oligonucleotide
  Sense strand starting at position 709 of SEQ ID NO: 1879812
ggagucagucaaggucauu

SEQ ID NO: 1933445 - RNA, 19 nt, Artificial Sequence
  Description of Artificial Sequence: Synthetic oligonucleotide
  Antisense strand to SEQ ID NO: 1933444
aaugaccuugacugacucc

SEQ ID NO: 1933446 - RNA, 19 nt, Artificial Sequence
  Description of Artificial Sequence: Synthetic oligonucleotide
  Sense strand starting at position 800 of SEQ ID NO: 1879812
gaugcagacuuguaguaaa

SEQ ID NO: 1933447 - RNA, 19 nt, Artificial Sequence
  Description of Artificial Sequence: Synthetic oligonucleotide
  Antisense strand to SEQ ID NO: 1933446
uuuacuacaagucugcauc

SEQ ID NO: 1933448 - RNA, 19 nt, Artificial Sequence
  Description of Artificial Sequence: Synthetic oligonucleotide
  Sense strand starting at position 843 of SEQ ID NO: 1879812
uggcuacauugacuucuau

SEQ ID NO: 1933449 - RNA, 19 nt, Artificial Sequence
  Description of Artificial Sequence: Synthetic oligonucleotide
  Antisense strand to SEQ ID NO: 1933448
auagaagucaauguagcca

SEQ ID NO: 1933450 - RNA, 19 nt, Artificial Sequence
  Description of Artificial Sequence: Synthetic oligonucleotide
  Sense strand starting at position 955 of SEQ ID NO: 1879812
uaggaaaggcccugauuaa

SEQ ID NO: 1933451 - RNA, 19 nt, Artificial Sequence
  Description of Artificial Sequence: Synthetic oligonucleotide
  Antisense strand to SEQ ID NO: 1933450
uuaaucagggccuuuccua

SEQ ID NO: 1933452 - RNA, 19 nt, Artificial Sequence
  Description of Artificial Sequence: Synthetic oligonucleotide
  Sense strand starting at position 989 of SEQ ID NO: 1879812
gcuuucucugggcagcaua

SEQ ID NO: 1933453 - RNA, 19 nt, Artificial Sequence
  Description of Artificial Sequence: Synthetic oligonucleotide
  Antisense strand to SEQ ID NO: 1933452
uaugcugcccagagaaagc

SEQ ID NO: 1933454 - RNA, 19 nt, Artificial Sequence
  Description of Artificial Sequence: Synthetic oligonucleotide
  Sense strand starting at position 1016 of SEQ ID NO: 1879812
gcuacaaauuccuuugugu

SEQ ID NO: 1933455 - RNA, 19 nt, Artificial Sequence
  Description of Artificial Sequence: Synthetic oligonucleotide
  Antisense strand to SEQ ID NO: 1933454
acacaaaggaauuuguagc

SEQ ID NO: 1933456 - RNA, 19 nt, Artificial Sequence
  Description of Artificial Sequence: Synthetic oligonucleotide
  Sense strand starting at position 1023 of SEQ ID NO: 1879812
auuccuuuguguuugagau

SEQ ID NO: 1933457 - RNA, 19 nt, Artificial Sequence
  Description of Artificial Sequence: Synthetic oligonucleotide
  Antisense strand to SEQ ID NO: 1933456
aucucaaacacaaaggaau

SEQ ID NO: 1933458 - RNA, 19 nt, Artificial Sequence
  Description of Artificial Sequence: Synthetic oligonucleotide
  Sense strand starting at position 1024 of SEQ ID NO: 1879812
uuccuuuguguuugagauc

SEQ ID NO: 1933459 - RNA, 19 nt, Artificial Sequence
  Description of Artificial Sequence: Synthetic oligonucleotide
  Antisense strand to SEQ ID NO: 1933458
gaucucaaacacaaaggaa

SEQ ID NO: 1933460 - RNA, 19 nt, Artificial Sequence
  Description of Artificial Sequence: Synthetic oligonucleotide
  Sense strand starting at position 1033 of SEQ ID NO: 1879812
guuugagauccucagagcu

SEQ ID NO: 1933461 - RNA, 19 nt, Artificial Sequence
  Description of Artificial Sequence: Synthetic oligonucleotide
  Antisense strand to SEQ ID NO: 1933460
agcucugaggaucucaaac

SEQ ID NO: 1933462 - RNA, 19 nt, Artificial Sequence
  Description of Artificial Sequence: Synthetic oligonucleotide
  Sense strand starting at position 1059 of SEQ ID NO: 1879812
gccauuuguucuuggagau

SEQ ID NO: 1933463 - RNA, 19 nt, Artificial Sequence
  Description of Artificial Sequence: Synthetic oligonucleotide
  Antisense strand to SEQ ID NO: 1933462
aucuccaagaacaaauggc

SEQ ID NO: 1933464 - RNA, 19 nt, Artificial Sequence
  Description of Artificial Sequence: Synthetic oligonucleotide
  Sense strand starting at position 1063 of SEQ ID NO: 1879812
uuuguucuuggagaugauu

SEQ ID NO: 1933465 - RNA, 19 nt, Artificial Sequence
  Description of Artificial Sequence: Synthetic oligonucleotide
  Antisense strand to SEQ ID NO: 1933464
aaucaucuccaagaacaaa

SEQ ID NO: 1933466 - RNA, 19 nt, Artificial Sequence
  Description of Artificial Sequence: Synthetic oligonucleotide
  Sense strand starting at position 1102 of SEQ ID NO: 1879812
gggaagguuggguguccua

SEQ ID NO: 1933467 - RNA, 19 nt, Artificial Sequence
  Description of Artificial Sequence: Synthetic oligonucleotide
  Antisense strand to SEQ ID NO: 1933466
uaggacacccaaccuuccc

SEQ ID NO: 1933468 - RNA, 19 nt, Artificial Sequence
  Description of Artificial Sequence: Synthetic oligonucleotide
  Sense strand starting at position 1141 of SEQ ID NO: 1879812
ucuggucaguaaugacaaa

SEQ ID NO: 1933469 - RNA, 19 nt, Artificial Sequence
  Description of Artificial Sequence: Synthetic oligonucleotide
  Antisense strand to SEQ ID NO: 1933468
uuugucauuacugaccaga

SEQ ID NO: 1933470 - RNA, 19 nt, Artificial Sequence
  Description of Artificial Sequence: Synthetic oligonucleotide
  Sense strand starting at position 1288 of SEQ ID NO: 1879812
cugccacccuguuuacauu

SEQ ID NO: 1933471 - RNA, 19 nt, Artificial Sequence
  Description of Artificial Sequence: Synthetic oligonucleotide
  Antisense strand to SEQ ID NO: 1933470
aauguaaacaggguggcag

SEQ ID NO: 1933472 - RNA, 19 nt, Artificial Sequence
  Description of Artificial Sequence: Synthetic oligonucleotide
  Sense strand starting at position 1402 of SEQ ID NO: 1879812
gcuuuaaggagccgacuua

SEQ ID NO: 1933473 - RNA, 19 nt, Artificial Sequence
  Description of Artificial Sequence: Synthetic oligonucleotide
  Antisense strand to SEQ ID NO: 1933472
uaagucggcuccuuaaagc

SEQ ID NO: 1933474 - RNA, 19 nt, Artificial Sequence
  Description of Artificial Sequence: Synthetic oligonucleotide
  Sense strand starting at position 1431 of SEQ ID NO: 1879812
aguguucucaggugacuuc

SEQ ID NO: 1933475 - RNA, 19 nt, Artificial Sequence
  Description of Artificial Sequence: Synthetic oligonucleotide
  Antisense strand to SEQ ID NO: 1933474
gaagucaccugagaacacu

SEQ ID NO: 1933476 - RNA, 19 nt, Artificial Sequence
  Description of Artificial Sequence: Synthetic oligonucleotide
  Sense strand starting at position 1438 of SEQ ID NO: 1879812
ucaggugacuuccuccaaa

SEQ ID NO: 1933477 - RNA, 19 nt, Artificial Sequence
  Description of Artificial Sequence: Synthetic oligonucleotide
  Antisense strand to SEQ ID NO: 1933476
uuuggaggaagucaccuga

SEQ ID NO: 1933478 - RNA, 19 nt, Artificial Sequence
  Description of Artificial Sequence: Synthetic oligonucleotide
  Sense strand starting at position 1718 of SEQ ID NO: 1879812
gugaaaugggacugugacu

SEQ ID NO: 1933479 - RNA, 19 nt, Artificial Sequence
  Description of Artificial Sequence: Synthetic oligonucleotide
  Antisense strand to SEQ ID NO: 1933478
agucacagucccauuucac

SEQ ID NO: 1933480 - RNA, 19 nt, Artificial Sequence
  Description of Artificial Sequence: Synthetic oligonucleotide
  Sense strand starting at position 1766 of SEQ ID NO: 1879812
ggugaaaugucgcccgaac

SEQ ID NO: 1933481 - RNA, 19 nt, Artificial Sequence
  Description of Artificial Sequence: Synthetic oligonucleotide
  Antisense strand to SEQ ID NO: 1933480
guucgggcgacauuucacc

SEQ ID NO: 1933482 - RNA, 19 nt, Artificial Sequence
  Description of Artificial Sequence: Synthetic oligonucleotide
  Sense strand starting at position 1768 of SEQ ID NO: 1879812
ugaaaugucgcccgaacca

SEQ ID NO: 1933483 - RNA, 19 nt, Artificial Sequence
  Description of Artificial Sequence: Synthetic oligonucleotide
  Antisense strand to SEQ ID NO: 1933482
ugguucgggcgacauuuca

SEQ ID NO: 1933484 - RNA, 19 nt, Artificial Sequence
  Description of Artificial Sequence: Synthetic oligonucleotide
  Sense strand starting at position 2433 of SEQ ID NO: 1879812
ugcccuucucuggaagauc

SEQ ID NO: 1933485 - RNA, 19 nt, Artificial Sequence
  Description of Artificial Sequence: Synthetic oligonucleotide
  Antisense strand to SEQ ID NO: 1933484
gaucuuccagagaagggca

SEQ ID NO: 1933486 - RNA, 19 nt, Artificial Sequence
  Description of Artificial Sequence: Synthetic oligonucleotide
  Sense strand starting at position 2755 of SEQ ID NO: 1879812
gcgagucucucaaggagag

SEQ ID NO: 1933487 - RNA, 19 nt, Artificial Sequence
  Description of Artificial Sequence: Synthetic oligonucleotide
  Antisense strand to SEQ ID NO: 1933486
cucuccuugagagacucgc

SEQ ID NO: 1933488 - RNA, 19 nt, Artificial Sequence
  Description of Artificial Sequence: Synthetic oligonucleotide
  Sense strand starting at position 2756 of SEQ ID NO: 1879812
cgagucucucaaggagaga

SEQ ID NO: 1933489 - RNA, 19 nt, Artificial Sequence
  Description of Artificial Sequence: Synthetic oligonucleotide
  Antisense strand to SEQ ID NO: 1933488
ucucuccuugagagacucg

SEQ ID NO: 1933490 - RNA, 19 nt, Artificial Sequence
  Description of Artificial Sequence: Synthetic oligonucleotide
  Sense strand starting at position 3534 of SEQ ID NO: 1879812
cuacgucucugugcugauu

SEQ ID NO: 1933491 - RNA, 19 nt, Artificial Sequence
  Description of Artificial Sequence: Synthetic oligonucleotide
  Antisense strand to SEQ ID NO: 1933490
aaucagcacagagacguag

SEQ ID NO: 1933492 - RNA, 19 nt, Artificial Sequence
  Description of Artificial Sequence: Synthetic oligonucleotide
  Sense strand starting at position 3785 of SEQ ID NO: 1879812
agaauauucuuugugcuuc

SEQ ID NO: 1933493 - RNA, 19 nt, Artificial Sequence
  Description of Artificial Sequence: Synthetic oligonucleotide
  Antisense strand to SEQ ID NO: 1933492
gaagcacaaagaauauucu

SEQ ID NO: 1933494 - RNA, 19 nt, Artificial Sequence
  Description of Artificial Sequence: Synthetic oligonucleotide
  Sense strand starting at position 3807 of SEQ ID NO: 1879812
gguucugauccuuagcaga

SEQ ID NO: 1933495 - RNA, 19 nt, Artificial Sequence
  Description of Artificial Sequence: Synthetic oligonucleotide
  Antisense strand to SEQ ID NO: 1933494
ucugcuaaggaucagaacc

SEQ ID NO: 1933496 - RNA, 19 nt, Artificial Sequence
  Description of Artificial Sequence: Synthetic oligonucleotide
  Sense strand starting at position 3809 of SEQ ID NO: 1879812
uucugauccuuagcagacu

SEQ ID NO: 1933497 - RNA, 19 nt, Artificial Sequence
  Description of Artificial Sequence: Synthetic oligonucleotide
  Antisense strand to SEQ ID NO: 1933496
agucugcuaaggaucagaa

SEQ ID NO: 1933498 - RNA, 19 nt, Artificial Sequence
  Description of Artificial Sequence: Synthetic oligonucleotide
  Sense strand starting at position 3820 of SEQ ID NO: 1879812
agcagacugugauccuaac

SEQ ID NO: 1933499 - RNA, 19 nt, Artificial Sequence
  Description of Artificial Sequence: Synthetic oligonucleotide
  Antisense strand to SEQ ID NO: 1933498
guuaggaucacagucugcu

SEQ ID NO: 1933500 - RNA, 19 nt, Artificial Sequence
  Description of Artificial Sequence: Synthetic oligonucleotide
  Sense strand starting at position 3890 of SEQ ID NO: 1879812
agggaaagauccuggaagu

SEQ ID NO: 1933501 - RNA, 19 nt, Artificial Sequence
  Description of Artificial Sequence: Synthetic oligonucleotide
  Antisense strand to SEQ ID NO: 1933500
acuuccaggaucuuucccu

SEQ ID NO: 1933502 - RNA, 19 nt, Artificial Sequence
  Description of Artificial Sequence: Synthetic oligonucleotide
  Sense strand starting at position 3976 of SEQ ID NO: 1879812
uggaauaucucuugaaugu

SEQ ID NO: 1933503 - RNA, 19 nt, Artificial Sequence
  Description of Artificial Sequence: Synthetic oligonucleotide
  Antisense strand to SEQ ID NO: 1933502
acauucaagagauauucca

SEQ ID NO: 1933504 - RNA, 19 nt, Artificial Sequence
  Description of Artificial Sequence: Synthetic oligonucleotide
  Sense strand starting at position 216 of SEQ ID NO: 1879813
ccagaacucuagcugaguu

SEQ ID NO: 1933505 - RNA, 19 nt, Artificial Sequence
  Description of Artificial Sequence: Synthetic oligonucleotide
  Antisense strand to SEQ ID NO: 1933504
aacucagcuagaguucugg

SEQ ID NO: 1933506 - RNA, 19 nt, Artificial Sequence
  Description of Artificial Sequence: Synthetic oligonucleotide
  Sense strand starting at position 290 of SEQ ID NO: 1879813
acccacucaugagaugaaa

SEQ ID NO: 1933507 - RNA, 19 nt, Artificial Sequence
  Description of Artificial Sequence: Synthetic oligonucleotide
  Antisense strand to SEQ ID NO: 1933506
uuucaucucaugagugggu

SEQ ID NO: 1933508 - RNA, 19 nt, Artificial Sequence
  Description of Artificial Sequence: Synthetic oligonucleotide
  Sense strand starting at position 399 of SEQ ID NO: 1879813
ggagaacagcuuugcucuu

SEQ ID NO: 1933509 - RNA, 19 nt, Artificial Sequence
  Description of Artificial Sequence: Synthetic oligonucleotide
  Antisense strand to SEQ ID NO: 1933508
aagagcaaagcuguucucc

SEQ ID NO: 1933510 - RNA, 19 nt, Artificial Sequence
  Description of Artificial Sequence: Synthetic oligonucleotide
  Sense strand starting at position 465 of SEQ ID NO: 1879813
gcacaagucagggagucaa

SEQ ID NO: 1933511 - RNA, 19 nt, Artificial Sequence
  Description of Artificial Sequence: Synthetic oligonucleotide
  Antisense strand to SEQ ID NO: 1933510
uugacucccugacuugugc

SEQ ID NO: 1933512 - RNA, 19 nt, Artificial Sequence
  Description of Artificial Sequence: Synthetic oligonucleotide
  Sense strand starting at position 539 of SEQ ID NO: 1879813
gcuugaaagagugacuauc

SEQ ID NO: 1933513 - RNA, 19 nt, Artificial Sequence
  Description of Artificial Sequence: Synthetic oligonucleotide
  Antisense strand to SEQ ID NO: 1933512
gauagucacucuuucaagc

SEQ ID NO: 1933514 - RNA, 19 nt, Artificial Sequence
  Description of Artificial Sequence: Synthetic oligonucleotide
  Sense strand starting at position 703 of SEQ ID NO: 1879813
cugugaguuauaggacuug

SEQ ID NO: 1933515 - RNA, 19 nt, Artificial Sequence
  Description of Artificial Sequence: Synthetic oligonucleotide
  Antisense strand to SEQ ID NO: 1933514
caaguccuauaacucacag

SEQ ID NO: 1933516 - RNA, 19 nt, Artificial Sequence
  Description of Artificial Sequence: Synthetic oligonucleotide
  Sense strand starting at position 782 of SEQ ID NO: 1879813
gaggaugccuccuccucua

SEQ ID NO: 1933517 - RNA, 19 nt, Artificial Sequence
  Description of Artificial Sequence: Synthetic oligonucleotide
  Antisense strand to SEQ ID NO: 1933516
uagaggaggaggcauccuc

SEQ ID NO: 1933518 - RNA, 19 nt, Artificial Sequence
  Description of Artificial Sequence: Synthetic oligonucleotide
  Sense strand starting at position 908 of SEQ ID NO: 1879813
ccuggauucccagaguccu

SEQ ID NO: 1933519 - RNA, 19 nt, Artificial Sequence
  Description of Artificial Sequence: Synthetic oligonucleotide
  Antisense strand to SEQ ID NO: 1933518
aggacucugggaauccagg

SEQ ID NO: 1933520 - RNA, 19 nt, Artificial Sequence
  Description of Artificial Sequence: Synthetic oligonucleotide
  Sense strand starting at position 934 of SEQ ID NO: 1879813
ggaaguguggagugguaca

SEQ ID NO: 1933521 - RNA, 19 nt, Artificial Sequence
  Description of Artificial Sequence: Synthetic oligonucleotide
  Antisense strand to SEQ ID NO: 1933520
uguaccacuccacacuucc

SEQ ID NO: 1933522 - RNA, 19 nt, Artificial Sequence
  Description of Artificial Sequence: Synthetic oligonucleotide
  Sense strand starting at position 959 of SEQ ID NO: 1879813
acagcuuuagaguaagcca

SEQ ID NO: 1933523 - RNA, 19 nt, Artificial Sequence
  Description of Artificial Sequence: Synthetic oligonucleotide
  Antisense strand to SEQ ID NO: 1933522
uggcuuacucuaaagcugu

SEQ ID NO: 1933524 - RNA, 19 nt, Artificial Sequence
  Description of Artificial Sequence: Synthetic oligonucleotide
  Sense strand starting at position 1525 of SEQ ID NO: 1879813
gggaaucccggcuaaaucu

SEQ ID NO: 1933525 - RNA, 19 nt, Artificial Sequence
  Description of Artificial Sequence: Synthetic oligonucleotide
  Antisense strand to SEQ ID NO: 1933524
agauuuagccgggauuccc

SEQ ID NO: 1933526 - RNA, 19 nt, Artificial Sequence
  Description of Artificial Sequence: Synthetic oligonucleotide
  Sense strand starting at position 1691 of SEQ ID NO: 1879813
cuggcaacuguguagacau

SEQ ID NO: 1933527 - RNA, 19 nt, Artificial Sequence
  Description of Artificial Sequence: Synthetic oligonucleotide
  Antisense strand to SEQ ID NO: 1933526
augucuacacaguugccag

SEQ ID NO: 1933528 - RNA, 19 nt, Artificial Sequence
  Description of Artificial Sequence: Synthetic oligonucleotide
  Sense strand starting at position 1795 of SEQ ID NO: 1879813
ggccaucucugccugaaga

SEQ ID NO: 1933529 - RNA, 19 nt, Artificial Sequence
  Description of Artificial Sequence: Synthetic oligonucleotide
  Antisense strand to SEQ ID NO: 1933528
ucuucaggcagagauggcc

SEQ ID NO: 1933530 - RNA, 19 nt, Artificial Sequence
  Description of Artificial Sequence: Synthetic oligonucleotide
  Sense strand starting at position 1924 of SEQ ID NO: 1879813
agcccugacccacagaauu

SEQ ID NO: 1933531 - RNA, 19 nt, Artificial Sequence
  Description of Artificial Sequence: Synthetic oligonucleotide
  Antisense strand to SEQ ID NO: 1933530
aauucugugggucagggcu

SEQ ID NO: 1933532 - RNA, 19 nt, Artificial Sequence
  Description of Artificial Sequence: Synthetic oligonucleotide
  Sense strand starting at position 1937 of SEQ ID NO: 1879813
agaauuagccagugaucca

SEQ ID NO: 1933533 - RNA, 19 nt, Artificial Sequence
  Description of Artificial Sequence: Synthetic oligonucleotide
  Antisense strand to SEQ ID NO: 1933532
uggaucacuggcuaauucu

SEQ ID NO: 1933534 - RNA, 19 nt, Artificial Sequence
  Description of Artificial Sequence: Synthetic oligonucleotide
  Sense strand starting at position 1982 of SEQ ID NO: 1879813
gguucugucccucacuagu

SEQ ID NO: 1933535 - RNA, 19 nt, Artificial Sequence
  Description of Artificial Sequence: Synthetic oligonucleotide
  Antisense strand to SEQ ID NO: 1933534
acuagugagggacagaacc

SEQ ID NO: 1933536 - RNA, 19 nt, Artificial Sequence
  Description of Artificial Sequence: Synthetic oligonucleotide
  Sense strand starting at position 2049 of SEQ ID NO: 1879813
gcaaaugagcuagaugauu

SEQ ID NO: 1933537 - RNA, 19 nt, Artificial Sequence
  Description of Artificial Sequence: Synthetic oligonucleotide
  Antisense strand to SEQ ID NO: 1933536
aaucaucuagcucauuugc

SEQ ID NO: 1933538 - RNA, 19 nt, Artificial Sequence
  Description of Artificial Sequence: Synthetic oligonucleotide
  Sense strand starting at position 2079 of SEQ ID NO: 1879813
ccuaacacccuguaaguua

SEQ ID NO: 1933539 - RNA, 19 nt, Artificial Sequence
  Description of Artificial Sequence: Synthetic oligonucleotide
  Antisense strand to SEQ ID NO: 1933538
uaacuuacaggguguuagg

SEQ ID NO: 1933540 - RNA, 19 nt, Artificial Sequence
  Description of Artificial Sequence: Synthetic oligonucleotide
  Sense strand starting at position 2102 of SEQ ID NO: 1879813
ugauucuguugaucuacca

SEQ ID NO: 1933541 - RNA, 19 nt, Artificial Sequence
  Description of Artificial Sequence: Synthetic oligonucleotide
  Antisense strand to SEQ ID NO: 1933540
ugguagaucaacagaauca

SEQ ID NO: 1933542 - RNA, 19 nt, Artificial Sequence
  Description of Artificial Sequence: Synthetic oligonucleotide
  Sense strand starting at position 2184 of SEQ ID NO: 1879813
aacagucaccugugaggua

SEQ ID NO: 1933543 - RNA, 19 nt, Artificial Sequence
  Description of Artificial Sequence: Synthetic oligonucleotide
  Antisense strand to SEQ ID NO: 1933542
uaccucacaggugacuguu

SEQ ID NO: 1933544 - RNA, 19 nt, Artificial Sequence
  Description of Artificial Sequence: Synthetic oligonucleotide
  Sense strand starting at position 2493 of SEQ ID NO: 1879813
gaauuaguuugaccugcuu

SEQ ID NO: 1933545 - RNA, 19 nt, Artificial Sequence
  Description of Artificial Sequence: Synthetic oligonucleotide
  Antisense strand to SEQ ID NO: 1933544
aagcaggucaaacuaauuc

SEQ ID NO: 1933546 - RNA, 19 nt, Artificial Sequence
  Description of Artificial Sequence: Synthetic oligonucleotide
  Sense strand starting at position 2532 of SEQ ID NO: 1879813
uacuuagcugaguaaugcu

SEQ ID NO: 1933547 - RNA, 19 nt, Artificial Sequence
  Description of Artificial Sequence: Synthetic oligonucleotide
  Antisense strand to SEQ ID NO: 1933546
agcauuacucagcuaagua

SEQ ID NO: 1933548 - RNA, 19 nt, Artificial Sequence
  Description of Artificial Sequence: Synthetic oligonucleotide
  Sense strand starting at position 2542 of SEQ ID NO: 1879813
aguaaugcugggcauguua

SEQ ID NO: 1933549 - RNA, 19 nt, Artificial Sequence
  Description of Artificial Sequence: Synthetic oligonucleotide
  Antisense strand to SEQ ID NO: 1933548
uaacaugcccagcauuacu

SEQ ID NO: 1933550 - RNA, 19 nt, Artificial Sequence
  Description of Artificial Sequence: Synthetic oligonucleotide
  Sense strand starting at position 2648 of SEQ ID NO: 1879813
ggcacacacuaguuguuau

SEQ ID NO: 1933551 - RNA, 19 nt, Artificial Sequence
  Description of Artificial Sequence: Synthetic oligonucleotide
  Antisense strand to SEQ ID NO: 1933550
auaacaacuagugugugcc

SEQ ID NO: 1933552 - RNA, 19 nt, Artificial Sequence
  Description of Artificial Sequence: Synthetic oligonucleotide
  Sense strand starting at position 2651 of SEQ ID NO: 1879813
acacacuaguuguuaucau

SEQ ID NO: 1933553 - RNA, 19 nt, Artificial Sequence
  Description of Artificial Sequence: Synthetic oligonucleotide
  Antisense strand to SEQ ID NO: 1933552
augauaacaacuagugugu

SEQ ID NO: 1933554 - RNA, 19 nt, Artificial Sequence
  Description of Artificial Sequence: Synthetic oligonucleotide
  Sense strand starting at position 2658 of SEQ ID NO: 1879813
aguuguuaucaucaucaag

SEQ ID NO: 1933555 - RNA, 19 nt, Artificial Sequence
  Description of Artificial Sequence: Synthetic oligonucleotide
  Antisense strand to SEQ ID NO: 1933554
cuugaugaugauaacaacu

SEQ ID NO: 1933556 - RNA, 19 nt, Artificial Sequence
  Description of Artificial Sequence: Synthetic oligonucleotide
  Sense strand starting at position 2660 of SEQ ID NO: 1879813
uuguuaucaucaucaaguu

SEQ ID NO: 1933557 - RNA, 19 nt, Artificial Sequence
  Description of Artificial Sequence: Synthetic oligonucleotide
  Antisense strand to SEQ ID NO: 1933556
aacuugaugaugauaacaa

SEQ ID NO: 1933558 - RNA, 19 nt, Artificial Sequence
  Description of Artificial Sequence: Synthetic oligonucleotide
  Sense strand starting at position 2669 of SEQ ID NO: 1879813
ucaucaaguugaguaaguu

SEQ ID NO: 1933559 - RNA, 19 nt, Artificial Sequence
  Description of Artificial Sequence: Synthetic oligonucleotide
  Antisense strand to SEQ ID NO: 1933558
aacuuacucaacuugauga

SEQ ID NO: 1933560 - RNA, 19 nt, Artificial Sequence
  Description of Artificial Sequence: Synthetic oligonucleotide
  Sense strand starting at position 2679 of SEQ ID NO: 1879813
gaguaaguugcucaugguu

SEQ ID NO: 1933561 - RNA, 19 nt, Artificial Sequence
  Description of Artificial Sequence: Synthetic oligonucleotide
  Antisense strand to SEQ ID NO: 1933560
aaccaugagcaacuuacuc

SEQ ID NO: 1933562 - RNA, 19 nt, Artificial Sequence
  Description of Artificial Sequence: Synthetic oligonucleotide
  Sense strand starting at position 2774 of SEQ ID NO: 1879813
gguucugaacgucaagaaa

SEQ ID NO: 1933563 - RNA, 19 nt, Artificial Sequence
  Description of Artificial Sequence: Synthetic oligonucleotide
  Antisense strand to SEQ ID NO: 1933562
uuucuugacguucagaacc

SEQ ID NO: 1933564 - RNA, 19 nt, Artificial Sequence
  Description of Artificial Sequence: Synthetic oligonucleotide
  Sense strand starting at position 2818 of SEQ ID NO: 1879813
uaguuuguggcacaaauca

SEQ ID NO: 1933565 - RNA, 19 nt, Artificial Sequence
  Description of Artificial Sequence: Synthetic oligonucleotide
  Antisense strand to SEQ ID NO: 1933564
ugauuugugccacaaacua

SEQ ID NO: 1933566 - RNA, 19 nt, Artificial Sequence
  Description of Artificial Sequence: Synthetic oligonucleotide
  Sense strand starting at position 2856 of SEQ ID NO: 1879813
gugaagaugguucguggaa

SEQ ID NO: 1933567 - RNA, 19 nt, Artificial Sequence
  Description of Artificial Sequence: Synthetic oligonucleotide
  Antisense strand to SEQ ID NO: 1933566
uuccacgaaccaucuucac

SEQ ID NO: 1933568 - RNA, 19 nt, Artificial Sequence
  Description of Artificial Sequence: Synthetic oligonucleotide
  Sense strand starting at position 2857 of SEQ ID NO: 1879813
ugaagaugguucguggaag

SEQ ID NO: 1933569 - RNA, 19 nt, Artificial Sequence
  Description of Artificial Sequence: Synthetic oligonucleotide
  Antisense strand to SEQ ID NO: 1933568
cuuccacgaaccaucuuca

SEQ ID NO: 1933570 - RNA, 19 nt, Artificial Sequence
  Description of Artificial Sequence: Synthetic oligonucleotide
  Sense strand starting at position 3014 of SEQ ID NO: 1879813
guaagauccugcucucaca

SEQ ID NO: 1933571 - RNA, 19 nt, Artificial Sequence
  Description of Artificial Sequence: Synthetic oligonucleotide
  Antisense strand to SEQ ID NO: 1933570
ugugagagcaggaucuuac

SEQ ID NO: 1933572 - RNA, 19 nt, Artificial Sequence
  Description of Artificial Sequence: Synthetic oligonucleotide
  Sense strand starting at position 3422 of SEQ ID NO: 1879813
ggccuuauuuaucuuguuu

SEQ ID NO: 1933573 - RNA, 19 nt, Artificial Sequence
  Description of Artificial Sequence: Synthetic oligonucleotide
  Antisense strand to SEQ ID NO: 1933572
aaacaagauaaauaaggcc

SEQ ID NO: 1933574 - RNA, 19 nt, Artificial Sequence
  Description of Artificial Sequence: Synthetic oligonucleotide
  Sense strand starting at position 3469 of SEQ ID NO: 1879813
gcgcuuguugaagacauuu

SEQ ID NO: 1933575 - RNA, 19 nt, Artificial Sequence
  Description of Artificial Sequence: Synthetic oligonucleotide
  Antisense strand to SEQ ID NO: 1933574
aaaugucuucaacaagcgc

SEQ ID NO: 1933576 - RNA, 19 nt, Artificial Sequence
  Description of Artificial Sequence: Synthetic oligonucleotide
  Sense strand starting at position 3578 of SEQ ID NO: 1879813
ugcacauggcucugaggau

SEQ ID NO: 1933577 - RNA, 19 nt, Artificial Sequence
  Description of Artificial Sequence: Synthetic oligonucleotide
  Antisense strand to SEQ ID NO: 1933576
auccucagagccaugugca

SEQ ID NO: 1933578 - RNA, 19 nt, Artificial Sequence
  Description of Artificial Sequence: Synthetic oligonucleotide
  Sense strand starting at position 3715 of SEQ ID NO: 1879813
ggaugaccuugggcacaua

SEQ ID NO: 1933579 - RNA, 19 nt, Artificial Sequence
  Description of Artificial Sequence: Synthetic oligonucleotide
  Antisense strand to SEQ ID NO: 1933578
uaugugcccaaggucaucc

SEQ ID NO: 1933580 - RNA, 19 nt, Artificial Sequence
  Description of Artificial Sequence: Synthetic oligonucleotide
  Sense strand starting at position 3752 of SEQ ID NO: 1879813
ucagcuugcuuaucugaaa

SEQ ID NO: 1933581 - RNA, 19 nt, Artificial Sequence
  Description of Artificial Sequence: Synthetic oligonucleotide
  Antisense strand to SEQ ID NO: 1933580
uuucagauaagcaagcuga

SEQ ID NO: 1933582 - RNA, 19 nt, Artificial Sequence
  Description of Artificial Sequence: Synthetic oligonucleotide
  Sense strand starting at position 3940 of SEQ ID NO: 1879813
guggaaauugcacaaccuu

SEQ ID NO: 1933583 - RNA, 19 nt, Artificial Sequence
  Description of Artificial Sequence: Synthetic oligonucleotide
  Antisense strand to SEQ ID NO: 1933582
aagguugugcaauuuccac

SEQ ID NO: 1933584 - RNA, 19 nt, Artificial Sequence
  Description of Artificial Sequence: Synthetic oligonucleotide
  Sense strand starting at position 1 of SEQ ID NO: 1879814
cgaaaugcccuguggcaua

SEQ ID NO: 1933585 - RNA, 19 nt, Artificial Sequence
  Description of Artificial Sequence: Synthetic oligonucleotide
  Antisense strand to SEQ ID NO: 1933584
uaugccacagggcauuucg

SEQ ID NO: 1933586 - RNA, 19 nt, Artificial Sequence
  Description of Artificial Sequence: Synthetic oligonucleotide
  Sense strand starting at position 117 of SEQ ID NO: 1879814
gccucaaguuggcuacauu

SEQ ID NO: 1933587 - RNA, 19 nt, Artificial Sequence
  Description of Artificial Sequence: Synthetic oligonucleotide
  Antisense strand to SEQ ID NO: 1933586
aauguagccaacuugaggc

SEQ ID NO: 1933588 - RNA, 19 nt, Artificial Sequence
  Description of Artificial Sequence: Synthetic oligonucleotide
  Sense strand starting at position 126 of SEQ ID NO: 1879814
uggcuacauucgguaagga

SEQ ID NO: 1933589 - RNA, 19 nt, Artificial Sequence
  Description of Artificial Sequence: Synthetic oligonucleotide
  Antisense strand to SEQ ID NO: 1933588
uccuuaccgaauguagcca

SEQ ID NO: 1933590 - RNA, 19 nt, Artificial Sequence
  Description of Artificial Sequence: Synthetic oligonucleotide
  Sense strand starting at position 282 of SEQ ID NO: 1879814
augagugauguuggugaag

SEQ ID NO: 1933591 - RNA, 19 nt, Artificial Sequence
  Description of Artificial Sequence: Synthetic oligonucleotide
  Antisense strand to SEQ ID NO: 1933590
cuucaccaacaucacucau

SEQ ID NO: 1933592 - RNA, 19 nt, Artificial Sequence
  Description of Artificial Sequence: Synthetic oligonucleotide
  Sense strand starting at position 296 of SEQ ID NO: 1879814
ugaagucacuccuccauga

SEQ ID NO: 1933593 - RNA, 19 nt, Artificial Sequence
  Description of Artificial Sequence: Synthetic oligonucleotide
  Antisense strand to SEQ ID NO: 1933592
ucauggaggagugacuuca

SEQ ID NO: 1933594 - RNA, 19 nt, Artificial Sequence
  Description of Artificial Sequence: Synthetic oligonucleotide
  Sense strand starting at position 349 of SEQ ID NO: 1879814
uuagaugcccuuuacaguu

SEQ ID NO: 1933595 - RNA, 19 nt, Artificial Sequence
  Description of Artificial Sequence: Synthetic oligonucleotide
  Antisense strand to SEQ ID NO: 1933594
aacuguaaagggcaucuaa

SEQ ID NO: 1933596 - RNA, 19 nt, Artificial Sequence
  Description of Artificial Sequence: Synthetic oligonucleotide
  Sense strand starting at position 438 of SEQ ID NO: 1879814
ccuggaaccugucuuauca

SEQ ID NO: 1933597 - RNA, 19 nt, Artificial Sequence
  Description of Artificial Sequence: Synthetic oligonucleotide
  Antisense strand to SEQ ID NO: 1933596
ugauaagacagguuccagg

SEQ ID NO: 1933598 - RNA, 19 nt, Artificial Sequence
  Description of Artificial Sequence: Synthetic oligonucleotide
  Sense strand starting at position 442 of SEQ ID NO: 1879814
gaaccugucuuaucaacgu

SEQ ID NO: 1933599 - RNA, 19 nt, Artificial Sequence
  Description of Artificial Sequence: Synthetic oligonucleotide
  Antisense strand to SEQ ID NO: 1933598
acguugauaagacagguuc

SEQ ID NO: 1933600 - RNA, 19 nt, Artificial Sequence
  Description of Artificial Sequence: Synthetic oligonucleotide
  Sense strand starting at position 446 of SEQ ID NO: 1879814
cugucuuaucaacguggau

SEQ ID NO: 1933601 - RNA, 19 nt, Artificial Sequence
  Description of Artificial Sequence: Synthetic oligonucleotide
  Antisense strand to SEQ ID NO: 1933600
auccacguugauaagacag

SEQ ID NO: 1933602 - RNA, 19 nt, Artificial Sequence
  Description of Artificial Sequence: Synthetic oligonucleotide
  Sense strand starting at position 448 of SEQ ID NO: 1879814
gucuuaucaacguggauag

SEQ ID NO: 1933603 - RNA, 19 nt, Artificial Sequence
  Description of Artificial Sequence: Synthetic oligonucleotide
  Antisense strand to SEQ ID NO: 1933602
cuauccacguugauaagac

SEQ ID NO: 1933604 - RNA, 19 nt, Artificial Sequence
  Description of Artificial Sequence: Synthetic oligonucleotide
  Sense strand starting at position 478 of SEQ ID NO: 1879814
ccuggaaggcaucaucauu

SEQ ID NO: 1933605 - RNA, 19 nt, Artificial Sequence
  Description of Artificial Sequence: Synthetic oligonucleotide
  Antisense strand to SEQ ID NO: 1933604
aaugaugaugccuuccagg

SEQ ID NO: 1933606 - RNA, 19 nt, Artificial Sequence
  Description of Artificial Sequence: Synthetic oligonucleotide
  Sense strand starting at position 613 of SEQ ID NO: 1879814
gggaaaugggucugcuuag

SEQ ID NO: 1933607 - RNA, 19 nt, Artificial Sequence
  Description of Artificial Sequence: Synthetic oligonucleotide
  Antisense strand to SEQ ID NO: 1933606
cuaagcagacccauuuccc

SEQ ID NO: 1933608 - RNA, 19 nt, Artificial Sequence
  Description of Artificial Sequence: Synthetic oligonucleotide
  Sense strand starting at position 614 of SEQ ID NO: 1879814
ggaaaugggucugcuuaga

SEQ ID NO: 1933609 - RNA, 19 nt, Artificial Sequence
  Description of Artificial Sequence: Synthetic oligonucleotide
  Antisense strand to SEQ ID NO: 1933608
ucuaagcagacccauuucc

SEQ ID NO: 1933610 - RNA, 19 nt, Artificial Sequence
  Description of Artificial Sequence: Synthetic oligonucleotide
  Sense strand starting at position 635 of SEQ ID NO: 1879814
cuggacuuuccauggccaa

SEQ ID NO: 1933611 - RNA, 19 nt, Artificial Sequence
  Description of Artificial Sequence: Synthetic oligonucleotide
  Antisense strand to SEQ ID NO: 1933610
uuggccauggaaaguccag

SEQ ID NO: 1933612 - RNA, 19 nt, Artificial Sequence
  Description of Artificial Sequence: Synthetic oligonucleotide
  Sense strand starting at position 800 of SEQ ID NO: 1879814
acccaauccucgcuuggaa

SEQ ID NO: 1933613 - RNA, 19 nt, Artificial Sequence
  Description of Artificial Sequence: Synthetic oligonucleotide
  Antisense strand to SEQ ID NO: 1933612
uuccaagcgaggauugggu

SEQ ID NO: 1933614 - RNA, 19 nt, Artificial Sequence
  Description of Artificial Sequence: Synthetic oligonucleotide
  Sense strand starting at position 820 of SEQ ID NO: 1879814
gcggcuggugcuuugagau

SEQ ID NO: 1933615 - RNA, 19 nt, Artificial Sequence
  Description of Artificial Sequence: Synthetic oligonucleotide
  Antisense strand to SEQ ID NO: 1933614
aucucaaagcaccagccgc

SEQ ID NO: 1933616 - RNA, 19 nt, Artificial Sequence
  Description of Artificial Sequence: Synthetic oligonucleotide
  Sense strand starting at position 1023 of SEQ ID NO: 1879814
ggauacuccuauccuggaa

SEQ ID NO: 1933617 - RNA, 19 nt, Artificial Sequence
  Description of Artificial Sequence: Synthetic oligonucleotide
  Antisense strand to SEQ ID NO: 1933616
uuccaggauaggaguaucc

SEQ ID NO: 1933618 - RNA, 19 nt, Artificial Sequence
  Description of Artificial Sequence: Synthetic oligonucleotide
  Sense strand starting at position 1052 of SEQ ID NO: 1879814
ggugaagcucuaugaggga

SEQ ID NO: 1933619 - RNA, 19 nt, Artificial Sequence
  Description of Artificial Sequence: Synthetic oligonucleotide
  Antisense strand to SEQ ID NO: 1933618
ucccucauagagcuucacc

SEQ ID NO: 1933620 - RNA, 19 nt, Artificial Sequence
  Description of Artificial Sequence: Synthetic oligonucleotide
  Sense strand starting at position 1167 of SEQ ID NO: 1879814
uccaaucuccaguaucgau

SEQ ID NO: 1933621 - RNA, 19 nt, Artificial Sequence
  Description of Artificial Sequence: Synthetic oligonucleotide
  Antisense strand to SEQ ID NO: 1933620
aucgauacuggagauugga

SEQ ID NO: 1933622 - RNA, 19 nt, Artificial Sequence
  Description of Artificial Sequence: Synthetic oligonucleotide
  Sense strand starting at position 1175 of SEQ ID NO: 1879814
ccaguaucgaugcaauggu

SEQ ID NO: 1933623 - RNA, 19 nt, Artificial Sequence
  Description of Artificial Sequence: Synthetic oligonucleotide
  Antisense strand to SEQ ID NO: 1933622
accauugcaucgauacugg

SEQ ID NO: 1933624 - RNA, 19 nt, Artificial Sequence
  Description of Artificial Sequence: Synthetic oligonucleotide
  Sense strand starting at position 1190 of SEQ ID NO: 1879814
uggugagguggcugauuga

SEQ ID NO: 1933625 - RNA, 19 nt, Artificial Sequence
  Description of Artificial Sequence: Synthetic oligonucleotide
  Antisense strand to SEQ ID NO: 1933624
ucaaucagccaccucacca

SEQ ID NO: 1933626 - RNA, 19 nt, Artificial Sequence
  Description of Artificial Sequence: Synthetic oligonucleotide
  Sense strand starting at position 1193 of SEQ ID NO: 1879814
ugagguggcugauugagau

SEQ ID NO: 1933627 - RNA, 19 nt, Artificial Sequence
  Description of Artificial Sequence: Synthetic oligonucleotide
  Antisense strand to SEQ ID NO: 1933626
aucucaaucagccaccuca

SEQ ID NO: 1933628 - RNA, 19 nt, Artificial Sequence
  Description of Artificial Sequence: Synthetic oligonucleotide
  Sense strand starting at position 1402 of SEQ ID NO: 1879814
gacccugaggucuaagcua

SEQ ID NO: 1933629 - RNA, 19 nt, Artificial Sequence
  Description of Artificial Sequence: Synthetic oligonucleotide
  Antisense strand to SEQ ID NO: 1933628
uagcuuagaccucaggguc

SEQ ID NO: 1933630 - RNA, 19 nt, Artificial Sequence
  Description of Artificial Sequence: Synthetic oligonucleotide
  Sense strand starting at position 1557 of SEQ ID NO: 1879814
agcacauugccauaaaguu

SEQ ID NO: 1933631 - RNA, 19 nt, Artificial Sequence
  Description of Artificial Sequence: Synthetic oligonucleotide
  Antisense strand to SEQ ID NO: 1933630
aacuuuauggcaaugugcu

SEQ ID NO: 1933632 - RNA, 19 nt, Artificial Sequence
  Description of Artificial Sequence: Synthetic oligonucleotide
  Sense strand starting at position 1642 of SEQ ID NO: 1879814
gaaggaaucggcgaguaga

SEQ ID NO: 1933633 - RNA, 19 nt, Artificial Sequence
  Description of Artificial Sequence: Synthetic oligonucleotide
  Antisense strand to SEQ ID NO: 1933632
ucuacucgccgauuccuuc

SEQ ID NO: 1933634 - RNA, 19 nt, Artificial Sequence
  Description of Artificial Sequence: Synthetic oligonucleotide
  Sense strand starting at position 1736 of SEQ ID NO: 1879814
gcuggauggaguuaaguga

SEQ ID NO: 1933635 - RNA, 19 nt, Artificial Sequence
  Description of Artificial Sequence: Synthetic oligonucleotide
  Antisense strand to SEQ ID NO: 1933634
ucacuuaacuccauccagc

SEQ ID NO: 1933636 - RNA, 19 nt, Artificial Sequence
  Description of Artificial Sequence: Synthetic oligonucleotide
  Sense strand starting at position 1743 of SEQ ID NO: 1879814
ggaguuaagugaaggauag

SEQ ID NO: 1933637 - RNA, 19 nt, Artificial Sequence
  Description of Artificial Sequence: Synthetic oligonucleotide
  Antisense strand to SEQ ID NO: 1933636
cuauccuucacuuaacucc

SEQ ID NO: 1933638 - RNA, 19 nt, Artificial Sequence
  Description of Artificial Sequence: Synthetic oligonucleotide
  Sense strand starting at position 2142 of SEQ ID NO: 1879814
gggaguuugcggaguccca

SEQ ID NO: 1933639 - RNA, 19 nt, Artificial Sequence
  Description of Artificial Sequence: Synthetic oligonucleotide
  Antisense strand to SEQ ID NO: 1933638
ugggacuccgcaaacuccc

SEQ ID NO: 1933640 - RNA, 19 nt, Artificial Sequence
  Description of Artificial Sequence: Synthetic oligonucleotide
  Sense strand starting at position 2191 of SEQ ID NO: 1879814
gcgcgcuugcucuuuaagu

SEQ ID NO: 1933641 - RNA, 19 nt, Artificial Sequence
  Description of Artificial Sequence: Synthetic oligonucleotide
  Antisense strand to SEQ ID NO: 1933640
acuuaaagagcaagcgcgc

SEQ ID NO: 1933642 - RNA, 19 nt, Artificial Sequence
  Description of Artificial Sequence: Synthetic oligonucleotide
  Sense strand starting at position 2271 of SEQ ID NO: 1879814
auggcuguugcuuggcaau

SEQ ID NO: 1933643 - RNA, 19 nt, Artificial Sequence
  Description of Artificial Sequence: Synthetic oligonucleotide
  Antisense strand to SEQ ID NO: 1933642
auugccaagcaacagccau

SEQ ID NO: 1933644 - RNA, 19 nt, Artificial Sequence
  Description of Artificial Sequence: Synthetic oligonucleotide
  Sense strand starting at position 2528 of SEQ ID NO: 1879814
gugccucgccgaaguguuu

SEQ ID NO: 1933645 - RNA, 19 nt, Artificial Sequence
  Description of Artificial Sequence: Synthetic oligonucleotide
  Antisense strand to SEQ ID NO: 1933644
aaacacuucggcgaggcac

SEQ ID NO: 1933646 - RNA, 19 nt, Artificial Sequence
  Description of Artificial Sequence: Synthetic oligonucleotide
  Sense strand starting at position 2546 of SEQ ID NO: 1879814
uuuaaaguguucuuuccaa

SEQ ID NO: 1933647 - RNA, 19 nt, Artificial Sequence
  Description of Artificial Sequence: Synthetic oligonucleotide
  Antisense strand to SEQ ID NO: 1933646
uuggaaagaacacuuuaaa

SEQ ID NO: 1933648 - RNA, 19 nt, Artificial Sequence
  Description of Artificial Sequence: Synthetic oligonucleotide
  Sense strand starting at position 2805 of SEQ ID NO: 1879814
aggauaguucuguguccgu

SEQ ID NO: 1933649 - RNA, 19 nt, Artificial Sequence
  Description of Artificial Sequence: Synthetic oligonucleotide
  Antisense strand to SEQ ID NO: 1933648
acggacacagaacuauccu

SEQ ID NO: 1933650 - RNA, 19 nt, Artificial Sequence
  Description of Artificial Sequence: Synthetic oligonucleotide
  Sense strand starting at position 2808 of SEQ ID NO: 1879814
auaguucuguguccguaaa

SEQ ID NO: 1933651 - RNA, 19 nt, Artificial Sequence
  Description of Artificial Sequence: Synthetic oligonucleotide
  Antisense strand to SEQ ID NO: 1933650
uuuacggacacagaacuau

SEQ ID NO: 1933652 - RNA, 19 nt, Artificial Sequence
  Description of Artificial Sequence: Synthetic oligonucleotide
  Sense strand starting at position 2809 of SEQ ID NO: 1879814
uaguucuguguccguaaau

SEQ ID NO: 1933653 - RNA, 19 nt, Artificial Sequence
  Description of Artificial Sequence: Synthetic oligonucleotide
  Antisense strand to SEQ ID NO: 1933652
auuuacggacacagaacua

SEQ ID NO: 1933654 - RNA, 19 nt, Artificial Sequence
  Description of Artificial Sequence: Synthetic oligonucleotide
  Sense strand starting at position 2810 of SEQ ID NO: 1879814
aguucuguguccguaaauc

SEQ ID NO: 1933655 - RNA, 19 nt, Artificial Sequence
  Description of Artificial Sequence: Synthetic oligonucleotide
  Antisense strand to SEQ ID NO: 1933654
gauuuacggacacagaacu

SEQ ID NO: 1933656 - RNA, 19 nt, Artificial Sequence
  Description of Artificial Sequence: Synthetic oligonucleotide
  Sense strand starting at position 3642 of SEQ ID NO: 1879814
ggcuuucuccaaggaggga

SEQ ID NO: 1933657 - RNA, 19 nt, Artificial Sequence
  Description of Artificial Sequence: Synthetic oligonucleotide
  Antisense strand to SEQ ID NO: 1933656
ucccuccuuggagaaagcc

SEQ ID NO: 1933658 - RNA, 19 nt, Artificial Sequence
  Description of Artificial Sequence: Synthetic oligonucleotide
  Sense strand starting at position 3699 of SEQ ID NO: 1879814
uggguuucaggguagaacu

SEQ ID NO: 1933659 - RNA, 19 nt, Artificial Sequence
  Description of Artificial Sequence: Synthetic oligonucleotide
  Antisense strand to SEQ ID NO: 1933658
aguucuacccugaaaccca

SEQ ID NO: 1933660 - RNA, 19 nt, Artificial Sequence
  Description of Artificial Sequence: Synthetic oligonucleotide
  Sense strand starting at position 3709 of SEQ ID NO: 1879814
gguagaacugcguguggaa

SEQ ID NO: 1933661 - RNA, 19 nt, Artificial Sequence
  Description of Artificial Sequence: Synthetic oligonucleotide
  Antisense strand to SEQ ID NO: 1933660
uuccacacgcaguucuacc

SEQ ID NO: 1933662 - RNA, 19 nt, Artificial Sequence
  Description of Artificial Sequence: Synthetic oligonucleotide
  Sense strand starting at position 3959 of SEQ ID NO: 1879814
aguuguugcccugaggcua

SEQ ID NO: 1933663 - RNA, 19 nt, Artificial Sequence
  Description of Artificial Sequence: Synthetic oligonucleotide
  Antisense strand to SEQ ID NO: 1933662
uagccucagggcaacaacu

SEQ ID NO: 1933664 - RNA, 19 nt, Artificial Sequence
  Description of Artificial Sequence: Synthetic oligonucleotide
  Sense strand starting at position 576 of SEQ ID NO: 1879815
ucuuaagguuagcuaucaa

SEQ ID NO: 1933665 - RNA, 19 nt, Artificial Sequence
  Description of Artificial Sequence: Synthetic oligonucleotide
  Antisense strand to SEQ ID NO: 1933664
uugauagcuaaccuuaaga

SEQ ID NO: 1933666 - RNA, 19 nt, Artificial Sequence
  Description of Artificial Sequence: Synthetic oligonucleotide
  Sense strand starting at position 639 of SEQ ID NO: 1879815
acauuuaggucauaucuga

SEQ ID NO: 1933667 - RNA, 19 nt, Artificial Sequence
  Description of Artificial Sequence: Synthetic oligonucleotide
  Antisense strand to SEQ ID NO: 1933666
ucagauaugaccuaaaugu

SEQ ID NO: 1933668 - RNA, 19 nt, Artificial Sequence
  Description of Artificial Sequence: Synthetic oligonucleotide
  Sense strand starting at position 658 of SEQ ID NO: 1879815
agauuauaaugcuuccagu

SEQ ID NO: 1933669 - RNA, 19 nt, Artificial Sequence
  Description of Artificial Sequence: Synthetic oligonucleotide
  Antisense strand to SEQ ID NO: 1933668
acuggaagcauuauaaucu

SEQ ID NO: 1933670 - RNA, 19 nt, Artificial Sequence
  Description of Artificial Sequence: Synthetic oligonucleotide
  Sense strand starting at position 674 of SEQ ID NO: 1879815
aguuauuucuagguccuuu

SEQ ID NO: 1933671 - RNA, 19 nt, Artificial Sequence
  Description of Artificial Sequence: Synthetic oligonucleotide
  Antisense strand to SEQ ID NO: 1933670
aaaggaccuagaaauaacu

SEQ ID NO: 1933672 - RNA, 19 nt, Artificial Sequence
  Description of Artificial Sequence: Synthetic oligonucleotide
  Sense strand starting at position 745 of SEQ ID NO: 1879815
aagugaugacuccagccuu

SEQ ID NO: 1933673 - RNA, 19 nt, Artificial Sequence
  Description of Artificial Sequence: Synthetic oligonucleotide
  Antisense strand to SEQ ID NO: 1933672
aaggcuggagucaucacuu

SEQ ID NO: 1933674 - RNA, 19 nt, Artificial Sequence
  Description of Artificial Sequence: Synthetic oligonucleotide
  Sense strand starting at position 781 of SEQ ID NO: 1879815
agugcucauccagaaaucu

SEQ ID NO: 1933675 - RNA, 19 nt, Artificial Sequence
  Description of Artificial Sequence: Synthetic oligonucleotide
  Antisense strand to SEQ ID NO: 1933674
agauuucuggaugagcacu

SEQ ID NO: 1933676 - RNA, 19 nt, Artificial Sequence
  Description of Artificial Sequence: Synthetic oligonucleotide
  Sense strand starting at position 875 of SEQ ID NO: 1879815
cgcugucuuaauucgaguu

SEQ ID NO: 1933677 - RNA, 19 nt, Artificial Sequence
  Description of Artificial Sequence: Synthetic oligonucleotide
  Antisense strand to SEQ ID NO: 1933676
aacucgaauuaagacagcg

SEQ ID NO: 1933678 - RNA, 19 nt, Artificial Sequence
  Description of Artificial Sequence: Synthetic oligonucleotide
  Sense strand starting at position 919 of SEQ ID NO: 1879815
auaaauaaugcagguguau

SEQ ID NO: 1933679 - RNA, 19 nt, Artificial Sequence
  Description of Artificial Sequence: Synthetic oligonucleotide
  Antisense strand to SEQ ID NO: 1933678
auacaccugcauuauuuau

SEQ ID NO: 1933680 - RNA, 19 nt, Artificial Sequence
  Description of Artificial Sequence: Synthetic oligonucleotide
  Sense strand starting at position 932 of SEQ ID NO: 1879815
guguauagcacauauguca

SEQ ID NO: 1933681 - RNA, 19 nt, Artificial Sequence
  Description of Artificial Sequence: Synthetic oligonucleotide
  Antisense strand to SEQ ID NO: 1933680
ugacauaugugcuauacac

SEQ ID NO: 1933682 - RNA, 19 nt, Artificial Sequence
  Description of Artificial Sequence: Synthetic oligonucleotide
  Sense strand starting at position 957 of SEQ ID NO: 1879815
acaaaugaguccuuguauc

SEQ ID NO: 1933683 - RNA, 19 nt, Artificial Sequence
  Description of Artificial Sequence: Synthetic oligonucleotide
  Antisense strand to SEQ ID NO: 1933682
gauacaaggacucauuugu

SEQ ID NO: 1933684 - RNA, 19 nt, Artificial Sequence
  Description of Artificial Sequence: Synthetic oligonucleotide
  Sense strand starting at position 1144 of SEQ ID NO: 1879815
cagggaaugugugcuauaa

SEQ ID NO: 1933685 - RNA, 19 nt, Artificial Sequence
  Description of Artificial Sequence: Synthetic oligonucleotide
  Antisense strand to SEQ ID NO: 1933684
uuauagcacacauucccug

SEQ ID NO: 1933686 - RNA, 19 nt, Artificial Sequence
  Description of Artificial Sequence: Synthetic oligonucleotide
  Sense strand starting at position 1148 of SEQ ID NO: 1879815
gaaugugugcuauaaccuc

SEQ ID NO: 1933687 - RNA, 19 nt, Artificial Sequence
  Description of Artificial Sequence: Synthetic oligonucleotide
  Antisense strand to SEQ ID NO: 1933686
gagguuauagcacacauuc

SEQ ID NO: 1933688 - RNA, 19 nt, Artificial Sequence
  Description of Artificial Sequence: Synthetic oligonucleotide
  Sense strand starting at position 1166 of SEQ ID NO: 1879815
cagugcuuucugcugagca

SEQ ID NO: 1933689 - RNA, 19 nt, Artificial Sequence
  Description of Artificial Sequence: Synthetic oligonucleotide
  Antisense strand to SEQ ID NO: 1933688
ugcucagcagaaagcacug

SEQ ID NO: 1933690 - RNA, 19 nt, Artificial Sequence
  Description of Artificial Sequence: Synthetic oligonucleotide
  Sense strand starting at position 1344 of SEQ ID NO: 1879815
agguuacaucaacauugua

SEQ ID NO: 1933691 - RNA, 19 nt, Artificial Sequence
  Description of Artificial Sequence: Synthetic oligonucleotide
  Antisense strand to SEQ ID NO: 1933690
uacaauguugauguaaccu

SEQ ID NO: 1933692 - RNA, 19 nt, Artificial Sequence
  Description of Artificial Sequence: Synthetic oligonucleotide
  Sense strand starting at position 1536 of SEQ ID NO: 1879815
auagcuucccacugaggau

SEQ ID NO: 1933693 - RNA, 19 nt, Artificial Sequence
  Description of Artificial Sequence: Synthetic oligonucleotide
  Antisense strand to SEQ ID NO: 1933692
auccucagugggaagcuau

SEQ ID NO: 1933694 - RNA, 19 nt, Artificial Sequence
  Description of Artificial Sequence: Synthetic oligonucleotide
  Sense strand starting at position 1707 of SEQ ID NO: 1879815
gcucccucugccuagaaca

SEQ ID NO: 1933695 - RNA, 19 nt, Artificial Sequence
  Description of Artificial Sequence: Synthetic oligonucleotide
  Antisense strand to SEQ ID NO: 1933694
uguucuaggcagagggagc

SEQ ID NO: 1933696 - RNA, 19 nt, Artificial Sequence
  Description of Artificial Sequence: Synthetic oligonucleotide
  Sense strand starting at position 1845 of SEQ ID NO: 1879815
cuugucauacuguauauua

SEQ ID NO: 1933697 - RNA, 19 nt, Artificial Sequence
  Description of Artificial Sequence: Synthetic oligonucleotide
  Antisense strand to SEQ ID NO: 1933696
uaauauacaguaugacaag

SEQ ID NO: 1933698 - RNA, 19 nt, Artificial Sequence
  Description of Artificial Sequence: Synthetic oligonucleotide
  Sense strand starting at position 1995 of SEQ ID NO: 1879815
uccuaauguuugcugaaga

SEQ ID NO: 1933699 - RNA, 19 nt, Artificial Sequence
  Description of Artificial Sequence: Synthetic oligonucleotide
  Antisense strand to SEQ ID NO: 1933698
ucuucagcaaacauuagga

SEQ ID NO: 1933700 - RNA, 19 nt, Artificial Sequence
  Description of Artificial Sequence: Synthetic oligonucleotide
  Sense strand starting at position 2161 of SEQ ID NO: 1879815
gggagcugucaguaagaac

SEQ ID NO: 1933701 - RNA, 19 nt, Artificial Sequence
  Description of Artificial Sequence: Synthetic oligonucleotide
  Antisense strand to SEQ ID NO: 1933700
guucuuacugacagcuccc

SEQ ID NO: 1933702 - RNA, 19 nt, Artificial Sequence
  Description of Artificial Sequence: Synthetic oligonucleotide
  Sense strand starting at position 2375 of SEQ ID NO: 1879815
ggacucagauuccucauca

SEQ ID NO: 1933703 - RNA, 19 nt, Artificial Sequence
  Description of Artificial Sequence: Synthetic oligonucleotide
  Antisense strand to SEQ ID NO: 1933702
ugaugaggaaucugagucc

SEQ ID NO: 1933704 - RNA, 19 nt, Artificial Sequence
  Description of Artificial Sequence: Synthetic oligonucleotide
  Sense strand starting at position 2449 of SEQ ID NO: 1879815
cuaggaugucauuacagug

SEQ ID NO: 1933705 - RNA, 19 nt, Artificial Sequence
  Description of Artificial Sequence: Synthetic oligonucleotide
  Antisense strand to SEQ ID NO: 1933704
cacuguaaugacauccuag

SEQ ID NO: 1933706 - RNA, 19 nt, Artificial Sequence
  Description of Artificial Sequence: Synthetic oligonucleotide
  Sense strand starting at position 2529 of SEQ ID NO: 1879815
gucacagaacuguaccauu

SEQ ID NO: 1933707 - RNA, 19 nt, Artificial Sequence
  Description of Artificial Sequence: Synthetic oligonucleotide
  Antisense strand to SEQ ID NO: 1933706
aaugguacaguucugugac

SEQ ID NO: 1933708 - RNA, 19 nt, Artificial Sequence
  Description of Artificial Sequence: Synthetic oligonucleotide
  Sense strand starting at position 2567 of SEQ ID NO: 1879815
gcagcuacaucuguuauuu

SEQ ID NO: 1933709 - RNA, 19 nt, Artificial Sequence
  Description of Artificial Sequence: Synthetic oligonucleotide
  Antisense strand to SEQ ID NO: 1933708
aaauaacagauguagcugc

SEQ ID NO: 1933710 - RNA, 19 nt, Artificial Sequence
  Description of Artificial Sequence: Synthetic oligonucleotide
  Sense strand starting at position 2613 of SEQ ID NO: 1879815
gugccuggugucuuggcaa

SEQ ID NO: 1933711 - RNA, 19 nt, Artificial Sequence
  Description of Artificial Sequence: Synthetic oligonucleotide
  Antisense strand to SEQ ID NO: 1933710
uugccaagacaccaggcac

SEQ ID NO: 1933712 - RNA, 19 nt, Artificial Sequence
  Description of Artificial Sequence: Synthetic oligonucleotide
  Sense strand starting at position 2628 of SEQ ID NO: 1879815
gcaacuugagauuguggaa

SEQ ID NO: 1933713 - RNA, 19 nt, Artificial Sequence
  Description of Artificial Sequence: Synthetic oligonucleotide
  Antisense strand to SEQ ID NO: 1933712
uuccacaaucucaaguugc

SEQ ID NO: 1933714 - RNA, 19 nt, Artificial Sequence
  Description of Artificial Sequence: Synthetic oligonucleotide
  Sense strand starting at position 2931 of SEQ ID NO: 1879815
augggaugcucuucuuaug

SEQ ID NO: 1933715 - RNA, 19 nt, Artificial Sequence
  Description of Artificial Sequence: Synthetic oligonucleotide
  Antisense strand to SEQ ID NO: 1933714
cauaagaagagcaucccau

SEQ ID NO: 1933716 - RNA, 19 nt, Artificial Sequence
  Description of Artificial Sequence: Synthetic oligonucleotide
  Sense strand starting at position 2966 of SEQ ID NO: 1879815
gugguaaagaccuagguaa

SEQ ID NO: 1933717 - RNA, 19 nt, Artificial Sequence
  Description of Artificial Sequence: Synthetic oligonucleotide
  Antisense strand to SEQ ID NO: 1933716
uuaccuaggucuuuaccac

SEQ ID NO: 1933718 - RNA, 19 nt, Artificial Sequence
  Description of Artificial Sequence: Synthetic oligonucleotide
  Sense strand starting at position 2968 of SEQ ID NO: 1879815
gguaaagaccuagguaaau

SEQ ID NO: 1933719 - RNA, 19 nt, Artificial Sequence
  Description of Artificial Sequence: Synthetic oligonucleotide
  Antisense strand to SEQ ID NO: 1933718
auuuaccuaggucuuuacc

SEQ ID NO: 1933720 - RNA, 19 nt, Artificial Sequence
  Description of Artificial Sequence: Synthetic oligonucleotide
  Sense strand starting at position 3206 of SEQ ID NO: 1879815
cagguuacggcauaucuaa

SEQ ID NO: 1933721 - RNA, 19 nt, Artificial Sequence
  Description of Artificial Sequence: Synthetic oligonucleotide
  Antisense strand to SEQ ID NO: 1933720
uuagauaugccguaaccug

SEQ ID NO: 1933722 - RNA, 19 nt, Artificial Sequence
  Description of Artificial Sequence: Synthetic oligonucleotide
  Sense strand starting at position 3293 of SEQ ID NO: 1879815
gacagaaggcuauguagga

SEQ ID NO: 1933723 - RNA, 19 nt, Artificial Sequence
  Description of Artificial Sequence: Synthetic oligonucleotide
  Antisense strand to SEQ ID NO: 1933722
uccuacauagccuucuguc

SEQ ID NO: 1933724 - RNA, 19 nt, Artificial Sequence
  Description of Artificial Sequence: Synthetic oligonucleotide
  Sense strand starting at position 3297 of SEQ ID NO: 1879815
gaaggcuauguaggaaaca

SEQ ID NO: 1933725 - RNA, 19 nt, Artificial Sequence
  Description of Artificial Sequence: Synthetic oligonucleotide
  Antisense strand to SEQ ID NO: 1933724
uguuuccuacauagccuuc

SEQ ID NO: 1933726 - RNA, 19 nt, Artificial Sequence
  Description of Artificial Sequence: Synthetic oligonucleotide
  Sense strand starting at position 3346 of SEQ ID NO: 1879815
gagcaauuggcgcucgcau

SEQ ID NO: 1933727 - RNA, 19 nt, Artificial Sequence
  Description of Artificial Sequence: Synthetic oligonucleotide
  Antisense strand to SEQ ID NO: 1933726
augcgagcgccaauugcuc

SEQ ID NO: 1933728 - RNA, 19 nt, Artificial Sequence
  Description of Artificial Sequence: Synthetic oligonucleotide
  Sense strand starting at position 3471 of SEQ ID NO: 1879815
cccagugacccaugacaga

SEQ ID NO: 1933729 - RNA, 19 nt, Artificial Sequence
  Description of Artificial Sequence: Synthetic oligonucleotide
  Antisense strand to SEQ ID NO: 1933728
ucugucaugggucacuggg

SEQ ID NO: 1933730 - RNA, 19 nt, Artificial Sequence
  Description of Artificial Sequence: Synthetic oligonucleotide
  Sense strand starting at position 3560 of SEQ ID NO: 1879815
uaguguuaucugugaaaua

SEQ ID NO: 1933731 - RNA, 19 nt, Artificial Sequence
  Description of Artificial Sequence: Synthetic oligonucleotide
  Antisense strand to SEQ ID NO: 1933730
uauuucacagauaacacua

SEQ ID NO: 1933732 - RNA, 19 nt, Artificial Sequence
  Description of Artificial Sequence: Synthetic oligonucleotide
  Sense strand starting at position 3584 of SEQ ID NO: 1879815
agcuuuaagacuggaggga

SEQ ID NO: 1933733 - RNA, 19 nt, Artificial Sequence
  Description of Artificial Sequence: Synthetic oligonucleotide
  Antisense strand to SEQ ID NO: 1933732
ucccuccagucuuaaagcu

SEQ ID NO: 1933734 - RNA, 19 nt, Artificial Sequence
  Description of Artificial Sequence: Synthetic oligonucleotide
  Sense strand starting at position 3599 of SEQ ID NO: 1879815
gggagaaucugaucagcua

SEQ ID NO: 1933735 - RNA, 19 nt, Artificial Sequence
  Description of Artificial Sequence: Synthetic oligonucleotide
  Antisense strand to SEQ ID NO: 1933734
uagcugaucagauucuccc

SEQ ID NO: 1933736 - RNA, 19 nt, Artificial Sequence
  Description of Artificial Sequence: Synthetic oligonucleotide
  Sense strand starting at position 3673 of SEQ ID NO: 1879815
agugcugucacacaggaaa

SEQ ID NO: 1933737 - RNA, 19 nt, Artificial Sequence
  Description of Artificial Sequence: Synthetic oligonucleotide
  Antisense strand to SEQ ID NO: 1933736
uuuccugugugacagcacu

SEQ ID NO: 1933738 - RNA, 19 nt, Artificial Sequence
  Description of Artificial Sequence: Synthetic oligonucleotide
  Sense strand starting at position 3694 of SEQ ID NO: 1879815
gugugaggaaucgaagucu

SEQ ID NO: 1933739 - RNA, 19 nt, Artificial Sequence
  Description of Artificial Sequence: Synthetic oligonucleotide
  Antisense strand to SEQ ID NO: 1933738
agacuucgauuccucacac

SEQ ID NO: 1933740 - RNA, 19 nt, Artificial Sequence
  Description of Artificial Sequence: Synthetic oligonucleotide
  Sense strand starting at position 3953 of SEQ ID NO: 1879815
gggagcaaaccuuguuacu

SEQ ID NO: 1933741 - RNA, 19 nt, Artificial Sequence
  Description of Artificial Sequence: Synthetic oligonucleotide
  Antisense strand to SEQ ID NO: 1933740
aguaacaagguuugcuccc

SEQ ID NO: 1933742 - RNA, 19 nt, Artificial Sequence
  Description of Artificial Sequence: Synthetic oligonucleotide
  Sense strand starting at position 3955 of SEQ ID NO: 1879815
gagcaaaccuuguuacuug

SEQ ID NO: 1933743 - RNA, 19 nt, Artificial Sequence
  Description of Artificial Sequence: Synthetic oligonucleotide
  Antisense strand to SEQ ID NO: 1933742
caaguaacaagguuugcuc

SEQ ID NO: 1933744 - RNA, 19 nt, Artificial Sequence
  Description of Artificial Sequence: Synthetic oligonucleotide
  Sense strand starting at position 286 of SEQ ID NO: 1879816
ccuggauggcucugaaugu

SEQ ID NO: 1933745 - RNA, 19 nt, Artificial Sequence
  Description of Artificial Sequence: Synthetic oligonucleotide
  Antisense strand to SEQ ID NO: 1933744
acauucagagccauccagg

SEQ ID NO: 1933746 - RNA, 19 nt, Artificial Sequence
  Description of Artificial Sequence: Synthetic oligonucleotide
  Sense strand starting at position 295 of SEQ ID NO: 1879816
cucugaaugugguccaaca

SEQ ID NO: 1933747 - RNA, 19 nt, Artificial Sequence
  Description of Artificial Sequence: Synthetic oligonucleotide
  Antisense strand to SEQ ID NO: 1933746
uguuggaccacauucagag

SEQ ID NO: 1933748 - RNA, 19 nt, Artificial Sequence
  Description of Artificial Sequence: Synthetic oligonucleotide
  Sense strand starting at position 297 of SEQ ID NO: 1879816
cugaaugugguccaacaca

SEQ ID NO: 1933749 - RNA, 19 nt, Artificial Sequence
  Description of Artificial Sequence: Synthetic oligonucleotide
  Antisense strand to SEQ ID NO: 1933748
uguguuggaccacauucag

SEQ ID NO: 1933750 - RNA, 19 nt, Artificial Sequence
  Description of Artificial Sequence: Synthetic oligonucleotide
  Sense strand starting at position 408 of SEQ ID NO: 1879816
ccaagaugguucuucuucu

SEQ ID NO: 1933751 - RNA, 19 nt, Artificial Sequence
  Description of Artificial Sequence: Synthetic oligonucleotide
  Antisense strand to SEQ ID NO: 1933750
agaagaagaaccaucuugg

SEQ ID NO: 1933752 - RNA, 19 nt, Artificial Sequence
  Description of Artificial Sequence: Synthetic oligonucleotide
  Sense strand starting at position 457 of SEQ ID NO: 1879816
ggacaccacugcucuauau

SEQ ID NO: 1933753 - RNA, 19 nt, Artificial Sequence
  Description of Artificial Sequence: Synthetic oligonucleotide
  Antisense strand to SEQ ID NO: 1933752
auauagagcaguggugucc

SEQ ID NO: 1933754 - RNA, 19 nt, Artificial Sequence
  Description of Artificial Sequence: Synthetic oligonucleotide
  Sense strand starting at position 461 of SEQ ID NO: 1879816
accacugcucuauauagua

SEQ ID NO: 1933755 - RNA, 19 nt, Artificial Sequence
  Description of Artificial Sequence: Synthetic oligonucleotide
  Antisense strand to SEQ ID NO: 1933754
uacuauauagagcaguggu

SEQ ID NO: 1933756 - RNA, 19 nt, Artificial Sequence
  Description of Artificial Sequence: Synthetic oligonucleotide
  Sense strand starting at position 469 of SEQ ID NO: 1879816
ucuauauaguaggcaauga

SEQ ID NO: 1933757 - RNA, 19 nt, Artificial Sequence
  Description of Artificial Sequence: Synthetic oligonucleotide
  Antisense strand to SEQ ID NO: 1933756
ucauugccuacuauauaga

SEQ ID NO: 1933758 - RNA, 19 nt, Artificial Sequence
  Description of Artificial Sequence: Synthetic oligonucleotide
  Sense strand starting at position 491 of SEQ ID NO: 1879816
ccaccaagguuuccgagua

SEQ ID NO: 1933759 - RNA, 19 nt, Artificial Sequence
  Description of Artificial Sequence: Synthetic oligonucleotide
  Antisense strand to SEQ ID NO: 1933758
uacucggaaaccuuggugg

SEQ ID NO: 1933760 - RNA, 19 nt, Artificial Sequence
  Description of Artificial Sequence: Synthetic oligonucleotide
  Sense strand starting at position 873 of SEQ ID NO: 1879816
agcccagcccucuaaugaa

SEQ ID NO: 1933761 - RNA, 19 nt, Artificial Sequence
  Description of Artificial Sequence: Synthetic oligonucleotide
  Antisense strand to SEQ ID NO: 1933760
uucauuagagggcugggcu

SEQ ID NO: 1933762 - RNA, 19 nt, Artificial Sequence
  Description of Artificial Sequence: Synthetic oligonucleotide
  Sense strand starting at position 937 of SEQ ID NO: 1879816
uggugauccagugagacau

SEQ ID NO: 1933763 - RNA, 19 nt, Artificial Sequence
  Description of Artificial Sequence: Synthetic oligonucleotide
  Antisense strand to SEQ ID NO: 1933762
augucucacuggaucacca

SEQ ID NO: 1933764 - RNA, 19 nt, Artificial Sequence
  Description of Artificial Sequence: Synthetic oligonucleotide
  Sense strand starting at position 1018 of SEQ ID NO: 1879816
ucaguuccaucuguaaauc

SEQ ID NO: 1933765 - RNA, 19 nt, Artificial Sequence
  Description of Artificial Sequence: Synthetic oligonucleotide
  Antisense strand to SEQ ID NO: 1933764
gauuuacagauggaacuga

SEQ ID NO: 1933766 - RNA, 19 nt, Artificial Sequence
  Description of Artificial Sequence: Synthetic oligonucleotide
  Sense strand starting at position 1076 of SEQ ID NO: 1879816
cucagagccuuucuaaagu

SEQ ID NO: 1933767 - RNA, 19 nt, Artificial Sequence
  Description of Artificial Sequence: Synthetic oligonucleotide
  Antisense strand to SEQ ID NO: 1933766
acuuuagaaaggcucugag

SEQ ID NO: 1933768 - RNA, 19 nt, Artificial Sequence
  Description of Artificial Sequence: Synthetic oligonucleotide
  Sense strand starting at position 1221 of SEQ ID NO: 1879816
auggccauuuccuagggaa

SEQ ID NO: 1933769 - RNA, 19 nt, Artificial Sequence
  Description of Artificial Sequence: Synthetic oligonucleotide
  Antisense strand to SEQ ID NO: 1933768
uucccuaggaaauggccau

SEQ ID NO: 1933770 - RNA, 19 nt, Artificial Sequence
  Description of Artificial Sequence: Synthetic oligonucleotide
  Sense strand starting at position 1546 of SEQ ID NO: 1879816
ucacaaauuccucacguga

SEQ ID NO: 1933771 - RNA, 19 nt, Artificial Sequence
  Description of Artificial Sequence: Synthetic oligonucleotide
  Antisense strand to SEQ ID NO: 1933770
ucacgugaggaauuuguga

SEQ ID NO: 1933772 - RNA, 19 nt, Artificial Sequence
  Description of Artificial Sequence: Synthetic oligonucleotide
  Sense strand starting at position 1617 of SEQ ID NO: 1879816
gguccugaucccugggaga

SEQ ID NO: 1933773 - RNA, 19 nt, Artificial Sequence
  Description of Artificial Sequence: Synthetic oligonucleotide
  Antisense strand to SEQ ID NO: 1933772
ucucccagggaucaggacc

SEQ ID NO: 1933774 - RNA, 19 nt, Artificial Sequence
  Description of Artificial Sequence: Synthetic oligonucleotide
  Sense strand starting at position 1861 of SEQ ID NO: 1879816
ggaggaauaccucgcaggu

SEQ ID NO: 1933775 - RNA, 19 nt, Artificial Sequence
  Description of Artificial Sequence: Synthetic oligonucleotide
  Antisense strand to SEQ ID NO: 1933774
accugcgagguauuccucc

SEQ ID NO: 1933776 - RNA, 19 nt, Artificial Sequence
  Description of Artificial Sequence: Synthetic oligonucleotide
  Sense strand starting at position 2315 of SEQ ID NO: 1879816
gggccaauucuguacaauu

SEQ ID NO: 1933777 - RNA, 19 nt, Artificial Sequence
  Description of Artificial Sequence: Synthetic oligonucleotide
  Antisense strand to SEQ ID NO: 1933776
aauuguacagaauuggccc

SEQ ID NO: 1933778 - RNA, 19 nt, Artificial Sequence
  Description of Artificial Sequence: Synthetic oligonucleotide
  Sense strand starting at position 2341 of SEQ ID NO: 1879816
aagucugagugccuagaau

SEQ ID NO: 1933779 - RNA, 19 nt, Artificial Sequence
  Description of Artificial Sequence: Synthetic oligonucleotide
  Antisense strand to SEQ ID NO: 1933778
auucuaggcacucagacuu

SEQ ID NO: 1933780 - RNA, 19 nt, Artificial Sequence
  Description of Artificial Sequence: Synthetic oligonucleotide
  Sense strand starting at position 2366 of SEQ ID NO: 1879816
auaagaguuucuccuugag

SEQ ID NO: 1933781 - RNA, 19 nt, Artificial Sequence
  Description of Artificial Sequence: Synthetic oligonucleotide
  Antisense strand to SEQ ID NO: 1933780
cucaaggagaaacucuuau

SEQ ID NO: 1933782 - RNA, 19 nt, Artificial Sequence
  Description of Artificial Sequence: Synthetic oligonucleotide
  Sense strand starting at position 2368 of SEQ ID NO: 1879816
aagaguuucuccuugagua

SEQ ID NO: 1933783 - RNA, 19 nt, Artificial Sequence
  Description of Artificial Sequence: Synthetic oligonucleotide
  Antisense strand to SEQ ID NO: 1933782
uacucaaggagaaacucuu

SEQ ID NO: 1933784 - RNA, 19 nt, Artificial Sequence
  Description of Artificial Sequence: Synthetic oligonucleotide
  Sense strand starting at position 2369 of SEQ ID NO: 1879816
agaguuucuccuugaguac

SEQ ID NO: 1933785 - RNA, 19 nt, Artificial Sequence
  Description of Artificial Sequence: Synthetic oligonucleotide
  Antisense strand to SEQ ID NO: 1933784
guacucaaggagaaacucu

SEQ ID NO: 1933786 - RNA, 19 nt, Artificial Sequence
  Description of Artificial Sequence: Synthetic oligonucleotide
  Sense strand starting at position 2370 of SEQ ID NO: 1879816
gaguuucuccuugaguaca

SEQ ID NO: 1933787 - RNA, 19 nt, Artificial Sequence
  Description of Artificial Sequence: Synthetic oligonucleotide
  Antisense strand to SEQ ID NO: 1933786
uguacucaaggagaaacuc

SEQ ID NO: 1933788 - RNA, 19 nt, Artificial Sequence
  Description of Artificial Sequence: Synthetic oligonucleotide
  Sense strand starting at position 2461 of SEQ ID NO: 1879816
agguuaaugccucaaccag

SEQ ID NO: 1933789 - RNA, 19 nt, Artificial Sequence
  Description of Artificial Sequence: Synthetic oligonucleotide
  Antisense strand to SEQ ID NO: 1933788
cugguugaggcauuaaccu

SEQ ID NO: 1933790 - RNA, 19 nt, Artificial Sequence
  Description of Artificial Sequence: Synthetic oligonucleotide
  Sense strand starting at position 2527 of SEQ ID NO: 1879816
gagaguguggacugggauu

SEQ ID NO: 1933791 - RNA, 19 nt, Artificial Sequence
  Description of Artificial Sequence: Synthetic oligonucleotide
  Antisense strand to SEQ ID NO: 1933790
aaucccaguccacacucuc

SEQ ID NO: 1933792 - RNA, 19 nt, Artificial Sequence
  Description of Artificial Sequence: Synthetic oligonucleotide
  Sense strand starting at position 2556 of SEQ ID NO: 1879816
gcugacuccgagugaugga

SEQ ID NO: 1933793 - RNA, 19 nt, Artificial Sequence
  Description of Artificial Sequence: Synthetic oligonucleotide
  Antisense strand to SEQ ID NO: 1933792
uccaucacucggagucagc

SEQ ID NO: 1933794 - RNA, 19 nt, Artificial Sequence
  Description of Artificial Sequence: Synthetic oligonucleotide
  Sense strand starting at position 2565 of SEQ ID NO: 1879816
gagugauggaggugaacau

SEQ ID NO: 1933795 - RNA, 19 nt, Artificial Sequence
  Description of Artificial Sequence: Synthetic oligonucleotide
  Antisense strand to SEQ ID NO: 1933794
auguucaccuccaucacuc

SEQ ID NO: 1933796 - RNA, 19 nt, Artificial Sequence
  Description of Artificial Sequence: Synthetic oligonucleotide
  Sense strand starting at position 2601 of SEQ ID NO: 1879816
caggauuaucgugaggauu

SEQ ID NO: 1933797 - RNA, 19 nt, Artificial Sequence
  Description of Artificial Sequence: Synthetic oligonucleotide
  Antisense strand to SEQ ID NO: 1933796
aauccucacgauaauccug

SEQ ID NO: 1933798 - RNA, 19 nt, Artificial Sequence
  Description of Artificial Sequence: Synthetic oligonucleotide
  Sense strand starting at position 2649 of SEQ ID NO: 1879816
gggacuugcuucccaucau

SEQ ID NO: 1933799 - RNA, 19 nt, Artificial Sequence
  Description of Artificial Sequence: Synthetic oligonucleotide
  Antisense strand to SEQ ID NO: 1933798
augaugggaagcaaguccc

SEQ ID NO: 1933800 - RNA, 19 nt, Artificial Sequence
  Description of Artificial Sequence: Synthetic oligonucleotide
  Sense strand starting at position 2726 of SEQ ID NO: 1879816
gaaggagauugggaauauu

SEQ ID NO: 1933801 - RNA, 19 nt, Artificial Sequence
  Description of Artificial Sequence: Synthetic oligonucleotide
  Antisense strand to SEQ ID NO: 1933800
aauauucccaaucuccuuc

SEQ ID NO: 1933802 - RNA, 19 nt, Artificial Sequence
  Description of Artificial Sequence: Synthetic oligonucleotide
  Sense strand starting at position 2963 of SEQ ID NO: 1879816
gcaauagcccaagagauuc

SEQ ID NO: 1933803 - RNA, 19 nt, Artificial Sequence
  Description of Artificial Sequence: Synthetic oligonucleotide
  Antisense strand to SEQ ID NO: 1933802
gaaucucuugggcuauugc

SEQ ID NO: 1933804 - RNA, 19 nt, Artificial Sequence
  Description of Artificial Sequence: Synthetic oligonucleotide
  Sense strand starting at position 3099 of SEQ ID NO: 1879816
uggagcucuagucaugacu

SEQ ID NO: 1933805 - RNA, 19 nt, Artificial Sequence
  Description of Artificial Sequence: Synthetic oligonucleotide
  Antisense strand to SEQ ID NO: 1933804
agucaugacuagagcucca

SEQ ID NO: 1933806 - RNA, 19 nt, Artificial Sequence
  Description of Artificial Sequence: Synthetic oligonucleotide
  Sense strand starting at position 3110 of SEQ ID NO: 1879816
ucaugacuguggcuuauuu

SEQ ID NO: 1933807 - RNA, 19 nt, Artificial Sequence
  Description of Artificial Sequence: Synthetic oligonucleotide
  Antisense strand to SEQ ID NO: 1933806
aaauaagccacagucauga

SEQ ID NO: 1933808 - RNA, 19 nt, Artificial Sequence
  Description of Artificial Sequence: Synthetic oligonucleotide
  Sense strand starting at position 3220 of SEQ ID NO: 1879816
cggcauccuuuacucaaua

SEQ ID NO: 1933809 - RNA, 19 nt, Artificial Sequence
  Description of Artificial Sequence: Synthetic oligonucleotide
  Antisense strand to SEQ ID NO: 1933808
uauugaguaaaggaugccg

SEQ ID NO: 1933810 - RNA, 19 nt, Artificial Sequence
  Description of Artificial Sequence: Synthetic oligonucleotide
  Sense strand starting at position 3260 of SEQ ID NO: 1879816
uggagaggauggcuuacua

SEQ ID NO: 1933811 - RNA, 19 nt, Artificial Sequence
  Description of Artificial Sequence: Synthetic oligonucleotide
  Antisense strand to SEQ ID NO: 1933810
uaguaagccauccucucca

SEQ ID NO: 1933812 - RNA, 19 nt, Artificial Sequence
  Description of Artificial Sequence: Synthetic oligonucleotide
  Sense strand starting at position 3264 of SEQ ID NO: 1879816
gaggauggcuuacuaccua

SEQ ID NO: 1933813 - RNA, 19 nt, Artificial Sequence
  Description of Artificial Sequence: Synthetic oligonucleotide
  Antisense strand to SEQ ID NO: 1933812
uagguaguaagccauccuc

SEQ ID NO: 1933814 - RNA, 19 nt, Artificial Sequence
  Description of Artificial Sequence: Synthetic oligonucleotide
  Sense strand starting at position 3282 of SEQ ID NO: 1879816
aggucccugcuccaaauau

SEQ ID NO: 1933815 - RNA, 19 nt, Artificial Sequence
  Description of Artificial Sequence: Synthetic oligonucleotide
  Antisense strand to SEQ ID NO: 1933814
auauuuggagcagggaccu

SEQ ID NO: 1933816 - RNA, 19 nt, Artificial Sequence
  Description of Artificial Sequence: Synthetic oligonucleotide
  Sense strand starting at position 3682 of SEQ ID NO: 1879816
ccaggacccuuuguuacua

SEQ ID NO: 1933817 - RNA, 19 nt, Artificial Sequence
  Description of Artificial Sequence: Synthetic oligonucleotide
  Antisense strand to SEQ ID NO: 1933816
uaguaacaaaggguccugg

SEQ ID NO: 1933818 - RNA, 19 nt, Artificial Sequence
  Description of Artificial Sequence: Synthetic oligonucleotide
  Sense strand starting at position 3803 of SEQ ID NO: 1879816
cucugugaaucucucaaag

SEQ ID NO: 1933819 - RNA, 19 nt, Artificial Sequence
  Description of Artificial Sequence: Synthetic oligonucleotide
  Antisense strand to SEQ ID NO: 1933818
cuuugagagauucacagag

SEQ ID NO: 1933820 - RNA, 19 nt, Artificial Sequence
  Description of Artificial Sequence: Synthetic oligonucleotide
  Sense strand starting at position 3969 of SEQ ID NO: 1879816
gucugagcuguccaaugac

SEQ ID NO: 1933821 - RNA, 19 nt, Artificial Sequence
  Description of Artificial Sequence: Synthetic oligonucleotide
  Antisense strand to SEQ ID NO: 1933820
gucauuggacagcucagac

SEQ ID NO: 1933822 - RNA, 19 nt, Artificial Sequence
  Description of Artificial Sequence: Synthetic oligonucleotide
  Sense strand starting at position 3972 of SEQ ID NO: 1879816
ugagcuguccaaugacaga

SEQ ID NO: 1933823 - RNA, 19 nt, Artificial Sequence
  Description of Artificial Sequence: Synthetic oligonucleotide
  Antisense strand to SEQ ID NO: 1933822
ucugucauuggacagcuca

SEQ ID NO: 1933824 - RNA, 19 nt, Artificial Sequence
  Description of Artificial Sequence: Synthetic oligonucleotide
  Sense strand starting at position 32 of SEQ ID NO: 1879817
aacugacagugugugauau

SEQ ID NO: 1933825 - RNA, 19 nt, Artificial Sequence
  Description of Artificial Sequence: Synthetic oligonucleotide
  Antisense strand to SEQ ID NO: 1933824
auaucacacacugucaguu

SEQ ID NO: 1933826 - RNA, 19 nt, Artificial Sequence
  Description of Artificial Sequence: Synthetic oligonucleotide
  Sense strand starting at position 84 of SEQ ID NO: 1879817
gcaucuaugcaucuguguu

SEQ ID NO: 1933827 - RNA, 19 nt, Artificial Sequence
  Description of Artificial Sequence: Synthetic oligonucleotide
  Antisense strand to SEQ ID NO: 1933826
aacacagaugcauagaugc

SEQ ID NO: 1933828 - RNA, 19 nt, Artificial Sequence
  Description of Artificial Sequence: Synthetic oligonucleotide
  Sense strand starting at position 96 of SEQ ID NO: 1879817
cuguguuuguauuucugga

SEQ ID NO: 1933829 - RNA, 19 nt, Artificial Sequence
  Description of Artificial Sequence: Synthetic oligonucleotide
  Antisense strand to SEQ ID NO: 1933828
uccagaaauacaaacacag

SEQ ID NO: 1933830 - RNA, 19 nt, Artificial Sequence
  Description of Artificial Sequence: Synthetic oligonucleotide
  Sense strand starting at position 98 of SEQ ID NO: 1879817
guguuuguauuucuggaua

SEQ ID NO: 1933831 - RNA, 19 nt, Artificial Sequence
  Description of Artificial Sequence: Synthetic oligonucleotide
  Antisense strand to SEQ ID NO: 1933830
uauccagaaauacaaacac

SEQ ID NO: 1933832 - RNA, 19 nt, Artificial Sequence
  Description of Artificial Sequence: Synthetic oligonucleotide
  Sense strand starting at position 346 of SEQ ID NO: 1879817
uggacacaugugugaguau

SEQ ID NO: 1933833 - RNA, 19 nt, Artificial Sequence
  Description of Artificial Sequence: Synthetic oligonucleotide
  Antisense strand to SEQ ID NO: 1933832
auacucacacaugugucca

SEQ ID NO: 1933834 - RNA, 19 nt, Artificial Sequence
  Description of Artificial Sequence: Synthetic oligonucleotide
  Sense strand starting at position 519 of SEQ ID NO: 1879817
aagagugaugugggagguu

SEQ ID NO: 1933835 - RNA, 19 nt, Artificial Sequence
  Description of Artificial Sequence: Synthetic oligonucleotide
  Antisense strand to SEQ ID NO: 1933834
aaccucccacaucacucuu

SEQ ID NO: 1933836 - RNA, 19 nt, Artificial Sequence
  Description of Artificial Sequence: Synthetic oligonucleotide
  Sense strand starting at position 631 of SEQ ID NO: 1879817
cauagugagcgguaaagag

SEQ ID NO: 1933837 - RNA, 19 nt, Artificial Sequence
  Description of Artificial Sequence: Synthetic oligonucleotide
  Antisense strand to SEQ ID NO: 1933836
cucuuuaccgcucacuaug

SEQ ID NO: 1933838 - RNA, 19 nt, Artificial Sequence
  Description of Artificial Sequence: Synthetic oligonucleotide
  Sense strand starting at position 709 of SEQ ID NO: 1879817
ggcugaugucuggacugaa

SEQ ID NO: 1933839 - RNA, 19 nt, Artificial Sequence
  Description of Artificial Sequence: Synthetic oligonucleotide
  Antisense strand to SEQ ID NO: 1933838
uucaguccagacaucagcc

SEQ ID NO: 1933840 - RNA, 19 nt, Artificial Sequence
  Description of Artificial Sequence: Synthetic oligonucleotide
  Sense strand starting at position 1069 of SEQ ID NO: 1879817
ccuauugcagcugaguaaa

SEQ ID NO: 1933841 - RNA, 19 nt, Artificial Sequence
  Description of Artificial Sequence: Synthetic oligonucleotide
  Antisense strand to SEQ ID NO: 1933840
uuuacucagcugcaauagg

SEQ ID NO: 1933842 - RNA, 19 nt, Artificial Sequence
  Description of Artificial Sequence: Synthetic oligonucleotide
  Sense strand starting at position 1077 of SEQ ID NO: 1879817
agcugaguaaaccagagua

SEQ ID NO: 1933843 - RNA, 19 nt, Artificial Sequence
  Description of Artificial Sequence: Synthetic oligonucleotide
  Antisense strand to SEQ ID NO: 1933842
uacucugguuuacucagcu

SEQ ID NO: 1933844 - RNA, 19 nt, Artificial Sequence
  Description of Artificial Sequence: Synthetic oligonucleotide
  Sense strand starting at position 1161 of SEQ ID NO: 1879817
caggguuguagugaagguu

SEQ ID NO: 1933845 - RNA, 19 nt, Artificial Sequence
  Description of Artificial Sequence: Synthetic oligonucleotide
  Antisense strand to SEQ ID NO: 1933844
aaccuucacuacaacccug

SEQ ID NO: 1933846 - RNA, 19 nt, Artificial Sequence
  Description of Artificial Sequence: Synthetic oligonucleotide
  Sense strand starting at position 1164 of SEQ ID NO: 1879817
gguuguagugaagguuaaa

SEQ ID NO: 1933847 - RNA, 19 nt, Artificial Sequence
  Description of Artificial Sequence: Synthetic oligonucleotide
  Antisense strand to SEQ ID NO: 1933846
uuuaaccuucacuacaacc

SEQ ID NO: 1933848 - RNA, 19 nt, Artificial Sequence
  Description of Artificial Sequence: Synthetic oligonucleotide
  Sense strand starting at position 1167 of SEQ ID NO: 1879817
uguagugaagguuaaaugu

SEQ ID NO: 1933849 - RNA, 19 nt, Artificial Sequence
  Description of Artificial Sequence: Synthetic oligonucleotide
  Antisense strand to SEQ ID NO: 1933848
acauuuaaccuucacuaca

SEQ ID NO: 1933850 - RNA, 19 nt, Artificial Sequence
  Description of Artificial Sequence: Synthetic oligonucleotide
  Sense strand starting at position 1194 of SEQ ID NO: 1879817
agggaaagugccuagcaga

SEQ ID NO: 1933851 - RNA, 19 nt, Artificial Sequence
  Description of Artificial Sequence: Synthetic oligonucleotide
  Antisense strand to SEQ ID NO: 1933850
ucugcuaggcacuuucccu

SEQ ID NO: 1933852 - RNA, 19 nt, Artificial Sequence
  Description of Artificial Sequence: Synthetic oligonucleotide
  Sense strand starting at position 1212 of SEQ ID NO: 1879817
agaguugcugcucaauaug

SEQ ID NO: 1933853 - RNA, 19 nt, Artificial Sequence
  Description of Artificial Sequence: Synthetic oligonucleotide
  Antisense strand to SEQ ID NO: 1933852
cauauugagcagcaacucu

SEQ ID NO: 1933854 - RNA, 19 nt, Artificial Sequence
  Description of Artificial Sequence: Synthetic oligonucleotide
  Sense strand starting at position 1501 of SEQ ID NO: 1879817
gcagcagauugauugauga

SEQ ID NO: 1933855 - RNA, 19 nt, Artificial Sequence
  Description of Artificial Sequence: Synthetic oligonucleotide
  Antisense strand to SEQ ID NO: 1933854
ucaucaaucaaucugcugc

SEQ ID NO: 1933856 - RNA, 19 nt, Artificial Sequence
  Description of Artificial Sequence: Synthetic oligonucleotide
  Sense strand starting at position 2092 of SEQ ID NO: 1879817
ucacaauucccuggccaga

SEQ ID NO: 1933857 - RNA, 19 nt, Artificial Sequence
  Description of Artificial Sequence: Synthetic oligonucleotide
  Antisense strand to SEQ ID NO: 1933856
ucuggccagggaauuguga

SEQ ID NO: 1933858 - RNA, 19 nt, Artificial Sequence
  Description of Artificial Sequence: Synthetic oligonucleotide
  Sense strand starting at position 2158 of SEQ ID NO: 1879817
uuaaccugugcucaguaga

SEQ ID NO: 1933859 - RNA, 19 nt, Artificial Sequence
  Description of Artificial Sequence: Synthetic oligonucleotide
  Antisense strand to SEQ ID NO: 1933858
ucuacugagcacagguuaa

SEQ ID NO: 1933860 - RNA, 19 nt, Artificial Sequence
  Description of Artificial Sequence: Synthetic oligonucleotide
  Sense strand starting at position 2299 of SEQ ID NO: 1879817
agaugaaaugguggugcaa

SEQ ID NO: 1933861 - RNA, 19 nt, Artificial Sequence
  Description of Artificial Sequence: Synthetic oligonucleotide
  Antisense strand to SEQ ID NO: 1933860
uugcaccaccauuucaucu

SEQ ID NO: 1933862 - RNA, 19 nt, Artificial Sequence
  Description of Artificial Sequence: Synthetic oligonucleotide
  Sense strand starting at position 2308 of SEQ ID NO: 1879817
gguggugcaaauugaauua

SEQ ID NO: 1933863 - RNA, 19 nt, Artificial Sequence
  Description of Artificial Sequence: Synthetic oligonucleotide
  Antisense strand to SEQ ID NO: 1933862
uaauucaauuugcaccacc

SEQ ID NO: 1933864 - RNA, 19 nt, Artificial Sequence
  Description of Artificial Sequence: Synthetic oligonucleotide
  Sense strand starting at position 2390 of SEQ ID NO: 1879817
gagggcaaccucgggaaua

SEQ ID NO: 1933865 - RNA, 19 nt, Artificial Sequence
  Description of Artificial Sequence: Synthetic oligonucleotide
  Antisense strand to SEQ ID NO: 1933864
uauucccgagguugcccuc

SEQ ID NO: 1933866 - RNA, 19 nt, Artificial Sequence
  Description of Artificial Sequence: Synthetic oligonucleotide
  Sense strand starting at position 2667 of SEQ ID NO: 1879817
uucuaauuacaggagcuua

SEQ ID NO: 1933867 - RNA, 19 nt, Artificial Sequence
  Description of Artificial Sequence: Synthetic oligonucleotide
  Antisense strand to SEQ ID NO: 1933866
uaagcuccuguaauuagaa

SEQ ID NO: 1933868 - RNA, 19 nt, Artificial Sequence
  Description of Artificial Sequence: Synthetic oligonucleotide
  Sense strand starting at position 2774 of SEQ ID NO: 1879817
caggcuuuggaucaguaca

SEQ ID NO: 1933869 - RNA, 19 nt, Artificial Sequence
  Description of Artificial Sequence: Synthetic oligonucleotide
  Antisense strand to SEQ ID NO: 1933868
uguacugauccaaagccug

SEQ ID NO: 1933870 - RNA, 19 nt, Artificial Sequence
  Description of Artificial Sequence: Synthetic oligonucleotide
  Sense strand starting at position 2836 of SEQ ID NO: 1879817
ggaugaguuuacuuaaucu

SEQ ID NO: 1933871 - RNA, 19 nt, Artificial Sequence
  Description of Artificial Sequence: Synthetic oligonucleotide
  Antisense strand to SEQ ID NO: 1933870
agauuaaguaaacucaucc

SEQ ID NO: 1933872 - RNA, 19 nt, Artificial Sequence
  Description of Artificial Sequence: Synthetic oligonucleotide
  Sense strand starting at position 2939 of SEQ ID NO: 1879817
auuauaagugcuuagcaua

SEQ ID NO: 1933873 - RNA, 19 nt, Artificial Sequence
  Description of Artificial Sequence: Synthetic oligonucleotide
  Antisense strand to SEQ ID NO: 1933872
uaugcuaagcacuuauaau

SEQ ID NO: 1933874 - RNA, 19 nt, Artificial Sequence
  Description of Artificial Sequence: Synthetic oligonucleotide
  Sense strand starting at position 2957 of SEQ ID NO: 1879817
agcauaacuuaguuguaga

SEQ ID NO: 1933875 - RNA, 19 nt, Artificial Sequence
  Description of Artificial Sequence: Synthetic oligonucleotide
  Antisense strand to SEQ ID NO: 1933874
ucuacaacuaaguuaugcu

SEQ ID NO: 1933876 - RNA, 19 nt, Artificial Sequence
  Description of Artificial Sequence: Synthetic oligonucleotide
  Sense strand starting at position 2973 of SEQ ID NO: 1879817
agaucuaauugugcuaauu

SEQ ID NO: 1933877 - RNA, 19 nt, Artificial Sequence
  Description of Artificial Sequence: Synthetic oligonucleotide
  Antisense strand to SEQ ID NO: 1933876
aauuagcacaauuagaucu

SEQ ID NO: 1933878 - RNA, 19 nt, Artificial Sequence
  Description of Artificial Sequence: Synthetic oligonucleotide
  Sense strand starting at position 3057 of SEQ ID NO: 1879817
ugcugaggauaacuuuaaa

SEQ ID NO: 1933879 - RNA, 19 nt, Artificial Sequence
  Description of Artificial Sequence: Synthetic oligonucleotide
  Antisense strand to SEQ ID NO: 1933878
uuuaaaguuauccucagca

SEQ ID NO: 1933880 - RNA, 19 nt, Artificial Sequence
  Description of Artificial Sequence: Synthetic oligonucleotide
  Sense strand starting at position 3101 of SEQ ID NO: 1879817
uguuuaaaggcaugggaga

SEQ ID NO: 1933881 - RNA, 19 nt, Artificial Sequence
  Description of Artificial Sequence: Synthetic oligonucleotide
  Antisense strand to SEQ ID NO: 1933880
ucucccaugccuuuaaaca

SEQ ID NO: 1933882 - RNA, 19 nt, Artificial Sequence
  Description of Artificial Sequence: Synthetic oligonucleotide
  Sense strand starting at position 3214 of SEQ ID NO: 1879817
ggaggcaguggucaugaga

SEQ ID NO: 1933883 - RNA, 19 nt, Artificial Sequence
  Description of Artificial Sequence: Synthetic oligonucleotide
  Antisense strand to SEQ ID NO: 1933882
ucucaugaccacugccucc

SEQ ID NO: 1933884 - RNA, 19 nt, Artificial Sequence
  Description of Artificial Sequence: Synthetic oligonucleotide
  Sense strand starting at position 3355 of SEQ ID NO: 1879817
aguuuccaaucaguauaau

SEQ ID NO: 1933885 - RNA, 19 nt, Artificial Sequence
  Description of Artificial Sequence: Synthetic oligonucleotide
  Antisense strand to SEQ ID NO: 1933884
auuauacugauuggaaacu

SEQ ID NO: 1933886 - RNA, 19 nt, Artificial Sequence
  Description of Artificial Sequence: Synthetic oligonucleotide
  Sense strand starting at position 3356 of SEQ ID NO: 1879817
guuuccaaucaguauaauc

SEQ ID NO: 1933887 - RNA, 19 nt, Artificial Sequence
  Description of Artificial Sequence: Synthetic oligonucleotide
  Antisense strand to SEQ ID NO: 1933886
gauuauacugauuggaaac

SEQ ID NO: 1933888 - RNA, 19 nt, Artificial Sequence
  Description of Artificial Sequence: Synthetic oligonucleotide
  Sense strand starting at position 3364 of SEQ ID NO: 1879817
ucaguauaauccucgauug

SEQ ID NO: 1933889 - RNA, 19 nt, Artificial Sequence
  Description of Artificial Sequence: Synthetic oligonucleotide
  Antisense strand to SEQ ID NO: 1933888
caaucgaggauuauacuga

SEQ ID NO: 1933890 - RNA, 19 nt, Artificial Sequence
  Description of Artificial Sequence: Synthetic oligonucleotide
  Sense strand starting at position 3369 of SEQ ID NO: 1879817
auaauccucgauuggguua

SEQ ID NO: 1933891 - RNA, 19 nt, Artificial Sequence
  Description of Artificial Sequence: Synthetic oligonucleotide
  Antisense strand to SEQ ID NO: 1933890
uaacccaaucgaggauuau

SEQ ID NO: 1933892 - RNA, 19 nt, Artificial Sequence
  Description of Artificial Sequence: Synthetic oligonucleotide
  Sense strand starting at position 3374 of SEQ ID NO: 1879817
ccucgauuggguuaaagug

SEQ ID NO: 1933893 - RNA, 19 nt, Artificial Sequence
  Description of Artificial Sequence: Synthetic oligonucleotide
  Antisense strand to SEQ ID NO: 1933892
cacuuuaacccaaucgagg

SEQ ID NO: 1933894 - RNA, 19 nt, Artificial Sequence
  Description of Artificial Sequence: Synthetic oligonucleotide
  Sense strand starting at position 3611 of SEQ ID NO: 1879817
gauccagauguuggaguuu

SEQ ID NO: 1933895 - RNA, 19 nt, Artificial Sequence
  Description of Artificial Sequence: Synthetic oligonucleotide
  Antisense strand to SEQ ID NO: 1933894
aaacuccaacaucuggauc

SEQ ID NO: 1933896 - RNA, 19 nt, Artificial Sequence
  Description of Artificial Sequence: Synthetic oligonucleotide
  Sense strand starting at position 3637 of SEQ ID NO: 1879817
uggacucuagaagguuuaa

SEQ ID NO: 1933897 - RNA, 19 nt, Artificial Sequence
  Description of Artificial Sequence: Synthetic oligonucleotide
  Antisense strand to SEQ ID NO: 1933896
uuaaaccuucuagagucca

SEQ ID NO: 1933898 - RNA, 19 nt, Artificial Sequence
  Description of Artificial Sequence: Synthetic oligonucleotide
  Sense strand starting at position 3761 of SEQ ID NO: 1879817
aucaauaacuccguugaug

SEQ ID NO: 1933899 - RNA, 19 nt, Artificial Sequence
  Description of Artificial Sequence: Synthetic oligonucleotide
  Antisense strand to SEQ ID NO: 1933898
caucaacggaguuauugau

SEQ ID NO: 1933900 - RNA, 19 nt, Artificial Sequence
  Description of Artificial Sequence: Synthetic oligonucleotide
  Sense strand starting at position 3763 of SEQ ID NO: 1879817
caauaacuccguugaugga

SEQ ID NO: 1933901 - RNA, 19 nt, Artificial Sequence
  Description of Artificial Sequence: Synthetic oligonucleotide
  Antisense strand to SEQ ID NO: 1933900
uccaucaacggaguuauug

SEQ ID NO: 1933902 - RNA, 19 nt, Artificial Sequence
  Description of Artificial Sequence: Synthetic oligonucleotide
  Sense strand starting at position 3764 of SEQ ID NO: 1879817
aauaacuccguugauggau

SEQ ID NO: 1933903 - RNA, 19 nt, Artificial Sequence
  Description of Artificial Sequence: Synthetic oligonucleotide
  Antisense strand to SEQ ID NO: 1933902
auccaucaacggaguuauu

SEQ ID NO: 1933904 - RNA, 19 nt, Artificial Sequence
  Description of Artificial Sequence: Synthetic oligonucleotide
  Sense strand starting at position 2906 of SEQ ID NO: 1879818
agggcucccgcuuaggaaa

SEQ ID NO: 1933905 - RNA, 19 nt, Artificial Sequence
  Description of Artificial Sequence: Synthetic oligonucleotide
  Antisense strand to SEQ ID NO: 1933904
uuuccuaagcgggagcccu

SEQ ID NO: 1933906 - RNA, 19 nt, Artificial Sequence
  Description of Artificial Sequence: Synthetic oligonucleotide
  Sense strand starting at position 3126 of SEQ ID NO: 1879818
gggacguggcagugaguau

SEQ ID NO: 1933907 - RNA, 19 nt, Artificial Sequence
  Description of Artificial Sequence: Synthetic oligonucleotide
  Antisense strand to SEQ ID NO: 1933906
auacucacugccacguccc

SEQ ID NO: 1933908 - RNA, 19 nt, Artificial Sequence
  Description of Artificial Sequence: Synthetic oligonucleotide
  Sense strand starting at position 3723 of SEQ ID NO: 1879818
cgccguauuugcuccgaca

SEQ ID NO: 1933909 - RNA, 19 nt, Artificial Sequence
  Description of Artificial Sequence: Synthetic oligonucleotide
  Antisense strand to SEQ ID NO: 1933908
ugucggagcaaauacggcg

SEQ ID NO: 1933910 - RNA, 19 nt, Artificial Sequence
  Description of Artificial Sequence: Synthetic oligonucleotide
  Sense strand starting at position 3594 of SEQ ID NO: 1879819
ggaguugagucccugcauu

SEQ ID NO: 1933911 - RNA, 19 nt, Artificial Sequence
  Description of Artificial Sequence: Synthetic oligonucleotide
  Antisense strand to SEQ ID NO: 1933910
aaugcagggacucaacucc

SEQ ID NO: 1933912 - RNA, 19 nt, Artificial Sequence
  Description of Artificial Sequence: Synthetic oligonucleotide
  Sense strand starting at position 65 of SEQ ID NO: 1879820
gcucgaaagcuacaggaaa

SEQ ID NO: 1933913 - RNA, 19 nt, Artificial Sequence
  Description of Artificial Sequence: Synthetic oligonucleotide
  Antisense strand to SEQ ID NO: 1933912
uuuccuguagcuuucgagc

SEQ ID NO: 1933914 - RNA, 19 nt, Artificial Sequence
  Description of Artificial Sequence: Synthetic oligonucleotide
  Sense strand starting at position 109 of SEQ ID NO: 1879820
gggagaaacugguuucguc

SEQ ID NO: 1933915 - RNA, 19 nt, Artificial Sequence
  Description of Artificial Sequence: Synthetic oligonucleotide
  Antisense strand to SEQ ID NO: 1933914
gacgaaaccaguuucuccc

SEQ ID NO: 1933916 - RNA, 19 nt, Artificial Sequence
  Description of Artificial Sequence: Synthetic oligonucleotide
  Sense strand starting at position 225 of SEQ ID NO: 1879820
gguauacguagacaccaua

SEQ ID NO: 1933917 - RNA, 19 nt, Artificial Sequence
  Description of Artificial Sequence: Synthetic oligonucleotide
  Antisense strand to SEQ ID NO: 1933916
uauggugucuacguauacc

SEQ ID NO: 1933918 - RNA, 19 nt, Artificial Sequence
  Description of Artificial Sequence: Synthetic oligonucleotide
  Sense strand starting at position 238 of SEQ ID NO: 1879820
accauaaccugaguauuga

SEQ ID NO: 1933919 - RNA, 19 nt, Artificial Sequence
  Description of Artificial Sequence: Synthetic oligonucleotide
  Antisense strand to SEQ ID NO: 1933918
ucaauacucagguuauggu

SEQ ID NO: 1933920 - RNA, 19 nt, Artificial Sequence
  Description of Artificial Sequence: Synthetic oligonucleotide
  Sense strand starting at position 242 of SEQ ID NO: 1879820
uaaccugaguauugagaag

SEQ ID NO: 1933921 - RNA, 19 nt, Artificial Sequence
  Description of Artificial Sequence: Synthetic oligonucleotide
  Antisense strand to SEQ ID NO: 1933920
cuucucaauacucagguua

SEQ ID NO: 1933922 - RNA, 19 nt, Artificial Sequence
  Description of Artificial Sequence: Synthetic oligonucleotide
  Sense strand starting at position 295 of SEQ ID NO: 1879820
gaugcucuccagugcugaa

SEQ ID NO: 1933923 - RNA, 19 nt, Artificial Sequence
  Description of Artificial Sequence: Synthetic oligonucleotide
  Antisense strand to SEQ ID NO: 1933922
uucagcacuggagagcauc

SEQ ID NO: 1933924 - RNA, 19 nt, Artificial Sequence
  Description of Artificial Sequence: Synthetic oligonucleotide
  Sense strand starting at position 432 of SEQ ID NO: 1879820
cucauuuguuuaugugaca

SEQ ID NO: 1933925 - RNA, 19 nt, Artificial Sequence
  Description of Artificial Sequence: Synthetic oligonucleotide
  Antisense strand to SEQ ID NO: 1933924
ugucacauaaacaaaugag

SEQ ID NO: 1933926 - RNA, 19 nt, Artificial Sequence
  Description of Artificial Sequence: Synthetic oligonucleotide
  Sense strand starting at position 496 of SEQ ID NO: 1879820
gagggcuggcuugaaacaa

SEQ ID NO: 1933927 - RNA, 19 nt, Artificial Sequence
  Description of Artificial Sequence: Synthetic oligonucleotide
  Antisense strand to SEQ ID NO: 1933926
uuguuucaagccagcccuc

SEQ ID NO: 1933928 - RNA, 19 nt, Artificial Sequence
  Description of Artificial Sequence: Synthetic oligonucleotide
  Sense strand starting at position 514 of SEQ ID NO: 1879820
acugcagguccuugagaga

SEQ ID NO: 1933929 - RNA, 19 nt, Artificial Sequence
  Description of Artificial Sequence: Synthetic oligonucleotide
  Antisense strand to SEQ ID NO: 1933928
ucucucaaggaccugcagu

SEQ ID NO: 1933930 - RNA, 19 nt, Artificial Sequence
  Description of Artificial Sequence: Synthetic oligonucleotide
  Sense strand starting at position 914 of SEQ ID NO: 1879820
guucuaccugaagauagua

SEQ ID NO: 1933931 - RNA, 19 nt, Artificial Sequence
  Description of Artificial Sequence: Synthetic oligonucleotide
  Antisense strand to SEQ ID NO: 1933930
uacuaucuucagguagaac

SEQ ID NO: 1933932 - RNA, 19 nt, Artificial Sequence
  Description of Artificial Sequence: Synthetic oligonucleotide
  Sense strand starting at position 927 of SEQ ID NO: 1879820
auaguaguguuagcucuga

SEQ ID NO: 1933933 - RNA, 19 nt, Artificial Sequence
  Description of Artificial Sequence: Synthetic oligonucleotide
  Antisense strand to SEQ ID NO: 1933932
ucagagcuaacacuacuau

SEQ ID NO: 1933934 - RNA, 19 nt, Artificial Sequence
  Description of Artificial Sequence: Synthetic oligonucleotide
  Sense strand starting at position 931 of SEQ ID NO: 1879820
uaguguuagcucugaguuc

SEQ ID NO: 1933935 - RNA, 19 nt, Artificial Sequence
  Description of Artificial Sequence: Synthetic oligonucleotide
  Antisense strand to SEQ ID NO: 1933934
gaacucagagcuaacacua

SEQ ID NO: 1933936 - RNA, 19 nt, Artificial Sequence
  Description of Artificial Sequence: Synthetic oligonucleotide
  Sense strand starting at position 957 of SEQ ID NO: 1879820
acccguuuauuugauucua

SEQ ID NO: 1933937 - RNA, 19 nt, Artificial Sequence
  Description of Artificial Sequence: Synthetic oligonucleotide
  Antisense strand to SEQ ID NO: 1933936
uagaaucaaauaaacgggu

SEQ ID NO: 1933938 - RNA, 19 nt, Artificial Sequence
  Description of Artificial Sequence: Synthetic oligonucleotide
  Sense strand starting at position 1879 of SEQ ID NO: 1879820
gcgcaaucucuggagcgaa

SEQ ID NO: 1933939 - RNA, 19 nt, Artificial Sequence
  Description of Artificial Sequence: Synthetic oligonucleotide
  Antisense strand to SEQ ID NO: 1933938
uucgcuccagagauugcgc

SEQ ID NO: 1933940 - RNA, 19 nt, Artificial Sequence
  Description of Artificial Sequence: Synthetic oligonucleotide
  Sense strand starting at position 2258 of SEQ ID NO: 1879820
gcuucuuccgggcugucaa

SEQ ID NO: 1933941 - RNA, 19 nt, Artificial Sequence
  Description of Artificial Sequence: Synthetic oligonucleotide
  Antisense strand to SEQ ID NO: 1933940
uugacagcccggaagaagc

SEQ ID NO: 1933942 - RNA, 19 nt, Artificial Sequence
  Description of Artificial Sequence: Synthetic oligonucleotide
  Sense strand starting at position 2570 of SEQ ID NO: 1879820
cugcgaguugggcuguauu

SEQ ID NO: 1933943 - RNA, 19 nt, Artificial Sequence
  Description of Artificial Sequence: Synthetic oligonucleotide
  Antisense strand to SEQ ID NO: 1933942
aauacagcccaacucgcag

SEQ ID NO: 1933944 - RNA, 19 nt, Artificial Sequence
  Description of Artificial Sequence: Synthetic oligonucleotide
  Sense strand starting at position 2573 of SEQ ID NO: 1879820
cgaguugggcuguauucca

SEQ ID NO: 1933945 - RNA, 19 nt, Artificial Sequence
  Description of Artificial Sequence: Synthetic oligonucleotide
  Antisense strand to SEQ ID NO: 1933944
uggaauacagcccaacucg

SEQ ID NO: 1933946 - RNA, 19 nt, Artificial Sequence
  Description of Artificial Sequence: Synthetic oligonucleotide
  Sense strand starting at position 2580 of SEQ ID NO: 1879820
ggcuguauuccagaguaau

SEQ ID NO: 1933947 - RNA, 19 nt, Artificial Sequence
  Description of Artificial Sequence: Synthetic oligonucleotide
  Antisense strand to SEQ ID NO: 1933946
auuacucuggaauacagcc

SEQ ID NO: 1933948 - RNA, 19 nt, Artificial Sequence
  Description of Artificial Sequence: Synthetic oligonucleotide
  Sense strand starting at position 2583 of SEQ ID NO: 1879820
uguauuccagaguaaugug

SEQ ID NO: 1933949 - RNA, 19 nt, Artificial Sequence
  Description of Artificial Sequence: Synthetic oligonucleotide
  Antisense strand to SEQ ID NO: 1933948
cacauuacucuggaauaca

SEQ ID NO: 1933950 - RNA, 19 nt, Artificial Sequence
  Description of Artificial Sequence: Synthetic oligonucleotide
  Sense strand starting at position 2627 of SEQ ID NO: 1879820
cagcgcuuaucuguaggau

SEQ ID NO: 1933951 - RNA, 19 nt, Artificial Sequence
  Description of Artificial Sequence: Synthetic oligonucleotide
  Antisense strand to SEQ ID NO: 1933950
auccuacagauaagcgcug

SEQ ID NO: 1933952 - RNA, 19 nt, Artificial Sequence
  Description of Artificial Sequence: Synthetic oligonucleotide
  Sense strand starting at position 2628 of SEQ ID NO: 1879820
agcgcuuaucuguaggauu

SEQ ID NO: 1933953 - RNA, 19 nt, Artificial Sequence
  Description of Artificial Sequence: Synthetic oligonucleotide
  Antisense strand to SEQ ID NO: 1933952
aauccuacagauaagcgcu

SEQ ID NO: 1933954 - RNA, 19 nt, Artificial Sequence
  Description of Artificial Sequence: Synthetic oligonucleotide
  Sense strand starting at position 2630 of SEQ ID NO: 1879820
cgcuuaucuguaggauuua

SEQ ID NO: 1933955 - RNA, 19 nt, Artificial Sequence
  Description of Artificial Sequence: Synthetic oligonucleotide
  Antisense strand to SEQ ID NO: 1933954
uaaauccuacagauaagcg

SEQ ID NO: 1933956 - RNA, 19 nt, Artificial Sequence
  Description of Artificial Sequence: Synthetic oligonucleotide
  Sense strand starting at position 2631 of SEQ ID NO: 1879820
gcuuaucuguaggauuuag

SEQ ID NO: 1933957 - RNA, 19 nt, Artificial Sequence
  Description of Artificial Sequence: Synthetic oligonucleotide
  Antisense strand to SEQ ID NO: 1933956
cuaaauccuacagauaagc

SEQ ID NO: 1933958 - RNA, 19 nt, Artificial Sequence
  Description of Artificial Sequence: Synthetic oligonucleotide
  Sense strand starting at position 2641 of SEQ ID NO: 1879820
aggauuuaguguuaagcuc

SEQ ID NO: 1933959 - RNA, 19 nt, Artificial Sequence
  Description of Artificial Sequence: Synthetic oligonucleotide
  Antisense strand to SEQ ID NO: 1933958
gagcuuaacacuaaauccu

SEQ ID NO: 1933960 - RNA, 19 nt, Artificial Sequence
  Description of Artificial Sequence: Synthetic oligonucleotide
  Sense strand starting at position 2932 of SEQ ID NO: 1879820
guugacauuucccaggaag

SEQ ID NO: 1933961 - RNA, 19 nt, Artificial Sequence
  Description of Artificial Sequence: Synthetic oligonucleotide
  Antisense strand to SEQ ID NO: 1933960
cuuccugggaaaugucaac

SEQ ID NO: 1933962 - RNA, 19 nt, Artificial Sequence
  Description of Artificial Sequence: Synthetic oligonucleotide
  Sense strand starting at position 2972 of SEQ ID NO: 1879820
gauaaaggguucucaguaa

SEQ ID NO: 1933963 - RNA, 19 nt, Artificial Sequence
  Description of Artificial Sequence: Synthetic oligonucleotide
  Antisense strand to SEQ ID NO: 1933962
uuacugagaacccuuuauc

SEQ ID NO: 1933964 - RNA, 19 nt, Artificial Sequence
  Description of Artificial Sequence: Synthetic oligonucleotide
  Sense strand starting at position 3012 of SEQ ID NO: 1879820
ugccguaugccugagguga

SEQ ID NO: 1933965 - RNA, 19 nt, Artificial Sequence
  Description of Artificial Sequence: Synthetic oligonucleotide
  Antisense strand to SEQ ID NO: 1933964
ucaccucaggcauacggca

SEQ ID NO: 1933966 - RNA, 19 nt, Artificial Sequence
  Description of Artificial Sequence: Synthetic oligonucleotide
  Sense strand starting at position 3013 of SEQ ID NO: 1879820
gccguaugccugaggugac

SEQ ID NO: 1933967 - RNA, 19 nt, Artificial Sequence
  Description of Artificial Sequence: Synthetic oligonucleotide
  Antisense strand to SEQ ID NO: 1933966
gucaccucaggcauacggc

SEQ ID NO: 1933968 - RNA, 19 nt, Artificial Sequence
  Description of Artificial Sequence: Synthetic oligonucleotide
  Sense strand starting at position 3039 of SEQ ID NO: 1879820
gcgguaacagugugucaga

SEQ ID NO: 1933969 - RNA, 19 nt, Artificial Sequence
  Description of Artificial Sequence: Synthetic oligonucleotide
  Antisense strand to SEQ ID NO: 1933968
ucugacacacuguuaccgc

SEQ ID NO: 1933970 - RNA, 19 nt, Artificial Sequence
  Description of Artificial Sequence: Synthetic oligonucleotide
  Sense strand starting at position 3209 of SEQ ID NO: 1879820
gggcuuucuuagucccgga

SEQ ID NO: 1933971 - RNA, 19 nt, Artificial Sequence
  Description of Artificial Sequence: Synthetic oligonucleotide
  Antisense strand to SEQ ID NO: 1933970
uccgggacuaagaaagccc

SEQ ID NO: 1933972 - RNA, 19 nt, Artificial Sequence
  Description of Artificial Sequence: Synthetic oligonucleotide
  Sense strand starting at position 3213 of SEQ ID NO: 1879820
uuucuuagucccggaggaa

SEQ ID NO: 1933973 - RNA, 19 nt, Artificial Sequence
  Description of Artificial Sequence: Synthetic oligonucleotide
  Antisense strand to SEQ ID NO: 1933972
uuccuccgggacuaagaaa

SEQ ID NO: 1933974 - RNA, 19 nt, Artificial Sequence
  Description of Artificial Sequence: Synthetic oligonucleotide
  Sense strand starting at position 3214 of SEQ ID NO: 1879820
uucuuagucccggaggaau

SEQ ID NO: 1933975 - RNA, 19 nt, Artificial Sequence
  Description of Artificial Sequence: Synthetic oligonucleotide
  Antisense strand to SEQ ID NO: 1933974
auuccuccgggacuaagaa

SEQ ID NO: 1933976 - RNA, 19 nt, Artificial Sequence
  Description of Artificial Sequence: Synthetic oligonucleotide
  Sense strand starting at position 3332 of SEQ ID NO: 1879820
cacagauguggaugaaugu

SEQ ID NO: 1933977 - RNA, 19 nt, Artificial Sequence
  Description of Artificial Sequence: Synthetic oligonucleotide
  Antisense strand to SEQ ID NO: 1933976
acauucauccacaucugug

SEQ ID NO: 1933978 - RNA, 19 nt, Artificial Sequence
  Description of Artificial Sequence: Synthetic oligonucleotide
  Sense strand starting at position 3442 of SEQ ID NO: 1879820
uuuguuugugaccaggcau

SEQ ID NO: 1933979 - RNA, 19 nt, Artificial Sequence
  Description of Artificial Sequence: Synthetic oligonucleotide
  Antisense strand to SEQ ID NO: 1933978
augccuggucacaaacaaa

SEQ ID NO: 1933980 - RNA, 19 nt, Artificial Sequence
  Description of Artificial Sequence: Synthetic oligonucleotide
  Sense strand starting at position 3491 of SEQ ID NO: 1879820
ggcugucuacuauguaaug

SEQ ID NO: 1933981 - RNA, 19 nt, Artificial Sequence
  Description of Artificial Sequence: Synthetic oligonucleotide
  Antisense strand to SEQ ID NO: 1933980
cauuacauaguagacagcc

SEQ ID NO: 1933982 - RNA, 19 nt, Artificial Sequence
  Description of Artificial Sequence: Synthetic oligonucleotide
  Sense strand starting at position 3597 of SEQ ID NO: 1879820
ccagaaagguaucaggaaa

SEQ ID NO: 1933983 - RNA, 19 nt, Artificial Sequence
  Description of Artificial Sequence: Synthetic oligonucleotide
  Antisense strand to SEQ ID NO: 1933982
uuuccugauaccuuucugg

SEQ ID NO: 1933984 - RNA, 19 nt, Artificial Sequence
  Description of Artificial Sequence: Synthetic oligonucleotide
  Sense strand starting at position 3610 of SEQ ID NO: 1879820
aggaaacaguuguacacaa

SEQ ID NO: 1933985 - RNA, 19 nt, Artificial Sequence
  Description of Artificial Sequence: Synthetic oligonucleotide
  Antisense strand to SEQ ID NO: 1933984
uuguguacaacuguuuccu

SEQ ID NO: 1933986 - RNA, 19 nt, Artificial Sequence
  Description of Artificial Sequence: Synthetic oligonucleotide
  Sense strand starting at position 3640 of SEQ ID NO: 1879820
ggugaugugauguaaggga

SEQ ID NO: 1933987 - RNA, 19 nt, Artificial Sequence
  Description of Artificial Sequence: Synthetic oligonucleotide
  Antisense strand to SEQ ID NO: 1933986
ucccuuacaucacaucacc

SEQ ID NO: 1933988 - RNA, 19 nt, Artificial Sequence
  Description of Artificial Sequence: Synthetic oligonucleotide
  Sense strand starting at position 3905 of SEQ ID NO: 1879820
ccuggaauagccuguccua

SEQ ID NO: 1933989 - RNA, 19 nt, Artificial Sequence
  Description of Artificial Sequence: Synthetic oligonucleotide
  Antisense strand to SEQ ID NO: 1933988
uaggacaggcuauuccagg

SEQ ID NO: 1933990 - RNA, 19 nt, Artificial Sequence
  Description of Artificial Sequence: Synthetic oligonucleotide
  Sense strand starting at position 3966 of SEQ ID NO: 1879820
gcuguuggaguccaaaguu

SEQ ID NO: 1933991 - RNA, 19 nt, Artificial Sequence
  Description of Artificial Sequence: Synthetic oligonucleotide
  Antisense strand to SEQ ID NO: 1933990
aacuuuggacuccaacagc

SEQ ID NO: 1933992 - RNA, 19 nt, Artificial Sequence
  Description of Artificial Sequence: Synthetic oligonucleotide
  Sense strand starting at position 85 of SEQ ID NO: 1879821
cugucaugcccuuauccua

SEQ ID NO: 1933993 - RNA, 19 nt, Artificial Sequence
  Description of Artificial Sequence: Synthetic oligonucleotide
  Antisense strand to SEQ ID NO: 1933992
uaggauaagggcaugacag

SEQ ID NO: 1933994 - RNA, 19 nt, Artificial Sequence
  Description of Artificial Sequence: Synthetic oligonucleotide
  Sense strand starting at position 156 of SEQ ID NO: 1879821
cucuguaaagcccagauua

SEQ ID NO: 1933995 - RNA, 19 nt, Artificial Sequence
  Description of Artificial Sequence: Synthetic oligonucleotide
  Antisense strand to SEQ ID NO: 1933994
uaaucugggcuuuacagag

SEQ ID NO: 1933996 - RNA, 19 nt, Artificial Sequence
  Description of Artificial Sequence: Synthetic oligonucleotide
  Sense strand starting at position 158 of SEQ ID NO: 1879821
cuguaaagcccagauuauu

SEQ ID NO: 1933997 - RNA, 19 nt, Artificial Sequence
  Description of Artificial Sequence: Synthetic oligonucleotide
  Antisense strand to SEQ ID NO: 1933996
aauaaucugggcuuuacag

SEQ ID NO: 1933998 - RNA, 19 nt, Artificial Sequence
  Description of Artificial Sequence: Synthetic oligonucleotide
  Sense strand starting at position 305 of SEQ ID NO: 1879821
uguccuuaaugaucaguuu

SEQ ID NO: 1933999 - RNA, 19 nt, Artificial Sequence
  Description of Artificial Sequence: Synthetic oligonucleotide
  Antisense strand to SEQ ID NO: 1933998
aaacugaucauuaaggaca

SEQ ID NO: 1934000 - RNA, 19 nt, Artificial Sequence
  Description of Artificial Sequence: Synthetic oligonucleotide
  Sense strand starting at position 365 of SEQ ID NO: 1879821
gaguauaauccagauguuc

SEQ ID NO: 1934001 - RNA, 19 nt, Artificial Sequence
  Description of Artificial Sequence: Synthetic oligonucleotide
  Antisense strand to SEQ ID NO: 1934000
gaacaucuggauuauacuc

SEQ ID NO: 1934002 - RNA, 19 nt, Artificial Sequence
  Description of Artificial Sequence: Synthetic oligonucleotide
  Sense strand starting at position 511 of SEQ ID NO: 1879821
uuuaacuauguaggagaau

SEQ ID NO: 1934003 - RNA, 19 nt, Artificial Sequence
  Description of Artificial Sequence: Synthetic oligonucleotide
  Antisense strand to SEQ ID NO: 1934002
auucuccuacauaguuaaa

SEQ ID NO: 1934004 - RNA, 19 nt, Artificial Sequence
  Description of Artificial Sequence: Synthetic oligonucleotide
  Sense strand starting at position 591 of SEQ ID NO: 1879821
aagucuuaggcuugaaaca

SEQ ID NO: 1934005 - RNA, 19 nt, Artificial Sequence
  Description of Artificial Sequence: Synthetic oligonucleotide
  Antisense strand to SEQ ID NO: 1934004
uguuucaagccuaagacuu

SEQ ID NO: 1934006 - RNA, 19 nt, Artificial Sequence
  Description of Artificial Sequence: Synthetic oligonucleotide
  Sense strand starting at position 592 of SEQ ID NO: 1879821
agucuuaggcuugaaacag

SEQ ID NO: 1934007 - RNA, 19 nt, Artificial Sequence
  Description of Artificial Sequence: Synthetic oligonucleotide
  Antisense strand to SEQ ID NO: 1934006
cuguuucaagccuaagacu

SEQ ID NO: 1934008 - RNA, 19 nt, Artificial Sequence
  Description of Artificial Sequence: Synthetic oligonucleotide
  Sense strand starting at position 613 of SEQ ID NO: 1879821
cucagaauauaucugaugu

SEQ ID NO: 1934009 - RNA, 19 nt, Artificial Sequence
  Description of Artificial Sequence: Synthetic oligonucleotide
  Antisense strand to SEQ ID NO: 1934008
acaucagauauauucugag

SEQ ID NO: 1934010 - RNA, 19 nt, Artificial Sequence
  Description of Artificial Sequence: Synthetic oligonucleotide
  Sense strand starting at position 815 of SEQ ID NO: 1879821
gcacauauguuaucuguca

SEQ ID NO: 1934011 - RNA, 19 nt, Artificial Sequence
  Description of Artificial Sequence: Synthetic oligonucleotide
  Antisense strand to SEQ ID NO: 1934010
ugacagauaacauaugugc

SEQ ID NO: 1934012 - RNA, 19 nt, Artificial Sequence
  Description of Artificial Sequence: Synthetic oligonucleotide
  Sense strand starting at position 908 of SEQ ID NO: 1879821
gaaugauauccaggucugu

SEQ ID NO: 1934013 - RNA, 19 nt, Artificial Sequence
  Description of Artificial Sequence: Synthetic oligonucleotide
  Antisense strand to SEQ ID NO: 1934012
acagaccuggauaucauuc

SEQ ID NO: 1934014 - RNA, 19 nt, Artificial Sequence
  Description of Artificial Sequence: Synthetic oligonucleotide
  Sense strand starting at position 941 of SEQ ID NO: 1879821
cuggguagagcuuguucaa

SEQ ID NO: 1934015 - RNA, 19 nt, Artificial Sequence
  Description of Artificial Sequence: Synthetic oligonucleotide
  Antisense strand to SEQ ID NO: 1934014
uugaacaagcucuacccag

SEQ ID NO: 1934016 - RNA, 19 nt, Artificial Sequence
  Description of Artificial Sequence: Synthetic oligonucleotide
  Sense strand starting at position 1023 of SEQ ID NO: 1879821
ugacucaagccuggaugaa

SEQ ID NO: 1934017 - RNA, 19 nt, Artificial Sequence
  Description of Artificial Sequence: Synthetic oligonucleotide
  Antisense strand to SEQ ID NO: 1934016
uucauccaggcuugaguca

SEQ ID NO: 1934018 - RNA, 19 nt, Artificial Sequence
  Description of Artificial Sequence: Synthetic oligonucleotide
  Sense strand starting at position 1153 of SEQ ID NO: 1879821
cugccuagaguggguuaau

SEQ ID NO: 1934019 - RNA, 19 nt, Artificial Sequence
  Description of Artificial Sequence: Synthetic oligonucleotide
  Antisense strand to SEQ ID NO: 1934018
auuaacccacucuaggcag

SEQ ID NO: 1934020 - RNA, 19 nt, Artificial Sequence
  Description of Artificial Sequence: Synthetic oligonucleotide
  Sense strand starting at position 1154 of SEQ ID NO: 1879821
ugccuagaguggguuaaua

SEQ ID NO: 1934021 - RNA, 19 nt, Artificial Sequence
  Description of Artificial Sequence: Synthetic oligonucleotide
  Antisense strand to SEQ ID NO: 1934020
uauuaacccacucuaggca

SEQ ID NO: 1934022 - RNA, 19 nt, Artificial Sequence
  Description of Artificial Sequence: Synthetic oligonucleotide
  Sense strand starting at position 1156 of SEQ ID NO: 1879821
ccuagaguggguuaauaug

SEQ ID NO: 1934023 - RNA, 19 nt, Artificial Sequence
  Description of Artificial Sequence: Synthetic oligonucleotide
  Antisense strand to SEQ ID NO: 1934022
cauauuaacccacucuagg

SEQ ID NO: 1934024 - RNA, 19 nt, Artificial Sequence
  Description of Artificial Sequence: Synthetic oligonucleotide
  Sense strand starting at position 1162 of SEQ ID NO: 1879821
guggguuaauaugccacaa

SEQ ID NO: 1934025 - RNA, 19 nt, Artificial Sequence
  Description of Artificial Sequence: Synthetic oligonucleotide
  Antisense strand to SEQ ID NO: 1934024
uuguggcauauuaacccac

SEQ ID NO: 1934026 - RNA, 19 nt, Artificial Sequence
  Description of Artificial Sequence: Synthetic oligonucleotide
  Sense strand starting at position 1333 of SEQ ID NO: 1879821
gagauacguuggcuuagga

SEQ ID NO: 1934027 - RNA, 19 nt, Artificial Sequence
  Description of Artificial Sequence: Synthetic oligonucleotide
  Antisense strand to SEQ ID NO: 1934026
uccuaagccaacguaucuc

SEQ ID NO: 1934028 - RNA, 19 nt, Artificial Sequence
  Description of Artificial Sequence: Synthetic oligonucleotide
  Sense strand starting at position 1352 of SEQ ID NO: 1879821
agagauguugcaggagaga

SEQ ID NO: 1934029 - RNA, 19 nt, Artificial Sequence
  Description of Artificial Sequence: Synthetic oligonucleotide
  Antisense strand to SEQ ID NO: 1934028
ucucuccugcaacaucucu

SEQ ID NO: 1934030 - RNA, 19 nt, Artificial Sequence
  Description of Artificial Sequence: Synthetic oligonucleotide
  Sense strand starting at position 1371 of SEQ ID NO: 1879821
gggugaaaugcacaggcua

SEQ ID NO: 1934031 - RNA, 19 nt, Artificial Sequence
  Description of Artificial Sequence: Synthetic oligonucleotide
  Antisense strand to SEQ ID NO: 1934030
uagccugugcauuucaccc

SEQ ID NO: 1934032 - RNA, 19 nt, Artificial Sequence
  Description of Artificial Sequence: Synthetic oligonucleotide
  Sense strand starting at position 1440 of SEQ ID NO: 1879821
ucuagaggcaguugucaga

SEQ ID NO: 1934033 - RNA, 19 nt, Artificial Sequence
  Description of Artificial Sequence: Synthetic oligonucleotide
  Antisense strand to SEQ ID NO: 1934032
ucugacaacugccucuaga

SEQ ID NO: 1934034 - RNA, 19 nt, Artificial Sequence
  Description of Artificial Sequence: Synthetic oligonucleotide
  Sense strand starting at position 2115 of SEQ ID NO: 1879821
uaagcaggcccguaguuaa

SEQ ID NO: 1934035 - RNA, 19 nt, Artificial Sequence
  Description of Artificial Sequence: Synthetic oligonucleotide
  Antisense strand to SEQ ID NO: 1934034
uuaacuacgggccugcuua

SEQ ID NO: 1934036 - RNA, 19 nt, Artificial Sequence
  Description of Artificial Sequence: Synthetic oligonucleotide
  Sense strand starting at position 2199 of SEQ ID NO: 1879821
gagacucgugagcgagaga

SEQ ID NO: 1934037 - RNA, 19 nt, Artificial Sequence
  Description of Artificial Sequence: Synthetic oligonucleotide
  Antisense strand to SEQ ID NO: 1934036
ucucucgcucacgagucuc

SEQ ID NO: 1934038 - RNA, 19 nt, Artificial Sequence
  Description of Artificial Sequence: Synthetic oligonucleotide
  Sense strand starting at position 2202 of SEQ ID NO: 1879821
acucgugagcgagagacua

SEQ ID NO: 1934039 - RNA, 19 nt, Artificial Sequence
  Description of Artificial Sequence: Synthetic oligonucleotide
  Antisense strand to SEQ ID NO: 1934038
uagucucucgcucacgagu

SEQ ID NO: 1934040 - RNA, 19 nt, Artificial Sequence
  Description of Artificial Sequence: Synthetic oligonucleotide
  Sense strand starting at position 2257 of SEQ ID NO: 1879821
ucccuagcgacuuaaggau

SEQ ID NO: 1934041 - RNA, 19 nt, Artificial Sequence
  Description of Artificial Sequence: Synthetic oligonucleotide
  Antisense strand to SEQ ID NO: 1934040
auccuuaagucgcuaggga

SEQ ID NO: 1934042 - RNA, 19 nt, Artificial Sequence
  Description of Artificial Sequence: Synthetic oligonucleotide
  Sense strand starting at position 2277 of SEQ ID NO: 1879821
ugguuagaguggcccgaau

SEQ ID NO: 1934043 - RNA, 19 nt, Artificial Sequence
  Description of Artificial Sequence: Synthetic oligonucleotide
  Antisense strand to SEQ ID NO: 1934042
auucgggccacucuaacca

SEQ ID NO: 1934044 - RNA, 19 nt, Artificial Sequence
  Description of Artificial Sequence: Synthetic oligonucleotide
  Sense strand starting at position 2351 of SEQ ID NO: 1879821
ggucgucaucucgcgagaa

SEQ ID NO: 1934045 - RNA, 19 nt, Artificial Sequence
  Description of Artificial Sequence: Synthetic oligonucleotide
  Antisense strand to SEQ ID NO: 1934044
uucucgcgagaugacgacc

SEQ ID NO: 1934046 - RNA, 19 nt, Artificial Sequence
  Description of Artificial Sequence: Synthetic oligonucleotide
  Sense strand starting at position 2353 of SEQ ID NO: 1879821
ucgucaucucgcgagaaag

SEQ ID NO: 1934047 - RNA, 19 nt, Artificial Sequence
  Description of Artificial Sequence: Synthetic oligonucleotide
  Antisense strand to SEQ ID NO: 1934046
cuuucucgcgagaugacga

SEQ ID NO: 1934048 - RNA, 19 nt, Artificial Sequence
  Description of Artificial Sequence: Synthetic oligonucleotide
  Sense strand starting at position 2354 of SEQ ID NO: 1879821
cgucaucucgcgagaaagg

SEQ ID NO: 1934049 - RNA, 19 nt, Artificial Sequence
  Description of Artificial Sequence: Synthetic oligonucleotide
  Antisense strand to SEQ ID NO: 1934048
ccuuucucgcgagaugacg

SEQ ID NO: 1934050 - RNA, 19 nt, Artificial Sequence
  Description of Artificial Sequence: Synthetic oligonucleotide
  Sense strand starting at position 3049 of SEQ ID NO: 1879821
aagguacuggcuuguaaag

SEQ ID NO: 1934051 - RNA, 19 nt, Artificial Sequence
  Description of Artificial Sequence: Synthetic oligonucleotide
  Antisense strand to SEQ ID NO: 1934050
cuuuacaagccaguaccuu

SEQ ID NO: 1934052 - RNA, 19 nt, Artificial Sequence
  Description of Artificial Sequence: Synthetic oligonucleotide
  Sense strand starting at position 3117 of SEQ ID NO: 1879821
aggagcugccgcguuuaga

SEQ ID NO: 1934053 - RNA, 19 nt, Artificial Sequence
  Description of Artificial Sequence: Synthetic oligonucleotide
  Antisense strand to SEQ ID NO: 1934052
ucuaaacgcggcagcuccu

SEQ ID NO: 1934054 - RNA, 19 nt, Artificial Sequence
  Description of Artificial Sequence: Synthetic oligonucleotide
  Sense strand starting at position 3280 of SEQ ID NO: 1879821
ccagacagaauccguguaa

SEQ ID NO: 1934055 - RNA, 19 nt, Artificial Sequence
  Description of Artificial Sequence: Synthetic oligonucleotide
  Antisense strand to SEQ ID NO: 1934054
uuacacggauucugucugg

SEQ ID NO: 1934056 - RNA, 19 nt, Artificial Sequence
  Description of Artificial Sequence: Synthetic oligonucleotide
  Sense strand starting at position 3281 of SEQ ID NO: 1879821
cagacagaauccguguaaa

SEQ ID NO: 1934057 - RNA, 19 nt, Artificial Sequence
  Description of Artificial Sequence: Synthetic oligonucleotide
  Antisense strand to SEQ ID NO: 1934056
uuuacacggauucugucug

SEQ ID NO: 1934058 - RNA, 19 nt, Artificial Sequence
  Description of Artificial Sequence: Synthetic oligonucleotide
  Sense strand starting at position 3284 of SEQ ID NO: 1879821
acagaauccguguaaacug

SEQ ID NO: 1934059 - RNA, 19 nt, Artificial Sequence
  Description of Artificial Sequence: Synthetic oligonucleotide
  Antisense strand to SEQ ID NO: 1934058
caguuuacacggauucugu

SEQ ID NO: 1934060 - RNA, 19 nt, Artificial Sequence
  Description of Artificial Sequence: Synthetic oligonucleotide
  Sense strand starting at position 3461 of SEQ ID NO: 1879821
auuuacaguuucguaguua

SEQ ID NO: 1934061 - RNA, 19 nt, Artificial Sequence
  Description of Artificial Sequence: Synthetic oligonucleotide
  Antisense strand to SEQ ID NO: 1934060
uaacuacgaaacuguaaau

SEQ ID NO: 1934062 - RNA, 19 nt, Artificial Sequence
  Description of Artificial Sequence: Synthetic oligonucleotide
  Sense strand starting at position 3612 of SEQ ID NO: 1879821
guacuuaguaaaggucuuu

SEQ ID NO: 1934063 - RNA, 19 nt, Artificial Sequence
  Description of Artificial Sequence: Synthetic oligonucleotide
  Antisense strand to SEQ ID NO: 1934062
aaagaccuuuacuaaguac

SEQ ID NO: 1934064 - RNA, 19 nt, Artificial Sequence
  Description of Artificial Sequence: Synthetic oligonucleotide
  Sense strand starting at position 3663 of SEQ ID NO: 1879821
uucuuucuauuuggagaua

SEQ ID NO: 1934065 - RNA, 19 nt, Artificial Sequence
  Description of Artificial Sequence: Synthetic oligonucleotide
  Antisense strand to SEQ ID NO: 1934064
uaucuccaaauagaaagaa

SEQ ID NO: 1934066 - RNA, 19 nt, Artificial Sequence
  Description of Artificial Sequence: Synthetic oligonucleotide
  Sense strand starting at position 3807 of SEQ ID NO: 1879821
acaguucugguuuguaaau

SEQ ID NO: 1934067 - RNA, 19 nt, Artificial Sequence
  Description of Artificial Sequence: Synthetic oligonucleotide
  Antisense strand to SEQ ID NO: 1934066
auuuacaaaccagaacugu

SEQ ID NO: 1934068 - RNA, 19 nt, Artificial Sequence
  Description of Artificial Sequence: Synthetic oligonucleotide
  Sense strand starting at position 3808 of SEQ ID NO: 1879821
caguucugguuuguaaauu

SEQ ID NO: 1934069 - RNA, 19 nt, Artificial Sequence
  Description of Artificial Sequence: Synthetic oligonucleotide
  Antisense strand to SEQ ID NO: 1934068
aauuuacaaaccagaacug

SEQ ID NO: 1934070 - RNA, 19 nt, Artificial Sequence
  Description of Artificial Sequence: Synthetic oligonucleotide
  Sense strand starting at position 3957 of SEQ ID NO: 1879821
cuccgccacccuuagaaau

SEQ ID NO: 1934071 - RNA, 19 nt, Artificial Sequence
  Description of Artificial Sequence: Synthetic oligonucleotide
  Antisense strand to SEQ ID NO: 1934070
auuucuaaggguggcggag

SEQ ID NO: 1934072 - RNA, 19 nt, Artificial Sequence
  Description of Artificial Sequence: Synthetic oligonucleotide
  Sense strand starting at position 21 of SEQ ID NO: 1879822
cuuguagguguucaaaugu

SEQ ID NO: 1934073 - RNA, 19 nt, Artificial Sequence
  Description of Artificial Sequence: Synthetic oligonucleotide
  Antisense strand to SEQ ID NO: 1934072
acauuugaacaccuacaag

SEQ ID NO: 1934074 - RNA, 19 nt, Artificial Sequence
  Description of Artificial Sequence: Synthetic oligonucleotide
  Sense strand starting at position 46 of SEQ ID NO: 1879822
guggguguagcuuauauuu

SEQ ID NO: 1934075 - RNA, 19 nt, Artificial Sequence
  Description of Artificial Sequence: Synthetic oligonucleotide
  Antisense strand to SEQ ID NO: 1934074
aaauauaagcuacacccac

SEQ ID NO: 1934076 - RNA, 19 nt, Artificial Sequence
  Description of Artificial Sequence: Synthetic oligonucleotide
  Sense strand starting at position 95 of SEQ ID NO: 1879822
cagagacucugcuuuguag

SEQ ID NO: 1934077 - RNA, 19 nt, Artificial Sequence
  Description of Artificial Sequence: Synthetic oligonucleotide
  Antisense strand to SEQ ID NO: 1934076
cuacaaagcagagucucug

SEQ ID NO: 1934078 - RNA, 19 nt, Artificial Sequence
  Description of Artificial Sequence: Synthetic oligonucleotide
  Sense strand starting at position 110 of SEQ ID NO: 1879822
guaguucugaagggaucca

SEQ ID NO: 1934079 - RNA, 19 nt, Artificial Sequence
  Description of Artificial Sequence: Synthetic oligonucleotide
  Antisense strand to SEQ ID NO: 1934078
uggaucccuucagaacuac

SEQ ID NO: 1934080 - RNA, 19 nt, Artificial Sequence
  Description of Artificial Sequence: Synthetic oligonucleotide
  Sense strand starting at position 569 of SEQ ID NO: 1879822
augugaucacucuguauca

SEQ ID NO: 1934081 - RNA, 19 nt, Artificial Sequence
  Description of Artificial Sequence: Synthetic oligonucleotide
  Antisense strand to SEQ ID NO: 1934080
ugauacagagugaucacau

SEQ ID NO: 1934082 - RNA, 19 nt, Artificial Sequence
  Description of Artificial Sequence: Synthetic oligonucleotide
  Sense strand starting at position 571 of SEQ ID NO: 1879822
gugaucacucuguaucaga

SEQ ID NO: 1934083 - RNA, 19 nt, Artificial Sequence
  Description of Artificial Sequence: Synthetic oligonucleotide
  Antisense strand to SEQ ID NO: 1934082
ucugauacagagugaucac

SEQ ID NO: 1934084 - RNA, 19 nt, Artificial Sequence
  Description of Artificial Sequence: Synthetic oligonucleotide
  Sense strand starting at position 579 of SEQ ID NO: 1879822
ucuguaucagaggaucagu

SEQ ID NO: 1934085 - RNA, 19 nt, Artificial Sequence
  Description of Artificial Sequence: Synthetic oligonucleotide
  Antisense strand to SEQ ID NO: 1934084
acugauccucugauacaga

SEQ ID NO: 1934086 - RNA, 19 nt, Artificial Sequence
  Description of Artificial Sequence: Synthetic oligonucleotide
  Sense strand starting at position 587 of SEQ ID NO: 1879822
agaggaucagucuguuuac

SEQ ID NO: 1934087 - RNA, 19 nt, Artificial Sequence
  Description of Artificial Sequence: Synthetic oligonucleotide
  Antisense strand to SEQ ID NO: 1934086
guaaacagacugauccucu

SEQ ID NO: 1934088 - RNA, 19 nt, Artificial Sequence
  Description of Artificial Sequence: Synthetic oligonucleotide
  Sense strand starting at position 588 of SEQ ID NO: 1879822
gaggaucagucuguuuacu

SEQ ID NO: 1934089 - RNA, 19 nt, Artificial Sequence
  Description of Artificial Sequence: Synthetic oligonucleotide
  Antisense strand to SEQ ID NO: 1934088
aguaaacagacugauccuc

SEQ ID NO: 1934090 - RNA, 19 nt, Artificial Sequence
  Description of Artificial Sequence: Synthetic oligonucleotide
  Sense strand starting at position 590 of SEQ ID NO: 1879822
ggaucagucuguuuacuua

SEQ ID NO: 1934091 - RNA, 19 nt, Artificial Sequence
  Description of Artificial Sequence: Synthetic oligonucleotide
  Antisense strand to SEQ ID NO: 1934090
uaaguaaacagacugaucc

SEQ ID NO: 1934092 - RNA, 19 nt, Artificial Sequence
  Description of Artificial Sequence: Synthetic oligonucleotide
  Sense strand starting at position 627 of SEQ ID NO: 1879822
augaguuuggugagugucu

SEQ ID NO: 1934093 - RNA, 19 nt, Artificial Sequence
  Description of Artificial Sequence: Synthetic oligonucleotide
  Antisense strand to SEQ ID NO: 1934092
agacacucaccaaacucau

SEQ ID NO: 1934094 - RNA, 19 nt, Artificial Sequence
  Description of Artificial Sequence: Synthetic oligonucleotide
  Sense strand starting at position 799 of SEQ ID NO: 1879822
cagacugugcaggaaucua

SEQ ID NO: 1934095 - RNA, 19 nt, Artificial Sequence
  Description of Artificial Sequence: Synthetic oligonucleotide
  Antisense strand to SEQ ID NO: 1934094
uagauuccugcacagucug

SEQ ID NO: 1934096 - RNA, 19 nt, Artificial Sequence
  Description of Artificial Sequence: Synthetic oligonucleotide
  Sense strand starting at position 804 of SEQ ID NO: 1879822
ugugcaggaaucuaguuau

SEQ ID NO: 1934097 - RNA, 19 nt, Artificial Sequence
  Description of Artificial Sequence: Synthetic oligonucleotide
  Antisense strand to SEQ ID NO: 1934096
auaacuagauuccugcaca

SEQ ID NO: 1934098 - RNA, 19 nt, Artificial Sequence
  Description of Artificial Sequence: Synthetic oligonucleotide
  Sense strand starting at position 817 of SEQ ID NO: 1879822
aguuauuucuggccaggca

SEQ ID NO: 1934099 - RNA, 19 nt, Artificial Sequence
  Description of Artificial Sequence: Synthetic oligonucleotide
  Antisense strand to SEQ ID NO: 1934098
ugccuggccagaaauaacu

SEQ ID NO: 1934100 - RNA, 19 nt, Artificial Sequence
  Description of Artificial Sequence: Synthetic oligonucleotide
  Sense strand starting at position 1224 of SEQ ID NO: 1879822
augaauuacucaguggaac

SEQ ID NO: 1934101 - RNA, 19 nt, Artificial Sequence
  Description of Artificial Sequence: Synthetic oligonucleotide
  Antisense strand to SEQ ID NO: 1934100
guuccacugaguaauucau

SEQ ID NO: 1934102 - RNA, 19 nt, Artificial Sequence
  Description of Artificial Sequence: Synthetic oligonucleotide
  Sense strand starting at position 1424 of SEQ ID NO: 1879822
gacagaugcccucaugacu

SEQ ID NO: 1934103 - RNA, 19 nt, Artificial Sequence
  Description of Artificial Sequence: Synthetic oligonucleotide
  Antisense strand to SEQ ID NO: 1934102
agucaugagggcaucuguc

SEQ ID NO: 1934104 - RNA, 19 nt, Artificial Sequence
  Description of Artificial Sequence: Synthetic oligonucleotide
  Sense strand starting at position 1995 of SEQ ID NO: 1879822
gcuuuaugaggucaccaug

SEQ ID NO: 1934105 - RNA, 19 nt, Artificial Sequence
  Description of Artificial Sequence: Synthetic oligonucleotide
  Antisense strand to SEQ ID NO: 1934104
cauggugaccucauaaagc

SEQ ID NO: 1934106 - RNA, 19 nt, Artificial Sequence
  Description of Artificial Sequence: Synthetic oligonucleotide
  Sense strand starting at position 2016 of SEQ ID NO: 1879822
ccagaagucccucagccaa

SEQ ID NO: 1934107 - RNA, 19 nt, Artificial Sequence
  Description of Artificial Sequence: Synthetic oligonucleotide
  Antisense strand to SEQ ID NO: 1934106
uuggcugagggacuucugg

SEQ ID NO: 1934108 - RNA, 19 nt, Artificial Sequence
  Description of Artificial Sequence: Synthetic oligonucleotide
  Sense strand starting at position 2138 of SEQ ID NO: 1879822
gcuaauaaacacugaguuu

SEQ ID NO: 1934109 - RNA, 19 nt, Artificial Sequence
  Description of Artificial Sequence: Synthetic oligonucleotide
  Antisense strand to SEQ ID NO: 1934108
aaacucaguguuuauuagc

SEQ ID NO: 1934110 - RNA, 19 nt, Artificial Sequence
  Description of Artificial Sequence: Synthetic oligonucleotide
  Sense strand starting at position 2149 of SEQ ID NO: 1879822
cugaguuucucauccagaa

SEQ ID NO: 1934111 - RNA, 19 nt, Artificial Sequence
  Description of Artificial Sequence: Synthetic oligonucleotide
  Antisense strand to SEQ ID NO: 1934110
uucuggaugagaaacucag

SEQ ID NO: 1934112 - RNA, 19 nt, Artificial Sequence
  Description of Artificial Sequence: Synthetic oligonucleotide
  Sense strand starting at position 2204 of SEQ ID NO: 1879822
cuuggaccucuguguauuu

SEQ ID NO: 1934113 - RNA, 19 nt, Artificial Sequence
  Description of Artificial Sequence: Synthetic oligonucleotide
  Antisense strand to SEQ ID NO: 1934112
aaauacacagagguccaag

SEQ ID NO: 1934114 - RNA, 19 nt, Artificial Sequence
  Description of Artificial Sequence: Synthetic oligonucleotide
  Sense strand starting at position 2228 of SEQ ID NO: 1879822
ugacaagggcuuugaaauc

SEQ ID NO: 1934115 - RNA, 19 nt, Artificial Sequence
  Description of Artificial Sequence: Synthetic oligonucleotide
  Antisense strand to SEQ ID NO: 1934114
gauuucaaagcccuuguca

SEQ ID NO: 1934116 - RNA, 19 nt, Artificial Sequence
  Description of Artificial Sequence: Synthetic oligonucleotide
  Sense strand starting at position 2241 of SEQ ID NO: 1879822
gaaaucagguggucuguga

SEQ ID NO: 1934117 - RNA, 19 nt, Artificial Sequence
  Description of Artificial Sequence: Synthetic oligonucleotide
  Antisense strand to SEQ ID NO: 1934116
ucacagaccaccugauuuc

SEQ ID NO: 1934118 - RNA, 19 nt, Artificial Sequence
  Description of Artificial Sequence: Synthetic oligonucleotide
  Sense strand starting at position 2249 of SEQ ID NO: 1879822
guggucugugaugaggcaa

SEQ ID NO: 1934119 - RNA, 19 nt, Artificial Sequence
  Description of Artificial Sequence: Synthetic oligonucleotide
  Antisense strand to SEQ ID NO: 1934118
uugccucaucacagaccac

SEQ ID NO: 1934120 - RNA, 19 nt, Artificial Sequence
  Description of Artificial Sequence: Synthetic oligonucleotide
  Sense strand starting at position 2435 of SEQ ID NO: 1879822
acagcagugucaucuagau

SEQ ID NO: 1934121 - RNA, 19 nt, Artificial Sequence
  Description of Artificial Sequence: Synthetic oligonucleotide
  Antisense strand to SEQ ID NO: 1934120
aucuagaugacacugcugu

SEQ ID NO: 1934122 - RNA, 19 nt, Artificial Sequence
  Description of Artificial Sequence: Synthetic oligonucleotide
  Sense strand starting at position 2479 of SEQ ID NO: 1879822
acggcuaucuuucuaaaga

SEQ ID NO: 1934123 - RNA, 19 nt, Artificial Sequence
  Description of Artificial Sequence: Synthetic oligonucleotide
  Antisense strand to SEQ ID NO: 1934122
ucuuuagaaagauagccgu

SEQ ID NO: 1934124 - RNA, 19 nt, Artificial Sequence
  Description of Artificial Sequence: Synthetic oligonucleotide
  Sense strand starting at position 2508 of SEQ ID NO: 1879822
gaugaugagcaauagcuca

SEQ ID NO: 1934125 - RNA, 19 nt, Artificial Sequence
  Description of Artificial Sequence: Synthetic oligonucleotide
  Antisense strand to SEQ ID NO: 1934124
ugagcuauugcucaucauc

SEQ ID NO: 1934126 - RNA, 19 nt, Artificial Sequence
  Description of Artificial Sequence: Synthetic oligonucleotide
  Sense strand starting at position 2513 of SEQ ID NO: 1879822
ugagcaauagcucagcuaa

SEQ ID NO: 1934127 - RNA, 19 nt, Artificial Sequence
  Description of Artificial Sequence: Synthetic oligonucleotide
  Antisense strand to SEQ ID NO: 1934126
uuagcugagcuauugcuca

SEQ ID NO: 1934128 - RNA, 19 nt, Artificial Sequence
  Description of Artificial Sequence: Synthetic oligonucleotide
  Sense strand starting at position 2663 of SEQ ID NO: 1879822
agacaagcugccuagaagu

SEQ ID NO: 1934129 - RNA, 19 nt, Artificial Sequence
  Description of Artificial Sequence: Synthetic oligonucleotide
  Antisense strand to SEQ ID NO: 1934128
acuucuaggcagcuugucu

SEQ ID NO: 1934130 - RNA, 19 nt, Artificial Sequence
  Description of Artificial Sequence: Synthetic oligonucleotide
  Sense strand starting at position 2863 of SEQ ID NO: 1879822
ccuugugucaucgaggauu

SEQ ID NO: 1934131 - RNA, 19 nt, Artificial Sequence
  Description of Artificial Sequence: Synthetic oligonucleotide
  Antisense strand to SEQ ID NO: 1934130
aauccucgaugacacaagg

SEQ ID NO: 1934132 - RNA, 19 nt, Artificial Sequence
  Description of Artificial Sequence: Synthetic oligonucleotide
  Sense strand starting at position 2866 of SEQ ID NO: 1879822
ugugucaucgaggauuccu

SEQ ID NO: 1934133 - RNA, 19 nt, Artificial Sequence
  Description of Artificial Sequence: Synthetic oligonucleotide
  Antisense strand to SEQ ID NO: 1934132
aggaauccucgaugacaca

SEQ ID NO: 1934134 - RNA, 19 nt, Artificial Sequence
  Description of Artificial Sequence: Synthetic oligonucleotide
  Sense strand starting at position 3416 of SEQ ID NO: 1879822
cucagaucuucgucauuga

SEQ ID NO: 1934135 - RNA, 19 nt, Artificial Sequence
  Description of Artificial Sequence: Synthetic oligonucleotide
  Antisense strand to SEQ ID NO: 1934134
ucaaugacgaagaucugag

SEQ ID NO: 1934136 - RNA, 19 nt, Artificial Sequence
  Description of Artificial Sequence: Synthetic oligonucleotide
  Sense strand starting at position 3417 of SEQ ID NO: 1879822
ucagaucuucgucauugaa

SEQ ID NO: 1934137 - RNA, 19 nt, Artificial Sequence
  Description of Artificial Sequence: Synthetic oligonucleotide
  Antisense strand to SEQ ID NO: 1934136
uucaaugacgaagaucuga

SEQ ID NO: 1934138 - RNA, 19 nt, Artificial Sequence
  Description of Artificial Sequence: Synthetic oligonucleotide
  Sense strand starting at position 3419 of SEQ ID NO: 1879822
agaucuucgucauugaaag

SEQ ID NO: 1934139 - RNA, 19 nt, Artificial Sequence
  Description of Artificial Sequence: Synthetic oligonucleotide
  Antisense strand to SEQ ID NO: 1934138
cuuucaaugacgaagaucu

SEQ ID NO: 1934140 - RNA, 19 nt, Artificial Sequence
  Description of Artificial Sequence: Synthetic oligonucleotide
  Sense strand starting at position 3447 of SEQ ID NO: 1879822
uggccaguccuguaaauaa

SEQ ID NO: 1934141 - RNA, 19 nt, Artificial Sequence
  Description of Artificial Sequence: Synthetic oligonucleotide
  Antisense strand to SEQ ID NO: 1934140
uuauuuacaggacuggcca

SEQ ID NO: 1934142 - RNA, 19 nt, Artificial Sequence
  Description of Artificial Sequence: Synthetic oligonucleotide
  Sense strand starting at position 3516 of SEQ ID NO: 1879822
gaggcagcuucccugacaa

SEQ ID NO: 1934143 - RNA, 19 nt, Artificial Sequence
  Description of Artificial Sequence: Synthetic oligonucleotide
  Antisense strand to SEQ ID NO: 1934142
uugucagggaagcugccuc

SEQ ID NO: 1934144 - RNA, 19 nt, Artificial Sequence
  Description of Artificial Sequence: Synthetic oligonucleotide
  Sense strand starting at position 3518 of SEQ ID NO: 1879822
ggcagcuucccugacaacu

SEQ ID NO: 1934145 - RNA, 19 nt, Artificial Sequence
  Description of Artificial Sequence: Synthetic oligonucleotide
  Antisense strand to SEQ ID NO: 1934144
aguugucagggaagcugcc

SEQ ID NO: 1934146 - RNA, 19 nt, Artificial Sequence
  Description of Artificial Sequence: Synthetic oligonucleotide
  Sense strand starting at position 3837 of SEQ ID NO: 1879822
gggaacagcuauccugacu

SEQ ID NO: 1934147 - RNA, 19 nt, Artificial Sequence
  Description of Artificial Sequence: Synthetic oligonucleotide
  Antisense strand to SEQ ID NO: 1934146
agucaggauagcuguuccc

SEQ ID NO: 1934148 - RNA, 19 nt, Artificial Sequence
  Description of Artificial Sequence: Synthetic oligonucleotide
  Sense strand starting at position 3937 of SEQ ID NO: 1879822
caauuaucauguuugugag

SEQ ID NO: 1934149 - RNA, 19 nt, Artificial Sequence
  Description of Artificial Sequence: Synthetic oligonucleotide
  Antisense strand to SEQ ID NO: 1934148
cucacaaacaugauaauug

SEQ ID NO: 1934150 - RNA, 19 nt, Artificial Sequence
  Description of Artificial Sequence: Synthetic oligonucleotide
  Sense strand starting at position 3939 of SEQ ID NO: 1879822
auuaucauguuugugagau

SEQ ID NO: 1934151 - RNA, 19 nt, Artificial Sequence
  Description of Artificial Sequence: Synthetic oligonucleotide
  Antisense strand to SEQ ID NO: 1934150
aucucacaaacaugauaau

SEQ ID NO: 1934152 - RNA, 19 nt, Artificial Sequence
  Description of Artificial Sequence: Synthetic oligonucleotide
  Sense strand starting at position 21 of SEQ ID NO: 1879823
cuuguagguguucaaaugu

SEQ ID NO: 1934153 - RNA, 19 nt, Artificial Sequence
  Description of Artificial Sequence: Synthetic oligonucleotide
  Antisense strand to SEQ ID NO: 1934152
acauuugaacaccuacaag

SEQ ID NO: 1934154 - RNA, 19 nt, Artificial Sequence
  Description of Artificial Sequence: Synthetic oligonucleotide
  Sense strand starting at position 46 of SEQ ID NO: 1879823
guggguguagcuuauauuu

SEQ ID NO: 1934155 - RNA, 19 nt, Artificial Sequence
  Description of Artificial Sequence: Synthetic oligonucleotide
  Antisense strand to SEQ ID NO: 1934154
aaauauaagcuacacccac

SEQ ID NO: 1934156 - RNA, 19 nt, Artificial Sequence
  Description of Artificial Sequence: Synthetic oligonucleotide
  Sense strand starting at position 95 of SEQ ID NO: 1879823
cagagacucugcuuuguag

SEQ ID NO: 1934157 - RNA, 19 nt, Artificial Sequence
  Description of Artificial Sequence: Synthetic oligonucleotide
  Antisense strand to SEQ ID NO: 1934156
cuacaaagcagagucucug

SEQ ID NO: 1934158 - RNA, 19 nt, Artificial Sequence
  Description of Artificial Sequence: Synthetic oligonucleotide
  Sense strand starting at position 110 of SEQ ID NO: 1879823
guaguucugaagggaucca

SEQ ID NO: 1934159 - RNA, 19 nt, Artificial Sequence
  Description of Artificial Sequence: Synthetic oligonucleotide
  Antisense strand to SEQ ID NO: 1934158
uggaucccuucagaacuac

SEQ ID NO: 1934160 - RNA, 19 nt, Artificial Sequence
  Description of Artificial Sequence: Synthetic oligonucleotide
  Sense strand starting at position 569 of SEQ ID NO: 1879823
augugaucacucuguauca

SEQ ID NO: 1934161 - RNA, 19 nt, Artificial Sequence
  Description of Artificial Sequence: Synthetic oligonucleotide
  Antisense strand to SEQ ID NO: 1934160
ugauacagagugaucacau

SEQ ID NO: 1934162 - RNA, 19 nt, Artificial Sequence
  Description of Artificial Sequence: Synthetic oligonucleotide
  Sense strand starting at position 571 of SEQ ID NO: 1879823
gugaucacucuguaucaga

SEQ ID NO: 1934163 - RNA, 19 nt, Artificial Sequence
  Description of Artificial Sequence: Synthetic oligonucleotide
  Antisense strand to SEQ ID NO: 1934162
ucugauacagagugaucac

SEQ ID NO: 1934164 - RNA, 19 nt, Artificial Sequence
  Description of Artificial Sequence: Synthetic oligonucleotide
  Sense strand starting at position 579 of SEQ ID NO: 1879823
ucuguaucagaggaucagu

SEQ ID NO: 1934165 - RNA, 19 nt, Artificial Sequence
  Description of Artificial Sequence: Synthetic oligonucleotide
  Antisense strand to SEQ ID NO: 1934164
acugauccucugauacaga

SEQ ID NO: 1934166 - RNA, 19 nt, Artificial Sequence
  Description of Artificial Sequence: Synthetic oligonucleotide
  Sense strand starting at position 587 of SEQ ID NO: 1879823
agaggaucagucuguuuac

SEQ ID NO: 1934167 - RNA, 19 nt, Artificial Sequence
  Description of Artificial Sequence: Synthetic oligonucleotide
  Antisense strand to SEQ ID NO: 1934166
guaaacagacugauccucu

SEQ ID NO: 1934168 - RNA, 19 nt, Artificial Sequence
  Description of Artificial Sequence: Synthetic oligonucleotide
  Sense strand starting at position 588 of SEQ ID NO: 1879823
gaggaucagucuguuuacu

SEQ ID NO: 1934169 - RNA, 19 nt, Artificial Sequence
  Description of Artificial Sequence: Synthetic oligonucleotide
  Antisense strand to SEQ ID NO: 1934168
aguaaacagacugauccuc

SEQ ID NO: 1934170 - RNA, 19 nt, Artificial Sequence
  Description of Artificial Sequence: Synthetic oligonucleotide
  Sense strand starting at position 590 of SEQ ID NO: 1879823
ggaucagucuguuuacuua

SEQ ID NO: 1934171 - RNA, 19 nt, Artificial Sequence
  Description of Artificial Sequence: Synthetic oligonucleotide
  Antisense strand to SEQ ID NO: 1934170
uaaguaaacagacugaucc

SEQ ID NO: 1934172 - RNA, 19 nt, Artificial Sequence
  Description of Artificial Sequence: Synthetic oligonucleotide
  Sense strand starting at position 627 of SEQ ID NO: 1879823
augaguuuggugagugucu

SEQ ID NO: 1934173 - RNA, 19 nt, Artificial Sequence
  Description of Artificial Sequence: Synthetic oligonucleotide
  Antisense strand to SEQ ID NO: 1934172
agacacucaccaaacucau

SEQ ID NO: 1934174 - RNA, 19 nt, Artificial Sequence
  Description of Artificial Sequence: Synthetic oligonucleotide
  Sense strand starting at position 799 of SEQ ID NO: 1879823
cagacugugcaggaaucua

SEQ ID NO: 1934175 - RNA, 19 nt, Artificial Sequence
  Description of Artificial Sequence: Synthetic oligonucleotide
  Antisense strand to SEQ ID NO: 1934174
uagauuccugcacagucug

SEQ ID NO: 1934176 - RNA, 19 nt, Artificial Sequence
  Description of Artificial Sequence: Synthetic oligonucleotide
  Sense strand starting at position 804 of SEQ ID NO: 1879823
ugugcaggaaucuaguuau

SEQ ID NO: 1934177 - RNA, 19 nt, Artificial Sequence
  Description of Artificial Sequence: Synthetic oligonucleotide
  Antisense strand to SEQ ID NO: 1934176
auaacuagauuccugcaca

SEQ ID NO: 1934178 - RNA, 19 nt, Artificial Sequence
  Description of Artificial Sequence: Synthetic oligonucleotide
  Sense strand starting at position 817 of SEQ ID NO: 1879823
aguuauuucuggccaggca

SEQ ID NO: 1934179 - RNA, 19 nt, Artificial Sequence
  Description of Artificial Sequence: Synthetic oligonucleotide
  Antisense strand to SEQ ID NO: 1934178
ugccuggccagaaauaacu

SEQ ID NO: 1934180 - RNA, 19 nt, Artificial Sequence
  Description of Artificial Sequence: Synthetic oligonucleotide
  Sense strand starting at position 1224 of SEQ ID NO: 1879823
augaauuacucaguggaac

SEQ ID NO: 1934181 - RNA, 19 nt, Artificial Sequence
  Description of Artificial Sequence: Synthetic oligonucleotide
  Antisense strand to SEQ ID NO: 1934180
guuccacugaguaauucau

SEQ ID NO: 1934182 - RNA, 19 nt, Artificial Sequence
  Description of Artificial Sequence: Synthetic oligonucleotide
  Sense strand starting at position 1424 of SEQ ID NO: 1879823
gacagaugcccucaugacu

SEQ ID NO: 1934183 - RNA, 19 nt, Artificial Sequence
  Description of Artificial Sequence: Synthetic oligonucleotide
  Antisense strand to SEQ ID NO: 1934182
agucaugagggcaucuguc

SEQ ID NO: 1934184 - RNA, 19 nt, Artificial Sequence
  Description of Artificial Sequence: Synthetic oligonucleotide
  Sense strand starting at position 1995 of SEQ ID NO: 1879823
gcuuuaugaggucaccaug

SEQ ID NO: 1934185 - RNA, 19 nt, Artificial Sequence
  Description of Artificial Sequence: Synthetic oligonucleotide
  Antisense strand to SEQ ID NO: 1934184
cauggugaccucauaaagc

SEQ ID NO: 1934186 - RNA, 19 nt, Artificial Sequence
  Description of Artificial Sequence: Synthetic oligonucleotide
  Sense strand starting at position 2016 of SEQ ID NO: 1879823
ccagaagucccucagccaa

SEQ ID NO: 1934187 - RNA, 19 nt, Artificial Sequence
  Description of Artificial Sequence: Synthetic oligonucleotide
  Antisense strand to SEQ ID NO: 1934186
uuggcugagggacuucugg

SEQ ID NO: 1934188 - RNA, 19 nt, Artificial Sequence
  Description of Artificial Sequence: Synthetic oligonucleotide
  Sense strand starting at position 2138 of SEQ ID NO: 1879823
gcuaauaaacacugaguuu

SEQ ID NO: 1934189 - RNA, 19 nt, Artificial Sequence
  Description of Artificial Sequence: Synthetic oligonucleotide
  Antisense strand to SEQ ID NO: 1934188
aaacucaguguuuauuagc

SEQ ID NO: 1934190 - RNA, 19 nt, Artificial Sequence
  Description of Artificial Sequence: Synthetic oligonucleotide
  Sense strand starting at position 2149 of SEQ ID NO: 1879823
cugaguuucucauccagaa

SEQ ID NO: 1934191 - RNA, 19 nt, Artificial Sequence
  Description of Artificial Sequence: Synthetic oligonucleotide
  Antisense strand to SEQ ID NO: 1934190
uucuggaugagaaacucag

SEQ ID NO: 1934192 - RNA, 19 nt, Artificial Sequence
  Description of Artificial Sequence: Synthetic oligonucleotide
  Sense strand starting at position 2204 of SEQ ID NO: 1879823
cuuggaccucuguguauuu

SEQ ID NO: 1934193 - RNA, 19 nt, Artificial Sequence
  Description of Artificial Sequence: Synthetic oligonucleotide
  Antisense strand to SEQ ID NO: 1934192
aaauacacagagguccaag

SEQ ID NO: 1934194 - RNA, 19 nt, Artificial Sequence
  Description of Artificial Sequence: Synthetic oligonucleotide
  Sense strand starting at position 2228 of SEQ ID NO: 1879823
ugacaagggcuuugaaauc

SEQ ID NO: 1934195 - RNA, 19 nt, Artificial Sequence
  Description of Artificial Sequence: Synthetic oligonucleotide
  Antisense strand to SEQ ID NO: 1934194
gauuucaaagcccuuguca

SEQ ID NO: 1934196 - RNA, 19 nt, Artificial Sequence
  Description of Artificial Sequence: Synthetic oligonucleotide
  Sense strand starting at position 2241 of SEQ ID NO: 1879823
gaaaucagguggucuguga

SEQ ID NO: 1934197 - RNA, 19 nt, Artificial Sequence
  Description of Artificial Sequence: Synthetic oligonucleotide
  Antisense strand to SEQ ID NO: 1934196
ucacagaccaccugauuuc

SEQ ID NO: 1934198 - RNA, 19 nt, Artificial Sequence
  Description of Artificial Sequence: Synthetic oligonucleotide
  Sense strand starting at position 2249 of SEQ ID NO: 1879823
guggucugugaugaggcaa

SEQ ID NO: 1934199 - RNA, 19 nt, Artificial Sequence
  Description of Artificial Sequence: Synthetic oligonucleotide
  Antisense strand to SEQ ID NO: 1934198
uugccucaucacagaccac

SEQ ID NO: 1934200 - RNA, 19 nt, Artificial Sequence
  Description of Artificial Sequence: Synthetic oligonucleotide
  Sense strand starting at position 2435 of SEQ ID NO: 1879823
acagcagugucaucuagau

SEQ ID NO: 1934201 - RNA, 19 nt, Artificial Sequence
  Description of Artificial Sequence: Synthetic oligonucleotide
  Antisense strand to SEQ ID NO: 1934200
aucuagaugacacugcugu

SEQ ID NO: 1934202 - RNA, 19 nt, Artificial Sequence
  Description of Artificial Sequence: Synthetic oligonucleotide
  Sense strand starting at position 2479 of SEQ ID NO: 1879823
acggcuaucuuucuaaaga

SEQ ID NO: 1934203 - RNA, 19 nt, Artificial Sequence
  Description of Artificial Sequence: Synthetic oligonucleotide
  Antisense strand to SEQ ID NO: 1934202
ucuuuagaaagauagccgu

SEQ ID NO: 1934204 - RNA, 19 nt, Artificial Sequence
  Description of Artificial Sequence: Synthetic oligonucleotide
  Sense strand starting at position 2508 of SEQ ID NO: 1879823
gaugaugagcaauagcuca

SEQ ID NO: 1934205 - RNA, 19 nt, Artificial Sequence
  Description of Artificial Sequence: Synthetic oligonucleotide
  Antisense strand to SEQ ID NO: 1934204
ugagcuauugcucaucauc

SEQ ID NO: 1934206 - RNA, 19 nt, Artificial Sequence
  Description of Artificial Sequence: Synthetic oligonucleotide
  Sense strand starting at position 2513 of SEQ ID NO: 1879823
ugagcaauagcucagcuaa

SEQ ID NO: 1934207 - RNA, 19 nt, Artificial Sequence
  Description of Artificial Sequence: Synthetic oligonucleotide
  Antisense strand to SEQ ID NO: 1934206
uuagcugagcuauugcuca

SEQ ID NO: 1934208 - RNA, 19 nt, Artificial Sequence
  Description of Artificial Sequence: Synthetic oligonucleotide
  Sense strand starting at position 2663 of SEQ ID NO: 1879823
agacaagcugccuagaagu

SEQ ID NO: 1934209 - RNA, 19 nt, Artificial Sequence
  Description of Artificial Sequence: Synthetic oligonucleotide
  Antisense strand to SEQ ID NO: 1934208
acuucuaggcagcuugucu

SEQ ID NO: 1934210 - RNA, 19 nt, Artificial Sequence
  Description of Artificial Sequence: Synthetic oligonucleotide
  Sense strand starting at position 2863 of SEQ ID NO: 1879823
ccuugugucaucgaggauu

SEQ ID NO: 1934211 - RNA, 19 nt, Artificial Sequence
  Description of Artificial Sequence: Synthetic oligonucleotide
  Antisense strand to SEQ ID NO: 1934210
aauccucgaugacacaagg

SEQ ID NO: 1934212 - RNA, 19 nt, Artificial Sequence
  Description of Artificial Sequence: Synthetic oligonucleotide
  Sense strand starting at position 2866 of SEQ ID NO: 1879823
ugugucaucgaggauuccu

SEQ ID NO: 1934213 - RNA, 19 nt, Artificial Sequence
  Description of Artificial Sequence: Synthetic oligonucleotide
  Antisense strand to SEQ ID NO: 1934212
aggaauccucgaugacaca

SEQ ID NO: 1934214 - RNA, 19 nt, Artificial Sequence
  Description of Artificial Sequence: Synthetic oligonucleotide
  Sense strand starting at position 3416 of SEQ ID NO: 1879823
cucagaucuucgucauuga

SEQ ID NO: 1934215 - RNA, 19 nt, Artificial Sequence
  Description of Artificial Sequence: Synthetic oligonucleotide
  Antisense strand to SEQ ID NO: 1934214
ucaaugacgaagaucugag

SEQ ID NO: 1934216 - RNA, 19 nt, Artificial Sequence
  Description of Artificial Sequence: Synthetic oligonucleotide
  Sense strand starting at position 3417 of SEQ ID NO: 1879823
ucagaucuucgucauugaa

SEQ ID NO: 1934217 - RNA, 19 nt, Artificial Sequence
  Description of Artificial Sequence: Synthetic oligonucleotide
  Antisense strand to SEQ ID NO: 1934216
uucaaugacgaagaucuga

SEQ ID NO: 1934218 - RNA, 19 nt, Artificial Sequence
  Description of Artificial Sequence: Synthetic oligonucleotide
  Sense strand starting at position 3419 of SEQ ID NO: 1879823
agaucuucgucauugaaag

SEQ ID NO: 1934219 - RNA, 19 nt, Artificial Sequence
  Description of Artificial Sequence: Synthetic oligonucleotide
  Antisense strand to SEQ ID NO: 1934218
cuuucaaugacgaagaucu

SEQ ID NO: 1934220 - RNA, 19 nt, Artificial Sequence
  Description of Artificial Sequence: Synthetic oligonucleotide
  Sense strand starting at position 3447 of SEQ ID NO: 1879823
uggccaguccuguaaauaa

SEQ ID NO: 1934221 - RNA, 19 nt, Artificial Sequence
  Description of Artificial Sequence: Synthetic oligonucleotide
  Antisense strand to SEQ ID NO: 1934220
uuauuuacaggacuggcca

SEQ ID NO: 1934222 - RNA, 19 nt, Artificial Sequence
  Description of Artificial Sequence: Synthetic oligonucleotide
  Sense strand starting at position 3516 of SEQ ID NO: 1879823
gaggcagcuucccugacaa

SEQ ID NO: 1934223 - RNA, 19 nt, Artificial Sequence
  Description of Artificial Sequence: Synthetic oligonucleotide
  Antisense strand to SEQ ID NO: 1934222
uugucagggaagcugccuc

SEQ ID NO: 1934224 - RNA, 19 nt, Artificial Sequence
  Description of Artificial Sequence: Synthetic oligonucleotide
  Sense strand starting at position 3518 of SEQ ID NO: 1879823
ggcagcuucccugacaacu

SEQ ID NO: 1934225 - RNA, 19 nt, Artificial Sequence
  Description of Artificial Sequence: Synthetic oligonucleotide
  Antisense strand to SEQ ID NO: 1934224
aguugucagggaagcugcc

SEQ ID NO: 1934226 - RNA, 19 nt, Artificial Sequence
  Description of Artificial Sequence: Synthetic oligonucleotide
  Sense strand starting at position 3837 of SEQ ID NO: 1879823
gggaacagcuauccugacu

SEQ ID NO: 1934227 - RNA, 19 nt, Artificial Sequence
  Description of Artificial Sequence: Synthetic oligonucleotide
  Antisense strand to SEQ ID NO: 1934226
agucaggauagcuguuccc

SEQ ID NO: 1934228 - RNA, 19 nt, Artificial Sequence
  Description of Artificial Sequence: Synthetic oligonucleotide
  Sense strand starting at position 3937 of SEQ ID NO: 1879823
caauuaucauguuugugag

SEQ ID NO: 1934229 - RNA, 19 nt, Artificial Sequence
  Description of Artificial Sequence: Synthetic oligonucleotide
  Antisense strand to SEQ ID NO: 1934228
cucacaaacaugauaauug

SEQ ID NO: 1934230 - RNA, 19 nt, Artificial Sequence
  Description of Artificial Sequence: Synthetic oligonucleotide
  Sense strand starting at position 3939 of SEQ ID NO: 1879823
auuaucauguuugugagau

SEQ ID NO: 1934231 - RNA, 19 nt, Artificial Sequence
  Description of Artificial Sequence: Synthetic oligonucleotide
  Antisense strand to SEQ ID NO: 1934230
aucucacaaacaugauaau

SEQ ID NO: 1934232 - RNA, 19 nt, Artificial Sequence
  Description of Artificial Sequence: Synthetic oligonucleotide
  Sense strand starting at position 29 of SEQ ID NO: 1879824
ccaagaggucuccauaccu

SEQ ID NO: 1934233 - RNA, 19 nt, Artificial Sequence
  Description of Artificial Sequence: Synthetic oligonucleotide
  Antisense strand to SEQ ID NO: 1934232
agguauggagaccucuugg

SEQ ID NO: 1934234 - RNA, 19 nt, Artificial Sequence
  Description of Artificial Sequence: Synthetic oligonucleotide
  Sense strand starting at position 203 of SEQ ID NO: 1879824
uggucuggaucuucucuaa

SEQ ID NO: 1934235 - RNA, 19 nt, Artificial Sequence
  Description of Artificial Sequence: Synthetic oligonucleotide
  Antisense strand to SEQ ID NO: 1934234
uuagagaagauccagacca

SEQ ID NO: 1934236 - RNA, 19 nt, Artificial Sequence
  Description of Artificial Sequence: Synthetic oligonucleotide
  Sense strand starting at position 227 of SEQ ID NO: 1879824
cuucuugucucagcuagaa

SEQ ID NO: 1934237 - RNA, 19 nt, Artificial Sequence
  Description of Artificial Sequence: Synthetic oligonucleotide
  Antisense strand to SEQ ID NO: 1934236
uucuagcugagacaagaag

SEQ ID NO: 1934238 - RNA, 19 nt, Artificial Sequence
  Description of Artificial Sequence: Synthetic oligonucleotide
  Sense strand starting at position 529 of SEQ ID NO: 1879824
ucgauuccggccuaaagau

SEQ ID NO: 1934239 - RNA, 19 nt, Artificial Sequence
  Description of Artificial Sequence: Synthetic oligonucleotide
  Antisense strand to SEQ ID NO: 1934238
aucuuuaggccggaaucga

SEQ ID NO: 1934240 - RNA, 19 nt, Artificial Sequence
  Description of Artificial Sequence: Synthetic oligonucleotide
  Sense strand starting at position 733 of SEQ ID NO: 1879824
agagacugcuaauuaguuu

SEQ ID NO: 1934241 - RNA, 19 nt, Artificial Sequence
  Description of Artificial Sequence: Synthetic oligonucleotide
  Antisense strand to SEQ ID NO: 1934240
aaacuaauuagcagucucu

SEQ ID NO: 1934242 - RNA, 19 nt, Artificial Sequence
  Description of Artificial Sequence: Synthetic oligonucleotide
  Sense strand starting at position 740 of SEQ ID NO: 1879824
gcuaauuaguuucuuuaga

SEQ ID NO: 1934243 - RNA, 19 nt, Artificial Sequence
  Description of Artificial Sequence: Synthetic oligonucleotide
  Antisense strand to SEQ ID NO: 1934242
ucuaaagaaacuaauuagc

SEQ ID NO: 1934244 - RNA, 19 nt, Artificial Sequence
  Description of Artificial Sequence: Synthetic oligonucleotide
  Sense strand starting at position 751 of SEQ ID NO: 1879824
ucuuuagaacuugauguau

SEQ ID NO: 1934245 - RNA, 19 nt, Artificial Sequence
  Description of Artificial Sequence: Synthetic oligonucleotide
  Antisense strand to SEQ ID NO: 1934244
auacaucaaguucuaaaga

SEQ ID NO: 1934246 - RNA, 19 nt, Artificial Sequence
  Description of Artificial Sequence: Synthetic oligonucleotide
  Sense strand starting at position 799 of SEQ ID NO: 1879824
ugucgucccauggaggauu

SEQ ID NO: 1934247 - RNA, 19 nt, Artificial Sequence
  Description of Artificial Sequence: Synthetic oligonucleotide
  Antisense strand to SEQ ID NO: 1934246
aauccuccaugggacgaca

SEQ ID NO: 1934248 - RNA, 19 nt, Artificial Sequence
  Description of Artificial Sequence: Synthetic oligonucleotide
  Sense strand starting at position 960 of SEQ ID NO: 1879824
guuggauuguuuccacaaa

SEQ ID NO: 1934249 - RNA, 19 nt, Artificial Sequence
  Description of Artificial Sequence: Synthetic oligonucleotide
  Antisense strand to SEQ ID NO: 1934248
uuuguggaaacaauccaac

SEQ ID NO: 1934250 - RNA, 19 nt, Artificial Sequence
  Description of Artificial Sequence: Synthetic oligonucleotide
  Sense strand starting at position 1362 of SEQ ID NO: 1879824
gaaacaauacucgagcgua

SEQ ID NO: 1934251 - RNA, 19 nt, Artificial Sequence
  Description of Artificial Sequence: Synthetic oligonucleotide
  Antisense strand to SEQ ID NO: 1934250
uacgcucgaguauuguuuc

SEQ ID NO: 1934252 - RNA, 19 nt, Artificial Sequence
  Description of Artificial Sequence: Synthetic oligonucleotide
  Sense strand starting at position 1746 of SEQ ID NO: 1879824
auuacugacugauaaugga

SEQ ID NO: 1934253 - RNA, 19 nt, Artificial Sequence
  Description of Artificial Sequence: Synthetic oligonucleotide
  Antisense strand to SEQ ID NO: 1934252
uccauuaucagucaguaau

SEQ ID NO: 1934254 - RNA, 19 nt, Artificial Sequence
  Description of Artificial Sequence: Synthetic oligonucleotide
  Sense strand starting at position 1754 of SEQ ID NO: 1879824
cugauaauggaaugagugu

SEQ ID NO: 1934255 - RNA, 19 nt, Artificial Sequence
  Description of Artificial Sequence: Synthetic oligonucleotide
  Antisense strand to SEQ ID NO: 1934254
acacucauuccauuaucag

SEQ ID NO: 1934256 - RNA, 19 nt, Artificial Sequence
  Description of Artificial Sequence: Synthetic oligonucleotide
  Sense strand starting at position 1794 of SEQ ID NO: 1879824
agacgcucuuccucuugaa

SEQ ID NO: 1934257 - RNA, 19 nt, Artificial Sequence
  Description of Artificial Sequence: Synthetic oligonucleotide
  Antisense strand to SEQ ID NO: 1934256
uucaagaggaagagcgucu

SEQ ID NO: 1934258 - RNA, 19 nt, Artificial Sequence
  Description of Artificial Sequence: Synthetic oligonucleotide
  Sense strand starting at position 1857 of SEQ ID NO: 1879824
uucuaacguucugugauga

SEQ ID NO: 1934259 - RNA, 19 nt, Artificial Sequence
  Description of Artificial Sequence: Synthetic oligonucleotide
  Antisense strand to SEQ ID NO: 1934258
ucaucacagaacguuagaa

SEQ ID NO: 1934260 - RNA, 19 nt, Artificial Sequence
  Description of Artificial Sequence: Synthetic oligonucleotide
  Sense strand starting at position 1998 of SEQ ID NO: 1879824
aucauuauacugcaguauu

SEQ ID NO: 1934261 - RNA, 19 nt, Artificial Sequence
  Description of Artificial Sequence: Synthetic oligonucleotide
  Antisense strand to SEQ ID NO: 1934260
aauacugcaguauaaugau

SEQ ID NO: 1934262 - RNA, 19 nt, Artificial Sequence
  Description of Artificial Sequence: Synthetic oligonucleotide
  Sense strand starting at position 2047 of SEQ ID NO: 1879824
agcuauguaaaccguagaa

SEQ ID NO: 1934263 - RNA, 19 nt, Artificial Sequence
  Description of Artificial Sequence: Synthetic oligonucleotide
  Antisense strand to SEQ ID NO: 1934262
uucuacgguuuacauagcu

SEQ ID NO: 1934264 - RNA, 19 nt, Artificial Sequence
  Description of Artificial Sequence: Synthetic oligonucleotide
  Sense strand starting at position 2110 of SEQ ID NO: 1879824
ggucucaguacuggacaga

SEQ ID NO: 1934265 - RNA, 19 nt, Artificial Sequence
  Description of Artificial Sequence: Synthetic oligonucleotide
  Antisense strand to SEQ ID NO: 1934264
ucuguccaguacugagacc

SEQ ID NO: 1934266 - RNA, 19 nt, Artificial Sequence
  Description of Artificial Sequence: Synthetic oligonucleotide
  Sense strand starting at position 2153 of SEQ ID NO: 1879824
agguccauuuggcagagau

SEQ ID NO: 1934267 - RNA, 19 nt, Artificial Sequence
  Description of Artificial Sequence: Synthetic oligonucleotide
  Antisense strand to SEQ ID NO: 1934266
aucucugccaaauggaccu

SEQ ID NO: 1934268 - RNA, 19 nt, Artificial Sequence
  Description of Artificial Sequence: Synthetic oligonucleotide
  Sense strand starting at position 2295 of SEQ ID NO: 1879824
uuagaaugcccucgggacu

SEQ ID NO: 1934269 - RNA, 19 nt, Artificial Sequence
  Description of Artificial Sequence: Synthetic oligonucleotide
  Antisense strand to SEQ ID NO: 1934268
agucccgagggcauucuaa

SEQ ID NO: 1934270 - RNA, 19 nt, Artificial Sequence
  Description of Artificial Sequence: Synthetic oligonucleotide
  Sense strand starting at position 2340 of SEQ ID NO: 1879824
guauacacucacuguugau

SEQ ID NO: 1934271 - RNA, 19 nt, Artificial Sequence
  Description of Artificial Sequence: Synthetic oligonucleotide
  Antisense strand to SEQ ID NO: 1934270
aucaacagugaguguauac

SEQ ID NO: 1934272 - RNA, 19 nt, Artificial Sequence
  Description of Artificial Sequence: Synthetic oligonucleotide
  Sense strand starting at position 2366 of SEQ ID NO: 1879824
agucucguggcuuacaaua

SEQ ID NO: 1934273 - RNA, 19 nt, Artificial Sequence
  Description of Artificial Sequence: Synthetic oligonucleotide
  Antisense strand to SEQ ID NO: 1934272
uauuguaagccacgagacu

SEQ ID NO: 1934274 - RNA, 19 nt, Artificial Sequence
  Description of Artificial Sequence: Synthetic oligonucleotide
  Sense strand starting at position 2416 of SEQ ID NO: 1879824
aguuccauccuagacaucu

SEQ ID NO: 1934275 - RNA, 19 nt, Artificial Sequence
  Description of Artificial Sequence: Synthetic oligonucleotide
  Antisense strand to SEQ ID NO: 1934274
agaugucuaggauggaacu

SEQ ID NO: 1934276 - RNA, 19 nt, Artificial Sequence
  Description of Artificial Sequence: Synthetic oligonucleotide
  Sense strand starting at position 2634 of SEQ ID NO: 1879824
caggaaauccuguggguuc

SEQ ID NO: 1934277 - RNA, 19 nt, Artificial Sequence
  Description of Artificial Sequence: Synthetic oligonucleotide
  Antisense strand to SEQ ID NO: 1934276
gaacccacaggauuuccug

SEQ ID NO: 1934278 - RNA, 19 nt, Artificial Sequence
  Description of Artificial Sequence: Synthetic oligonucleotide
  Sense strand starting at position 2636 of SEQ ID NO: 1879824
ggaaauccuguggguucua

SEQ ID NO: 1934279 - RNA, 19 nt, Artificial Sequence
  Description of Artificial Sequence: Synthetic oligonucleotide
  Antisense strand to SEQ ID NO: 1934278
uagaacccacaggauuucc

SEQ ID NO: 1934280 - RNA, 19 nt, Artificial Sequence
  Description of Artificial Sequence: Synthetic oligonucleotide
  Sense strand starting at position 2647 of SEQ ID NO: 1879824
ggguucuaccuuuaaauua

SEQ ID NO: 1934281 - RNA, 19 nt, Artificial Sequence
  Description of Artificial Sequence: Synthetic oligonucleotide
  Antisense strand to SEQ ID NO: 1934280
uaauuuaaagguagaaccc

SEQ ID NO: 1934282 - RNA, 19 nt, Artificial Sequence
  Description of Artificial Sequence: Synthetic oligonucleotide
  Sense strand starting at position 2668 of SEQ ID NO: 1879824
gauagucccugacuuggau

SEQ ID NO: 1934283 - RNA, 19 nt, Artificial Sequence
  Description of Artificial Sequence: Synthetic oligonucleotide
  Antisense strand to SEQ ID NO: 1934282
auccaagucagggacuauc

SEQ ID NO: 1934284 - RNA, 19 nt, Artificial Sequence
  Description of Artificial Sequence: Synthetic oligonucleotide
  Sense strand starting at position 2805 of SEQ ID NO: 1879824
ccaacugucggauaaguug

SEQ ID NO: 1934285 - RNA, 19 nt, Artificial Sequence
  Description of Artificial Sequence: Synthetic oligonucleotide
  Antisense strand to SEQ ID NO: 1934284
caacuuauccgacaguugg

SEQ ID NO: 1934286 - RNA, 19 nt, Artificial Sequence
  Description of Artificial Sequence: Synthetic oligonucleotide
  Sense strand starting at position 2814 of SEQ ID NO: 1879824
ggauaaguugucugagcau

SEQ ID NO: 1934287 - RNA, 19 nt, Artificial Sequence
  Description of Artificial Sequence: Synthetic oligonucleotide
  Antisense strand to SEQ ID NO: 1934286
augcucagacaacuuaucc

SEQ ID NO: 1934288 - RNA, 19 nt, Artificial Sequence
  Description of Artificial Sequence: Synthetic oligonucleotide
  Sense strand starting at position 2904 of SEQ ID NO: 1879824
ucaacauacgauggguuua

SEQ ID NO: 1934289 - RNA, 19 nt, Artificial Sequence
  Description of Artificial Sequence: Synthetic oligonucleotide
  Antisense strand to SEQ ID NO: 1934288
uaaacccaucguauguuga

SEQ ID NO: 1934290 - RNA, 19 nt, Artificial Sequence
  Description of Artificial Sequence: Synthetic oligonucleotide
  Sense strand starting at position 2995 of SEQ ID NO: 1879824
augcucuaccuuggaauaa

SEQ ID NO: 1934291 - RNA, 19 nt, Artificial Sequence
  Description of Artificial Sequence: Synthetic oligonucleotide
  Antisense strand to SEQ ID NO: 1934290
uuauuccaagguagagcau

SEQ ID NO: 1934292 - RNA, 19 nt, Artificial Sequence
  Description of Artificial Sequence: Synthetic oligonucleotide
  Sense strand starting at position 3204 of SEQ ID NO: 1879824
gccaucagauggucuacaa

SEQ ID NO: 1934293 - RNA, 19 nt, Artificial Sequence
  Description of Artificial Sequence: Synthetic oligonucleotide
  Antisense strand to SEQ ID NO: 1934292
uuguagaccaucugauggc

SEQ ID NO: 1934294 - RNA, 19 nt, Artificial Sequence
  Description of Artificial Sequence: Synthetic oligonucleotide
  Sense strand starting at position 3353 of SEQ ID NO: 1879824
ggaugcucuuauccucaga

SEQ ID NO: 1934295 - RNA, 19 nt, Artificial Sequence
  Description of Artificial Sequence: Synthetic oligonucleotide
  Antisense strand to SEQ ID NO: 1934294
ucugaggauaagagcaucc

SEQ ID NO: 1934296 - RNA, 19 nt, Artificial Sequence
  Description of Artificial Sequence: Synthetic oligonucleotide
  Sense strand starting at position 3355 of SEQ ID NO: 1879824
augcucuuauccucagaug

SEQ ID NO: 1934297 - RNA, 19 nt, Artificial Sequence
  Description of Artificial Sequence: Synthetic oligonucleotide
  Antisense strand to SEQ ID NO: 1934296
caucugaggauaagagcau

SEQ ID NO: 1934298 - RNA, 19 nt, Artificial Sequence
  Description of Artificial Sequence: Synthetic oligonucleotide
  Sense strand starting at position 3370 of SEQ ID NO: 1879824
gaugcuggcuugguuaaca

SEQ ID NO: 1934299 - RNA, 19 nt, Artificial Sequence
  Description of Artificial Sequence: Synthetic oligonucleotide
  Antisense strand to SEQ ID NO: 1934298
uguuaaccaagccagcauc

SEQ ID NO: 1934300 - RNA, 19 nt, Artificial Sequence
  Description of Artificial Sequence: Synthetic oligonucleotide
  Sense strand starting at position 3397 of SEQ ID NO: 1879824
uccuccaaguguuuaauua

SEQ ID NO: 1934301 - RNA, 19 nt, Artificial Sequence
  Description of Artificial Sequence: Synthetic oligonucleotide
  Antisense strand to SEQ ID NO: 1934300
uaauuaaacacuuggagga

SEQ ID NO: 1934302 - RNA, 19 nt, Artificial Sequence
  Description of Artificial Sequence: Synthetic oligonucleotide
  Sense strand starting at position 3589 of SEQ ID NO: 1879824
uuuagaagauacguuccau

SEQ ID NO: 1934303 - RNA, 19 nt, Artificial Sequence
  Description of Artificial Sequence: Synthetic oligonucleotide
  Antisense strand to SEQ ID NO: 1934302
auggaacguaucuucuaaa

SEQ ID NO: 1934304 - RNA, 19 nt, Artificial Sequence
  Description of Artificial Sequence: Synthetic oligonucleotide
  Sense strand starting at position 3630 of SEQ ID NO: 1879824
acugauguaucaucucaag

SEQ ID NO: 1934305 - RNA, 19 nt, Artificial Sequence
  Description of Artificial Sequence: Synthetic oligonucleotide
  Antisense strand to SEQ ID NO: 1934304
cuugagaugauacaucagu

SEQ ID NO: 1934306 - RNA, 19 nt, Artificial Sequence
  Description of Artificial Sequence: Synthetic oligonucleotide
  Sense strand starting at position 3652 of SEQ ID NO: 1879824
cuagaauagugccuggcua

SEQ ID NO: 1934307 - RNA, 19 nt, Artificial Sequence
  Description of Artificial Sequence: Synthetic oligonucleotide
  Antisense strand to SEQ ID NO: 1934306
uagccaggcacuauucuag

SEQ ID NO: 1934308 - RNA, 19 nt, Artificial Sequence
  Description of Artificial Sequence: Synthetic oligonucleotide
  Sense strand starting at position 3653 of SEQ ID NO: 1879824
uagaauagugccuggcuaa

SEQ ID NO: 1934309 - RNA, 19 nt, Artificial Sequence
  Description of Artificial Sequence: Synthetic oligonucleotide
  Antisense strand to SEQ ID NO: 1934308
uuagccaggcacuauucua

SEQ ID NO: 1934310 - RNA, 19 nt, Artificial Sequence
  Description of Artificial Sequence: Synthetic oligonucleotide
  Sense strand starting at position 3654 of SEQ ID NO: 1879824
agaauagugccuggcuaau

SEQ ID NO: 1934311 - RNA, 19 nt, Artificial Sequence
  Description of Artificial Sequence: Synthetic oligonucleotide
  Antisense strand to SEQ ID NO: 1934310
auuagccaggcacuauucu

SEQ ID NO: 1934312 - RNA, 19 nt, Artificial Sequence
  Description of Artificial Sequence: Synthetic oligonucleotide
  Sense strand starting at position 85 of SEQ ID NO: 1879825
acaauccuucugggacuuu

SEQ ID NO: 1934313 - RNA, 19 nt, Artificial Sequence
  Description of Artificial Sequence: Synthetic oligonucleotide
  Antisense strand to SEQ ID NO: 1934312
aaagucccagaaggauugu

SEQ ID NO: 1934314 - RNA, 19 nt, Artificial Sequence
  Description of Artificial Sequence: Synthetic oligonucleotide
  Sense strand starting at position 198 of SEQ ID NO: 1879825
auacaacguucucuugaau

SEQ ID NO: 1934315 - RNA, 19 nt, Artificial Sequence
  Description of Artificial Sequence: Synthetic oligonucleotide
  Antisense strand to SEQ ID NO: 1934314
auucaagagaacguuguau

SEQ ID NO: 1934316 - RNA, 19 nt, Artificial Sequence
  Description of Artificial Sequence: Synthetic oligonucleotide
  Sense strand starting at position 458 of SEQ ID NO: 1879825
uguaucauauguucuacau

SEQ ID NO: 1934317 - RNA, 19 nt, Artificial Sequence
  Description of Artificial Sequence: Synthetic oligonucleotide
  Antisense strand to SEQ ID NO: 1934316
auguagaacauaugauaca

SEQ ID NO: 1934318 - RNA, 19 nt, Artificial Sequence
  Description of Artificial Sequence: Synthetic oligonucleotide
  Sense strand starting at position 477 of SEQ ID NO: 1879825
ucccuccuguuaucagaga

SEQ ID NO: 1934319 - RNA, 19 nt, Artificial Sequence
  Description of Artificial Sequence: Synthetic oligonucleotide
  Antisense strand to SEQ ID NO: 1934318
ucucugauaacaggaggga

SEQ ID NO: 1934320 - RNA, 19 nt, Artificial Sequence
  Description of Artificial Sequence: Synthetic oligonucleotide
  Sense strand starting at position 491 of SEQ ID NO: 1879825
agagauccacucuguccaa

SEQ ID NO: 1934321 - RNA, 19 nt, Artificial Sequence
  Description of Artificial Sequence: Synthetic oligonucleotide
  Antisense strand to SEQ ID NO: 1934320
uuggacagaguggaucucu

SEQ ID NO: 1934322 - RNA, 19 nt, Artificial Sequence
  Description of Artificial Sequence: Synthetic oligonucleotide
  Sense strand starting at position 670 of SEQ ID NO: 1879825
ugggaaauuuagcacccaa

SEQ ID NO: 1934323 - RNA, 19 nt, Artificial Sequence
  Description of Artificial Sequence: Synthetic oligonucleotide
  Antisense strand to SEQ ID NO: 1934322
uugggugcuaaauuuccca

SEQ ID NO: 1934324 - RNA, 19 nt, Artificial Sequence
  Description of Artificial Sequence: Synthetic oligonucleotide
  Sense strand starting at position 792 of SEQ ID NO: 1879825
uuggauauaccugguuaaa

SEQ ID NO: 1934325 - RNA, 19 nt, Artificial Sequence
  Description of Artificial Sequence: Synthetic oligonucleotide
  Antisense strand to SEQ ID NO: 1934324
uuuaaccagguauauccaa

SEQ ID NO: 1934326 - RNA, 19 nt, Artificial Sequence
  Description of Artificial Sequence: Synthetic oligonucleotide
  Sense strand starting at position 794 of SEQ ID NO: 1879825
ggauauaccugguuaaaua

SEQ ID NO: 1934327 - RNA, 19 nt, Artificial Sequence
  Description of Artificial Sequence: Synthetic oligonucleotide
  Antisense strand to SEQ ID NO: 1934326
uauuuaaccagguauaucc

SEQ ID NO: 1934328 - RNA, 19 nt, Artificial Sequence
  Description of Artificial Sequence: Synthetic oligonucleotide
  Sense strand starting at position 926 of SEQ ID NO: 1879825
cagauuaacuguccagguu

SEQ ID NO: 1934329 - RNA, 19 nt, Artificial Sequence
  Description of Artificial Sequence: Synthetic oligonucleotide
  Antisense strand to SEQ ID NO: 1934328
aaccuggacaguuaaucug

SEQ ID NO: 1934330 - RNA, 19 nt, Artificial Sequence
  Description of Artificial Sequence: Synthetic oligonucleotide
  Sense strand starting at position 1148 of SEQ ID NO: 1879825
aagguacagcucuagcaau

SEQ ID NO: 1934331 - RNA, 19 nt, Artificial Sequence
  Description of Artificial Sequence: Synthetic oligonucleotide
  Antisense strand to SEQ ID NO: 1934330
auugcuagagcuguaccuu

SEQ ID NO: 1934332 - RNA, 19 nt, Artificial Sequence
  Description of Artificial Sequence: Synthetic oligonucleotide
  Sense strand starting at position 1390 of SEQ ID NO: 1879825
ucagaacagcugugauuaa

SEQ ID NO: 1934333 - RNA, 19 nt, Artificial Sequence
  Description of Artificial Sequence: Synthetic oligonucleotide
  Antisense strand to SEQ ID NO: 1934332
uuaaucacagcuguucuga

SEQ ID NO: 1934334 - RNA, 19 nt, Artificial Sequence
  Description of Artificial Sequence: Synthetic oligonucleotide
  Sense strand starting at position 1470 of SEQ ID NO: 1879825
uaucaacuuugagcagagu

SEQ ID NO: 1934335 - RNA, 19 nt, Artificial Sequence
  Description of Artificial Sequence: Synthetic oligonucleotide
  Antisense strand to SEQ ID NO: 1934334
acucugcucaaaguugaua

SEQ ID NO: 1934336 - RNA, 19 nt, Artificial Sequence
  Description of Artificial Sequence: Synthetic oligonucleotide
  Sense strand starting at position 1604 of SEQ ID NO: 1879825
aucucuuaacguuacaagu

SEQ ID NO: 1934337 - RNA, 19 nt, Artificial Sequence
  Description of Artificial Sequence: Synthetic oligonucleotide
  Antisense strand to SEQ ID NO: 1934336
acuuguaacguuaagagau

SEQ ID NO: 1934338 - RNA, 19 nt, Artificial Sequence
  Description of Artificial Sequence: Synthetic oligonucleotide
  Sense strand starting at position 1629 of SEQ ID NO: 1879825
gagcucaauccucggaacu

SEQ ID NO: 1934339 - RNA, 19 nt, Artificial Sequence
  Description of Artificial Sequence: Synthetic oligonucleotide
  Antisense strand to SEQ ID NO: 1934338
aguuccgaggauugagcuc

SEQ ID NO: 1934340 - RNA, 19 nt, Artificial Sequence
  Description of Artificial Sequence: Synthetic oligonucleotide
  Sense strand starting at position 1709 of SEQ ID NO: 1879825
uagucauaugcuuacgaaa

SEQ ID NO: 1934341 - RNA, 19 nt, Artificial Sequence
  Description of Artificial Sequence: Synthetic oligonucleotide
  Antisense strand to SEQ ID NO: 1934340
uuucguaagcauaugacua

SEQ ID NO: 1934342 - RNA, 19 nt, Artificial Sequence
  Description of Artificial Sequence: Synthetic oligonucleotide
  Sense strand starting at position 1845 of SEQ ID NO: 1879825
ggacccguggguuaugaga

SEQ ID NO: 1934343 - RNA, 19 nt, Artificial Sequence
  Description of Artificial Sequence: Synthetic oligonucleotide
  Antisense strand to SEQ ID NO: 1934342
ucucauaacccacgggucc

SEQ ID NO: 1934344 - RNA, 19 nt, Artificial Sequence
  Description of Artificial Sequence: Synthetic oligonucleotide
  Sense strand starting at position 1978 of SEQ ID NO: 1879825
gcugaaacuuuauugacac

SEQ ID NO: 1934345 - RNA, 19 nt, Artificial Sequence
  Description of Artificial Sequence: Synthetic oligonucleotide
  Antisense strand to SEQ ID NO: 1934344
gugucaauaaaguuucagc

SEQ ID NO: 1934346 - RNA, 19 nt, Artificial Sequence
  Description of Artificial Sequence: Synthetic oligonucleotide
  Sense strand starting at position 2100 of SEQ ID NO: 1879825
aucggagcucucgcgauau

SEQ ID NO: 1934347 - RNA, 19 nt, Artificial Sequence
  Description of Artificial Sequence: Synthetic oligonucleotide
  Antisense strand to SEQ ID NO: 1934346
auaucgcgagagcuccgau

SEQ ID NO: 1934348 - RNA, 19 nt, Artificial Sequence
  Description of Artificial Sequence: Synthetic oligonucleotide
  Sense strand starting at position 2102 of SEQ ID NO: 1879825
cggagcucucgcgauauuu

SEQ ID NO: 1934349 - RNA, 19 nt, Artificial Sequence
  Description of Artificial Sequence: Synthetic oligonucleotide
  Antisense strand to SEQ ID NO: 1934348
aaauaucgcgagagcuccg

SEQ ID NO: 1934350 - RNA, 19 nt, Artificial Sequence
  Description of Artificial Sequence: Synthetic oligonucleotide
  Sense strand starting at position 2247 of SEQ ID NO: 1879825
cuauaagcgggucaugaaa

SEQ ID NO: 1934351 - RNA, 19 nt, Artificial Sequence
  Description of Artificial Sequence: Synthetic oligonucleotide
  Antisense strand to SEQ ID NO: 1934350
uuucaugacccgcuuauag

SEQ ID NO: 1934352 - RNA, 19 nt, Artificial Sequence
  Description of Artificial Sequence: Synthetic oligonucleotide
  Sense strand starting at position 2258 of SEQ ID NO: 1879825
ucaugaaauaggcgagcua

SEQ ID NO: 1934353 - RNA, 19 nt, Artificial Sequence
  Description of Artificial Sequence: Synthetic oligonucleotide
  Antisense strand to SEQ ID NO: 1934352
uagcucgccuauuucauga

SEQ ID NO: 1934354 - RNA, 19 nt, Artificial Sequence
  Description of Artificial Sequence: Synthetic oligonucleotide
  Sense strand starting at position 2362 of SEQ ID NO: 1879825
accuuauuggugugaccag

SEQ ID NO: 1934355 - RNA, 19 nt, Artificial Sequence
  Description of Artificial Sequence: Synthetic oligonucleotide
  Antisense strand to SEQ ID NO: 1934354
cuggucacaccaauaaggu

SEQ ID NO: 1934356 - RNA, 19 nt, Artificial Sequence
  Description of Artificial Sequence: Synthetic oligonucleotide
  Sense strand starting at position 2476 of SEQ ID NO: 1879825
ccuggaaaguggucagaaa

SEQ ID NO: 1934357 - RNA, 19 nt, Artificial Sequence
  Description of Artificial Sequence: Synthetic oligonucleotide
  Antisense strand to SEQ ID NO: 1934356
uuucugaccacuuuccagg

SEQ ID NO: 1934358 - RNA, 19 nt, Artificial Sequence
  Description of Artificial Sequence: Synthetic oligonucleotide
  Sense strand starting at position 2500 of SEQ ID NO: 1879825
agacuuaagccacgggagu

SEQ ID NO: 1934359 - RNA, 19 nt, Artificial Sequence
  Description of Artificial Sequence: Synthetic oligonucleotide
  Antisense strand to SEQ ID NO: 1934358
acucccguggcuuaagucu

SEQ ID NO: 1934360 - RNA, 19 nt, Artificial Sequence
  Description of Artificial Sequence: Synthetic oligonucleotide
  Sense strand starting at position 2502 of SEQ ID NO: 1879825
acuuaagccacgggaguua

SEQ ID NO: 1934361 - RNA, 19 nt, Artificial Sequence
  Description of Artificial Sequence: Synthetic oligonucleotide
  Antisense strand to SEQ ID NO: 1934360
uaacucccguggcuuaagu

SEQ ID NO: 1934362 - RNA, 19 nt, Artificial Sequence
  Description of Artificial Sequence: Synthetic oligonucleotide
  Sense strand starting at position 2989 of SEQ ID NO: 1879825
gaugaacagucgguuggaa

SEQ ID NO: 1934363 - RNA, 19 nt, Artificial Sequence
  Description of Artificial Sequence: Synthetic oligonucleotide
  Antisense strand to SEQ ID NO: 1934362
uuccaaccgacuguucauc

SEQ ID NO: 1934364 - RNA, 19 nt, Artificial Sequence
  Description of Artificial Sequence: Synthetic oligonucleotide
  Sense strand starting at position 2991 of SEQ ID NO: 1879825
ugaacagucgguuggaaga

SEQ ID NO: 1934365 - RNA, 19 nt, Artificial Sequence
  Description of Artificial Sequence: Synthetic oligonucleotide
  Antisense strand to SEQ ID NO: 1934364
ucuuccaaccgacuguuca

SEQ ID NO: 1934366 - RNA, 19 nt, Artificial Sequence
  Description of Artificial Sequence: Synthetic oligonucleotide
  Sense strand starting at position 2994 of SEQ ID NO: 1879825
acagucgguuggaagagau

SEQ ID NO: 1934367 - RNA, 19 nt, Artificial Sequence
  Description of Artificial Sequence: Synthetic oligonucleotide
  Antisense strand to SEQ ID NO: 1934366
aucucuuccaaccgacugu

SEQ ID NO: 1934368 - RNA, 19 nt, Artificial Sequence
  Description of Artificial Sequence: Synthetic oligonucleotide
  Sense strand starting at position 3069 of SEQ ID NO: 1879825
ggccaucuuccagaaaccu

SEQ ID NO: 1934369 - RNA, 19 nt, Artificial Sequence
  Description of Artificial Sequence: Synthetic oligonucleotide
  Antisense strand to SEQ ID NO: 1934368
agguuucuggaagauggcc

SEQ ID NO: 1934370 - RNA, 19 nt, Artificial Sequence
  Description of Artificial Sequence: Synthetic oligonucleotide
  Sense strand starting at position 3114 of SEQ ID NO: 1879825
gugaaagcaucuuuaaaca

SEQ ID NO: 1934371 - RNA, 19 nt, Artificial Sequence
  Description of Artificial Sequence: Synthetic oligonucleotide
  Antisense strand to SEQ ID NO: 1934370
uguuuaaagaugcuuucac

SEQ ID NO: 1934372 - RNA, 19 nt, Artificial Sequence
  Description of Artificial Sequence: Synthetic oligonucleotide
  Sense strand starting at position 3220 of SEQ ID NO: 1879825
ggcauuaaguaccuuuaca

SEQ ID NO: 1934373 - RNA, 19 nt, Artificial Sequence
  Description of Artificial Sequence: Synthetic oligonucleotide
  Antisense strand to SEQ ID NO: 1934372
uguaaagguacuuaaugcc

SEQ ID NO: 1934374 - RNA, 19 nt, Artificial Sequence
  Description of Artificial Sequence: Synthetic oligonucleotide
  Sense strand starting at position 3271 of SEQ ID NO: 1879825
agaacuuugugucuuccaa

SEQ ID NO: 1934375 - RNA, 19 nt, Artificial Sequence
  Description of Artificial Sequence: Synthetic oligonucleotide
  Antisense strand to SEQ ID NO: 1934374
uuggaagacacaaaguucu

SEQ ID NO: 1934376 - RNA, 19 nt, Artificial Sequence
  Description of Artificial Sequence: Synthetic oligonucleotide
  Sense strand starting at position 3396 of SEQ ID NO: 1879825
uagcucaucuaaguggaau

SEQ ID NO: 1934377 - RNA, 19 nt, Artificial Sequence
  Description of Artificial Sequence: Synthetic oligonucleotide
  Antisense strand to SEQ ID NO: 1934376
auuccacuuagaugagcua

SEQ ID NO: 1934378 - RNA, 19 nt, Artificial Sequence
  Description of Artificial Sequence: Synthetic oligonucleotide
  Sense strand starting at position 3452 of SEQ ID NO: 1879825
uuauaacauccucaggguu

SEQ ID NO: 1934379 - RNA, 19 nt, Artificial Sequence
  Description of Artificial Sequence: Synthetic oligonucleotide
  Antisense strand to SEQ ID NO: 1934378
aacccugaggauguuauaa

SEQ ID NO: 1934380 - RNA, 19 nt, Artificial Sequence
  Description of Artificial Sequence: Synthetic oligonucleotide
  Sense strand starting at position 3697 of SEQ ID NO: 1879825
aaccuaauggugugaguga

SEQ ID NO: 1934381 - RNA, 19 nt, Artificial Sequence
  Description of Artificial Sequence: Synthetic oligonucleotide
  Antisense strand to SEQ ID NO: 1934380
ucacucacaccauuagguu

SEQ ID NO: 1934382 - RNA, 19 nt, Artificial Sequence
  Description of Artificial Sequence: Synthetic oligonucleotide
  Sense strand starting at position 3745 of SEQ ID NO: 1879825
acuccagggucuucuuuaa

SEQ ID NO: 1934383 - RNA, 19 nt, Artificial Sequence
  Description of Artificial Sequence: Synthetic oligonucleotide
  Antisense strand to SEQ ID NO: 1934382
uuaaagaagacccuggagu

SEQ ID NO: 1934384 - RNA, 19 nt, Artificial Sequence
  Description of Artificial Sequence: Synthetic oligonucleotide
  Sense strand starting at position 3752 of SEQ ID NO: 1879825
ggucuucuuuaauuaauug

SEQ ID NO: 1934385 - RNA, 19 nt, Artificial Sequence
  Description of Artificial Sequence: Synthetic oligonucleotide
  Antisense strand to SEQ ID NO: 1934384
caauuaauuaaagaagacc

SEQ ID NO: 1934386 - RNA, 19 nt, Artificial Sequence
  Description of Artificial Sequence: Synthetic oligonucleotide
  Sense strand starting at position 3857 of SEQ ID NO: 1879825
uaaagaagucucgguuuac

SEQ ID NO: 1934387 - RNA, 19 nt, Artificial Sequence
  Description of Artificial Sequence: Synthetic oligonucleotide
  Antisense strand to SEQ ID NO: 1934386
guaaaccgagacuucuuua

SEQ ID NO: 1934388 - RNA, 19 nt, Artificial Sequence
  Description of Artificial Sequence: Synthetic oligonucleotide
  Sense strand starting at position 3941 of SEQ ID NO: 1879825
cuuuacuguccuggaauau

SEQ ID NO: 1934389 - RNA, 19 nt, Artificial Sequence
  Description of Artificial Sequence: Synthetic oligonucleotide
  Antisense strand to SEQ ID NO: 1934388
auauuccaggacaguaaag

SEQ ID NO: 1934390 - RNA, 19 nt, Artificial Sequence
  Description of Artificial Sequence: Synthetic oligonucleotide
  Sense strand starting at position 3942 of SEQ ID NO: 1879825
uuuacuguccuggaauauu

SEQ ID NO: 1934391 - RNA, 19 nt, Artificial Sequence
  Description of Artificial Sequence: Synthetic oligonucleotide
  Antisense strand to SEQ ID NO: 1934390
aauauuccaggacaguaaa

SEQ ID NO: 1934392 - RNA, 19 nt, Artificial Sequence
  Description of Artificial Sequence: Synthetic oligonucleotide
  Sense strand starting at position 601 of SEQ ID NO: 1879826
ggcccagagcaucacuaua

SEQ ID NO: 1934393 - RNA, 19 nt, Artificial Sequence
  Description of Artificial Sequence: Synthetic oligonucleotide
  Antisense strand to SEQ ID NO: 1934392
uauagugaugcucugggcc

SEQ ID NO: 1934394 - RNA, 19 nt, Artificial Sequence
  Description of Artificial Sequence: Synthetic oligonucleotide
  Sense strand starting at position 603 of SEQ ID NO: 1879826
cccagagcaucacuauagu

SEQ ID NO: 1934395 - RNA, 19 nt, Artificial Sequence
  Description of Artificial Sequence: Synthetic oligonucleotide
  Antisense strand to SEQ ID NO: 1934394
acuauagugaugcucuggg

SEQ ID NO: 1934396 - RNA, 19 nt, Artificial Sequence
  Description of Artificial Sequence: Synthetic oligonucleotide
  Sense strand starting at position 776 of SEQ ID NO: 1879826
guccguauguagucuggga

SEQ ID NO: 1934397 - RNA, 19 nt, Artificial Sequence
  Description of Artificial Sequence: Synthetic oligonucleotide
  Antisense strand to SEQ ID NO: 1934396
ucccagacuacauacggac

SEQ ID NO: 1934398 - RNA, 19 nt, Artificial Sequence
  Description of Artificial Sequence: Synthetic oligonucleotide
  Sense strand starting at position 780 of SEQ ID NO: 1879826
guauguagucugggagcaa

SEQ ID NO: 1934399 - RNA, 19 nt, Artificial Sequence
  Description of Artificial Sequence: Synthetic oligonucleotide
  Antisense strand to SEQ ID NO: 1934398
uugcucccagacuacauac

SEQ ID NO: 1934400 - RNA, 19 nt, Artificial Sequence
  Description of Artificial Sequence: Synthetic oligonucleotide
  Sense strand starting at position 1031 of SEQ ID NO: 1879826
agucuuaucuaugcccagu

SEQ ID NO: 1934401 - RNA, 19 nt, Artificial Sequence
  Description of Artificial Sequence: Synthetic oligonucleotide
  Antisense strand to SEQ ID NO: 1934400
acugggcauagauaagacu

SEQ ID NO: 1934402 - RNA, 19 nt, Artificial Sequence
  Description of Artificial Sequence: Synthetic oligonucleotide
  Sense strand starting at position 1233 of SEQ ID NO: 1879826
gcauacaugucaguaaugu

SEQ ID NO: 1934403 - RNA, 19 nt, Artificial Sequence
  Description of Artificial Sequence: Synthetic oligonucleotide
  Antisense strand to SEQ ID NO: 1934402
acauuacugacauguaugc

SEQ ID NO: 1934404 - RNA, 19 nt, Artificial Sequence
  Description of Artificial Sequence: Synthetic oligonucleotide
  Sense strand starting at position 1234 of SEQ ID NO: 1879826
cauacaugucaguaaugug

SEQ ID NO: 1934405 - RNA, 19 nt, Artificial Sequence
  Description of Artificial Sequence: Synthetic oligonucleotide
  Antisense strand to SEQ ID NO: 1934404
cacauuacugacauguaug

SEQ ID NO: 1934406 - RNA, 19 nt, Artificial Sequence
  Description of Artificial Sequence: Synthetic oligonucleotide
  Sense strand starting at position 1388 of SEQ ID NO: 1879826
ggcccagacuugguaguua

SEQ ID NO: 1934407 - RNA, 19 nt, Artificial Sequence
  Description of Artificial Sequence: Synthetic oligonucleotide
  Antisense strand to SEQ ID NO: 1934406
uaacuaccaagucugggcc

SEQ ID NO: 1934408 - RNA, 19 nt, Artificial Sequence
  Description of Artificial Sequence: Synthetic oligonucleotide
  Sense strand starting at position 1439 of SEQ ID NO: 1879826
cgggcucagaucuaacaca

SEQ ID NO: 1934409 - RNA, 19 nt, Artificial Sequence
  Description of Artificial Sequence: Synthetic oligonucleotide
  Antisense strand to SEQ ID NO: 1934408
uguguuagaucugagcccg

SEQ ID NO: 1934410 - RNA, 19 nt, Artificial Sequence
  Description of Artificial Sequence: Synthetic oligonucleotide
  Sense strand starting at position 1600 of SEQ ID NO: 1879826
aaaggcauacgcuagguua

SEQ ID NO: 1934411 - RNA, 19 nt, Artificial Sequence
  Description of Artificial Sequence: Synthetic oligonucleotide
  Antisense strand to SEQ ID NO: 1934410
uaaccuagcguaugccuuu

SEQ ID NO: 1934412 - RNA, 19 nt, Artificial Sequence
  Description of Artificial Sequence: Synthetic oligonucleotide
  Sense strand starting at position 1602 of SEQ ID NO: 1879826
aggcauacgcuagguuaga

SEQ ID NO: 1934413 - RNA, 19 nt, Artificial Sequence
  Description of Artificial Sequence: Synthetic oligonucleotide
  Antisense strand to SEQ ID NO: 1934412
ucuaaccuagcguaugccu

SEQ ID NO: 1934414 - RNA, 19 nt, Artificial Sequence
  Description of Artificial Sequence: Synthetic oligonucleotide
  Sense strand starting at position 1665 of SEQ ID NO: 1879826
gcaucugugugguccuaac

SEQ ID NO: 1934415 - RNA, 19 nt, Artificial Sequence
  Description of Artificial Sequence: Synthetic oligonucleotide
  Antisense strand to SEQ ID NO: 1934414
guuaggaccacacagaugc

SEQ ID NO: 1934416 - RNA, 19 nt, Artificial Sequence
  Description of Artificial Sequence: Synthetic oligonucleotide
  Sense strand starting at position 1687 of SEQ ID NO: 1879826
gcuucagugcuagagcaga

SEQ ID NO: 1934417 - RNA, 19 nt, Artificial Sequence
  Description of Artificial Sequence: Synthetic oligonucleotide
  Antisense strand to SEQ ID NO: 1934416
ucugcucuagcacugaagc

SEQ ID NO: 1934418 - RNA, 19 nt, Artificial Sequence
  Description of Artificial Sequence: Synthetic oligonucleotide
  Sense strand starting at position 1721 of SEQ ID NO: 1879826
cuaagugggccaugucuau

SEQ ID NO: 1934419 - RNA, 19 nt, Artificial Sequence
  Description of Artificial Sequence: Synthetic oligonucleotide
  Antisense strand to SEQ ID NO: 1934418
auagacauggcccacuuag

SEQ ID NO: 1934420 - RNA, 19 nt, Artificial Sequence
  Description of Artificial Sequence: Synthetic oligonucleotide
  Sense strand starting at position 1727 of SEQ ID NO: 1879826
gggccaugucuauguguuc

SEQ ID NO: 1934421 - RNA, 19 nt, Artificial Sequence
  Description of Artificial Sequence: Synthetic oligonucleotide
  Antisense strand to SEQ ID NO: 1934420
gaacacauagacauggccc

SEQ ID NO: 1934422 - RNA, 19 nt, Artificial Sequence
  Description of Artificial Sequence: Synthetic oligonucleotide
  Sense strand starting at position 1730 of SEQ ID NO: 1879826
ccaugucuauguguuccua

SEQ ID NO: 1934423 - RNA, 19 nt, Artificial Sequence
  Description of Artificial Sequence: Synthetic oligonucleotide
  Antisense strand to SEQ ID NO: 1934422
uaggaacacauagacaugg

SEQ ID NO: 1934424 - RNA, 19 nt, Artificial Sequence
  Description of Artificial Sequence: Synthetic oligonucleotide
  Sense strand starting at position 2254 of SEQ ID NO: 1879826
gcccaagggcauugugaaa

SEQ ID NO: 1934425 - RNA, 19 nt, Artificial Sequence
  Description of Artificial Sequence: Synthetic oligonucleotide
  Antisense strand to SEQ ID NO: 1934424
uuucacaaugcccuugggc

SEQ ID NO: 1934426 - RNA, 19 nt, Artificial Sequence
  Description of Artificial Sequence: Synthetic oligonucleotide
  Sense strand starting at position 2304 of SEQ ID NO: 1879826
ccuggcugacauuaaacuu

SEQ ID NO: 1934427 - RNA, 19 nt, Artificial Sequence
  Description of Artificial Sequence: Synthetic oligonucleotide
  Antisense strand to SEQ ID NO: 1934426
aaguuuaaugucagccagg

SEQ ID NO: 1934428 - RNA, 19 nt, Artificial Sequence
  Description of Artificial Sequence: Synthetic oligonucleotide
  Sense strand starting at position 2492 of SEQ ID NO: 1879826
gugucaucccagggaaggu

SEQ ID NO: 1934429 - RNA, 19 nt, Artificial Sequence
  Description of Artificial Sequence: Synthetic oligonucleotide
  Antisense strand to SEQ ID NO: 1934428
accuucccugggaugacac

SEQ ID NO: 1934430 - RNA, 19 nt, Artificial Sequence
  Description of Artificial Sequence: Synthetic oligonucleotide
  Sense strand starting at position 2515 of SEQ ID NO: 1879826
gaagcuguccacuaggacu

SEQ ID NO: 1934431 - RNA, 19 nt, Artificial Sequence
  Description of Artificial Sequence: Synthetic oligonucleotide
  Antisense strand to SEQ ID NO: 1934430
aguccuaguggacagcuuc

SEQ ID NO: 1934432 - RNA, 19 nt, Artificial Sequence
  Description of Artificial Sequence: Synthetic oligonucleotide
  Sense strand starting at position 2726 of SEQ ID NO: 1879826
ggccuuucggcgaagcuga

SEQ ID NO: 1934433 - RNA, 19 nt, Artificial Sequence
  Description of Artificial Sequence: Synthetic oligonucleotide
  Antisense strand to SEQ ID NO: 1934432
ucagcuucgccgaaaggcc

SEQ ID NO: 1934434 - RNA, 19 nt, Artificial Sequence
  Description of Artificial Sequence: Synthetic oligonucleotide
  Sense strand starting at position 3020 of SEQ ID NO: 1879826
gccgggaucugagugcgaa

SEQ ID NO: 1934435 - RNA, 19 nt, Artificial Sequence
  Description of Artificial Sequence: Synthetic oligonucleotide
  Antisense strand to SEQ ID NO: 1934434
uucgcacucagaucccggc

SEQ ID NO: 1934436 - RNA, 19 nt, Artificial Sequence
  Description of Artificial Sequence: Synthetic oligonucleotide
  Sense strand starting at position 3021 of SEQ ID NO: 1879826
ccgggaucugagugcgaaa

SEQ ID NO: 1934437 - RNA, 19 nt, Artificial Sequence
  Description of Artificial Sequence: Synthetic oligonucleotide
  Antisense strand to SEQ ID NO: 1934436
uuucgcacucagaucccgg

SEQ ID NO: 1934438 - RNA, 19 nt, Artificial Sequence
  Description of Artificial Sequence: Synthetic oligonucleotide
  Sense strand starting at position 3023 of SEQ ID NO: 1879826
gggaucugagugcgaaacu

SEQ ID NO: 1934439 - RNA, 19 nt, Artificial Sequence
  Description of Artificial Sequence: Synthetic oligonucleotide
  Antisense strand to SEQ ID NO: 1934438
aguuucgcacucagauccc

SEQ ID NO: 1934440 - RNA, 19 nt, Artificial Sequence
  Description of Artificial Sequence: Synthetic oligonucleotide
  Sense strand starting at position 3127 of SEQ ID NO: 1879826
ggaguagguucaguucuga

SEQ ID NO: 1934441 - RNA, 19 nt, Artificial Sequence
  Description of Artificial Sequence: Synthetic oligonucleotide
  Antisense strand to SEQ ID NO: 1934440
ucagaacugaaccuacucc

SEQ ID NO: 1934442 - RNA, 19 nt, Artificial Sequence
  Description of Artificial Sequence: Synthetic oligonucleotide
  Sense strand starting at position 3262 of SEQ ID NO: 1879826
aaggucugcucaucaaaug

SEQ ID NO: 1934443 - RNA, 19 nt, Artificial Sequence
  Description of Artificial Sequence: Synthetic oligonucleotide
  Antisense strand to SEQ ID NO: 1934442
cauuugaugagcagaccuu

SEQ ID NO: 1934444 - RNA, 19 nt, Artificial Sequence
  Description of Artificial Sequence: Synthetic oligonucleotide
  Sense strand starting at position 3263 of SEQ ID NO: 1879826
aggucugcucaucaaauga

SEQ ID NO: 1934445 - RNA, 19 nt, Artificial Sequence
  Description of Artificial Sequence: Synthetic oligonucleotide
  Antisense strand to SEQ ID NO: 1934444
ucauuugaugagcagaccu

SEQ ID NO: 1934446 - RNA, 19 nt, Artificial Sequence
  Description of Artificial Sequence: Synthetic oligonucleotide
  Sense strand starting at position 3409 of SEQ ID NO: 1879826
gguuuguggcgggaguaga

SEQ ID NO: 1934447 - RNA, 19 nt, Artificial Sequence
  Description of Artificial Sequence: Synthetic oligonucleotide
  Antisense strand to SEQ ID NO: 1934446
ucuacucccgccacaaacc

SEQ ID NO: 1934448 - RNA, 19 nt, Artificial Sequence
  Description of Artificial Sequence: Synthetic oligonucleotide
  Sense strand starting at position 3510 of SEQ ID NO: 1879826
accugcgcugucuaauaga

SEQ ID NO: 1934449 - RNA, 19 nt, Artificial Sequence
  Description of Artificial Sequence: Synthetic oligonucleotide
  Antisense strand to SEQ ID NO: 1934448
ucuauuagacagcgcaggu

SEQ ID NO: 1934450 - RNA, 19 nt, Artificial Sequence
  Description of Artificial Sequence: Synthetic oligonucleotide
  Sense strand starting at position 3529 of SEQ ID NO: 1879826
acuuuauaugaugguggga

SEQ ID NO: 1934451 - RNA, 19 nt, Artificial Sequence
  Description of Artificial Sequence: Synthetic oligonucleotide
  Antisense strand to SEQ ID NO: 1934450
ucccaccaucauauaaagu

SEQ ID NO: 1934452 - RNA, 19 nt, Artificial Sequence
  Description of Artificial Sequence: Synthetic oligonucleotide
  Sense strand starting at position 3557 of SEQ ID NO: 1879826
cuuugugcuguccaauaga

SEQ ID NO: 1934453 - RNA, 19 nt, Artificial Sequence
  Description of Artificial Sequence: Synthetic oligonucleotide
  Antisense strand to SEQ ID NO: 1934452
ucuauuggacagcacaaag

SEQ ID NO: 1934454 - RNA, 19 nt, Artificial Sequence
  Description of Artificial Sequence: Synthetic oligonucleotide
  Sense strand starting at position 3574 of SEQ ID NO: 1879826
gaguaaccguuagccacau

SEQ ID NO: 1934455 - RNA, 19 nt, Artificial Sequence
  Description of Artificial Sequence: Synthetic oligonucleotide
  Antisense strand to SEQ ID NO: 1934454
auguggcuaacgguuacuc

SEQ ID NO: 1934456 - RNA, 19 nt, Artificial Sequence
  Description of Artificial Sequence: Synthetic oligonucleotide
  Sense strand starting at position 3586 of SEQ ID NO: 1879826
gccacauguggucauugaa

SEQ ID NO: 1934457 - RNA, 19 nt, Artificial Sequence
  Description of Artificial Sequence: Synthetic oligonucleotide
  Antisense strand to SEQ ID NO: 1934456
uucaaugaccacauguggc

SEQ ID NO: 1934458 - RNA, 19 nt, Artificial Sequence
  Description of Artificial Sequence: Synthetic oligonucleotide
  Sense strand starting at position 3589 of SEQ ID NO: 1879826
acauguggucauugaacuc

SEQ ID NO: 1934459 - RNA, 19 nt, Artificial Sequence
  Description of Artificial Sequence: Synthetic oligonucleotide
  Antisense strand to SEQ ID NO: 1934458
gaguucaaugaccacaugu

SEQ ID NO: 1934460 - RNA, 19 nt, Artificial Sequence
  Description of Artificial Sequence: Synthetic oligonucleotide
  Sense strand starting at position 3608 of SEQ ID NO: 1879826
uugaaauguggcugaggca

SEQ ID NO: 1934461 - RNA, 19 nt, Artificial Sequence
  Description of Artificial Sequence: Synthetic oligonucleotide
  Antisense strand to SEQ ID NO: 1934460
ugccucagccacauuucaa

SEQ ID NO: 1934462 - RNA, 19 nt, Artificial Sequence
  Description of Artificial Sequence: Synthetic oligonucleotide
  Sense strand starting at position 3609 of SEQ ID NO: 1879826
ugaaauguggcugaggcaa

SEQ ID NO: 1934463 - RNA, 19 nt, Artificial Sequence
  Description of Artificial Sequence: Synthetic oligonucleotide
  Antisense strand to SEQ ID NO: 1934462
uugccucagccacauuuca

SEQ ID NO: 1934464 - RNA, 19 nt, Artificial Sequence
  Description of Artificial Sequence: Synthetic oligonucleotide
  Sense strand starting at position 3861 of SEQ ID NO: 1879826
ccacaugugugagugggaa

SEQ ID NO: 1934465 - RNA, 19 nt, Artificial Sequence
  Description of Artificial Sequence: Synthetic oligonucleotide
  Antisense strand to SEQ ID NO: 1934464
uucccacucacacaugugg

SEQ ID NO: 1934466 - RNA, 19 nt, Artificial Sequence
  Description of Artificial Sequence: Synthetic oligonucleotide
  Sense strand starting at position 3863 of SEQ ID NO: 1879826
acaugugugagugggaaca

SEQ ID NO: 1934467 - RNA, 19 nt, Artificial Sequence
  Description of Artificial Sequence: Synthetic oligonucleotide
  Antisense strand to SEQ ID NO: 1934466
uguucccacucacacaugu

SEQ ID NO: 1934468 - RNA, 19 nt, Artificial Sequence
  Description of Artificial Sequence: Synthetic oligonucleotide
  Sense strand starting at position 3953 of SEQ ID NO: 1879826
gggaguaagugggacuuau

SEQ ID NO: 1934469 - RNA, 19 nt, Artificial Sequence
  Description of Artificial Sequence: Synthetic oligonucleotide
  Antisense strand to SEQ ID NO: 1934468
auaagucccacuuacuccc

SEQ ID NO: 1934470 - RNA, 19 nt, Artificial Sequence
  Description of Artificial Sequence: Synthetic oligonucleotide
  Sense strand starting at position 3962 of SEQ ID NO: 1879826
ugggacuuauggcuagaga

SEQ ID NO: 1934471 - RNA, 19 nt, Artificial Sequence
  Description of Artificial Sequence: Synthetic oligonucleotide
  Antisense strand to SEQ ID NO: 1934470
ucucuagccauaaguccca

SEQ ID NO: 1934472 - RNA, 19 nt, Artificial Sequence
  Description of Artificial Sequence: Synthetic oligonucleotide
  Sense strand starting at position 2004 of SEQ ID NO: 1879827
ggguguuauucucggcuac

SEQ ID NO: 1934473 - RNA, 19 nt, Artificial Sequence
  Description of Artificial Sequence: Synthetic oligonucleotide
  Antisense strand to SEQ ID NO: 1934472
guagccgagaauaacaccc

SEQ ID NO: 1934474 - RNA, 19 nt, Artificial Sequence
  Description of Artificial Sequence: Synthetic oligonucleotide
  Sense strand starting at position 2005 of SEQ ID NO: 1879827
gguguuauucucggcuacu

SEQ ID NO: 1934475 - RNA, 19 nt, Artificial Sequence
  Description of Artificial Sequence: Synthetic oligonucleotide
  Antisense strand to SEQ ID NO: 1934474
aguagccgagaauaacacc

SEQ ID NO: 1934476 - RNA, 19 nt, Artificial Sequence
  Description of Artificial Sequence: Synthetic oligonucleotide
  Sense strand starting at position 2006 of SEQ ID NO: 1879827
guguuauucucggcuacuu

SEQ ID NO: 1934477 - RNA, 19 nt, Artificial Sequence
  Description of Artificial Sequence: Synthetic oligonucleotide
  Antisense strand to SEQ ID NO: 1934476
aaguagccgagaauaacac

SEQ ID NO: 1934478 - RNA, 19 nt, Artificial Sequence
  Description of Artificial Sequence: Synthetic oligonucleotide
  Sense strand starting at position 2008 of SEQ ID NO: 1879827
guuauucucggcuacuuau

SEQ ID NO: 1934479 - RNA, 19 nt, Artificial Sequence
  Description of Artificial Sequence: Synthetic oligonucleotide
  Antisense strand to SEQ ID NO: 1934478
auaaguagccgagaauaac

SEQ ID NO: 1934480 - RNA, 19 nt, Artificial Sequence
  Description of Artificial Sequence: Synthetic oligonucleotide
  Sense strand starting at position 2018 of SEQ ID NO: 1879827
gcuacuuauuggcccgcaa

SEQ ID NO: 1934481 - RNA, 19 nt, Artificial Sequence
  Description of Artificial Sequence: Synthetic oligonucleotide
  Antisense strand to SEQ ID NO: 1934480
uugcgggccaauaaguagc

SEQ ID NO: 1934482 - RNA, 19 nt, Artificial Sequence
  Description of Artificial Sequence: Synthetic oligonucleotide
  Sense strand starting at position 2391 of SEQ ID NO: 1879827
cgacuaauaaccuguggac

SEQ ID NO: 1934483 - RNA, 19 nt, Artificial Sequence
  Description of Artificial Sequence: Synthetic oligonucleotide
  Antisense strand to SEQ ID NO: 1934482
guccacagguuauuagucg

SEQ ID NO: 1934484 - RNA, 19 nt, Artificial Sequence
  Description of Artificial Sequence: Synthetic oligonucleotide
  Sense strand starting at position 2403 of SEQ ID NO: 1879827
uguggacuggcuuagcuau

SEQ ID NO: 1934485 - RNA, 19 nt, Artificial Sequence
  Description of Artificial Sequence: Synthetic oligonucleotide
  Antisense strand to SEQ ID NO: 1934484
auagcuaagccaguccaca

SEQ ID NO: 1934486 - RNA, 19 nt, Artificial Sequence
  Description of Artificial Sequence: Synthetic oligonucleotide
  Sense strand starting at position 2410 of SEQ ID NO: 1879827
uggcuuagcuaucauaucu

SEQ ID NO: 1934487 - RNA, 19 nt, Artificial Sequence
  Description of Artificial Sequence: Synthetic oligonucleotide
  Antisense strand to SEQ ID NO: 1934486
agauaugauagcuaagcca

SEQ ID NO: 1934488 - RNA, 19 nt, Artificial Sequence
  Description of Artificial Sequence: Synthetic oligonucleotide
  Sense strand starting at position 2427 of SEQ ID NO: 1879827
cucuaucauuuacacguau

SEQ ID NO: 1934489 - RNA, 19 nt, Artificial Sequence
  Description of Artificial Sequence: Synthetic oligonucleotide
  Antisense strand to SEQ ID NO: 1934488
auacguguaaaugauagag

SEQ ID NO: 1934490 - RNA, 19 nt, Artificial Sequence
  Description of Artificial Sequence: Synthetic oligonucleotide
  Sense strand starting at position 2445 of SEQ ID NO: 1879827
uuuaucuaucucuguguau

SEQ ID NO: 1934491 - RNA, 19 nt, Artificial Sequence
  Description of Artificial Sequence: Synthetic oligonucleotide
  Antisense strand to SEQ ID NO: 1934490
auacacagagauagauaaa

SEQ ID NO: 1934492 - RNA, 19 nt, Artificial Sequence
  Description of Artificial Sequence: Synthetic oligonucleotide
  Sense strand starting at position 2449 of SEQ ID NO: 1879827
ucuaucucuguguaucuaa

SEQ ID NO: 1934493 - RNA, 19 nt, Artificial Sequence
  Description of Artificial Sequence: Synthetic oligonucleotide
  Antisense strand to SEQ ID NO: 1934492
uuagauacacagagauaga

SEQ ID NO: 1934494 - RNA, 19 nt, Artificial Sequence
  Description of Artificial Sequence: Synthetic oligonucleotide
  Sense strand starting at position 2456 of SEQ ID NO: 1879827
cuguguaucuaacaccuua

SEQ ID NO: 1934495 - RNA, 19 nt, Artificial Sequence
  Description of Artificial Sequence: Synthetic oligonucleotide
  Antisense strand to SEQ ID NO: 1934494
uaagguguuagauacacag

SEQ ID NO: 1934496 - RNA, 19 nt, Artificial Sequence
  Description of Artificial Sequence: Synthetic oligonucleotide
  Sense strand starting at position 2507 of SEQ ID NO: 1879827
ugcucaauaugguuuaugu

SEQ ID NO: 1934497 - RNA, 19 nt, Artificial Sequence
  Description of Artificial Sequence: Synthetic oligonucleotide
  Antisense strand to SEQ ID NO: 1934496
acauaaaccauauugagca

SEQ ID NO: 1934498 - RNA, 19 nt, Artificial Sequence
  Description of Artificial Sequence: Synthetic oligonucleotide
  Sense strand starting at position 2509 of SEQ ID NO: 1879827
cucaauaugguuuauguaa

SEQ ID NO: 1934499 - RNA, 19 nt, Artificial Sequence
  Description of Artificial Sequence: Synthetic oligonucleotide
  Antisense strand to SEQ ID NO: 1934498
uuacauaaaccauauugag

SEQ ID NO: 1934500 - RNA, 19 nt, Artificial Sequence
  Description of Artificial Sequence: Synthetic oligonucleotide
  Sense strand starting at position 2567 of SEQ ID NO: 1879827
ugcggaauaguccauugua

SEQ ID NO: 1934501 - RNA, 19 nt, Artificial Sequence
  Description of Artificial Sequence: Synthetic oligonucleotide
  Antisense strand to SEQ ID NO: 1934500
uacaauggacuauuccgca

SEQ ID NO: 1934502 - RNA, 19 nt, Artificial Sequence
  Description of Artificial Sequence: Synthetic oligonucleotide
  Sense strand starting at position 2583 of SEQ ID NO: 1879827
guaugaauacgccaccacu

SEQ ID NO: 1934503 - RNA, 19 nt, Artificial Sequence
  Description of Artificial Sequence: Synthetic oligonucleotide
  Antisense strand to SEQ ID NO: 1934502
agugguggcguauucauac

SEQ ID NO: 1934504 - RNA, 19 nt, Artificial Sequence
  Description of Artificial Sequence: Synthetic oligonucleotide
  Sense strand starting at position 2993 of SEQ ID NO: 1879827
gcuauuaggugcuaugauu

SEQ ID NO: 1934505 - RNA, 19 nt, Artificial Sequence
  Description of Artificial Sequence: Synthetic oligonucleotide
  Antisense strand to SEQ ID NO: 1934504
aaucauagcaccuaauagc

SEQ ID NO: 1934506 - RNA, 19 nt, Artificial Sequence
  Description of Artificial Sequence: Synthetic oligonucleotide
  Sense strand starting at position 3008 of SEQ ID NO: 1879827
gauuaacauucuugugugu

SEQ ID NO: 1934507 - RNA, 19 nt, Artificial Sequence
  Description of Artificial Sequence: Synthetic oligonucleotide
  Antisense strand to SEQ ID NO: 1934506
acacacaagaauguuaauc

SEQ ID NO: 1934508 - RNA, 19 nt, Artificial Sequence
  Description of Artificial Sequence: Synthetic oligonucleotide
  Sense strand starting at position 3010 of SEQ ID NO: 1879827
uuaacauucuuguguguau

SEQ ID NO: 1934509 - RNA, 19 nt, Artificial Sequence
  Description of Artificial Sequence: Synthetic oligonucleotide
  Antisense strand to SEQ ID NO: 1934508
auacacacaagaauguuaa

SEQ ID NO: 1934510 - RNA, 19 nt, Artificial Sequence
  Description of Artificial Sequence: Synthetic oligonucleotide
  Sense strand starting at position 3013 of SEQ ID NO: 1879827
acauucuuguguguauuua

SEQ ID NO: 1934511 - RNA, 19 nt, Artificial Sequence
  Description of Artificial Sequence: Synthetic oligonucleotide
  Antisense strand to SEQ ID NO: 1934510
uaaauacacacaagaaugu

SEQ ID NO: 1934512 - RNA, 19 nt, Artificial Sequence
  Description of Artificial Sequence: Synthetic oligonucleotide
  Sense strand starting at position 3227 of SEQ ID NO: 1879827
ggcugagucagggaaucau

SEQ ID NO: 1934513 - RNA, 19 nt, Artificial Sequence
  Description of Artificial Sequence: Synthetic oligonucleotide
  Antisense strand to SEQ ID NO: 1934512
augauucccugacucagcc

SEQ ID NO: 1934514 - RNA, 19 nt, Artificial Sequence
  Description of Artificial Sequence: Synthetic oligonucleotide
  Sense strand starting at position 3759 of SEQ ID NO: 1879827
aguccagaaauucgagaau

SEQ ID NO: 1934515 - RNA, 19 nt, Artificial Sequence
  Description of Artificial Sequence: Synthetic oligonucleotide
  Antisense strand to SEQ ID NO: 1934514
auucucgaauuucuggacu

SEQ ID NO: 1934516 - RNA, 19 nt, Artificial Sequence
  Description of Artificial Sequence: Synthetic oligonucleotide
  Sense strand starting at position 3770 of SEQ ID NO: 1879827
ucgagaaugugaggguaga

SEQ ID NO: 1934517 - RNA, 19 nt, Artificial Sequence
  Description of Artificial Sequence: Synthetic oligonucleotide
  Antisense strand to SEQ ID NO: 1934516
ucuacccucacauucucga

SEQ ID NO: 1934518 - RNA, 19 nt, Artificial Sequence
  Description of Artificial Sequence: Synthetic oligonucleotide
  Sense strand starting at position 3904 of SEQ ID NO: 1879827
cgcuucagcgcaggaauua

SEQ ID NO: 1934519 - RNA, 19 nt, Artificial Sequence
  Description of Artificial Sequence: Synthetic oligonucleotide
  Antisense strand to SEQ ID NO: 1934518
uaauuccugcgcugaagcg

SEQ ID NO: 1934520 - RNA, 19 nt, Artificial Sequence
  Description of Artificial Sequence: Synthetic oligonucleotide
  Sense strand starting at position 2022 of SEQ ID NO: 1879828
ggguguuauucucggcuac

SEQ ID NO: 1934521 - RNA, 19 nt, Artificial Sequence
  Description of Artificial Sequence: Synthetic oligonucleotide
  Antisense strand to SEQ ID NO: 1934520
guagccgagaauaacaccc

SEQ ID NO: 1934522 - RNA, 19 nt, Artificial Sequence
  Description of Artificial Sequence: Synthetic oligonucleotide
  Sense strand starting at position 2023 of SEQ ID NO: 1879828
gguguuauucucggcuacu

SEQ ID NO: 1934523 - RNA, 19 nt, Artificial Sequence
  Description of Artificial Sequence: Synthetic oligonucleotide
  Antisense strand to SEQ ID NO: 1934522
aguagccgagaauaacacc

SEQ ID NO: 1934524 - RNA, 19 nt, Artificial Sequence
  Description of Artificial Sequence: Synthetic oligonucleotide
  Sense strand starting at position 2024 of SEQ ID NO: 1879828
guguuauucucggcuacuu

SEQ ID NO: 1934525 - RNA, 19 nt, Artificial Sequence
  Description of Artificial Sequence: Synthetic oligonucleotide
  Antisense strand to SEQ ID NO: 1934524
aaguagccgagaauaacac

SEQ ID NO: 1934526 - RNA, 19 nt, Artificial Sequence
  Description of Artificial Sequence: Synthetic oligonucleotide
  Sense strand starting at position 2026 of SEQ ID NO: 1879828
guuauucucggcuacuuau

SEQ ID NO: 1934527 - RNA, 19 nt, Artificial Sequence
  Description of Artificial Sequence: Synthetic oligonucleotide
  Antisense strand to SEQ ID NO: 1934526
auaaguagccgagaauaac

SEQ ID NO: 1934528 - RNA, 19 nt, Artificial Sequence
  Description of Artificial Sequence: Synthetic oligonucleotide
  Sense strand starting at position 2036 of SEQ ID NO: 1879828
gcuacuuauuggcccgcaa

SEQ ID NO: 1934529 - RNA, 19 nt, Artificial Sequence
  Description of Artificial Sequence: Synthetic oligonucleotide
  Antisense strand to SEQ ID NO: 1934528
uugcgggccaauaaguagc

SEQ ID NO: 1934530 - RNA, 19 nt, Artificial Sequence
  Description of Artificial Sequence: Synthetic oligonucleotide
  Sense strand starting at position 2409 of SEQ ID NO: 1879828
cgacuaauaaccuguggac

SEQ ID NO: 1934531 - RNA, 19 nt, Artificial Sequence
  Description of Artificial Sequence: Synthetic oligonucleotide
  Antisense strand to SEQ ID NO: 1934530
guccacagguuauuagucg

SEQ ID NO: 1934532 - RNA, 19 nt, Artificial Sequence
  Description of Artificial Sequence: Synthetic oligonucleotide
  Sense strand starting at position 2421 of SEQ ID NO: 1879828
uguggacuggcuuagcuau

SEQ ID NO: 1934533 - RNA, 19 nt, Artificial Sequence
  Description of Artificial Sequence: Synthetic oligonucleotide
  Antisense strand to SEQ ID NO: 1934532
auagcuaagccaguccaca

SEQ ID NO: 1934534 - RNA, 19 nt, Artificial Sequence
  Description of Artificial Sequence: Synthetic oligonucleotide
  Sense strand starting at position 2428 of SEQ ID NO: 1879828
uggcuuagcuaucauaucu

SEQ ID NO: 1934535 - RNA, 19 nt, Artificial Sequence
  Description of Artificial Sequence: Synthetic oligonucleotide
  Antisense strand to SEQ ID NO: 1934534
agauaugauagcuaagcca

SEQ ID NO: 1934536 - RNA, 19 nt, Artificial Sequence
  Description of Artificial Sequence: Synthetic oligonucleotide
  Sense strand starting at position 2445 of SEQ ID NO: 1879828
cucuaucauuuacacguau

SEQ ID NO: 1934537 - RNA, 19 nt, Artificial Sequence
  Description of Artificial Sequence: Synthetic oligonucleotide
  Antisense strand to SEQ ID NO: 1934536
auacguguaaaugauagag

SEQ ID NO: 1934538 - RNA, 19 nt, Artificial Sequence
  Description of Artificial Sequence: Synthetic oligonucleotide
  Sense strand starting at position 2463 of SEQ ID NO: 1879828
uuuaucuaucucuguguau

SEQ ID NO: 1934539 - RNA, 19 nt, Artificial Sequence
  Description of Artificial Sequence: Synthetic oligonucleotide
  Antisense strand to SEQ ID NO: 1934538
auacacagagauagauaaa

SEQ ID NO: 1934540 - RNA, 19 nt, Artificial Sequence
  Description of Artificial Sequence: Synthetic oligonucleotide
  Sense strand starting at position 2467 of SEQ ID NO: 1879828
ucuaucucuguguaucuaa

SEQ ID NO: 1934541 - RNA, 19 nt, Artificial Sequence
  Description of Artificial Sequence: Synthetic oligonucleotide
  Antisense strand to SEQ ID NO: 1934540
uuagauacacagagauaga

SEQ ID NO: 1934542 - RNA, 19 nt, Artificial Sequence
  Description of Artificial Sequence: Synthetic oligonucleotide
  Sense strand starting at position 2474 of SEQ ID NO: 1879828
cuguguaucuaacaccuua

SEQ ID NO: 1934543 - RNA, 19 nt, Artificial Sequence
  Description of Artificial Sequence: Synthetic oligonucleotide
  Antisense strand to SEQ ID NO: 1934542
uaagguguuagauacacag

SEQ ID NO: 1934544 - RNA, 19 nt, Artificial Sequence
  Description of Artificial Sequence: Synthetic oligonucleotide
  Sense strand starting at position 2525 of SEQ ID NO: 1879828
ugcucaauaugguuuaugu

SEQ ID NO: 1934545 - RNA, 19 nt, Artificial Sequence
  Description of Artificial Sequence: Synthetic oligonucleotide
  Antisense strand to SEQ ID NO: 1934544
acauaaaccauauugagca

SEQ ID NO: 1934546 - RNA, 19 nt, Artificial Sequence
  Description of Artificial Sequence: Synthetic oligonucleotide
  Sense strand starting at position 2527 of SEQ ID NO: 1879828
cucaauaugguuuauguaa

SEQ ID NO: 1934547 - RNA, 19 nt, Artificial Sequence
  Description of Artificial Sequence: Synthetic oligonucleotide
  Antisense strand to SEQ ID NO: 1934546
uuacauaaaccauauugag

SEQ ID NO: 1934548 - RNA, 19 nt, Artificial Sequence
  Description of Artificial Sequence: Synthetic oligonucleotide
  Sense strand starting at position 2585 of SEQ ID NO: 1879828
ugcggaauaguccauugua

SEQ ID NO: 1934549 - RNA, 19 nt, Artificial Sequence
  Description of Artificial Sequence: Synthetic oligonucleotide
  Antisense strand to SEQ ID NO: 1934548
uacaauggacuauuccgca

SEQ ID NO: 1934550 - RNA, 19 nt, Artificial Sequence
  Description of Artificial Sequence: Synthetic oligonucleotide
  Sense strand starting at position 2601 of SEQ ID NO: 1879828
guaugaauacgccaccacu

SEQ ID NO: 1934551 - RNA, 19 nt, Artificial Sequence
  Description of Artificial Sequence: Synthetic oligonucleotide
  Antisense strand to SEQ ID NO: 1934550
agugguggcguauucauac

SEQ ID NO: 1934552 - RNA, 19 nt, Artificial Sequence
  Description of Artificial Sequence: Synthetic oligonucleotide
  Sense strand starting at position 3011 of SEQ ID NO: 1879828
gcuauuaggugcuaugauu

SEQ ID NO: 1934553 - RNA, 19 nt, Artificial Sequence
  Description of Artificial Sequence: Synthetic oligonucleotide
  Antisense strand to SEQ ID NO: 1934552
aaucauagcaccuaauagc

SEQ ID NO: 1934554 - RNA, 19 nt, Artificial Sequence
  Description of Artificial Sequence: Synthetic oligonucleotide
  Sense strand starting at position 3026 of SEQ ID NO: 1879828
gauuaacauucuugugugu

SEQ ID NO: 1934555 - RNA, 19 nt, Artificial Sequence
  Description of Artificial Sequence: Synthetic oligonucleotide
  Antisense strand to SEQ ID NO: 1934554
acacacaagaauguuaauc

SEQ ID NO: 1934556 - RNA, 19 nt, Artificial Sequence
  Description of Artificial Sequence: Synthetic oligonucleotide
  Sense strand starting at position 3028 of SEQ ID NO: 1879828
uuaacauucuuguguguau

SEQ ID NO: 1934557 - RNA, 19 nt, Artificial Sequence
  Description of Artificial Sequence: Synthetic oligonucleotide
  Antisense strand to SEQ ID NO: 1934556
auacacacaagaauguuaa

SEQ ID NO: 1934558 - RNA, 19 nt, Artificial Sequence
  Description of Artificial Sequence: Synthetic oligonucleotide
  Sense strand starting at position 3031 of SEQ ID NO: 1879828
acauucuuguguguauuua

SEQ ID NO: 1934559 - RNA, 19 nt, Artificial Sequence
  Description of Artificial Sequence: Synthetic oligonucleotide
  Antisense strand to SEQ ID NO: 1934558
uaaauacacacaagaaugu

SEQ ID NO: 1934560 - RNA, 19 nt, Artificial Sequence
  Description of Artificial Sequence: Synthetic oligonucleotide
  Sense strand starting at position 3245 of SEQ ID NO: 1879828
ggcugagucagggaaucau

SEQ ID NO: 1934561 - RNA, 19 nt, Artificial Sequence
  Description of Artificial Sequence: Synthetic oligonucleotide
  Antisense strand to SEQ ID NO: 1934560
augauucccugacucagcc

SEQ ID NO: 1934562 - RNA, 19 nt, Artificial Sequence
  Description of Artificial Sequence: Synthetic oligonucleotide
  Sense strand starting at position 3777 of SEQ ID NO: 1879828
aguccagaaauucgagaau

SEQ ID NO: 1934563 - RNA, 19 nt, Artificial Sequence
  Description of Artificial Sequence: Synthetic oligonucleotide
  Antisense strand to SEQ ID NO: 1934562
auucucgaauuucuggacu

SEQ ID NO: 1934564 - RNA, 19 nt, Artificial Sequence
  Description of Artificial Sequence: Synthetic oligonucleotide
  Sense strand starting at position 3788 of SEQ ID NO: 1879828
ucgagaaugugaggguaga

SEQ ID NO: 1934565 - RNA, 19 nt, Artificial Sequence
  Description of Artificial Sequence: Synthetic oligonucleotide
  Antisense strand to SEQ ID NO: 1934564
ucuacccucacauucucga

SEQ ID NO: 1934566 - RNA, 19 nt, Artificial Sequence
  Description of Artificial Sequence: Synthetic oligonucleotide
  Sense strand starting at position 3922 of SEQ ID NO: 1879828
cgcuucagcgcaggaauua

SEQ ID NO: 1934567 - RNA, 19 nt, Artificial Sequence
  Description of Artificial Sequence: Synthetic oligonucleotide
  Antisense strand to SEQ ID NO: 1934566
uaauuccugcgcugaagcg

SEQ ID NO: 1934568 - RNA, 19 nt, Artificial Sequence
  Description of Artificial Sequence: Synthetic oligonucleotide
  Sense strand starting at position 27 of SEQ ID NO: 1879829
gaaagauaguuagcaggau

SEQ ID NO: 1934569 - RNA, 19 nt, Artificial Sequence
  Description of Artificial Sequence: Synthetic oligonucleotide
  Antisense strand to SEQ ID NO: 1934568
auccugcuaacuaucuuuc

SEQ ID NO: 1934570 - RNA, 19 nt, Artificial Sequence
  Description of Artificial Sequence: Synthetic oligonucleotide
  Sense strand starting at position 1521 of SEQ ID NO: 1879829
gguccuggagcucgguaaa

SEQ ID NO: 1934571 - RNA, 19 nt, Artificial Sequence
  Description of Artificial Sequence: Synthetic oligonucleotide
  Antisense strand to SEQ ID NO: 1934570
uuuaccgagcuccaggacc

SEQ ID NO: 1934572 - RNA, 19 nt, Artificial Sequence
  Description of Artificial Sequence: Synthetic oligonucleotide
  Sense strand starting at position 2013 of SEQ ID NO: 1879829
cgcgugggcggguguuaua

SEQ ID NO: 1934573 - RNA, 19 nt, Artificial Sequence
  Description of Artificial Sequence: Synthetic oligonucleotide
  Antisense strand to SEQ ID NO: 1934572
uauaacacccgcccacgcg

SEQ ID NO: 1934574 - RNA, 19 nt, Artificial Sequence
  Description of Artificial Sequence: Synthetic oligonucleotide
  Sense strand starting at position 2022 of SEQ ID NO: 1879829
ggguguuauacuggcgacu

SEQ ID NO: 1934575 - RNA, 19 nt, Artificial Sequence
  Description of Artificial Sequence: Synthetic oligonucleotide
  Antisense strand to SEQ ID NO: 1934574
agucgccaguauaacaccc

SEQ ID NO: 1934576 - RNA, 19 nt, Artificial Sequence
  Description of Artificial Sequence: Synthetic oligonucleotide
  Sense strand starting at position 2024 of SEQ ID NO: 1879829
guguuauacuggcgacuua

SEQ ID NO: 1934577 - RNA, 19 nt, Artificial Sequence
  Description of Artificial Sequence: Synthetic oligonucleotide
  Antisense strand to SEQ ID NO: 1934576
uaagucgccaguauaacac

SEQ ID NO: 1934578 - RNA, 19 nt, Artificial Sequence
  Description of Artificial Sequence: Synthetic oligonucleotide
  Sense strand starting at position 2025 of SEQ ID NO: 1879829
uguuauacuggcgacuuau

SEQ ID NO: 1934579 - RNA, 19 nt, Artificial Sequence
  Description of Artificial Sequence: Synthetic oligonucleotide
  Antisense strand to SEQ ID NO: 1934578
auaagucgccaguauaaca

SEQ ID NO: 1934580 - RNA, 19 nt, Artificial Sequence
  Description of Artificial Sequence: Synthetic oligonucleotide
  Sense strand starting at position 2035 of SEQ ID NO: 1879829
gcgacuuauugguccgcaa

SEQ ID NO: 1934581 - RNA, 19 nt, Artificial Sequence
  Description of Artificial Sequence: Synthetic oligonucleotide
  Antisense strand to SEQ ID NO: 1934580
uugcggaccaauaagucgc

SEQ ID NO: 1934582 - RNA, 19 nt, Artificial Sequence
  Description of Artificial Sequence: Synthetic oligonucleotide
  Sense strand starting at position 2037 of SEQ ID NO: 1879829
gacuuauugguccgcaaac

SEQ ID NO: 1934583 - RNA, 19 nt, Artificial Sequence
  Description of Artificial Sequence: Synthetic oligonucleotide
  Antisense strand to SEQ ID NO: 1934582
guuugcggaccaauaaguc

SEQ ID NO: 1934584 - RNA, 19 nt, Artificial Sequence
  Description of Artificial Sequence: Synthetic oligonucleotide
  Sense strand starting at position 2038 of SEQ ID NO: 1879829
acuuauugguccgcaaaca

SEQ ID NO: 1934585 - RNA, 19 nt, Artificial Sequence
  Description of Artificial Sequence: Synthetic oligonucleotide
  Antisense strand to SEQ ID NO: 1934584
uguuugcggaccaauaagu

SEQ ID NO: 1934586 - RNA, 19 nt, Artificial Sequence
  Description of Artificial Sequence: Synthetic oligonucleotide
  Sense strand starting at position 2060 of SEQ ID NO: 1879829
ccuuucccauuggagaaau

SEQ ID NO: 1934587 - RNA, 19 nt, Artificial Sequence
  Description of Artificial Sequence: Synthetic oligonucleotide
  Antisense strand to SEQ ID NO: 1934586
auuucuccaaugggaaagg

SEQ ID NO: 1934588 - RNA, 19 nt, Artificial Sequence
  Description of Artificial Sequence: Synthetic oligonucleotide
  Sense strand starting at position 2071 of SEQ ID NO: 1879829
ggagaaaugaugcgccgau

SEQ ID NO: 1934589 - RNA, 19 nt, Artificial Sequence
  Description of Artificial Sequence: Synthetic oligonucleotide
  Antisense strand to SEQ ID NO: 1934588
aucggcgcaucauuucucc

SEQ ID NO: 1934590 - RNA, 19 nt, Artificial Sequence
  Description of Artificial Sequence: Synthetic oligonucleotide
  Sense strand starting at position 2275 of SEQ ID NO: 1879829
ggucuuaucucuucuuaca

SEQ ID NO: 1934591 - RNA, 19 nt, Artificial Sequence
  Description of Artificial Sequence: Synthetic oligonucleotide
  Antisense strand to SEQ ID NO: 1934590
uguaagaagagauaagacc

SEQ ID NO: 1934592 - RNA, 19 nt, Artificial Sequence
  Description of Artificial Sequence: Synthetic oligonucleotide
  Sense strand starting at position 2329 of SEQ ID NO: 1879829
augaaaccuugccagaaua

SEQ ID NO: 1934593 - RNA, 19 nt, Artificial Sequence
  Description of Artificial Sequence: Synthetic oligonucleotide
  Antisense strand to SEQ ID NO: 1934592
uauucuggcaagguuucau

SEQ ID NO: 1934594 - RNA, 19 nt, Artificial Sequence
  Description of Artificial Sequence: Synthetic oligonucleotide
  Sense strand starting at position 2433 of SEQ ID NO: 1879829
cguggacugaccuagcuau

SEQ ID NO: 1934595 - RNA, 19 nt, Artificial Sequence
  Description of Artificial Sequence: Synthetic oligonucleotide
  Antisense strand to SEQ ID NO: 1934594
auagcuaggucaguccacg

SEQ ID NO: 1934596 - RNA, 19 nt, Artificial Sequence
  Description of Artificial Sequence: Synthetic oligonucleotide
  Sense strand starting at position 2447 of SEQ ID NO: 1879829
gcuaucauaucuguaucau

SEQ ID NO: 1934597 - RNA, 19 nt, Artificial Sequence
  Description of Artificial Sequence: Synthetic oligonucleotide
  Antisense strand to SEQ ID NO: 1934596
augauacagauaugauagc

SEQ ID NO: 1934598 - RNA, 19 nt, Artificial Sequence
  Description of Artificial Sequence: Synthetic oligonucleotide
  Sense strand starting at position 2457 of SEQ ID NO: 1879829
cuguaucauuuacauguau

SEQ ID NO: 1934599 - RNA, 19 nt, Artificial Sequence
  Description of Artificial Sequence: Synthetic oligonucleotide
  Antisense strand to SEQ ID NO: 1934598
auacauguaaaugauacag

SEQ ID NO: 1934600 - RNA, 19 nt, Artificial Sequence
  Description of Artificial Sequence: Synthetic oligonucleotide
  Sense strand starting at position 2472 of SEQ ID NO: 1879829
guauuaaucuaucucugug

SEQ ID NO: 1934601 - RNA, 19 nt, Artificial Sequence
  Description of Artificial Sequence: Synthetic oligonucleotide
  Antisense strand to SEQ ID NO: 1934600
cacagagauagauuaauac

SEQ ID NO: 1934602 - RNA, 19 nt, Artificial Sequence
  Description of Artificial Sequence: Synthetic oligonucleotide
  Sense strand starting at position 2478 of SEQ ID NO: 1879829
aucuaucucuguguaugua

SEQ ID NO: 1934603 - RNA, 19 nt, Artificial Sequence
  Description of Artificial Sequence: Synthetic oligonucleotide
  Antisense strand to SEQ ID NO: 1934602
uacauacacagagauagau

SEQ ID NO: 1934604 - RNA, 19 nt, Artificial Sequence
  Description of Artificial Sequence: Synthetic oligonucleotide
  Sense strand starting at position 2479 of SEQ ID NO: 1879829
ucuaucucuguguauguaa

SEQ ID NO: 1934605 - RNA, 19 nt, Artificial Sequence
  Description of Artificial Sequence: Synthetic oligonucleotide
  Antisense strand to SEQ ID NO: 1934604
uuacauacacagagauaga

SEQ ID NO: 1934606 - RNA, 19 nt, Artificial Sequence
  Description of Artificial Sequence: Synthetic oligonucleotide
  Sense strand starting at position 2486 of SEQ ID NO: 1879829
cuguguauguaacacuuua

SEQ ID NO: 1934607 - RNA, 19 nt, Artificial Sequence
  Description of Artificial Sequence: Synthetic oligonucleotide
  Antisense strand to SEQ ID NO: 1934606
uaaaguguuacauacacag

SEQ ID NO: 1934608 - RNA, 19 nt, Artificial Sequence
  Description of Artificial Sequence: Synthetic oligonucleotide
  Sense strand starting at position 2513 of SEQ ID NO: 1879829
gaguauuggcgucugucuu

SEQ ID NO: 1934609 - RNA, 19 nt, Artificial Sequence
  Description of Artificial Sequence: Synthetic oligonucleotide
  Antisense strand to SEQ ID NO: 1934608
aagacagacgccaauacuc

SEQ ID NO: 1934610 - RNA, 19 nt, Artificial Sequence
  Description of Artificial Sequence: Synthetic oligonucleotide
  Sense strand starting at position 2535 of SEQ ID NO: 1879829
cucaauaugguuuaugcaa

SEQ ID NO: 1934611 - RNA, 19 nt, Artificial Sequence
  Description of Artificial Sequence: Synthetic oligonucleotide
  Antisense strand to SEQ ID NO: 1934610
uugcauaaaccauauugag

SEQ ID NO: 1934612 - RNA, 19 nt, Artificial Sequence
  Description of Artificial Sequence: Synthetic oligonucleotide
  Sense strand starting at position 2585 of SEQ ID NO: 1879829
uguggaauaguccauugua

SEQ ID NO: 1934613 - RNA, 19 nt, Artificial Sequence
  Description of Artificial Sequence: Synthetic oligonucleotide
  Antisense strand to SEQ ID NO: 1934612
uacaauggacuauuccaca

SEQ ID NO: 1934614 - RNA, 19 nt, Artificial Sequence
  Description of Artificial Sequence: Synthetic oligonucleotide
  Sense strand starting at position 2635 of SEQ ID NO: 1879829
augaauauauucugcugau

SEQ ID NO: 1934615 - RNA, 19 nt, Artificial Sequence
  Description of Artificial Sequence: Synthetic oligonucleotide
  Antisense strand to SEQ ID NO: 1934614
aucagcagaauauauucau

SEQ ID NO: 1934616 - RNA, 19 nt, Artificial Sequence
  Description of Artificial Sequence: Synthetic oligonucleotide
  Sense strand starting at position 2636 of SEQ ID NO: 1879829
ugaauauauucugcugaua

SEQ ID NO: 1934617 - RNA, 19 nt, Artificial Sequence
  Description of Artificial Sequence: Synthetic oligonucleotide
  Antisense strand to SEQ ID NO: 1934616
uaucagcagaauauauuca

SEQ ID NO: 1934618 - RNA, 19 nt, Artificial Sequence
  Description of Artificial Sequence: Synthetic oligonucleotide
  Sense strand starting at position 2662 of SEQ ID NO: 1879829
uugggauuguuuccauugu

SEQ ID NO: 1934619 - RNA, 19 nt, Artificial Sequence
  Description of Artificial Sequence: Synthetic oligonucleotide
  Antisense strand to SEQ ID NO: 1934618
acaauggaaacaaucccaa

SEQ ID NO: 1934620 - RNA, 19 nt, Artificial Sequence
  Description of Artificial Sequence: Synthetic oligonucleotide
  Sense strand starting at position 2663 of SEQ ID NO: 1879829
ugggauuguuuccauuguu

SEQ ID NO: 1934621 - RNA, 19 nt, Artificial Sequence
  Description of Artificial Sequence: Synthetic oligonucleotide
  Antisense strand to SEQ ID NO: 1934620
aacaauggaaacaauccca

SEQ ID NO: 1934622 - RNA, 19 nt, Artificial Sequence
  Description of Artificial Sequence: Synthetic oligonucleotide
  Sense strand starting at position 2693 of SEQ ID NO: 1879829
ccuauuaggugcuaugauu

SEQ ID NO: 1934623 - RNA, 19 nt, Artificial Sequence
  Description of Artificial Sequence: Synthetic oligonucleotide
  Antisense strand to SEQ ID NO: 1934622
aaucauagcaccuaauagg

SEQ ID NO: 1934624 - RNA, 19 nt, Artificial Sequence
  Description of Artificial Sequence: Synthetic oligonucleotide
  Sense strand starting at position 2707 of SEQ ID NO: 1879829
ugauuaacauccuugugua

SEQ ID NO: 1934625 - RNA, 19 nt, Artificial Sequence
  Description of Artificial Sequence: Synthetic oligonucleotide
  Antisense strand to SEQ ID NO: 1934624
uacacaaggauguuaauca

SEQ ID NO: 1934626 - RNA, 19 nt, Artificial Sequence
  Description of Artificial Sequence: Synthetic oligonucleotide
  Sense strand starting at position 2710 of SEQ ID NO: 1879829
uuaacauccuuguguauau

SEQ ID NO: 1934627 - RNA, 19 nt, Artificial Sequence
  Description of Artificial Sequence: Synthetic oligonucleotide
  Antisense strand to SEQ ID NO: 1934626
auauacacaaggauguuaa

SEQ ID NO: 1934628 - RNA, 19 nt, Artificial Sequence
  Description of Artificial Sequence: Synthetic oligonucleotide
  Sense strand starting at position 3213 of SEQ ID NO: 1879829
ugguguugggcgcuuguaa

SEQ ID NO: 1934629 - RNA, 19 nt, Artificial Sequence
  Description of Artificial Sequence: Synthetic oligonucleotide
  Antisense strand to SEQ ID NO: 1934628
uuacaagcgcccaacacca

SEQ ID NO: 1934630 - RNA, 19 nt, Artificial Sequence
  Description of Artificial Sequence: Synthetic oligonucleotide
  Sense strand starting at position 3214 of SEQ ID NO: 1879829
gguguugggcgcuuguaau

SEQ ID NO: 1934631 - RNA, 19 nt, Artificial Sequence
  Description of Artificial Sequence: Synthetic oligonucleotide
  Antisense strand to SEQ ID NO: 1934630
auuacaagcgcccaacacc

SEQ ID NO: 1934632 - RNA, 19 nt, Artificial Sequence
  Description of Artificial Sequence: Synthetic oligonucleotide
  Sense strand starting at position 3380 of SEQ ID NO: 1879829
ugucuauucugagcuccuu

SEQ ID NO: 1934633 - RNA, 19 nt, Artificial Sequence
  Description of Artificial Sequence: Synthetic oligonucleotide
  Antisense strand to SEQ ID NO: 1934632
aaggagcucagaauagaca

SEQ ID NO: 1934634 - RNA, 19 nt, Artificial Sequence
  Description of Artificial Sequence: Synthetic oligonucleotide
  Sense strand starting at position 3386 of SEQ ID NO: 1879829
uucugagcuccuuguaauu

SEQ ID NO: 1934635 - RNA, 19 nt, Artificial Sequence
  Description of Artificial Sequence: Synthetic oligonucleotide
  Antisense strand to SEQ ID NO: 1934634
aauuacaaggagcucagaa

SEQ ID NO: 1934636 - RNA, 19 nt, Artificial Sequence
  Description of Artificial Sequence: Synthetic oligonucleotide
  Sense strand starting at position 3765 of SEQ ID NO: 1879829
uucuguagguacucugaca

SEQ ID NO: 1934637 - RNA, 19 nt, Artificial Sequence
  Description of Artificial Sequence: Synthetic oligonucleotide
  Antisense strand to SEQ ID NO: 1934636
ugucagaguaccuacagaa

SEQ ID NO: 1934638 - RNA, 19 nt, Artificial Sequence
  Description of Artificial Sequence: Synthetic oligonucleotide
  Sense strand starting at position 3770 of SEQ ID NO: 1879829
uagguacucugacagcuua

SEQ ID NO: 1934639 - RNA, 19 nt, Artificial Sequence
  Description of Artificial Sequence: Synthetic oligonucleotide
  Antisense strand to SEQ ID NO: 1934638
uaagcugucagaguaccua

SEQ ID NO: 1934640 - RNA, 19 nt, Artificial Sequence
  Description of Artificial Sequence: Synthetic oligonucleotide
  Sense strand starting at position 3778 of SEQ ID NO: 1879829
cugacagcuuaaggaaauu

SEQ ID NO: 1934641 - RNA, 19 nt, Artificial Sequence
  Description of Artificial Sequence: Synthetic oligonucleotide
  Antisense strand to SEQ ID NO: 1934640
aauuuccuuaagcugucag

SEQ ID NO: 1934642 - RNA, 19 nt, Artificial Sequence
  Description of Artificial Sequence: Synthetic oligonucleotide
  Sense strand starting at position 3851 of SEQ ID NO: 1879829
acagcuuucuccgcacuaa

SEQ ID NO: 1934643 - RNA, 19 nt, Artificial Sequence
  Description of Artificial Sequence: Synthetic oligonucleotide
  Antisense strand to SEQ ID NO: 1934642
uuagugcggagaaagcugu

SEQ ID NO: 1934644 - RNA, 19 nt, Artificial Sequence
  Description of Artificial Sequence: Synthetic oligonucleotide
  Sense strand starting at position 3855 of SEQ ID NO: 1879829
cuuucuccgcacuaagaua

SEQ ID NO: 1934645 - RNA, 19 nt, Artificial Sequence
  Description of Artificial Sequence: Synthetic oligonucleotide
  Antisense strand to SEQ ID NO: 1934644
uaucuuagugcggagaaag

SEQ ID NO: 1934646 - RNA, 19 nt, Artificial Sequence
  Description of Artificial Sequence: Synthetic oligonucleotide
  Sense strand starting at position 3885 of SEQ ID NO: 1879829
uuaucauuccuuuguugca

SEQ ID NO: 1934647 - RNA, 19 nt, Artificial Sequence
  Description of Artificial Sequence: Synthetic oligonucleotide
  Antisense strand to SEQ ID NO: 1934646
ugcaacaaaggaaugauaa

SEQ ID NO: 1934648 - RNA, 19 nt, Artificial Sequence
  Description of Artificial Sequence: Synthetic oligonucleotide
  Sense strand starting at position 32 of SEQ ID NO: 1879830
ccaggaaaggcuugagucu

SEQ ID NO: 1934649 - RNA, 19 nt, Artificial Sequence
  Description of Artificial Sequence: Synthetic oligonucleotide
  Antisense strand to SEQ ID NO: 1934648
agacucaagccuuuccugg

SEQ ID NO: 1934650 - RNA, 19 nt, Artificial Sequence
  Description of Artificial Sequence: Synthetic oligonucleotide
  Sense strand starting at position 33 of SEQ ID NO: 1879830
caggaaaggcuugagucuu

SEQ ID NO: 1934651 - RNA, 19 nt, Artificial Sequence
  Description of Artificial Sequence: Synthetic oligonucleotide
  Antisense strand to SEQ ID NO: 1934650
aagacucaagccuuuccug

SEQ ID NO: 1934652 - RNA, 19 nt, Artificial Sequence
  Description of Artificial Sequence: Synthetic oligonucleotide
  Sense strand starting at position 39 of SEQ ID NO: 1879830
aggcuugagucuucaaggu

SEQ ID NO: 1934653 - RNA, 19 nt, Artificial Sequence
  Description of Artificial Sequence: Synthetic oligonucleotide
  Antisense strand to SEQ ID NO: 1934652
accuugaagacucaagccu

SEQ ID NO: 1934654 - RNA, 19 nt, Artificial Sequence
  Description of Artificial Sequence: Synthetic oligonucleotide
  Sense strand starting at position 49 of SEQ ID NO: 1879830
cuucaagguuccuggagga

SEQ ID NO: 1934655 - RNA, 19 nt, Artificial Sequence
  Description of Artificial Sequence: Synthetic oligonucleotide
  Antisense strand to SEQ ID NO: 1934654
uccuccaggaaccuugaag

SEQ ID NO: 1934656 - RNA, 19 nt, Artificial Sequence
  Description of Artificial Sequence: Synthetic oligonucleotide
  Sense strand starting at position 247 of SEQ ID NO: 1879830
ccgagagcguguccaugau

SEQ ID NO: 1934657 - RNA, 19 nt, Artificial Sequence
  Description of Artificial Sequence: Synthetic oligonucleotide
  Antisense strand to SEQ ID NO: 1934656
aucauggacacgcucucgg

SEQ ID NO: 1934658 - RNA, 19 nt, Artificial Sequence
  Description of Artificial Sequence: Synthetic oligonucleotide
  Sense strand starting at position 251 of SEQ ID NO: 1879830
gagcguguccaugaugaag

SEQ ID NO: 1934659 - RNA, 19 nt, Artificial Sequence
  Description of Artificial Sequence: Synthetic oligonucleotide
  Antisense strand to SEQ ID NO: 1934658
cuucaucauggacacgcuc

SEQ ID NO: 1934660 - RNA, 19 nt, Artificial Sequence
  Description of Artificial Sequence: Synthetic oligonucleotide
  Sense strand starting at position 390 of SEQ ID NO: 1879830
gacucaguucuggaaguga

SEQ ID NO: 1934661 - RNA, 19 nt, Artificial Sequence
  Description of Artificial Sequence: Synthetic oligonucleotide
  Antisense strand to SEQ ID NO: 1934660
ucacuuccagaacugaguc

SEQ ID NO: 1934662 - RNA, 19 nt, Artificial Sequence
  Description of Artificial Sequence: Synthetic oligonucleotide
  Sense strand starting at position 473 of SEQ ID NO: 1879830
gggcgaacucacgaggcuu

SEQ ID NO: 1934663 - RNA, 19 nt, Artificial Sequence
  Description of Artificial Sequence: Synthetic oligonucleotide
  Antisense strand to SEQ ID NO: 1934662
aagccucgugaguucgccc

SEQ ID NO: 1934664 - RNA, 19 nt, Artificial Sequence
  Description of Artificial Sequence: Synthetic oligonucleotide
  Sense strand starting at position 513 of SEQ ID NO: 1879830
uggccaaagugguuuggga

SEQ ID NO: 1934665 - RNA, 19 nt, Artificial Sequence
  Description of Artificial Sequence: Synthetic oligonucleotide
  Antisense strand to SEQ ID NO: 1934664
ucccaaaccacuuuggcca

SEQ ID NO: 1934666 - RNA, 19 nt, Artificial Sequence
  Description of Artificial Sequence: Synthetic oligonucleotide
  Sense strand starting at position 526 of SEQ ID NO: 1879830
uugggacccuaugaauaga

SEQ ID NO: 1934667 - RNA, 19 nt, Artificial Sequence
  Description of Artificial Sequence: Synthetic oligonucleotide
  Antisense strand to SEQ ID NO: 1934666
ucuauucauagggucccaa

SEQ ID NO: 1934668 - RNA, 19 nt, Artificial Sequence
  Description of Artificial Sequence: Synthetic oligonucleotide
  Sense strand starting at position 552 of SEQ ID NO: 1879830
cggguccuggcuugacaaa

SEQ ID NO: 1934669 - RNA, 19 nt, Artificial Sequence
  Description of Artificial Sequence: Synthetic oligonucleotide
  Antisense strand to SEQ ID NO: 1934668
uuugucaagccaggacccg

SEQ ID NO: 1934670 - RNA, 19 nt, Artificial Sequence
  Description of Artificial Sequence: Synthetic oligonucleotide
  Sense strand starting at position 612 of SEQ ID NO: 1879830
gggccagagaaaggugaua

SEQ ID NO: 1934671 - RNA, 19 nt, Artificial Sequence
  Description of Artificial Sequence: Synthetic oligonucleotide
  Antisense strand to SEQ ID NO: 1934670
uaucaccuuucucuggccc

SEQ ID NO: 1934672 - RNA, 19 nt, Artificial Sequence
  Description of Artificial Sequence: Synthetic oligonucleotide
  Sense strand starting at position 700 of SEQ ID NO: 1879830
cgcgaauugaccgggccaa

SEQ ID NO: 1934673 - RNA, 19 nt, Artificial Sequence
  Description of Artificial Sequence: Synthetic oligonucleotide
  Antisense strand to SEQ ID NO: 1934672
uuggcccggucaauucgcg

SEQ ID NO: 1934674 - RNA, 19 nt, Artificial Sequence
  Description of Artificial Sequence: Synthetic oligonucleotide
  Sense strand starting at position 701 of SEQ ID NO: 1879830
gcgaauugaccgggccaaa

SEQ ID NO: 1934675 - RNA, 19 nt, Artificial Sequence
  Description of Artificial Sequence: Synthetic oligonucleotide
  Antisense strand to SEQ ID NO: 1934674
uuuggcccggucaauucgc

SEQ ID NO: 1934676 - RNA, 19 nt, Artificial Sequence
  Description of Artificial Sequence: Synthetic oligonucleotide
  Sense strand starting at position 1079 of SEQ ID NO: 1879830
acucucuugcaguagaguu

SEQ ID NO: 1934677 - RNA, 19 nt, Artificial Sequence
  Description of Artificial Sequence: Synthetic oligonucleotide
  Antisense strand to SEQ ID NO: 1934676
aacucuacugcaagagagu

SEQ ID NO: 1934678 - RNA, 19 nt, Artificial Sequence
  Description of Artificial Sequence: Synthetic oligonucleotide
  Sense strand starting at position 1337 of SEQ ID NO: 1879830
ugcggagccucuuugaaca

SEQ ID NO: 1934679 - RNA, 19 nt, Artificial Sequence
  Description of Artificial Sequence: Synthetic oligonucleotide
  Antisense strand to SEQ ID NO: 1934678
uguucaaagaggcuccgca

SEQ ID NO: 1934680 - RNA, 19 nt, Artificial Sequence
  Description of Artificial Sequence: Synthetic oligonucleotide
  Sense strand starting at position 1339 of SEQ ID NO: 1879830
cggagccucuuugaacaga

SEQ ID NO: 1934681 - RNA, 19 nt, Artificial Sequence
  Description of Artificial Sequence: Synthetic oligonucleotide
  Antisense strand to SEQ ID NO: 1934680
ucuguucaaagaggcuccg

SEQ ID NO: 1934682 - RNA, 19 nt, Artificial Sequence
  Description of Artificial Sequence: Synthetic oligonucleotide
  Sense strand starting at position 1845 of SEQ ID NO: 1879830
gggcucagcccguauggau

SEQ ID NO: 1934683 - RNA, 19 nt, Artificial Sequence
  Description of Artificial Sequence: Synthetic oligonucleotide
  Antisense strand to SEQ ID NO: 1934682
auccauacgggcugagccc

SEQ ID NO: 1934684 - RNA, 19 nt, Artificial Sequence
  Description of Artificial Sequence: Synthetic oligonucleotide
  Sense strand starting at position 1859 of SEQ ID NO: 1879830
uggaucagcuccgagaacu

SEQ ID NO: 1934685 - RNA, 19 nt, Artificial Sequence
  Description of Artificial Sequence: Synthetic oligonucleotide
  Antisense strand to SEQ ID NO: 1934684
aguucucggagcugaucca

SEQ ID NO: 1934686 - RNA, 19 nt, Artificial Sequence
  Description of Artificial Sequence: Synthetic oligonucleotide
  Sense strand starting at position 1878 of SEQ ID NO: 1879830
ccauucugccagugagaga

SEQ ID NO: 1934687 - RNA, 19 nt, Artificial Sequence
  Description of Artificial Sequence: Synthetic oligonucleotide
  Antisense strand to SEQ ID NO: 1934686
ucucucacuggcagaaugg

SEQ ID NO: 1934688 - RNA, 19 nt, Artificial Sequence
  Description of Artificial Sequence: Synthetic oligonucleotide
  Sense strand starting at position 2062 of SEQ ID NO: 1879830
ugccaauauuucuuagcga

SEQ ID NO: 1934689 - RNA, 19 nt, Artificial Sequence
  Description of Artificial Sequence: Synthetic oligonucleotide
  Antisense strand to SEQ ID NO: 1934688
ucgcuaagaaauauuggca

SEQ ID NO: 1934690 - RNA, 19 nt, Artificial Sequence
  Description of Artificial Sequence: Synthetic oligonucleotide
  Sense strand starting at position 2063 of SEQ ID NO: 1879830
gccaauauuucuuagcgag

SEQ ID NO: 1934691 - RNA, 19 nt, Artificial Sequence
  Description of Artificial Sequence: Synthetic oligonucleotide
  Antisense strand to SEQ ID NO: 1934690
cucgcuaagaaauauuggc

SEQ ID NO: 1934692 - RNA, 19 nt, Artificial Sequence
  Description of Artificial Sequence: Synthetic oligonucleotide
  Sense strand starting at position 2065 of SEQ ID NO: 1879830
caauauuucuuagcgaggu

SEQ ID NO: 1934693 - RNA, 19 nt, Artificial Sequence
  Description of Artificial Sequence: Synthetic oligonucleotide
  Antisense strand to SEQ ID NO: 1934692
accucgcuaagaaauauug

SEQ ID NO: 1934694 - RNA, 19 nt, Artificial Sequence
  Description of Artificial Sequence: Synthetic oligonucleotide
  Sense strand starting at position 2066 of SEQ ID NO: 1879830
aauauuucuuagcgagguc

SEQ ID NO: 1934695 - RNA, 19 nt, Artificial Sequence
  Description of Artificial Sequence: Synthetic oligonucleotide
  Antisense strand to SEQ ID NO: 1934694
gaccucgcuaagaaauauu

SEQ ID NO: 1934696 - RNA, 19 nt, Artificial Sequence
  Description of Artificial Sequence: Synthetic oligonucleotide
  Sense strand starting at position 2086 of SEQ ID NO: 1879830
cuggccagagacuguuaua

SEQ ID NO: 1934697 - RNA, 19 nt, Artificial Sequence
  Description of Artificial Sequence: Synthetic oligonucleotide
  Antisense strand to SEQ ID NO: 1934696
uauaacagucucuggccag

SEQ ID NO: 1934698 - RNA, 19 nt, Artificial Sequence
  Description of Artificial Sequence: Synthetic oligonucleotide
  Sense strand starting at position 2091 of SEQ ID NO: 1879830
cagagacuguuauaagcaa

SEQ ID NO: 1934699 - RNA, 19 nt, Artificial Sequence
  Description of Artificial Sequence: Synthetic oligonucleotide
  Antisense strand to SEQ ID NO: 1934698
uugcuuauaacagucucug

SEQ ID NO: 1934700 - RNA, 19 nt, Artificial Sequence
  Description of Artificial Sequence: Synthetic oligonucleotide
  Sense strand starting at position 2115 of SEQ ID NO: 1879830
caugucaucgucugugaaa

SEQ ID NO: 1934701 - RNA, 19 nt, Artificial Sequence
  Description of Artificial Sequence: Synthetic oligonucleotide
  Antisense strand to SEQ ID NO: 1934700
uuucacagacgaugacaug

SEQ ID NO: 1934702 - RNA, 19 nt, Artificial Sequence
  Description of Artificial Sequence: Synthetic oligonucleotide
  Sense strand starting at position 2116 of SEQ ID NO: 1879830
augucaucgucugugaaau

SEQ ID NO: 1934703 - RNA, 19 nt, Artificial Sequence
  Description of Artificial Sequence: Synthetic oligonucleotide
  Antisense strand to SEQ ID NO: 1934702
auuucacagacgaugacau

SEQ ID NO: 1934704 - RNA, 19 nt, Artificial Sequence
  Description of Artificial Sequence: Synthetic oligonucleotide
  Sense strand starting at position 2117 of SEQ ID NO: 1879830
ugucaucgucugugaaaug

SEQ ID NO: 1934705 - RNA, 19 nt, Artificial Sequence
  Description of Artificial Sequence: Synthetic oligonucleotide
  Antisense strand to SEQ ID NO: 1934704
cauuucacagacgaugaca

SEQ ID NO: 1934706 - RNA, 19 nt, Artificial Sequence
  Description of Artificial Sequence: Synthetic oligonucleotide
  Sense strand starting at position 2137 of SEQ ID NO: 1879830
ggagaauaaucuugccuaa

SEQ ID NO: 1934707 - RNA, 19 nt, Artificial Sequence
  Description of Artificial Sequence: Synthetic oligonucleotide
  Antisense strand to SEQ ID NO: 1934706
uuaggcaagauuauucucc

SEQ ID NO: 1934708 - RNA, 19 nt, Artificial Sequence
  Description of Artificial Sequence: Synthetic oligonucleotide
  Sense strand starting at position 2139 of SEQ ID NO: 1879830
agaauaaucuugccuaaag

SEQ ID NO: 1934709 - RNA, 19 nt, Artificial Sequence
  Description of Artificial Sequence: Synthetic oligonucleotide
  Antisense strand to SEQ ID NO: 1934708
cuuuaggcaagauuauucu

SEQ ID NO: 1934710 - RNA, 19 nt, Artificial Sequence
  Description of Artificial Sequence: Synthetic oligonucleotide
  Sense strand starting at position 2815 of SEQ ID NO: 1879830
cuggaaagugggugugaaa

SEQ ID NO: 1934711 - RNA, 19 nt, Artificial Sequence
  Description of Artificial Sequence: Synthetic oligonucleotide
  Antisense strand to SEQ ID NO: 1934710
uuucacacccacuuuccag

SEQ ID NO: 1934712 - RNA, 19 nt, Artificial Sequence
  Description of Artificial Sequence: Synthetic oligonucleotide
  Sense strand starting at position 2878 of SEQ ID NO: 1879830
gggaaauccuuugguccac

SEQ ID NO: 1934713 - RNA, 19 nt, Artificial Sequence
  Description of Artificial Sequence: Synthetic oligonucleotide
  Antisense strand to SEQ ID NO: 1934712
guggaccaaaggauuuccc

SEQ ID NO: 1934714 - RNA, 19 nt, Artificial Sequence
  Description of Artificial Sequence: Synthetic oligonucleotide
  Sense strand starting at position 3029 of SEQ ID NO: 1879830
ucguuucagcaagugugua

SEQ ID NO: 1934715 - RNA, 19 nt, Artificial Sequence
  Description of Artificial Sequence: Synthetic oligonucleotide
  Antisense strand to SEQ ID NO: 1934714
uacacacuugcugaaacga

SEQ ID NO: 1934716 - RNA, 19 nt, Artificial Sequence
  Description of Artificial Sequence: Synthetic oligonucleotide
  Sense strand starting at position 3041 of SEQ ID NO: 1879830
guguguauuaccuguacag

SEQ ID NO: 1934717 - RNA, 19 nt, Artificial Sequence
  Description of Artificial Sequence: Synthetic oligonucleotide
  Antisense strand to SEQ ID NO: 1934716
cuguacagguaauacacac

SEQ ID NO: 1934718 - RNA, 19 nt, Artificial Sequence
  Description of Artificial Sequence: Synthetic oligonucleotide
  Sense strand starting at position 3043 of SEQ ID NO: 1879830
guguauuaccuguacagug

SEQ ID NO: 1934719 - RNA, 19 nt, Artificial Sequence
  Description of Artificial Sequence: Synthetic oligonucleotide
  Antisense strand to SEQ ID NO: 1934718
cacuguacagguaauacac

SEQ ID NO: 1934720 - RNA, 19 nt, Artificial Sequence
  Description of Artificial Sequence: Synthetic oligonucleotide
  Sense strand starting at position 3048 of SEQ ID NO: 1879830
uuaccuguacagugaguua

SEQ ID NO: 1934721 - RNA, 19 nt, Artificial Sequence
  Description of Artificial Sequence: Synthetic oligonucleotide
  Antisense strand to SEQ ID NO: 1934720
uaacucacuguacagguaa

SEQ ID NO: 1934722 - RNA, 19 nt, Artificial Sequence
  Description of Artificial Sequence: Synthetic oligonucleotide
  Sense strand starting at position 3108 of SEQ ID NO: 1879830
ggaagauucuguucacagg

SEQ ID NO: 1934723 - RNA, 19 nt, Artificial Sequence
  Description of Artificial Sequence: Synthetic oligonucleotide
  Antisense strand to SEQ ID NO: 1934722
ccugugaacagaaucuucc

SEQ ID NO: 1934724 - RNA, 19 nt, Artificial Sequence
  Description of Artificial Sequence: Synthetic oligonucleotide
  Sense strand starting at position 3535 of SEQ ID NO: 1879830
ggcuaaaucuggucucuac

SEQ ID NO: 1934725 - RNA, 19 nt, Artificial Sequence
  Description of Artificial Sequence: Synthetic oligonucleotide
  Antisense strand to SEQ ID NO: 1934724
guagagaccagauuuagcc

SEQ ID NO: 1934726 - RNA, 19 nt, Artificial Sequence
  Description of Artificial Sequence: Synthetic oligonucleotide
  Sense strand starting at position 3629 of SEQ ID NO: 1879830
gucccuugaacccgagaaa

SEQ ID NO: 1934727 - RNA, 19 nt, Artificial Sequence
  Description of Artificial Sequence: Synthetic oligonucleotide
  Antisense strand to SEQ ID NO: 1934726
uuucucggguucaagggac

SEQ ID NO: 1934728 - RNA, 19 nt, Artificial Sequence
  Description of Artificial Sequence: Synthetic oligonucleotide
  Sense strand starting at position 23 of SEQ ID NO: 1879831
cauugaagugugugcagaa

SEQ ID NO: 1934729 - RNA, 19 nt, Artificial Sequence
  Description of Artificial Sequence: Synthetic oligonucleotide
  Antisense strand to SEQ ID NO: 1934728
uucugcacacacuucaaug

SEQ ID NO: 1934730 - RNA, 19 nt, Artificial Sequence
  Description of Artificial Sequence: Synthetic oligonucleotide
  Sense strand starting at position 24 of SEQ ID NO: 1879831
auugaagugugugcagaau

SEQ ID NO: 1934731 - RNA, 19 nt, Artificial Sequence
  Description of Artificial Sequence: Synthetic oligonucleotide
  Antisense strand to SEQ ID NO: 1934730
auucugcacacacuucaau

SEQ ID NO: 1934732 - RNA, 19 nt, Artificial Sequence
  Description of Artificial Sequence: Synthetic oligonucleotide
  Sense strand starting at position 529 of SEQ ID NO: 1879831
ccaguuauguccucuugag

SEQ ID NO: 1934733 - RNA, 19 nt, Artificial Sequence
  Description of Artificial Sequence: Synthetic oligonucleotide
  Antisense strand to SEQ ID NO: 1934732
cucaagaggacauaacugg

SEQ ID NO: 1934734 - RNA, 19 nt, Artificial Sequence
  Description of Artificial Sequence: Synthetic oligonucleotide
  Sense strand starting at position 537 of SEQ ID NO: 1879831
guccucuugagaugcaaga

SEQ ID NO: 1934735 - RNA, 19 nt, Artificial Sequence
  Description of Artificial Sequence: Synthetic oligonucleotide
  Antisense strand to SEQ ID NO: 1934734
ucuugcaucucaagaggac

SEQ ID NO: 1934736 - RNA, 19 nt, Artificial Sequence
  Description of Artificial Sequence: Synthetic oligonucleotide
  Sense strand starting at position 750 of SEQ ID NO: 1879831
gaauuuaagugagacagau

SEQ ID NO: 1934737 - RNA, 19 nt, Artificial Sequence
  Description of Artificial Sequence: Synthetic oligonucleotide
  Antisense strand to SEQ ID NO: 1934736
aucugucucacuuaaauuc

SEQ ID NO: 1934738 - RNA, 19 nt, Artificial Sequence
  Description of Artificial Sequence: Synthetic oligonucleotide
  Sense strand starting at position 765 of SEQ ID NO: 1879831
agauaacuucuguagcuag

SEQ ID NO: 1934739 - RNA, 19 nt, Artificial Sequence
  Description of Artificial Sequence: Synthetic oligonucleotide
  Antisense strand to SEQ ID NO: 1934738
cuagcuacagaaguuaucu

SEQ ID NO: 1934740 - RNA, 19 nt, Artificial Sequence
  Description of Artificial Sequence: Synthetic oligonucleotide
  Sense strand starting at position 834 of SEQ ID NO: 1879831
aaggguuguuucucuucua

SEQ ID NO: 1934741 - RNA, 19 nt, Artificial Sequence
  Description of Artificial Sequence: Synthetic oligonucleotide
  Antisense strand to SEQ ID NO: 1934740
uagaagagaaacaacccuu

SEQ ID NO: 1934742 - RNA, 19 nt, Artificial Sequence
  Description of Artificial Sequence: Synthetic oligonucleotide
  Sense strand starting at position 847 of SEQ ID NO: 1879831
cuucuagugcauugacaag

SEQ ID NO: 1934743 - RNA, 19 nt, Artificial Sequence
  Description of Artificial Sequence: Synthetic oligonucleotide
  Antisense strand to SEQ ID NO: 1934742
cuugucaaugcacuagaag

SEQ ID NO: 1934744 - RNA, 19 nt, Artificial Sequence
  Description of Artificial Sequence: Synthetic oligonucleotide
  Sense strand starting at position 909 of SEQ ID NO: 1879831
agaguuacagucgggcaua

SEQ ID NO: 1934745 - RNA, 19 nt, Artificial Sequence
  Description of Artificial Sequence: Synthetic oligonucleotide
  Antisense strand to SEQ ID NO: 1934744
uaugcccgacuguaacucu

SEQ ID NO: 1934746 - RNA, 19 nt, Artificial Sequence
  Description of Artificial Sequence: Synthetic oligonucleotide
  Sense strand starting at position 1420 of SEQ ID NO: 1879831
aaacuuaagcugugagaga

SEQ ID NO: 1934747 - RNA, 19 nt, Artificial Sequence
  Description of Artificial Sequence: Synthetic oligonucleotide
  Antisense strand to SEQ ID NO: 1934746
ucucucacagcuuaaguuu

SEQ ID NO: 1934748 - RNA, 19 nt, Artificial Sequence
  Description of Artificial Sequence: Synthetic oligonucleotide
  Sense strand starting at position 1572 of SEQ ID NO: 1879831
aguagaaucaccugcagag

SEQ ID NO: 1934749 - RNA, 19 nt, Artificial Sequence
  Description of Artificial Sequence: Synthetic oligonucleotide
  Antisense strand to SEQ ID NO: 1934748
cucugcaggugauucuacu

SEQ ID NO: 1934750 - RNA, 19 nt, Artificial Sequence
  Description of Artificial Sequence: Synthetic oligonucleotide
  Sense strand starting at position 1648 of SEQ ID NO: 1879831
gacucaggaucaguaucuu

SEQ ID NO: 1934751 - RNA, 19 nt, Artificial Sequence
  Description of Artificial Sequence: Synthetic oligonucleotide
  Antisense strand to SEQ ID NO: 1934750
aagauacugauccugaguc

SEQ ID NO: 1934752 - RNA, 19 nt, Artificial Sequence
  Description of Artificial Sequence: Synthetic oligonucleotide
  Sense strand starting at position 1765 of SEQ ID NO: 1879831
uuagguucucauuggccaa

SEQ ID NO: 1934753 - RNA, 19 nt, Artificial Sequence
  Description of Artificial Sequence: Synthetic oligonucleotide
  Antisense strand to SEQ ID NO: 1934752
uuggccaaugagaaccuaa

SEQ ID NO: 1934754 - RNA, 19 nt, Artificial Sequence
  Description of Artificial Sequence: Synthetic oligonucleotide
  Sense strand starting at position 1850 of SEQ ID NO: 1879831
ugcaguuuccgcuuguaga

SEQ ID NO: 1934755 - RNA, 19 nt, Artificial Sequence
  Description of Artificial Sequence: Synthetic oligonucleotide
  Antisense strand to SEQ ID NO: 1934754
ucuacaagcggaaacugca

SEQ ID NO: 1934756 - RNA, 19 nt, Artificial Sequence
  Description of Artificial Sequence: Synthetic oligonucleotide
  Sense strand starting at position 1868 of SEQ ID NO: 1879831
agaagaagcuuucccaagu

SEQ ID NO: 1934757 - RNA, 19 nt, Artificial Sequence
  Description of Artificial Sequence: Synthetic oligonucleotide
  Antisense strand to SEQ ID NO: 1934756
acuugggaaagcuucuucu

SEQ ID NO: 1934758 - RNA, 19 nt, Artificial Sequence
  Description of Artificial Sequence: Synthetic oligonucleotide
  Sense strand starting at position 1996 of SEQ ID NO: 1879831
cccauuccuugagugggua

SEQ ID NO: 1934759 - RNA, 19 nt, Artificial Sequence
  Description of Artificial Sequence: Synthetic oligonucleotide
  Antisense strand to SEQ ID NO: 1934758
uacccacucaaggaauggg

SEQ ID NO: 1934760 - RNA, 19 nt, Artificial Sequence
  Description of Artificial Sequence: Synthetic oligonucleotide
  Sense strand starting at position 2235 of SEQ ID NO: 1879831
acacauuccugccuaggaa

SEQ ID NO: 1934761 - RNA, 19 nt, Artificial Sequence
  Description of Artificial Sequence: Synthetic oligonucleotide
  Antisense strand to SEQ ID NO: 1934760
uuccuaggcaggaaugugu

SEQ ID NO: 1934762 - RNA, 19 nt, Artificial Sequence
  Description of Artificial Sequence: Synthetic oligonucleotide
  Sense strand starting at position 2296 of SEQ ID NO: 1879831
aggaacaucuaugaauaca

SEQ ID NO: 1934763 - RNA, 19 nt, Artificial Sequence
  Description of Artificial Sequence: Synthetic oligonucleotide
  Antisense strand to SEQ ID NO: 1934762
uguauucauagauguuccu

SEQ ID NO: 1934764 - RNA, 19 nt, Artificial Sequence
  Description of Artificial Sequence: Synthetic oligonucleotide
  Sense strand starting at position 2318 of SEQ ID NO: 1879831
auuuauggcucugaaauga

SEQ ID NO: 1934765 - RNA, 19 nt, Artificial Sequence
  Description of Artificial Sequence: Synthetic oligonucleotide
  Antisense strand to SEQ ID NO: 1934764
ucauuucagagccauaaau

SEQ ID NO: 1934766 - RNA, 19 nt, Artificial Sequence
  Description of Artificial Sequence: Synthetic oligonucleotide
  Sense strand starting at position 2371 of SEQ ID NO: 1879831
uuaugaaaugcccagugaa

SEQ ID NO: 1934767 - RNA, 19 nt, Artificial Sequence
  Description of Artificial Sequence: Synthetic oligonucleotide
  Antisense strand to SEQ ID NO: 1934766
uucacugggcauuucauaa

SEQ ID NO: 1934768 - RNA, 19 nt, Artificial Sequence
  Description of Artificial Sequence: Synthetic oligonucleotide
  Sense strand starting at position 2374 of SEQ ID NO: 1879831
ugaaaugcccagugaaugu

SEQ ID NO: 1934769 - RNA, 19 nt, Artificial Sequence
  Description of Artificial Sequence: Synthetic oligonucleotide
  Antisense strand to SEQ ID NO: 1934768
acauucacugggcauuuca

SEQ ID NO: 1934770 - RNA, 19 nt, Artificial Sequence
  Description of Artificial Sequence: Synthetic oligonucleotide
  Sense strand starting at position 2495 of SEQ ID NO: 1879831
gaguuucuacagcagagau

SEQ ID NO: 1934771 - RNA, 19 nt, Artificial Sequence
  Description of Artificial Sequence: Synthetic oligonucleotide
  Antisense strand to SEQ ID NO: 1934770
aucucugcuguagaaacuc

SEQ ID NO: 1934772 - RNA, 19 nt, Artificial Sequence
  Description of Artificial Sequence: Synthetic oligonucleotide
  Sense strand starting at position 2556 of SEQ ID NO: 1879831
aauguagacuuagaggaga

SEQ ID NO: 1934773 - RNA, 19 nt, Artificial Sequence
  Description of Artificial Sequence: Synthetic oligonucleotide
  Antisense strand to SEQ ID NO: 1934772
ucuccucuaagucuacauu

SEQ ID NO: 1934774 - RNA, 19 nt, Artificial Sequence
  Description of Artificial Sequence: Synthetic oligonucleotide
  Sense strand starting at position 2600 of SEQ ID NO: 1879831
aagagagaugccugucuga

SEQ ID NO: 1934775 - RNA, 19 nt, Artificial Sequence
  Description of Artificial Sequence: Synthetic oligonucleotide
  Antisense strand to SEQ ID NO: 1934774
ucagacaggcaucucucuu

SEQ ID NO: 1934776 - RNA, 19 nt, Artificial Sequence
  Description of Artificial Sequence: Synthetic oligonucleotide
  Sense strand starting at position 2603 of SEQ ID NO: 1879831
agagaugccugucugacuu

SEQ ID NO: 1934777 - RNA, 19 nt, Artificial Sequence
  Description of Artificial Sequence: Synthetic oligonucleotide
  Antisense strand to SEQ ID NO: 1934776
aagucagacaggcaucucu

SEQ ID NO: 1934778 - RNA, 19 nt, Artificial Sequence
  Description of Artificial Sequence: Synthetic oligonucleotide
  Sense strand starting at position 2733 of SEQ ID NO: 1879831
accuaacuauuggugagaa

SEQ ID NO: 1934779 - RNA, 19 nt, Artificial Sequence
  Description of Artificial Sequence: Synthetic oligonucleotide
  Antisense strand to SEQ ID NO: 1934778
uucucaccaauaguuaggu

SEQ ID NO: 1934780 - RNA, 19 nt, Artificial Sequence
  Description of Artificial Sequence: Synthetic oligonucleotide
  Sense strand starting at position 2762 of SEQ ID NO: 1879831
acaaucacucaguguacuu

SEQ ID NO: 1934781 - RNA, 19 nt, Artificial Sequence
  Description of Artificial Sequence: Synthetic oligonucleotide
  Antisense strand to SEQ ID NO: 1934780
aaguacacugagugauugu

SEQ ID NO: 1934782 - RNA, 19 nt, Artificial Sequence
  Description of Artificial Sequence: Synthetic oligonucleotide
  Sense strand starting at position 2841 of SEQ ID NO: 1879831
gguccaaggccugaaagua

SEQ ID NO: 1934783 - RNA, 19 nt, Artificial Sequence
  Description of Artificial Sequence: Synthetic oligonucleotide
  Antisense strand to SEQ ID NO: 1934782
uacuuucaggccuuggacc

SEQ ID NO: 1934784 - RNA, 19 nt, Artificial Sequence
  Description of Artificial Sequence: Synthetic oligonucleotide
  Sense strand starting at position 2862 of SEQ ID NO: 1879831
gcauuacauuuauagugga

SEQ ID NO: 1934785 - RNA, 19 nt, Artificial Sequence
  Description of Artificial Sequence: Synthetic oligonucleotide
  Antisense strand to SEQ ID NO: 1934784
uccacuauaaauguaaugc

SEQ ID NO: 1934786 - RNA, 19 nt, Artificial Sequence
  Description of Artificial Sequence: Synthetic oligonucleotide
  Sense strand starting at position 2876 of SEQ ID NO: 1879831
guggaaauuuggcucuugu

SEQ ID NO: 1934787 - RNA, 19 nt, Artificial Sequence
  Description of Artificial Sequence: Synthetic oligonucleotide
  Antisense strand to SEQ ID NO: 1934786
acaagagccaaauuuccac

SEQ ID NO: 1934788 - RNA, 19 nt, Artificial Sequence
  Description of Artificial Sequence: Synthetic oligonucleotide
  Sense strand starting at position 3160 of SEQ ID NO: 1879831
gaucauugucgcuagacuu

SEQ ID NO: 1934789 - RNA, 19 nt, Artificial Sequence
  Description of Artificial Sequence: Synthetic oligonucleotide
  Antisense strand to SEQ ID NO: 1934788
aagucuagcgacaaugauc

SEQ ID NO: 1934790 - RNA, 19 nt, Artificial Sequence
  Description of Artificial Sequence: Synthetic oligonucleotide
  Sense strand starting at position 3179 of SEQ ID NO: 1879831
uuaaguuuaucuccaugga

SEQ ID NO: 1934791 - RNA, 19 nt, Artificial Sequence
  Description of Artificial Sequence: Synthetic oligonucleotide
  Antisense strand to SEQ ID NO: 1934790
uccauggagauaaacuuaa

SEQ ID NO: 1934792 - RNA, 19 nt, Artificial Sequence
  Description of Artificial Sequence: Synthetic oligonucleotide
  Sense strand starting at position 3203 of SEQ ID NO: 1879831
gcuccauggguucauggaa

SEQ ID NO: 1934793 - RNA, 19 nt, Artificial Sequence
  Description of Artificial Sequence: Synthetic oligonucleotide
  Antisense strand to SEQ ID NO: 1934792
uuccaugaacccauggagc

SEQ ID NO: 1934794 - RNA, 19 nt, Artificial Sequence
  Description of Artificial Sequence: Synthetic oligonucleotide
  Sense strand starting at position 3256 of SEQ ID NO: 1879831
uucugagucugacuucuua

SEQ ID NO: 1934795 - RNA, 19 nt, Artificial Sequence
  Description of Artificial Sequence: Synthetic oligonucleotide
  Antisense strand to SEQ ID NO: 1934794
uaagaagucagacucagaa

SEQ ID NO: 1934796 - RNA, 19 nt, Artificial Sequence
  Description of Artificial Sequence: Synthetic oligonucleotide
  Sense strand starting at position 3725 of SEQ ID NO: 1879831
gagauuugcugauagaauc

SEQ ID NO: 1934797 - RNA, 19 nt, Artificial Sequence
  Description of Artificial Sequence: Synthetic oligonucleotide
  Antisense strand to SEQ ID NO: 1934796
gauucuaucagcaaaucuc

SEQ ID NO: 1934798 - RNA, 19 nt, Artificial Sequence
  Description of Artificial Sequence: Synthetic oligonucleotide
  Sense strand starting at position 3752 of SEQ ID NO: 1879831
aggguacugugagugaaau

SEQ ID NO: 1934799 - RNA, 19 nt, Artificial Sequence
  Description of Artificial Sequence: Synthetic oligonucleotide
  Antisense strand to SEQ ID NO: 1934798
auuucacucacaguacccu

SEQ ID NO: 1934800 - RNA, 19 nt, Artificial Sequence
  Description of Artificial Sequence: Synthetic oligonucleotide
  Sense strand starting at position 3753 of SEQ ID NO: 1879831
ggguacugugagugaaaua

SEQ ID NO: 1934801 - RNA, 19 nt, Artificial Sequence
  Description of Artificial Sequence: Synthetic oligonucleotide
  Antisense strand to SEQ ID NO: 1934800
uauuucacucacaguaccc

SEQ ID NO: 1934802 - RNA, 19 nt, Artificial Sequence
  Description of Artificial Sequence: Synthetic oligonucleotide
  Sense strand starting at position 3754 of SEQ ID NO: 1879831
gguacugugagugaaauac

SEQ ID NO: 1934803 - RNA, 19 nt, Artificial Sequence
  Description of Artificial Sequence: Synthetic oligonucleotide
  Antisense strand to SEQ ID NO: 1934802
guauuucacucacaguacc

SEQ ID NO: 1934804 - RNA, 19 nt, Artificial Sequence
  Description of Artificial Sequence: Synthetic oligonucleotide
  Sense strand starting at position 3764 of SEQ ID NO: 1879831
gugaaauacccuuaggcag

SEQ ID NO: 1934805 - RNA, 19 nt, Artificial Sequence
  Description of Artificial Sequence: Synthetic oligonucleotide
  Antisense strand to SEQ ID NO: 1934804
cugccuaaggguauuucac

SEQ ID NO: 1934806 - RNA, 19 nt, Artificial Sequence
  Description of Artificial Sequence: Synthetic oligonucleotide
  Sense strand starting at position 3799 of SEQ ID NO: 1879831
ucucuauaguuguuagaug

SEQ ID NO: 1934807 - RNA, 19 nt, Artificial Sequence
  Description of Artificial Sequence: Synthetic oligonucleotide
  Antisense strand to SEQ ID NO: 1934806
caucuaacaacuauagaga

SEQ ID NO: 1934808 - RNA, 19 nt, Artificial Sequence
  Description of Artificial Sequence: Synthetic oligonucleotide
  Sense strand starting at position 475 of SEQ ID NO: 1879832
ugcuuaucuccagugugca

SEQ ID NO: 1934809 - RNA, 19 nt, Artificial Sequence
  Description of Artificial Sequence: Synthetic oligonucleotide
  Antisense strand to SEQ ID NO: 1934808
ugcacacuggagauaagca

SEQ ID NO: 1934810 - RNA, 19 nt, Artificial Sequence
  Description of Artificial Sequence: Synthetic oligonucleotide
  Sense strand starting at position 612 of SEQ ID NO: 1879832
agaguagucccuuaagacu

SEQ ID NO: 1934811 - RNA, 19 nt, Artificial Sequence
  Description of Artificial Sequence: Synthetic oligonucleotide
  Antisense strand to SEQ ID NO: 1934810
agucuuaagggacuacucu

SEQ ID NO: 1934812 - RNA, 19 nt, Artificial Sequence
  Description of Artificial Sequence: Synthetic oligonucleotide
  Sense strand starting at position 623 of SEQ ID NO: 1879832
uuaagacuugcugaaguuu

SEQ ID NO: 1934813 - RNA, 19 nt, Artificial Sequence
  Description of Artificial Sequence: Synthetic oligonucleotide
  Antisense strand to SEQ ID NO: 1934812
aaacuucagcaagucuuaa

SEQ ID NO: 1934814 - RNA, 19 nt, Artificial Sequence
  Description of Artificial Sequence: Synthetic oligonucleotide
  Sense strand starting at position 632 of SEQ ID NO: 1879832
gcugaaguuuauuugcaaa

SEQ ID NO: 1934815 - RNA, 19 nt, Artificial Sequence
  Description of Artificial Sequence: Synthetic oligonucleotide
  Antisense strand to SEQ ID NO: 1934814
uuugcaaauaaacuucagc

SEQ ID NO: 1934816 - RNA, 19 nt, Artificial Sequence
  Description of Artificial Sequence: Synthetic oligonucleotide
  Sense strand starting at position 653 of SEQ ID NO: 1879832
gguaaacuauuaucugaac

SEQ ID NO: 1934817 - RNA, 19 nt, Artificial Sequence
  Description of Artificial Sequence: Synthetic oligonucleotide
  Antisense strand to SEQ ID NO: 1934816
guucagauaauaguuuacc

SEQ ID NO: 1934818 - RNA, 19 nt, Artificial Sequence
  Description of Artificial Sequence: Synthetic oligonucleotide
  Sense strand starting at position 711 of SEQ ID NO: 1879832
uucuaagacccaggaguua

SEQ ID NO: 1934819 - RNA, 19 nt, Artificial Sequence
  Description of Artificial Sequence: Synthetic oligonucleotide
  Antisense strand to SEQ ID NO: 1934818
uaacuccugggucuuagaa

SEQ ID NO: 1934820 - RNA, 19 nt, Artificial Sequence
  Description of Artificial Sequence: Synthetic oligonucleotide
  Sense strand starting at position 862 of SEQ ID NO: 1879832
ugaauaucccagugaguug

SEQ ID NO: 1934821 - RNA, 19 nt, Artificial Sequence
  Description of Artificial Sequence: Synthetic oligonucleotide
  Antisense strand to SEQ ID NO: 1934820
caacucacugggauauuca

SEQ ID NO: 1934822 - RNA, 19 nt, Artificial Sequence
  Description of Artificial Sequence: Synthetic oligonucleotide
  Sense strand starting at position 871 of SEQ ID NO: 1879832
cagugaguugagugacaca

SEQ ID NO: 1934823 - RNA, 19 nt, Artificial Sequence
  Description of Artificial Sequence: Synthetic oligonucleotide
  Antisense strand to SEQ ID NO: 1934822
ugugucacucaacucacug

SEQ ID NO: 1934824 - RNA, 19 nt, Artificial Sequence
  Description of Artificial Sequence: Synthetic oligonucleotide
  Sense strand starting at position 908 of SEQ ID NO: 1879832
gugcuaagccaauaaagua

SEQ ID NO: 1934825 - RNA, 19 nt, Artificial Sequence
  Description of Artificial Sequence: Synthetic oligonucleotide
  Antisense strand to SEQ ID NO: 1934824
uacuuuauuggcuuagcac

SEQ ID NO: 1934826 - RNA, 19 nt, Artificial Sequence
  Description of Artificial Sequence: Synthetic oligonucleotide
  Sense strand starting at position 990 of SEQ ID NO: 1879832
ucuugaagccacgaaugaa

SEQ ID NO: 1934827 - RNA, 19 nt, Artificial Sequence
  Description of Artificial Sequence: Synthetic oligonucleotide
  Antisense strand to SEQ ID NO: 1934826
uucauucguggcuucaaga

SEQ ID NO: 1934828 - RNA, 19 nt, Artificial Sequence
  Description of Artificial Sequence: Synthetic oligonucleotide
  Sense strand starting at position 1009 of SEQ ID NO: 1879832
gagauacagcguuaacagu

SEQ ID NO: 1934829 - RNA, 19 nt, Artificial Sequence
  Description of Artificial Sequence: Synthetic oligonucleotide
  Antisense strand to SEQ ID NO: 1934828
acuguuaacgcuguaucuc

SEQ ID NO: 1934830 - RNA, 19 nt, Artificial Sequence
  Description of Artificial Sequence: Synthetic oligonucleotide
  Sense strand starting at position 1055 of SEQ ID NO: 1879832
auguaaccaccuugauaug

SEQ ID NO: 1934831 - RNA, 19 nt, Artificial Sequence
  Description of Artificial Sequence: Synthetic oligonucleotide
  Antisense strand to SEQ ID NO: 1934830
cauaucaaggugguuacau

SEQ ID NO: 1934832 - RNA, 19 nt, Artificial Sequence
  Description of Artificial Sequence: Synthetic oligonucleotide
  Sense strand starting at position 1169 of SEQ ID NO: 1879832
agccaaauucgcuaugaau

SEQ ID NO: 1934833 - RNA, 19 nt, Artificial Sequence
  Description of Artificial Sequence: Synthetic oligonucleotide
  Antisense strand to SEQ ID NO: 1934832
auucauagcgaauuuggcu

SEQ ID NO: 1934834 - RNA, 19 nt, Artificial Sequence
  Description of Artificial Sequence: Synthetic oligonucleotide
  Sense strand starting at position 1334 of SEQ ID NO: 1879832
aucugaagguccuuggcaa

SEQ ID NO: 1934835 - RNA, 19 nt, Artificial Sequence
  Description of Artificial Sequence: Synthetic oligonucleotide
  Antisense strand to SEQ ID NO: 1934834
uugccaaggaccuucagau

SEQ ID NO: 1934836 - RNA, 19 nt, Artificial Sequence
  Description of Artificial Sequence: Synthetic oligonucleotide
  Sense strand starting at position 2357 of SEQ ID NO: 1879832
ggcucucguccugagaaag

SEQ ID NO: 1934837 - RNA, 19 nt, Artificial Sequence
  Description of Artificial Sequence: Synthetic oligonucleotide
  Antisense strand to SEQ ID NO: 1934836
cuuucucaggacgagagcc

SEQ ID NO: 1934838 - RNA, 19 nt, Artificial Sequence
  Description of Artificial Sequence: Synthetic oligonucleotide
  Sense strand starting at position 2399 of SEQ ID NO: 1879832
cgaggaggguguuuagaau

SEQ ID NO: 1934839 - RNA, 19 nt, Artificial Sequence
  Description of Artificial Sequence: Synthetic oligonucleotide
  Antisense strand to SEQ ID NO: 1934838
auucuaaacacccuccucg

SEQ ID NO: 1934840 - RNA, 19 nt, Artificial Sequence
  Description of Artificial Sequence: Synthetic oligonucleotide
  Sense strand starting at position 2496 of SEQ ID NO: 1879832
gcaguaacgagcuugcagu

SEQ ID NO: 1934841 - RNA, 19 nt, Artificial Sequence
  Description of Artificial Sequence: Synthetic oligonucleotide
  Antisense strand to SEQ ID NO: 1934840
acugcaagcucguuacugc

SEQ ID NO: 1934842 - RNA, 19 nt, Artificial Sequence
  Description of Artificial Sequence: Synthetic oligonucleotide
  Sense strand starting at position 2608 of SEQ ID NO: 1879832
ugguuagauguccagugag

SEQ ID NO: 1934843 - RNA, 19 nt, Artificial Sequence
  Description of Artificial Sequence: Synthetic oligonucleotide
  Antisense strand to SEQ ID NO: 1934842
cucacuggacaucuaacca

SEQ ID NO: 1934844 - RNA, 19 nt, Artificial Sequence
  Description of Artificial Sequence: Synthetic oligonucleotide
  Sense strand starting at position 2636 of SEQ ID NO: 1879832
guccaauccgggcaaugaa

SEQ ID NO: 1934845 - RNA, 19 nt, Artificial Sequence
  Description of Artificial Sequence: Synthetic oligonucleotide
  Antisense strand to SEQ ID NO: 1934844
uucauugcccggauuggac

SEQ ID NO: 1934846 - RNA, 19 nt, Artificial Sequence
  Description of Artificial Sequence: Synthetic oligonucleotide
  Sense strand starting at position 2649 of SEQ ID NO: 1879832
aaugaaucacgaugcuaug

SEQ ID NO: 1934847 - RNA, 19 nt, Artificial Sequence
  Description of Artificial Sequence: Synthetic oligonucleotide
  Antisense strand to SEQ ID NO: 1934846
cauagcaucgugauucauu

SEQ ID NO: 1934848 - RNA, 19 nt, Artificial Sequence
  Description of Artificial Sequence: Synthetic oligonucleotide
  Sense strand starting at position 2717 of SEQ ID NO: 1879832
agcaacaugugauuauacu

SEQ ID NO: 1934849 - RNA, 19 nt, Artificial Sequence
  Description of Artificial Sequence: Synthetic oligonucleotide
  Antisense strand to SEQ ID NO: 1934848
aguauaaucacauguugcu

SEQ ID NO: 1934850 - RNA, 19 nt, Artificial Sequence
  Description of Artificial Sequence: Synthetic oligonucleotide
  Sense strand starting at position 2718 of SEQ ID NO: 1879832
gcaacaugugauuauacuc

SEQ ID NO: 1934851 - RNA, 19 nt, Artificial Sequence
  Description of Artificial Sequence: Synthetic oligonucleotide
  Antisense strand to SEQ ID NO: 1934850
gaguauaaucacauguugc

SEQ ID NO: 1934852 - RNA, 19 nt, Artificial Sequence
  Description of Artificial Sequence: Synthetic oligonucleotide
  Sense strand starting at position 2723 of SEQ ID NO: 1879832
augugauuauacucaagac

SEQ ID NO: 1934853 - RNA, 19 nt, Artificial Sequence
  Description of Artificial Sequence: Synthetic oligonucleotide
  Antisense strand to SEQ ID NO: 1934852
gucuugaguauaaucacau

SEQ ID NO: 1934854 - RNA, 19 nt, Artificial Sequence
  Description of Artificial Sequence: Synthetic oligonucleotide
  Sense strand starting at position 2935 of SEQ ID NO: 1879832
ucgaaaggauaucauuuaa

SEQ ID NO: 1934855 - RNA, 19 nt, Artificial Sequence
  Description of Artificial Sequence: Synthetic oligonucleotide
  Antisense strand to SEQ ID NO: 1934854
uuaaaugauauccuuucga

SEQ ID NO: 1934856 - RNA, 19 nt, Artificial Sequence
  Description of Artificial Sequence: Synthetic oligonucleotide
  Sense strand starting at position 3125 of SEQ ID NO: 1879832
aggcuacuucucugauaau

SEQ ID NO: 1934857 - RNA, 19 nt, Artificial Sequence
  Description of Artificial Sequence: Synthetic oligonucleotide
  Antisense strand to SEQ ID NO: 1934856
auuaucagagaaguagccu

SEQ ID NO: 1934858 - RNA, 19 nt, Artificial Sequence
  Description of Artificial Sequence: Synthetic oligonucleotide
  Sense strand starting at position 3209 of SEQ ID NO: 1879832
gagauuguucguuagggac

SEQ ID NO: 1934859 - RNA, 19 nt, Artificial Sequence
  Description of Artificial Sequence: Synthetic oligonucleotide
  Antisense strand to SEQ ID NO: 1934858
gucccuaacgaacaaucuc

SEQ ID NO: 1934860 - RNA, 19 nt, Artificial Sequence
  Description of Artificial Sequence: Synthetic oligonucleotide
  Sense strand starting at position 3317 of SEQ ID NO: 1879832
uggaaugucaagugauuga

SEQ ID NO: 1934861 - RNA, 19 nt, Artificial Sequence
  Description of Artificial Sequence: Synthetic oligonucleotide
  Antisense strand to SEQ ID NO: 1934860
ucaaucacuugacauucca

SEQ ID NO: 1934862 - RNA, 19 nt, Artificial Sequence
  Description of Artificial Sequence: Synthetic oligonucleotide
  Sense strand starting at position 3321 of SEQ ID NO: 1879832
augucaagugauugagaau

SEQ ID NO: 1934863 - RNA, 19 nt, Artificial Sequence
  Description of Artificial Sequence: Synthetic oligonucleotide
  Antisense strand to SEQ ID NO: 1934862
auucucaaucacuugacau

SEQ ID NO: 1934864 - RNA, 19 nt, Artificial Sequence
  Description of Artificial Sequence: Synthetic oligonucleotide
  Sense strand starting at position 3330 of SEQ ID NO: 1879832
gauugagaaucuccuugug

SEQ ID NO: 1934865 - RNA, 19 nt, Artificial Sequence
  Description of Artificial Sequence: Synthetic oligonucleotide
  Antisense strand to SEQ ID NO: 1934864
cacaaggagauucucaauc

SEQ ID NO: 1934866 - RNA, 19 nt, Artificial Sequence
  Description of Artificial Sequence: Synthetic oligonucleotide
  Sense strand starting at position 3332 of SEQ ID NO: 1879832
uugagaaucuccuugugaa

SEQ ID NO: 1934867 - RNA, 19 nt, Artificial Sequence
  Description of Artificial Sequence: Synthetic oligonucleotide
  Antisense strand to SEQ ID NO: 1934866
uucacaaggagauucucaa

SEQ ID NO: 1934868 - RNA, 19 nt, Artificial Sequence
  Description of Artificial Sequence: Synthetic oligonucleotide
  Sense strand starting at position 3333 of SEQ ID NO: 1879832
ugagaaucuccuugugaag

SEQ ID NO: 1934869 - RNA, 19 nt, Artificial Sequence
  Description of Artificial Sequence: Synthetic oligonucleotide
  Antisense strand to SEQ ID NO: 1934868
cuucacaaggagauucuca

SEQ ID NO: 1934870 - RNA, 19 nt, Artificial Sequence
  Description of Artificial Sequence: Synthetic oligonucleotide
  Sense strand starting at position 3423 of SEQ ID NO: 1879832
ucauguucuguagaggaac

SEQ ID NO: 1934871 - RNA, 19 nt, Artificial Sequence
  Description of Artificial Sequence: Synthetic oligonucleotide
  Antisense strand to SEQ ID NO: 1934870
guuccucuacagaacauga

SEQ ID NO: 1934872 - RNA, 19 nt, Artificial Sequence
  Description of Artificial Sequence: Synthetic oligonucleotide
  Sense strand starting at position 3556 of SEQ ID NO: 1879832
aacggugaccucuagagua

SEQ ID NO: 1934873 - RNA, 19 nt, Artificial Sequence
  Description of Artificial Sequence: Synthetic oligonucleotide
  Antisense strand to SEQ ID NO: 1934872
uacucuagaggucaccguu

SEQ ID NO: 1934874 - RNA, 19 nt, Artificial Sequence
  Description of Artificial Sequence: Synthetic oligonucleotide
  Sense strand starting at position 3561 of SEQ ID NO: 1879832
ugaccucuagaguaguagu

SEQ ID NO: 1934875 - RNA, 19 nt, Artificial Sequence
  Description of Artificial Sequence: Synthetic oligonucleotide
  Antisense strand to SEQ ID NO: 1934874
acuacuacucuagagguca

SEQ ID NO: 1934876 - RNA, 19 nt, Artificial Sequence
  Description of Artificial Sequence: Synthetic oligonucleotide
  Sense strand starting at position 3676 of SEQ ID NO: 1879832
uugaacugauguguugaaa

SEQ ID NO: 1934877 - RNA, 19 nt, Artificial Sequence
  Description of Artificial Sequence: Synthetic oligonucleotide
  Antisense strand to SEQ ID NO: 1934876
uuucaacacaucaguucaa

SEQ ID NO: 1934878 - RNA, 19 nt, Artificial Sequence
  Description of Artificial Sequence: Synthetic oligonucleotide
  Sense strand starting at position 3704 of SEQ ID NO: 1879832
acuaguacuaaguguggaa

SEQ ID NO: 1934879 - RNA, 19 nt, Artificial Sequence
  Description of Artificial Sequence: Synthetic oligonucleotide
  Antisense strand to SEQ ID NO: 1934878
uuccacacuuaguacuagu

SEQ ID NO: 1934880 - RNA, 19 nt, Artificial Sequence
  Description of Artificial Sequence: Synthetic oligonucleotide
  Sense strand starting at position 3706 of SEQ ID NO: 1879832
uaguacuaaguguggaaau

SEQ ID NO: 1934881 - RNA, 19 nt, Artificial Sequence
  Description of Artificial Sequence: Synthetic oligonucleotide
  Antisense strand to SEQ ID NO: 1934880
auuuccacacuuaguacua

SEQ ID NO: 1934882 - RNA, 19 nt, Artificial Sequence
  Description of Artificial Sequence: Synthetic oligonucleotide
  Sense strand starting at position 3708 of SEQ ID NO: 1879832
guacuaaguguggaaaucu

SEQ ID NO: 1934883 - RNA, 19 nt, Artificial Sequence
  Description of Artificial Sequence: Synthetic oligonucleotide
  Antisense strand to SEQ ID NO: 1934882
agauuuccacacuuaguac

SEQ ID NO: 1934884 - RNA, 19 nt, Artificial Sequence
  Description of Artificial Sequence: Synthetic oligonucleotide
  Sense strand starting at position 3777 of SEQ ID NO: 1879832
acacuaugauugucaggau

SEQ ID NO: 1934885 - RNA, 19 nt, Artificial Sequence
  Description of Artificial Sequence: Synthetic oligonucleotide
  Antisense strand to SEQ ID NO: 1934884
auccugacaaucauagugu

SEQ ID NO: 1934886 - RNA, 19 nt, Artificial Sequence
  Description of Artificial Sequence: Synthetic oligonucleotide
  Sense strand starting at position 3916 of SEQ ID NO: 1879832
ucugguauuuggcuacauu

SEQ ID NO: 1934887 - RNA, 19 nt, Artificial Sequence
  Description of Artificial Sequence: Synthetic oligonucleotide
  Antisense strand to SEQ ID NO: 1934886
aauguagccaaauaccaga

SEQ ID NO: 1934888 - RNA, 19 nt, Artificial Sequence
  Description of Artificial Sequence: Synthetic oligonucleotide
  Sense strand starting at position 210 of SEQ ID NO: 1879833
agaucaccugcacguuuaa

SEQ ID NO: 1934889 - RNA, 19 nt, Artificial Sequence
  Description of Artificial Sequence: Synthetic oligonucleotide
  Antisense strand to SEQ ID NO: 1934888
uuaaacgugcaggugaucu

SEQ ID NO: 1934890 - RNA, 19 nt, Artificial Sequence
  Description of Artificial Sequence: Synthetic oligonucleotide
  Sense strand starting at position 233 of SEQ ID NO: 1879833
gugaacuucuucuguauac

SEQ ID NO: 1934891 - RNA, 19 nt, Artificial Sequence
  Description of Artificial Sequence: Synthetic oligonucleotide
  Antisense strand to SEQ ID NO: 1934890
guauacagaagaaguucac

SEQ ID NO: 1934892 - RNA, 19 nt, Artificial Sequence
  Description of Artificial Sequence: Synthetic oligonucleotide
  Sense strand starting at position 441 of SEQ ID NO: 1879833
uuuccuuaacuucgugaag

SEQ ID NO: 1934893 - RNA, 19 nt, Artificial Sequence
  Description of Artificial Sequence: Synthetic oligonucleotide
  Antisense strand to SEQ ID NO: 1934892
cuucacgaaguuaaggaaa

SEQ ID NO: 1934894 - RNA, 19 nt, Artificial Sequence
  Description of Artificial Sequence: Synthetic oligonucleotide
  Sense strand starting at position 443 of SEQ ID NO: 1879833
uccuuaacuucgugaagca

SEQ ID NO: 1934895 - RNA, 19 nt, Artificial Sequence
  Description of Artificial Sequence: Synthetic oligonucleotide
  Antisense strand to SEQ ID NO: 1934894
ugcuucacgaaguuaagga

SEQ ID NO: 1934896 - RNA, 19 nt, Artificial Sequence
  Description of Artificial Sequence: Synthetic oligonucleotide
  Sense strand starting at position 452 of SEQ ID NO: 1879833
ucgugaagcacugguauuc

SEQ ID NO: 1934897 - RNA, 19 nt, Artificial Sequence
  Description of Artificial Sequence: Synthetic oligonucleotide
  Antisense strand to SEQ ID NO: 1934896
gaauaccagugcuucacga

SEQ ID NO: 1934898 - RNA, 19 nt, Artificial Sequence
  Description of Artificial Sequence: Synthetic oligonucleotide
  Sense strand starting at position 595 of SEQ ID NO: 1879833
acaagauaucuccgcucac

SEQ ID NO: 1934899 - RNA, 19 nt, Artificial Sequence
  Description of Artificial Sequence: Synthetic oligonucleotide
  Antisense strand to SEQ ID NO: 1934898
gugagcggagauaucuugu

SEQ ID NO: 1934900 - RNA, 19 nt, Artificial Sequence
  Description of Artificial Sequence: Synthetic oligonucleotide
  Sense strand starting at position 855 of SEQ ID NO: 1879833
ccauuccucgcuugguuaa

SEQ ID NO: 1934901 - RNA, 19 nt, Artificial Sequence
  Description of Artificial Sequence: Synthetic oligonucleotide
  Antisense strand to SEQ ID NO: 1934900
uuaaccaagcgaggaaugg

SEQ ID NO: 1934902 - RNA, 19 nt, Artificial Sequence
  Description of Artificial Sequence: Synthetic oligonucleotide
  Sense strand starting at position 993 of SEQ ID NO: 1879833
ccagaaauccugugguuaa

SEQ ID NO: 1934903 - RNA, 19 nt, Artificial Sequence
  Description of Artificial Sequence: Synthetic oligonucleotide
  Antisense strand to SEQ ID NO: 1934902
uuaaccacaggauuucugg

SEQ ID NO: 1934904 - RNA, 19 nt, Artificial Sequence
  Description of Artificial Sequence: Synthetic oligonucleotide
  Sense strand starting at position 994 of SEQ ID NO: 1879833
cagaaauccugugguuaau

SEQ ID NO: 1934905 - RNA, 19 nt, Artificial Sequence
  Description of Artificial Sequence: Synthetic oligonucleotide
  Antisense strand to SEQ ID NO: 1934904
auuaaccacaggauuucug

SEQ ID NO: 1934906 - RNA, 19 nt, Artificial Sequence
  Description of Artificial Sequence: Synthetic oligonucleotide
  Sense strand starting at position 996 of SEQ ID NO: 1879833
gaaauccugugguuaauug

SEQ ID NO: 1934907 - RNA, 19 nt, Artificial Sequence
  Description of Artificial Sequence: Synthetic oligonucleotide
  Antisense strand to SEQ ID NO: 1934906
caauuaaccacaggauuuc

SEQ ID NO: 1934908 - RNA, 19 nt, Artificial Sequence
  Description of Artificial Sequence: Synthetic oligonucleotide
  Sense strand starting at position 1024 of SEQ ID NO: 1879833
cccgcuagucaugagauga

SEQ ID NO: 1934909 - RNA, 19 nt, Artificial Sequence
  Description of Artificial Sequence: Synthetic oligonucleotide
  Antisense strand to SEQ ID NO: 1934908
ucaucucaugacuagcggg

SEQ ID NO: 1934910 - RNA, 19 nt, Artificial Sequence
  Description of Artificial Sequence: Synthetic oligonucleotide
  Sense strand starting at position 1575 of SEQ ID NO: 1879833
uggacuucgcaguaaacuu

SEQ ID NO: 1934911 - RNA, 19 nt, Artificial Sequence
  Description of Artificial Sequence: Synthetic oligonucleotide
  Antisense strand to SEQ ID NO: 1934910
aaguuuacugcgaagucca

SEQ ID NO: 1934912 - RNA, 19 nt, Artificial Sequence
  Description of Artificial Sequence: Synthetic oligonucleotide
  Sense strand starting at position 2418 of SEQ ID NO: 1879833
aggcaaauguuugcauaau

SEQ ID NO: 1934913 - RNA, 19 nt, Artificial Sequence
  Description of Artificial Sequence: Synthetic oligonucleotide
  Antisense strand to SEQ ID NO: 1934912
auuaugcaaacauuugccu

SEQ ID NO: 1934914 - RNA, 19 nt, Artificial Sequence
  Description of Artificial Sequence: Synthetic oligonucleotide
  Sense strand starting at position 2419 of SEQ ID NO: 1879833
ggcaaauguuugcauaauu

SEQ ID NO: 1934915 - RNA, 19 nt, Artificial Sequence
  Description of Artificial Sequence: Synthetic oligonucleotide
  Antisense strand to SEQ ID NO: 1934914
aauuaugcaaacauuugcc

SEQ ID NO: 1934916 - RNA, 19 nt, Artificial Sequence
  Description of Artificial Sequence: Synthetic oligonucleotide
  Sense strand starting at position 2686 of SEQ ID NO: 1879833
cuagucuccuugugguuua

SEQ ID NO: 1934917 - RNA, 19 nt, Artificial Sequence
  Description of Artificial Sequence: Synthetic oligonucleotide
  Antisense strand to SEQ ID NO: 1934916
uaaaccacaaggagacuag

SEQ ID NO: 1934918 - RNA, 19 nt, Artificial Sequence
  Description of Artificial Sequence: Synthetic oligonucleotide
  Sense strand starting at position 2693 of SEQ ID NO: 1879833
ccuugugguuuacccauau

SEQ ID NO: 1934919 - RNA, 19 nt, Artificial Sequence
  Description of Artificial Sequence: Synthetic oligonucleotide
  Antisense strand to SEQ ID NO: 1934918
auauggguaaaccacaagg

SEQ ID NO: 1934920 - RNA, 19 nt, Artificial Sequence
  Description of Artificial Sequence: Synthetic oligonucleotide
  Sense strand starting at position 3121 of SEQ ID NO: 1879833
cuguaaucaagugguuaug

SEQ ID NO: 1934921 - RNA, 19 nt, Artificial Sequence
  Description of Artificial Sequence: Synthetic oligonucleotide
  Antisense strand to SEQ ID NO: 1934920
cauaaccacuugauuacag

SEQ ID NO: 1934922 - RNA, 19 nt, Artificial Sequence
  Description of Artificial Sequence: Synthetic oligonucleotide
  Sense strand starting at position 3123 of SEQ ID NO: 1879833
guaaucaagugguuauguu

SEQ ID NO: 1934923 - RNA, 19 nt, Artificial Sequence
  Description of Artificial Sequence: Synthetic oligonucleotide
  Antisense strand to SEQ ID NO: 1934922
aacauaaccacuugauuac

SEQ ID NO: 1934924 - RNA, 19 nt, Artificial Sequence
  Description of Artificial Sequence: Synthetic oligonucleotide
  Sense strand starting at position 3228 of SEQ ID NO: 1879833
guuccuaaaugagaacgau

SEQ ID NO: 1934925 - RNA, 19 nt, Artificial Sequence
  Description of Artificial Sequence: Synthetic oligonucleotide
  Antisense strand to SEQ ID NO: 1934924
aucguucucauuuaggaac

SEQ ID NO: 1934926 - RNA, 19 nt, Artificial Sequence
  Description of Artificial Sequence: Synthetic oligonucleotide
  Sense strand starting at position 3238 of SEQ ID NO: 1879833
gagaacgauagaugcuaga

SEQ ID NO: 1934927 - RNA, 19 nt, Artificial Sequence
  Description of Artificial Sequence: Synthetic oligonucleotide
  Antisense strand to SEQ ID NO: 1934926
ucuagcaucuaucguucuc

SEQ ID NO: 1934928 - RNA, 19 nt, Artificial Sequence
  Description of Artificial Sequence: Synthetic oligonucleotide
  Sense strand starting at position 3241 of SEQ ID NO: 1879833
aacgauagaugcuagaagu

SEQ ID NO: 1934929 - RNA, 19 nt, Artificial Sequence
  Description of Artificial Sequence: Synthetic oligonucleotide
  Antisense strand to SEQ ID NO: 1934928
acuucuagcaucuaucguu

SEQ ID NO: 1934930 - RNA, 19 nt, Artificial Sequence
  Description of Artificial Sequence: Synthetic oligonucleotide
  Sense strand starting at position 3382 of SEQ ID NO: 1879833
cagggacucuuuggguaau

SEQ ID NO: 1934931 - RNA, 19 nt, Artificial Sequence
  Description of Artificial Sequence: Synthetic oligonucleotide
  Antisense strand to SEQ ID NO: 1934930
auuacccaaagagucccug

SEQ ID NO: 1934932 - RNA, 19 nt, Artificial Sequence
  Description of Artificial Sequence: Synthetic oligonucleotide
  Sense strand starting at position 3384 of SEQ ID NO: 1879833
gggacucuuuggguaaucu

SEQ ID NO: 1934933 - RNA, 19 nt, Artificial Sequence
  Description of Artificial Sequence: Synthetic oligonucleotide
  Antisense strand to SEQ ID NO: 1934932
agauuacccaaagaguccc

SEQ ID NO: 1934934 - RNA, 19 nt, Artificial Sequence
  Description of Artificial Sequence: Synthetic oligonucleotide
  Sense strand starting at position 3385 of SEQ ID NO: 1879833
ggacucuuuggguaaucuu

SEQ ID NO: 1934935 - RNA, 19 nt, Artificial Sequence
  Description of Artificial Sequence: Synthetic oligonucleotide
  Antisense strand to SEQ ID NO: 1934934
aagauuacccaaagagucc

SEQ ID NO: 1934936 - RNA, 19 nt, Artificial Sequence
  Description of Artificial Sequence: Synthetic oligonucleotide
  Sense strand starting at position 3388 of SEQ ID NO: 1879833
cucuuuggguaaucuuuaa

SEQ ID NO: 1934937 - RNA, 19 nt, Artificial Sequence
  Description of Artificial Sequence: Synthetic oligonucleotide
  Antisense strand to SEQ ID NO: 1934936
uuaaagauuacccaaagag

SEQ ID NO: 1934938 - RNA, 19 nt, Artificial Sequence
  Description of Artificial Sequence: Synthetic oligonucleotide
  Sense strand starting at position 3410 of SEQ ID NO: 1879833
ugaguucucagagagccuu

SEQ ID NO: 1934939 - RNA, 19 nt, Artificial Sequence
  Description of Artificial Sequence: Synthetic oligonucleotide
  Antisense strand to SEQ ID NO: 1934938
aaggcucucugagaacuca

SEQ ID NO: 1934940 - RNA, 19 nt, Artificial Sequence
  Description of Artificial Sequence: Synthetic oligonucleotide
  Sense strand starting at position 3416 of SEQ ID NO: 1879833
cucagagagccuuguauaa

SEQ ID NO: 1934941 - RNA, 19 nt, Artificial Sequence
  Description of Artificial Sequence: Synthetic oligonucleotide
  Antisense strand to SEQ ID NO: 1934940
uuauacaaggcucucugag

SEQ ID NO: 1934942 - RNA, 19 nt, Artificial Sequence
  Description of Artificial Sequence: Synthetic oligonucleotide
  Sense strand starting at position 3418 of SEQ ID NO: 1879833
cagagagccuuguauaaac

SEQ ID NO: 1934943 - RNA, 19 nt, Artificial Sequence
  Description of Artificial Sequence: Synthetic oligonucleotide
  Antisense strand to SEQ ID NO: 1934942
guuuauacaaggcucucug

SEQ ID NO: 1934944 - RNA, 19 nt, Artificial Sequence
  Description of Artificial Sequence: Synthetic oligonucleotide
  Sense strand starting at position 3448 of SEQ ID NO: 1879833
uaaugauagcccugggaug

SEQ ID NO: 1934945 - RNA, 19 nt, Artificial Sequence
  Description of Artificial Sequence: Synthetic oligonucleotide
  Antisense strand to SEQ ID NO: 1934944
caucccagggcuaucauua

SEQ ID NO: 1934946 - RNA, 19 nt, Artificial Sequence
  Description of Artificial Sequence: Synthetic oligonucleotide
  Sense strand starting at position 3841 of SEQ ID NO: 1879833
gguggcuacuggugggaaa

SEQ ID NO: 1934947 - RNA, 19 nt, Artificial Sequence
  Description of Artificial Sequence: Synthetic oligonucleotide
  Antisense strand to SEQ ID NO: 1934946
uuucccaccaguagccacc

SEQ ID NO: 1934948 - RNA, 19 nt, Artificial Sequence
  Description of Artificial Sequence: Synthetic oligonucleotide
  Sense strand starting at position 24 of SEQ ID NO: 1879834
cacaguguacagugaucau

SEQ ID NO: 1934949 - RNA, 19 nt, Artificial Sequence
  Description of Artificial Sequence: Synthetic oligonucleotide
  Antisense strand to SEQ ID NO: 1934948
augaucacuguacacugug

SEQ ID NO: 1934950 - RNA, 19 nt, Artificial Sequence
  Description of Artificial Sequence: Synthetic oligonucleotide
  Sense strand starting at position 27 of SEQ ID NO: 1879834
aguguacagugaucaugaa

SEQ ID NO: 1934951 - RNA, 19 nt, Artificial Sequence
  Description of Artificial Sequence: Synthetic oligonucleotide
  Antisense strand to SEQ ID NO: 1934950
uucaugaucacuguacacu

SEQ ID NO: 1934952 - RNA, 19 nt, Artificial Sequence
  Description of Artificial Sequence: Synthetic oligonucleotide
  Sense strand starting at position 28 of SEQ ID NO: 1879834
guguacagugaucaugaaa

SEQ ID NO: 1934953 - RNA, 19 nt, Artificial Sequence
  Description of Artificial Sequence: Synthetic oligonucleotide
  Antisense strand to SEQ ID NO: 1934952
uuucaugaucacuguacac

SEQ ID NO: 1934954 - RNA, 19 nt, Artificial Sequence
  Description of Artificial Sequence: Synthetic oligonucleotide
  Sense strand starting at position 91 of SEQ ID NO: 1879834
ugcaguugccaugagaaua

SEQ ID NO: 1934955 - RNA, 19 nt, Artificial Sequence
  Description of Artificial Sequence: Synthetic oligonucleotide
  Antisense strand to SEQ ID NO: 1934954
uauucucauggcaacugca

SEQ ID NO: 1934956 - RNA, 19 nt, Artificial Sequence
  Description of Artificial Sequence: Synthetic oligonucleotide
  Sense strand starting at position 538 of SEQ ID NO: 1879834
uggucaugauauucuuuga

SEQ ID NO: 1934957 - RNA, 19 nt, Artificial Sequence
  Description of Artificial Sequence: Synthetic oligonucleotide
  Antisense strand to SEQ ID NO: 1934956
ucaaagaauaucaugacca

SEQ ID NO: 1934958 - RNA, 19 nt, Artificial Sequence
  Description of Artificial Sequence: Synthetic oligonucleotide
  Sense strand starting at position 1186 of SEQ ID NO: 1879834
acugguaggagucgaauaa

SEQ ID NO: 1934959 - RNA, 19 nt, Artificial Sequence
  Description of Artificial Sequence: Synthetic oligonucleotide
  Antisense strand to SEQ ID NO: 1934958
uuauucgacuccuaccagu

SEQ ID NO: 1934960 - RNA, 19 nt, Artificial Sequence
  Description of Artificial Sequence: Synthetic oligonucleotide
  Sense strand starting at position 1187 of SEQ ID NO: 1879834
cugguaggagucgaauaau

SEQ ID NO: 1934961 - RNA, 19 nt, Artificial Sequence
  Description of Artificial Sequence: Synthetic oligonucleotide
  Antisense strand to SEQ ID NO: 1934960
auuauucgacuccuaccag

SEQ ID NO: 1934962 - RNA, 19 nt, Artificial Sequence
  Description of Artificial Sequence: Synthetic oligonucleotide
  Sense strand starting at position 1190 of SEQ ID NO: 1879834
guaggagucgaauaauauc

SEQ ID NO: 1934963 - RNA, 19 nt, Artificial Sequence
  Description of Artificial Sequence: Synthetic oligonucleotide
  Antisense strand to SEQ ID NO: 1934962
gauauuauucgacuccuac

SEQ ID NO: 1934964 - RNA, 19 nt, Artificial Sequence
  Description of Artificial Sequence: Synthetic oligonucleotide
  Sense strand starting at position 1341 of SEQ ID NO: 1879834
ggcauaaagaagugguuaa

SEQ ID NO: 1934965 - RNA, 19 nt, Artificial Sequence
  Description of Artificial Sequence: Synthetic oligonucleotide
  Antisense strand to SEQ ID NO: 1934964
uuaaccacuucuuuaugcc

SEQ ID NO: 1934966 - RNA, 19 nt, Artificial Sequence
  Description of Artificial Sequence: Synthetic oligonucleotide
  Sense strand starting at position 1342 of SEQ ID NO: 1879834
gcauaaagaagugguuaaa

SEQ ID NO: 1934967 - RNA, 19 nt, Artificial Sequence
  Description of Artificial Sequence: Synthetic oligonucleotide
  Antisense strand to SEQ ID NO: 1934966
uuuaaccacuucuuuaugc

SEQ ID NO: 1934968 - RNA, 19 nt, Artificial Sequence
  Description of Artificial Sequence: Synthetic oligonucleotide
  Sense strand starting at position 1427 of SEQ ID NO: 1879834
cuggguaguaaaugaugaa

SEQ ID NO: 1934969 - RNA, 19 nt, Artificial Sequence
  Description of Artificial Sequence: Synthetic oligonucleotide
  Antisense strand to SEQ ID NO: 1934968
uucaucauuuacuacccag

SEQ ID NO: 1934970 - RNA, 19 nt, Artificial Sequence
  Description of Artificial Sequence: Synthetic oligonucleotide
  Sense strand starting at position 1490 of SEQ ID NO: 1879834
uagugaauuguccagguga

SEQ ID NO: 1934971 - RNA, 19 nt, Artificial Sequence
  Description of Artificial Sequence: Synthetic oligonucleotide
  Antisense strand to SEQ ID NO: 1934970
ucaccuggacaauucacua

SEQ ID NO: 1934972 - RNA, 19 nt, Artificial Sequence
  Description of Artificial Sequence: Synthetic oligonucleotide
  Sense strand starting at position 1563 of SEQ ID NO: 1879834
gcaaacagugagcaugaau

SEQ ID NO: 1934973 - RNA, 19 nt, Artificial Sequence
  Description of Artificial Sequence: Synthetic oligonucleotide
  Antisense strand to SEQ ID NO: 1934972
auucaugcucacuguuugc

SEQ ID NO: 1934974 - RNA, 19 nt, Artificial Sequence
  Description of Artificial Sequence: Synthetic oligonucleotide
  Sense strand starting at position 1577 of SEQ ID NO: 1879834
ugaauagagugggcucaau

SEQ ID NO: 1934975 - RNA, 19 nt, Artificial Sequence
  Description of Artificial Sequence: Synthetic oligonucleotide
  Antisense strand to SEQ ID NO: 1934974
auugagcccacucuauuca

SEQ ID NO: 1934976 - RNA, 19 nt, Artificial Sequence
  Description of Artificial Sequence: Synthetic oligonucleotide
  Sense strand starting at position 1740 of SEQ ID NO: 1879834
gcaauauuaguaggaguaa

SEQ ID NO: 1934977 - RNA, 19 nt, Artificial Sequence
  Description of Artificial Sequence: Synthetic oligonucleotide
  Antisense strand to SEQ ID NO: 1934976
uuacuccuacuaauauugc

SEQ ID NO: 1934978 - RNA, 19 nt, Artificial Sequence
  Description of Artificial Sequence: Synthetic oligonucleotide
  Sense strand starting at position 1755 of SEQ ID NO: 1879834
guaauucaggcuuggcuga

SEQ ID NO: 1934979 - RNA, 19 nt, Artificial Sequence
  Description of Artificial Sequence: Synthetic oligonucleotide
  Antisense strand to SEQ ID NO: 1934978
ucagccaagccugaauuac

SEQ ID NO: 1934980 - RNA, 19 nt, Artificial Sequence
  Description of Artificial Sequence: Synthetic oligonucleotide
  Sense strand starting at position 1760 of SEQ ID NO: 1879834
ucaggcuuggcugacaaga

SEQ ID NO: 1934981 - RNA, 19 nt, Artificial Sequence
  Description of Artificial Sequence: Synthetic oligonucleotide
  Antisense strand to SEQ ID NO: 1934980
ucuugucagccaagccuga

SEQ ID NO: 1934982 - RNA, 19 nt, Artificial Sequence
  Description of Artificial Sequence: Synthetic oligonucleotide
  Sense strand starting at position 1876 of SEQ ID NO: 1879834
gggacauguugccucucga

SEQ ID NO: 1934983 - RNA, 19 nt, Artificial Sequence
  Description of Artificial Sequence: Synthetic oligonucleotide
  Antisense strand to SEQ ID NO: 1934982
ucgagaggcaacauguccc

SEQ ID NO: 1934984 - RNA, 19 nt, Artificial Sequence
  Description of Artificial Sequence: Synthetic oligonucleotide
  Sense strand starting at position 2167 of SEQ ID NO: 1879834
uaggucuguguacacaaau

SEQ ID NO: 1934985 - RNA, 19 nt, Artificial Sequence
  Description of Artificial Sequence: Synthetic oligonucleotide
  Antisense strand to SEQ ID NO: 1934984
auuuguguacacagaccua

SEQ ID NO: 1934986 - RNA, 19 nt, Artificial Sequence
  Description of Artificial Sequence: Synthetic oligonucleotide
  Sense strand starting at position 2221 of SEQ ID NO: 1879834
guucuaacaccucguagga

SEQ ID NO: 1934987 - RNA, 19 nt, Artificial Sequence
  Description of Artificial Sequence: Synthetic oligonucleotide
  Antisense strand to SEQ ID NO: 1934986
uccuacgagguguuagaac

SEQ ID NO: 1934988 - RNA, 19 nt, Artificial Sequence
  Description of Artificial Sequence: Synthetic oligonucleotide
  Sense strand starting at position 2230 of SEQ ID NO: 1879834
ccucguaggagagauacuu

SEQ ID NO: 1934989 - RNA, 19 nt, Artificial Sequence
  Description of Artificial Sequence: Synthetic oligonucleotide
  Antisense strand to SEQ ID NO: 1934988
aaguaucucuccuacgagg

SEQ ID NO: 1934990 - RNA, 19 nt, Artificial Sequence
  Description of Artificial Sequence: Synthetic oligonucleotide
  Sense strand starting at position 2310 of SEQ ID NO: 1879834
ugagauuuguuggaugggu

SEQ ID NO: 1934991 - RNA, 19 nt, Artificial Sequence
  Description of Artificial Sequence: Synthetic oligonucleotide
  Antisense strand to SEQ ID NO: 1934990
acccauccaacaaaucuca

SEQ ID NO: 1934992 - RNA, 19 nt, Artificial Sequence
  Description of Artificial Sequence: Synthetic oligonucleotide
  Sense strand starting at position 2318 of SEQ ID NO: 1879834
guuggaugggugcaaugua

SEQ ID NO: 1934993 - RNA, 19 nt, Artificial Sequence
  Description of Artificial Sequence: Synthetic oligonucleotide
  Antisense strand to SEQ ID NO: 1934992
uacauugcacccauccaac

SEQ ID NO: 1934994 - RNA, 19 nt, Artificial Sequence
  Description of Artificial Sequence: Synthetic oligonucleotide
  Sense strand starting at position 2336 of SEQ ID NO: 1879834
accagcucuugagucagaa

SEQ ID NO: 1934995 - RNA, 19 nt, Artificial Sequence
  Description of Artificial Sequence: Synthetic oligonucleotide
  Antisense strand to SEQ ID NO: 1934994
uucugacucaagagcuggu

SEQ ID NO: 1934996 - RNA, 19 nt, Artificial Sequence
  Description of Artificial Sequence: Synthetic oligonucleotide
  Sense strand starting at position 2352 of SEQ ID NO: 1879834
gaaugagucuuggugcuac

SEQ ID NO: 1934997 - RNA, 19 nt, Artificial Sequence
  Description of Artificial Sequence: Synthetic oligonucleotide
  Antisense strand to SEQ ID NO: 1934996
guagcaccaagacucauuc

SEQ ID NO: 1934998 - RNA, 19 nt, Artificial Sequence
  Description of Artificial Sequence: Synthetic oligonucleotide
  Sense strand starting at position 2409 of SEQ ID NO: 1879834
gucaacuguuuaucuagaa

SEQ ID NO: 1934999 - RNA, 19 nt, Artificial Sequence
  Description of Artificial Sequence: Synthetic oligonucleotide
  Antisense strand to SEQ ID NO: 1934998
uucuagauaaacaguugac

SEQ ID NO: 1935000 - RNA, 19 nt, Artificial Sequence
  Description of Artificial Sequence: Synthetic oligonucleotide
  Sense strand starting at position 2956 of SEQ ID NO: 1879834
uggaguacucacuaccuau

SEQ ID NO: 1935001 - RNA, 19 nt, Artificial Sequence
  Description of Artificial Sequence: Synthetic oligonucleotide
  Antisense strand to SEQ ID NO: 1935000
auagguagugaguacucca

SEQ ID NO: 1935002 - RNA, 19 nt, Artificial Sequence
  Description of Artificial Sequence: Synthetic oligonucleotide
  Sense strand starting at position 3035 of SEQ ID NO: 1879834
guacaaggcagauauguca

SEQ ID NO: 1935003 - RNA, 19 nt, Artificial Sequence
  Description of Artificial Sequence: Synthetic oligonucleotide
  Antisense strand to SEQ ID NO: 1935002
ugacauaucugccuuguac

SEQ ID NO: 1935004 - RNA, 19 nt, Artificial Sequence
  Description of Artificial Sequence: Synthetic oligonucleotide
  Sense strand starting at position 3217 of SEQ ID NO: 1879834
acagaaucgaguggucaca

SEQ ID NO: 1935005 - RNA, 19 nt, Artificial Sequence
  Description of Artificial Sequence: Synthetic oligonucleotide
  Antisense strand to SEQ ID NO: 1935004
ugugaccacucgauucugu

SEQ ID NO: 1935006 - RNA, 19 nt, Artificial Sequence
  Description of Artificial Sequence: Synthetic oligonucleotide
  Sense strand starting at position 3219 of SEQ ID NO: 1879834
agaaucgaguggucacaaa

SEQ ID NO: 1935007 - RNA, 19 nt, Artificial Sequence
  Description of Artificial Sequence: Synthetic oligonucleotide
  Antisense strand to SEQ ID NO: 1935006
uuugugaccacucgauucu

SEQ ID NO: 1935008 - RNA, 19 nt, Artificial Sequence
  Description of Artificial Sequence: Synthetic oligonucleotide
  Sense strand starting at position 3331 of SEQ ID NO: 1879834
ggucaugcucagugcauuu

SEQ ID NO: 1935009 - RNA, 19 nt, Artificial Sequence
  Description of Artificial Sequence: Synthetic oligonucleotide
  Antisense strand to SEQ ID NO: 1935008
aaaugcacugagcaugacc

SEQ ID NO: 1935010 - RNA, 19 nt, Artificial Sequence
  Description of Artificial Sequence: Synthetic oligonucleotide
  Sense strand starting at position 3375 of SEQ ID NO: 1879834
cccagacucuccguguaaa

SEQ ID NO: 1935011 - RNA, 19 nt, Artificial Sequence
  Description of Artificial Sequence: Synthetic oligonucleotide
  Antisense strand to SEQ ID NO: 1935010
uuuacacggagagucuggg

SEQ ID NO: 1935012 - RNA, 19 nt, Artificial Sequence
  Description of Artificial Sequence: Synthetic oligonucleotide
  Sense strand starting at position 3376 of SEQ ID NO: 1879834
ccagacucuccguguaaac

SEQ ID NO: 1935013 - RNA, 19 nt, Artificial Sequence
  Description of Artificial Sequence: Synthetic oligonucleotide
  Antisense strand to SEQ ID NO: 1935012
guuuacacggagagucugg

SEQ ID NO: 1935014 - RNA, 19 nt, Artificial Sequence
  Description of Artificial Sequence: Synthetic oligonucleotide
  Sense strand starting at position 3378 of SEQ ID NO: 1879834
agacucuccguguaaacua

SEQ ID NO: 1935015 - RNA, 19 nt, Artificial Sequence
  Description of Artificial Sequence: Synthetic oligonucleotide
  Antisense strand to SEQ ID NO: 1935014
uaguuuacacggagagucu

SEQ ID NO: 1935016 - RNA, 19 nt, Artificial Sequence
  Description of Artificial Sequence: Synthetic oligonucleotide
  Sense strand starting at position 3681 of SEQ ID NO: 1879834
ccaagaaaucccuguuugg

SEQ ID NO: 1935017 - RNA, 19 nt, Artificial Sequence
  Description of Artificial Sequence: Synthetic oligonucleotide
  Antisense strand to SEQ ID NO: 1935016
ccaaacagggauuucuugg

SEQ ID NO: 1935018 - RNA, 19 nt, Artificial Sequence
  Description of Artificial Sequence: Synthetic oligonucleotide
  Sense strand starting at position 3684 of SEQ ID NO: 1879834
agaaaucccuguuugguua

SEQ ID NO: 1935019 - RNA, 19 nt, Artificial Sequence
  Description of Artificial Sequence: Synthetic oligonucleotide
  Antisense strand to SEQ ID NO: 1935018
uaaccaaacagggauuucu

SEQ ID NO: 1935020 - RNA, 19 nt, Artificial Sequence
  Description of Artificial Sequence: Synthetic oligonucleotide
  Sense strand starting at position 3724 of SEQ ID NO: 1879834
gcagguuccuaucuugaga

SEQ ID NO: 1935021 - RNA, 19 nt, Artificial Sequence
  Description of Artificial Sequence: Synthetic oligonucleotide
  Antisense strand to SEQ ID NO: 1935020
ucucaagauaggaaccugc

SEQ ID NO: 1935022 - RNA, 19 nt, Artificial Sequence
  Description of Artificial Sequence: Synthetic oligonucleotide
  Sense strand starting at position 3763 of SEQ ID NO: 1879834
acacaagugccaugaauaa

SEQ ID NO: 1935023 - RNA, 19 nt, Artificial Sequence
  Description of Artificial Sequence: Synthetic oligonucleotide
  Antisense strand to SEQ ID NO: 1935022
uuauucauggcacuugugu

SEQ ID NO: 1935024 - RNA, 19 nt, Artificial Sequence
  Description of Artificial Sequence: Synthetic oligonucleotide
  Sense strand starting at position 3947 of SEQ ID NO: 1879834
ccucuuccucgugauuacu

SEQ ID NO: 1935025 - RNA, 19 nt, Artificial Sequence
  Description of Artificial Sequence: Synthetic oligonucleotide
  Antisense strand to SEQ ID NO: 1935024
aguaaucacgaggaagagg

SEQ ID NO: 1935026 - RNA, 19 nt, Artificial Sequence
  Description of Artificial Sequence: Synthetic oligonucleotide
  Sense strand starting at position 3953 of SEQ ID NO: 1879834
ccucgugauuacuuugauu

SEQ ID NO: 1935027 - RNA, 19 nt, Artificial Sequence
  Description of Artificial Sequence: Synthetic oligonucleotide
  Antisense strand to SEQ ID NO: 1935026
aaucaaaguaaucacgagg

SEQ ID NO: 1935028 - RNA, 19 nt, Artificial Sequence
  Description of Artificial Sequence: Synthetic oligonucleotide
  Sense strand starting at position 329 of SEQ ID NO: 1879835
cucugaauccugggccauu

SEQ ID NO: 1935029 - RNA, 19 nt, Artificial Sequence
  Description of Artificial Sequence: Synthetic oligonucleotide
  Antisense strand to SEQ ID NO: 1935028
aauggcccaggauucagag

SEQ ID NO: 1935030 - RNA, 19 nt, Artificial Sequence
  Description of Artificial Sequence: Synthetic oligonucleotide
  Sense strand starting at position 559 of SEQ ID NO: 1879835
ccgaaauacuaaucaaguu

SEQ ID NO: 1935031 - RNA, 19 nt, Artificial Sequence
  Description of Artificial Sequence: Synthetic oligonucleotide
  Antisense strand to SEQ ID NO: 1935030
aacuugauuaguauuucgg

SEQ ID NO: 1935032 - RNA, 19 nt, Artificial Sequence
  Description of Artificial Sequence: Synthetic oligonucleotide
  Sense strand starting at position 574 of SEQ ID NO: 1879835
aguuucuguuaaguuagaa

SEQ ID NO: 1935033 - RNA, 19 nt, Artificial Sequence
  Description of Artificial Sequence: Synthetic oligonucleotide
  Antisense strand to SEQ ID NO: 1935032
uucuaacuuaacagaaacu

SEQ ID NO: 1935034 - RNA, 19 nt, Artificial Sequence
  Description of Artificial Sequence: Synthetic oligonucleotide
  Sense strand starting at position 632 of SEQ ID NO: 1879835
acaacuguuccaggagguu

SEQ ID NO: 1935035 - RNA, 19 nt, Artificial Sequence
  Description of Artificial Sequence: Synthetic oligonucleotide
  Antisense strand to SEQ ID NO: 1935034
aaccuccuggaacaguugu

SEQ ID NO: 1935036 - RNA, 19 nt, Artificial Sequence
  Description of Artificial Sequence: Synthetic oligonucleotide
  Sense strand starting at position 681 of SEQ ID NO: 1879835
gcaauuugcagagguaggu

SEQ ID NO: 1935037 - RNA, 19 nt, Artificial Sequence
  Description of Artificial Sequence: Synthetic oligonucleotide
  Antisense strand to SEQ ID NO: 1935036
accuaccucugcaaauugc

SEQ ID NO: 1935038 - RNA, 19 nt, Artificial Sequence
  Description of Artificial Sequence: Synthetic oligonucleotide
  Sense strand starting at position 685 of SEQ ID NO: 1879835
uuugcagagguagguauua

SEQ ID NO: 1935039 - RNA, 19 nt, Artificial Sequence
  Description of Artificial Sequence: Synthetic oligonucleotide
  Antisense strand to SEQ ID NO: 1935038
uaauaccuaccucugcaaa

SEQ ID NO: 1935040 - RNA, 19 nt, Artificial Sequence
  Description of Artificial Sequence: Synthetic oligonucleotide
  Sense strand starting at position 687 of SEQ ID NO: 1879835
ugcagagguagguauuauu

SEQ ID NO: 1935041 - RNA, 19 nt, Artificial Sequence
  Description of Artificial Sequence: Synthetic oligonucleotide
  Antisense strand to SEQ ID NO: 1935040
aauaauaccuaccucugca

SEQ ID NO: 1935042 - RNA, 19 nt, Artificial Sequence
  Description of Artificial Sequence: Synthetic oligonucleotide
  Sense strand starting at position 936 of SEQ ID NO: 1879835
uucuauuaggagcagaguu

SEQ ID NO: 1935043 - RNA, 19 nt, Artificial Sequence
  Description of Artificial Sequence: Synthetic oligonucleotide
  Antisense strand to SEQ ID NO: 1935042
aacucugcuccuaauagaa

SEQ ID NO: 1935044 - RNA, 19 nt, Artificial Sequence
  Description of Artificial Sequence: Synthetic oligonucleotide
  Sense strand starting at position 944 of SEQ ID NO: 1879835
ggagcagaguucucuuuaa

SEQ ID NO: 1935045 - RNA, 19 nt, Artificial Sequence
  Description of Artificial Sequence: Synthetic oligonucleotide
  Antisense strand to SEQ ID NO: 1935044
uuaaagagaacucugcucc

SEQ ID NO: 1935046 - RNA, 19 nt, Artificial Sequence
  Description of Artificial Sequence: Synthetic oligonucleotide
  Sense strand starting at position 1372 of SEQ ID NO: 1879835
cauuuaguuucucagagag

SEQ ID NO: 1935047 - RNA, 19 nt, Artificial Sequence
  Description of Artificial Sequence: Synthetic oligonucleotide
  Antisense strand to SEQ ID NO: 1935046
cucucugagaaacuaaaug

SEQ ID NO: 1935048 - RNA, 19 nt, Artificial Sequence
  Description of Artificial Sequence: Synthetic oligonucleotide
  Sense strand starting at position 2010 of SEQ ID NO: 1879835
acgagaggucaccaccgau

SEQ ID NO: 1935049 - RNA, 19 nt, Artificial Sequence
  Description of Artificial Sequence: Synthetic oligonucleotide
  Antisense strand to SEQ ID NO: 1935048
aucgguggugaccucucgu

SEQ ID NO: 1935050 - RNA, 19 nt, Artificial Sequence
  Description of Artificial Sequence: Synthetic oligonucleotide
  Sense strand starting at position 2139 of SEQ ID NO: 1879835
ucauuucuuguguguacaa

SEQ ID NO: 1935051 - RNA, 19 nt, Artificial Sequence
  Description of Artificial Sequence: Synthetic oligonucleotide
  Antisense strand to SEQ ID NO: 1935050
uuguacacacaagaaauga

SEQ ID NO: 1935052 - RNA, 19 nt, Artificial Sequence
  Description of Artificial Sequence: Synthetic oligonucleotide
  Sense strand starting at position 2198 of SEQ ID NO: 1879835
ucuaaaugguagucaugaa

SEQ ID NO: 1935053 - RNA, 19 nt, Artificial Sequence
  Description of Artificial Sequence: Synthetic oligonucleotide
  Antisense strand to SEQ ID NO: 1935052
uucaugacuaccauuuaga

SEQ ID NO: 1935054 - RNA, 19 nt, Artificial Sequence
  Description of Artificial Sequence: Synthetic oligonucleotide
  Sense strand starting at position 2287 of SEQ ID NO: 1879835
uuuagacugccaugauauc

SEQ ID NO: 1935055 - RNA, 19 nt, Artificial Sequence
  Description of Artificial Sequence: Synthetic oligonucleotide
  Antisense strand to SEQ ID NO: 1935054
gauaucauggcagucuaaa

SEQ ID NO: 1935056 - RNA, 19 nt, Artificial Sequence
  Description of Artificial Sequence: Synthetic oligonucleotide
  Sense strand starting at position 2297 of SEQ ID NO: 1879835
caugauauccugugggucu

SEQ ID NO: 1935057 - RNA, 19 nt, Artificial Sequence
  Description of Artificial Sequence: Synthetic oligonucleotide
  Antisense strand to SEQ ID NO: 1935056
agacccacaggauaucaug

SEQ ID NO: 1935058 - RNA, 19 nt, Artificial Sequence
  Description of Artificial Sequence: Synthetic oligonucleotide
  Sense strand starting at position 2469 of SEQ ID NO: 1879835
uuaagaccaguuugacauu

SEQ ID NO: 1935059 - RNA, 19 nt, Artificial Sequence
  Description of Artificial Sequence: Synthetic oligonucleotide
  Antisense strand to SEQ ID NO: 1935058
aaugucaaacuggucuuaa

SEQ ID NO: 1935060 - RNA, 19 nt, Artificial Sequence
  Description of Artificial Sequence: Synthetic oligonucleotide
  Sense strand starting at position 2504 of SEQ ID NO: 1879835
uuccucuaugugggaugau

SEQ ID NO: 1935061 - RNA, 19 nt, Artificial Sequence
  Description of Artificial Sequence: Synthetic oligonucleotide
  Antisense strand to SEQ ID NO: 1935060
aucaucccacauagaggaa

SEQ ID NO: 1935062 - RNA, 19 nt, Artificial Sequence
  Description of Artificial Sequence: Synthetic oligonucleotide
  Sense strand starting at position 2572 of SEQ ID NO: 1879835
augucauucugggcccaua

SEQ ID NO: 1935063 - RNA, 19 nt, Artificial Sequence
  Description of Artificial Sequence: Synthetic oligonucleotide
  Antisense strand to SEQ ID NO: 1935062
uaugggcccagaaugacau

SEQ ID NO: 1935064 - RNA, 19 nt, Artificial Sequence
  Description of Artificial Sequence: Synthetic oligonucleotide
  Sense strand starting at position 2575 of SEQ ID NO: 1879835
ucauucugggcccauaaga

SEQ ID NO: 1935065 - RNA, 19 nt, Artificial Sequence
  Description of Artificial Sequence: Synthetic oligonucleotide
  Antisense strand to SEQ ID NO: 1935064
ucuuaugggcccagaauga

SEQ ID NO: 1935066 - RNA, 19 nt, Artificial Sequence
  Description of Artificial Sequence: Synthetic oligonucleotide
  Sense strand starting at position 2749 of SEQ ID NO: 1879835
guucuuauggaauauugcu

SEQ ID NO: 1935067 - RNA, 19 nt, Artificial Sequence
  Description of Artificial Sequence: Synthetic oligonucleotide
  Antisense strand to SEQ ID NO: 1935066
agcaauauuccauaagaac

SEQ ID NO: 1935068 - RNA, 19 nt, Artificial Sequence
  Description of Artificial Sequence: Synthetic oligonucleotide
  Sense strand starting at position 2755 of SEQ ID NO: 1879835
auggaauauugcuugauaa

SEQ ID NO: 1935069 - RNA, 19 nt, Artificial Sequence
  Description of Artificial Sequence: Synthetic oligonucleotide
  Antisense strand to SEQ ID NO: 1935068
uuaucaagcaauauuccau

SEQ ID NO: 1935070 - RNA, 19 nt, Artificial Sequence
  Description of Artificial Sequence: Synthetic oligonucleotide
  Sense strand starting at position 2756 of SEQ ID NO: 1879835
uggaauauugcuugauaag

SEQ ID NO: 1935071 - RNA, 19 nt, Artificial Sequence
  Description of Artificial Sequence: Synthetic oligonucleotide
  Antisense strand to SEQ ID NO: 1935070
cuuaucaagcaauauucca

SEQ ID NO: 1935072 - RNA, 19 nt, Artificial Sequence
  Description of Artificial Sequence: Synthetic oligonucleotide
  Sense strand starting at position 2757 of SEQ ID NO: 1879835
ggaauauugcuugauaagu

SEQ ID NO: 1935073 - RNA, 19 nt, Artificial Sequence
  Description of Artificial Sequence: Synthetic oligonucleotide
  Antisense strand to SEQ ID NO: 1935072
acuuaucaagcaauauucc

SEQ ID NO: 1935074 - RNA, 19 nt, Artificial Sequence
  Description of Artificial Sequence: Synthetic oligonucleotide
  Sense strand starting at position 2811 of SEQ ID NO: 1879835
guugcuuuccacuaacaga

SEQ ID NO: 1935075 - RNA, 19 nt, Artificial Sequence
  Description of Artificial Sequence: Synthetic oligonucleotide
  Antisense strand to SEQ ID NO: 1935074
ucuguuaguggaaagcaac

SEQ ID NO: 1935076 - RNA, 19 nt, Artificial Sequence
  Description of Artificial Sequence: Synthetic oligonucleotide
  Sense strand starting at position 2851 of SEQ ID NO: 1879835
ggucuugguguuaguaguu

SEQ ID NO: 1935077 - RNA, 19 nt, Artificial Sequence
  Description of Artificial Sequence: Synthetic oligonucleotide
  Antisense strand to SEQ ID NO: 1935076
aacuacuaacaccaagacc

SEQ ID NO: 1935078 - RNA, 19 nt, Artificial Sequence
  Description of Artificial Sequence: Synthetic oligonucleotide
  Sense strand starting at position 2858 of SEQ ID NO: 1879835
guguuaguaguugguauuu

SEQ ID NO: 1935079 - RNA, 19 nt, Artificial Sequence
  Description of Artificial Sequence: Synthetic oligonucleotide
  Antisense strand to SEQ ID NO: 1935078
aaauaccaacuacuaacac

SEQ ID NO: 1935080 - RNA, 19 nt, Artificial Sequence
  Description of Artificial Sequence: Synthetic oligonucleotide
  Sense strand starting at position 2864 of SEQ ID NO: 1879835
guaguugguauuuggugau

SEQ ID NO: 1935081 - RNA, 19 nt, Artificial Sequence
  Description of Artificial Sequence: Synthetic oligonucleotide
  Antisense strand to SEQ ID NO: 1935080
aucaccaaauaccaacuac

SEQ ID NO: 1935082 - RNA, 19 nt, Artificial Sequence
  Description of Artificial Sequence: Synthetic oligonucleotide
  Sense strand starting at position 2874 of SEQ ID NO: 1879835
uuuggugauccucaguguu

SEQ ID NO: 1935083 - RNA, 19 nt, Artificial Sequence
  Description of Artificial Sequence: Synthetic oligonucleotide
  Antisense strand to SEQ ID NO: 1935082
aacacugaggaucaccaaa

SEQ ID NO: 1935084 - RNA, 19 nt, Artificial Sequence
  Description of Artificial Sequence: Synthetic oligonucleotide
  Sense strand starting at position 2908 of SEQ ID NO: 1879835
gugaguuugacgugagagg

SEQ ID NO: 1935085 - RNA, 19 nt, Artificial Sequence
  Description of Artificial Sequence: Synthetic oligonucleotide
  Antisense strand to SEQ ID NO: 1935084
ccucucacgucaaacucac

SEQ ID NO: 1935086 - RNA, 19 nt, Artificial Sequence
  Description of Artificial Sequence: Synthetic oligonucleotide
  Sense strand starting at position 2909 of SEQ ID NO: 1879835
ugaguuugacgugagagga

SEQ ID NO: 1935087 - RNA, 19 nt, Artificial Sequence
  Description of Artificial Sequence: Synthetic oligonucleotide
  Antisense strand to SEQ ID NO: 1935086
uccucucacgucaaacuca

SEQ ID NO: 1935088 - RNA, 19 nt, Artificial Sequence
  Description of Artificial Sequence: Synthetic oligonucleotide
  Sense strand starting at position 3183 of SEQ ID NO: 1879835
aacuauacugcguagggau

SEQ ID NO: 1935089 - RNA, 19 nt, Artificial Sequence
  Description of Artificial Sequence: Synthetic oligonucleotide
  Antisense strand to SEQ ID NO: 1935088
aucccuacgcaguauaguu

SEQ ID NO: 1935090 - RNA, 19 nt, Artificial Sequence
  Description of Artificial Sequence: Synthetic oligonucleotide
  Sense strand starting at position 3195 of SEQ ID NO: 1879835
uagggauacugcuuugaga

SEQ ID NO: 1935091 - RNA, 19 nt, Artificial Sequence
  Description of Artificial Sequence: Synthetic oligonucleotide
  Antisense strand to SEQ ID NO: 1935090
ucucaaagcaguaucccua

SEQ ID NO: 1935092 - RNA, 19 nt, Artificial Sequence
  Description of Artificial Sequence: Synthetic oligonucleotide
  Sense strand starting at position 3197 of SEQ ID NO: 1879835
gggauacugcuuugagaug

SEQ ID NO: 1935093 - RNA, 19 nt, Artificial Sequence
  Description of Artificial Sequence: Synthetic oligonucleotide
  Antisense strand to SEQ ID NO: 1935092
caucucaaagcaguauccc

SEQ ID NO: 1935094 - RNA, 19 nt, Artificial Sequence
  Description of Artificial Sequence: Synthetic oligonucleotide
  Sense strand starting at position 3261 of SEQ ID NO: 1879835
ccugacauucuguggcaga

SEQ ID NO: 1935095 - RNA, 19 nt, Artificial Sequence
  Description of Artificial Sequence: Synthetic oligonucleotide
  Antisense strand to SEQ ID NO: 1935094
ucugccacagaaugucagg

SEQ ID NO: 1935096 - RNA, 19 nt, Artificial Sequence
  Description of Artificial Sequence: Synthetic oligonucleotide
  Sense strand starting at position 3266 of SEQ ID NO: 1879835
cauucuguggcagaaugaa

SEQ ID NO: 1935097 - RNA, 19 nt, Artificial Sequence
  Description of Artificial Sequence: Synthetic oligonucleotide
  Antisense strand to SEQ ID NO: 1935096
uucauucugccacagaaug

SEQ ID NO: 1935098 - RNA, 19 nt, Artificial Sequence
  Description of Artificial Sequence: Synthetic oligonucleotide
  Sense strand starting at position 3593 of SEQ ID NO: 1879835
agggauagcuaaucaugua

SEQ ID NO: 1935099 - RNA, 19 nt, Artificial Sequence
  Description of Artificial Sequence: Synthetic oligonucleotide
  Antisense strand to SEQ ID NO: 1935098
uacaugauuagcuaucccu

SEQ ID NO: 1935100 - RNA, 19 nt, Artificial Sequence
  Description of Artificial Sequence: Synthetic oligonucleotide
  Sense strand starting at position 3594 of SEQ ID NO: 1879835
gggauagcuaaucauguau

SEQ ID NO: 1935101 - RNA, 19 nt, Artificial Sequence
  Description of Artificial Sequence: Synthetic oligonucleotide
  Antisense strand to SEQ ID NO: 1935100
auacaugauuagcuauccc

SEQ ID NO: 1935102 - RNA, 19 nt, Artificial Sequence
  Description of Artificial Sequence: Synthetic oligonucleotide
  Sense strand starting at position 3605 of SEQ ID NO: 1879835
ucauguauuuggccauauu

SEQ ID NO: 1935103 - RNA, 19 nt, Artificial Sequence
  Description of Artificial Sequence: Synthetic oligonucleotide
  Antisense strand to SEQ ID NO: 1935102
aauauggccaaauacauga

SEQ ID NO: 1935104 - RNA, 19 nt, Artificial Sequence
  Description of Artificial Sequence: Synthetic oligonucleotide
  Sense strand starting at position 3674 of SEQ ID NO: 1879835
ggaagaguauuccuuccug

SEQ ID NO: 1935105 - RNA, 19 nt, Artificial Sequence
  Description of Artificial Sequence: Synthetic oligonucleotide
  Antisense strand to SEQ ID NO: 1935104
caggaaggaauacucuucc

SEQ ID NO: 1935106 - RNA, 19 nt, Artificial Sequence
  Description of Artificial Sequence: Synthetic oligonucleotide
  Sense strand starting at position 3833 of SEQ ID NO: 1879835
guaugagaccugggucuuc

SEQ ID NO: 1935107 - RNA, 19 nt, Artificial Sequence
  Description of Artificial Sequence: Synthetic oligonucleotide
  Antisense strand to SEQ ID NO: 1935106
gaagacccaggucucauac

SEQ ID NO: 1935108 - RNA, 19 nt, Artificial Sequence
  Description of Artificial Sequence: Synthetic oligonucleotide
  Sense strand starting at position 169 of SEQ ID NO: 1879836
ggagaauauuaccagcagu

SEQ ID NO: 1935109 - RNA, 19 nt, Artificial Sequence
  Description of Artificial Sequence: Synthetic oligonucleotide
  Antisense strand to SEQ ID NO: 1935108
acugcugguaauauucucc

SEQ ID NO: 1935110 - RNA, 19 nt, Artificial Sequence
  Description of Artificial Sequence: Synthetic oligonucleotide
  Sense strand starting at position 234 of SEQ ID NO: 1879836
aguacagacuugcuuugaa

SEQ ID NO: 1935111 - RNA, 19 nt, Artificial Sequence
  Description of Artificial Sequence: Synthetic oligonucleotide
  Antisense strand to SEQ ID NO: 1935110
uucaaagcaagucuguacu

SEQ ID NO: 1935112 - RNA, 19 nt, Artificial Sequence
  Description of Artificial Sequence: Synthetic oligonucleotide
  Sense strand starting at position 238 of SEQ ID NO: 1879836
cagacuugcuuugaaagga

SEQ ID NO: 1935113 - RNA, 19 nt, Artificial Sequence
  Description of Artificial Sequence: Synthetic oligonucleotide
  Antisense strand to SEQ ID NO: 1935112
uccuuucaaagcaagucug

SEQ ID NO: 1935114 - RNA, 19 nt, Artificial Sequence
  Description of Artificial Sequence: Synthetic oligonucleotide
  Sense strand starting at position 380 of SEQ ID NO: 1879836
uagggagcauucugaauag

SEQ ID NO: 1935115 - RNA, 19 nt, Artificial Sequence
  Description of Artificial Sequence: Synthetic oligonucleotide
  Antisense strand to SEQ ID NO: 1935114
cuauucagaaugcucccua

SEQ ID NO: 1935116 - RNA, 19 nt, Artificial Sequence
  Description of Artificial Sequence: Synthetic oligonucleotide
  Sense strand starting at position 384 of SEQ ID NO: 1879836
gagcauucugaauaguguc

SEQ ID NO: 1935117 - RNA, 19 nt, Artificial Sequence
  Description of Artificial Sequence: Synthetic oligonucleotide
  Antisense strand to SEQ ID NO: 1935116
gacacuauucagaaugcuc

SEQ ID NO: 1935118 - RNA, 19 nt, Artificial Sequence
  Description of Artificial Sequence: Synthetic oligonucleotide
  Sense strand starting at position 613 of SEQ ID NO: 1879836
uagauauagccuggacaca

SEQ ID NO: 1935119 - RNA, 19 nt, Artificial Sequence
  Description of Artificial Sequence: Synthetic oligonucleotide
  Antisense strand to SEQ ID NO: 1935118
uguguccaggcuauaucua

SEQ ID NO: 1935120 - RNA, 19 nt, Artificial Sequence
  Description of Artificial Sequence: Synthetic oligonucleotide
  Sense strand starting at position 767 of SEQ ID NO: 1879836
auguucccuuguguauaau

SEQ ID NO: 1935121 - RNA, 19 nt, Artificial Sequence
  Description of Artificial Sequence: Synthetic oligonucleotide
  Antisense strand to SEQ ID NO: 1935120
auuauacacaagggaacau

SEQ ID NO: 1935122 - RNA, 19 nt, Artificial Sequence
  Description of Artificial Sequence: Synthetic oligonucleotide
  Sense strand starting at position 770 of SEQ ID NO: 1879836
uucccuuguguauaaugaa

SEQ ID NO: 1935123 - RNA, 19 nt, Artificial Sequence
  Description of Artificial Sequence: Synthetic oligonucleotide
  Antisense strand to SEQ ID NO: 1935122
uucauuauacacaagggaa

SEQ ID NO: 1935124 - RNA, 19 nt, Artificial Sequence
  Description of Artificial Sequence: Synthetic oligonucleotide
  Sense strand starting at position 773 of SEQ ID NO: 1879836
ccuuguguauaaugaaucu

SEQ ID NO: 1935125 - RNA, 19 nt, Artificial Sequence
  Description of Artificial Sequence: Synthetic oligonucleotide
  Antisense strand to SEQ ID NO: 1935124
agauucauuauacacaagg

SEQ ID NO: 1935126 - RNA, 19 nt, Artificial Sequence
  Description of Artificial Sequence: Synthetic oligonucleotide
  Sense strand starting at position 1191 of SEQ ID NO: 1879836
gauaauucguagcgccaca

SEQ ID NO: 1935127 - RNA, 19 nt, Artificial Sequence
  Description of Artificial Sequence: Synthetic oligonucleotide
  Antisense strand to SEQ ID NO: 1935126
uguggcgcuacgaauuauc

SEQ ID NO: 1935128 - RNA, 19 nt, Artificial Sequence
  Description of Artificial Sequence: Synthetic oligonucleotide
  Sense strand starting at position 2816 of SEQ ID NO: 1879836
agguaauaccugugcuuga

SEQ ID NO: 1935129 - RNA, 19 nt, Artificial Sequence
  Description of Artificial Sequence: Synthetic oligonucleotide
  Antisense strand to SEQ ID NO: 1935128
ucaagcacagguauuaccu

SEQ ID NO: 1935130 - RNA, 19 nt, Artificial Sequence
  Description of Artificial Sequence: Synthetic oligonucleotide
  Sense strand starting at position 2817 of SEQ ID NO: 1879836
gguaauaccugugcuugaa

SEQ ID NO: 1935131 - RNA, 19 nt, Artificial Sequence
  Description of Artificial Sequence: Synthetic oligonucleotide
  Antisense strand to SEQ ID NO: 1935130
uucaagcacagguauuacc

SEQ ID NO: 1935132 - RNA, 19 nt, Artificial Sequence
  Description of Artificial Sequence: Synthetic oligonucleotide
  Sense strand starting at position 2820 of SEQ ID NO: 1879836
aauaccugugcuugaaagu

SEQ ID NO: 1935133 - RNA, 19 nt, Artificial Sequence
  Description of Artificial Sequence: Synthetic oligonucleotide
  Antisense strand to SEQ ID NO: 1935132
acuuucaagcacagguauu

SEQ ID NO: 1935134 - RNA, 19 nt, Artificial Sequence
  Description of Artificial Sequence: Synthetic oligonucleotide
  Sense strand starting at position 2821 of SEQ ID NO: 1879836
auaccugugcuugaaagua

SEQ ID NO: 1935135 - RNA, 19 nt, Artificial Sequence
  Description of Artificial Sequence: Synthetic oligonucleotide
  Antisense strand to SEQ ID NO: 1935134
uacuuucaagcacagguau

SEQ ID NO: 1935136 - RNA, 19 nt, Artificial Sequence
  Description of Artificial Sequence: Synthetic oligonucleotide
  Sense strand starting at position 3375 of SEQ ID NO: 1879836
guguucuuugauuccguuu

SEQ ID NO: 1935137 - RNA, 19 nt, Artificial Sequence
  Description of Artificial Sequence: Synthetic oligonucleotide
  Antisense strand to SEQ ID NO: 1935136
aaacggaaucaaagaacac

SEQ ID NO: 1935138 - RNA, 19 nt, Artificial Sequence
  Description of Artificial Sequence: Synthetic oligonucleotide
  Sense strand starting at position 3679 of SEQ ID NO: 1879836
ggugacaacucaggguuau

SEQ ID NO: 1935139 - RNA, 19 nt, Artificial Sequence
  Description of Artificial Sequence: Synthetic oligonucleotide
  Antisense strand to SEQ ID NO: 1935138
auaacccugaguugucacc

SEQ ID NO: 1935140 - RNA, 19 nt, Artificial Sequence
  Description of Artificial Sequence: Synthetic oligonucleotide
  Sense strand starting at position 3680 of SEQ ID NO: 1879836
gugacaacucaggguuauu

SEQ ID NO: 1935141 - RNA, 19 nt, Artificial Sequence
  Description of Artificial Sequence: Synthetic oligonucleotide
  Antisense strand to SEQ ID NO: 1935140
aauaacccugaguugucac

SEQ ID NO: 1935142 - RNA, 19 nt, Artificial Sequence
  Description of Artificial Sequence: Synthetic oligonucleotide
  Sense strand starting at position 3830 of SEQ ID NO: 1879836
aauugauacguugaaccga

SEQ ID NO: 1935143 - RNA, 19 nt, Artificial Sequence
  Description of Artificial Sequence: Synthetic oligonucleotide
  Antisense strand to SEQ ID NO: 1935142
ucgguucaacguaucaauu

SEQ ID NO: 1935144 - RNA, 19 nt, Artificial Sequence
  Description of Artificial Sequence: Synthetic oligonucleotide
  Sense strand starting at position 39 of SEQ ID NO: 1879837
agguuuaacaggcauguca

SEQ ID NO: 1935145 - RNA, 19 nt, Artificial Sequence
  Description of Artificial Sequence: Synthetic oligonucleotide
  Antisense strand to SEQ ID NO: 1935144
ugacaugccuguuaaaccu

SEQ ID NO: 1935146 - RNA, 19 nt, Artificial Sequence
  Description of Artificial Sequence: Synthetic oligonucleotide
  Sense strand starting at position 41 of SEQ ID NO: 1879837
guuuaacaggcaugucaca

SEQ ID NO: 1935147 - RNA, 19 nt, Artificial Sequence
  Description of Artificial Sequence: Synthetic oligonucleotide
  Antisense strand to SEQ ID NO: 1935146
ugugacaugccuguuaaac

SEQ ID NO: 1935148 - RNA, 19 nt, Artificial Sequence
  Description of Artificial Sequence: Synthetic oligonucleotide
  Sense strand starting at position 190 of SEQ ID NO: 1879837
agaauauccuugcuaaaug

SEQ ID NO: 1935149 - RNA, 19 nt, Artificial Sequence
  Description of Artificial Sequence: Synthetic oligonucleotide
  Antisense strand to SEQ ID NO: 1935148
cauuuagcaaggauauucu

SEQ ID NO: 1935150 - RNA, 19 nt, Artificial Sequence
  Description of Artificial Sequence: Synthetic oligonucleotide
  Sense strand starting at position 303 of SEQ ID NO: 1879837
acuccagucuaguaauguu

SEQ ID NO: 1935151 - RNA, 19 nt, Artificial Sequence
  Description of Artificial Sequence: Synthetic oligonucleotide
  Antisense strand to SEQ ID NO: 1935150
aacauuacuagacuggagu

SEQ ID NO: 1935152 - RNA, 19 nt, Artificial Sequence
  Description of Artificial Sequence: Synthetic oligonucleotide
  Sense strand starting at position 338 of SEQ ID NO: 1879837
ggugguucacuuggucaaa

SEQ ID NO: 1935153 - RNA, 19 nt, Artificial Sequence
  Description of Artificial Sequence: Synthetic oligonucleotide
  Antisense strand to SEQ ID NO: 1935152
uuugaccaagugaaccacc

SEQ ID NO: 1935154 - RNA, 19 nt, Artificial Sequence
  Description of Artificial Sequence: Synthetic oligonucleotide
  Sense strand starting at position 584 of SEQ ID NO: 1879837
guggaaauccugggcucaa

SEQ ID NO: 1935155 - RNA, 19 nt, Artificial Sequence
  Description of Artificial Sequence: Synthetic oligonucleotide
  Antisense strand to SEQ ID NO: 1935154
uugagcccaggauuuccac

SEQ ID NO: 1935156 - RNA, 19 nt, Artificial Sequence
  Description of Artificial Sequence: Synthetic oligonucleotide
  Sense strand starting at position 721 of SEQ ID NO: 1879837
agauuucuuugacgcaaag

SEQ ID NO: 1935157 - RNA, 19 nt, Artificial Sequence
  Description of Artificial Sequence: Synthetic oligonucleotide
  Antisense strand to SEQ ID NO: 1935156
cuuugcgucaaagaaaucu

SEQ ID NO: 1935158 - RNA, 19 nt, Artificial Sequence
  Description of Artificial Sequence: Synthetic oligonucleotide
  Sense strand starting at position 731 of SEQ ID NO: 1879837
gacgcaaaguuaucagaaa

SEQ ID NO: 1935159 - RNA, 19 nt, Artificial Sequence
  Description of Artificial Sequence: Synthetic oligonucleotide
  Antisense strand to SEQ ID NO: 1935158
uuucugauaacuuugcguc

SEQ ID NO: 1935160 - RNA, 19 nt, Artificial Sequence
  Description of Artificial Sequence: Synthetic oligonucleotide
  Sense strand starting at position 732 of SEQ ID NO: 1879837
acgcaaaguuaucagaaau

SEQ ID NO: 1935161 - RNA, 19 nt, Artificial Sequence
  Description of Artificial Sequence: Synthetic oligonucleotide
  Antisense strand to SEQ ID NO: 1935160
auuucugauaacuuugcgu

SEQ ID NO: 1935162 - RNA, 19 nt, Artificial Sequence
  Description of Artificial Sequence: Synthetic oligonucleotide
  Sense strand starting at position 882 of SEQ ID NO: 1879837
gaucuuuaacuucgugaag

SEQ ID NO: 1935163 - RNA, 19 nt, Artificial Sequence
  Description of Artificial Sequence: Synthetic oligonucleotide
  Antisense strand to SEQ ID NO: 1935162
cuucacgaaguuaaagauc

SEQ ID NO: 1935164 - RNA, 19 nt, Artificial Sequence
  Description of Artificial Sequence: Synthetic oligonucleotide
  Sense strand starting at position 884 of SEQ ID NO: 1879837
ucuuuaacuucgugaagca

SEQ ID NO: 1935165 - RNA, 19 nt, Artificial Sequence
  Description of Artificial Sequence: Synthetic oligonucleotide
  Antisense strand to SEQ ID NO: 1935164
ugcuucacgaaguuaaaga

SEQ ID NO: 1935166 - RNA, 19 nt, Artificial Sequence
  Description of Artificial Sequence: Synthetic oligonucleotide
  Sense strand starting at position 910 of SEQ ID NO: 1879837
ucauuccuuuggcaaagaa

SEQ ID NO: 1935167 - RNA, 19 nt, Artificial Sequence
  Description of Artificial Sequence: Synthetic oligonucleotide
  Antisense strand to SEQ ID NO: 1935166
uucuuugccaaaggaauga

SEQ ID NO: 1935168 - RNA, 19 nt, Artificial Sequence
  Description of Artificial Sequence: Synthetic oligonucleotide
  Sense strand starting at position 1034 of SEQ ID NO: 1879837
ggccaaacgucuugguuaa

SEQ ID NO: 1935169 - RNA, 19 nt, Artificial Sequence
  Description of Artificial Sequence: Synthetic oligonucleotide
  Antisense strand to SEQ ID NO: 1935168
uuaaccaagacguuuggcc

SEQ ID NO: 1935170 - RNA, 19 nt, Artificial Sequence
  Description of Artificial Sequence: Synthetic oligonucleotide
  Sense strand starting at position 1045 of SEQ ID NO: 1879837
uugguuaacucuucgguga

SEQ ID NO: 1935171 - RNA, 19 nt, Artificial Sequence
  Description of Artificial Sequence: Synthetic oligonucleotide
  Antisense strand to SEQ ID NO: 1935170
ucaccgaagaguuaaccaa

SEQ ID NO: 1935172 - RNA, 19 nt, Artificial Sequence
  Description of Artificial Sequence: Synthetic oligonucleotide
  Sense strand starting at position 1046 of SEQ ID NO: 1879837
ugguuaacucuucggugaa

SEQ ID NO: 1935173 - RNA, 19 nt, Artificial Sequence
  Description of Artificial Sequence: Synthetic oligonucleotide
  Antisense strand to SEQ ID NO: 1935172
uucaccgaagaguuaacca

SEQ ID NO: 1935174 - RNA, 19 nt, Artificial Sequence
  Description of Artificial Sequence: Synthetic oligonucleotide
  Sense strand starting at position 1047 of SEQ ID NO: 1879837
gguuaacucuucggugaaa

SEQ ID NO: 1935175 - RNA, 19 nt, Artificial Sequence
  Description of Artificial Sequence: Synthetic oligonucleotide
  Antisense strand to SEQ ID NO: 1935174
uuucaccgaagaguuaacc

SEQ ID NO: 1935176 - RNA, 19 nt, Artificial Sequence
  Description of Artificial Sequence: Synthetic oligonucleotide
  Sense strand starting at position 1048 of SEQ ID NO: 1879837
guuaacucuucggugaaag

SEQ ID NO: 1935177 - RNA, 19 nt, Artificial Sequence
  Description of Artificial Sequence: Synthetic oligonucleotide
  Antisense strand to SEQ ID NO: 1935176
cuuucaccgaagaguuaac

SEQ ID NO: 1935178 - RNA, 19 nt, Artificial Sequence
  Description of Artificial Sequence: Synthetic oligonucleotide
  Sense strand starting at position 1049 of SEQ ID NO: 1879837
uuaacucuucggugaaagg

SEQ ID NO: 1935179 - RNA, 19 nt, Artificial Sequence
  Description of Artificial Sequence: Synthetic oligonucleotide
  Antisense strand to SEQ ID NO: 1935178
ccuuucaccgaagaguuaa

SEQ ID NO: 1935180 - RNA, 19 nt, Artificial Sequence
  Description of Artificial Sequence: Synthetic oligonucleotide
  Sense strand starting at position 1069 of SEQ ID NO: 1879837
cgccacaugagaugaugau

SEQ ID NO: 1935181 - RNA, 19 nt, Artificial Sequence
  Description of Artificial Sequence: Synthetic oligonucleotide
  Antisense strand to SEQ ID NO: 1935180
aucaucaucucauguggcg

SEQ ID NO: 1935182 - RNA, 19 nt, Artificial Sequence
  Description of Artificial Sequence: Synthetic oligonucleotide
  Sense strand starting at position 1175 of SEQ ID NO: 1879837
gccgaaauccugcgguuca

SEQ ID NO: 1935183 - RNA, 19 nt, Artificial Sequence
  Description of Artificial Sequence: Synthetic oligonucleotide
  Antisense strand to SEQ ID NO: 1935182
ugaaccgcaggauuucggc

SEQ ID NO: 1935184 - RNA, 19 nt, Artificial Sequence
  Description of Artificial Sequence: Synthetic oligonucleotide
  Sense strand starting at position 1176 of SEQ ID NO: 1879837
ccgaaauccugcgguucau

SEQ ID NO: 1935185 - RNA, 19 nt, Artificial Sequence
  Description of Artificial Sequence: Synthetic oligonucleotide
  Antisense strand to SEQ ID NO: 1935184
augaaccgcaggauuucgg

SEQ ID NO: 1935186 - RNA, 19 nt, Artificial Sequence
  Description of Artificial Sequence: Synthetic oligonucleotide
  Sense strand starting at position 1425 of SEQ ID NO: 1879837
gagucaguguccucuacag

SEQ ID NO: 1935187 - RNA, 19 nt, Artificial Sequence
  Description of Artificial Sequence: Synthetic oligonucleotide
  Antisense strand to SEQ ID NO: 1935186
cuguagaggacacugacuc

SEQ ID NO: 1935188 - RNA, 19 nt, Artificial Sequence
  Description of Artificial Sequence: Synthetic oligonucleotide
  Sense strand starting at position 1427 of SEQ ID NO: 1879837
gucaguguccucuacagga

SEQ ID NO: 1935189 - RNA, 19 nt, Artificial Sequence
  Description of Artificial Sequence: Synthetic oligonucleotide
  Antisense strand to SEQ ID NO: 1935188
uccuguagaggacacugac

SEQ ID NO: 1935190 - RNA, 19 nt, Artificial Sequence
  Description of Artificial Sequence: Synthetic oligonucleotide
  Sense strand starting at position 1429 of SEQ ID NO: 1879837
caguguccucuacaggaua

SEQ ID NO: 1935191 - RNA, 19 nt, Artificial Sequence
  Description of Artificial Sequence: Synthetic oligonucleotide
  Antisense strand to SEQ ID NO: 1935190
uauccuguagaggacacug

SEQ ID NO: 1935192 - RNA, 19 nt, Artificial Sequence
  Description of Artificial Sequence: Synthetic oligonucleotide
  Sense strand starting at position 1732 of SEQ ID NO: 1879837
ggcgcccucaccugagaaa

SEQ ID NO: 1935193 - RNA, 19 nt, Artificial Sequence
  Description of Artificial Sequence: Synthetic oligonucleotide
  Antisense strand to SEQ ID NO: 1935192
uuucucaggugagggcgcc

SEQ ID NO: 1935194 - RNA, 19 nt, Artificial Sequence
  Description of Artificial Sequence: Synthetic oligonucleotide
  Sense strand starting at position 2117 of SEQ ID NO: 1879837
aggaguaaccuaggugaug

SEQ ID NO: 1935195 - RNA, 19 nt, Artificial Sequence
  Description of Artificial Sequence: Synthetic oligonucleotide
  Antisense strand to SEQ ID NO: 1935194
caucaccuagguuacuccu

SEQ ID NO: 1935196 - RNA, 19 nt, Artificial Sequence
  Description of Artificial Sequence: Synthetic oligonucleotide
  Sense strand starting at position 2206 of SEQ ID NO: 1879837
ccuccaaaucgcugauuuc

SEQ ID NO: 1935197 - RNA, 19 nt, Artificial Sequence
  Description of Artificial Sequence: Synthetic oligonucleotide
  Antisense strand to SEQ ID NO: 1935196
gaaaucagcgauuuggagg

SEQ ID NO: 1935198 - RNA, 19 nt, Artificial Sequence
  Description of Artificial Sequence: Synthetic oligonucleotide
  Sense strand starting at position 2342 of SEQ ID NO: 1879837
uuuacaugguucgaaauuc

SEQ ID NO: 1935199 - RNA, 19 nt, Artificial Sequence
  Description of Artificial Sequence: Synthetic oligonucleotide
  Antisense strand to SEQ ID NO: 1935198
gaauuucgaaccauguaaa

SEQ ID NO: 1935200 - RNA, 19 nt, Artificial Sequence
  Description of Artificial Sequence: Synthetic oligonucleotide
  Sense strand starting at position 2527 of SEQ ID NO: 1879837
ggaugcuguuccugugaau

SEQ ID NO: 1935201 - RNA, 19 nt, Artificial Sequence
  Description of Artificial Sequence: Synthetic oligonucleotide
  Antisense strand to SEQ ID NO: 1935200
auucacaggaacagcaucc

SEQ ID NO: 1935202 - RNA, 19 nt, Artificial Sequence
  Description of Artificial Sequence: Synthetic oligonucleotide
  Sense strand starting at position 2530 of SEQ ID NO: 1879837
ugcuguuccugugaauccu

SEQ ID NO: 1935203 - RNA, 19 nt, Artificial Sequence
  Description of Artificial Sequence: Synthetic oligonucleotide
  Antisense strand to SEQ ID NO: 1935202
aggauucacaggaacagca

SEQ ID NO: 1935204 - RNA, 19 nt, Artificial Sequence
  Description of Artificial Sequence: Synthetic oligonucleotide
  Sense strand starting at position 2541 of SEQ ID NO: 1879837
ugaauccuuccagggauau

SEQ ID NO: 1935205 - RNA, 19 nt, Artificial Sequence
  Description of Artificial Sequence: Synthetic oligonucleotide
  Antisense strand to SEQ ID NO: 1935204
auaucccuggaaggauuca

SEQ ID NO: 1935206 - RNA, 19 nt, Artificial Sequence
  Description of Artificial Sequence: Synthetic oligonucleotide
  Sense strand starting at position 3025 of SEQ ID NO: 1879837
ggaagagcguuccaaagag

SEQ ID NO: 1935207 - RNA, 19 nt, Artificial Sequence
  Description of Artificial Sequence: Synthetic oligonucleotide
  Antisense strand to SEQ ID NO: 1935206
cucuuuggaacgcucuucc

SEQ ID NO: 1935208 - RNA, 19 nt, Artificial Sequence
  Description of Artificial Sequence: Synthetic oligonucleotide
  Sense strand starting at position 3352 of SEQ ID NO: 1879837
cugugcaggucauuuaagu

SEQ ID NO: 1935209 - RNA, 19 nt, Artificial Sequence
  Description of Artificial Sequence: Synthetic oligonucleotide
  Antisense strand to SEQ ID NO: 1935208
acuuaaaugaccugcacag

SEQ ID NO: 1935210 - RNA, 19 nt, Artificial Sequence
  Description of Artificial Sequence: Synthetic oligonucleotide
  Sense strand starting at position 3418 of SEQ ID NO: 1879837
auaggacuggugugaggau

SEQ ID NO: 1935211 - RNA, 19 nt, Artificial Sequence
  Description of Artificial Sequence: Synthetic oligonucleotide
  Antisense strand to SEQ ID NO: 1935210
auccucacaccaguccuau

SEQ ID NO: 1935212 - RNA, 19 nt, Artificial Sequence
  Description of Artificial Sequence: Synthetic oligonucleotide
  Sense strand starting at position 3419 of SEQ ID NO: 1879837
uaggacuggugugaggauu

SEQ ID NO: 1935213 - RNA, 19 nt, Artificial Sequence
  Description of Artificial Sequence: Synthetic oligonucleotide
  Antisense strand to SEQ ID NO: 1935212
aauccucacaccaguccua

SEQ ID NO: 1935214 - RNA, 19 nt, Artificial Sequence
  Description of Artificial Sequence: Synthetic oligonucleotide
  Sense strand starting at position 183 of SEQ ID NO: 1879838
cgggaaggucccuaggacu

SEQ ID NO: 1935215 - RNA, 19 nt, Artificial Sequence
  Description of Artificial Sequence: Synthetic oligonucleotide
  Antisense strand to SEQ ID NO: 1935214
aguccuagggaccuucccg

SEQ ID NO: 1935216 - RNA, 19 nt, Artificial Sequence
  Description of Artificial Sequence: Synthetic oligonucleotide
  Sense strand starting at position 398 of SEQ ID NO: 1879838
agauuuagauucguugugu

SEQ ID NO: 1935217 - RNA, 19 nt, Artificial Sequence
  Description of Artificial Sequence: Synthetic oligonucleotide
  Antisense strand to SEQ ID NO: 1935216
acacaacgaaucuaaaucu

SEQ ID NO: 1935218 - RNA, 19 nt, Artificial Sequence
  Description of Artificial Sequence: Synthetic oligonucleotide
  Sense strand starting at position 399 of SEQ ID NO: 1879838
gauuuagauucguuguguu

SEQ ID NO: 1935219 - RNA, 19 nt, Artificial Sequence
  Description of Artificial Sequence: Synthetic oligonucleotide
  Antisense strand to SEQ ID NO: 1935218
aacacaacgaaucuaaauc

SEQ ID NO: 1935220 - RNA, 19 nt, Artificial Sequence
  Description of Artificial Sequence: Synthetic oligonucleotide
  Sense strand starting at position 402 of SEQ ID NO: 1879838
uuagauucguuguguuaau

SEQ ID NO: 1935221 - RNA, 19 nt, Artificial Sequence
  Description of Artificial Sequence: Synthetic oligonucleotide
  Antisense strand to SEQ ID NO: 1935220
auuaacacaacgaaucuaa

SEQ ID NO: 1935222 - RNA, 19 nt, Artificial Sequence
  Description of Artificial Sequence: Synthetic oligonucleotide
  Sense strand starting at position 403 of SEQ ID NO: 1879838
uagauucguuguguuaauu

SEQ ID NO: 1935223 - RNA, 19 nt, Artificial Sequence
  Description of Artificial Sequence: Synthetic oligonucleotide
  Antisense strand to SEQ ID NO: 1935222
aauuaacacaacgaaucua

SEQ ID NO: 1935224 - RNA, 19 nt, Artificial Sequence
  Description of Artificial Sequence: Synthetic oligonucleotide
  Sense strand starting at position 430 of SEQ ID NO: 1879838
gcauaagauuaguuugugu

SEQ ID NO: 1935225 - RNA, 19 nt, Artificial Sequence
  Description of Artificial Sequence: Synthetic oligonucleotide
  Antisense strand to SEQ ID NO: 1935224
acacaaacuaaucuuaugc

SEQ ID NO: 1935226 - RNA, 19 nt, Artificial Sequence
  Description of Artificial Sequence: Synthetic oligonucleotide
  Sense strand starting at position 523 of SEQ ID NO: 1879838
caggaaaugccucauguaa

SEQ ID NO: 1935227 - RNA, 19 nt, Artificial Sequence
  Description of Artificial Sequence: Synthetic oligonucleotide
  Antisense strand to SEQ ID NO: 1935226
uuacaugaggcauuuccug

SEQ ID NO: 1935228 - RNA, 19 nt, Artificial Sequence
  Description of Artificial Sequence: Synthetic oligonucleotide
  Sense strand starting at position 525 of SEQ ID NO: 1879838
ggaaaugccucauguaauu

SEQ ID NO: 1935229 - RNA, 19 nt, Artificial Sequence
  Description of Artificial Sequence: Synthetic oligonucleotide
  Antisense strand to SEQ ID NO: 1935228
aauuacaugaggcauuucc

SEQ ID NO: 1935230 - RNA, 19 nt, Artificial Sequence
  Description of Artificial Sequence: Synthetic oligonucleotide
  Sense strand starting at position 1084 of SEQ ID NO: 1879838
aggagugagccauguugca

SEQ ID NO: 1935231 - RNA, 19 nt, Artificial Sequence
  Description of Artificial Sequence: Synthetic oligonucleotide
  Antisense strand to SEQ ID NO: 1935230
ugcaacauggcucacuccu

SEQ ID NO: 1935232 - RNA, 19 nt, Artificial Sequence
  Description of Artificial Sequence: Synthetic oligonucleotide
  Sense strand starting at position 1395 of SEQ ID NO: 1879838
ucguucugugccuguguua

SEQ ID NO: 1935233 - RNA, 19 nt, Artificial Sequence
  Description of Artificial Sequence: Synthetic oligonucleotide
  Antisense strand to SEQ ID NO: 1935232
uaacacaggcacagaacga

SEQ ID NO: 1935234 - RNA, 19 nt, Artificial Sequence
  Description of Artificial Sequence: Synthetic oligonucleotide
  Sense strand starting at position 2799 of SEQ ID NO: 1879838
uuuacucaaguguguauau

SEQ ID NO: 1935235 - RNA, 19 nt, Artificial Sequence
  Description of Artificial Sequence: Synthetic oligonucleotide
  Antisense strand to SEQ ID NO: 1935234
auauacacacuugaguaaa

SEQ ID NO: 1935236 - RNA, 19 nt, Artificial Sequence
  Description of Artificial Sequence: Synthetic oligonucleotide
  Sense strand starting at position 2800 of SEQ ID NO: 1879838
uuacucaaguguguauaua

SEQ ID NO: 1935237 - RNA, 19 nt, Artificial Sequence
  Description of Artificial Sequence: Synthetic oligonucleotide
  Antisense strand to SEQ ID NO: 1935236
uauauacacacuugaguaa

SEQ ID NO: 1935238 - RNA, 19 nt, Artificial Sequence
  Description of Artificial Sequence: Synthetic oligonucleotide
  Sense strand starting at position 2808 of SEQ ID NO: 1879838
guguguauauaugccacua

SEQ ID NO: 1935239 - RNA, 19 nt, Artificial Sequence
  Description of Artificial Sequence: Synthetic oligonucleotide
  Antisense strand to SEQ ID NO: 1935238
uaguggcauauauacacac

SEQ ID NO: 1935240 - RNA, 19 nt, Artificial Sequence
  Description of Artificial Sequence: Synthetic oligonucleotide
  Sense strand starting at position 2810 of SEQ ID NO: 1879838
guguauauaugccacuaau

SEQ ID NO: 1935241 - RNA, 19 nt, Artificial Sequence
  Description of Artificial Sequence: Synthetic oligonucleotide
  Antisense strand to SEQ ID NO: 1935240
auuaguggcauauauacac

SEQ ID NO: 1935242 - RNA, 19 nt, Artificial Sequence
  Description of Artificial Sequence: Synthetic oligonucleotide
  Sense strand starting at position 3744 of SEQ ID NO: 1879838
gugcaagcauguucucacu

SEQ ID NO: 1935243 - RNA, 19 nt, Artificial Sequence
  Description of Artificial Sequence: Synthetic oligonucleotide
  Antisense strand to SEQ ID NO: 1935242
agugagaacaugcuugcac

SEQ ID NO: 1935244 - RNA, 19 nt, Artificial Sequence
  Description of Artificial Sequence: Synthetic oligonucleotide
  Sense strand starting at position 3746 of SEQ ID NO: 1879838
gcaagcauguucucacuca

SEQ ID NO: 1935245 - RNA, 19 nt, Artificial Sequence
  Description of Artificial Sequence: Synthetic oligonucleotide
  Antisense strand to SEQ ID NO: 1935244
ugagugagaacaugcuugc

SEQ ID NO: 1935246 - RNA, 19 nt, Artificial Sequence
  Description of Artificial Sequence: Synthetic oligonucleotide
  Sense strand starting at position 522 of SEQ ID NO: 1879839
aaauaugugguauguccau

SEQ ID NO: 1935247 - RNA, 19 nt, Artificial Sequence
  Description of Artificial Sequence: Synthetic oligonucleotide
  Antisense strand to SEQ ID NO: 1935246
auggacauaccacauauuu

SEQ ID NO: 1935248 - RNA, 19 nt, Artificial Sequence
  Description of Artificial Sequence: Synthetic oligonucleotide
  Sense strand starting at position 535 of SEQ ID NO: 1879839
guccauacaguggauuauu

SEQ ID NO: 1935249 - RNA, 19 nt, Artificial Sequence
  Description of Artificial Sequence: Synthetic oligonucleotide
  Antisense strand to SEQ ID NO: 1935248
aauaauccacuguauggac

SEQ ID NO: 1935250 - RNA, 19 nt, Artificial Sequence
  Description of Artificial Sequence: Synthetic oligonucleotide
  Sense strand starting at position 573 of SEQ ID NO: 1879839
aguacucaugcaugcuaaa

SEQ ID NO: 1935251 - RNA, 19 nt, Artificial Sequence
  Description of Artificial Sequence: Synthetic oligonucleotide
  Antisense strand to SEQ ID NO: 1935250
uuuagcaugcaugaguacu

SEQ ID NO: 1935252 - RNA, 19 nt, Artificial Sequence
  Description of Artificial Sequence: Synthetic oligonucleotide
  Sense strand starting at position 792 of SEQ ID NO: 1879839
ggaugacucacuugagguc

SEQ ID NO: 1935253 - RNA, 19 nt, Artificial Sequence
  Description of Artificial Sequence: Synthetic oligonucleotide
  Antisense strand to SEQ ID NO: 1935252
gaccucaagugagucaucc

SEQ ID NO: 1935254 - RNA, 19 nt, Artificial Sequence
  Description of Artificial Sequence: Synthetic oligonucleotide
  Sense strand starting at position 884 of SEQ ID NO: 1879839
aguggugcguaucuauaau

SEQ ID NO: 1935255 - RNA, 19 nt, Artificial Sequence
  Description of Artificial Sequence: Synthetic oligonucleotide
  Antisense strand to SEQ ID NO: 1935254
auuauagauacgcaccacu

SEQ ID NO: 1935256 - RNA, 19 nt, Artificial Sequence
  Description of Artificial Sequence: Synthetic oligonucleotide
  Sense strand starting at position 1115 of SEQ ID NO: 1879839
agggaucuuucuccucuuu

SEQ ID NO: 1935257 - RNA, 19 nt, Artificial Sequence
  Description of Artificial Sequence: Synthetic oligonucleotide
  Antisense strand to SEQ ID NO: 1935256
aaagaggagaaagaucccu

SEQ ID NO: 1935258 - RNA, 19 nt, Artificial Sequence
  Description of Artificial Sequence: Synthetic oligonucleotide
  Sense strand starting at position 1134 of SEQ ID NO: 1879839
cucuuugcacuccagagaa

SEQ ID NO: 1935259 - RNA, 19 nt, Artificial Sequence
  Description of Artificial Sequence: Synthetic oligonucleotide
  Antisense strand to SEQ ID NO: 1935258
uucucuggagugcaaagag

SEQ ID NO: 1935260 - RNA, 19 nt, Artificial Sequence
  Description of Artificial Sequence: Synthetic oligonucleotide
  Sense strand starting at position 1147 of SEQ ID NO: 1879839
agagaagcgauguaguacu

SEQ ID NO: 1935261 - RNA, 19 nt, Artificial Sequence
  Description of Artificial Sequence: Synthetic oligonucleotide
  Antisense strand to SEQ ID NO: 1935260
aguacuacaucgcuucucu

SEQ ID NO: 1935262 - RNA, 19 nt, Artificial Sequence
  Description of Artificial Sequence: Synthetic oligonucleotide
  Sense strand starting at position 1163 of SEQ ID NO: 1879839
acuguuaauuccguaacuu

SEQ ID NO: 1935263 - RNA, 19 nt, Artificial Sequence
  Description of Artificial Sequence: Synthetic oligonucleotide
  Antisense strand to SEQ ID NO: 1935262
aaguuacggaauuaacagu

SEQ ID NO: 1935264 - RNA, 19 nt, Artificial Sequence
  Description of Artificial Sequence: Synthetic oligonucleotide
  Sense strand starting at position 1164 of SEQ ID NO: 1879839
cuguuaauuccguaacuuu

SEQ ID NO: 1935265 - RNA, 19 nt, Artificial Sequence
  Description of Artificial Sequence: Synthetic oligonucleotide
  Antisense strand to SEQ ID NO: 1935264
aaaguuacggaauuaacag

SEQ ID NO: 1935266 - RNA, 19 nt, Artificial Sequence
  Description of Artificial Sequence: Synthetic oligonucleotide
  Sense strand starting at position 1861 of SEQ ID NO: 1879839
cgaggcuucgucuggacaa

SEQ ID NO: 1935267 - RNA, 19 nt, Artificial Sequence
  Description of Artificial Sequence: Synthetic oligonucleotide
  Antisense strand to SEQ ID NO: 1935266
uuguccagacgaagccucg

SEQ ID NO: 1935268 - RNA, 19 nt, Artificial Sequence
  Description of Artificial Sequence: Synthetic oligonucleotide
  Sense strand starting at position 2094 of SEQ ID NO: 1879839
acagaaugcugggagucaa

SEQ ID NO: 1935269 - RNA, 19 nt, Artificial Sequence
  Description of Artificial Sequence: Synthetic oligonucleotide
  Antisense strand to SEQ ID NO: 1935268
uugacucccagcauucugu

SEQ ID NO: 1935270 - RNA, 19 nt, Artificial Sequence
  Description of Artificial Sequence: Synthetic oligonucleotide
  Sense strand starting at position 2167 of SEQ ID NO: 1879839
cgauaacagccacaguauu

SEQ ID NO: 1935271 - RNA, 19 nt, Artificial Sequence
  Description of Artificial Sequence: Synthetic oligonucleotide
  Antisense strand to SEQ ID NO: 1935270
aauacuguggcuguuaucg

SEQ ID NO: 1935272 - RNA, 19 nt, Artificial Sequence
  Description of Artificial Sequence: Synthetic oligonucleotide
  Sense strand starting at position 2180 of SEQ ID NO: 1879839
aguauugauugacuggaau

SEQ ID NO: 1935273 - RNA, 19 nt, Artificial Sequence
  Description of Artificial Sequence: Synthetic oligonucleotide
  Antisense strand to SEQ ID NO: 1935272
auuccagucaaucaauacu

SEQ ID NO: 1935274 - RNA, 19 nt, Artificial Sequence
  Description of Artificial Sequence: Synthetic oligonucleotide
  Sense strand starting at position 2283 of SEQ ID NO: 1879839
gguggucuucuccacaaua

SEQ ID NO: 1935275 - RNA, 19 nt, Artificial Sequence
  Description of Artificial Sequence: Synthetic oligonucleotide
  Antisense strand to SEQ ID NO: 1935274
uauuguggagaagaccacc

SEQ ID NO: 1935276 - RNA, 19 nt, Artificial Sequence
  Description of Artificial Sequence: Synthetic oligonucleotide
  Sense strand starting at position 2296 of SEQ ID NO: 1879839
acaauagguacgcaguaau

SEQ ID NO: 1935277 - RNA, 19 nt, Artificial Sequence
  Description of Artificial Sequence: Synthetic oligonucleotide
  Antisense strand to SEQ ID NO: 1935276
auuacugcguaccuauugu

SEQ ID NO: 1935278 - RNA, 19 nt, Artificial Sequence
  Description of Artificial Sequence: Synthetic oligonucleotide
  Sense strand starting at position 2341 of SEQ ID NO: 1879839
uagagaugccuuugguuuc

SEQ ID NO: 1935279 - RNA, 19 nt, Artificial Sequence
  Description of Artificial Sequence: Synthetic oligonucleotide
  Antisense strand to SEQ ID NO: 1935278
gaaaccaaaggcaucucua

SEQ ID NO: 1935280 - RNA, 19 nt, Artificial Sequence
  Description of Artificial Sequence: Synthetic oligonucleotide
  Sense strand starting at position 2439 of SEQ ID NO: 1879839
acaguaagauaaggaugaa

SEQ ID NO: 1935281 - RNA, 19 nt, Artificial Sequence
  Description of Artificial Sequence: Synthetic oligonucleotide
  Antisense strand to SEQ ID NO: 1935280
uucauccuuaucuuacugu

SEQ ID NO: 1935282 - RNA, 19 nt, Artificial Sequence
  Description of Artificial Sequence: Synthetic oligonucleotide
  Sense strand starting at position 2474 of SEQ ID NO: 1879839
ugauguugugaggauguaa

SEQ ID NO: 1935283 - RNA, 19 nt, Artificial Sequence
  Description of Artificial Sequence: Synthetic oligonucleotide
  Antisense strand to SEQ ID NO: 1935282
uuacauccucacaacauca

SEQ ID NO: 1935284 - RNA, 19 nt, Artificial Sequence
  Description of Artificial Sequence: Synthetic oligonucleotide
  Sense strand starting at position 2485 of SEQ ID NO: 1879839
ggauguaaauaauaugcua

SEQ ID NO: 1935285 - RNA, 19 nt, Artificial Sequence
  Description of Artificial Sequence: Synthetic oligonucleotide
  Antisense strand to SEQ ID NO: 1935284
uagcauauuauuuacaucc

SEQ ID NO: 1935286 - RNA, 19 nt, Artificial Sequence
  Description of Artificial Sequence: Synthetic oligonucleotide
  Sense strand starting at position 2573 of SEQ ID NO: 1879839
gaagucuucucagugcuuu

SEQ ID NO: 1935287 - RNA, 19 nt, Artificial Sequence
  Description of Artificial Sequence: Synthetic oligonucleotide
  Antisense strand to SEQ ID NO: 1935286
aaagcacugagaagacuuc

SEQ ID NO: 1935288 - RNA, 19 nt, Artificial Sequence
  Description of Artificial Sequence: Synthetic oligonucleotide
  Sense strand starting at position 2589 of SEQ ID NO: 1879839
uuuagaccucagugagauc

SEQ ID NO: 1935289 - RNA, 19 nt, Artificial Sequence
  Description of Artificial Sequence: Synthetic oligonucleotide
  Antisense strand to SEQ ID NO: 1935288
gaucucacugaggucuaaa

SEQ ID NO: 1935290 - RNA, 19 nt, Artificial Sequence
  Description of Artificial Sequence: Synthetic oligonucleotide
  Sense strand starting at position 2600 of SEQ ID NO: 1879839
gugagaucucuggaugcau

SEQ ID NO: 1935291 - RNA, 19 nt, Artificial Sequence
  Description of Artificial Sequence: Synthetic oligonucleotide
  Antisense strand to SEQ ID NO: 1935290
augcauccagagaucucac

SEQ ID NO: 1935292 - RNA, 19 nt, Artificial Sequence
  Description of Artificial Sequence: Synthetic oligonucleotide
  Sense strand starting at position 2602 of SEQ ID NO: 1879839
gagaucucuggaugcauau

SEQ ID NO: 1935293 - RNA, 19 nt, Artificial Sequence
  Description of Artificial Sequence: Synthetic oligonucleotide
  Antisense strand to SEQ ID NO: 1935292
auaugcauccagagaucuc

SEQ ID NO: 1935294 - RNA, 19 nt, Artificial Sequence
  Description of Artificial Sequence: Synthetic oligonucleotide
  Sense strand starting at position 2710 of SEQ ID NO: 1879839
aaugcauaggcuggugaga

SEQ ID NO: 1935295 - RNA, 19 nt, Artificial Sequence
  Description of Artificial Sequence: Synthetic oligonucleotide
  Antisense strand to SEQ ID NO: 1935294
ucucaccagccuaugcauu

SEQ ID NO: 1935296 - RNA, 19 nt, Artificial Sequence
  Description of Artificial Sequence: Synthetic oligonucleotide
  Sense strand starting at position 2753 of SEQ ID NO: 1879839
cugcaacguuugcuaacaa

SEQ ID NO: 1935297 - RNA, 19 nt, Artificial Sequence
  Description of Artificial Sequence: Synthetic oligonucleotide
  Antisense strand to SEQ ID NO: 1935296
uuguuagcaaacguugcag

SEQ ID NO: 1935298 - RNA, 19 nt, Artificial Sequence
  Description of Artificial Sequence: Synthetic oligonucleotide
  Sense strand starting at position 2772 of SEQ ID NO: 1879839
uggcuuccugaaugcuuua

SEQ ID NO: 1935299 - RNA, 19 nt, Artificial Sequence
  Description of Artificial Sequence: Synthetic oligonucleotide
  Antisense strand to SEQ ID NO: 1935298
uaaagcauucaggaagcca

SEQ ID NO: 1935300 - RNA, 19 nt, Artificial Sequence
  Description of Artificial Sequence: Synthetic oligonucleotide
  Sense strand starting at position 2775 of SEQ ID NO: 1879839
cuuccugaaugcuuuaaga

SEQ ID NO: 1935301 - RNA, 19 nt, Artificial Sequence
  Description of Artificial Sequence: Synthetic oligonucleotide
  Antisense strand to SEQ ID NO: 1935300
ucuuaaagcauucaggaag

SEQ ID NO: 1935302 - RNA, 19 nt, Artificial Sequence
  Description of Artificial Sequence: Synthetic oligonucleotide
  Sense strand starting at position 2777 of SEQ ID NO: 1879839
uccugaaugcuuuaagauu

SEQ ID NO: 1935303 - RNA, 19 nt, Artificial Sequence
  Description of Artificial Sequence: Synthetic oligonucleotide
  Antisense strand to SEQ ID NO: 1935302
aaucuuaaagcauucagga

SEQ ID NO: 1935304 - RNA, 19 nt, Artificial Sequence
  Description of Artificial Sequence: Synthetic oligonucleotide
  Sense strand starting at position 2880 of SEQ ID NO: 1879839
aagucucugccgugaagag

SEQ ID NO: 1935305 - RNA, 19 nt, Artificial Sequence
  Description of Artificial Sequence: Synthetic oligonucleotide
  Antisense strand to SEQ ID NO: 1935304
cucuucacggcagagacuu

SEQ ID NO: 1935306 - RNA, 19 nt, Artificial Sequence
  Description of Artificial Sequence: Synthetic oligonucleotide
  Sense strand starting at position 2881 of SEQ ID NO: 1879839
agucucugccgugaagaga

SEQ ID NO: 1935307 - RNA, 19 nt, Artificial Sequence
  Description of Artificial Sequence: Synthetic oligonucleotide
  Antisense strand to SEQ ID NO: 1935306
ucucuucacggcagagacu

SEQ ID NO: 1935308 - RNA, 19 nt, Artificial Sequence
  Description of Artificial Sequence: Synthetic oligonucleotide
  Sense strand starting at position 2894 of SEQ ID NO: 1879839
aagagaucuauccgguggu

SEQ ID NO: 1935309 - RNA, 19 nt, Artificial Sequence
  Description of Artificial Sequence: Synthetic oligonucleotide
  Antisense strand to SEQ ID NO: 1935308
accaccggauagaucucuu

SEQ ID NO: 1935310 - RNA, 19 nt, Artificial Sequence
  Description of Artificial Sequence: Synthetic oligonucleotide
  Sense strand starting at position 2897 of SEQ ID NO: 1879839
agaucuauccgguggugga

SEQ ID NO: 1935311 - RNA, 19 nt, Artificial Sequence
  Description of Artificial Sequence: Synthetic oligonucleotide
  Antisense strand to SEQ ID NO: 1935310
uccaccaccggauagaucu

SEQ ID NO: 1935312 - RNA, 19 nt, Artificial Sequence
  Description of Artificial Sequence: Synthetic oligonucleotide
  Sense strand starting at position 3191 of SEQ ID NO: 1879839
cagugauggcgccaucaca

SEQ ID NO: 1935313 - RNA, 19 nt, Artificial Sequence
  Description of Artificial Sequence: Synthetic oligonucleotide
  Antisense strand to SEQ ID NO: 1935312
ugugauggcgccaucacug

SEQ ID NO: 1935314 - RNA, 19 nt, Artificial Sequence
  Description of Artificial Sequence: Synthetic oligonucleotide
  Sense strand starting at position 3299 of SEQ ID NO: 1879839
guucuugugguagagacua

SEQ ID NO: 1935315 - RNA, 19 nt, Artificial Sequence
  Description of Artificial Sequence: Synthetic oligonucleotide
  Antisense strand to SEQ ID NO: 1935314
uagucucuaccacaagaac

SEQ ID NO: 1935316 - RNA, 19 nt, Artificial Sequence
  Description of Artificial Sequence: Synthetic oligonucleotide
  Sense strand starting at position 3307 of SEQ ID NO: 1879839
gguagagacuacucguugu

SEQ ID NO: 1935317 - RNA, 19 nt, Artificial Sequence
  Description of Artificial Sequence: Synthetic oligonucleotide
  Antisense strand to SEQ ID NO: 1935316
acaacgaguagucucuacc

SEQ ID NO: 1935318 - RNA, 19 nt, Artificial Sequence
  Description of Artificial Sequence: Synthetic oligonucleotide
  Sense strand starting at position 3320 of SEQ ID NO: 1879839
cguugucugccucaauauc

SEQ ID NO: 1935319 - RNA, 19 nt, Artificial Sequence
  Description of Artificial Sequence: Synthetic oligonucleotide
  Antisense strand to SEQ ID NO: 1935318
gauauugaggcagacaacg

SEQ ID NO: 1935320 - RNA, 19 nt, Artificial Sequence
  Description of Artificial Sequence: Synthetic oligonucleotide
  Sense strand starting at position 3383 of SEQ ID NO: 1879839
cugggcauauaguuauauu

SEQ ID NO: 1935321 - RNA, 19 nt, Artificial Sequence
  Description of Artificial Sequence: Synthetic oligonucleotide
  Antisense strand to SEQ ID NO: 1935320
aauauaacuauaugcccag

SEQ ID NO: 1935322 - RNA, 19 nt, Artificial Sequence
  Description of Artificial Sequence: Synthetic oligonucleotide
  Sense strand starting at position 3474 of SEQ ID NO: 1879839
caugguagcuuccuagaaa

SEQ ID NO: 1935323 - RNA, 19 nt, Artificial Sequence
  Description of Artificial Sequence: Synthetic oligonucleotide
  Antisense strand to SEQ ID NO: 1935322
uuucuaggaagcuaccaug

SEQ ID NO: 1935324 - RNA, 19 nt, Artificial Sequence
  Description of Artificial Sequence: Synthetic oligonucleotide
  Sense strand starting at position 3659 of SEQ ID NO: 1879839
cuugauuauuuauggcaac

SEQ ID NO: 1935325 - RNA, 19 nt, Artificial Sequence
  Description of Artificial Sequence: Synthetic oligonucleotide
  Antisense strand to SEQ ID NO: 1935324
guugccauaaauaaucaag

SEQ ID NO: 1935326 - RNA, 19 nt, Artificial Sequence
  Description of Artificial Sequence: Synthetic oligonucleotide
  Sense strand starting at position 102 of SEQ ID NO: 1879840
gguuaauaggguuaugugu

SEQ ID NO: 1935327 - RNA, 19 nt, Artificial Sequence
  Description of Artificial Sequence: Synthetic oligonucleotide
  Antisense strand to SEQ ID NO: 1935326
acacauaacccuauuaacc

SEQ ID NO: 1935328 - RNA, 19 nt, Artificial Sequence
  Description of Artificial Sequence: Synthetic oligonucleotide
  Sense strand starting at position 235 of SEQ ID NO: 1879840
cacguucuauuggugaaag

SEQ ID NO: 1935329 - RNA, 19 nt, Artificial Sequence
  Description of Artificial Sequence: Synthetic oligonucleotide
  Antisense strand to SEQ ID NO: 1935328
cuuucaccaauagaacgug

SEQ ID NO: 1935330 - RNA, 19 nt, Artificial Sequence
  Description of Artificial Sequence: Synthetic oligonucleotide
  Sense strand starting at position 540 of SEQ ID NO: 1879840
agaggaugcuuaguauuga

SEQ ID NO: 1935331 - RNA, 19 nt, Artificial Sequence
  Description of Artificial Sequence: Synthetic oligonucleotide
  Antisense strand to SEQ ID NO: 1935330
ucaauacuaagcauccucu

SEQ ID NO: 1935332 - RNA, 19 nt, Artificial Sequence
  Description of Artificial Sequence: Synthetic oligonucleotide
  Sense strand starting at position 703 of SEQ ID NO: 1879840
guagcaucaugguuaaaga

SEQ ID NO: 1935333 - RNA, 19 nt, Artificial Sequence
  Description of Artificial Sequence: Synthetic oligonucleotide
  Antisense strand to SEQ ID NO: 1935332
ucuuuaaccaugaugcuac

SEQ ID NO: 1935334 - RNA, 19 nt, Artificial Sequence
  Description of Artificial Sequence: Synthetic oligonucleotide
  Sense strand starting at position 788 of SEQ ID NO: 1879840
cuaggagguuuaucacuuu

SEQ ID NO: 1935335 - RNA, 19 nt, Artificial Sequence
  Description of Artificial Sequence: Synthetic oligonucleotide
  Antisense strand to SEQ ID NO: 1935334
aaagugauaaaccuccuag

SEQ ID NO: 1935336 - RNA, 19 nt, Artificial Sequence
  Description of Artificial Sequence: Synthetic oligonucleotide
  Sense strand starting at position 791 of SEQ ID NO: 1879840
ggagguuuaucacuuuggu

SEQ ID NO: 1935337 - RNA, 19 nt, Artificial Sequence
  Description of Artificial Sequence: Synthetic oligonucleotide
  Antisense strand to SEQ ID NO: 1935336
accaaagugauaaaccucc

SEQ ID NO: 1935338 - RNA, 19 nt, Artificial Sequence
  Description of Artificial Sequence: Synthetic oligonucleotide
  Sense strand starting at position 885 of SEQ ID NO: 1879840
uguauauaugccuagucua

SEQ ID NO: 1935339 - RNA, 19 nt, Artificial Sequence
  Description of Artificial Sequence: Synthetic oligonucleotide
  Antisense strand to SEQ ID NO: 1935338
uagacuaggcauauauaca

SEQ ID NO: 1935340 - RNA, 19 nt, Artificial Sequence
  Description of Artificial Sequence: Synthetic oligonucleotide
  Sense strand starting at position 888 of SEQ ID NO: 1879840
auauaugccuagucuauag

SEQ ID NO: 1935341 - RNA, 19 nt, Artificial Sequence
  Description of Artificial Sequence: Synthetic oligonucleotide
  Antisense strand to SEQ ID NO: 1935340
cuauagacuaggcauauau

SEQ ID NO: 1935342 - RNA, 19 nt, Artificial Sequence
  Description of Artificial Sequence: Synthetic oligonucleotide
  Sense strand starting at position 890 of SEQ ID NO: 1879840
auaugccuagucuauagua

SEQ ID NO: 1935343 - RNA, 19 nt, Artificial Sequence
  Description of Artificial Sequence: Synthetic oligonucleotide
  Antisense strand to SEQ ID NO: 1935342
uacuauagacuaggcauau

SEQ ID NO: 1935344 - RNA, 19 nt, Artificial Sequence
  Description of Artificial Sequence: Synthetic oligonucleotide
  Sense strand starting at position 1038 of SEQ ID NO: 1879840
ugaucaggcucccucauua

SEQ ID NO: 1935345 - RNA, 19 nt, Artificial Sequence
  Description of Artificial Sequence: Synthetic oligonucleotide
  Antisense strand to SEQ ID NO: 1935344
uaaugagggagccugauca

SEQ ID NO: 1935346 - RNA, 19 nt, Artificial Sequence
  Description of Artificial Sequence: Synthetic oligonucleotide
  Sense strand starting at position 1086 of SEQ ID NO: 1879840
gacuauguacugcauguua

SEQ ID NO: 1935347 - RNA, 19 nt, Artificial Sequence
  Description of Artificial Sequence: Synthetic oligonucleotide
  Antisense strand to SEQ ID NO: 1935346
uaacaugcaguacauaguc

SEQ ID NO: 1935348 - RNA, 19 nt, Artificial Sequence
  Description of Artificial Sequence: Synthetic oligonucleotide
  Sense strand starting at position 1097 of SEQ ID NO: 1879840
gcauguuauugacuuugga

SEQ ID NO: 1935349 - RNA, 19 nt, Artificial Sequence
  Description of Artificial Sequence: Synthetic oligonucleotide
  Antisense strand to SEQ ID NO: 1935348
uccaaagucaauaacaugc

SEQ ID NO: 1935350 - RNA, 19 nt, Artificial Sequence
  Description of Artificial Sequence: Synthetic oligonucleotide
  Sense strand starting at position 1310 of SEQ ID NO: 1879840
ggugccuguagacagaauu

SEQ ID NO: 1935351 - RNA, 19 nt, Artificial Sequence
  Description of Artificial Sequence: Synthetic oligonucleotide
  Antisense strand to SEQ ID NO: 1935350
aauucugucuacaggcacc

SEQ ID NO: 1935352 - RNA, 19 nt, Artificial Sequence
  Description of Artificial Sequence: Synthetic oligonucleotide
  Sense strand starting at position 1340 of SEQ ID NO: 1879840
cugugaagcagagguugaa

SEQ ID NO: 1935353 - RNA, 19 nt, Artificial Sequence
  Description of Artificial Sequence: Synthetic oligonucleotide
  Antisense strand to SEQ ID NO: 1935352
uucaaccucugcuucacag

SEQ ID NO: 1935354 - RNA, 19 nt, Artificial Sequence
  Description of Artificial Sequence: Synthetic oligonucleotide
  Sense strand starting at position 1484 of SEQ ID NO: 1879840
auaugaagucgguacucuu

SEQ ID NO: 1935355 - RNA, 19 nt, Artificial Sequence
  Description of Artificial Sequence: Synthetic oligonucleotide
  Antisense strand to SEQ ID NO: 1935354
aagaguaccgacuucauau

SEQ ID NO: 1935356 - RNA, 19 nt, Artificial Sequence
  Description of Artificial Sequence: Synthetic oligonucleotide
  Sense strand starting at position 1534 of SEQ ID NO: 1879840
augaaaccugcuggaacau

SEQ ID NO: 1935357 - RNA, 19 nt, Artificial Sequence
  Description of Artificial Sequence: Synthetic oligonucleotide
  Antisense strand to SEQ ID NO: 1935356
auguuccagcagguuucau

SEQ ID NO: 1935358 - RNA, 19 nt, Artificial Sequence
  Description of Artificial Sequence: Synthetic oligonucleotide
  Sense strand starting at position 1555 of SEQ ID NO: 1879840
uuucuuccuguguauauca

SEQ ID NO: 1935359 - RNA, 19 nt, Artificial Sequence
  Description of Artificial Sequence: Synthetic oligonucleotide
  Antisense strand to SEQ ID NO: 1935358
ugauauacacaggaagaaa

SEQ ID NO: 1935360 - RNA, 19 nt, Artificial Sequence
  Description of Artificial Sequence: Synthetic oligonucleotide
  Sense strand starting at position 1958 of SEQ ID NO: 1879840
gaaguuguaccucaaugua

SEQ ID NO: 1935361 - RNA, 19 nt, Artificial Sequence
  Description of Artificial Sequence: Synthetic oligonucleotide
  Antisense strand to SEQ ID NO: 1935360
uacauugagguacaacuuc

SEQ ID NO: 1935362 - RNA, 19 nt, Artificial Sequence
  Description of Artificial Sequence: Synthetic oligonucleotide
  Sense strand starting at position 1989 of SEQ ID NO: 1879840
ugaauucugccagacucuu

SEQ ID NO: 1935363 - RNA, 19 nt, Artificial Sequence
  Description of Artificial Sequence: Synthetic oligonucleotide
  Antisense strand to SEQ ID NO: 1935362
aagagucuggcagaauuca

SEQ ID NO: 1935364 - RNA, 19 nt, Artificial Sequence
  Description of Artificial Sequence: Synthetic oligonucleotide
  Sense strand starting at position 1998 of SEQ ID NO: 1879840
ccagacucuuccuuguauu

SEQ ID NO: 1935365 - RNA, 19 nt, Artificial Sequence
  Description of Artificial Sequence: Synthetic oligonucleotide
  Antisense strand to SEQ ID NO: 1935364
aauacaaggaagagucugg

SEQ ID NO: 1935366 - RNA, 19 nt, Artificial Sequence
  Description of Artificial Sequence: Synthetic oligonucleotide
  Sense strand starting at position 2047 of SEQ ID NO: 1879840
ugcuguuuaccgucaaguc

SEQ ID NO: 1935367 - RNA, 19 nt, Artificial Sequence
  Description of Artificial Sequence: Synthetic oligonucleotide
  Antisense strand to SEQ ID NO: 1935366
gacuugacgguaaacagca

SEQ ID NO: 1935368 - RNA, 19 nt, Artificial Sequence
  Description of Artificial Sequence: Synthetic oligonucleotide
  Sense strand starting at position 2115 of SEQ ID NO: 1879840
guaacuccaugauuagcaa

SEQ ID NO: 1935369 - RNA, 19 nt, Artificial Sequence
  Description of Artificial Sequence: Synthetic oligonucleotide
  Antisense strand to SEQ ID NO: 1935368
uugcuaaucauggaguuac

SEQ ID NO: 1935370 - RNA, 19 nt, Artificial Sequence
  Description of Artificial Sequence: Synthetic oligonucleotide
  Sense strand starting at position 2171 of SEQ ID NO: 1879840
uuugaagaguagcugauaa

SEQ ID NO: 1935371 - RNA, 19 nt, Artificial Sequence
  Description of Artificial Sequence: Synthetic oligonucleotide
  Antisense strand to SEQ ID NO: 1935370
uuaucagcuacucuucaaa

SEQ ID NO: 1935372 - RNA, 19 nt, Artificial Sequence
  Description of Artificial Sequence: Synthetic oligonucleotide
  Sense strand starting at position 2241 of SEQ ID NO: 1879840
gacacuauucuaggcaugu

SEQ ID NO: 1935373 - RNA, 19 nt, Artificial Sequence
  Description of Artificial Sequence: Synthetic oligonucleotide
  Antisense strand to SEQ ID NO: 1935372
acaugccuagaauaguguc

SEQ ID NO: 1935374 - RNA, 19 nt, Artificial Sequence
  Description of Artificial Sequence: Synthetic oligonucleotide
  Sense strand starting at position 2298 of SEQ ID NO: 1879840
aguagauauuauuccuacu

SEQ ID NO: 1935375 - RNA, 19 nt, Artificial Sequence
  Description of Artificial Sequence: Synthetic oligonucleotide
  Antisense strand to SEQ ID NO: 1935374
aguaggaauaauaucuacu

SEQ ID NO: 1935376 - RNA, 19 nt, Artificial Sequence
  Description of Artificial Sequence: Synthetic oligonucleotide
  Sense strand starting at position 2310 of SEQ ID NO: 1879840
uccuacuuugcauauagga

SEQ ID NO: 1935377 - RNA, 19 nt, Artificial Sequence
  Description of Artificial Sequence: Synthetic oligonucleotide
  Antisense strand to SEQ ID NO: 1935376
uccuauaugcaaaguagga

SEQ ID NO: 1935378 - RNA, 19 nt, Artificial Sequence
  Description of Artificial Sequence: Synthetic oligonucleotide
  Sense strand starting at position 2505 of SEQ ID NO: 1879840
uugucuuauccagagcauu

SEQ ID NO: 1935379 - RNA, 19 nt, Artificial Sequence
  Description of Artificial Sequence: Synthetic oligonucleotide
  Antisense strand to SEQ ID NO: 1935378
aaugcucuggauaagacaa

SEQ ID NO: 1935380 - RNA, 19 nt, Artificial Sequence
  Description of Artificial Sequence: Synthetic oligonucleotide
  Sense strand starting at position 2519 of SEQ ID NO: 1879840
gcauucagucacguuuguu

SEQ ID NO: 1935381 - RNA, 19 nt, Artificial Sequence
  Description of Artificial Sequence: Synthetic oligonucleotide
  Antisense strand to SEQ ID NO: 1935380
aacaaacgugacugaaugc

SEQ ID NO: 1935382 - RNA, 19 nt, Artificial Sequence
  Description of Artificial Sequence: Synthetic oligonucleotide
  Sense strand starting at position 2531 of SEQ ID NO: 1879840
guuuguugcccucuuguua

SEQ ID NO: 1935383 - RNA, 19 nt, Artificial Sequence
  Description of Artificial Sequence: Synthetic oligonucleotide
  Antisense strand to SEQ ID NO: 1935382
uaacaagagggcaacaaac

SEQ ID NO: 1935384 - RNA, 19 nt, Artificial Sequence
  Description of Artificial Sequence: Synthetic oligonucleotide
  Sense strand starting at position 2910 of SEQ ID NO: 1879840
uguauucuuccugauguuc

SEQ ID NO: 1935385 - RNA, 19 nt, Artificial Sequence
  Description of Artificial Sequence: Synthetic oligonucleotide
  Antisense strand to SEQ ID NO: 1935384
gaacaucaggaagaauaca

SEQ ID NO: 1935386 - RNA, 19 nt, Artificial Sequence
  Description of Artificial Sequence: Synthetic oligonucleotide
  Sense strand starting at position 3028 of SEQ ID NO: 1879840
uuguuugagguacauugaa

SEQ ID NO: 1935387 - RNA, 19 nt, Artificial Sequence
  Description of Artificial Sequence: Synthetic oligonucleotide
  Antisense strand to SEQ ID NO: 1935386
uucaauguaccucaaacaa

SEQ ID NO: 1935388 - RNA, 19 nt, Artificial Sequence
  Description of Artificial Sequence: Synthetic oligonucleotide
  Sense strand starting at position 3054 of SEQ ID NO: 1879840
agaucuuauuaucccaguu

SEQ ID NO: 1935389 - RNA, 19 nt, Artificial Sequence
  Description of Artificial Sequence: Synthetic oligonucleotide
  Antisense strand to SEQ ID NO: 1935388
aacugggauaauaagaucu

SEQ ID NO: 1935390 - RNA, 19 nt, Artificial Sequence
  Description of Artificial Sequence: Synthetic oligonucleotide
  Sense strand starting at position 3462 of SEQ ID NO: 1879840
ccuagcuuugacuaaggua

SEQ ID NO: 1935391 - RNA, 19 nt, Artificial Sequence
  Description of Artificial Sequence: Synthetic oligonucleotide
  Antisense strand to SEQ ID NO: 1935390
uaccuuagucaaagcuagg

SEQ ID NO: 1935392 - RNA, 19 nt, Artificial Sequence
  Description of Artificial Sequence: Synthetic oligonucleotide
  Sense strand starting at position 3515 of SEQ ID NO: 1879840
auuagaaaguucuuagguu

SEQ ID NO: 1935393 - RNA, 19 nt, Artificial Sequence
  Description of Artificial Sequence: Synthetic oligonucleotide
  Antisense strand to SEQ ID NO: 1935392
aaccuaagaacuuucuaau

SEQ ID NO: 1935394 - RNA, 19 nt, Artificial Sequence
  Description of Artificial Sequence: Synthetic oligonucleotide
  Sense strand starting at position 3608 of SEQ ID NO: 1879840
gugugaagugcuuuguuuc

SEQ ID NO: 1935395 - RNA, 19 nt, Artificial Sequence
  Description of Artificial Sequence: Synthetic oligonucleotide
  Antisense strand to SEQ ID NO: 1935394
gaaacaaagcacuucacac

SEQ ID NO: 1935396 - RNA, 19 nt, Artificial Sequence
  Description of Artificial Sequence: Synthetic oligonucleotide
  Sense strand starting at position 3630 of SEQ ID NO: 1879840
cagaguagucuugaacucu

SEQ ID NO: 1935397 - RNA, 19 nt, Artificial Sequence
  Description of Artificial Sequence: Synthetic oligonucleotide
  Antisense strand to SEQ ID NO: 1935396
agaguucaagacuacucug

SEQ ID NO: 1935398 - RNA, 19 nt, Artificial Sequence
  Description of Artificial Sequence: Synthetic oligonucleotide
  Sense strand starting at position 3775 of SEQ ID NO: 1879840
gccugaaauuaaucaaaug

SEQ ID NO: 1935399 - RNA, 19 nt, Artificial Sequence
  Description of Artificial Sequence: Synthetic oligonucleotide
  Antisense strand to SEQ ID NO: 1935398
cauuugauuaauuucaggc

SEQ ID NO: 1935400 - RNA, 19 nt, Artificial Sequence
  Description of Artificial Sequence: Synthetic oligonucleotide
  Sense strand starting at position 3793 of SEQ ID NO: 1879840
gagauuuaaucuggaacug

SEQ ID NO: 1935401 - RNA, 19 nt, Artificial Sequence
  Description of Artificial Sequence: Synthetic oligonucleotide
  Antisense strand to SEQ ID NO: 1935400
caguuccagauuaaaucuc

SEQ ID NO: 1935402 - RNA, 19 nt, Artificial Sequence
  Description of Artificial Sequence: Synthetic oligonucleotide
  Sense strand starting at position 3815 of SEQ ID NO: 1879840
aggccaguauuugauuaaa

SEQ ID NO: 1935403 - RNA, 19 nt, Artificial Sequence
  Description of Artificial Sequence: Synthetic oligonucleotide
  Antisense strand to SEQ ID NO: 1935402
uuuaaucaaauacuggccu

SEQ ID NO: 1935404 - RNA, 19 nt, Artificial Sequence
  Description of Artificial Sequence: Synthetic oligonucleotide
  Sense strand starting at position 3925 of SEQ ID NO: 1879840
uguaauggaguuugagaaa

SEQ ID NO: 1935405 - RNA, 19 nt, Artificial Sequence
  Description of Artificial Sequence: Synthetic oligonucleotide
  Antisense strand to SEQ ID NO: 1935404
uuucucaaacuccauuaca

SEQ ID NO: 1935406 - RNA, 19 nt, Artificial Sequence
  Description of Artificial Sequence: Synthetic oligonucleotide
  Sense strand starting at position 101 of SEQ ID NO: 1879841
cuguaaccucaguggugaa

SEQ ID NO: 1935407 - RNA, 19 nt, Artificial Sequence
  Description of Artificial Sequence: Synthetic oligonucleotide
  Antisense strand to SEQ ID NO: 1935406
uucaccacugagguuacag

SEQ ID NO: 1935408 - RNA, 19 nt, Artificial Sequence
  Description of Artificial Sequence: Synthetic oligonucleotide
  Sense strand starting at position 172 of SEQ ID NO: 1879841
guuggagagucccuagaag

SEQ ID NO: 1935409 - RNA, 19 nt, Artificial Sequence
  Description of Artificial Sequence: Synthetic oligonucleotide
  Antisense strand to SEQ ID NO: 1935408
cuucuagggacucuccaac

SEQ ID NO: 1935410 - RNA, 19 nt, Artificial Sequence
  Description of Artificial Sequence: Synthetic oligonucleotide
  Sense strand starting at position 187 of SEQ ID NO: 1879841
gaaggaagauuccaagaac

SEQ ID NO: 1935411 - RNA, 19 nt, Artificial Sequence
  Description of Artificial Sequence: Synthetic oligonucleotide
  Antisense strand to SEQ ID NO: 1935410
guucuuggaaucuuccuuc

SEQ ID NO: 1935412 - RNA, 19 nt, Artificial Sequence
  Description of Artificial Sequence: Synthetic oligonucleotide
  Sense strand starting at position 261 of SEQ ID NO: 1879841
gggaaucuaugugcagguu

SEQ ID NO: 1935413 - RNA, 19 nt, Artificial Sequence
  Description of Artificial Sequence: Synthetic oligonucleotide
  Antisense strand to SEQ ID NO: 1935412
aaccugcacauagauuccc

SEQ ID NO: 1935414 - RNA, 19 nt, Artificial Sequence
  Description of Artificial Sequence: Synthetic oligonucleotide
  Sense strand starting at position 262 of SEQ ID NO: 1879841
ggaaucuaugugcagguuu

SEQ ID NO: 1935415 - RNA, 19 nt, Artificial Sequence
  Description of Artificial Sequence: Synthetic oligonucleotide
  Antisense strand to SEQ ID NO: 1935414
aaaccugcacauagauucc

SEQ ID NO: 1935416 - RNA, 19 nt, Artificial Sequence
  Description of Artificial Sequence: Synthetic oligonucleotide
  Sense strand starting at position 351 of SEQ ID NO: 1879841
auucuucuggcagaacauu

SEQ ID NO: 1935417 - RNA, 19 nt, Artificial Sequence
  Description of Artificial Sequence: Synthetic oligonucleotide
  Antisense strand to SEQ ID NO: 1935416
aauguucugccagaagaau

SEQ ID NO: 1935418 - RNA, 19 nt, Artificial Sequence
  Description of Artificial Sequence: Synthetic oligonucleotide
  Sense strand starting at position 360 of SEQ ID NO: 1879841
gcagaacauuccucugcua

SEQ ID NO: 1935419 - RNA, 19 nt, Artificial Sequence
  Description of Artificial Sequence: Synthetic oligonucleotide
  Antisense strand to SEQ ID NO: 1935418
uagcagaggaauguucugc

SEQ ID NO: 1935420 - RNA, 19 nt, Artificial Sequence
  Description of Artificial Sequence: Synthetic oligonucleotide
  Sense strand starting at position 362 of SEQ ID NO: 1879841
agaacauuccucugcuaga

SEQ ID NO: 1935421 - RNA, 19 nt, Artificial Sequence
  Description of Artificial Sequence: Synthetic oligonucleotide
  Antisense strand to SEQ ID NO: 1935420
ucuagcagaggaauguucu

SEQ ID NO: 1935422 - RNA, 19 nt, Artificial Sequence
  Description of Artificial Sequence: Synthetic oligonucleotide
  Sense strand starting at position 375 of SEQ ID NO: 1879841
gcuagagaugcccauuaga

SEQ ID NO: 1935423 - RNA, 19 nt, Artificial Sequence
  Description of Artificial Sequence: Synthetic oligonucleotide
  Antisense strand to SEQ ID NO: 1935422
ucuaaugggcaucucuagc

SEQ ID NO: 1935424 - RNA, 19 nt, Artificial Sequence
  Description of Artificial Sequence: Synthetic oligonucleotide
  Sense strand starting at position 482 of SEQ ID NO: 1879841
guauauacggccuaggcaa

SEQ ID NO: 1935425 - RNA, 19 nt, Artificial Sequence
  Description of Artificial Sequence: Synthetic oligonucleotide
  Antisense strand to SEQ ID NO: 1935424
uugccuaggccguauauac

SEQ ID NO: 1935426 - RNA, 19 nt, Artificial Sequence
  Description of Artificial Sequence: Synthetic oligonucleotide
  Sense strand starting at position 508 of SEQ ID NO: 1879841
caccguuauuggguaggga

SEQ ID NO: 1935427 - RNA, 19 nt, Artificial Sequence
  Description of Artificial Sequence: Synthetic oligonucleotide
  Antisense strand to SEQ ID NO: 1935426
ucccuacccaauaacggug

SEQ ID NO: 1935428 - RNA, 19 nt, Artificial Sequence
  Description of Artificial Sequence: Synthetic oligonucleotide
  Sense strand starting at position 509 of SEQ ID NO: 1879841
accguuauuggguagggaa

SEQ ID NO: 1935429 - RNA, 19 nt, Artificial Sequence
  Description of Artificial Sequence: Synthetic oligonucleotide
  Antisense strand to SEQ ID NO: 1935428
uucccuacccaauaacggu

SEQ ID NO: 1935430 - RNA, 19 nt, Artificial Sequence
  Description of Artificial Sequence: Synthetic oligonucleotide
  Sense strand starting at position 721 of SEQ ID NO: 1879841
acugacucaugguucuaaa

SEQ ID NO: 1935431 - RNA, 19 nt, Artificial Sequence
  Description of Artificial Sequence: Synthetic oligonucleotide
  Antisense strand to SEQ ID NO: 1935430
uuuagaaccaugagucagu

SEQ ID NO: 1935432 - RNA, 19 nt, Artificial Sequence
  Description of Artificial Sequence: Synthetic oligonucleotide
  Sense strand starting at position 962 of SEQ ID NO: 1879841
ucugaaauacuaugguacu

SEQ ID NO: 1935433 - RNA, 19 nt, Artificial Sequence
  Description of Artificial Sequence: Synthetic oligonucleotide
  Antisense strand to SEQ ID NO: 1935432
aguaccauaguauuucaga

SEQ ID NO: 1935434 - RNA, 19 nt, Artificial Sequence
  Description of Artificial Sequence: Synthetic oligonucleotide
  Sense strand starting at position 1269 of SEQ ID NO: 1879841
gaugcagaggccugggaua

SEQ ID NO: 1935435 - RNA, 19 nt, Artificial Sequence
  Description of Artificial Sequence: Synthetic oligonucleotide
  Antisense strand to SEQ ID NO: 1935434
uaucccaggccucugcauc

SEQ ID NO: 1935436 - RNA, 19 nt, Artificial Sequence
  Description of Artificial Sequence: Synthetic oligonucleotide
  Sense strand starting at position 1463 of SEQ ID NO: 1879841
gaggucuguacgcagauca

SEQ ID NO: 1935437 - RNA, 19 nt, Artificial Sequence
  Description of Artificial Sequence: Synthetic oligonucleotide
  Antisense strand to SEQ ID NO: 1935436
ugaucugcguacagaccuc

SEQ ID NO: 1935438 - RNA, 19 nt, Artificial Sequence
  Description of Artificial Sequence: Synthetic oligonucleotide
  Sense strand starting at position 2124 of SEQ ID NO: 1879841
gcagcuggaaccuggaaau

SEQ ID NO: 1935439 - RNA, 19 nt, Artificial Sequence
  Description of Artificial Sequence: Synthetic oligonucleotide
  Antisense strand to SEQ ID NO: 1935438
auuuccagguuccagcugc

SEQ ID NO: 1935440 - RNA, 19 nt, Artificial Sequence
  Description of Artificial Sequence: Synthetic oligonucleotide
  Sense strand starting at position 2203 of SEQ ID NO: 1879841
cacagugguuccuugauca

SEQ ID NO: 1935441 - RNA, 19 nt, Artificial Sequence
  Description of Artificial Sequence: Synthetic oligonucleotide
  Antisense strand to SEQ ID NO: 1935440
ugaucaaggaaccacugug

SEQ ID NO: 1935442 - RNA, 19 nt, Artificial Sequence
  Description of Artificial Sequence: Synthetic oligonucleotide
  Sense strand starting at position 2341 of SEQ ID NO: 1879841
uuaaguuucugguucccaa

SEQ ID NO: 1935443 - RNA, 19 nt, Artificial Sequence
  Description of Artificial Sequence: Synthetic oligonucleotide
  Antisense strand to SEQ ID NO: 1935442
uugggaaccagaaacuuaa

SEQ ID NO: 1935444 - RNA, 19 nt, Artificial Sequence
  Description of Artificial Sequence: Synthetic oligonucleotide
  Sense strand starting at position 2348 of SEQ ID NO: 1879841
ucugguucccaaggagauu

SEQ ID NO: 1935445 - RNA, 19 nt, Artificial Sequence
  Description of Artificial Sequence: Synthetic oligonucleotide
  Antisense strand to SEQ ID NO: 1935444
aaucuccuugggaaccaga

SEQ ID NO: 1935446 - RNA, 19 nt, Artificial Sequence
  Description of Artificial Sequence: Synthetic oligonucleotide
  Sense strand starting at position 2390 of SEQ ID NO: 1879841
accgauacgcccugaaaua

SEQ ID NO: 1935447 - RNA, 19 nt, Artificial Sequence
  Description of Artificial Sequence: Synthetic oligonucleotide
  Antisense strand to SEQ ID NO: 1935446
uauuucagggcguaucggu

SEQ ID NO: 1935448 - RNA, 19 nt, Artificial Sequence
  Description of Artificial Sequence: Synthetic oligonucleotide
  Sense strand starting at position 2391 of SEQ ID NO: 1879841
ccgauacgcccugaaauaa

SEQ ID NO: 1935449 - RNA, 19 nt, Artificial Sequence
  Description of Artificial Sequence: Synthetic oligonucleotide
  Antisense strand to SEQ ID NO: 1935448
uuauuucagggcguaucgg

SEQ ID NO: 1935450 - RNA, 19 nt, Artificial Sequence
  Description of Artificial Sequence: Synthetic oligonucleotide
  Sense strand starting at position 2536 of SEQ ID NO: 1879841
uacauugugugggcagaua

SEQ ID NO: 1935451 - RNA, 19 nt, Artificial Sequence
  Description of Artificial Sequence: Synthetic oligonucleotide
  Antisense strand to SEQ ID NO: 1935450
uaucugcccacacaaugua

SEQ ID NO: 1935452 - RNA, 19 nt, Artificial Sequence
  Description of Artificial Sequence: Synthetic oligonucleotide
  Sense strand starting at position 2559 of SEQ ID NO: 1879841
auaagaugcuaaguaguau

SEQ ID NO: 1935453 - RNA, 19 nt, Artificial Sequence
  Description of Artificial Sequence: Synthetic oligonucleotide
  Antisense strand to SEQ ID NO: 1935452
auacuacuuagcaucuuau

SEQ ID NO: 1935454 - RNA, 19 nt, Artificial Sequence
  Description of Artificial Sequence: Synthetic oligonucleotide
  Sense strand starting at position 3067 of SEQ ID NO: 1879841
ggaagagcacuuuggucaa

SEQ ID NO: 1935455 - RNA, 19 nt, Artificial Sequence
  Description of Artificial Sequence: Synthetic oligonucleotide
  Antisense strand to SEQ ID NO: 1935454
uugaccaaagugcucuucc

SEQ ID NO: 1935456 - RNA, 19 nt, Artificial Sequence
  Description of Artificial Sequence: Synthetic oligonucleotide
  Sense strand starting at position 3095 of SEQ ID NO: 1879841
ugcauaaaugcggaggaau

SEQ ID NO: 1935457 - RNA, 19 nt, Artificial Sequence
  Description of Artificial Sequence: Synthetic oligonucleotide
  Antisense strand to SEQ ID NO: 1935456
auuccuccgcauuuaugca

SEQ ID NO: 1935458 - RNA, 19 nt, Artificial Sequence
  Description of Artificial Sequence: Synthetic oligonucleotide
  Sense strand starting at position 3097 of SEQ ID NO: 1879841
cauaaaugcggaggaauga

SEQ ID NO: 1935459 - RNA, 19 nt, Artificial Sequence
  Description of Artificial Sequence: Synthetic oligonucleotide
  Antisense strand to SEQ ID NO: 1935458
ucauuccuccgcauuuaug

SEQ ID NO: 1935460 - RNA, 19 nt, Artificial Sequence
  Description of Artificial Sequence: Synthetic oligonucleotide
  Sense strand starting at position 3277 of SEQ ID NO: 1879841
ggucucauuccagacccaa

SEQ ID NO: 1935461 - RNA, 19 nt, Artificial Sequence
  Description of Artificial Sequence: Synthetic oligonucleotide
  Antisense strand to SEQ ID NO: 1935460
uugggucuggaaugagacc

SEQ ID NO: 1935462 - RNA, 19 nt, Artificial Sequence
  Description of Artificial Sequence: Synthetic oligonucleotide
  Sense strand starting at position 3412 of SEQ ID NO: 1879841
uaguauccuugcuuugaag

SEQ ID NO: 1935463 - RNA, 19 nt, Artificial Sequence
  Description of Artificial Sequence: Synthetic oligonucleotide
  Antisense strand to SEQ ID NO: 1935462
cuucaaagcaaggauacua

SEQ ID NO: 1935464 - RNA, 19 nt, Artificial Sequence
  Description of Artificial Sequence: Synthetic oligonucleotide
  Sense strand starting at position 3440 of SEQ ID NO: 1879841
gcaaguauuguuuauauag

SEQ ID NO: 1935465 - RNA, 19 nt, Artificial Sequence
  Description of Artificial Sequence: Synthetic oligonucleotide
  Antisense strand to SEQ ID NO: 1935464
cuauauaaacaauacuugc

SEQ ID NO: 1935466 - RNA, 19 nt, Artificial Sequence
  Description of Artificial Sequence: Synthetic oligonucleotide
  Sense strand starting at position 3528 of SEQ ID NO: 1879841
cuaugaucagcuuguuaca

SEQ ID NO: 1935467 - RNA, 19 nt, Artificial Sequence
  Description of Artificial Sequence: Synthetic oligonucleotide
  Antisense strand to SEQ ID NO: 1935466
uguaacaagcugaucauag

SEQ ID NO: 1935468 - RNA, 19 nt, Artificial Sequence
  Description of Artificial Sequence: Synthetic oligonucleotide
  Sense strand starting at position 3530 of SEQ ID NO: 1879841
augaucagcuuguuacaga

SEQ ID NO: 1935469 - RNA, 19 nt, Artificial Sequence
  Description of Artificial Sequence: Synthetic oligonucleotide
  Antisense strand to SEQ ID NO: 1935468
ucuguaacaagcugaucau

SEQ ID NO: 1935470 - RNA, 19 nt, Artificial Sequence
  Description of Artificial Sequence: Synthetic oligonucleotide
  Sense strand starting at position 3538 of SEQ ID NO: 1879841
cuuguuacagacuauuagu

SEQ ID NO: 1935471 - RNA, 19 nt, Artificial Sequence
  Description of Artificial Sequence: Synthetic oligonucleotide
  Antisense strand to SEQ ID NO: 1935470
acuaauagucuguaacaag

SEQ ID NO: 1935472 - RNA, 19 nt, Artificial Sequence
  Description of Artificial Sequence: Synthetic oligonucleotide
  Sense strand starting at position 3696 of SEQ ID NO: 1879841
gugccuaucuuccugggaa

SEQ ID NO: 1935473 - RNA, 19 nt, Artificial Sequence
  Description of Artificial Sequence: Synthetic oligonucleotide
  Antisense strand to SEQ ID NO: 1935472
uucccaggaagauaggcac

SEQ ID NO: 1935474 - RNA, 19 nt, Artificial Sequence
  Description of Artificial Sequence: Synthetic oligonucleotide
  Sense strand starting at position 3698 of SEQ ID NO: 1879841
gccuaucuuccugggaaag

SEQ ID NO: 1935475 - RNA, 19 nt, Artificial Sequence
  Description of Artificial Sequence: Synthetic oligonucleotide
  Antisense strand to SEQ ID NO: 1935474
cuuucccaggaagauaggc

SEQ ID NO: 1935476 - RNA, 19 nt, Artificial Sequence
  Description of Artificial Sequence: Synthetic oligonucleotide
  Sense strand starting at position 3699 of SEQ ID NO: 1879841
ccuaucuuccugggaaagu

SEQ ID NO: 1935477 - RNA, 19 nt, Artificial Sequence
  Description of Artificial Sequence: Synthetic oligonucleotide
  Antisense strand to SEQ ID NO: 1935476
acuuucccaggaagauagg

SEQ ID NO: 1935478 - RNA, 19 nt, Artificial Sequence
  Description of Artificial Sequence: Synthetic oligonucleotide
  Sense strand starting at position 3725 of SEQ ID NO: 1879841
cagguuuggcuuuaucuga

SEQ ID NO: 1935479 - RNA, 19 nt, Artificial Sequence
  Description of Artificial Sequence: Synthetic oligonucleotide
  Antisense strand to SEQ ID NO: 1935478
ucagauaaagccaaaccug

SEQ ID NO: 1935480 - RNA, 19 nt, Artificial Sequence
  Description of Artificial Sequence: Synthetic oligonucleotide
  Sense strand starting at position 3732 of SEQ ID NO: 1879841
ggcuuuaucugaccuuuau

SEQ ID NO: 1935481 - RNA, 19 nt, Artificial Sequence
  Description of Artificial Sequence: Synthetic oligonucleotide
  Antisense strand to SEQ ID NO: 1935480
auaaaggucagauaaagcc

SEQ ID NO: 1935482 - RNA, 19 nt, Artificial Sequence
  Description of Artificial Sequence: Synthetic oligonucleotide
  Sense strand starting at position 3759 of SEQ ID NO: 1879841
gaaucacucugguuaggac

SEQ ID NO: 1935483 - RNA, 19 nt, Artificial Sequence
  Description of Artificial Sequence: Synthetic oligonucleotide
  Antisense strand to SEQ ID NO: 1935482
guccuaaccagagugauuc

SEQ ID NO: 1935484 - RNA, 19 nt, Artificial Sequence
  Description of Artificial Sequence: Synthetic oligonucleotide
  Sense strand starting at position 3903 of SEQ ID NO: 1879841
uuaggaucccuuugcccaa

SEQ ID NO: 1935485 - RNA, 19 nt, Artificial Sequence
  Description of Artificial Sequence: Synthetic oligonucleotide
  Antisense strand to SEQ ID NO: 1935484
uugggcaaagggauccuaa

SEQ ID NO: 1935486 - RNA, 19 nt, Artificial Sequence
  Description of Artificial Sequence: Synthetic oligonucleotide
  Sense strand starting at position 46 of SEQ ID NO: 1879842
gguggaagugguuaccuuu

SEQ ID NO: 1935487 - RNA, 19 nt, Artificial Sequence
  Description of Artificial Sequence: Synthetic oligonucleotide
  Antisense strand to SEQ ID NO: 1935486
aaagguaaccacuuccacc

SEQ ID NO: 1935488 - RNA, 19 nt, Artificial Sequence
  Description of Artificial Sequence: Synthetic oligonucleotide
  Sense strand starting at position 49 of SEQ ID NO: 1879842
ggaagugguuaccuuuauu

SEQ ID NO: 1935489 - RNA, 19 nt, Artificial Sequence
  Description of Artificial Sequence: Synthetic oligonucleotide
  Antisense strand to SEQ ID NO: 1935488
aauaaagguaaccacuucc

SEQ ID NO: 1935490 - RNA, 19 nt, Artificial Sequence
  Description of Artificial Sequence: Synthetic oligonucleotide
  Sense strand starting at position 52 of SEQ ID NO: 1879842
agugguuaccuuuauucuu

SEQ ID NO: 1935491 - RNA, 19 nt, Artificial Sequence
  Description of Artificial Sequence: Synthetic oligonucleotide
  Antisense strand to SEQ ID NO: 1935490
aagaauaaagguaaccacu

SEQ ID NO: 1935492 - RNA, 19 nt, Artificial Sequence
  Description of Artificial Sequence: Synthetic oligonucleotide
  Sense strand starting at position 65 of SEQ ID NO: 1879842
auucuuuaucuggauguca

SEQ ID NO: 1935493 - RNA, 19 nt, Artificial Sequence
  Description of Artificial Sequence: Synthetic oligonucleotide
  Antisense strand to SEQ ID NO: 1935492
ugacauccagauaaagaau

SEQ ID NO: 1935494 - RNA, 19 nt, Artificial Sequence
  Description of Artificial Sequence: Synthetic oligonucleotide
  Sense strand starting at position 223 of SEQ ID NO: 1879842
ggugucuaauagucaaaga

SEQ ID NO: 1935495 - RNA, 19 nt, Artificial Sequence
  Description of Artificial Sequence: Synthetic oligonucleotide
  Antisense strand to SEQ ID NO: 1935494
ucuuugacuauuagacacc

SEQ ID NO: 1935496 - RNA, 19 nt, Artificial Sequence
  Description of Artificial Sequence: Synthetic oligonucleotide
  Sense strand starting at position 519 of SEQ ID NO: 1879842
gcaauagacagaugaagug

SEQ ID NO: 1935497 - RNA, 19 nt, Artificial Sequence
  Description of Artificial Sequence: Synthetic oligonucleotide
  Antisense strand to SEQ ID NO: 1935496
cacuucaucugucuauugc

SEQ ID NO: 1935498 - RNA, 19 nt, Artificial Sequence
  Description of Artificial Sequence: Synthetic oligonucleotide
  Sense strand starting at position 587 of SEQ ID NO: 1879842
aaggucaaugcuuagggua

SEQ ID NO: 1935499 - RNA, 19 nt, Artificial Sequence
  Description of Artificial Sequence: Synthetic oligonucleotide
  Antisense strand to SEQ ID NO: 1935498
uacccuaagcauugaccuu

SEQ ID NO: 1935500 - RNA, 19 nt, Artificial Sequence
  Description of Artificial Sequence: Synthetic oligonucleotide
  Sense strand starting at position 592 of SEQ ID NO: 1879842
caaugcuuaggguaguaga

SEQ ID NO: 1935501 - RNA, 19 nt, Artificial Sequence
  Description of Artificial Sequence: Synthetic oligonucleotide
  Antisense strand to SEQ ID NO: 1935500
ucuacuacccuaagcauug

SEQ ID NO: 1935502 - RNA, 19 nt, Artificial Sequence
  Description of Artificial Sequence: Synthetic oligonucleotide
  Sense strand starting at position 625 of SEQ ID NO: 1879842
uuggcuucuugacuggaaa

SEQ ID NO: 1935503 - RNA, 19 nt, Artificial Sequence
  Description of Artificial Sequence: Synthetic oligonucleotide
  Antisense strand to SEQ ID NO: 1935502
uuuccagucaagaagccaa

SEQ ID NO: 1935504 - RNA, 19 nt, Artificial Sequence
  Description of Artificial Sequence: Synthetic oligonucleotide
  Sense strand starting at position 626 of SEQ ID NO: 1879842
uggcuucuugacuggaaac

SEQ ID NO: 1935505 - RNA, 19 nt, Artificial Sequence
  Description of Artificial Sequence: Synthetic oligonucleotide
  Antisense strand to SEQ ID NO: 1935504
guuuccagucaagaagcca

SEQ ID NO: 1935506 - RNA, 19 nt, Artificial Sequence
  Description of Artificial Sequence: Synthetic oligonucleotide
  Sense strand starting at position 627 of SEQ ID NO: 1879842
ggcuucuugacuggaaacu

SEQ ID NO: 1935507 - RNA, 19 nt, Artificial Sequence
  Description of Artificial Sequence: Synthetic oligonucleotide
  Antisense strand to SEQ ID NO: 1935506
aguuuccagucaagaagcc

SEQ ID NO: 1935508 - RNA, 19 nt, Artificial Sequence
  Description of Artificial Sequence: Synthetic oligonucleotide
  Sense strand starting at position 628 of SEQ ID NO: 1879842
gcuucuugacuggaaacua

SEQ ID NO: 1935509 - RNA, 19 nt, Artificial Sequence
  Description of Artificial Sequence: Synthetic oligonucleotide
  Antisense strand to SEQ ID NO: 1935508
uaguuuccagucaagaagc

SEQ ID NO: 1935510 - RNA, 19 nt, Artificial Sequence
  Description of Artificial Sequence: Synthetic oligonucleotide
  Sense strand starting at position 851 of SEQ ID NO: 1879842
acaaauucuggcggaaagu

SEQ ID NO: 1935511 - RNA, 19 nt, Artificial Sequence
  Description of Artificial Sequence: Synthetic oligonucleotide
  Antisense strand to SEQ ID NO: 1935510
acuuuccgccagaauuugu

SEQ ID NO: 1935512 - RNA, 19 nt, Artificial Sequence
  Description of Artificial Sequence: Synthetic oligonucleotide
  Sense strand starting at position 852 of SEQ ID NO: 1879842
caaauucuggcggaaaguu

SEQ ID NO: 1935513 - RNA, 19 nt, Artificial Sequence
  Description of Artificial Sequence: Synthetic oligonucleotide
  Antisense strand to SEQ ID NO: 1935512
aacuuuccgccagaauuug

SEQ ID NO: 1935514 - RNA, 19 nt, Artificial Sequence
  Description of Artificial Sequence: Synthetic oligonucleotide
  Sense strand starting at position 1694 of SEQ ID NO: 1879842
agcagugccaguuaagaaa

SEQ ID NO: 1935515 - RNA, 19 nt, Artificial Sequence
  Description of Artificial Sequence: Synthetic oligonucleotide
  Antisense strand to SEQ ID NO: 1935514
uuucuuaacuggcacugcu

SEQ ID NO: 1935516 - RNA, 19 nt, Artificial Sequence
  Description of Artificial Sequence: Synthetic oligonucleotide
  Sense strand starting at position 1901 of SEQ ID NO: 1879842
aguuuaagugagugaagaa

SEQ ID NO: 1935517 - RNA, 19 nt, Artificial Sequence
  Description of Artificial Sequence: Synthetic oligonucleotide
  Antisense strand to SEQ ID NO: 1935516
uucuucacucacuuaaacu

SEQ ID NO: 1935518 - RNA, 19 nt, Artificial Sequence
  Description of Artificial Sequence: Synthetic oligonucleotide
  Sense strand starting at position 1902 of SEQ ID NO: 1879842
guuuaagugagugaagaau

SEQ ID NO: 1935519 - RNA, 19 nt, Artificial Sequence
  Description of Artificial Sequence: Synthetic oligonucleotide
  Antisense strand to SEQ ID NO: 1935518
auucuucacucacuuaaac

SEQ ID NO: 1935520 - RNA, 19 nt, Artificial Sequence
  Description of Artificial Sequence: Synthetic oligonucleotide
  Sense strand starting at position 2013 of SEQ ID NO: 1879842
gcauuagcauuggcauuua

SEQ ID NO: 1935521 - RNA, 19 nt, Artificial Sequence
  Description of Artificial Sequence: Synthetic oligonucleotide
  Antisense strand to SEQ ID NO: 1935520
uaaaugccaaugcuaaugc

SEQ ID NO: 1935522 - RNA, 19 nt, Artificial Sequence
  Description of Artificial Sequence: Synthetic oligonucleotide
  Sense strand starting at position 2069 of SEQ ID NO: 1879842
acugcagugacuuagagau

SEQ ID NO: 1935523 - RNA, 19 nt, Artificial Sequence
  Description of Artificial Sequence: Synthetic oligonucleotide
  Antisense strand to SEQ ID NO: 1935522
aucucuaagucacugcagu

SEQ ID NO: 1935524 - RNA, 19 nt, Artificial Sequence
  Description of Artificial Sequence: Synthetic oligonucleotide
  Sense strand starting at position 2075 of SEQ ID NO: 1879842
gugacuuagagaugcucau

SEQ ID NO: 1935525 - RNA, 19 nt, Artificial Sequence
  Description of Artificial Sequence: Synthetic oligonucleotide
  Antisense strand to SEQ ID NO: 1935524
augagcaucucuaagucac

SEQ ID NO: 1935526 - RNA, 19 nt, Artificial Sequence
  Description of Artificial Sequence: Synthetic oligonucleotide
  Sense strand starting at position 2154 of SEQ ID NO: 1879842
gcauaaggauauguccuaa

SEQ ID NO: 1935527 - RNA, 19 nt, Artificial Sequence
  Description of Artificial Sequence: Synthetic oligonucleotide
  Antisense strand to SEQ ID NO: 1935526
uuaggacauauccuuaugc

SEQ ID NO: 1935528 - RNA, 19 nt, Artificial Sequence
  Description of Artificial Sequence: Synthetic oligonucleotide
  Sense strand starting at position 2303 of SEQ ID NO: 1879842
uggccuucgagucacaaca

SEQ ID NO: 1935529 - RNA, 19 nt, Artificial Sequence
  Description of Artificial Sequence: Synthetic oligonucleotide
  Antisense strand to SEQ ID NO: 1935528
uguugugacucgaaggcca

SEQ ID NO: 1935530 - RNA, 19 nt, Artificial Sequence
  Description of Artificial Sequence: Synthetic oligonucleotide
  Sense strand starting at position 2325 of SEQ ID NO: 1879842
cuaugucuuagguaaugug

SEQ ID NO: 1935531 - RNA, 19 nt, Artificial Sequence
  Description of Artificial Sequence: Synthetic oligonucleotide
  Antisense strand to SEQ ID NO: 1935530
cacauuaccuaagacauag

SEQ ID NO: 1935532 - RNA, 19 nt, Artificial Sequence
  Description of Artificial Sequence: Synthetic oligonucleotide
  Sense strand starting at position 2385 of SEQ ID NO: 1879842
gucacacguuauuuauauc

SEQ ID NO: 1935533 - RNA, 19 nt, Artificial Sequence
  Description of Artificial Sequence: Synthetic oligonucleotide
  Antisense strand to SEQ ID NO: 1935532
gauauaaauaacgugugac

SEQ ID NO: 1935534 - RNA, 19 nt, Artificial Sequence
  Description of Artificial Sequence: Synthetic oligonucleotide
  Sense strand starting at position 2413 of SEQ ID NO: 1879842
cguuauugaguggaccaca

SEQ ID NO: 1935535 - RNA, 19 nt, Artificial Sequence
  Description of Artificial Sequence: Synthetic oligonucleotide
  Antisense strand to SEQ ID NO: 1935534
ugugguccacucaauaacg

SEQ ID NO: 1935536 - RNA, 19 nt, Artificial Sequence
  Description of Artificial Sequence: Synthetic oligonucleotide
  Sense strand starting at position 2595 of SEQ ID NO: 1879842
uugauuaaccaauguagcu

SEQ ID NO: 1935537 - RNA, 19 nt, Artificial Sequence
  Description of Artificial Sequence: Synthetic oligonucleotide
  Antisense strand to SEQ ID NO: 1935536
agcuacauugguuaaucaa

SEQ ID NO: 1935538 - RNA, 19 nt, Artificial Sequence
  Description of Artificial Sequence: Synthetic oligonucleotide
  Sense strand starting at position 2925 of SEQ ID NO: 1879842
acauguaaggcugaucauu

SEQ ID NO: 1935539 - RNA, 19 nt, Artificial Sequence
  Description of Artificial Sequence: Synthetic oligonucleotide
  Antisense strand to SEQ ID NO: 1935538
aaugaucagccuuacaugu

SEQ ID NO: 1935540 - RNA, 19 nt, Artificial Sequence
  Description of Artificial Sequence: Synthetic oligonucleotide
  Sense strand starting at position 2930 of SEQ ID NO: 1879842
uaaggcugaucauugucaa

SEQ ID NO: 1935541 - RNA, 19 nt, Artificial Sequence
  Description of Artificial Sequence: Synthetic oligonucleotide
  Antisense strand to SEQ ID NO: 1935540
uugacaaugaucagccuua

SEQ ID NO: 1935542 - RNA, 19 nt, Artificial Sequence
  Description of Artificial Sequence: Synthetic oligonucleotide
  Sense strand starting at position 2931 of SEQ ID NO: 1879842
aaggcugaucauugucaaa

SEQ ID NO: 1935543 - RNA, 19 nt, Artificial Sequence
  Description of Artificial Sequence: Synthetic oligonucleotide
  Antisense strand to SEQ ID NO: 1935542
uuugacaaugaucagccuu

SEQ ID NO: 1935544 - RNA, 19 nt, Artificial Sequence
  Description of Artificial Sequence: Synthetic oligonucleotide
  Sense strand starting at position 2948 of SEQ ID NO: 1879842
aaauguaugucaucuugag

SEQ ID NO: 1935545 - RNA, 19 nt, Artificial Sequence
  Description of Artificial Sequence: Synthetic oligonucleotide
  Antisense strand to SEQ ID NO: 1935544
cucaagaugacauacauuu

SEQ ID NO: 1935546 - RNA, 19 nt, Artificial Sequence
  Description of Artificial Sequence: Synthetic oligonucleotide
  Sense strand starting at position 2952 of SEQ ID NO: 1879842
guaugucaucuugagauga

SEQ ID NO: 1935547 - RNA, 19 nt, Artificial Sequence
  Description of Artificial Sequence: Synthetic oligonucleotide
  Antisense strand to SEQ ID NO: 1935546
ucaucucaagaugacauac

SEQ ID NO: 1935548 - RNA, 19 nt, Artificial Sequence
  Description of Artificial Sequence: Synthetic oligonucleotide
  Sense strand starting at position 3135 of SEQ ID NO: 1879842
aucugagcggccuauaaug

SEQ ID NO: 1935549 - RNA, 19 nt, Artificial Sequence
  Description of Artificial Sequence: Synthetic oligonucleotide
  Antisense strand to SEQ ID NO: 1935548
cauuauaggccgcucagau

SEQ ID NO: 1935550 - RNA, 19 nt, Artificial Sequence
  Description of Artificial Sequence: Synthetic oligonucleotide
  Sense strand starting at position 3235 of SEQ ID NO: 1879842
gagaguugugcacaccuaa

SEQ ID NO: 1935551 - RNA, 19 nt, Artificial Sequence
  Description of Artificial Sequence: Synthetic oligonucleotide
  Antisense strand to SEQ ID NO: 1935550
uuaggugugcacaacucuc

SEQ ID NO: 1935552 - RNA, 19 nt, Artificial Sequence
  Description of Artificial Sequence: Synthetic oligonucleotide
  Sense strand starting at position 3367 of SEQ ID NO: 1879842
acagaacaucuugguaguu

SEQ ID NO: 1935553 - RNA, 19 nt, Artificial Sequence
  Description of Artificial Sequence: Synthetic oligonucleotide
  Antisense strand to SEQ ID NO: 1935552
aacuaccaagauguucugu

SEQ ID NO: 1935554 - RNA, 19 nt, Artificial Sequence
  Description of Artificial Sequence: Synthetic oligonucleotide
  Sense strand starting at position 3372 of SEQ ID NO: 1879842
acaucuugguaguuuauaa

SEQ ID NO: 1935555 - RNA, 19 nt, Artificial Sequence
  Description of Artificial Sequence: Synthetic oligonucleotide
  Antisense strand to SEQ ID NO: 1935554
uuauaaacuaccaagaugu

SEQ ID NO: 1935556 - RNA, 19 nt, Artificial Sequence
  Description of Artificial Sequence: Synthetic oligonucleotide
  Sense strand starting at position 3382 of SEQ ID NO: 1879842
aguuuauaauuuggagaga

SEQ ID NO: 1935557 - RNA, 19 nt, Artificial Sequence
  Description of Artificial Sequence: Synthetic oligonucleotide
  Antisense strand to SEQ ID NO: 1935556
ucucuccaaauuauaaacu

SEQ ID NO: 1935558 - RNA, 19 nt, Artificial Sequence
  Description of Artificial Sequence: Synthetic oligonucleotide
  Sense strand starting at position 3383 of SEQ ID NO: 1879842
guuuauaauuuggagagaa

SEQ ID NO: 1935559 - RNA, 19 nt, Artificial Sequence
  Description of Artificial Sequence: Synthetic oligonucleotide
  Antisense strand to SEQ ID NO: 1935558
uucucuccaaauuauaaac

SEQ ID NO: 1935560 - RNA, 19 nt, Artificial Sequence
  Description of Artificial Sequence: Synthetic oligonucleotide
  Sense strand starting at position 3500 of SEQ ID NO: 1879842
cuggguuuauaauugcaua

SEQ ID NO: 1935561 - RNA, 19 nt, Artificial Sequence
  Description of Artificial Sequence: Synthetic oligonucleotide
  Antisense strand to SEQ ID NO: 1935560
uaugcaauuauaaacccag

SEQ ID NO: 1935562 - RNA, 19 nt, Artificial Sequence
  Description of Artificial Sequence: Synthetic oligonucleotide
  Sense strand starting at position 3680 of SEQ ID NO: 1879842
auguuaauacaccauguua

SEQ ID NO: 1935563 - RNA, 19 nt, Artificial Sequence
  Description of Artificial Sequence: Synthetic oligonucleotide
  Antisense strand to SEQ ID NO: 1935562
uaacaugguguauuaacau

SEQ ID NO: 1935564 - RNA, 19 nt, Artificial Sequence
  Description of Artificial Sequence: Synthetic oligonucleotide
  Sense strand starting at position 3682 of SEQ ID NO: 1879842
guuaauacaccauguuaua

SEQ ID NO: 1935565 - RNA, 19 nt, Artificial Sequence
  Description of Artificial Sequence: Synthetic oligonucleotide
  Antisense strand to SEQ ID NO: 1935564
uauaacaugguguauuaac

SEQ ID NO: 1935566 - RNA, 19 nt, Artificial Sequence
  Description of Artificial Sequence: Synthetic oligonucleotide
  Sense strand starting at position 16 of SEQ ID NO: 1879843
agcugauaauaaguaaacu

SEQ ID NO: 1935567 - RNA, 19 nt, Artificial Sequence
  Description of Artificial Sequence: Synthetic oligonucleotide
  Antisense strand to SEQ ID NO: 1935566
aguuuacuuauuaucagcu

SEQ ID NO: 1935568 - RNA, 19 nt, Artificial Sequence
  Description of Artificial Sequence: Synthetic oligonucleotide
  Sense strand starting at position 40 of SEQ ID NO: 1879843
aaagcagaagguugagauu

SEQ ID NO: 1935569 - RNA, 19 nt, Artificial Sequence
  Description of Artificial Sequence: Synthetic oligonucleotide
  Antisense strand to SEQ ID NO: 1935568
aaucucaaccuucugcuuu

SEQ ID NO: 1935570 - RNA, 19 nt, Artificial Sequence
  Description of Artificial Sequence: Synthetic oligonucleotide
  Sense strand starting at position 513 of SEQ ID NO: 1879843
agagcuauaccagaaugcu

SEQ ID NO: 1935571 - RNA, 19 nt, Artificial Sequence
  Description of Artificial Sequence: Synthetic oligonucleotide
  Antisense strand to SEQ ID NO: 1935570
agcauucugguauagcucu

SEQ ID NO: 1935572 - RNA, 19 nt, Artificial Sequence
  Description of Artificial Sequence: Synthetic oligonucleotide
  Sense strand starting at position 655 of SEQ ID NO: 1879843
aguagaaacucuguauuaa

SEQ ID NO: 1935573 - RNA, 19 nt, Artificial Sequence
  Description of Artificial Sequence: Synthetic oligonucleotide
  Antisense strand to SEQ ID NO: 1935572
uuaauacagaguuucuacu

SEQ ID NO: 1935574 - RNA, 19 nt, Artificial Sequence
  Description of Artificial Sequence: Synthetic oligonucleotide
  Sense strand starting at position 656 of SEQ ID NO: 1879843
guagaaacucuguauuaac

SEQ ID NO: 1935575 - RNA, 19 nt, Artificial Sequence
  Description of Artificial Sequence: Synthetic oligonucleotide
  Antisense strand to SEQ ID NO: 1935574
guuaauacagaguuucuac

SEQ ID NO: 1935576 - RNA, 19 nt, Artificial Sequence
  Description of Artificial Sequence: Synthetic oligonucleotide
  Sense strand starting at position 992 of SEQ ID NO: 1879843
gauuacaugucagugagau

SEQ ID NO: 1935577 - RNA, 19 nt, Artificial Sequence
  Description of Artificial Sequence: Synthetic oligonucleotide
  Antisense strand to SEQ ID NO: 1935576
aucucacugacauguaauc

SEQ ID NO: 1935578 - RNA, 19 nt, Artificial Sequence
  Description of Artificial Sequence: Synthetic oligonucleotide
  Sense strand starting at position 993 of SEQ ID NO: 1879843
auuacaugucagugagaua

SEQ ID NO: 1935579 - RNA, 19 nt, Artificial Sequence
  Description of Artificial Sequence: Synthetic oligonucleotide
  Antisense strand to SEQ ID NO: 1935578
uaucucacugacauguaau

SEQ ID NO: 1935580 - RNA, 19 nt, Artificial Sequence
  Description of Artificial Sequence: Synthetic oligonucleotide
  Sense strand starting at position 1345 of SEQ ID NO: 1879843
uggauaagguaacuucuau

SEQ ID NO: 1935581 - RNA, 19 nt, Artificial Sequence
  Description of Artificial Sequence: Synthetic oligonucleotide
  Antisense strand to SEQ ID NO: 1935580
auagaaguuaccuuaucca

SEQ ID NO: 1935582 - RNA, 19 nt, Artificial Sequence
  Description of Artificial Sequence: Synthetic oligonucleotide
  Sense strand starting at position 1442 of SEQ ID NO: 1879843
gcagauagaguuuauaucu

SEQ ID NO: 1935583 - RNA, 19 nt, Artificial Sequence
  Description of Artificial Sequence: Synthetic oligonucleotide
  Antisense strand to SEQ ID NO: 1935582
agauauaaacucuaucugc

SEQ ID NO: 1935584 - RNA, 19 nt, Artificial Sequence
  Description of Artificial Sequence: Synthetic oligonucleotide
  Sense strand starting at position 1447 of SEQ ID NO: 1879843
uagaguuuauaucuuggga

SEQ ID NO: 1935585 - RNA, 19 nt, Artificial Sequence
  Description of Artificial Sequence: Synthetic oligonucleotide
  Antisense strand to SEQ ID NO: 1935584
ucccaagauauaaacucua

SEQ ID NO: 1935586 - RNA, 19 nt, Artificial Sequence
  Description of Artificial Sequence: Synthetic oligonucleotide
  Sense strand starting at position 1450 of SEQ ID NO: 1879843
aguuuauaucuugggauga

SEQ ID NO: 1935587 - RNA, 19 nt, Artificial Sequence
  Description of Artificial Sequence: Synthetic oligonucleotide
  Antisense strand to SEQ ID NO: 1935586
ucaucccaagauauaaacu

SEQ ID NO: 1935588 - RNA, 19 nt, Artificial Sequence
  Description of Artificial Sequence: Synthetic oligonucleotide
  Sense strand starting at position 1461 of SEQ ID NO: 1879843
ugggaugagauguguaaag

SEQ ID NO: 1935589 - RNA, 19 nt, Artificial Sequence
  Description of Artificial Sequence: Synthetic oligonucleotide
  Antisense strand to SEQ ID NO: 1935588
cuuuacacaucucauccca

SEQ ID NO: 1935590 - RNA, 19 nt, Artificial Sequence
  Description of Artificial Sequence: Synthetic oligonucleotide
  Sense strand starting at position 1489 of SEQ ID NO: 1879843
cugaaauuacgugaagguu

SEQ ID NO: 1935591 - RNA, 19 nt, Artificial Sequence
  Description of Artificial Sequence: Synthetic oligonucleotide
  Antisense strand to SEQ ID NO: 1935590
aaccuucacguaauuucag

SEQ ID NO: 1935592 - RNA, 19 nt, Artificial Sequence
  Description of Artificial Sequence: Synthetic oligonucleotide
  Sense strand starting at position 1691 of SEQ ID NO: 1879843
gacaguaauccaggcagaa

SEQ ID NO: 1935593 - RNA, 19 nt, Artificial Sequence
  Description of Artificial Sequence: Synthetic oligonucleotide
  Antisense strand to SEQ ID NO: 1935592
uucugccuggauuacuguc

SEQ ID NO: 1935594 - RNA, 19 nt, Artificial Sequence
  Description of Artificial Sequence: Synthetic oligonucleotide
  Sense strand starting at position 1862 of SEQ ID NO: 1879843
uacagaaguuaguccuuga

SEQ ID NO: 1935595 - RNA, 19 nt, Artificial Sequence
  Description of Artificial Sequence: Synthetic oligonucleotide
  Antisense strand to SEQ ID NO: 1935594
ucaaggacuaacuucugua

SEQ ID NO: 1935596 - RNA, 19 nt, Artificial Sequence
  Description of Artificial Sequence: Synthetic oligonucleotide
  Sense strand starting at position 1867 of SEQ ID NO: 1879843
aaguuaguccuugagguag

SEQ ID NO: 1935597 - RNA, 19 nt, Artificial Sequence
  Description of Artificial Sequence: Synthetic oligonucleotide
  Antisense strand to SEQ ID NO: 1935596
cuaccucaaggacuaacuu

SEQ ID NO: 1935598 - RNA, 19 nt, Artificial Sequence
  Description of Artificial Sequence: Synthetic oligonucleotide
  Sense strand starting at position 2017 of SEQ ID NO: 1879843
gauggcugagcucacagau

SEQ ID NO: 1935599 - RNA, 19 nt, Artificial Sequence
  Description of Artificial Sequence: Synthetic oligonucleotide
  Antisense strand to SEQ ID NO: 1935598
aucugugagcucagccauc

SEQ ID NO: 1935600 - RNA, 19 nt, Artificial Sequence
  Description of Artificial Sequence: Synthetic oligonucleotide
  Sense strand starting at position 2037 of SEQ ID NO: 1879843
gggacuguuauguaaucag

SEQ ID NO: 1935601 - RNA, 19 nt, Artificial Sequence
  Description of Artificial Sequence: Synthetic oligonucleotide
  Antisense strand to SEQ ID NO: 1935600
cugauuacauaacaguccc

SEQ ID NO: 1935602 - RNA, 19 nt, Artificial Sequence
  Description of Artificial Sequence: Synthetic oligonucleotide
  Sense strand starting at position 2041 of SEQ ID NO: 1879843
cuguuauguaaucagaggu

SEQ ID NO: 1935603 - RNA, 19 nt, Artificial Sequence
  Description of Artificial Sequence: Synthetic oligonucleotide
  Antisense strand to SEQ ID NO: 1935602
accucugauuacauaacag

SEQ ID NO: 1935604 - RNA, 19 nt, Artificial Sequence
  Description of Artificial Sequence: Synthetic oligonucleotide
  Sense strand starting at position 2088 of SEQ ID NO: 1879843
ccaggugaagacugaaagu

SEQ ID NO: 1935605 - RNA, 19 nt, Artificial Sequence
  Description of Artificial Sequence: Synthetic oligonucleotide
  Antisense strand to SEQ ID NO: 1935604
acuuucagucuucaccugg

SEQ ID NO: 1935606 - RNA, 19 nt, Artificial Sequence
  Description of Artificial Sequence: Synthetic oligonucleotide
  Sense strand starting at position 2176 of SEQ ID NO: 1879843
gacugaaaguuugcccaaa

SEQ ID NO: 1935607 - RNA, 19 nt, Artificial Sequence
  Description of Artificial Sequence: Synthetic oligonucleotide
  Antisense strand to SEQ ID NO: 1935606
uuugggcaaacuuucaguc

SEQ ID NO: 1935608 - RNA, 19 nt, Artificial Sequence
  Description of Artificial Sequence: Synthetic oligonucleotide
  Sense strand starting at position 2178 of SEQ ID NO: 1879843
cugaaaguuugcccaaaga

SEQ ID NO: 1935609 - RNA, 19 nt, Artificial Sequence
  Description of Artificial Sequence: Synthetic oligonucleotide
  Antisense strand to SEQ ID NO: 1935608
ucuuugggcaaacuuucag

SEQ ID NO: 1935610 - RNA, 19 nt, Artificial Sequence
  Description of Artificial Sequence: Synthetic oligonucleotide
  Sense strand starting at position 2237 of SEQ ID NO: 1879843
uuagaaugaccacgucuaa

SEQ ID NO: 1935611 - RNA, 19 nt, Artificial Sequence
  Description of Artificial Sequence: Synthetic oligonucleotide
  Antisense strand to SEQ ID NO: 1935610
uuagacguggucauucuaa

SEQ ID NO: 1935612 - RNA, 19 nt, Artificial Sequence
  Description of Artificial Sequence: Synthetic oligonucleotide
  Sense strand starting at position 2354 of SEQ ID NO: 1879843
uuaaucugucaugauggca

SEQ ID NO: 1935613 - RNA, 19 nt, Artificial Sequence
  Description of Artificial Sequence: Synthetic oligonucleotide
  Antisense strand to SEQ ID NO: 1935612
ugccaucaugacagauuaa

SEQ ID NO: 1935614 - RNA, 19 nt, Artificial Sequence
  Description of Artificial Sequence: Synthetic oligonucleotide
  Sense strand starting at position 2511 of SEQ ID NO: 1879843
agacauacugguuagcuca

SEQ ID NO: 1935615 - RNA, 19 nt, Artificial Sequence
  Description of Artificial Sequence: Synthetic oligonucleotide
  Antisense strand to SEQ ID NO: 1935614
ugagcuaaccaguaugucu

SEQ ID NO: 1935616 - RNA, 19 nt, Artificial Sequence
  Description of Artificial Sequence: Synthetic oligonucleotide
  Sense strand starting at position 2587 of SEQ ID NO: 1879843
guguguuccaucuuacguc

SEQ ID NO: 1935617 - RNA, 19 nt, Artificial Sequence
  Description of Artificial Sequence: Synthetic oligonucleotide
  Antisense strand to SEQ ID NO: 1935616
gacguaagauggaacacac

SEQ ID NO: 1935618 - RNA, 19 nt, Artificial Sequence
  Description of Artificial Sequence: Synthetic oligonucleotide
  Sense strand starting at position 2591 of SEQ ID NO: 1879843
guuccaucuuacgucauuu

SEQ ID NO: 1935619 - RNA, 19 nt, Artificial Sequence
  Description of Artificial Sequence: Synthetic oligonucleotide
  Antisense strand to SEQ ID NO: 1935618
aaaugacguaagauggaac

SEQ ID NO: 1935620 - RNA, 19 nt, Artificial Sequence
  Description of Artificial Sequence: Synthetic oligonucleotide
  Sense strand starting at position 2628 of SEQ ID NO: 1879843
uugcaauucccagaguacu

SEQ ID NO: 1935621 - RNA, 19 nt, Artificial Sequence
  Description of Artificial Sequence: Synthetic oligonucleotide
  Antisense strand to SEQ ID NO: 1935620
aguacucugggaauugcaa

SEQ ID NO: 1935622 - RNA, 19 nt, Artificial Sequence
  Description of Artificial Sequence: Synthetic oligonucleotide
  Sense strand starting at position 2636 of SEQ ID NO: 1879843
cccagaguacugggauagu

SEQ ID NO: 1935623 - RNA, 19 nt, Artificial Sequence
  Description of Artificial Sequence: Synthetic oligonucleotide
  Antisense strand to SEQ ID NO: 1935622
acuaucccaguacucuggg

SEQ ID NO: 1935624 - RNA, 19 nt, Artificial Sequence
  Description of Artificial Sequence: Synthetic oligonucleotide
  Sense strand starting at position 2710 of SEQ ID NO: 1879843
acuaauuuccacuguuguu

SEQ ID NO: 1935625 - RNA, 19 nt, Artificial Sequence
  Description of Artificial Sequence: Synthetic oligonucleotide
  Antisense strand to SEQ ID NO: 1935624
aacaacaguggaaauuagu

SEQ ID NO: 1935626 - RNA, 19 nt, Artificial Sequence
  Description of Artificial Sequence: Synthetic oligonucleotide
  Sense strand starting at position 2896 of SEQ ID NO: 1879843
augauagagcauugacaca

SEQ ID NO: 1935627 - RNA, 19 nt, Artificial Sequence
  Description of Artificial Sequence: Synthetic oligonucleotide
  Antisense strand to SEQ ID NO: 1935626
ugugucaaugcucuaucau

SEQ ID NO: 1935628 - RNA, 19 nt, Artificial Sequence
  Description of Artificial Sequence: Synthetic oligonucleotide
  Sense strand starting at position 3006 of SEQ ID NO: 1879843
ccuucuguuggauaggcaa

SEQ ID NO: 1935629 - RNA, 19 nt, Artificial Sequence
  Description of Artificial Sequence: Synthetic oligonucleotide
  Antisense strand to SEQ ID NO: 1935628
uugccuauccaacagaagg

SEQ ID NO: 1935630 - RNA, 19 nt, Artificial Sequence
  Description of Artificial Sequence: Synthetic oligonucleotide
  Sense strand starting at position 3018 of SEQ ID NO: 1879843
uaggcaagauuaguacaua

SEQ ID NO: 1935631 - RNA, 19 nt, Artificial Sequence
  Description of Artificial Sequence: Synthetic oligonucleotide
  Antisense strand to SEQ ID NO: 1935630
uauguacuaaucuugccua

SEQ ID NO: 1935632 - RNA, 19 nt, Artificial Sequence
  Description of Artificial Sequence: Synthetic oligonucleotide
  Sense strand starting at position 3040 of SEQ ID NO: 1879843
caguuauggagccauguga

SEQ ID NO: 1935633 - RNA, 19 nt, Artificial Sequence
  Description of Artificial Sequence: Synthetic oligonucleotide
  Antisense strand to SEQ ID NO: 1935632
ucacauggcuccauaacug

SEQ ID NO: 1935634 - RNA, 19 nt, Artificial Sequence
  Description of Artificial Sequence: Synthetic oligonucleotide
  Sense strand starting at position 3140 of SEQ ID NO: 1879843
cucagagcacaguaagauu

SEQ ID NO: 1935635 - RNA, 19 nt, Artificial Sequence
  Description of Artificial Sequence: Synthetic oligonucleotide
  Antisense strand to SEQ ID NO: 1935634
aaucuuacugugcucugag

SEQ ID NO: 1935636 - RNA, 19 nt, Artificial Sequence
  Description of Artificial Sequence: Synthetic oligonucleotide
  Sense strand starting at position 3235 of SEQ ID NO: 1879843
ggcagauaucugcauauag

SEQ ID NO: 1935637 - RNA, 19 nt, Artificial Sequence
  Description of Artificial Sequence: Synthetic oligonucleotide
  Antisense strand to SEQ ID NO: 1935636
cuauaugcagauaucugcc

SEQ ID NO: 1935638 - RNA, 19 nt, Artificial Sequence
  Description of Artificial Sequence: Synthetic oligonucleotide
  Sense strand starting at position 3370 of SEQ ID NO: 1879843
gugaauuguaauuaaagug

SEQ ID NO: 1935639 - RNA, 19 nt, Artificial Sequence
  Description of Artificial Sequence: Synthetic oligonucleotide
  Antisense strand to SEQ ID NO: 1935638
cacuuuaauuacaauucac

SEQ ID NO: 1935640 - RNA, 19 nt, Artificial Sequence
  Description of Artificial Sequence: Synthetic oligonucleotide
  Sense strand starting at position 3752 of SEQ ID NO: 1879843
aguguugcugugucagcaa

SEQ ID NO: 1935641 - RNA, 19 nt, Artificial Sequence
  Description of Artificial Sequence: Synthetic oligonucleotide
  Antisense strand to SEQ ID NO: 1935640
uugcugacacagcaacacu

SEQ ID NO: 1935642 - RNA, 19 nt, Artificial Sequence
  Description of Artificial Sequence: Synthetic oligonucleotide
  Sense strand starting at position 3781 of SEQ ID NO: 1879843
guuugaauugucugaaagg

SEQ ID NO: 1935643 - RNA, 19 nt, Artificial Sequence
  Description of Artificial Sequence: Synthetic oligonucleotide
  Antisense strand to SEQ ID NO: 1935642
ccuuucagacaauucaaac

SEQ ID NO: 1935644 - RNA, 19 nt, Artificial Sequence
  Description of Artificial Sequence: Synthetic oligonucleotide
  Sense strand starting at position 3918 of SEQ ID NO: 1879843
uugcauuaugcguuacuuu

SEQ ID NO: 1935645 - RNA, 19 nt, Artificial Sequence
  Description of Artificial Sequence: Synthetic oligonucleotide
  Antisense strand to SEQ ID NO: 1935644
aaaguaacgcauaaugcaa

SEQ ID NO: 1935646 - RNA, 19 nt, Artificial Sequence
  Description of Artificial Sequence: Synthetic oligonucleotide
  Sense strand starting at position 29 of SEQ ID NO: 1879844
gccagagugagauguugga

SEQ ID NO: 1935647 - RNA, 19 nt, Artificial Sequence
  Description of Artificial Sequence: Synthetic oligonucleotide
  Antisense strand to SEQ ID NO: 1935646
uccaacaucucacucuggc

SEQ ID NO: 1935648 - RNA, 19 nt, Artificial Sequence
  Description of Artificial Sequence: Synthetic oligonucleotide
  Sense strand starting at position 33 of SEQ ID NO: 1879844
gagugagauguuggaaggu

SEQ ID NO: 1935649 - RNA, 19 nt, Artificial Sequence
  Description of Artificial Sequence: Synthetic oligonucleotide
  Antisense strand to SEQ ID NO: 1935648
accuuccaacaucucacuc

SEQ ID NO: 1935650 - RNA, 19 nt, Artificial Sequence
  Description of Artificial Sequence: Synthetic oligonucleotide
  Sense strand starting at position 35 of SEQ ID NO: 1879844
gugagauguuggaagguga

SEQ ID NO: 1935651 - RNA, 19 nt, Artificial Sequence
  Description of Artificial Sequence: Synthetic oligonucleotide
  Antisense strand to SEQ ID NO: 1935650
ucaccuuccaacaucucac

SEQ ID NO: 1935652 - RNA, 19 nt, Artificial Sequence
  Description of Artificial Sequence: Synthetic oligonucleotide
  Sense strand starting at position 53 of SEQ ID NO: 1879844
agguuucgugaagacauca

SEQ ID NO: 1935653 - RNA, 19 nt, Artificial Sequence
  Description of Artificial Sequence: Synthetic oligonucleotide
  Antisense strand to SEQ ID NO: 1935652
ugaugucuucacgaaaccu

SEQ ID NO: 1935654 - RNA, 19 nt, Artificial Sequence
  Description of Artificial Sequence: Synthetic oligonucleotide
  Sense strand starting at position 95 of SEQ ID NO: 1879844
aaguuuggcugacugaaga

SEQ ID NO: 1935655 - RNA, 19 nt, Artificial Sequence
  Description of Artificial Sequence: Synthetic oligonucleotide
  Antisense strand to SEQ ID NO: 1935654
ucuucagucagccaaacuu

SEQ ID NO: 1935656 - RNA, 19 nt, Artificial Sequence
  Description of Artificial Sequence: Synthetic oligonucleotide
  Sense strand starting at position 172 of SEQ ID NO: 1879844
gguaaagugucuucagaag

SEQ ID NO: 1935657 - RNA, 19 nt, Artificial Sequence
  Description of Artificial Sequence: Synthetic oligonucleotide
  Antisense strand to SEQ ID NO: 1935656
cuucugaagacacuuuacc

SEQ ID NO: 1935658 - RNA, 19 nt, Artificial Sequence
  Description of Artificial Sequence: Synthetic oligonucleotide
  Sense strand starting at position 294 of SEQ ID NO: 1879844
cucuguucucaggaagcca

SEQ ID NO: 1935659 - RNA, 19 nt, Artificial Sequence
  Description of Artificial Sequence: Synthetic oligonucleotide
  Antisense strand to SEQ ID NO: 1935658
uggcuuccugagaacagag

SEQ ID NO: 1935660 - RNA, 19 nt, Artificial Sequence
  Description of Artificial Sequence: Synthetic oligonucleotide
  Sense strand starting at position 309 of SEQ ID NO: 1879844
gccagagaaaccuauggca

SEQ ID NO: 1935661 - RNA, 19 nt, Artificial Sequence
  Description of Artificial Sequence: Synthetic oligonucleotide
  Antisense strand to SEQ ID NO: 1935660
ugccauagguuucucuggc

SEQ ID NO: 1935662 - RNA, 19 nt, Artificial Sequence
  Description of Artificial Sequence: Synthetic oligonucleotide
  Sense strand starting at position 311 of SEQ ID NO: 1879844
cagagaaaccuauggcaug

SEQ ID NO: 1935663 - RNA, 19 nt, Artificial Sequence
  Description of Artificial Sequence: Synthetic oligonucleotide
  Antisense strand to SEQ ID NO: 1935662
caugccauagguuucucug

SEQ ID NO: 1935664 - RNA, 19 nt, Artificial Sequence
  Description of Artificial Sequence: Synthetic oligonucleotide
  Sense strand starting at position 550 of SEQ ID NO: 1879844
aguauuauugaccauaggu

SEQ ID NO: 1935665 - RNA, 19 nt, Artificial Sequence
  Description of Artificial Sequence: Synthetic oligonucleotide
  Antisense strand to SEQ ID NO: 1935664
accuauggucaauaauacu

SEQ ID NO: 1935666 - RNA, 19 nt, Artificial Sequence
  Description of Artificial Sequence: Synthetic oligonucleotide
  Sense strand starting at position 620 of SEQ ID NO: 1879844
cuguauguccauugauuaa

SEQ ID NO: 1935667 - RNA, 19 nt, Artificial Sequence
  Description of Artificial Sequence: Synthetic oligonucleotide
  Antisense strand to SEQ ID NO: 1935666
uuaaucaauggacauacag

SEQ ID NO: 1935668 - RNA, 19 nt, Artificial Sequence
  Description of Artificial Sequence: Synthetic oligonucleotide
  Sense strand starting at position 753 of SEQ ID NO: 1879844
uucucugagugguuuauuu

SEQ ID NO: 1935669 - RNA, 19 nt, Artificial Sequence
  Description of Artificial Sequence: Synthetic oligonucleotide
  Antisense strand to SEQ ID NO: 1935668
aaauaaaccacucagagaa

SEQ ID NO: 1935670 - RNA, 19 nt, Artificial Sequence
  Description of Artificial Sequence: Synthetic oligonucleotide
  Sense strand starting at position 840 of SEQ ID NO: 1879844
aguaauauucugggaugug

SEQ ID NO: 1935671 - RNA, 19 nt, Artificial Sequence
  Description of Artificial Sequence: Synthetic oligonucleotide
  Antisense strand to SEQ ID NO: 1935670
cacaucccagaauauuacu

SEQ ID NO: 1935672 - RNA, 19 nt, Artificial Sequence
  Description of Artificial Sequence: Synthetic oligonucleotide
  Sense strand starting at position 896 of SEQ ID NO: 1879844
auugaucuguuguuggaua

SEQ ID NO: 1935673 - RNA, 19 nt, Artificial Sequence
  Description of Artificial Sequence: Synthetic oligonucleotide
  Antisense strand to SEQ ID NO: 1935672
uauccaacaacagaucaau

SEQ ID NO: 1935674 - RNA, 19 nt, Artificial Sequence
  Description of Artificial Sequence: Synthetic oligonucleotide
  Sense strand starting at position 1011 of SEQ ID NO: 1879844
auaaauacccugugggacu

SEQ ID NO: 1935675 - RNA, 19 nt, Artificial Sequence
  Description of Artificial Sequence: Synthetic oligonucleotide
  Antisense strand to SEQ ID NO: 1935674
agucccacaggguauuuau

SEQ ID NO: 1935676 - RNA, 19 nt, Artificial Sequence
  Description of Artificial Sequence: Synthetic oligonucleotide
  Sense strand starting at position 1409 of SEQ ID NO: 1879844
gcccuaaagaaaugagugu

SEQ ID NO: 1935677 - RNA, 19 nt, Artificial Sequence
  Description of Artificial Sequence: Synthetic oligonucleotide
  Antisense strand to SEQ ID NO: 1935676
acacucauuucuuuagggc

SEQ ID NO: 1935678 - RNA, 19 nt, Artificial Sequence
  Description of Artificial Sequence: Synthetic oligonucleotide
  Sense strand starting at position 1416 of SEQ ID NO: 1879844
agaaaugaguguccugaag

SEQ ID NO: 1935679 - RNA, 19 nt, Artificial Sequence
  Description of Artificial Sequence: Synthetic oligonucleotide
  Antisense strand to SEQ ID NO: 1935678
cuucaggacacucauuucu

SEQ ID NO: 1935680 - RNA, 19 nt, Artificial Sequence
  Description of Artificial Sequence: Synthetic oligonucleotide
  Sense strand starting at position 1425 of SEQ ID NO: 1879844
uguccugaaguguagaaca

SEQ ID NO: 1935681 - RNA, 19 nt, Artificial Sequence
  Description of Artificial Sequence: Synthetic oligonucleotide
  Antisense strand to SEQ ID NO: 1935680
uguucuacacuucaggaca

SEQ ID NO: 1935682 - RNA, 19 nt, Artificial Sequence
  Description of Artificial Sequence: Synthetic oligonucleotide
  Sense strand starting at position 1427 of SEQ ID NO: 1879844
uccugaaguguagaacauu

SEQ ID NO: 1935683 - RNA, 19 nt, Artificial Sequence
  Description of Artificial Sequence: Synthetic oligonucleotide
  Antisense strand to SEQ ID NO: 1935682
aauguucuacacuucagga

SEQ ID NO: 1935684 - RNA, 19 nt, Artificial Sequence
  Description of Artificial Sequence: Synthetic oligonucleotide
  Sense strand starting at position 1480 of SEQ ID NO: 1879844
ucauacagacagugcuaau

SEQ ID NO: 1935685 - RNA, 19 nt, Artificial Sequence
  Description of Artificial Sequence: Synthetic oligonucleotide
  Antisense strand to SEQ ID NO: 1935684
auuagcacugucuguauga

SEQ ID NO: 1935686 - RNA, 19 nt, Artificial Sequence
  Description of Artificial Sequence: Synthetic oligonucleotide
  Sense strand starting at position 1553 of SEQ ID NO: 1879844
uguuuaaugcgucccagca

SEQ ID NO: 1935687 - RNA, 19 nt, Artificial Sequence
  Description of Artificial Sequence: Synthetic oligonucleotide
  Antisense strand to SEQ ID NO: 1935686
ugcugggacgcauuaaaca

SEQ ID NO: 1935688 - RNA, 19 nt, Artificial Sequence
  Description of Artificial Sequence: Synthetic oligonucleotide
  Sense strand starting at position 1554 of SEQ ID NO: 1879844
guuuaaugcgucccagcaa

SEQ ID NO: 1935689 - RNA, 19 nt, Artificial Sequence
  Description of Artificial Sequence: Synthetic oligonucleotide
  Antisense strand to SEQ ID NO: 1935688
uugcugggacgcauuaaac

SEQ ID NO: 1935690 - RNA, 19 nt, Artificial Sequence
  Description of Artificial Sequence: Synthetic oligonucleotide
  Sense strand starting at position 1610 of SEQ ID NO: 1879844
acuauucuguggcugacaa

SEQ ID NO: 1935691 - RNA, 19 nt, Artificial Sequence
  Description of Artificial Sequence: Synthetic oligonucleotide
  Antisense strand to SEQ ID NO: 1935690
uugucagccacagaauagu

SEQ ID NO: 1935692 - RNA, 19 nt, Artificial Sequence
  Description of Artificial Sequence: Synthetic oligonucleotide
  Sense strand starting at position 1778 of SEQ ID NO: 1879844
uaggcuggcgaugaaauau

SEQ ID NO: 1935693 - RNA, 19 nt, Artificial Sequence
  Description of Artificial Sequence: Synthetic oligonucleotide
  Antisense strand to SEQ ID NO: 1935692
auauuucaucgccagccua

SEQ ID NO: 1935694 - RNA, 19 nt, Artificial Sequence
  Description of Artificial Sequence: Synthetic oligonucleotide
  Sense strand starting at position 1786 of SEQ ID NO: 1879844
cgaugaaauauaggcuuua

SEQ ID NO: 1935695 - RNA, 19 nt, Artificial Sequence
  Description of Artificial Sequence: Synthetic oligonucleotide
  Antisense strand to SEQ ID NO: 1935694
uaaagccuauauuucaucg

SEQ ID NO: 1935696 - RNA, 19 nt, Artificial Sequence
  Description of Artificial Sequence: Synthetic oligonucleotide
  Sense strand starting at position 2021 of SEQ ID NO: 1879844
guguaucacagucagcaga

SEQ ID NO: 1935697 - RNA, 19 nt, Artificial Sequence
  Description of Artificial Sequence: Synthetic oligonucleotide
  Antisense strand to SEQ ID NO: 1935696
ucugcugacugugauacac

SEQ ID NO: 1935698 - RNA, 19 nt, Artificial Sequence
  Description of Artificial Sequence: Synthetic oligonucleotide
  Sense strand starting at position 2071 of SEQ ID NO: 1879844
gucucccacucagugaaau

SEQ ID NO: 1935699 - RNA, 19 nt, Artificial Sequence
  Description of Artificial Sequence: Synthetic oligonucleotide
  Antisense strand to SEQ ID NO: 1935698
auuucacugagugggagac

SEQ ID NO: 1935700 - RNA, 19 nt, Artificial Sequence
  Description of Artificial Sequence: Synthetic oligonucleotide
  Sense strand starting at position 2668 of SEQ ID NO: 1879844
aguaaagguuucuuggaug

SEQ ID NO: 1935701 - RNA, 19 nt, Artificial Sequence
  Description of Artificial Sequence: Synthetic oligonucleotide
  Antisense strand to SEQ ID NO: 1935700
cauccaagaaaccuuuacu

SEQ ID NO: 1935702 - RNA, 19 nt, Artificial Sequence
  Description of Artificial Sequence: Synthetic oligonucleotide
  Sense strand starting at position 2673 of SEQ ID NO: 1879844
agguuucuuggauggaaag

SEQ ID NO: 1935703 - RNA, 19 nt, Artificial Sequence
  Description of Artificial Sequence: Synthetic oligonucleotide
  Antisense strand to SEQ ID NO: 1935702
cuuuccauccaagaaaccu

SEQ ID NO: 1935704 - RNA, 19 nt, Artificial Sequence
  Description of Artificial Sequence: Synthetic oligonucleotide
  Sense strand starting at position 2674 of SEQ ID NO: 1879844
gguuucuuggauggaaaga

SEQ ID NO: 1935705 - RNA, 19 nt, Artificial Sequence
  Description of Artificial Sequence: Synthetic oligonucleotide
  Antisense strand to SEQ ID NO: 1935704
ucuuuccauccaagaaacc

SEQ ID NO: 1935706 - RNA, 19 nt, Artificial Sequence
  Description of Artificial Sequence: Synthetic oligonucleotide
  Sense strand starting at position 2817 of SEQ ID NO: 1879844
cggauccuggcucaaacau

SEQ ID NO: 1935707 - RNA, 19 nt, Artificial Sequence
  Description of Artificial Sequence: Synthetic oligonucleotide
  Antisense strand to SEQ ID NO: 1935706
auguuugagccaggauccg

SEQ ID NO: 1935708 - RNA, 19 nt, Artificial Sequence
  Description of Artificial Sequence: Synthetic oligonucleotide
  Sense strand starting at position 2930 of SEQ ID NO: 1879844
uacgguggagauugagaaa

SEQ ID NO: 1935709 - RNA, 19 nt, Artificial Sequence
  Description of Artificial Sequence: Synthetic oligonucleotide
  Antisense strand to SEQ ID NO: 1935708
uuucucaaucuccaccgua

SEQ ID NO: 1935710 - RNA, 19 nt, Artificial Sequence
  Description of Artificial Sequence: Synthetic oligonucleotide
  Sense strand starting at position 2952 of SEQ ID NO: 1879844
caguaagcaccugauagua

SEQ ID NO: 1935711 - RNA, 19 nt, Artificial Sequence
  Description of Artificial Sequence: Synthetic oligonucleotide
  Antisense strand to SEQ ID NO: 1935710
uacuaucaggugcuuacug

SEQ ID NO: 1935712 - RNA, 19 nt, Artificial Sequence
  Description of Artificial Sequence: Synthetic oligonucleotide
  Sense strand starting at position 3009 of SEQ ID NO: 1879844
guuuauagauuaucaaguc

SEQ ID NO: 1935713 - RNA, 19 nt, Artificial Sequence
  Description of Artificial Sequence: Synthetic oligonucleotide
  Antisense strand to SEQ ID NO: 1935712
gacuugauaaucuauaaac

SEQ ID NO: 1935714 - RNA, 19 nt, Artificial Sequence
  Description of Artificial Sequence: Synthetic oligonucleotide
  Sense strand starting at position 3305 of SEQ ID NO: 1879844
cuagauuucuucuaugaga

SEQ ID NO: 1935715 - RNA, 19 nt, Artificial Sequence
  Description of Artificial Sequence: Synthetic oligonucleotide
  Antisense strand to SEQ ID NO: 1935714
ucucauagaagaaaucuag

SEQ ID NO: 1935716 - RNA, 19 nt, Artificial Sequence
  Description of Artificial Sequence: Synthetic oligonucleotide
  Sense strand starting at position 3331 of SEQ ID NO: 1879844
auaugauugcaugaaugcu

SEQ ID NO: 1935717 - RNA, 19 nt, Artificial Sequence
  Description of Artificial Sequence: Synthetic oligonucleotide
  Antisense strand to SEQ ID NO: 1935716
agcauucaugcaaucauau

SEQ ID NO: 1935718 - RNA, 19 nt, Artificial Sequence
  Description of Artificial Sequence: Synthetic oligonucleotide
  Sense strand starting at position 3376 of SEQ ID NO: 1879844
gauucuauccuucgagauc

SEQ ID NO: 1935719 - RNA, 19 nt, Artificial Sequence
  Description of Artificial Sequence: Synthetic oligonucleotide
  Antisense strand to SEQ ID NO: 1935718
gaucucgaaggauagaauc

SEQ ID NO: 1935720 - RNA, 19 nt, Artificial Sequence
  Description of Artificial Sequence: Synthetic oligonucleotide
  Sense strand starting at position 3422 of SEQ ID NO: 1879844
gaagccuguccugaccauu

SEQ ID NO: 1935721 - RNA, 19 nt, Artificial Sequence
  Description of Artificial Sequence: Synthetic oligonucleotide
  Antisense strand to SEQ ID NO: 1935720
aauggucaggacaggcuuc

SEQ ID NO: 1935722 - RNA, 19 nt, Artificial Sequence
  Description of Artificial Sequence: Synthetic oligonucleotide
  Sense strand starting at position 3488 of SEQ ID NO: 1879844
cugcgcuaugugucuggaa

SEQ ID NO: 1935723 - RNA, 19 nt, Artificial Sequence
  Description of Artificial Sequence: Synthetic oligonucleotide
  Antisense strand to SEQ ID NO: 1935722
uuccagacacauagcgcag

SEQ ID NO: 1935724 - RNA, 19 nt, Artificial Sequence
  Description of Artificial Sequence: Synthetic oligonucleotide
  Sense strand starting at position 3520 of SEQ ID NO: 1879844
auagccuugcaaugaugau

SEQ ID NO: 1935725 - RNA, 19 nt, Artificial Sequence
  Description of Artificial Sequence: Synthetic oligonucleotide
  Antisense strand to SEQ ID NO: 1935724
aucaucauugcaaggcuau

SEQ ID NO: 1935726 - RNA, 19 nt, Artificial Sequence
  Description of Artificial Sequence: Synthetic oligonucleotide
  Sense strand starting at position 290 of SEQ ID NO: 1879845
aauugagacucccugaagu

SEQ ID NO: 1935727 - RNA, 19 nt, Artificial Sequence
  Description of Artificial Sequence: Synthetic oligonucleotide
  Antisense strand to SEQ ID NO: 1935726
acuucagggagucucaauu

SEQ ID NO: 1935728 - RNA, 19 nt, Artificial Sequence
  Description of Artificial Sequence: Synthetic oligonucleotide
  Sense strand starting at position 304 of SEQ ID NO: 1879845
gaagucaagugucuuauag

SEQ ID NO: 1935729 - RNA, 19 nt, Artificial Sequence
  Description of Artificial Sequence: Synthetic oligonucleotide
  Antisense strand to SEQ ID NO: 1935728
cuauaagacacuugacuuc

SEQ ID NO: 1935730 - RNA, 19 nt, Artificial Sequence
  Description of Artificial Sequence: Synthetic oligonucleotide
  Sense strand starting at position 348 of SEQ ID NO: 1879845
aauagagugccugauguga

SEQ ID NO: 1935731 - RNA, 19 nt, Artificial Sequence
  Description of Artificial Sequence: Synthetic oligonucleotide
  Antisense strand to SEQ ID NO: 1935730
ucacaucaggcacucuauu

SEQ ID NO: 1935732 - RNA, 19 nt, Artificial Sequence
  Description of Artificial Sequence: Synthetic oligonucleotide
  Sense strand starting at position 413 of SEQ ID NO: 1879845
gaggguuuacuccacuauu

SEQ ID NO: 1935733 - RNA, 19 nt, Artificial Sequence
  Description of Artificial Sequence: Synthetic oligonucleotide
  Antisense strand to SEQ ID NO: 1935732
aauaguggaguaaacccuc

SEQ ID NO: 1935734 - RNA, 19 nt, Artificial Sequence
  Description of Artificial Sequence: Synthetic oligonucleotide
  Sense strand starting at position 437 of SEQ ID NO: 1879845
uuacuuuaucaccaggguu

SEQ ID NO: 1935735 - RNA, 19 nt, Artificial Sequence
  Description of Artificial Sequence: Synthetic oligonucleotide
  Antisense strand to SEQ ID NO: 1935734
aacccuggugauaaaguaa

SEQ ID NO: 1935736 - RNA, 19 nt, Artificial Sequence
  Description of Artificial Sequence: Synthetic oligonucleotide
  Sense strand starting at position 439 of SEQ ID NO: 1879845
acuuuaucaccaggguuau

SEQ ID NO: 1935737 - RNA, 19 nt, Artificial Sequence
  Description of Artificial Sequence: Synthetic oligonucleotide
  Antisense strand to SEQ ID NO: 1935736
auaacccuggugauaaagu

SEQ ID NO: 1935738 - RNA, 19 nt, Artificial Sequence
  Description of Artificial Sequence: Synthetic oligonucleotide
  Sense strand starting at position 440 of SEQ ID NO: 1879845
cuuuaucaccaggguuaua

SEQ ID NO: 1935739 - RNA, 19 nt, Artificial Sequence
  Description of Artificial Sequence: Synthetic oligonucleotide
  Antisense strand to SEQ ID NO: 1935738
uauaacccuggugauaaag

SEQ ID NO: 1935740 - RNA, 19 nt, Artificial Sequence
  Description of Artificial Sequence: Synthetic oligonucleotide
  Sense strand starting at position 473 of SEQ ID NO: 1879845
gaguaacaacagugugauu

SEQ ID NO: 1935741 - RNA, 19 nt, Artificial Sequence
  Description of Artificial Sequence: Synthetic oligonucleotide
  Antisense strand to SEQ ID NO: 1935740
aaucacacuguuguuacuc

SEQ ID NO: 1935742 - RNA, 19 nt, Artificial Sequence
  Description of Artificial Sequence: Synthetic oligonucleotide
  Sense strand starting at position 527 of SEQ ID NO: 1879845
gcuccagugucauuuguaa

SEQ ID NO: 1935743 - RNA, 19 nt, Artificial Sequence
  Description of Artificial Sequence: Synthetic oligonucleotide
  Antisense strand to SEQ ID NO: 1935742
uuacaaaugacacuggagc

SEQ ID NO: 1935744 - RNA, 19 nt, Artificial Sequence
  Description of Artificial Sequence: Synthetic oligonucleotide
  Sense strand starting at position 550 of SEQ ID NO: 1879845
caagguuaccaucagcaga

SEQ ID NO: 1935745 - RNA, 19 nt, Artificial Sequence
  Description of Artificial Sequence: Synthetic oligonucleotide
  Antisense strand to SEQ ID NO: 1935744
ucugcugaugguaaccuug

SEQ ID NO: 1935746 - RNA, 19 nt, Artificial Sequence
  Description of Artificial Sequence: Synthetic oligonucleotide
  Sense strand starting at position 634 of SEQ ID NO: 1879845
agacacauuugaugacuau

SEQ ID NO: 1935747 - RNA, 19 nt, Artificial Sequence
  Description of Artificial Sequence: Synthetic oligonucleotide
  Antisense strand to SEQ ID NO: 1935746
auagucaucaaaugugucu

SEQ ID NO: 1935748 - RNA, 19 nt, Artificial Sequence
  Description of Artificial Sequence: Synthetic oligonucleotide
  Sense strand starting at position 646 of SEQ ID NO: 1879845
ugacuauaccuacagguuu

SEQ ID NO: 1935749 - RNA, 19 nt, Artificial Sequence
  Description of Artificial Sequence: Synthetic oligonucleotide
  Antisense strand to SEQ ID NO: 1935748
aaaccuguagguauaguca

SEQ ID NO: 1935750 - RNA, 19 nt, Artificial Sequence
  Description of Artificial Sequence: Synthetic oligonucleotide
  Sense strand starting at position 786 of SEQ ID NO: 1879845
ccaaguggucacggaaaug

SEQ ID NO: 1935751 - RNA, 19 nt, Artificial Sequence
  Description of Artificial Sequence: Synthetic oligonucleotide
  Antisense strand to SEQ ID NO: 1935750
cauuuccgugaccacuugg

SEQ ID NO: 1935752 - RNA, 19 nt, Artificial Sequence
  Description of Artificial Sequence: Synthetic oligonucleotide
  Sense strand starting at position 892 of SEQ ID NO: 1879845
aacaacuaugucgacguaa

SEQ ID NO: 1935753 - RNA, 19 nt, Artificial Sequence
  Description of Artificial Sequence: Synthetic oligonucleotide
  Antisense strand to SEQ ID NO: 1935752
uuacgucgacauaguuguu

SEQ ID NO: 1935754 - RNA, 19 nt, Artificial Sequence
  Description of Artificial Sequence: Synthetic oligonucleotide
  Sense strand starting at position 918 of SEQ ID NO: 1879845
agcuaacuauucuugguaa

SEQ ID NO: 1935755 - RNA, 19 nt, Artificial Sequence
  Description of Artificial Sequence: Synthetic oligonucleotide
  Antisense strand to SEQ ID NO: 1935754
uuaccaagaauaguuagcu

SEQ ID NO: 1935756 - RNA, 19 nt, Artificial Sequence
  Description of Artificial Sequence: Synthetic oligonucleotide
  Sense strand starting at position 920 of SEQ ID NO: 1879845
cuaacuauucuugguaagu

SEQ ID NO: 1935757 - RNA, 19 nt, Artificial Sequence
  Description of Artificial Sequence: Synthetic oligonucleotide
  Antisense strand to SEQ ID NO: 1935756
acuuaccaagaauaguuag

SEQ ID NO: 1935758 - RNA, 19 nt, Artificial Sequence
  Description of Artificial Sequence: Synthetic oligonucleotide
  Sense strand starting at position 936 of SEQ ID NO: 1879845
aguacuguucuuuauucua

SEQ ID NO: 1935759 - RNA, 19 nt, Artificial Sequence
  Description of Artificial Sequence: Synthetic oligonucleotide
  Antisense strand to SEQ ID NO: 1935758
uagaauaaagaacaguacu

SEQ ID NO: 1935760 - RNA, 19 nt, Artificial Sequence
  Description of Artificial Sequence: Synthetic oligonucleotide
  Sense strand starting at position 2158 of SEQ ID NO: 1879845
acaugcauggcccaagauu

SEQ ID NO: 1935761 - RNA, 19 nt, Artificial Sequence
  Description of Artificial Sequence: Synthetic oligonucleotide
  Antisense strand to SEQ ID NO: 1935760
aaucuugggccaugcaugu

SEQ ID NO: 1935762 - RNA, 19 nt, Artificial Sequence
  Description of Artificial Sequence: Synthetic oligonucleotide
  Sense strand starting at position 2236 of SEQ ID NO: 1879845
gagagucuucgagauccag

SEQ ID NO: 1935763 - RNA, 19 nt, Artificial Sequence
  Description of Artificial Sequence: Synthetic oligonucleotide
  Antisense strand to SEQ ID NO: 1935762
cuggaucucgaagacucuc

SEQ ID NO: 1935764 - RNA, 19 nt, Artificial Sequence
  Description of Artificial Sequence: Synthetic oligonucleotide
  Sense strand starting at position 2246 of SEQ ID NO: 1879845
gagauccaggguugcuaau

SEQ ID NO: 1935765 - RNA, 19 nt, Artificial Sequence
  Description of Artificial Sequence: Synthetic oligonucleotide
  Antisense strand to SEQ ID NO: 1935764
auuagcaacccuggaucuc

SEQ ID NO: 1935766 - RNA, 19 nt, Artificial Sequence
  Description of Artificial Sequence: Synthetic oligonucleotide
  Sense strand starting at position 2305 of SEQ ID NO: 1879845
guguaugguguaggaagaa

SEQ ID NO: 1935767 - RNA, 19 nt, Artificial Sequence
  Description of Artificial Sequence: Synthetic oligonucleotide
  Antisense strand to SEQ ID NO: 1935766
uucuuccuacaccauacac

SEQ ID NO: 1935768 - RNA, 19 nt, Artificial Sequence
  Description of Artificial Sequence: Synthetic oligonucleotide
  Sense strand starting at position 2470 of SEQ ID NO: 1879845
ccgagagaggaaugcuauu

SEQ ID NO: 1935769 - RNA, 19 nt, Artificial Sequence
  Description of Artificial Sequence: Synthetic oligonucleotide
  Antisense strand to SEQ ID NO: 1935768
aauagcauuccucucucgg

SEQ ID NO: 1935770 - RNA, 19 nt, Artificial Sequence
  Description of Artificial Sequence: Synthetic oligonucleotide
  Sense strand starting at position 2738 of SEQ ID NO: 1879845
guaguugguaguuauuugu

SEQ ID NO: 1935771 - RNA, 19 nt, Artificial Sequence
  Description of Artificial Sequence: Synthetic oligonucleotide
  Antisense strand to SEQ ID NO: 1935770
acaaauaacuaccaacuac

SEQ ID NO: 1935772 - RNA, 19 nt, Artificial Sequence
  Description of Artificial Sequence: Synthetic oligonucleotide
  Sense strand starting at position 2741 of SEQ ID NO: 1879845
guugguaguuauuuguuga

SEQ ID NO: 1935773 - RNA, 19 nt, Artificial Sequence
  Description of Artificial Sequence: Synthetic oligonucleotide
  Antisense strand to SEQ ID NO: 1935772
ucaacaaauaacuaccaac

SEQ ID NO: 1935774 - RNA, 19 nt, Artificial Sequence
  Description of Artificial Sequence: Synthetic oligonucleotide
  Sense strand starting at position 2744 of SEQ ID NO: 1879845
gguaguuauuuguugagua

SEQ ID NO: 1935775 - RNA, 19 nt, Artificial Sequence
  Description of Artificial Sequence: Synthetic oligonucleotide
  Antisense strand to SEQ ID NO: 1935774
uacucaacaaauaacuacc

SEQ ID NO: 1935776 - RNA, 19 nt, Artificial Sequence
  Description of Artificial Sequence: Synthetic oligonucleotide
  Sense strand starting at position 2758 of SEQ ID NO: 1879845
gaguaaauauuguuagguu

SEQ ID NO: 1935777 - RNA, 19 nt, Artificial Sequence
  Description of Artificial Sequence: Synthetic oligonucleotide
  Antisense strand to SEQ ID NO: 1935776
aaccuaacaauauuuacuc

SEQ ID NO: 1935778 - RNA, 19 nt, Artificial Sequence
  Description of Artificial Sequence: Synthetic oligonucleotide
  Sense strand starting at position 2816 of SEQ ID NO: 1879845
cuugguuuauuuccuugua

SEQ ID NO: 1935779 - RNA, 19 nt, Artificial Sequence
  Description of Artificial Sequence: Synthetic oligonucleotide
  Antisense strand to SEQ ID NO: 1935778
uacaaggaaauaaaccaag

SEQ ID NO: 1935780 - RNA, 19 nt, Artificial Sequence
  Description of Artificial Sequence: Synthetic oligonucleotide
  Sense strand starting at position 2817 of SEQ ID NO: 1879845
uugguuuauuuccuuguau

SEQ ID NO: 1935781 - RNA, 19 nt, Artificial Sequence
  Description of Artificial Sequence: Synthetic oligonucleotide
  Antisense strand to SEQ ID NO: 1935780
auacaaggaaauaaaccaa

SEQ ID NO: 1935782 - RNA, 19 nt, Artificial Sequence
  Description of Artificial Sequence: Synthetic oligonucleotide
  Sense strand starting at position 2819 of SEQ ID NO: 1879845
gguuuauuuccuuguauau

SEQ ID NO: 1935783 - RNA, 19 nt, Artificial Sequence
  Description of Artificial Sequence: Synthetic oligonucleotide
  Antisense strand to SEQ ID NO: 1935782
auauacaaggaaauaaacc

SEQ ID NO: 1935784 - RNA, 19 nt, Artificial Sequence
  Description of Artificial Sequence: Synthetic oligonucleotide
  Sense strand starting at position 2926 of SEQ ID NO: 1879845
augcauagcuucuuaagga

SEQ ID NO: 1935785 - RNA, 19 nt, Artificial Sequence
  Description of Artificial Sequence: Synthetic oligonucleotide
  Antisense strand to SEQ ID NO: 1935784
uccuuaagaagcuaugcau

SEQ ID NO: 1935786 - RNA, 19 nt, Artificial Sequence
  Description of Artificial Sequence: Synthetic oligonucleotide
  Sense strand starting at position 3008 of SEQ ID NO: 1879845
ccagucaacuuguugggaa

SEQ ID NO: 1935787 - RNA, 19 nt, Artificial Sequence
  Description of Artificial Sequence: Synthetic oligonucleotide
  Antisense strand to SEQ ID NO: 1935786
uucccaacaaguugacugg

SEQ ID NO: 1935788 - RNA, 19 nt, Artificial Sequence
  Description of Artificial Sequence: Synthetic oligonucleotide
  Sense strand starting at position 3010 of SEQ ID NO: 1879845
agucaacuuguugggaaua

SEQ ID NO: 1935789 - RNA, 19 nt, Artificial Sequence
  Description of Artificial Sequence: Synthetic oligonucleotide
  Antisense strand to SEQ ID NO: 1935788
uauucccaacaaguugacu

SEQ ID NO: 1935790 - RNA, 19 nt, Artificial Sequence
  Description of Artificial Sequence: Synthetic oligonucleotide
  Sense strand starting at position 3073 of SEQ ID NO: 1879845
uacauuugcucgucccagu

SEQ ID NO: 1935791 - RNA, 19 nt, Artificial Sequence
  Description of Artificial Sequence: Synthetic oligonucleotide
  Antisense strand to SEQ ID NO: 1935790
acugggacgagcaaaugua

SEQ ID NO: 1935792 - RNA, 19 nt, Artificial Sequence
  Description of Artificial Sequence: Synthetic oligonucleotide
  Sense strand starting at position 3537 of SEQ ID NO: 1879845
ccaaguggaucaucuacuu

SEQ ID NO: 1935793 - RNA, 19 nt, Artificial Sequence
  Description of Artificial Sequence: Synthetic oligonucleotide
  Antisense strand to SEQ ID NO: 1935792
aaguagaugauccacuugg

SEQ ID NO: 1935794 - RNA, 19 nt, Artificial Sequence
  Description of Artificial Sequence: Synthetic oligonucleotide
  Sense strand starting at position 3542 of SEQ ID NO: 1879845
uggaucaucuacuuugauu

SEQ ID NO: 1935795 - RNA, 19 nt, Artificial Sequence
  Description of Artificial Sequence: Synthetic oligonucleotide
  Antisense strand to SEQ ID NO: 1935794
aaucaaaguagaugaucca

SEQ ID NO: 1935796 - RNA, 19 nt, Artificial Sequence
  Description of Artificial Sequence: Synthetic oligonucleotide
  Sense strand starting at position 3553 of SEQ ID NO: 1879845
cuuugauuucuggguguuu

SEQ ID NO: 1935797 - RNA, 19 nt, Artificial Sequence
  Description of Artificial Sequence: Synthetic oligonucleotide
  Antisense strand to SEQ ID NO: 1935796
aaacacccagaaaucaaag

SEQ ID NO: 1935798 - RNA, 19 nt, Artificial Sequence
  Description of Artificial Sequence: Synthetic oligonucleotide
  Sense strand starting at position 3558 of SEQ ID NO: 1879845
auuucuggguguuuagagu

SEQ ID NO: 1935799 - RNA, 19 nt, Artificial Sequence
  Description of Artificial Sequence: Synthetic oligonucleotide
  Antisense strand to SEQ ID NO: 1935798
acucuaaacacccagaaau

SEQ ID NO: 1935800 - RNA, 19 nt, Artificial Sequence
  Description of Artificial Sequence: Synthetic oligonucleotide
  Sense strand starting at position 3820 of SEQ ID NO: 1879845
cagaauauugcagauaguc

SEQ ID NO: 1935801 - RNA, 19 nt, Artificial Sequence
  Description of Artificial Sequence: Synthetic oligonucleotide
  Antisense strand to SEQ ID NO: 1935800
gacuaucugcaauauucug

SEQ ID NO: 1935802 - RNA, 19 nt, Artificial Sequence
  Description of Artificial Sequence: Synthetic oligonucleotide
  Sense strand starting at position 3830 of SEQ ID NO: 1879845
cagauagucuuucuguaug

SEQ ID NO: 1935803 - RNA, 19 nt, Artificial Sequence
  Description of Artificial Sequence: Synthetic oligonucleotide
  Antisense strand to SEQ ID NO: 1935802
cauacagaaagacuaucug

SEQ ID NO: 1935804 - RNA, 19 nt, Artificial Sequence
  Description of Artificial Sequence: Synthetic oligonucleotide
  Sense strand starting at position 3893 of SEQ ID NO: 1879845
guguaaagagcucacugga

SEQ ID NO: 1935805 - RNA, 19 nt, Artificial Sequence
  Description of Artificial Sequence: Synthetic oligonucleotide
  Antisense strand to SEQ ID NO: 1935804
uccagugagcucuuuacac

SEQ ID NO: 1935806 - RNA, 19 nt, Artificial Sequence
  Description of Artificial Sequence: Synthetic oligonucleotide
  Sense strand starting at position 14 of SEQ ID NO: 1879846
ucauauuaaguuugaagga

SEQ ID NO: 1935807 - RNA, 19 nt, Artificial Sequence
  Description of Artificial Sequence: Synthetic oligonucleotide
  Antisense strand to SEQ ID NO: 1935806
uccuucaaacuuaauauga

SEQ ID NO: 1935808 - RNA, 19 nt, Artificial Sequence
  Description of Artificial Sequence: Synthetic oligonucleotide
  Sense strand starting at position 63 of SEQ ID NO: 1879846
ugaguuaggcauuaguaga

SEQ ID NO: 1935809 - RNA, 19 nt, Artificial Sequence
  Description of Artificial Sequence: Synthetic oligonucleotide
  Antisense strand to SEQ ID NO: 1935808
ucuacuaaugccuaacuca

SEQ ID NO: 1935810 - RNA, 19 nt, Artificial Sequence
  Description of Artificial Sequence: Synthetic oligonucleotide
  Sense strand starting at position 68 of SEQ ID NO: 1879846
uaggcauuaguagaucuga

SEQ ID NO: 1935811 - RNA, 19 nt, Artificial Sequence
  Description of Artificial Sequence: Synthetic oligonucleotide
  Antisense strand to SEQ ID NO: 1935810
ucagaucuacuaaugccua

SEQ ID NO: 1935812 - RNA, 19 nt, Artificial Sequence
  Description of Artificial Sequence: Synthetic oligonucleotide
  Sense strand starting at position 122 of SEQ ID NO: 1879846
guuaguagaauccauguga

SEQ ID NO: 1935813 - RNA, 19 nt, Artificial Sequence
  Description of Artificial Sequence: Synthetic oligonucleotide
  Antisense strand to SEQ ID NO: 1935812
ucacauggauucuacuaac

SEQ ID NO: 1935814 - RNA, 19 nt, Artificial Sequence
  Description of Artificial Sequence: Synthetic oligonucleotide
  Sense strand starting at position 130 of SEQ ID NO: 1879846
aauccaugugaguggacaa

SEQ ID NO: 1935815 - RNA, 19 nt, Artificial Sequence
  Description of Artificial Sequence: Synthetic oligonucleotide
  Antisense strand to SEQ ID NO: 1935814
uuguccacucacauggauu

SEQ ID NO: 1935816 - RNA, 19 nt, Artificial Sequence
  Description of Artificial Sequence: Synthetic oligonucleotide
  Sense strand starting at position 131 of SEQ ID NO: 1879846
auccaugugaguggacaaa

SEQ ID NO: 1935817 - RNA, 19 nt, Artificial Sequence
  Description of Artificial Sequence: Synthetic oligonucleotide
  Antisense strand to SEQ ID NO: 1935816
uuuguccacucacauggau

SEQ ID NO: 1935818 - RNA, 19 nt, Artificial Sequence
  Description of Artificial Sequence: Synthetic oligonucleotide
  Sense strand starting at position 430 of SEQ ID NO: 1879846
ucaagaaguuuacugauag

SEQ ID NO: 1935819 - RNA, 19 nt, Artificial Sequence
  Description of Artificial Sequence: Synthetic oligonucleotide
  Antisense strand to SEQ ID NO: 1935818
cuaucaguaaacuucuuga

SEQ ID NO: 1935820 - RNA, 19 nt, Artificial Sequence
  Description of Artificial Sequence: Synthetic oligonucleotide
  Sense strand starting at position 527 of SEQ ID NO: 1879846
ugacuugagcacugaagag

SEQ ID NO: 1935821 - RNA, 19 nt, Artificial Sequence
  Description of Artificial Sequence: Synthetic oligonucleotide
  Antisense strand to SEQ ID NO: 1935820
cucuucagugcucaaguca

SEQ ID NO: 1935822 - RNA, 19 nt, Artificial Sequence
  Description of Artificial Sequence: Synthetic oligonucleotide
  Sense strand starting at position 642 of SEQ ID NO: 1879846
auggauggauuauccuuua

SEQ ID NO: 1935823 - RNA, 19 nt, Artificial Sequence
  Description of Artificial Sequence: Synthetic oligonucleotide
  Antisense strand to SEQ ID NO: 1935822
uaaaggauaauccauccau

SEQ ID NO: 1935824 - RNA, 19 nt, Artificial Sequence
  Description of Artificial Sequence: Synthetic oligonucleotide
  Sense strand starting at position 744 of SEQ ID NO: 1879846
gaagaaauggccuguuaua

SEQ ID NO: 1935825 - RNA, 19 nt, Artificial Sequence
  Description of Artificial Sequence: Synthetic oligonucleotide
  Antisense strand to SEQ ID NO: 1935824
uauaacaggccauuucuuc

SEQ ID NO: 1935826 - RNA, 19 nt, Artificial Sequence
  Description of Artificial Sequence: Synthetic oligonucleotide
  Sense strand starting at position 754 of SEQ ID NO: 1879846
ccuguuauacuccaucaug

SEQ ID NO: 1935827 - RNA, 19 nt, Artificial Sequence
  Description of Artificial Sequence: Synthetic oligonucleotide
  Antisense strand to SEQ ID NO: 1935826
caugauggaguauaacagg

SEQ ID NO: 1935828 - RNA, 19 nt, Artificial Sequence
  Description of Artificial Sequence: Synthetic oligonucleotide
  Sense strand starting at position 876 of SEQ ID NO: 1879846
aggauugcugaguaguaug

SEQ ID NO: 1935829 - RNA, 19 nt, Artificial Sequence
  Description of Artificial Sequence: Synthetic oligonucleotide
  Antisense strand to SEQ ID NO: 1935828
cauacuacucagcaauccu

SEQ ID NO: 1935830 - RNA, 19 nt, Artificial Sequence
  Description of Artificial Sequence: Synthetic oligonucleotide
  Sense strand starting at position 997 of SEQ ID NO: 1879846
agauaugguaguuaaguga

SEQ ID NO: 1935831 - RNA, 19 nt, Artificial Sequence
  Description of Artificial Sequence: Synthetic oligonucleotide
  Antisense strand to SEQ ID NO: 1935830
ucacuuaacuaccauaucu

SEQ ID NO: 1935832 - RNA, 19 nt, Artificial Sequence
  Description of Artificial Sequence: Synthetic oligonucleotide
  Sense strand starting at position 1132 of SEQ ID NO: 1879846
cagugaauuccagaagcuc

SEQ ID NO: 1935833 - RNA, 19 nt, Artificial Sequence
  Description of Artificial Sequence: Synthetic oligonucleotide
  Antisense strand to SEQ ID NO: 1935832
gagcuucuggaauucacug

SEQ ID NO: 1935834 - RNA, 19 nt, Artificial Sequence
  Description of Artificial Sequence: Synthetic oligonucleotide
  Sense strand starting at position 1141 of SEQ ID NO: 1879846
ccagaagcucuccaagcaa

SEQ ID NO: 1935835 - RNA, 19 nt, Artificial Sequence
  Description of Artificial Sequence: Synthetic oligonucleotide
  Antisense strand to SEQ ID NO: 1935834
uugcuuggagagcuucugg

SEQ ID NO: 1935836 - RNA, 19 nt, Artificial Sequence
  Description of Artificial Sequence: Synthetic oligonucleotide
  Sense strand starting at position 1308 of SEQ ID NO: 1879846
ggcagugcucugccacuca

SEQ ID NO: 1935837 - RNA, 19 nt, Artificial Sequence
  Description of Artificial Sequence: Synthetic oligonucleotide
  Antisense strand to SEQ ID NO: 1935836
ugaguggcagagcacugcc

SEQ ID NO: 1935838 - RNA, 19 nt, Artificial Sequence
  Description of Artificial Sequence: Synthetic oligonucleotide
  Sense strand starting at position 1354 of SEQ ID NO: 1879846
ggagauucagaucaguguu

SEQ ID NO: 1935839 - RNA, 19 nt, Artificial Sequence
  Description of Artificial Sequence: Synthetic oligonucleotide
  Antisense strand to SEQ ID NO: 1935838
aacacugaucugaaucucc

SEQ ID NO: 1935840 - RNA, 19 nt, Artificial Sequence
  Description of Artificial Sequence: Synthetic oligonucleotide
  Sense strand starting at position 1418 of SEQ ID NO: 1879846
uaaugugaaucugugaaca

SEQ ID NO: 1935841 - RNA, 19 nt, Artificial Sequence
  Description of Artificial Sequence: Synthetic oligonucleotide
  Antisense strand to SEQ ID NO: 1935840
uguucacagauucacauua

SEQ ID NO: 1935842 - RNA, 19 nt, Artificial Sequence
  Description of Artificial Sequence: Synthetic oligonucleotide
  Sense strand starting at position 1532 of SEQ ID NO: 1879846
ucuagagacuuaguaacau

SEQ ID NO: 1935843 - RNA, 19 nt, Artificial Sequence
  Description of Artificial Sequence: Synthetic oligonucleotide
  Antisense strand to SEQ ID NO: 1935842
auguuacuaagucucuaga

SEQ ID NO: 1935844 - RNA, 19 nt, Artificial Sequence
  Description of Artificial Sequence: Synthetic oligonucleotide
  Sense strand starting at position 1541 of SEQ ID NO: 1879846
uuaguaacauuaguggaau

SEQ ID NO: 1935845 - RNA, 19 nt, Artificial Sequence
  Description of Artificial Sequence: Synthetic oligonucleotide
  Antisense strand to SEQ ID NO: 1935844
auuccacuaauguuacuaa

SEQ ID NO: 1935846 - RNA, 19 nt, Artificial Sequence
  Description of Artificial Sequence: Synthetic oligonucleotide
  Sense strand starting at position 1773 of SEQ ID NO: 1879846
auagguaucguugagacag

SEQ ID NO: 1935847 - RNA, 19 nt, Artificial Sequence
  Description of Artificial Sequence: Synthetic oligonucleotide
  Antisense strand to SEQ ID NO: 1935846
cugucucaacgauaccuau

SEQ ID NO: 1935848 - RNA, 19 nt, Artificial Sequence
  Description of Artificial Sequence: Synthetic oligonucleotide
  Sense strand starting at position 1819 of SEQ ID NO: 1879846
cgguuacucaggcaacaaa

SEQ ID NO: 1935849 - RNA, 19 nt, Artificial Sequence
  Description of Artificial Sequence: Synthetic oligonucleotide
  Antisense strand to SEQ ID NO: 1935848
uuuguugccugaguaaccg

SEQ ID NO: 1935850 - RNA, 19 nt, Artificial Sequence
  Description of Artificial Sequence: Synthetic oligonucleotide
  Sense strand starting at position 1903 of SEQ ID NO: 1879846
gaguaaucucagcugcguu

SEQ ID NO: 1935851 - RNA, 19 nt, Artificial Sequence
  Description of Artificial Sequence: Synthetic oligonucleotide
  Antisense strand to SEQ ID NO: 1935850
aacgcagcugagauuacuc

SEQ ID NO: 1935852 - RNA, 19 nt, Artificial Sequence
  Description of Artificial Sequence: Synthetic oligonucleotide
  Sense strand starting at position 2469 of SEQ ID NO: 1879846
gggaaagauuguuccggga

SEQ ID NO: 1935853 - RNA, 19 nt, Artificial Sequence
  Description of Artificial Sequence: Synthetic oligonucleotide
  Antisense strand to SEQ ID NO: 1935852
ucccggaacaaucuuuccc

SEQ ID NO: 1935854 - RNA, 19 nt, Artificial Sequence
  Description of Artificial Sequence: Synthetic oligonucleotide
  Sense strand starting at position 2473 of SEQ ID NO: 1879846
aagauuguuccgggaagac

SEQ ID NO: 1935855 - RNA, 19 nt, Artificial Sequence
  Description of Artificial Sequence: Synthetic oligonucleotide
  Antisense strand to SEQ ID NO: 1935854
gucuucccggaacaaucuu

SEQ ID NO: 1935856 - RNA, 19 nt, Artificial Sequence
  Description of Artificial Sequence: Synthetic oligonucleotide
  Sense strand starting at position 2505 of SEQ ID NO: 1879846
gaugaaacuuagguuucga

SEQ ID NO: 1935857 - RNA, 19 nt, Artificial Sequence
  Description of Artificial Sequence: Synthetic oligonucleotide
  Antisense strand to SEQ ID NO: 1935856
ucgaaaccuaaguuucauc

SEQ ID NO: 1935858 - RNA, 19 nt, Artificial Sequence
  Description of Artificial Sequence: Synthetic oligonucleotide
  Sense strand starting at position 2781 of SEQ ID NO: 1879846
guuagucgucggguucacu

SEQ ID NO: 1935859 - RNA, 19 nt, Artificial Sequence
  Description of Artificial Sequence: Synthetic oligonucleotide
  Antisense strand to SEQ ID NO: 1935858
agugaacccgacgacuaac

SEQ ID NO: 1935860 - RNA, 19 nt, Artificial Sequence
  Description of Artificial Sequence: Synthetic oligonucleotide
  Sense strand starting at position 2820 of SEQ ID NO: 1879846
aguacugagaacgaucuuu

SEQ ID NO: 1935861 - RNA, 19 nt, Artificial Sequence
  Description of Artificial Sequence: Synthetic oligonucleotide
  Antisense strand to SEQ ID NO: 1935860
aaagaucguucucaguacu

SEQ ID NO: 1935862 - RNA, 19 nt, Artificial Sequence
  Description of Artificial Sequence: Synthetic oligonucleotide
  Sense strand starting at position 2933 of SEQ ID NO: 1879846
gagucuguacuguaagaca

SEQ ID NO: 1935863 - RNA, 19 nt, Artificial Sequence
  Description of Artificial Sequence: Synthetic oligonucleotide
  Antisense strand to SEQ ID NO: 1935862
ugucuuacaguacagacuc

SEQ ID NO: 1935864 - RNA, 19 nt, Artificial Sequence
  Description of Artificial Sequence: Synthetic oligonucleotide
  Sense strand starting at position 2941 of SEQ ID NO: 1879846
acuguaagacaauguauac

SEQ ID NO: 1935865 - RNA, 19 nt, Artificial Sequence
  Description of Artificial Sequence: Synthetic oligonucleotide
  Antisense strand to SEQ ID NO: 1935864
guauacauugucuuacagu

SEQ ID NO: 1935866 - RNA, 19 nt, Artificial Sequence
  Description of Artificial Sequence: Synthetic oligonucleotide
  Sense strand starting at position 3184 of SEQ ID NO: 1879846
uugucauauggaugacaaa

SEQ ID NO: 1935867 - RNA, 19 nt, Artificial Sequence
  Description of Artificial Sequence: Synthetic oligonucleotide
  Antisense strand to SEQ ID NO: 1935866
uuugucauccauaugacaa

SEQ ID NO: 1935868 - RNA, 19 nt, Artificial Sequence
  Description of Artificial Sequence: Synthetic oligonucleotide
  Sense strand starting at position 3266 of SEQ ID NO: 1879846
gaguguauuggugaggaug

SEQ ID NO: 1935869 - RNA, 19 nt, Artificial Sequence
  Description of Artificial Sequence: Synthetic oligonucleotide
  Antisense strand to SEQ ID NO: 1935868
cauccucaccaauacacuc

SEQ ID NO: 1935870 - RNA, 19 nt, Artificial Sequence
  Description of Artificial Sequence: Synthetic oligonucleotide
  Sense strand starting at position 3281 of SEQ ID NO: 1879846
gauggugaaacggaguauu

SEQ ID NO: 1935871 - RNA, 19 nt, Artificial Sequence
  Description of Artificial Sequence: Synthetic oligonucleotide
  Antisense strand to SEQ ID NO: 1935870
aauacuccguuucaccauc

SEQ ID NO: 1935872 - RNA, 19 nt, Artificial Sequence
  Description of Artificial Sequence: Synthetic oligonucleotide
  Sense strand starting at position 3455 of SEQ ID NO: 1879846
acucuauguguuuauauga

SEQ ID NO: 1935873 - RNA, 19 nt, Artificial Sequence
  Description of Artificial Sequence: Synthetic oligonucleotide
  Antisense strand to SEQ ID NO: 1935872
ucauauaaacacauagagu

SEQ ID NO: 1935874 - RNA, 19 nt, Artificial Sequence
  Description of Artificial Sequence: Synthetic oligonucleotide
  Sense strand starting at position 3647 of SEQ ID NO: 1879846
guuugagccagauaacuag

SEQ ID NO: 1935875 - RNA, 19 nt, Artificial Sequence
  Description of Artificial Sequence: Synthetic oligonucleotide
  Antisense strand to SEQ ID NO: 1935874
cuaguuaucuggcucaaac

SEQ ID NO: 1935876 - RNA, 19 nt, Artificial Sequence
  Description of Artificial Sequence: Synthetic oligonucleotide
  Sense strand starting at position 3745 of SEQ ID NO: 1879846
guacuuuagauguacaagu

SEQ ID NO: 1935877 - RNA, 19 nt, Artificial Sequence
  Description of Artificial Sequence: Synthetic oligonucleotide
  Antisense strand to SEQ ID NO: 1935876
acuuguacaucuaaaguac

SEQ ID NO: 1935878 - RNA, 19 nt, Artificial Sequence
  Description of Artificial Sequence: Synthetic oligonucleotide
  Sense strand starting at position 3792 of SEQ ID NO: 1879846
uuaggugacuacucuuaaa

SEQ ID NO: 1935879 - RNA, 19 nt, Artificial Sequence
  Description of Artificial Sequence: Synthetic oligonucleotide
  Antisense strand to SEQ ID NO: 1935878
uuuaagaguagucaccuaa

SEQ ID NO: 1935880 - RNA, 19 nt, Artificial Sequence
  Description of Artificial Sequence: Synthetic oligonucleotide
  Sense strand starting at position 3857 of SEQ ID NO: 1879846
cuagaagauuacgauuuaa

SEQ ID NO: 1935881 - RNA, 19 nt, Artificial Sequence
  Description of Artificial Sequence: Synthetic oligonucleotide
  Antisense strand to SEQ ID NO: 1935880
uuaaaucguaaucuucuag

SEQ ID NO: 1935882 - RNA, 19 nt, Artificial Sequence
  Description of Artificial Sequence: Synthetic oligonucleotide
  Sense strand starting at position 3916 of SEQ ID NO: 1879846
gcaacuaggguguaucaaa

SEQ ID NO: 1935883 - RNA, 19 nt, Artificial Sequence
  Description of Artificial Sequence: Synthetic oligonucleotide
  Antisense strand to SEQ ID NO: 1935882
uuugauacacccuaguugc

SEQ ID NO: 1935884 - RNA, 19 nt, Artificial Sequence
  Description of Artificial Sequence: Synthetic oligonucleotide
  Sense strand starting at position 3923 of SEQ ID NO: 1879846
ggguguaucaaagaucucu

SEQ ID NO: 1935885 - RNA, 19 nt, Artificial Sequence
  Description of Artificial Sequence: Synthetic oligonucleotide
  Antisense strand to SEQ ID NO: 1935884
agagaucuuugauacaccc

SEQ ID NO: 1935886 - RNA, 19 nt, Artificial Sequence
  Description of Artificial Sequence: Synthetic oligonucleotide
  Sense strand starting at position 39 of SEQ ID NO: 1879847
cucacauucuaugguuacu

SEQ ID NO: 1935887 - RNA, 19 nt, Artificial Sequence
  Description of Artificial Sequence: Synthetic oligonucleotide
  Antisense strand to SEQ ID NO: 1935886
aguaaccauagaaugugag

SEQ ID NO: 1935888 - RNA, 19 nt, Artificial Sequence
  Description of Artificial Sequence: Synthetic oligonucleotide
  Sense strand starting at position 42 of SEQ ID NO: 1879847
acauucuaugguuacuauu

SEQ ID NO: 1935889 - RNA, 19 nt, Artificial Sequence
  Description of Artificial Sequence: Synthetic oligonucleotide
  Antisense strand to SEQ ID NO: 1935888
aauaguaaccauagaaugu

SEQ ID NO: 1935890 - RNA, 19 nt, Artificial Sequence
  Description of Artificial Sequence: Synthetic oligonucleotide
  Sense strand starting at position 94 of SEQ ID NO: 1879847
cgccaucuuacagaugaga

SEQ ID NO: 1935891 - RNA, 19 nt, Artificial Sequence
  Description of Artificial Sequence: Synthetic oligonucleotide
  Antisense strand to SEQ ID NO: 1935890
ucucaucuguaagauggcg

SEQ ID NO: 1935892 - RNA, 19 nt, Artificial Sequence
  Description of Artificial Sequence: Synthetic oligonucleotide
  Sense strand starting at position 379 of SEQ ID NO: 1879847
aaaugagagcugugaaauc

SEQ ID NO: 1935893 - RNA, 19 nt, Artificial Sequence
  Description of Artificial Sequence: Synthetic oligonucleotide
  Antisense strand to SEQ ID NO: 1935892
gauuucacagcucucauuu

SEQ ID NO: 1935894 - RNA, 19 nt, Artificial Sequence
  Description of Artificial Sequence: Synthetic oligonucleotide
  Sense strand starting at position 399 of SEQ ID NO: 1879847
ccuugagaucucugcuucu

SEQ ID NO: 1935895 - RNA, 19 nt, Artificial Sequence
  Description of Artificial Sequence: Synthetic oligonucleotide
  Antisense strand to SEQ ID NO: 1935894
agaagcagagaucucaagg

SEQ ID NO: 1935896 - RNA, 19 nt, Artificial Sequence
  Description of Artificial Sequence: Synthetic oligonucleotide
  Sense strand starting at position 408 of SEQ ID NO: 1879847
cucugcuucugcugaucua

SEQ ID NO: 1935897 - RNA, 19 nt, Artificial Sequence
  Description of Artificial Sequence: Synthetic oligonucleotide
  Antisense strand to SEQ ID NO: 1935896
uagaucagcagaagcagag

SEQ ID NO: 1935898 - RNA, 19 nt, Artificial Sequence
  Description of Artificial Sequence: Synthetic oligonucleotide
  Sense strand starting at position 409 of SEQ ID NO: 1879847
ucugcuucugcugaucuau

SEQ ID NO: 1935899 - RNA, 19 nt, Artificial Sequence
  Description of Artificial Sequence: Synthetic oligonucleotide
  Antisense strand to SEQ ID NO: 1935898
auagaucagcagaagcaga

SEQ ID NO: 1935900 - RNA, 19 nt, Artificial Sequence
  Description of Artificial Sequence: Synthetic oligonucleotide
  Sense strand starting at position 431 of SEQ ID NO: 1879847
gcaacuauuucccgagcac

SEQ ID NO: 1935901 - RNA, 19 nt, Artificial Sequence
  Description of Artificial Sequence: Synthetic oligonucleotide
  Antisense strand to SEQ ID NO: 1935900
gugcucgggaaauaguugc

SEQ ID NO: 1935902 - RNA, 19 nt, Artificial Sequence
  Description of Artificial Sequence: Synthetic oligonucleotide
  Sense strand starting at position 443 of SEQ ID NO: 1879847
cgagcacuuguguuccagu

SEQ ID NO: 1935903 - RNA, 19 nt, Artificial Sequence
  Description of Artificial Sequence: Synthetic oligonucleotide
  Antisense strand to SEQ ID NO: 1935902
acuggaacacaagugcucg

SEQ ID NO: 1935904 - RNA, 19 nt, Artificial Sequence
  Description of Artificial Sequence: Synthetic oligonucleotide
  Sense strand starting at position 446 of SEQ ID NO: 1879847
gcacuuguguuccagugca

SEQ ID NO: 1935905 - RNA, 19 nt, Artificial Sequence
  Description of Artificial Sequence: Synthetic oligonucleotide
  Antisense strand to SEQ ID NO: 1935904
ugcacuggaacacaagugc

SEQ ID NO: 1935906 - RNA, 19 nt, Artificial Sequence
  Description of Artificial Sequence: Synthetic oligonucleotide
  Sense strand starting at position 451 of SEQ ID NO: 1879847
uguguuccagugcauaaga

SEQ ID NO: 1935907 - RNA, 19 nt, Artificial Sequence
  Description of Artificial Sequence: Synthetic oligonucleotide
  Antisense strand to SEQ ID NO: 1935906
ucuuaugcacuggaacaca

SEQ ID NO: 1935908 - RNA, 19 nt, Artificial Sequence
  Description of Artificial Sequence: Synthetic oligonucleotide
  Sense strand starting at position 462 of SEQ ID NO: 1879847
gcauaagaaggcugucaaa

SEQ ID NO: 1935909 - RNA, 19 nt, Artificial Sequence
  Description of Artificial Sequence: Synthetic oligonucleotide
  Antisense strand to SEQ ID NO: 1935908
uuugacagccuucuuaugc

SEQ ID NO: 1935910 - RNA, 19 nt, Artificial Sequence
  Description of Artificial Sequence: Synthetic oligonucleotide
  Sense strand starting at position 465 of SEQ ID NO: 1879847
uaagaaggcugucaaaugu

SEQ ID NO: 1935911 - RNA, 19 nt, Artificial Sequence
  Description of Artificial Sequence: Synthetic oligonucleotide
  Antisense strand to SEQ ID NO: 1935910
acauuugacagccuucuua

SEQ ID NO: 1935912 - RNA, 19 nt, Artificial Sequence
  Description of Artificial Sequence: Synthetic oligonucleotide
  Sense strand starting at position 474 of SEQ ID NO: 1879847
ugucaaaugugcugucuuc

SEQ ID NO: 1935913 - RNA, 19 nt, Artificial Sequence
  Description of Artificial Sequence: Synthetic oligonucleotide
  Antisense strand to SEQ ID NO: 1935912
gaagacagcacauuugaca

SEQ ID NO: 1935914 - RNA, 19 nt, Artificial Sequence
  Description of Artificial Sequence: Synthetic oligonucleotide
  Sense strand starting at position 648 of SEQ ID NO: 1879847
auguguaaugccugagacc

SEQ ID NO: 1935915 - RNA, 19 nt, Artificial Sequence
  Description of Artificial Sequence: Synthetic oligonucleotide
  Antisense strand to SEQ ID NO: 1935914
ggucucaggcauuacacau

SEQ ID NO: 1935916 - RNA, 19 nt, Artificial Sequence
  Description of Artificial Sequence: Synthetic oligonucleotide
  Sense strand starting at position 691 of SEQ ID NO: 1879847
gaagcagaggucugauuaa

SEQ ID NO: 1935917 - RNA, 19 nt, Artificial Sequence
  Description of Artificial Sequence: Synthetic oligonucleotide
  Antisense strand to SEQ ID NO: 1935916
uuaaucagaccucugcuuc

SEQ ID NO: 1935918 - RNA, 19 nt, Artificial Sequence
  Description of Artificial Sequence: Synthetic oligonucleotide
  Sense strand starting at position 706 of SEQ ID NO: 1879847
uuaagcacugccuggaauu

SEQ ID NO: 1935919 - RNA, 19 nt, Artificial Sequence
  Description of Artificial Sequence: Synthetic oligonucleotide
  Antisense strand to SEQ ID NO: 1935918
aauuccaggcagugcuuaa

SEQ ID NO: 1935920 - RNA, 19 nt, Artificial Sequence
  Description of Artificial Sequence: Synthetic oligonucleotide
  Sense strand starting at position 768 of SEQ ID NO: 1879847
gagaaacggucuugaacac

SEQ ID NO: 1935921 - RNA, 19 nt, Artificial Sequence
  Description of Artificial Sequence: Synthetic oligonucleotide
  Antisense strand to SEQ ID NO: 1935920
guguucaagaccguuucuc

SEQ ID NO: 1935922 - RNA, 19 nt, Artificial Sequence
  Description of Artificial Sequence: Synthetic oligonucleotide
  Sense strand starting at position 828 of SEQ ID NO: 1879847
ggcacaaauuagcauacaa

SEQ ID NO: 1935923 - RNA, 19 nt, Artificial Sequence
  Description of Artificial Sequence: Synthetic oligonucleotide
  Antisense strand to SEQ ID NO: 1935922
uuguaugcuaauuugugcc

SEQ ID NO: 1935924 - RNA, 19 nt, Artificial Sequence
  Description of Artificial Sequence: Synthetic oligonucleotide
  Sense strand starting at position 853 of SEQ ID NO: 1879847
acaagugugaccuacggaa

SEQ ID NO: 1935925 - RNA, 19 nt, Artificial Sequence
  Description of Artificial Sequence: Synthetic oligonucleotide
  Antisense strand to SEQ ID NO: 1935924
uuccguaggucacacuugu

SEQ ID NO: 1935926 - RNA, 19 nt, Artificial Sequence
  Description of Artificial Sequence: Synthetic oligonucleotide
  Sense strand starting at position 1040 of SEQ ID NO: 1879847
gcggucuccuaagaaguua

SEQ ID NO: 1935927 - RNA, 19 nt, Artificial Sequence
  Description of Artificial Sequence: Synthetic oligonucleotide
  Antisense strand to SEQ ID NO: 1935926
uaacuucuuaggagaccgc

SEQ ID NO: 1935928 - RNA, 19 nt, Artificial Sequence
  Description of Artificial Sequence: Synthetic oligonucleotide
  Sense strand starting at position 3301 of SEQ ID NO: 1879847
ucagccucacuuugugauu

SEQ ID NO: 1935929 - RNA, 19 nt, Artificial Sequence
  Description of Artificial Sequence: Synthetic oligonucleotide
  Antisense strand to SEQ ID NO: 1935928
aaucacaaagugaggcuga

SEQ ID NO: 1935930 - RNA, 19 nt, Artificial Sequence
  Description of Artificial Sequence: Synthetic oligonucleotide
  Sense strand starting at position 3344 of SEQ ID NO: 1879847
ucuugcuuccugucgugau

SEQ ID NO: 1935931 - RNA, 19 nt, Artificial Sequence
  Description of Artificial Sequence: Synthetic oligonucleotide
  Antisense strand to SEQ ID NO: 1935930
aucacgacaggaagcaaga

SEQ ID NO: 1935932 - RNA, 19 nt, Artificial Sequence
  Description of Artificial Sequence: Synthetic oligonucleotide
  Sense strand starting at position 3345 of SEQ ID NO: 1879847
cuugcuuccugucgugaua

SEQ ID NO: 1935933 - RNA, 19 nt, Artificial Sequence
  Description of Artificial Sequence: Synthetic oligonucleotide
  Antisense strand to SEQ ID NO: 1935932
uaucacgacaggaagcaag

SEQ ID NO: 1935934 - RNA, 19 nt, Artificial Sequence
  Description of Artificial Sequence: Synthetic oligonucleotide
  Sense strand starting at position 3508 of SEQ ID NO: 1879847
uugucugcccuguguugaa

SEQ ID NO: 1935935 - RNA, 19 nt, Artificial Sequence
  Description of Artificial Sequence: Synthetic oligonucleotide
  Antisense strand to SEQ ID NO: 1935934
uucaacacagggcagacaa

SEQ ID NO: 1935936 - RNA, 19 nt, Artificial Sequence
  Description of Artificial Sequence: Synthetic oligonucleotide
  Sense strand starting at position 3518 of SEQ ID NO: 1879847
uguguugaacuguguccaa

SEQ ID NO: 1935937 - RNA, 19 nt, Artificial Sequence
  Description of Artificial Sequence: Synthetic oligonucleotide
  Antisense strand to SEQ ID NO: 1935936
uuggacacaguucaacaca

SEQ ID NO: 1935938 - RNA, 19 nt, Artificial Sequence
  Description of Artificial Sequence: Synthetic oligonucleotide
  Sense strand starting at position 3570 of SEQ ID NO: 1879847
gugggcuauuagcauuuau

SEQ ID NO: 1935939 - RNA, 19 nt, Artificial Sequence
  Description of Artificial Sequence: Synthetic oligonucleotide
  Antisense strand to SEQ ID NO: 1935938
auaaaugcuaauagcccac

SEQ ID NO: 1935940 - RNA, 19 nt, Artificial Sequence
  Description of Artificial Sequence: Synthetic oligonucleotide
  Sense strand starting at position 2252 of SEQ ID NO: 1879848
ccuguuaguuugucacaga

SEQ ID NO: 1935941 - RNA, 19 nt, Artificial Sequence
  Description of Artificial Sequence: Synthetic oligonucleotide
  Antisense strand to SEQ ID NO: 1935940
ucugugacaaacuaacagg

SEQ ID NO: 1935942 - RNA, 19 nt, Artificial Sequence
  Description of Artificial Sequence: Synthetic oligonucleotide
  Sense strand starting at position 2253 of SEQ ID NO: 1879848
cuguuaguuugucacagaa

SEQ ID NO: 1935943 - RNA, 19 nt, Artificial Sequence
  Description of Artificial Sequence: Synthetic oligonucleotide
  Antisense strand to SEQ ID NO: 1935942
uucugugacaaacuaacag

SEQ ID NO: 1935944 - RNA, 19 nt, Artificial Sequence
  Description of Artificial Sequence: Synthetic oligonucleotide
  Sense strand starting at position 2255 of SEQ ID NO: 1879848
guuaguuugucacagaaug

SEQ ID NO: 1935945 - RNA, 19 nt, Artificial Sequence
  Description of Artificial Sequence: Synthetic oligonucleotide
  Antisense strand to SEQ ID NO: 1935944
cauucugugacaaacuaac

SEQ ID NO: 1935946 - RNA, 19 nt, Artificial Sequence
  Description of Artificial Sequence: Synthetic oligonucleotide
  Sense strand starting at position 2299 of SEQ ID NO: 1879848
gacacagcuugauugggau

SEQ ID NO: 1935947 - RNA, 19 nt, Artificial Sequence
  Description of Artificial Sequence: Synthetic oligonucleotide
  Antisense strand to SEQ ID NO: 1935946
aucccaaucaagcuguguc

SEQ ID NO: 1935948 - RNA, 19 nt, Artificial Sequence
  Description of Artificial Sequence: Synthetic oligonucleotide
  Sense strand starting at position 2302 of SEQ ID NO: 1879848
acagcuugauugggauaaa

SEQ ID NO: 1935949 - RNA, 19 nt, Artificial Sequence
  Description of Artificial Sequence: Synthetic oligonucleotide
  Antisense strand to SEQ ID NO: 1935948
uuuaucccaaucaagcugu

SEQ ID NO: 1935950 - RNA, 19 nt, Artificial Sequence
  Description of Artificial Sequence: Synthetic oligonucleotide
  Sense strand starting at position 2303 of SEQ ID NO: 1879848
cagcuugauugggauaaac

SEQ ID NO: 1935951 - RNA, 19 nt, Artificial Sequence
  Description of Artificial Sequence: Synthetic oligonucleotide
  Antisense strand to SEQ ID NO: 1935950
guuuaucccaaucaagcug

SEQ ID NO: 1935952 - RNA, 19 nt, Artificial Sequence
  Description of Artificial Sequence: Synthetic oligonucleotide
  Sense strand starting at position 2355 of SEQ ID NO: 1879848
ggacaagguuagcuccaaa

SEQ ID NO: 1935953 - RNA, 19 nt, Artificial Sequence
  Description of Artificial Sequence: Synthetic oligonucleotide
  Antisense strand to SEQ ID NO: 1935952
uuuggagcuaaccuugucc

SEQ ID NO: 1935954 - RNA, 19 nt, Artificial Sequence
  Description of Artificial Sequence: Synthetic oligonucleotide
  Sense strand starting at position 2487 of SEQ ID NO: 1879848
cuugaagucuccugagauu

SEQ ID NO: 1935955 - RNA, 19 nt, Artificial Sequence
  Description of Artificial Sequence: Synthetic oligonucleotide
  Antisense strand to SEQ ID NO: 1935954
aaucucaggagacuucaag

SEQ ID NO: 1935956 - RNA, 19 nt, Artificial Sequence
  Description of Artificial Sequence: Synthetic oligonucleotide
  Sense strand starting at position 2490 of SEQ ID NO: 1879848
gaagucuccugagauuaug

SEQ ID NO: 1935957 - RNA, 19 nt, Artificial Sequence
  Description of Artificial Sequence: Synthetic oligonucleotide
  Antisense strand to SEQ ID NO: 1935956
cauaaucucaggagacuuc

SEQ ID NO: 1935958 - RNA, 19 nt, Artificial Sequence
  Description of Artificial Sequence: Synthetic oligonucleotide
  Sense strand starting at position 2540 of SEQ ID NO: 1879848
caaagugaccuaugggagu

SEQ ID NO: 1935959 - RNA, 19 nt, Artificial Sequence
  Description of Artificial Sequence: Synthetic oligonucleotide
  Antisense strand to SEQ ID NO: 1935958
acucccauaggucacuuug

SEQ ID NO: 1935960 - RNA, 19 nt, Artificial Sequence
  Description of Artificial Sequence: Synthetic oligonucleotide
  Sense strand starting at position 2554 of SEQ ID NO: 1879848
ggagucauuuguuacaggu

SEQ ID NO: 1935961 - RNA, 19 nt, Artificial Sequence
  Description of Artificial Sequence: Synthetic oligonucleotide
  Antisense strand to SEQ ID NO: 1935960
accuguaacaaaugacucc

SEQ ID NO: 1935962 - RNA, 19 nt, Artificial Sequence
  Description of Artificial Sequence: Synthetic oligonucleotide
  Sense strand starting at position 2558 of SEQ ID NO: 1879848
ucauuuguuacaggucguu

SEQ ID NO: 1935963 - RNA, 19 nt, Artificial Sequence
  Description of Artificial Sequence: Synthetic oligonucleotide
  Antisense strand to SEQ ID NO: 1935962
aacgaccuguaacaaauga

SEQ ID NO: 1935964 - RNA, 19 nt, Artificial Sequence
  Description of Artificial Sequence: Synthetic oligonucleotide
  Sense strand starting at position 2561 of SEQ ID NO: 1879848
uuuguuacaggucguuaca

SEQ ID NO: 1935965 - RNA, 19 nt, Artificial Sequence
  Description of Artificial Sequence: Synthetic oligonucleotide
  Antisense strand to SEQ ID NO: 1935964
uguaacgaccuguaacaaa

SEQ ID NO: 1935966 - RNA, 19 nt, Artificial Sequence
  Description of Artificial Sequence: Synthetic oligonucleotide
  Sense strand starting at position 2563 of SEQ ID NO: 1879848
uguuacaggucguuacagu

SEQ ID NO: 1935967 - RNA, 19 nt, Artificial Sequence
  Description of Artificial Sequence: Synthetic oligonucleotide
  Antisense strand to SEQ ID NO: 1935966
acuguaacgaccuguaaca

SEQ ID NO: 1935968 - RNA, 19 nt, Artificial Sequence
  Description of Artificial Sequence: Synthetic oligonucleotide
  Sense strand starting at position 2591 of SEQ ID NO: 1879848
gugucacuguuguugggaa

SEQ ID NO: 1935969 - RNA, 19 nt, Artificial Sequence
  Description of Artificial Sequence: Synthetic oligonucleotide
  Antisense strand to SEQ ID NO: 1935968
uucccaacaacagugacac

SEQ ID NO: 1935970 - RNA, 19 nt, Artificial Sequence
  Description of Artificial Sequence: Synthetic oligonucleotide
  Sense strand starting at position 2609 of SEQ ID NO: 1879848
acuccaaagccacgucaua

SEQ ID NO: 1935971 - RNA, 19 nt, Artificial Sequence
  Description of Artificial Sequence: Synthetic oligonucleotide
  Antisense strand to SEQ ID NO: 1935970
uaugacguggcuuuggagu

SEQ ID NO: 1935972 - RNA, 19 nt, Artificial Sequence
  Description of Artificial Sequence: Synthetic oligonucleotide
  Sense strand starting at position 2622 of SEQ ID NO: 1879848
gucauaaacuauguuagga

SEQ ID NO: 1935973 - RNA, 19 nt, Artificial Sequence
  Description of Artificial Sequence: Synthetic oligonucleotide
  Antisense strand to SEQ ID NO: 1935972
uccuaacauaguuuaugac

SEQ ID NO: 1935974 - RNA, 19 nt, Artificial Sequence
  Description of Artificial Sequence: Synthetic oligonucleotide
  Sense strand starting at position 2632 of SEQ ID NO: 1879848
auguuaggacucugucagu

SEQ ID NO: 1935975 - RNA, 19 nt, Artificial Sequence
  Description of Artificial Sequence: Synthetic oligonucleotide
  Antisense strand to SEQ ID NO: 1935974
acugacagaguccuaacau

SEQ ID NO: 1935976 - RNA, 19 nt, Artificial Sequence
  Description of Artificial Sequence: Synthetic oligonucleotide
  Sense strand starting at position 2635 of SEQ ID NO: 1879848
uuaggacucugucagugua

SEQ ID NO: 1935977 - RNA, 19 nt, Artificial Sequence
  Description of Artificial Sequence: Synthetic oligonucleotide
  Antisense strand to SEQ ID NO: 1935976
uacacugacagaguccuaa

SEQ ID NO: 1935978 - RNA, 19 nt, Artificial Sequence
  Description of Artificial Sequence: Synthetic oligonucleotide
  Sense strand starting at position 2637 of SEQ ID NO: 1879848
aggacucugucaguguagu

SEQ ID NO: 1935979 - RNA, 19 nt, Artificial Sequence
  Description of Artificial Sequence: Synthetic oligonucleotide
  Antisense strand to SEQ ID NO: 1935978
acuacacugacagaguccu

SEQ ID NO: 1935980 - RNA, 19 nt, Artificial Sequence
  Description of Artificial Sequence: Synthetic oligonucleotide
  Sense strand starting at position 2643 of SEQ ID NO: 1879848
cugucaguguaguuggcaa

SEQ ID NO: 1935981 - RNA, 19 nt, Artificial Sequence
  Description of Artificial Sequence: Synthetic oligonucleotide
  Antisense strand to SEQ ID NO: 1935980
uugccaacuacacugacag

SEQ ID NO: 1935982 - RNA, 19 nt, Artificial Sequence
  Description of Artificial Sequence: Synthetic oligonucleotide
  Sense strand starting at position 2645 of SEQ ID NO: 1879848
gucaguguaguuggcaauu

SEQ ID NO: 1935983 - RNA, 19 nt, Artificial Sequence
  Description of Artificial Sequence: Synthetic oligonucleotide
  Antisense strand to SEQ ID NO: 1935982
aauugccaacuacacugac

SEQ ID NO: 1935984 - RNA, 19 nt, Artificial Sequence
  Description of Artificial Sequence: Synthetic oligonucleotide
  Sense strand starting at position 2707 of SEQ ID NO: 1879848
guaaguacgcacuaugcau

SEQ ID NO: 1935985 - RNA, 19 nt, Artificial Sequence
  Description of Artificial Sequence: Synthetic oligonucleotide
  Antisense strand to SEQ ID NO: 1935984
augcauagugcguacuuac

SEQ ID NO: 1935986 - RNA, 19 nt, Artificial Sequence
  Description of Artificial Sequence: Synthetic oligonucleotide
  Sense strand starting at position 2729 of SEQ ID NO: 1879848
aggguugugccgcauagaa

SEQ ID NO: 1935987 - RNA, 19 nt, Artificial Sequence
  Description of Artificial Sequence: Synthetic oligonucleotide
  Antisense strand to SEQ ID NO: 1935986
uucuaugcggcacaacccu

SEQ ID NO: 1935988 - RNA, 19 nt, Artificial Sequence
  Description of Artificial Sequence: Synthetic oligonucleotide
  Sense strand starting at position 2731 of SEQ ID NO: 1879848
gguugugccgcauagaaga

SEQ ID NO: 1935989 - RNA, 19 nt, Artificial Sequence
  Description of Artificial Sequence: Synthetic oligonucleotide
  Antisense strand to SEQ ID NO: 1935988
ucuucuaugcggcacaacc

SEQ ID NO: 1935990 - RNA, 19 nt, Artificial Sequence
  Description of Artificial Sequence: Synthetic oligonucleotide
  Sense strand starting at position 2862 of SEQ ID NO: 1879848
gaaaccgugucucuaccau

SEQ ID NO: 1935991 - RNA, 19 nt, Artificial Sequence
  Description of Artificial Sequence: Synthetic oligonucleotide
  Antisense strand to SEQ ID NO: 1935990
augguagagacacgguuuc

SEQ ID NO: 1935992 - RNA, 19 nt, Artificial Sequence
  Description of Artificial Sequence: Synthetic oligonucleotide
  Sense strand starting at position 2866 of SEQ ID NO: 1879848
ccgugucucuaccauaaau

SEQ ID NO: 1935993 - RNA, 19 nt, Artificial Sequence
  Description of Artificial Sequence: Synthetic oligonucleotide
  Antisense strand to SEQ ID NO: 1935992
auuuaugguagagacacgg

SEQ ID NO: 1935994 - RNA, 19 nt, Artificial Sequence
  Description of Artificial Sequence: Synthetic oligonucleotide
  Sense strand starting at position 2868 of SEQ ID NO: 1879848
gugucucuaccauaaauac

SEQ ID NO: 1935995 - RNA, 19 nt, Artificial Sequence
  Description of Artificial Sequence: Synthetic oligonucleotide
  Antisense strand to SEQ ID NO: 1935994
guauuuaugguagagacac

SEQ ID NO: 1935996 - RNA, 19 nt, Artificial Sequence
  Description of Artificial Sequence: Synthetic oligonucleotide
  Sense strand starting at position 3251 of SEQ ID NO: 1879848
aaaggaaagucugcagcaa

SEQ ID NO: 1935997 - RNA, 19 nt, Artificial Sequence
  Description of Artificial Sequence: Synthetic oligonucleotide
  Antisense strand to SEQ ID NO: 1935996
uugcugcagacuuuccuuu

SEQ ID NO: 1935998 - RNA, 19 nt, Artificial Sequence
  Description of Artificial Sequence: Synthetic oligonucleotide
  Sense strand starting at position 3252 of SEQ ID NO: 1879848
aaggaaagucugcagcaau

SEQ ID NO: 1935999 - RNA, 19 nt, Artificial Sequence
  Description of Artificial Sequence: Synthetic oligonucleotide
  Antisense strand to SEQ ID NO: 1935998
auugcugcagacuuuccuu

SEQ ID NO: 1936000 - RNA, 19 nt, Artificial Sequence
  Description of Artificial Sequence: Synthetic oligonucleotide
  Sense strand starting at position 3381 of SEQ ID NO: 1879848
cggagugaagagcaacauu

SEQ ID NO: 1936001 - RNA, 19 nt, Artificial Sequence
  Description of Artificial Sequence: Synthetic oligonucleotide
  Antisense strand to SEQ ID NO: 1936000
aauguugcucuucacuccg

SEQ ID NO: 1936002 - RNA, 19 nt, Artificial Sequence
  Description of Artificial Sequence: Synthetic oligonucleotide
  Sense strand starting at position 3559 of SEQ ID NO: 1879848
gugggaugccuacguuucu

SEQ ID NO: 1936003 - RNA, 19 nt, Artificial Sequence
  Description of Artificial Sequence: Synthetic oligonucleotide
  Antisense strand to SEQ ID NO: 1936002
agaaacguaggcaucccac

SEQ ID NO: 1936004 - RNA, 19 nt, Artificial Sequence
  Description of Artificial Sequence: Synthetic oligonucleotide
  Sense strand starting at position 3566 of SEQ ID NO: 1879848
gccuacguuucuggugaga

SEQ ID NO: 1936005 - RNA, 19 nt, Artificial Sequence
  Description of Artificial Sequence: Synthetic oligonucleotide
  Antisense strand to SEQ ID NO: 1936004
ucucaccagaaacguaggc

SEQ ID NO: 1936006 - RNA, 19 nt, Artificial Sequence
  Description of Artificial Sequence: Synthetic oligonucleotide
  Sense strand starting at position 3568 of SEQ ID NO: 1879848
cuacguuucuggugagaag

SEQ ID NO: 1936007 - RNA, 19 nt, Artificial Sequence
  Description of Artificial Sequence: Synthetic oligonucleotide
  Antisense strand to SEQ ID NO: 1936006
cuucucaccagaaacguag

SEQ ID NO: 1936008 - RNA, 19 nt, Artificial Sequence
  Description of Artificial Sequence: Synthetic oligonucleotide
  Sense strand starting at position 3615 of SEQ ID NO: 1879848
gggauccucucucaaaggu

SEQ ID NO: 1936009 - RNA, 19 nt, Artificial Sequence
  Description of Artificial Sequence: Synthetic oligonucleotide
  Antisense strand to SEQ ID NO: 1936008
accuuugagagaggauccc

SEQ ID NO: 1936010 - RNA, 19 nt, Artificial Sequence
  Description of Artificial Sequence: Synthetic oligonucleotide
  Sense strand starting at position 7 of SEQ ID NO: 1879849
gagagaucaucagcccagu

SEQ ID NO: 1936011 - RNA, 19 nt, Artificial Sequence
  Description of Artificial Sequence: Synthetic oligonucleotide
  Antisense strand to SEQ ID NO: 1936010
acugggcugaugaucucuc

SEQ ID NO: 1936012 - RNA, 19 nt, Artificial Sequence
  Description of Artificial Sequence: Synthetic oligonucleotide
  Sense strand starting at position 95 of SEQ ID NO: 1879849
aggugaaaucgugaggcaa

SEQ ID NO: 1936013 - RNA, 19 nt, Artificial Sequence
  Description of Artificial Sequence: Synthetic oligonucleotide
  Antisense strand to SEQ ID NO: 1936012
uugccucacgauuucaccu

SEQ ID NO: 1936014 - RNA, 19 nt, Artificial Sequence
  Description of Artificial Sequence: Synthetic oligonucleotide
  Sense strand starting at position 140 of SEQ ID NO: 1879849
aggcgaaaucaugggucca

SEQ ID NO: 1936015 - RNA, 19 nt, Artificial Sequence
  Description of Artificial Sequence: Synthetic oligonucleotide
  Antisense strand to SEQ ID NO: 1936014
uggacccaugauuucgccu

SEQ ID NO: 1936016 - RNA, 19 nt, Artificial Sequence
  Description of Artificial Sequence: Synthetic oligonucleotide
  Sense strand starting at position 141 of SEQ ID NO: 1879849
ggcgaaaucauggguccag

SEQ ID NO: 1936017 - RNA, 19 nt, Artificial Sequence
  Description of Artificial Sequence: Synthetic oligonucleotide
  Antisense strand to SEQ ID NO: 1936016
cuggacccaugauuucgcc

SEQ ID NO: 1936018 - RNA, 19 nt, Artificial Sequence
  Description of Artificial Sequence: Synthetic oligonucleotide
  Sense strand starting at position 142 of SEQ ID NO: 1879849
gcgaaaucauggguccagu

SEQ ID NO: 1936019 - RNA, 19 nt, Artificial Sequence
  Description of Artificial Sequence: Synthetic oligonucleotide
  Antisense strand to SEQ ID NO: 1936018
acuggacccaugauuucgc

SEQ ID NO: 1936020 - RNA, 19 nt, Artificial Sequence
  Description of Artificial Sequence: Synthetic oligonucleotide
  Sense strand starting at position 155 of SEQ ID NO: 1879849
uccaguuuccaaggguaca

SEQ ID NO: 1936021 - RNA, 19 nt, Artificial Sequence
  Description of Artificial Sequence: Synthetic oligonucleotide
  Antisense strand to SEQ ID NO: 1936020
uguacccuuggaaacugga

SEQ ID NO: 1936022 - RNA, 19 nt, Artificial Sequence
  Description of Artificial Sequence: Synthetic oligonucleotide
  Sense strand starting at position 262 of SEQ ID NO: 1879849
aaggccauccgcuagagua

SEQ ID NO: 1936023 - RNA, 19 nt, Artificial Sequence
  Description of Artificial Sequence: Synthetic oligonucleotide
  Antisense strand to SEQ ID NO: 1936022
uacucuagcggauggccuu

SEQ ID NO: 1936024 - RNA, 19 nt, Artificial Sequence
  Description of Artificial Sequence: Synthetic oligonucleotide
  Sense strand starting at position 270 of SEQ ID NO: 1879849
ccgcuagaguaacagagau

SEQ ID NO: 1936025 - RNA, 19 nt, Artificial Sequence
  Description of Artificial Sequence: Synthetic oligonucleotide
  Antisense strand to SEQ ID NO: 1936024
aucucuguuacucuagcgg

SEQ ID NO: 1936026 - RNA, 19 nt, Artificial Sequence
  Description of Artificial Sequence: Synthetic oligonucleotide
  Sense strand starting at position 282 of SEQ ID NO: 1879849
cagagauuagugugcuggu

SEQ ID NO: 1936027 - RNA, 19 nt, Artificial Sequence
  Description of Artificial Sequence: Synthetic oligonucleotide
  Antisense strand to SEQ ID NO: 1936026
accagcacacuaaucucug

SEQ ID NO: 1936028 - RNA, 19 nt, Artificial Sequence
  Description of Artificial Sequence: Synthetic oligonucleotide
  Sense strand starting at position 289 of SEQ ID NO: 1879849
uagugugcuggucacagua

SEQ ID NO: 1936029 - RNA, 19 nt, Artificial Sequence
  Description of Artificial Sequence: Synthetic oligonucleotide
  Antisense strand to SEQ ID NO: 1936028
uacugugaccagcacacua

SEQ ID NO: 1936030 - RNA, 19 nt, Artificial Sequence
  Description of Artificial Sequence: Synthetic oligonucleotide
  Sense strand starting at position 1054 of SEQ ID NO: 1879849
agacguaacaaguggaaga

SEQ ID NO: 1936031 - RNA, 19 nt, Artificial Sequence
  Description of Artificial Sequence: Synthetic oligonucleotide
  Antisense strand to SEQ ID NO: 1936030
ucuuccacuuguuacgucu

SEQ ID NO: 1936032 - RNA, 19 nt, Artificial Sequence
  Description of Artificial Sequence: Synthetic oligonucleotide
  Sense strand starting at position 1072 of SEQ ID NO: 1879849
acacuaacgcucgggacau

SEQ ID NO: 1936033 - RNA, 19 nt, Artificial Sequence
  Description of Artificial Sequence: Synthetic oligonucleotide
  Antisense strand to SEQ ID NO: 1936032
augucccgagcguuagugu

SEQ ID NO: 1936034 - RNA, 19 nt, Artificial Sequence
  Description of Artificial Sequence: Synthetic oligonucleotide
  Sense strand starting at position 1149 of SEQ ID NO: 1879849
ccguggagugcuugggaaa

SEQ ID NO: 1936035 - RNA, 19 nt, Artificial Sequence
  Description of Artificial Sequence: Synthetic oligonucleotide
  Antisense strand to SEQ ID NO: 1936034
uuucccaagcacuccacgg

SEQ ID NO: 1936036 - RNA, 19 nt, Artificial Sequence
  Description of Artificial Sequence: Synthetic oligonucleotide
  Sense strand starting at position 1150 of SEQ ID NO: 1879849
cguggagugcuugggaaag

SEQ ID NO: 1936037 - RNA, 19 nt, Artificial Sequence
  Description of Artificial Sequence: Synthetic oligonucleotide
  Antisense strand to SEQ ID NO: 1936036
cuuucccaagcacuccacg

SEQ ID NO: 1936038 - RNA, 19 nt, Artificial Sequence
  Description of Artificial Sequence: Synthetic oligonucleotide
  Sense strand starting at position 1151 of SEQ ID NO: 1879849
guggagugcuugggaaaga

SEQ ID NO: 1936039 - RNA, 19 nt, Artificial Sequence
  Description of Artificial Sequence: Synthetic oligonucleotide
  Antisense strand to SEQ ID NO: 1936038
ucuuucccaagcacuccac

SEQ ID NO: 1936040 - RNA, 19 nt, Artificial Sequence
  Description of Artificial Sequence: Synthetic oligonucleotide
  Sense strand starting at position 2196 of SEQ ID NO: 1879849
cugcucuaucuauggacua

SEQ ID NO: 1936041 - RNA, 19 nt, Artificial Sequence
  Description of Artificial Sequence: Synthetic oligonucleotide
  Antisense strand to SEQ ID NO: 1936040
uaguccauagauagagcag

SEQ ID NO: 1936042 - RNA, 19 nt, Artificial Sequence
  Description of Artificial Sequence: Synthetic oligonucleotide
  Sense strand starting at position 2283 of SEQ ID NO: 1879849
uuucuugugcgagauccau

SEQ ID NO: 1936043 - RNA, 19 nt, Artificial Sequence
  Description of Artificial Sequence: Synthetic oligonucleotide
  Antisense strand to SEQ ID NO: 1936042
auggaucucgcacaagaaa

SEQ ID NO: 1936044 - RNA, 19 nt, Artificial Sequence
  Description of Artificial Sequence: Synthetic oligonucleotide
  Sense strand starting at position 2289 of SEQ ID NO: 1879849
gugcgagauccaugaaccu

SEQ ID NO: 1936045 - RNA, 19 nt, Artificial Sequence
  Description of Artificial Sequence: Synthetic oligonucleotide
  Antisense strand to SEQ ID NO: 1936044
agguucauggaucucgcac

SEQ ID NO: 1936046 - RNA, 19 nt, Artificial Sequence
  Description of Artificial Sequence: Synthetic oligonucleotide
  Sense strand starting at position 2337 of SEQ ID NO: 1879849
ugguaacaaugccuguaau

SEQ ID NO: 1936047 - RNA, 19 nt, Artificial Sequence
  Description of Artificial Sequence: Synthetic oligonucleotide
  Antisense strand to SEQ ID NO: 1936046
auuacaggcauuguuacca

SEQ ID NO: 1936048 - RNA, 19 nt, Artificial Sequence
  Description of Artificial Sequence: Synthetic oligonucleotide
  Sense strand starting at position 2338 of SEQ ID NO: 1879849
gguaacaaugccuguaauc

SEQ ID NO: 1936049 - RNA, 19 nt, Artificial Sequence
  Description of Artificial Sequence: Synthetic oligonucleotide
  Antisense strand to SEQ ID NO: 1936048
gauuacaggcauuguuacc

SEQ ID NO: 1936050 - RNA, 19 nt, Artificial Sequence
  Description of Artificial Sequence: Synthetic oligonucleotide
  Sense strand starting at position 2405 of SEQ ID NO: 1879849
ccugauaauuggcuguuga

SEQ ID NO: 1936051 - RNA, 19 nt, Artificial Sequence
  Description of Artificial Sequence: Synthetic oligonucleotide
  Antisense strand to SEQ ID NO: 1936050
ucaacagccaauuaucagg

SEQ ID NO: 1936052 - RNA, 19 nt, Artificial Sequence
  Description of Artificial Sequence: Synthetic oligonucleotide
  Sense strand starting at position 2406 of SEQ ID NO: 1879849
cugauaauuggcuguugaa

SEQ ID NO: 1936053 - RNA, 19 nt, Artificial Sequence
  Description of Artificial Sequence: Synthetic oligonucleotide
  Antisense strand to SEQ ID NO: 1936052
uucaacagccaauuaucag

SEQ ID NO: 1936054 - RNA, 19 nt, Artificial Sequence
  Description of Artificial Sequence: Synthetic oligonucleotide
  Sense strand starting at position 2409 of SEQ ID NO: 1879849
auaauuggcuguugaauga

SEQ ID NO: 1936055 - RNA, 19 nt, Artificial Sequence
  Description of Artificial Sequence: Synthetic oligonucleotide
  Antisense strand to SEQ ID NO: 1936054
ucauucaacagccaauuau

SEQ ID NO: 1936056 - RNA, 19 nt, Artificial Sequence
  Description of Artificial Sequence: Synthetic oligonucleotide
  Sense strand starting at position 2413 of SEQ ID NO: 1879849
uuggcuguugaaugaucau

SEQ ID NO: 1936057 - RNA, 19 nt, Artificial Sequence
  Description of Artificial Sequence: Synthetic oligonucleotide
  Antisense strand to SEQ ID NO: 1936056
augaucauucaacagccaa

SEQ ID NO: 1936058 - RNA, 19 nt, Artificial Sequence
  Description of Artificial Sequence: Synthetic oligonucleotide
  Sense strand starting at position 2482 of SEQ ID NO: 1879849
ggugaugucaaauguugug

SEQ ID NO: 1936059 - RNA, 19 nt, Artificial Sequence
  Description of Artificial Sequence: Synthetic oligonucleotide
  Antisense strand to SEQ ID NO: 1936058
cacaacauuugacaucacc

SEQ ID NO: 1936060 - RNA, 19 nt, Artificial Sequence
  Description of Artificial Sequence: Synthetic oligonucleotide
  Sense strand starting at position 2502 of SEQ ID NO: 1879849
ggccuaacgcuuccgcaau

SEQ ID NO: 1936061 - RNA, 19 nt, Artificial Sequence
  Description of Artificial Sequence: Synthetic oligonucleotide
  Antisense strand to SEQ ID NO: 1936060
auugcggaagcguuaggcc

SEQ ID NO: 1936062 - RNA, 19 nt, Artificial Sequence
  Description of Artificial Sequence: Synthetic oligonucleotide
  Sense strand starting at position 2513 of SEQ ID NO: 1879849
uccgcaauuugagaagaca

SEQ ID NO: 1936063 - RNA, 19 nt, Artificial Sequence
  Description of Artificial Sequence: Synthetic oligonucleotide
  Antisense strand to SEQ ID NO: 1936062
ugucuucucaaauugcgga

SEQ ID NO: 1936064 - RNA, 19 nt, Artificial Sequence
  Description of Artificial Sequence: Synthetic oligonucleotide
  Sense strand starting at position 3228 of SEQ ID NO: 1879849
aguugaauguaagugguga

SEQ ID NO: 1936065 - RNA, 19 nt, Artificial Sequence
  Description of Artificial Sequence: Synthetic oligonucleotide
  Antisense strand to SEQ ID NO: 1936064
ucaccacuuacauucaacu

SEQ ID NO: 1936066 - RNA, 19 nt, Artificial Sequence
  Description of Artificial Sequence: Synthetic oligonucleotide
  Sense strand starting at position 3233 of SEQ ID NO: 1879849
aauguaaguggugauggua

SEQ ID NO: 1936067 - RNA, 19 nt, Artificial Sequence
  Description of Artificial Sequence: Synthetic oligonucleotide
  Antisense strand to SEQ ID NO: 1936066
uaccaucaccacuuacauu

SEQ ID NO: 1936068 - RNA, 19 nt, Artificial Sequence
  Description of Artificial Sequence: Synthetic oligonucleotide
  Sense strand starting at position 3337 of SEQ ID NO: 1879849
gcguguaccugcaugugua

SEQ ID NO: 1936069 - RNA, 19 nt, Artificial Sequence
  Description of Artificial Sequence: Synthetic oligonucleotide
  Antisense strand to SEQ ID NO: 1936068
uacacaugcagguacacgc

SEQ ID NO: 1936070 - RNA, 19 nt, Artificial Sequence
  Description of Artificial Sequence: Synthetic oligonucleotide
  Sense strand starting at position 3338 of SEQ ID NO: 1879849
cguguaccugcauguguau

SEQ ID NO: 1936071 - RNA, 19 nt, Artificial Sequence
  Description of Artificial Sequence: Synthetic oligonucleotide
  Antisense strand to SEQ ID NO: 1936070
auacacaugcagguacacg

SEQ ID NO: 1936072 - RNA, 19 nt, Artificial Sequence
  Description of Artificial Sequence: Synthetic oligonucleotide
  Sense strand starting at position 3341 of SEQ ID NO: 1879849
guaccugcauguguauaga

SEQ ID NO: 1936073 - RNA, 19 nt, Artificial Sequence
  Description of Artificial Sequence: Synthetic oligonucleotide
  Antisense strand to SEQ ID NO: 1936072
ucuauacacaugcagguac

SEQ ID NO: 1936074 - RNA, 19 nt, Artificial Sequence
  Description of Artificial Sequence: Synthetic oligonucleotide
  Sense strand starting at position 3351 of SEQ ID NO: 1879849
guguauagauguccuuucu

SEQ ID NO: 1936075 - RNA, 19 nt, Artificial Sequence
  Description of Artificial Sequence: Synthetic oligonucleotide
  Antisense strand to SEQ ID NO: 1936074
agaaaggacaucuauacac

SEQ ID NO: 1936076 - RNA, 19 nt, Artificial Sequence
  Description of Artificial Sequence: Synthetic oligonucleotide
  Sense strand starting at position 3357 of SEQ ID NO: 1879849
agauguccuuucuuagguu

SEQ ID NO: 1936077 - RNA, 19 nt, Artificial Sequence
  Description of Artificial Sequence: Synthetic oligonucleotide
  Antisense strand to SEQ ID NO: 1936076
aaccuaagaaaggacaucu

SEQ ID NO: 1936078 - RNA, 19 nt, Artificial Sequence
  Description of Artificial Sequence: Synthetic oligonucleotide
  Sense strand starting at position 3361 of SEQ ID NO: 1879849
guccuuucuuagguuuaga

SEQ ID NO: 1936079 - RNA, 19 nt, Artificial Sequence
  Description of Artificial Sequence: Synthetic oligonucleotide
  Antisense strand to SEQ ID NO: 1936078
ucuaaaccuaagaaaggac

SEQ ID NO: 1936080 - RNA, 19 nt, Artificial Sequence
  Description of Artificial Sequence: Synthetic oligonucleotide
  Sense strand starting at position 3375 of SEQ ID NO: 1879849
uuagaaaguucccuucugu

SEQ ID NO: 1936081 - RNA, 19 nt, Artificial Sequence
  Description of Artificial Sequence: Synthetic oligonucleotide
  Antisense strand to SEQ ID NO: 1936080
acagaagggaacuuucuaa

SEQ ID NO: 1936082 - RNA, 19 nt, Artificial Sequence
  Description of Artificial Sequence: Synthetic oligonucleotide
  Sense strand starting at position 3417 of SEQ ID NO: 1879849
aaaucaugauaguuguuga

SEQ ID NO: 1936083 - RNA, 19 nt, Artificial Sequence
  Description of Artificial Sequence: Synthetic oligonucleotide
  Antisense strand to SEQ ID NO: 1936082
ucaacaacuaucaugauuu

SEQ ID NO: 1936084 - RNA, 19 nt, Artificial Sequence
  Description of Artificial Sequence: Synthetic oligonucleotide
  Sense strand starting at position 3461 of SEQ ID NO: 1879849
cuguuaagaugaucauaca

SEQ ID NO: 1936085 - RNA, 19 nt, Artificial Sequence
  Description of Artificial Sequence: Synthetic oligonucleotide
  Antisense strand to SEQ ID NO: 1936084
uguaugaucaucuuaacag

SEQ ID NO: 1936086 - RNA, 19 nt, Artificial Sequence
  Description of Artificial Sequence: Synthetic oligonucleotide
  Sense strand starting at position 3464 of SEQ ID NO: 1879849
uuaagaugaucauacaguu

SEQ ID NO: 1936087 - RNA, 19 nt, Artificial Sequence
  Description of Artificial Sequence: Synthetic oligonucleotide
  Antisense strand to SEQ ID NO: 1936086
aacuguaugaucaucuuaa

SEQ ID NO: 1936088 - RNA, 19 nt, Artificial Sequence
  Description of Artificial Sequence: Synthetic oligonucleotide
  Sense strand starting at position 3811 of SEQ ID NO: 1879849
gcaucauguugacugacuu

SEQ ID NO: 1936089 - RNA, 19 nt, Artificial Sequence
  Description of Artificial Sequence: Synthetic oligonucleotide
  Antisense strand to SEQ ID NO: 1936088
aagucagucaacaugaugc

SEQ ID NO: 1936090 - RNA, 19 nt, Artificial Sequence
  Description of Artificial Sequence: Synthetic oligonucleotide
  Sense strand starting at position 72 of SEQ ID NO: 1879855
uggauagaaugugucacua

SEQ ID NO: 1936091 - RNA, 19 nt, Artificial Sequence
  Description of Artificial Sequence: Synthetic oligonucleotide
  Antisense strand to SEQ ID NO: 1936090
uagugacacauucuaucca

SEQ ID NO: 1936092 - RNA, 19 nt, Artificial Sequence
  Description of Artificial Sequence: Synthetic oligonucleotide
  Sense strand starting at position 170 of SEQ ID NO: 1879855
agcuacaccuuaguauaua

SEQ ID NO: 1936093 - RNA, 19 nt, Artificial Sequence
  Description of Artificial Sequence: Synthetic oligonucleotide
  Antisense strand to SEQ ID NO: 1936092
uauauacuaagguguagcu

SEQ ID NO: 1936094 - RNA, 19 nt, Artificial Sequence
  Description of Artificial Sequence: Synthetic oligonucleotide
  Sense strand starting at position 194 of SEQ ID NO: 1879855
ugccuuuaagauuauuaag

SEQ ID NO: 1936095 - RNA, 19 nt, Artificial Sequence
  Description of Artificial Sequence: Synthetic oligonucleotide
  Antisense strand to SEQ ID NO: 1936094
cuuaauaaucuuaaaggca

SEQ ID NO: 1936096 - RNA, 19 nt, Artificial Sequence
  Description of Artificial Sequence: Synthetic oligonucleotide
  Sense strand starting at position 227 of SEQ ID NO: 1879855
gagugaagcguuuacauca

SEQ ID NO: 1936097 - RNA, 19 nt, Artificial Sequence
  Description of Artificial Sequence: Synthetic oligonucleotide
  Antisense strand to SEQ ID NO: 1936096
ugauguaaacgcuucacuc

SEQ ID NO: 1936098 - RNA, 19 nt, Artificial Sequence
  Description of Artificial Sequence: Synthetic oligonucleotide
  Sense strand starting at position 645 of SEQ ID NO: 1879855
auucccugucauuaugauu

SEQ ID NO: 1936099 - RNA, 19 nt, Artificial Sequence
  Description of Artificial Sequence: Synthetic oligonucleotide
  Antisense strand to SEQ ID NO: 1936098
aaucauaaugacagggaau

SEQ ID NO: 1936100 - RNA, 19 nt, Artificial Sequence
  Description of Artificial Sequence: Synthetic oligonucleotide
  Sense strand starting at position 788 of SEQ ID NO: 1879855
uugccaguacuagauaauu

SEQ ID NO: 1936101 - RNA, 19 nt, Artificial Sequence
  Description of Artificial Sequence: Synthetic oligonucleotide
  Antisense strand to SEQ ID NO: 1936100
aauuaucuaguacuggcaa

SEQ ID NO: 1936102 - RNA, 19 nt, Artificial Sequence
  Description of Artificial Sequence: Synthetic oligonucleotide
  Sense strand starting at position 978 of SEQ ID NO: 1879855
agccauggcagagaguaua

SEQ ID NO: 1936103 - RNA, 19 nt, Artificial Sequence
  Description of Artificial Sequence: Synthetic oligonucleotide
  Antisense strand to SEQ ID NO: 1936102
uauacucucugccauggcu

SEQ ID NO: 1936104 - RNA, 19 nt, Artificial Sequence
  Description of Artificial Sequence: Synthetic oligonucleotide
  Sense strand starting at position 1065 of SEQ ID NO: 1879855
cugcgaugggaguauuauu

SEQ ID NO: 1936105 - RNA, 19 nt, Artificial Sequence
  Description of Artificial Sequence: Synthetic oligonucleotide
  Antisense strand to SEQ ID NO: 1936104
aauaauacucccaucgcag

SEQ ID NO: 1936106 - RNA, 19 nt, Artificial Sequence
  Description of Artificial Sequence: Synthetic oligonucleotide
  Sense strand starting at position 1070 of SEQ ID NO: 1879855
augggaguauuauugacca

SEQ ID NO: 1936107 - RNA, 19 nt, Artificial Sequence
  Description of Artificial Sequence: Synthetic oligonucleotide
  Antisense strand to SEQ ID NO: 1936106
uggucaauaauacucccau

SEQ ID NO: 1936108 - RNA, 19 nt, Artificial Sequence
  Description of Artificial Sequence: Synthetic oligonucleotide
  Sense strand starting at position 1074 of SEQ ID NO: 1879855
gaguauuauugaccaggau

SEQ ID NO: 1936109 - RNA, 19 nt, Artificial Sequence
  Description of Artificial Sequence: Synthetic oligonucleotide
  Antisense strand to SEQ ID NO: 1936108
auccuggucaauaauacuc

SEQ ID NO: 1936110 - RNA, 19 nt, Artificial Sequence
  Description of Artificial Sequence: Synthetic oligonucleotide
  Sense strand starting at position 1222 of SEQ ID NO: 1879855
agcaguuggacacggaaua

SEQ ID NO: 1936111 - RNA, 19 nt, Artificial Sequence
  Description of Artificial Sequence: Synthetic oligonucleotide
  Antisense strand to SEQ ID NO: 1936110
uauuccguguccaacugcu

SEQ ID NO: 1936112 - RNA, 19 nt, Artificial Sequence
  Description of Artificial Sequence: Synthetic oligonucleotide
  Sense strand starting at position 1223 of SEQ ID NO: 1879855
gcaguuggacacggaauaa

SEQ ID NO: 1936113 - RNA, 19 nt, Artificial Sequence
  Description of Artificial Sequence: Synthetic oligonucleotide
  Antisense strand to SEQ ID NO: 1936112
uuauuccguguccaacugc

SEQ ID NO: 1936114 - RNA, 19 nt, Artificial Sequence
  Description of Artificial Sequence: Synthetic oligonucleotide
  Sense strand starting at position 1394 of SEQ ID NO: 1879855
ccauaagguagcugaaaga

SEQ ID NO: 1936115 - RNA, 19 nt, Artificial Sequence
  Description of Artificial Sequence: Synthetic oligonucleotide
  Antisense strand to SEQ ID NO: 1936114
ucuuucagcuaccuuaugg

SEQ ID NO: 1936116 - RNA, 19 nt, Artificial Sequence
  Description of Artificial Sequence: Synthetic oligonucleotide
  Sense strand starting at position 2090 of SEQ ID NO: 1879855
caacuugagcugcagagaa

SEQ ID NO: 1936117 - RNA, 19 nt, Artificial Sequence
  Description of Artificial Sequence: Synthetic oligonucleotide
  Antisense strand to SEQ ID NO: 1936116
uucucugcagcucaaguug

SEQ ID NO: 1936118 - RNA, 19 nt, Artificial Sequence
  Description of Artificial Sequence: Synthetic oligonucleotide
  Sense strand starting at position 2092 of SEQ ID NO: 1879855
acuugagcugcagagaagu

SEQ ID NO: 1936119 - RNA, 19 nt, Artificial Sequence
  Description of Artificial Sequence: Synthetic oligonucleotide
  Antisense strand to SEQ ID NO: 1936118
acuucucugcagcucaagu

SEQ ID NO: 1936120 - RNA, 19 nt, Artificial Sequence
  Description of Artificial Sequence: Synthetic oligonucleotide
  Sense strand starting at position 2108 of SEQ ID NO: 1879855
aguaaagagucagcuaaau

SEQ ID NO: 1936121 - RNA, 19 nt, Artificial Sequence
  Description of Artificial Sequence: Synthetic oligonucleotide
  Antisense strand to SEQ ID NO: 1936120
auuuagcugacucuuuacu

SEQ ID NO: 1936122 - RNA, 19 nt, Artificial Sequence
  Description of Artificial Sequence: Synthetic oligonucleotide
  Sense strand starting at position 2190 of SEQ ID NO: 1879855
uguauuuagugcuuuaaac

SEQ ID NO: 1936123 - RNA, 19 nt, Artificial Sequence
  Description of Artificial Sequence: Synthetic oligonucleotide
  Antisense strand to SEQ ID NO: 1936122
guuuaaagcacuaaauaca

SEQ ID NO: 1936124 - RNA, 19 nt, Artificial Sequence
  Description of Artificial Sequence: Synthetic oligonucleotide
  Sense strand starting at position 2269 of SEQ ID NO: 1879855
uugauagaugaauguggua

SEQ ID NO: 1936125 - RNA, 19 nt, Artificial Sequence
  Description of Artificial Sequence: Synthetic oligonucleotide
  Antisense strand to SEQ ID NO: 1936124
uaccacauucaucuaucaa

SEQ ID NO: 1936126 - RNA, 19 nt, Artificial Sequence
  Description of Artificial Sequence: Synthetic oligonucleotide
  Sense strand starting at position 2274 of SEQ ID NO: 1879855
agaugaaugugguaauuua

SEQ ID NO: 1936127 - RNA, 19 nt, Artificial Sequence
  Description of Artificial Sequence: Synthetic oligonucleotide
  Antisense strand to SEQ ID NO: 1936126
uaaauuaccacauucaucu

SEQ ID NO: 1936128 - RNA, 19 nt, Artificial Sequence
  Description of Artificial Sequence: Synthetic oligonucleotide
  Sense strand starting at position 2291 of SEQ ID NO: 1879855
uauagauaugugcagucau

SEQ ID NO: 1936129 - RNA, 19 nt, Artificial Sequence
  Description of Artificial Sequence: Synthetic oligonucleotide
  Antisense strand to SEQ ID NO: 1936128
augacugcacauaucuaua

SEQ ID NO: 1936130 - RNA, 19 nt, Artificial Sequence
  Description of Artificial Sequence: Synthetic oligonucleotide
  Sense strand starting at position 2346 of SEQ ID NO: 1879855
gguauuaauguguaucuau

SEQ ID NO: 1936131 - RNA, 19 nt, Artificial Sequence
  Description of Artificial Sequence: Synthetic oligonucleotide
  Antisense strand to SEQ ID NO: 1936130
auagauacacauuaauacc

SEQ ID NO: 1936132 - RNA, 19 nt, Artificial Sequence
  Description of Artificial Sequence: Synthetic oligonucleotide
  Sense strand starting at position 2357 of SEQ ID NO: 1879855
guaucuaucuaucuaggga

SEQ ID NO: 1936133 - RNA, 19 nt, Artificial Sequence
  Description of Artificial Sequence: Synthetic oligonucleotide
  Antisense strand to SEQ ID NO: 1936132
ucccuagauagauagauac

SEQ ID NO: 1936134 - RNA, 19 nt, Artificial Sequence
  Description of Artificial Sequence: Synthetic oligonucleotide
  Sense strand starting at position 2443 of SEQ ID NO: 1879855
gguauauuccauuagugau

SEQ ID NO: 1936135 - RNA, 19 nt, Artificial Sequence
  Description of Artificial Sequence: Synthetic oligonucleotide
  Antisense strand to SEQ ID NO: 1936134
aucacuaauggaauauacc

SEQ ID NO: 1936136 - RNA, 19 nt, Artificial Sequence
  Description of Artificial Sequence: Synthetic oligonucleotide
  Sense strand starting at position 2492 of SEQ ID NO: 1879855
acagccauaccuggaaaua

SEQ ID NO: 1936137 - RNA, 19 nt, Artificial Sequence
  Description of Artificial Sequence: Synthetic oligonucleotide
  Antisense strand to SEQ ID NO: 1936136
uauuuccagguauggcugu

SEQ ID NO: 1936138 - RNA, 19 nt, Artificial Sequence
  Description of Artificial Sequence: Synthetic oligonucleotide
  Sense strand starting at position 2585 of SEQ ID NO: 1879855
gaguguuuauuucuaagcu

SEQ ID NO: 1936139 - RNA, 19 nt, Artificial Sequence
  Description of Artificial Sequence: Synthetic oligonucleotide
  Antisense strand to SEQ ID NO: 1936138
agcuuagaaauaaacacuc

SEQ ID NO: 1936140 - RNA, 19 nt, Artificial Sequence
  Description of Artificial Sequence: Synthetic oligonucleotide
  Sense strand starting at position 2703 of SEQ ID NO: 1879855
ucaaccuuacuggagcaau

SEQ ID NO: 1936141 - RNA, 19 nt, Artificial Sequence
  Description of Artificial Sequence: Synthetic oligonucleotide
  Antisense strand to SEQ ID NO: 1936140
auugcuccaguaagguuga

SEQ ID NO: 1936142 - RNA, 19 nt, Artificial Sequence
  Description of Artificial Sequence: Synthetic oligonucleotide
  Sense strand starting at position 2777 of SEQ ID NO: 1879855
gguagccacccugaaacau

SEQ ID NO: 1936143 - RNA, 19 nt, Artificial Sequence
  Description of Artificial Sequence: Synthetic oligonucleotide
  Antisense strand to SEQ ID NO: 1936142
auguuucaggguggcuacc

SEQ ID NO: 1936144 - RNA, 19 nt, Artificial Sequence
  Description of Artificial Sequence: Synthetic oligonucleotide
  Sense strand starting at position 3143 of SEQ ID NO: 1879855
acauaaauggcaugaaguu

SEQ ID NO: 1936145 - RNA, 19 nt, Artificial Sequence
  Description of Artificial Sequence: Synthetic oligonucleotide
  Antisense strand to SEQ ID NO: 1936144
aacuucaugccauuuaugu

SEQ ID NO: 1936146 - RNA, 19 nt, Artificial Sequence
  Description of Artificial Sequence: Synthetic oligonucleotide
  Sense strand starting at position 3436 of SEQ ID NO: 1879855
cuuaucuaucuauguagga

SEQ ID NO: 1936147 - RNA, 19 nt, Artificial Sequence
  Description of Artificial Sequence: Synthetic oligonucleotide
  Antisense strand to SEQ ID NO: 1936146
uccuacauagauagauaag

SEQ ID NO: 1936148 - RNA, 19 nt, Artificial Sequence
  Description of Artificial Sequence: Synthetic oligonucleotide
  Sense strand starting at position 3437 of SEQ ID NO: 1879855
uuaucuaucuauguaggau

SEQ ID NO: 1936149 - RNA, 19 nt, Artificial Sequence
  Description of Artificial Sequence: Synthetic oligonucleotide
  Antisense strand to SEQ ID NO: 1936148
auccuacauagauagauaa

SEQ ID NO: 1936150 - RNA, 19 nt, Artificial Sequence
  Description of Artificial Sequence: Synthetic oligonucleotide
  Sense strand starting at position 3440 of SEQ ID NO: 1879855
ucuaucuauguaggauaaa

SEQ ID NO: 1936151 - RNA, 19 nt, Artificial Sequence
  Description of Artificial Sequence: Synthetic oligonucleotide
  Antisense strand to SEQ ID NO: 1936150
uuuauccuacauagauaga

SEQ ID NO: 1936152 - RNA, 19 nt, Artificial Sequence
  Description of Artificial Sequence: Synthetic oligonucleotide
  Sense strand starting at position 3529 of SEQ ID NO: 1879855
caugacugugcagauugaa

SEQ ID NO: 1936153 - RNA, 19 nt, Artificial Sequence
  Description of Artificial Sequence: Synthetic oligonucleotide
  Antisense strand to SEQ ID NO: 1936152
uucaaucugcacagucaug

SEQ ID NO: 1936154 - RNA, 19 nt, Artificial Sequence
  Description of Artificial Sequence: Synthetic oligonucleotide
  Sense strand starting at position 3550 of SEQ ID NO: 1879855
ugaauuugcagaggugugu

SEQ ID NO: 1936155 - RNA, 19 nt, Artificial Sequence
  Description of Artificial Sequence: Synthetic oligonucleotide
  Antisense strand to SEQ ID NO: 1936154
acacaccucugcaaauuca

SEQ ID NO: 1936156 - RNA, 19 nt, Artificial Sequence
  Description of Artificial Sequence: Synthetic oligonucleotide
  Sense strand starting at position 3568 of SEQ ID NO: 1879855
uuggcugaaugauuauaau

SEQ ID NO: 1936157 - RNA, 19 nt, Artificial Sequence
  Description of Artificial Sequence: Synthetic oligonucleotide
  Antisense strand to SEQ ID NO: 1936156
auuauaaucauucagccaa

SEQ ID NO: 1936158 - RNA, 19 nt, Artificial Sequence
  Description of Artificial Sequence: Synthetic oligonucleotide
  Sense strand starting at position 3695 of SEQ ID NO: 1879855
ucucaauuagcagacagua

SEQ ID NO: 1936159 - RNA, 19 nt, Artificial Sequence
  Description of Artificial Sequence: Synthetic oligonucleotide
  Antisense strand to SEQ ID NO: 1936158
uacugucugcuaauugaga

SEQ ID NO: 1936160 - RNA, 19 nt, Artificial Sequence
  Description of Artificial Sequence: Synthetic oligonucleotide
  Sense strand starting at position 3708 of SEQ ID NO: 1879855
acaguaguacauuauacuu

SEQ ID NO: 1936161 - RNA, 19 nt, Artificial Sequence
  Description of Artificial Sequence: Synthetic oligonucleotide
  Antisense strand to SEQ ID NO: 1936160
aaguauaauguacuacugu

SEQ ID NO: 1936162 - RNA, 19 nt, Artificial Sequence
  Description of Artificial Sequence: Synthetic oligonucleotide
  Sense strand starting at position 3718 of SEQ ID NO: 1879855
auuauacuuguuugaguag

SEQ ID NO: 1936163 - RNA, 19 nt, Artificial Sequence
  Description of Artificial Sequence: Synthetic oligonucleotide
  Antisense strand to SEQ ID NO: 1936162
cuacucaaacaaguauaau

SEQ ID NO: 1936164 - RNA, 19 nt, Artificial Sequence
  Description of Artificial Sequence: Synthetic oligonucleotide
  Sense strand starting at position 3959 of SEQ ID NO: 1879855
gaaugucauuuguaacaag

SEQ ID NO: 1936165 - RNA, 19 nt, Artificial Sequence
  Description of Artificial Sequence: Synthetic oligonucleotide
  Antisense strand to SEQ ID NO: 1936164
cuuguuacaaaugacauuc

SEQ ID NO: 1936166 - RNA, 19 nt, Artificial Sequence
  Description of Artificial Sequence: Synthetic oligonucleotide
  Sense strand starting at position 3962 of SEQ ID NO: 1879855
ugucauuuguaacaagaag

SEQ ID NO: 1936167 - RNA, 19 nt, Artificial Sequence
  Description of Artificial Sequence: Synthetic oligonucleotide
  Antisense strand to SEQ ID NO: 1936166
cuucuuguuacaaaugaca

SEQ ID NO: 1936168 - RNA, 19 nt, Artificial Sequence
  Description of Artificial Sequence: Synthetic oligonucleotide
  Sense strand starting at position 3979 of SEQ ID NO: 1879855
aguuaauaagaaggcaaau

SEQ ID NO: 1936169 - RNA, 19 nt, Artificial Sequence
  Description of Artificial Sequence: Synthetic oligonucleotide
  Antisense strand to SEQ ID NO: 1936168
auuugccuucuuauuaacu

SEQ ID NO: 1936170 - RNA, 19 nt, Artificial Sequence
  Description of Artificial Sequence: Synthetic oligonucleotide
  Sense strand starting at position 363 of SEQ ID NO: 1879854
aggugcaaaguuugaaaua

SEQ ID NO: 1936171 - RNA, 19 nt, Artificial Sequence
  Description of Artificial Sequence: Synthetic oligonucleotide
  Antisense strand to SEQ ID NO: 1936170
uauuucaaacuuugcaccu

SEQ ID NO: 1936172 - RNA, 19 nt, Artificial Sequence
  Description of Artificial Sequence: Synthetic oligonucleotide
  Sense strand starting at position 390 of SEQ ID NO: 1879854
ucauuaguaccucaguuua

SEQ ID NO: 1936173 - RNA, 19 nt, Artificial Sequence
  Description of Artificial Sequence: Synthetic oligonucleotide
  Antisense strand to SEQ ID NO: 1936172
uaaacugagguacuaauga

SEQ ID NO: 1936174 - RNA, 19 nt, Artificial Sequence
  Description of Artificial Sequence: Synthetic oligonucleotide
  Sense strand starting at position 414 of SEQ ID NO: 1879854
auuauccugcaagaguuaa

SEQ ID NO: 1936175 - RNA, 19 nt, Artificial Sequence
  Description of Artificial Sequence: Synthetic oligonucleotide
  Antisense strand to SEQ ID NO: 1936174
uuaacucuugcaggauaau

SEQ ID NO: 1936176 - RNA, 19 nt, Artificial Sequence
  Description of Artificial Sequence: Synthetic oligonucleotide
  Sense strand starting at position 439 of SEQ ID NO: 1879854
aaugauguuguugaaaucu

SEQ ID NO: 1936177 - RNA, 19 nt, Artificial Sequence
  Description of Artificial Sequence: Synthetic oligonucleotide
  Antisense strand to SEQ ID NO: 1936176
agauuucaacaacaucauu

SEQ ID NO: 1936178 - RNA, 19 nt, Artificial Sequence
  Description of Artificial Sequence: Synthetic oligonucleotide
  Sense strand starting at position 451 of SEQ ID NO: 1879854
gaaaucugguacuuggaca

SEQ ID NO: 1936179 - RNA, 19 nt, Artificial Sequence
  Description of Artificial Sequence: Synthetic oligonucleotide
  Antisense strand to SEQ ID NO: 1936178
uguccaaguaccagauuuc

SEQ ID NO: 1936180 - RNA, 19 nt, Artificial Sequence
  Description of Artificial Sequence: Synthetic oligonucleotide
  Sense strand starting at position 714 of SEQ ID NO: 1879854
gccuuaagcacugggagaa

SEQ ID NO: 1936181 - RNA, 19 nt, Artificial Sequence
  Description of Artificial Sequence: Synthetic oligonucleotide
  Antisense strand to SEQ ID NO: 1936180
uucucccagugcuuaaggc

SEQ ID NO: 1936182 - RNA, 19 nt, Artificial Sequence
  Description of Artificial Sequence: Synthetic oligonucleotide
  Sense strand starting at position 715 of SEQ ID NO: 1879854
ccuuaagcacugggagaau

SEQ ID NO: 1936183 - RNA, 19 nt, Artificial Sequence
  Description of Artificial Sequence: Synthetic oligonucleotide
  Antisense strand to SEQ ID NO: 1936182
auucucccagugcuuaagg

SEQ ID NO: 1936184 - RNA, 19 nt, Artificial Sequence
  Description of Artificial Sequence: Synthetic oligonucleotide
  Sense strand starting at position 760 of SEQ ID NO: 1879854
agacuauacucaguugauu

SEQ ID NO: 1936185 - RNA, 19 nt, Artificial Sequence
  Description of Artificial Sequence: Synthetic oligonucleotide
  Antisense strand to SEQ ID NO: 1936184
aaucaacugaguauagucu

SEQ ID NO: 1936186 - RNA, 19 nt, Artificial Sequence
  Description of Artificial Sequence: Synthetic oligonucleotide
  Sense strand starting at position 772 of SEQ ID NO: 1879854
guugauuaacauugguuga

SEQ ID NO: 1936187 - RNA, 19 nt, Artificial Sequence
  Description of Artificial Sequence: Synthetic oligonucleotide
  Antisense strand to SEQ ID NO: 1936186
ucaaccaauguuaaucaac

SEQ ID NO: 1936188 - RNA, 19 nt, Artificial Sequence
  Description of Artificial Sequence: Synthetic oligonucleotide
  Sense strand starting at position 774 of SEQ ID NO: 1879854
ugauuaacauugguugaua

SEQ ID NO: 1936189 - RNA, 19 nt, Artificial Sequence
  Description of Artificial Sequence: Synthetic oligonucleotide
  Antisense strand to SEQ ID NO: 1936188
uaucaaccaauguuaauca

SEQ ID NO: 1936190 - RNA, 19 nt, Artificial Sequence
  Description of Artificial Sequence: Synthetic oligonucleotide
  Sense strand starting at position 775 of SEQ ID NO: 1879854
gauuaacauugguugauag

SEQ ID NO: 1936191 - RNA, 19 nt, Artificial Sequence
  Description of Artificial Sequence: Synthetic oligonucleotide
  Antisense strand to SEQ ID NO: 1936190
cuaucaaccaauguuaauc

SEQ ID NO: 1936192 - RNA, 19 nt, Artificial Sequence
  Description of Artificial Sequence: Synthetic oligonucleotide
  Sense strand starting at position 776 of SEQ ID NO: 1879854
auuaacauugguugauaga

SEQ ID NO: 1936193 - RNA, 19 nt, Artificial Sequence
  Description of Artificial Sequence: Synthetic oligonucleotide
  Antisense strand to SEQ ID NO: 1936192
ucuaucaaccaauguuaau

SEQ ID NO: 1936194 - RNA, 19 nt, Artificial Sequence
  Description of Artificial Sequence: Synthetic oligonucleotide
  Sense strand starting at position 1059 of SEQ ID NO: 1879854
caggaaauacuuuguuaga

SEQ ID NO: 1936195 - RNA, 19 nt, Artificial Sequence
  Description of Artificial Sequence: Synthetic oligonucleotide
  Antisense strand to SEQ ID NO: 1936194
ucuaacaaaguauuuccug

SEQ ID NO: 1936196 - RNA, 19 nt, Artificial Sequence
  Description of Artificial Sequence: Synthetic oligonucleotide
  Sense strand starting at position 1330 of SEQ ID NO: 1879854
auugcauuccaaggaagaa

SEQ ID NO: 1936197 - RNA, 19 nt, Artificial Sequence
  Description of Artificial Sequence: Synthetic oligonucleotide
  Antisense strand to SEQ ID NO: 1936196
uucuuccuuggaaugcaau

SEQ ID NO: 1936198 - RNA, 19 nt, Artificial Sequence
  Description of Artificial Sequence: Synthetic oligonucleotide
  Sense strand starting at position 1344 of SEQ ID NO: 1879854
aagaaucugcuguagcaga

SEQ ID NO: 1936199 - RNA, 19 nt, Artificial Sequence
  Description of Artificial Sequence: Synthetic oligonucleotide
  Antisense strand to SEQ ID NO: 1936198
ucugcuacagcagauucuu

SEQ ID NO: 1936200 - RNA, 19 nt, Artificial Sequence
  Description of Artificial Sequence: Synthetic oligonucleotide
  Sense strand starting at position 1372 of SEQ ID NO: 1879854
gacagaauauacuuuguag

SEQ ID NO: 1936201 - RNA, 19 nt, Artificial Sequence
  Description of Artificial Sequence: Synthetic oligonucleotide
  Antisense strand to SEQ ID NO: 1936200
cuacaaaguauauucuguc

SEQ ID NO: 1936202 - RNA, 19 nt, Artificial Sequence
  Description of Artificial Sequence: Synthetic oligonucleotide
  Sense strand starting at position 1479 of SEQ ID NO: 1879854
uuaagaauugcccaagcuu

SEQ ID NO: 1936203 - RNA, 19 nt, Artificial Sequence
  Description of Artificial Sequence: Synthetic oligonucleotide
  Antisense strand to SEQ ID NO: 1936202
aagcuugggcaauucuuaa

SEQ ID NO: 1936204 - RNA, 19 nt, Artificial Sequence
  Description of Artificial Sequence: Synthetic oligonucleotide
  Sense strand starting at position 1825 of SEQ ID NO: 1879854
ggacauccaguuugagauc

SEQ ID NO: 1936205 - RNA, 19 nt, Artificial Sequence
  Description of Artificial Sequence: Synthetic oligonucleotide
  Antisense strand to SEQ ID NO: 1936204
gaucucaaacuggaugucc

SEQ ID NO: 1936206 - RNA, 19 nt, Artificial Sequence
  Description of Artificial Sequence: Synthetic oligonucleotide
  Sense strand starting at position 1916 of SEQ ID NO: 1879854
cauagugacugauuaagau

SEQ ID NO: 1936207 - RNA, 19 nt, Artificial Sequence
  Description of Artificial Sequence: Synthetic oligonucleotide
  Antisense strand to SEQ ID NO: 1936206
aucuuaaucagucacuaug

SEQ ID NO: 1936208 - RNA, 19 nt, Artificial Sequence
  Description of Artificial Sequence: Synthetic oligonucleotide
  Sense strand starting at position 2101 of SEQ ID NO: 1879854
uuugcuggaucaucaaaca

SEQ ID NO: 1936209 - RNA, 19 nt, Artificial Sequence
  Description of Artificial Sequence: Synthetic oligonucleotide
  Antisense strand to SEQ ID NO: 1936208
uguuugaugauccagcaaa

SEQ ID NO: 1936210 - RNA, 19 nt, Artificial Sequence
  Description of Artificial Sequence: Synthetic oligonucleotide
  Sense strand starting at position 2137 of SEQ ID NO: 1879854
uugguugguaauuaucaga

SEQ ID NO: 1936211 - RNA, 19 nt, Artificial Sequence
  Description of Artificial Sequence: Synthetic oligonucleotide
  Antisense strand to SEQ ID NO: 1936210
ucugauaauuaccaaccaa

SEQ ID NO: 1936212 - RNA, 19 nt, Artificial Sequence
  Description of Artificial Sequence: Synthetic oligonucleotide
  Sense strand starting at position 2207 of SEQ ID NO: 1879854
guuaguuaccaucaacaga

SEQ ID NO: 1936213 - RNA, 19 nt, Artificial Sequence
  Description of Artificial Sequence: Synthetic oligonucleotide
  Antisense strand to SEQ ID NO: 1936212
ucuguugaugguaacuaac

SEQ ID NO: 1936214 - RNA, 19 nt, Artificial Sequence
  Description of Artificial Sequence: Synthetic oligonucleotide
  Sense strand starting at position 2702 of SEQ ID NO: 1879854
ucaguuugugaggaaugac

SEQ ID NO: 1936215 - RNA, 19 nt, Artificial Sequence
  Description of Artificial Sequence: Synthetic oligonucleotide
  Antisense strand to SEQ ID NO: 1936214
gucauuccucacaaacuga

SEQ ID NO: 1936216 - RNA, 19 nt, Artificial Sequence
  Description of Artificial Sequence: Synthetic oligonucleotide
  Sense strand starting at position 2705 of SEQ ID NO: 1879854
guuugugaggaaugacgga

SEQ ID NO: 1936217 - RNA, 19 nt, Artificial Sequence
  Description of Artificial Sequence: Synthetic oligonucleotide
  Antisense strand to SEQ ID NO: 1936216
uccgucauuccucacaaac

SEQ ID NO: 1936218 - RNA, 19 nt, Artificial Sequence
  Description of Artificial Sequence: Synthetic oligonucleotide
  Sense strand starting at position 2728 of SEQ ID NO: 1879854
uauggaaagucuguaucuu

SEQ ID NO: 1936219 - RNA, 19 nt, Artificial Sequence
  Description of Artificial Sequence: Synthetic oligonucleotide
  Antisense strand to SEQ ID NO: 1936218
aagauacagacuuuccaua

SEQ ID NO: 1936220 - RNA, 19 nt, Artificial Sequence
  Description of Artificial Sequence: Synthetic oligonucleotide
  Sense strand starting at position 2729 of SEQ ID NO: 1879854
auggaaagucuguaucuug

SEQ ID NO: 1936221 - RNA, 19 nt, Artificial Sequence
  Description of Artificial Sequence: Synthetic oligonucleotide
  Antisense strand to SEQ ID NO: 1936220
caagauacagacuuuccau

SEQ ID NO: 1936222 - RNA, 19 nt, Artificial Sequence
  Description of Artificial Sequence: Synthetic oligonucleotide
  Sense strand starting at position 2732 of SEQ ID NO: 1879854
gaaagucuguaucuugaga

SEQ ID NO: 1936223 - RNA, 19 nt, Artificial Sequence
  Description of Artificial Sequence: Synthetic oligonucleotide
  Antisense strand to SEQ ID NO: 1936222
ucucaagauacagacuuuc

SEQ ID NO: 1936224 - RNA, 19 nt, Artificial Sequence
  Description of Artificial Sequence: Synthetic oligonucleotide
  Sense strand starting at position 2747 of SEQ ID NO: 1879854
gagagaacaugugauuuag

SEQ ID NO: 1936225 - RNA, 19 nt, Artificial Sequence
  Description of Artificial Sequence: Synthetic oligonucleotide
  Antisense strand to SEQ ID NO: 1936224
cuaaaucacauguucucuc

SEQ ID NO: 1936226 - RNA, 19 nt, Artificial Sequence
  Description of Artificial Sequence: Synthetic oligonucleotide
  Sense strand starting at position 2821 of SEQ ID NO: 1879854
ucuaguuagccauaugacu

SEQ ID NO: 1936227 - RNA, 19 nt, Artificial Sequence
  Description of Artificial Sequence: Synthetic oligonucleotide
  Antisense strand to SEQ ID NO: 1936226
agucauauggcuaacuaga

SEQ ID NO: 1936228 - RNA, 19 nt, Artificial Sequence
  Description of Artificial Sequence: Synthetic oligonucleotide
  Sense strand starting at position 2959 of SEQ ID NO: 1879854
gcaagugugguauauagaa

SEQ ID NO: 1936229 - RNA, 19 nt, Artificial Sequence
  Description of Artificial Sequence: Synthetic oligonucleotide
  Antisense strand to SEQ ID NO: 1936228
uucuauauaccacacuugc

SEQ ID NO: 1936230 - RNA, 19 nt, Artificial Sequence
  Description of Artificial Sequence: Synthetic oligonucleotide
  Sense strand starting at position 2971 of SEQ ID NO: 1879854
uauagaauccaggguuuau

SEQ ID NO: 1936231 - RNA, 19 nt, Artificial Sequence
  Description of Artificial Sequence: Synthetic oligonucleotide
  Antisense strand to SEQ ID NO: 1936230
auaaacccuggauucuaua

SEQ ID NO: 1936232 - RNA, 19 nt, Artificial Sequence
  Description of Artificial Sequence: Synthetic oligonucleotide
  Sense strand starting at position 2980 of SEQ ID NO: 1879854
caggguuuauggguaacuu

SEQ ID NO: 1936233 - RNA, 19 nt, Artificial Sequence
  Description of Artificial Sequence: Synthetic oligonucleotide
  Antisense strand to SEQ ID NO: 1936232
aaguuacccauaaacccug

SEQ ID NO: 1936234 - RNA, 19 nt, Artificial Sequence
  Description of Artificial Sequence: Synthetic oligonucleotide
  Sense strand starting at position 2981 of SEQ ID NO: 1879854
aggguuuauggguaacuuu

SEQ ID NO: 1936235 - RNA, 19 nt, Artificial Sequence
  Description of Artificial Sequence: Synthetic oligonucleotide
  Antisense strand to SEQ ID NO: 1936234
aaaguuacccauaaacccu

SEQ ID NO: 1936236 - RNA, 19 nt, Artificial Sequence
  Description of Artificial Sequence: Synthetic oligonucleotide
  Sense strand starting at position 3077 of SEQ ID NO: 1879854
ugucuuauccaauauaugu

SEQ ID NO: 1936237 - RNA, 19 nt, Artificial Sequence
  Description of Artificial Sequence: Synthetic oligonucleotide
  Antisense strand to SEQ ID NO: 1936236
acauauauuggauaagaca

SEQ ID NO: 1936238 - RNA, 19 nt, Artificial Sequence
  Description of Artificial Sequence: Synthetic oligonucleotide
  Sense strand starting at position 3194 of SEQ ID NO: 1879854
uugauuucuuaggagaauu

SEQ ID NO: 1936239 - RNA, 19 nt, Artificial Sequence
  Description of Artificial Sequence: Synthetic oligonucleotide
  Antisense strand to SEQ ID NO: 1936238
aauucuccuaagaaaucaa

SEQ ID NO: 1936240 - RNA, 19 nt, Artificial Sequence
  Description of Artificial Sequence: Synthetic oligonucleotide
  Sense strand starting at position 3212 of SEQ ID NO: 1879854
ucuggacuuguuuguauuu

SEQ ID NO: 1936241 - RNA, 19 nt, Artificial Sequence
  Description of Artificial Sequence: Synthetic oligonucleotide
  Antisense strand to SEQ ID NO: 1936240
aaauacaaacaaguccaga

SEQ ID NO: 1936242 - RNA, 19 nt, Artificial Sequence
  Description of Artificial Sequence: Synthetic oligonucleotide
  Sense strand starting at position 3572 of SEQ ID NO: 1879854
guauuaaacuuagcagaaa

SEQ ID NO: 1936243 - RNA, 19 nt, Artificial Sequence
  Description of Artificial Sequence: Synthetic oligonucleotide
  Antisense strand to SEQ ID NO: 1936242
uuucugcuaaguuuaauac

SEQ ID NO: 1936244 - RNA, 19 nt, Artificial Sequence
  Description of Artificial Sequence: Synthetic oligonucleotide
  Sense strand starting at position 3585 of SEQ ID NO: 1879854
cagaaagcccugugaaauu

SEQ ID NO: 1936245 - RNA, 19 nt, Artificial Sequence
  Description of Artificial Sequence: Synthetic oligonucleotide
  Antisense strand to SEQ ID NO: 1936244
aauuucacagggcuuucug

SEQ ID NO: 1936246 - RNA, 19 nt, Artificial Sequence
  Description of Artificial Sequence: Synthetic oligonucleotide
  Sense strand starting at position 3787 of SEQ ID NO: 1879854
ggcagaugguaauuauacu

SEQ ID NO: 1936247 - RNA, 19 nt, Artificial Sequence
  Description of Artificial Sequence: Synthetic oligonucleotide
  Antisense strand to SEQ ID NO: 1936246
aguauaauuaccaucugcc

SEQ ID NO: 1936248 - RNA, 19 nt, Artificial Sequence
  Description of Artificial Sequence: Synthetic oligonucleotide
  Sense strand starting at position 3879 of SEQ ID NO: 1879854
gugcucugauuugcaaauu

SEQ ID NO: 1936249 - RNA, 19 nt, Artificial Sequence
  Description of Artificial Sequence: Synthetic oligonucleotide
  Antisense strand to SEQ ID NO: 1936248
aauuugcaaaucagagcac

SEQ ID NO: 1936250 - RNA, 19 nt, Artificial Sequence
  Description of Artificial Sequence: Synthetic oligonucleotide
  Sense strand starting at position 86 of SEQ ID NO: 1879856
uuauuuagugaaugugguu

SEQ ID NO: 1936251 - RNA, 19 nt, Artificial Sequence
  Description of Artificial Sequence: Synthetic oligonucleotide
  Antisense strand to SEQ ID NO: 1936250
aaccacauucacuaaauaa

SEQ ID NO: 1936252 - RNA, 19 nt, Artificial Sequence
  Description of Artificial Sequence: Synthetic oligonucleotide
  Sense strand starting at position 95 of SEQ ID NO: 1879856
gaaugugguuugucaugaa

SEQ ID NO: 1936253 - RNA, 19 nt, Artificial Sequence
  Description of Artificial Sequence: Synthetic oligonucleotide
  Antisense strand to SEQ ID NO: 1936252
uucaugacaaaccacauuc

SEQ ID NO: 1936254 - RNA, 19 nt, Artificial Sequence
  Description of Artificial Sequence: Synthetic oligonucleotide
  Sense strand starting at position 99 of SEQ ID NO: 1879856
gugguuugucaugaagauc

SEQ ID NO: 1936255 - RNA, 19 nt, Artificial Sequence
  Description of Artificial Sequence: Synthetic oligonucleotide
  Antisense strand to SEQ ID NO: 1936254
gaucuucaugacaaaccac

SEQ ID NO: 1936256 - RNA, 19 nt, Artificial Sequence
  Description of Artificial Sequence: Synthetic oligonucleotide
  Sense strand starting at position 345 of SEQ ID NO: 1879856
gccuccucuccucagagau

SEQ ID NO: 1936257 - RNA, 19 nt, Artificial Sequence
  Description of Artificial Sequence: Synthetic oligonucleotide
  Antisense strand to SEQ ID NO: 1936256
aucucugaggagaggaggc

SEQ ID NO: 1936258 - RNA, 19 nt, Artificial Sequence
  Description of Artificial Sequence: Synthetic oligonucleotide
  Sense strand starting at position 362 of SEQ ID NO: 1879856
auuaaagaguuucucagga

SEQ ID NO: 1936259 - RNA, 19 nt, Artificial Sequence
  Description of Artificial Sequence: Synthetic oligonucleotide
  Antisense strand to SEQ ID NO: 1936258
uccugagaaacucuuuaau

SEQ ID NO: 1936260 - RNA, 19 nt, Artificial Sequence
  Description of Artificial Sequence: Synthetic oligonucleotide
  Sense strand starting at position 382 of SEQ ID NO: 1879856
ugggcucuucuggaaagca

SEQ ID NO: 1936261 - RNA, 19 nt, Artificial Sequence
  Description of Artificial Sequence: Synthetic oligonucleotide
  Antisense strand to SEQ ID NO: 1936260
ugcuuuccagaagagccca

SEQ ID NO: 1936262 - RNA, 19 nt, Artificial Sequence
  Description of Artificial Sequence: Synthetic oligonucleotide
  Sense strand starting at position 423 of SEQ ID NO: 1879856
gaccuaagcggauaacuuu

SEQ ID NO: 1936263 - RNA, 19 nt, Artificial Sequence
  Description of Artificial Sequence: Synthetic oligonucleotide
  Antisense strand to SEQ ID NO: 1936262
aaaguuauccgcuuagguc

SEQ ID NO: 1936264 - RNA, 19 nt, Artificial Sequence
  Description of Artificial Sequence: Synthetic oligonucleotide
  Sense strand starting at position 524 of SEQ ID NO: 1879856
gcuaaauagacccguugau

SEQ ID NO: 1936265 - RNA, 19 nt, Artificial Sequence
  Description of Artificial Sequence: Synthetic oligonucleotide
  Antisense strand to SEQ ID NO: 1936264
aucaacgggucuauuuagc

SEQ ID NO: 1936266 - RNA, 19 nt, Artificial Sequence
  Description of Artificial Sequence: Synthetic oligonucleotide
  Sense strand starting at position 537 of SEQ ID NO: 1879856
guugauuuaugacaagagu

SEQ ID NO: 1936267 - RNA, 19 nt, Artificial Sequence
  Description of Artificial Sequence: Synthetic oligonucleotide
  Antisense strand to SEQ ID NO: 1936266
acucuugucauaaaucaac

SEQ ID NO: 1936268 - RNA, 19 nt, Artificial Sequence
  Description of Artificial Sequence: Synthetic oligonucleotide
  Sense strand starting at position 582 of SEQ ID NO: 1879856
gaaugucuugcacgagaau

SEQ ID NO: 1936269 - RNA, 19 nt, Artificial Sequence
  Description of Artificial Sequence: Synthetic oligonucleotide
  Antisense strand to SEQ ID NO: 1936268
auucucgugcaagacauuc

SEQ ID NO: 1936270 - RNA, 19 nt, Artificial Sequence
  Description of Artificial Sequence: Synthetic oligonucleotide
  Sense strand starting at position 583 of SEQ ID NO: 1879856
aaugucuugcacgagaaua

SEQ ID NO: 1936271 - RNA, 19 nt, Artificial Sequence
  Description of Artificial Sequence: Synthetic oligonucleotide
  Antisense strand to SEQ ID NO: 1936270
uauucucgugcaagacauu

SEQ ID NO: 1936272 - RNA, 19 nt, Artificial Sequence
  Description of Artificial Sequence: Synthetic oligonucleotide
  Sense strand starting at position 619 of SEQ ID NO: 1879856
gggaaacauugaguguguu

SEQ ID NO: 1936273 - RNA, 19 nt, Artificial Sequence
  Description of Artificial Sequence: Synthetic oligonucleotide
  Antisense strand to SEQ ID NO: 1936272
aacacacucaauguuuccc

SEQ ID NO: 1936274 - RNA, 19 nt, Artificial Sequence
  Description of Artificial Sequence: Synthetic oligonucleotide
  Sense strand starting at position 623 of SEQ ID NO: 1879856
aacauugaguguguuguga

SEQ ID NO: 1936275 - RNA, 19 nt, Artificial Sequence
  Description of Artificial Sequence: Synthetic oligonucleotide
  Antisense strand to SEQ ID NO: 1936274
ucacaacacacucaauguu

SEQ ID NO: 1936276 - RNA, 19 nt, Artificial Sequence
  Description of Artificial Sequence: Synthetic oligonucleotide
  Sense strand starting at position 636 of SEQ ID NO: 1879856
uugugaugugacugcaaau

SEQ ID NO: 1936277 - RNA, 19 nt, Artificial Sequence
  Description of Artificial Sequence: Synthetic oligonucleotide
  Antisense strand to SEQ ID NO: 1936276
auuugcagucacaucacaa

SEQ ID NO: 1936278 - RNA, 19 nt, Artificial Sequence
  Description of Artificial Sequence: Synthetic oligonucleotide
  Sense strand starting at position 715 of SEQ ID NO: 1879856
uacagaagguagcuguaua

SEQ ID NO: 1936279 - RNA, 19 nt, Artificial Sequence
  Description of Artificial Sequence: Synthetic oligonucleotide
  Antisense strand to SEQ ID NO: 1936278
uauacagcuaccuucugua

SEQ ID NO: 1936280 - RNA, 19 nt, Artificial Sequence
  Description of Artificial Sequence: Synthetic oligonucleotide
  Sense strand starting at position 746 of SEQ ID NO: 1879856
gggaaacucuugucuaucu

SEQ ID NO: 1936281 - RNA, 19 nt, Artificial Sequence
  Description of Artificial Sequence: Synthetic oligonucleotide
  Antisense strand to SEQ ID NO: 1936280
agauagacaagaguuuccc

SEQ ID NO: 1936282 - RNA, 19 nt, Artificial Sequence
  Description of Artificial Sequence: Synthetic oligonucleotide
  Sense strand starting at position 747 of SEQ ID NO: 1879856
ggaaacucuugucuaucua

SEQ ID NO: 1936283 - RNA, 19 nt, Artificial Sequence
  Description of Artificial Sequence: Synthetic oligonucleotide
  Antisense strand to SEQ ID NO: 1936282
uagauagacaagaguuucc

SEQ ID NO: 1936284 - RNA, 19 nt, Artificial Sequence
  Description of Artificial Sequence: Synthetic oligonucleotide
  Sense strand starting at position 897 of SEQ ID NO: 1879856
ggugucuuagaauaugcaa

SEQ ID NO: 1936285 - RNA, 19 nt, Artificial Sequence
  Description of Artificial Sequence: Synthetic oligonucleotide
  Antisense strand to SEQ ID NO: 1936284
uugcauauucuaagacacc

SEQ ID NO: 1936286 - RNA, 19 nt, Artificial Sequence
  Description of Artificial Sequence: Synthetic oligonucleotide
  Sense strand starting at position 2039 of SEQ ID NO: 1879856
ggguaagugaaguacagua

SEQ ID NO: 1936287 - RNA, 19 nt, Artificial Sequence
  Description of Artificial Sequence: Synthetic oligonucleotide
  Antisense strand to SEQ ID NO: 1936286
uacuguacuucacuuaccc

SEQ ID NO: 1936288 - RNA, 19 nt, Artificial Sequence
  Description of Artificial Sequence: Synthetic oligonucleotide
  Sense strand starting at position 2355 of SEQ ID NO: 1879856
ugucuacgugaugagauaa

SEQ ID NO: 1936289 - RNA, 19 nt, Artificial Sequence
  Description of Artificial Sequence: Synthetic oligonucleotide
  Antisense strand to SEQ ID NO: 1936288
uuaucucaucacguagaca

SEQ ID NO: 1936290 - RNA, 19 nt, Artificial Sequence
  Description of Artificial Sequence: Synthetic oligonucleotide
  Sense strand starting at position 2470 of SEQ ID NO: 1879856
gcaaucucagaugacaguu

SEQ ID NO: 1936291 - RNA, 19 nt, Artificial Sequence
  Description of Artificial Sequence: Synthetic oligonucleotide
  Antisense strand to SEQ ID NO: 1936290
aacugucaucugagauugc

SEQ ID NO: 1936292 - RNA, 19 nt, Artificial Sequence
  Description of Artificial Sequence: Synthetic oligonucleotide
  Sense strand starting at position 2776 of SEQ ID NO: 1879856
auguuugcugcccaacaca

SEQ ID NO: 1936293 - RNA, 19 nt, Artificial Sequence
  Description of Artificial Sequence: Synthetic oligonucleotide
  Antisense strand to SEQ ID NO: 1936292
uguguugggcagcaaacau

SEQ ID NO: 1936294 - RNA, 19 nt, Artificial Sequence
  Description of Artificial Sequence: Synthetic oligonucleotide
  Sense strand starting at position 2984 of SEQ ID NO: 1879856
ugaauugucuuugccuaau

SEQ ID NO: 1936295 - RNA, 19 nt, Artificial Sequence
  Description of Artificial Sequence: Synthetic oligonucleotide
  Antisense strand to SEQ ID NO: 1936294
auuaggcaaagacaauuca

SEQ ID NO: 1936296 - RNA, 19 nt, Artificial Sequence
  Description of Artificial Sequence: Synthetic oligonucleotide
  Sense strand starting at position 3172 of SEQ ID NO: 1879856
auucuuaaguuagugcaga

SEQ ID NO: 1936297 - RNA, 19 nt, Artificial Sequence
  Description of Artificial Sequence: Synthetic oligonucleotide
  Antisense strand to SEQ ID NO: 1936296
ucugcacuaacuuaagaau

SEQ ID NO: 1936298 - RNA, 19 nt, Artificial Sequence
  Description of Artificial Sequence: Synthetic oligonucleotide
  Sense strand starting at position 3254 of SEQ ID NO: 1879856
ccaauagaauguguauucu

SEQ ID NO: 1936299 - RNA, 19 nt, Artificial Sequence
  Description of Artificial Sequence: Synthetic oligonucleotide
  Antisense strand to SEQ ID NO: 1936298
agaauacacauucuauugg

SEQ ID NO: 1936300 - RNA, 19 nt, Artificial Sequence
  Description of Artificial Sequence: Synthetic oligonucleotide
  Sense strand starting at position 3262 of SEQ ID NO: 1879856
auguguauucuguaucuuu

SEQ ID NO: 1936301 - RNA, 19 nt, Artificial Sequence
  Description of Artificial Sequence: Synthetic oligonucleotide
  Antisense strand to SEQ ID NO: 1936300
aaagauacagaauacacau

SEQ ID NO: 1936302 - RNA, 19 nt, Artificial Sequence
  Description of Artificial Sequence: Synthetic oligonucleotide
  Sense strand starting at position 3299 of SEQ ID NO: 1879856
uuacauagacuuuguggau

SEQ ID NO: 1936303 - RNA, 19 nt, Artificial Sequence
  Description of Artificial Sequence: Synthetic oligonucleotide
  Antisense strand to SEQ ID NO: 1936302
auccacaaagucuauguaa

SEQ ID NO: 1936304 - RNA, 19 nt, Artificial Sequence
  Description of Artificial Sequence: Synthetic oligonucleotide
  Sense strand starting at position 3330 of SEQ ID NO: 1879856
augaaaggaucauaagaau

SEQ ID NO: 1936305 - RNA, 19 nt, Artificial Sequence
  Description of Artificial Sequence: Synthetic oligonucleotide
  Antisense strand to SEQ ID NO: 1936304
auucuuaugauccuuucau

SEQ ID NO: 1936306 - RNA, 19 nt, Artificial Sequence
  Description of Artificial Sequence: Synthetic oligonucleotide
  Sense strand starting at position 3353 of SEQ ID NO: 1879856
aucaauuauuuaggaggau

SEQ ID NO: 1936307 - RNA, 19 nt, Artificial Sequence
  Description of Artificial Sequence: Synthetic oligonucleotide
  Antisense strand to SEQ ID NO: 1936306
auccuccuaaauaauugau

SEQ ID NO: 1936308 - RNA, 19 nt, Artificial Sequence
  Description of Artificial Sequence: Synthetic oligonucleotide
  Sense strand starting at position 3354 of SEQ ID NO: 1879856
ucaauuauuuaggaggauc

SEQ ID NO: 1936309 - RNA, 19 nt, Artificial Sequence
  Description of Artificial Sequence: Synthetic oligonucleotide
  Antisense strand to SEQ ID NO: 1936308
gauccuccuaaauaauuga

SEQ ID NO: 1936310 - RNA, 19 nt, Artificial Sequence
  Description of Artificial Sequence: Synthetic oligonucleotide
  Sense strand starting at position 3494 of SEQ ID NO: 1879856
cuugacaguuuccugggua

SEQ ID NO: 1936311 - RNA, 19 nt, Artificial Sequence
  Description of Artificial Sequence: Synthetic oligonucleotide
  Antisense strand to SEQ ID NO: 1936310
uacccaggaaacugucaag

SEQ ID NO: 1936312 - RNA, 19 nt, Artificial Sequence
  Description of Artificial Sequence: Synthetic oligonucleotide
  Sense strand starting at position 3497 of SEQ ID NO: 1879856
gacaguuuccuggguauag

SEQ ID NO: 1936313 - RNA, 19 nt, Artificial Sequence
  Description of Artificial Sequence: Synthetic oligonucleotide
  Antisense strand to SEQ ID NO: 1936312
cuauacccaggaaacuguc

SEQ ID NO: 1936314 - RNA, 19 nt, Artificial Sequence
  Description of Artificial Sequence: Synthetic oligonucleotide
  Sense strand starting at position 3522 of SEQ ID NO: 1879856
cgagcauucuucuccagau

SEQ ID NO: 1936315 - RNA, 19 nt, Artificial Sequence
  Description of Artificial Sequence: Synthetic oligonucleotide
  Antisense strand to SEQ ID NO: 1936314
aucuggagaagaaugcucg

SEQ ID NO: 1936316 - RNA, 19 nt, Artificial Sequence
  Description of Artificial Sequence: Synthetic oligonucleotide
  Sense strand starting at position 3524 of SEQ ID NO: 1879856
agcauucuucuccagauag

SEQ ID NO: 1936317 - RNA, 19 nt, Artificial Sequence
  Description of Artificial Sequence: Synthetic oligonucleotide
  Antisense strand to SEQ ID NO: 1936316
cuaucuggagaagaaugcu

SEQ ID NO: 1936318 - RNA, 19 nt, Artificial Sequence
  Description of Artificial Sequence: Synthetic oligonucleotide
  Sense strand starting at position 3582 of SEQ ID NO: 1879856
gacugaagucuuuaggcuu

SEQ ID NO: 1936319 - RNA, 19 nt, Artificial Sequence
  Description of Artificial Sequence: Synthetic oligonucleotide
  Antisense strand to SEQ ID NO: 1936318
aagccuaaagacuucaguc

SEQ ID NO: 1936320 - RNA, 19 nt, Artificial Sequence
  Description of Artificial Sequence: Synthetic oligonucleotide
  Sense strand starting at position 3585 of SEQ ID NO: 1879856
ugaagucuuuaggcuuaaa

SEQ ID NO: 1936321 - RNA, 19 nt, Artificial Sequence
  Description of Artificial Sequence: Synthetic oligonucleotide
  Antisense strand to SEQ ID NO: 1936320
uuuaagccuaaagacuuca

SEQ ID NO: 1936322 - RNA, 19 nt, Artificial Sequence
  Description of Artificial Sequence: Synthetic oligonucleotide
  Sense strand starting at position 3588 of SEQ ID NO: 1879856
agucuuuaggcuuaaauau

SEQ ID NO: 1936323 - RNA, 19 nt, Artificial Sequence
  Description of Artificial Sequence: Synthetic oligonucleotide
  Antisense strand to SEQ ID NO: 1936322
auauuuaagccuaaagacu

SEQ ID NO: 1936324 - RNA, 19 nt, Artificial Sequence
  Description of Artificial Sequence: Synthetic oligonucleotide
  Sense strand starting at position 3624 of SEQ ID NO: 1879856
ucagcagaccuuugaggaa

SEQ ID NO: 1936325 - RNA, 19 nt, Artificial Sequence
  Description of Artificial Sequence: Synthetic oligonucleotide
  Antisense strand to SEQ ID NO: 1936324
uuccucaaaggucugcuga

SEQ ID NO: 1936326 - RNA, 19 nt, Artificial Sequence
  Description of Artificial Sequence: Synthetic oligonucleotide
  Sense strand starting at position 3642 of SEQ ID NO: 1879856
aguguaacaaugugaaaga

SEQ ID NO: 1936327 - RNA, 19 nt, Artificial Sequence
  Description of Artificial Sequence: Synthetic oligonucleotide
  Antisense strand to SEQ ID NO: 1936326
ucuuucacauuguuacacu

SEQ ID NO: 1936328 - RNA, 19 nt, Artificial Sequence
  Description of Artificial Sequence: Synthetic oligonucleotide
  Sense strand starting at position 3878 of SEQ ID NO: 1879856
ggaugugacagguaacgau

SEQ ID NO: 1936329 - RNA, 19 nt, Artificial Sequence
  Description of Artificial Sequence: Synthetic oligonucleotide
  Antisense strand to SEQ ID NO: 1936328
aucguuaccugucacaucc

SEQ ID NO: 1936330 - RNA, 19 nt, Artificial Sequence
  Description of Artificial Sequence: Synthetic oligonucleotide
  Sense strand starting at position 105 of SEQ ID NO: 1879857
gucuaugcaucugacaauc

SEQ ID NO: 1936331 - RNA, 19 nt, Artificial Sequence
  Description of Artificial Sequence: Synthetic oligonucleotide
  Antisense strand to SEQ ID NO: 1936330
gauugucagaugcauagac

SEQ ID NO: 1936332 - RNA, 19 nt, Artificial Sequence
  Description of Artificial Sequence: Synthetic oligonucleotide
  Sense strand starting at position 107 of SEQ ID NO: 1879857
cuaugcaucugacaaucga

SEQ ID NO: 1936333 - RNA, 19 nt, Artificial Sequence
  Description of Artificial Sequence: Synthetic oligonucleotide
  Antisense strand to SEQ ID NO: 1936332
ucgauugucagaugcauag

SEQ ID NO: 1936334 - RNA, 19 nt, Artificial Sequence
  Description of Artificial Sequence: Synthetic oligonucleotide
  Sense strand starting at position 201 of SEQ ID NO: 1879857
ggcuaagggacuugaauag

SEQ ID NO: 1936335 - RNA, 19 nt, Artificial Sequence
  Description of Artificial Sequence: Synthetic oligonucleotide
  Antisense strand to SEQ ID NO: 1936334
cuauucaagucccuuagcc

SEQ ID NO: 1936336 - RNA, 19 nt, Artificial Sequence
  Description of Artificial Sequence: Synthetic oligonucleotide
  Sense strand starting at position 423 of SEQ ID NO: 1879857
ugugaacuguuacaagacu

SEQ ID NO: 1936337 - RNA, 19 nt, Artificial Sequence
  Description of Artificial Sequence: Synthetic oligonucleotide
  Antisense strand to SEQ ID NO: 1936336
agucuuguaacaguucaca

SEQ ID NO: 1936338 - RNA, 19 nt, Artificial Sequence
  Description of Artificial Sequence: Synthetic oligonucleotide
  Sense strand starting at position 512 of SEQ ID NO: 1879857
caagguuaguacucagaag

SEQ ID NO: 1936339 - RNA, 19 nt, Artificial Sequence
  Description of Artificial Sequence: Synthetic oligonucleotide
  Antisense strand to SEQ ID NO: 1936338
cuucugaguacuaaccuug

SEQ ID NO: 1936340 - RNA, 19 nt, Artificial Sequence
  Description of Artificial Sequence: Synthetic oligonucleotide
  Sense strand starting at position 559 of SEQ ID NO: 1879857
uuacauguugcauguuuau

SEQ ID NO: 1936341 - RNA, 19 nt, Artificial Sequence
  Description of Artificial Sequence: Synthetic oligonucleotide
  Antisense strand to SEQ ID NO: 1936340
auaaacaugcaacauguaa

SEQ ID NO: 1936342 - RNA, 19 nt, Artificial Sequence
  Description of Artificial Sequence: Synthetic oligonucleotide
  Sense strand starting at position 565 of SEQ ID NO: 1879857
guugcauguuuauagcaac

SEQ ID NO: 1936343 - RNA, 19 nt, Artificial Sequence
  Description of Artificial Sequence: Synthetic oligonucleotide
  Antisense strand to SEQ ID NO: 1936342
guugcuauaaacaugcaac

SEQ ID NO: 1936344 - RNA, 19 nt, Artificial Sequence
  Description of Artificial Sequence: Synthetic oligonucleotide
  Sense strand starting at position 753 of SEQ ID NO: 1879857
auuggagacuaucauacaa

SEQ ID NO: 1936345 - RNA, 19 nt, Artificial Sequence
  Description of Artificial Sequence: Synthetic oligonucleotide
  Antisense strand to SEQ ID NO: 1936344
uuguaugauagucuccaau

SEQ ID NO: 1936346 - RNA, 19 nt, Artificial Sequence
  Description of Artificial Sequence: Synthetic oligonucleotide
  Sense strand starting at position 755 of SEQ ID NO: 1879857
uggagacuaucauacaaag

SEQ ID NO: 1936347 - RNA, 19 nt, Artificial Sequence
  Description of Artificial Sequence: Synthetic oligonucleotide
  Antisense strand to SEQ ID NO: 1936346
cuuuguaugauagucucca

SEQ ID NO: 1936348 - RNA, 19 nt, Artificial Sequence
  Description of Artificial Sequence: Synthetic oligonucleotide
  Sense strand starting at position 827 of SEQ ID NO: 1879857
ccagcuaaguuaugagaca

SEQ ID NO: 1936349 - RNA, 19 nt, Artificial Sequence
  Description of Artificial Sequence: Synthetic oligonucleotide
  Antisense strand to SEQ ID NO: 1936348
ugucucauaacuuagcugg

SEQ ID NO: 1936350 - RNA, 19 nt, Artificial Sequence
  Description of Artificial Sequence: Synthetic oligonucleotide
  Sense strand starting at position 828 of SEQ ID NO: 1879857
cagcuaaguuaugagacau

SEQ ID NO: 1936351 - RNA, 19 nt, Artificial Sequence
  Description of Artificial Sequence: Synthetic oligonucleotide
  Antisense strand to SEQ ID NO: 1936350
augucucauaacuuagcug

SEQ ID NO: 1936352 - RNA, 19 nt, Artificial Sequence
  Description of Artificial Sequence: Synthetic oligonucleotide
  Sense strand starting at position 838 of SEQ ID NO: 1879857
augagacauccaggcauaa

SEQ ID NO: 1936353 - RNA, 19 nt, Artificial Sequence
  Description of Artificial Sequence: Synthetic oligonucleotide
  Antisense strand to SEQ ID NO: 1936352
uuaugccuggaugucucau

SEQ ID NO: 1936354 - RNA, 19 nt, Artificial Sequence
  Description of Artificial Sequence: Synthetic oligonucleotide
  Sense strand starting at position 934 of SEQ ID NO: 1879857
gugaacacuacuugguuga

SEQ ID NO: 1936355 - RNA, 19 nt, Artificial Sequence
  Description of Artificial Sequence: Synthetic oligonucleotide
  Antisense strand to SEQ ID NO: 1936354
ucaaccaaguaguguucac

SEQ ID NO: 1936356 - RNA, 19 nt, Artificial Sequence
  Description of Artificial Sequence: Synthetic oligonucleotide
  Sense strand starting at position 935 of SEQ ID NO: 1879857
ugaacacuacuugguugau

SEQ ID NO: 1936357 - RNA, 19 nt, Artificial Sequence
  Description of Artificial Sequence: Synthetic oligonucleotide
  Antisense strand to SEQ ID NO: 1936356
aucaaccaaguaguguuca

SEQ ID NO: 1936358 - RNA, 19 nt, Artificial Sequence
  Description of Artificial Sequence: Synthetic oligonucleotide
  Sense strand starting at position 1075 of SEQ ID NO: 1879857
cuuauauuguagucacaac

SEQ ID NO: 1936359 - RNA, 19 nt, Artificial Sequence
  Description of Artificial Sequence: Synthetic oligonucleotide
  Antisense strand to SEQ ID NO: 1936358
guugugacuacaauauaag

SEQ ID NO: 1936360 - RNA, 19 nt, Artificial Sequence
  Description of Artificial Sequence: Synthetic oligonucleotide
  Sense strand starting at position 1223 of SEQ ID NO: 1879857
agaauaauuuagcagacau

SEQ ID NO: 1936361 - RNA, 19 nt, Artificial Sequence
  Description of Artificial Sequence: Synthetic oligonucleotide
  Antisense strand to SEQ ID NO: 1936360
augucugcuaaauuauucu

SEQ ID NO: 1936362 - RNA, 19 nt, Artificial Sequence
  Description of Artificial Sequence: Synthetic oligonucleotide
  Sense strand starting at position 2278 of SEQ ID NO: 1879857
aaagcaugugauuguggua

SEQ ID NO: 1936363 - RNA, 19 nt, Artificial Sequence
  Description of Artificial Sequence: Synthetic oligonucleotide
  Antisense strand to SEQ ID NO: 1936362
uaccacaaucacaugcuuu

SEQ ID NO: 1936364 - RNA, 19 nt, Artificial Sequence
  Description of Artificial Sequence: Synthetic oligonucleotide
  Sense strand starting at position 2281 of SEQ ID NO: 1879857
gcaugugauugugguaaau

SEQ ID NO: 1936365 - RNA, 19 nt, Artificial Sequence
  Description of Artificial Sequence: Synthetic oligonucleotide
  Antisense strand to SEQ ID NO: 1936364
auuuaccacaaucacaugc

SEQ ID NO: 1936366 - RNA, 19 nt, Artificial Sequence
  Description of Artificial Sequence: Synthetic oligonucleotide
  Sense strand starting at position 2283 of SEQ ID NO: 1879857
augugauugugguaaauuc

SEQ ID NO: 1936367 - RNA, 19 nt, Artificial Sequence
  Description of Artificial Sequence: Synthetic oligonucleotide
  Antisense strand to SEQ ID NO: 1936366
gaauuuaccacaaucacau

SEQ ID NO: 1936368 - RNA, 19 nt, Artificial Sequence
  Description of Artificial Sequence: Synthetic oligonucleotide
  Sense strand starting at position 2290 of SEQ ID NO: 1879857
ugugguaaauucuguaguu

SEQ ID NO: 1936369 - RNA, 19 nt, Artificial Sequence
  Description of Artificial Sequence: Synthetic oligonucleotide
  Antisense strand to SEQ ID NO: 1936368
aacuacagaauuuaccaca

SEQ ID NO: 1936370 - RNA, 19 nt, Artificial Sequence
  Description of Artificial Sequence: Synthetic oligonucleotide
  Sense strand starting at position 2291 of SEQ ID NO: 1879857
gugguaaauucuguaguug

SEQ ID NO: 1936371 - RNA, 19 nt, Artificial Sequence
  Description of Artificial Sequence: Synthetic oligonucleotide
  Antisense strand to SEQ ID NO: 1936370
caacuacagaauuuaccac

SEQ ID NO: 1936372 - RNA, 19 nt, Artificial Sequence
  Description of Artificial Sequence: Synthetic oligonucleotide
  Sense strand starting at position 2292 of SEQ ID NO: 1879857
ugguaaauucuguaguuga

SEQ ID NO: 1936373 - RNA, 19 nt, Artificial Sequence
  Description of Artificial Sequence: Synthetic oligonucleotide
  Antisense strand to SEQ ID NO: 1936372
ucaacuacagaauuuacca

SEQ ID NO: 1936374 - RNA, 19 nt, Artificial Sequence
  Description of Artificial Sequence: Synthetic oligonucleotide
  Sense strand starting at position 2297 of SEQ ID NO: 1879857
aauucuguaguugagugau

SEQ ID NO: 1936375 - RNA, 19 nt, Artificial Sequence
  Description of Artificial Sequence: Synthetic oligonucleotide
  Antisense strand to SEQ ID NO: 1936374
aucacucaacuacagaauu

SEQ ID NO: 1936376 - RNA, 19 nt, Artificial Sequence
  Description of Artificial Sequence: Synthetic oligonucleotide
  Sense strand starting at position 2299 of SEQ ID NO: 1879857
uucuguaguugagugauca

SEQ ID NO: 1936377 - RNA, 19 nt, Artificial Sequence
  Description of Artificial Sequence: Synthetic oligonucleotide
  Antisense strand to SEQ ID NO: 1936376
ugaucacucaacuacagaa

SEQ ID NO: 1936378 - RNA, 19 nt, Artificial Sequence
  Description of Artificial Sequence: Synthetic oligonucleotide
  Sense strand starting at position 2300 of SEQ ID NO: 1879857
ucuguaguugagugaucaa

SEQ ID NO: 1936379 - RNA, 19 nt, Artificial Sequence
  Description of Artificial Sequence: Synthetic oligonucleotide
  Antisense strand to SEQ ID NO: 1936378
uugaucacucaacuacaga

SEQ ID NO: 1936380 - RNA, 19 nt, Artificial Sequence
  Description of Artificial Sequence: Synthetic oligonucleotide
  Sense strand starting at position 2303 of SEQ ID NO: 1879857
guaguugagugaucaauac

SEQ ID NO: 1936381 - RNA, 19 nt, Artificial Sequence
  Description of Artificial Sequence: Synthetic oligonucleotide
  Antisense strand to SEQ ID NO: 1936380
guauugaucacucaacuac

SEQ ID NO: 1936382 - RNA, 19 nt, Artificial Sequence
  Description of Artificial Sequence: Synthetic oligonucleotide
  Sense strand starting at position 2307 of SEQ ID NO: 1879857
uugagugaucaauacagca

SEQ ID NO: 1936383 - RNA, 19 nt, Artificial Sequence
  Description of Artificial Sequence: Synthetic oligonucleotide
  Antisense strand to SEQ ID NO: 1936382
ugcuguauugaucacucaa

SEQ ID NO: 1936384 - RNA, 19 nt, Artificial Sequence
  Description of Artificial Sequence: Synthetic oligonucleotide
  Sense strand starting at position 2343 of SEQ ID NO: 1879857
cucaaagguuaagaauuau

SEQ ID NO: 1936385 - RNA, 19 nt, Artificial Sequence
  Description of Artificial Sequence: Synthetic oligonucleotide
  Antisense strand to SEQ ID NO: 1936384
auaauucuuaaccuuugag

SEQ ID NO: 1936386 - RNA, 19 nt, Artificial Sequence
  Description of Artificial Sequence: Synthetic oligonucleotide
  Sense strand starting at position 2349 of SEQ ID NO: 1879857
gguuaagaauuauagaauc

SEQ ID NO: 1936387 - RNA, 19 nt, Artificial Sequence
  Description of Artificial Sequence: Synthetic oligonucleotide
  Antisense strand to SEQ ID NO: 1936386
gauucuauaauucuuaacc

SEQ ID NO: 1936388 - RNA, 19 nt, Artificial Sequence
  Description of Artificial Sequence: Synthetic oligonucleotide
  Sense strand starting at position 2386 of SEQ ID NO: 1879857
ucagcacugucucacuuau

SEQ ID NO: 1936389 - RNA, 19 nt, Artificial Sequence
  Description of Artificial Sequence: Synthetic oligonucleotide
  Antisense strand to SEQ ID NO: 1936388
auaagugagacagugcuga

SEQ ID NO: 1936390 - RNA, 19 nt, Artificial Sequence
  Description of Artificial Sequence: Synthetic oligonucleotide
  Sense strand starting at position 39 of SEQ ID NO: 1879858
cacuuagugcuaugugaug

SEQ ID NO: 1936391 - RNA, 19 nt, Artificial Sequence
  Description of Artificial Sequence: Synthetic oligonucleotide
  Antisense strand to SEQ ID NO: 1936390
caucacauagcacuaagug

SEQ ID NO: 1936392 - RNA, 19 nt, Artificial Sequence
  Description of Artificial Sequence: Synthetic oligonucleotide
  Sense strand starting at position 50 of SEQ ID NO: 1879858
augugauguugagcaaauu

SEQ ID NO: 1936393 - RNA, 19 nt, Artificial Sequence
  Description of Artificial Sequence: Synthetic oligonucleotide
  Antisense strand to SEQ ID NO: 1936392
aauuugcucaacaucacau

SEQ ID NO: 1936394 - RNA, 19 nt, Artificial Sequence
  Description of Artificial Sequence: Synthetic oligonucleotide
  Sense strand starting at position 58 of SEQ ID NO: 1879858
uugagcaaauugcuuuaaa

SEQ ID NO: 1936395 - RNA, 19 nt, Artificial Sequence
  Description of Artificial Sequence: Synthetic oligonucleotide
  Antisense strand to SEQ ID NO: 1936394
uuuaaagcaauuugcucaa

SEQ ID NO: 1936396 - RNA, 19 nt, Artificial Sequence
  Description of Artificial Sequence: Synthetic oligonucleotide
  Sense strand starting at position 148 of SEQ ID NO: 1879858
aguuauuaggagugaaaug

SEQ ID NO: 1936397 - RNA, 19 nt, Artificial Sequence
  Description of Artificial Sequence: Synthetic oligonucleotide
  Antisense strand to SEQ ID NO: 1936396
cauuucacuccuaauaacu

SEQ ID NO: 1936398 - RNA, 19 nt, Artificial Sequence
  Description of Artificial Sequence: Synthetic oligonucleotide
  Sense strand starting at position 429 of SEQ ID NO: 1879858
aucggcuaucgucaacuau

SEQ ID NO: 1936399 - RNA, 19 nt, Artificial Sequence
  Description of Artificial Sequence: Synthetic oligonucleotide
  Antisense strand to SEQ ID NO: 1936398
auaguugacgauagccgau

SEQ ID NO: 1936400 - RNA, 19 nt, Artificial Sequence
  Description of Artificial Sequence: Synthetic oligonucleotide
  Sense strand starting at position 464 of SEQ ID NO: 1879858
guaccuuucuaaguaaguu

SEQ ID NO: 1936401 - RNA, 19 nt, Artificial Sequence
  Description of Artificial Sequence: Synthetic oligonucleotide
  Antisense strand to SEQ ID NO: 1936400
aacuuacuuagaaagguac

SEQ ID NO: 1936402 - RNA, 19 nt, Artificial Sequence
  Description of Artificial Sequence: Synthetic oligonucleotide
  Sense strand starting at position 992 of SEQ ID NO: 1879858
ugucucucuucgcugacaa

SEQ ID NO: 1936403 - RNA, 19 nt, Artificial Sequence
  Description of Artificial Sequence: Synthetic oligonucleotide
  Antisense strand to SEQ ID NO: 1936402
uugucagcgaagagagaca

SEQ ID NO: 1936404 - RNA, 19 nt, Artificial Sequence
  Description of Artificial Sequence: Synthetic oligonucleotide
  Sense strand starting at position 993 of SEQ ID NO: 1879858
gucucucuucgcugacaag

SEQ ID NO: 1936405 - RNA, 19 nt, Artificial Sequence
  Description of Artificial Sequence: Synthetic oligonucleotide
  Antisense strand to SEQ ID NO: 1936404
cuugucagcgaagagagac

SEQ ID NO: 1936406 - RNA, 19 nt, Artificial Sequence
  Description of Artificial Sequence: Synthetic oligonucleotide
  Sense strand starting at position 994 of SEQ ID NO: 1879858
ucucucuucgcugacaaga

SEQ ID NO: 1936407 - RNA, 19 nt, Artificial Sequence
  Description of Artificial Sequence: Synthetic oligonucleotide
  Antisense strand to SEQ ID NO: 1936406
ucuugucagcgaagagaga

SEQ ID NO: 1936408 - RNA, 19 nt, Artificial Sequence
  Description of Artificial Sequence: Synthetic oligonucleotide
  Sense strand starting at position 1011 of SEQ ID NO: 1879858
gagucucgcguguaggaaa

SEQ ID NO: 1936409 - RNA, 19 nt, Artificial Sequence
  Description of Artificial Sequence: Synthetic oligonucleotide
  Antisense strand to SEQ ID NO: 1936408
uuuccuacacgcgagacuc

SEQ ID NO: 1936410 - RNA, 19 nt, Artificial Sequence
  Description of Artificial Sequence: Synthetic oligonucleotide
  Sense strand starting at position 1022 of SEQ ID NO: 1879858
guaggaaauccuuggcucu

SEQ ID NO: 1936411 - RNA, 19 nt, Artificial Sequence
  Description of Artificial Sequence: Synthetic oligonucleotide
  Antisense strand to SEQ ID NO: 1936410
agagccaaggauuuccuac

SEQ ID NO: 1936412 - RNA, 19 nt, Artificial Sequence
  Description of Artificial Sequence: Synthetic oligonucleotide
  Sense strand starting at position 1024 of SEQ ID NO: 1879858
aggaaauccuuggcucuca

SEQ ID NO: 1936413 - RNA, 19 nt, Artificial Sequence
  Description of Artificial Sequence: Synthetic oligonucleotide
  Antisense strand to SEQ ID NO: 1936412
ugagagccaaggauuuccu

SEQ ID NO: 1936414 - RNA, 19 nt, Artificial Sequence
  Description of Artificial Sequence: Synthetic oligonucleotide
  Sense strand starting at position 1025 of SEQ ID NO: 1879858
ggaaauccuuggcucucaa

SEQ ID NO: 1936415 - RNA, 19 nt, Artificial Sequence
  Description of Artificial Sequence: Synthetic oligonucleotide
  Antisense strand to SEQ ID NO: 1936414
uugagagccaaggauuucc

SEQ ID NO: 1936416 - RNA, 19 nt, Artificial Sequence
  Description of Artificial Sequence: Synthetic oligonucleotide
  Sense strand starting at position 1063 of SEQ ID NO: 1879858
gcucgccucccgcuaaaua

SEQ ID NO: 1936417 - RNA, 19 nt, Artificial Sequence
  Description of Artificial Sequence: Synthetic oligonucleotide
  Antisense strand to SEQ ID NO: 1936416
uauuuagcgggaggcgagc

SEQ ID NO: 1936418 - RNA, 19 nt, Artificial Sequence
  Description of Artificial Sequence: Synthetic oligonucleotide
  Sense strand starting at position 1085 of SEQ ID NO: 1879858
gggugcgucccuugaauga

SEQ ID NO: 1936419 - RNA, 19 nt, Artificial Sequence
  Description of Artificial Sequence: Synthetic oligonucleotide
  Antisense strand to SEQ ID NO: 1936418
ucauucaagggacgcaccc

SEQ ID NO: 1936420 - RNA, 19 nt, Artificial Sequence
  Description of Artificial Sequence: Synthetic oligonucleotide
  Sense strand starting at position 1089 of SEQ ID NO: 1879858
gcgucccuugaaugagaca

SEQ ID NO: 1936421 - RNA, 19 nt, Artificial Sequence
  Description of Artificial Sequence: Synthetic oligonucleotide
  Antisense strand to SEQ ID NO: 1936420
ugucucauucaagggacgc

SEQ ID NO: 1936422 - RNA, 19 nt, Artificial Sequence
  Description of Artificial Sequence: Synthetic oligonucleotide
  Sense strand starting at position 1191 of SEQ ID NO: 1879858
uggccacuccuccgaggaa

SEQ ID NO: 1936423 - RNA, 19 nt, Artificial Sequence
  Description of Artificial Sequence: Synthetic oligonucleotide
  Antisense strand to SEQ ID NO: 1936422
uuccucggaggaguggcca

SEQ ID NO: 1936424 - RNA, 19 nt, Artificial Sequence
  Description of Artificial Sequence: Synthetic oligonucleotide
  Sense strand starting at position 1274 of SEQ ID NO: 1879858
caguguaaaguccaugaca

SEQ ID NO: 1936425 - RNA, 19 nt, Artificial Sequence
  Description of Artificial Sequence: Synthetic oligonucleotide
  Antisense strand to SEQ ID NO: 1936424
ugucauggacuuuacacug

SEQ ID NO: 1936426 - RNA, 19 nt, Artificial Sequence
  Description of Artificial Sequence: Synthetic oligonucleotide
  Sense strand starting at position 1276 of SEQ ID NO: 1879858
guguaaaguccaugacaac

SEQ ID NO: 1936427 - RNA, 19 nt, Artificial Sequence
  Description of Artificial Sequence: Synthetic oligonucleotide
  Antisense strand to SEQ ID NO: 1936426
guugucauggacuuuacac

SEQ ID NO: 1936428 - RNA, 19 nt, Artificial Sequence
  Description of Artificial Sequence: Synthetic oligonucleotide
  Sense strand starting at position 1438 of SEQ ID NO: 1879858
ucagacagcuaguuucuau

SEQ ID NO: 1936429 - RNA, 19 nt, Artificial Sequence
  Description of Artificial Sequence: Synthetic oligonucleotide
  Antisense strand to SEQ ID NO: 1936428
auagaaacuagcugucuga

SEQ ID NO: 1936430 - RNA, 19 nt, Artificial Sequence
  Description of Artificial Sequence: Synthetic oligonucleotide
  Sense strand starting at position 1442 of SEQ ID NO: 1879858
acagcuaguuucuauuuau

SEQ ID NO: 1936431 - RNA, 19 nt, Artificial Sequence
  Description of Artificial Sequence: Synthetic oligonucleotide
  Antisense strand to SEQ ID NO: 1936430
auaaauagaaacuagcugu

SEQ ID NO: 1936432 - RNA, 19 nt, Artificial Sequence
  Description of Artificial Sequence: Synthetic oligonucleotide
  Sense strand starting at position 1490 of SEQ ID NO: 1879858
uuggcuauccgagacguaa

SEQ ID NO: 1936433 - RNA, 19 nt, Artificial Sequence
  Description of Artificial Sequence: Synthetic oligonucleotide
  Antisense strand to SEQ ID NO: 1936432
uuacgucucggauagccaa

SEQ ID NO: 1936434 - RNA, 19 nt, Artificial Sequence
  Description of Artificial Sequence: Synthetic oligonucleotide
  Sense strand starting at position 1644 of SEQ ID NO: 1879858
aaggacucaccguguagua

SEQ ID NO: 1936435 - RNA, 19 nt, Artificial Sequence
  Description of Artificial Sequence: Synthetic oligonucleotide
  Antisense strand to SEQ ID NO: 1936434
uacuacacggugaguccuu

SEQ ID NO: 1936436 - RNA, 19 nt, Artificial Sequence
  Description of Artificial Sequence: Synthetic oligonucleotide
  Sense strand starting at position 2002 of SEQ ID NO: 1879858
cugucaugggauuagagua

SEQ ID NO: 1936437 - RNA, 19 nt, Artificial Sequence
  Description of Artificial Sequence: Synthetic oligonucleotide
  Antisense strand to SEQ ID NO: 1936436
uacucuaaucccaugacag

SEQ ID NO: 1936438 - RNA, 19 nt, Artificial Sequence
  Description of Artificial Sequence: Synthetic oligonucleotide
  Sense strand starting at position 2164 of SEQ ID NO: 1879858
ggcauucuucuagacauug

SEQ ID NO: 1936439 - RNA, 19 nt, Artificial Sequence
  Description of Artificial Sequence: Synthetic oligonucleotide
  Antisense strand to SEQ ID NO: 1936438
caaugucuagaagaaugcc

SEQ ID NO: 1936440 - RNA, 19 nt, Artificial Sequence
  Description of Artificial Sequence: Synthetic oligonucleotide
  Sense strand starting at position 2258 of SEQ ID NO: 1879858
ucauaaaugcuauggagaa

SEQ ID NO: 1936441 - RNA, 19 nt, Artificial Sequence
  Description of Artificial Sequence: Synthetic oligonucleotide
  Antisense strand to SEQ ID NO: 1936440
uucuccauagcauuuauga

SEQ ID NO: 1936442 - RNA, 19 nt, Artificial Sequence
  Description of Artificial Sequence: Synthetic oligonucleotide
  Sense strand starting at position 2459 of SEQ ID NO: 1879858
uggcaucuugagggaucaa

SEQ ID NO: 1936443 - RNA, 19 nt, Artificial Sequence
  Description of Artificial Sequence: Synthetic oligonucleotide
  Antisense strand to SEQ ID NO: 1936442
uugaucccucaagaugcca

SEQ ID NO: 1936444 - RNA, 19 nt, Artificial Sequence
  Description of Artificial Sequence: Synthetic oligonucleotide
  Sense strand starting at position 2755 of SEQ ID NO: 1879858
cuagcugaggcacaagaau

SEQ ID NO: 1936445 - RNA, 19 nt, Artificial Sequence
  Description of Artificial Sequence: Synthetic oligonucleotide
  Antisense strand to SEQ ID NO: 1936444
auucuugugccucagcuag

SEQ ID NO: 1936446 - RNA, 19 nt, Artificial Sequence
  Description of Artificial Sequence: Synthetic oligonucleotide
  Sense strand starting at position 2910 of SEQ ID NO: 1879858
guuggagguccugggaaua

SEQ ID NO: 1936447 - RNA, 19 nt, Artificial Sequence
  Description of Artificial Sequence: Synthetic oligonucleotide
  Antisense strand to SEQ ID NO: 1936446
uauucccaggaccuccaac

SEQ ID NO: 1936448 - RNA, 19 nt, Artificial Sequence
  Description of Artificial Sequence: Synthetic oligonucleotide
  Sense strand starting at position 2952 of SEQ ID NO: 1879858
agcuuaaauucugugguga

SEQ ID NO: 1936449 - RNA, 19 nt, Artificial Sequence
  Description of Artificial Sequence: Synthetic oligonucleotide
  Antisense strand to SEQ ID NO: 1936448
ucaccacagaauuuaagcu

SEQ ID NO: 1936450 - RNA, 19 nt, Artificial Sequence
  Description of Artificial Sequence: Synthetic oligonucleotide
  Sense strand starting at position 2953 of SEQ ID NO: 1879858
gcuuaaauucuguggugaa

SEQ ID NO: 1936451 - RNA, 19 nt, Artificial Sequence
  Description of Artificial Sequence: Synthetic oligonucleotide
  Antisense strand to SEQ ID NO: 1936450
uucaccacagaauuuaagc

SEQ ID NO: 1936452 - RNA, 19 nt, Artificial Sequence
  Description of Artificial Sequence: Synthetic oligonucleotide
  Sense strand starting at position 2957 of SEQ ID NO: 1879858
aaauucuguggugaaagca

SEQ ID NO: 1936453 - RNA, 19 nt, Artificial Sequence
  Description of Artificial Sequence: Synthetic oligonucleotide
  Antisense strand to SEQ ID NO: 1936452
ugcuuucaccacagaauuu

SEQ ID NO: 1936454 - RNA, 19 nt, Artificial Sequence
  Description of Artificial Sequence: Synthetic oligonucleotide
  Sense strand starting at position 3116 of SEQ ID NO: 1879858
aaacuuagauauggaggau

SEQ ID NO: 1936455 - RNA, 19 nt, Artificial Sequence
  Description of Artificial Sequence: Synthetic oligonucleotide
  Antisense strand to SEQ ID NO: 1936454
auccuccauaucuaaguuu

SEQ ID NO: 1936456 - RNA, 19 nt, Artificial Sequence
  Description of Artificial Sequence: Synthetic oligonucleotide
  Sense strand starting at position 3280 of SEQ ID NO: 1879858
agaauauuacuuugcugau

SEQ ID NO: 1936457 - RNA, 19 nt, Artificial Sequence
  Description of Artificial Sequence: Synthetic oligonucleotide
  Antisense strand to SEQ ID NO: 1936456
aucagcaaaguaauauucu

SEQ ID NO: 1936458 - RNA, 19 nt, Artificial Sequence
  Description of Artificial Sequence: Synthetic oligonucleotide
  Sense strand starting at position 3537 of SEQ ID NO: 1879858
gccaguggaucaguaguua

SEQ ID NO: 1936459 - RNA, 19 nt, Artificial Sequence
  Description of Artificial Sequence: Synthetic oligonucleotide
  Antisense strand to SEQ ID NO: 1936458
uaacuacugauccacuggc

SEQ ID NO: 1936460 - RNA, 19 nt, Artificial Sequence
  Description of Artificial Sequence: Synthetic oligonucleotide
  Sense strand starting at position 3541 of SEQ ID NO: 1879858
guggaucaguaguuagaug

SEQ ID NO: 1936461 - RNA, 19 nt, Artificial Sequence
  Description of Artificial Sequence: Synthetic oligonucleotide
  Antisense strand to SEQ ID NO: 1936460
caucuaacuacugauccac

SEQ ID NO: 1936462 - RNA, 19 nt, Artificial Sequence
  Description of Artificial Sequence: Synthetic oligonucleotide
  Sense strand starting at position 3546 of SEQ ID NO: 1879858
ucaguaguuagaugguaua

SEQ ID NO: 1936463 - RNA, 19 nt, Artificial Sequence
  Description of Artificial Sequence: Synthetic oligonucleotide
  Antisense strand to SEQ ID NO: 1936462
uauaccaucuaacuacuga

SEQ ID NO: 1936464 - RNA, 19 nt, Artificial Sequence
  Description of Artificial Sequence: Synthetic oligonucleotide
  Sense strand starting at position 3896 of SEQ ID NO: 1879858
cggaguuucuacuucuagu

SEQ ID NO: 1936465 - RNA, 19 nt, Artificial Sequence
  Description of Artificial Sequence: Synthetic oligonucleotide
  Antisense strand to SEQ ID NO: 1936464
acuagaaguagaaacuccg

SEQ ID NO: 1936466 - RNA, 19 nt, Artificial Sequence
  Description of Artificial Sequence: Synthetic oligonucleotide
  Sense strand starting at position 3902 of SEQ ID NO: 1879858
uucuacuucuaguugagga

SEQ ID NO: 1936467 - RNA, 19 nt, Artificial Sequence
  Description of Artificial Sequence: Synthetic oligonucleotide
  Antisense strand to SEQ ID NO: 1936466
uccucaacuagaaguagaa

SEQ ID NO: 1936468 - RNA, 19 nt, Artificial Sequence
  Description of Artificial Sequence: Synthetic oligonucleotide
  Sense strand starting at position 3924 of SEQ ID NO: 1879858
gcucaaagcuuaguacuua

SEQ ID NO: 1936469 - RNA, 19 nt, Artificial Sequence
  Description of Artificial Sequence: Synthetic oligonucleotide
  Antisense strand to SEQ ID NO: 1936468
uaaguacuaagcuuugagc

SEQ ID NO: 1936470 - RNA, 19 nt, Artificial Sequence
  Description of Artificial Sequence: Synthetic oligonucleotide
  Sense strand starting at position 127 of SEQ ID NO: 1879859
aaaggaguuugauuacuau

SEQ ID NO: 1936471 - RNA, 19 nt, Artificial Sequence
  Description of Artificial Sequence: Synthetic oligonucleotide
  Antisense strand to SEQ ID NO: 1936470
auaguaaucaaacuccuuu

SEQ ID NO: 1936472 - RNA, 19 nt, Artificial Sequence
  Description of Artificial Sequence: Synthetic oligonucleotide
  Sense strand starting at position 130 of SEQ ID NO: 1879859
ggaguuugauuacuaugua

SEQ ID NO: 1936473 - RNA, 19 nt, Artificial Sequence
  Description of Artificial Sequence: Synthetic oligonucleotide
  Antisense strand to SEQ ID NO: 1936472
uacauaguaaucaaacucc

SEQ ID NO: 1936474 - RNA, 19 nt, Artificial Sequence
  Description of Artificial Sequence: Synthetic oligonucleotide
  Sense strand starting at position 142 of SEQ ID NO: 1879859
cuauguaaguuacuaacua

SEQ ID NO: 1936475 - RNA, 19 nt, Artificial Sequence
  Description of Artificial Sequence: Synthetic oligonucleotide
  Antisense strand to SEQ ID NO: 1936474
uaguuaguaacuuacauag

SEQ ID NO: 1936476 - RNA, 19 nt, Artificial Sequence
  Description of Artificial Sequence: Synthetic oligonucleotide
  Sense strand starting at position 146 of SEQ ID NO: 1879859
guaaguuacuaacuauaga

SEQ ID NO: 1936477 - RNA, 19 nt, Artificial Sequence
  Description of Artificial Sequence: Synthetic oligonucleotide
  Antisense strand to SEQ ID NO: 1936476
ucuauaguuaguaacuuac

SEQ ID NO: 1936478 - RNA, 19 nt, Artificial Sequence
  Description of Artificial Sequence: Synthetic oligonucleotide
  Sense strand starting at position 242 of SEQ ID NO: 1879859
guaaauacugcugaacauu

SEQ ID NO: 1936479 - RNA, 19 nt, Artificial Sequence
  Description of Artificial Sequence: Synthetic oligonucleotide
  Antisense strand to SEQ ID NO: 1936478
aauguucagcaguauuuac

SEQ ID NO: 1936480 - RNA, 19 nt, Artificial Sequence
  Description of Artificial Sequence: Synthetic oligonucleotide
  Sense strand starting at position 257 of SEQ ID NO: 1879859
cauuuagugggcugaaugu

SEQ ID NO: 1936481 - RNA, 19 nt, Artificial Sequence
  Description of Artificial Sequence: Synthetic oligonucleotide
  Antisense strand to SEQ ID NO: 1936480
acauucagcccacuaaaug

SEQ ID NO: 1936482 - RNA, 19 nt, Artificial Sequence
  Description of Artificial Sequence: Synthetic oligonucleotide
  Sense strand starting at position 285 of SEQ ID NO: 1879859
uaacuuagccaguaaaggu

SEQ ID NO: 1936483 - RNA, 19 nt, Artificial Sequence
  Description of Artificial Sequence: Synthetic oligonucleotide
  Antisense strand to SEQ ID NO: 1936482
accuuuacuggcuaaguua

SEQ ID NO: 1936484 - RNA, 19 nt, Artificial Sequence
  Description of Artificial Sequence: Synthetic oligonucleotide
  Sense strand starting at position 293 of SEQ ID NO: 1879859
ccaguaaagguguagguua

SEQ ID NO: 1936485 - RNA, 19 nt, Artificial Sequence
  Description of Artificial Sequence: Synthetic oligonucleotide
  Antisense strand to SEQ ID NO: 1936484
uaaccuacaccuuuacugg

SEQ ID NO: 1936486 - RNA, 19 nt, Artificial Sequence
  Description of Artificial Sequence: Synthetic oligonucleotide
  Sense strand starting at position 295 of SEQ ID NO: 1879859
aguaaagguguagguuaua

SEQ ID NO: 1936487 - RNA, 19 nt, Artificial Sequence
  Description of Artificial Sequence: Synthetic oligonucleotide
  Antisense strand to SEQ ID NO: 1936486
uauaaccuacaccuuuacu

SEQ ID NO: 1936488 - RNA, 19 nt, Artificial Sequence
  Description of Artificial Sequence: Synthetic oligonucleotide
  Sense strand starting at position 322 of SEQ ID NO: 1879859
uuucuaauguaugugaacu

SEQ ID NO: 1936489 - RNA, 19 nt, Artificial Sequence
  Description of Artificial Sequence: Synthetic oligonucleotide
  Antisense strand to SEQ ID NO: 1936488
aguucacauacauuagaaa

SEQ ID NO: 1936490 - RNA, 19 nt, Artificial Sequence
  Description of Artificial Sequence: Synthetic oligonucleotide
  Sense strand starting at position 330 of SEQ ID NO: 1879859
guaugugaacuauguagau

SEQ ID NO: 1936491 - RNA, 19 nt, Artificial Sequence
  Description of Artificial Sequence: Synthetic oligonucleotide
  Antisense strand to SEQ ID NO: 1936490
aucuacauaguucacauac

SEQ ID NO: 1936492 - RNA, 19 nt, Artificial Sequence
  Description of Artificial Sequence: Synthetic oligonucleotide
  Sense strand starting at position 334 of SEQ ID NO: 1879859
gugaacuauguagaucuau

SEQ ID NO: 1936493 - RNA, 19 nt, Artificial Sequence
  Description of Artificial Sequence: Synthetic oligonucleotide
  Antisense strand to SEQ ID NO: 1936492
auagaucuacauaguucac

SEQ ID NO: 1936494 - RNA, 19 nt, Artificial Sequence
  Description of Artificial Sequence: Synthetic oligonucleotide
  Sense strand starting at position 533 of SEQ ID NO: 1879859
acucuagacuuuguaugau

SEQ ID NO: 1936495 - RNA, 19 nt, Artificial Sequence
  Description of Artificial Sequence: Synthetic oligonucleotide
  Antisense strand to SEQ ID NO: 1936494
aucauacaaagucuagagu

SEQ ID NO: 1936496 - RNA, 19 nt, Artificial Sequence
  Description of Artificial Sequence: Synthetic oligonucleotide
  Sense strand starting at position 678 of SEQ ID NO: 1879859
uucugaacuccucgauauc

SEQ ID NO: 1936497 - RNA, 19 nt, Artificial Sequence
  Description of Artificial Sequence: Synthetic oligonucleotide
  Antisense strand to SEQ ID NO: 1936496
gauaucgaggaguucagaa

SEQ ID NO: 1936498 - RNA, 19 nt, Artificial Sequence
  Description of Artificial Sequence: Synthetic oligonucleotide
  Sense strand starting at position 679 of SEQ ID NO: 1879859
ucugaacuccucgauauca

SEQ ID NO: 1936499 - RNA, 19 nt, Artificial Sequence
  Description of Artificial Sequence: Synthetic oligonucleotide
  Antisense strand to SEQ ID NO: 1936498
ugauaucgaggaguucaga

SEQ ID NO: 1936500 - RNA, 19 nt, Artificial Sequence
  Description of Artificial Sequence: Synthetic oligonucleotide
  Sense strand starting at position 907 of SEQ ID NO: 1879859
cuucucauaugguuauuau

SEQ ID NO: 1936501 - RNA, 19 nt, Artificial Sequence
  Description of Artificial Sequence: Synthetic oligonucleotide
  Antisense strand to SEQ ID NO: 1936500
auaauaaccauaugagaag

SEQ ID NO: 1936502 - RNA, 19 nt, Artificial Sequence
  Description of Artificial Sequence: Synthetic oligonucleotide
  Sense strand starting at position 908 of SEQ ID NO: 1879859
uucucauaugguuauuaug

SEQ ID NO: 1936503 - RNA, 19 nt, Artificial Sequence
  Description of Artificial Sequence: Synthetic oligonucleotide
  Antisense strand to SEQ ID NO: 1936502
cauaauaaccauaugagaa

SEQ ID NO: 1936504 - RNA, 19 nt, Artificial Sequence
  Description of Artificial Sequence: Synthetic oligonucleotide
  Sense strand starting at position 910 of SEQ ID NO: 1879859
cucauaugguuauuaugaa

SEQ ID NO: 1936505 - RNA, 19 nt, Artificial Sequence
  Description of Artificial Sequence: Synthetic oligonucleotide
  Antisense strand to SEQ ID NO: 1936504
uucauaauaaccauaugag

SEQ ID NO: 1936506 - RNA, 19 nt, Artificial Sequence
  Description of Artificial Sequence: Synthetic oligonucleotide
  Sense strand starting at position 946 of SEQ ID NO: 1879859
cauggaagaugcuuagcaa

SEQ ID NO: 1936507 - RNA, 19 nt, Artificial Sequence
  Description of Artificial Sequence: Synthetic oligonucleotide
  Antisense strand to SEQ ID NO: 1936506
uugcuaagcaucuuccaug

SEQ ID NO: 1936508 - RNA, 19 nt, Artificial Sequence
  Description of Artificial Sequence: Synthetic oligonucleotide
  Sense strand starting at position 949 of SEQ ID NO: 1879859
ggaagaugcuuagcaaacu

SEQ ID NO: 1936509 - RNA, 19 nt, Artificial Sequence
  Description of Artificial Sequence: Synthetic oligonucleotide
  Antisense strand to SEQ ID NO: 1936508
aguuugcuaagcaucuucc

SEQ ID NO: 1936510 - RNA, 19 nt, Artificial Sequence
  Description of Artificial Sequence: Synthetic oligonucleotide
  Sense strand starting at position 1025 of SEQ ID NO: 1879859
uccugagguggcuauaguu

SEQ ID NO: 1936511 - RNA, 19 nt, Artificial Sequence
  Description of Artificial Sequence: Synthetic oligonucleotide
  Antisense strand to SEQ ID NO: 1936510
aacuauagccaccucagga

SEQ ID NO: 1936512 - RNA, 19 nt, Artificial Sequence
  Description of Artificial Sequence: Synthetic oligonucleotide
  Sense strand starting at position 1896 of SEQ ID NO: 1879859
aaagguuuauuugauugga

SEQ ID NO: 1936513 - RNA, 19 nt, Artificial Sequence
  Description of Artificial Sequence: Synthetic oligonucleotide
  Antisense strand to SEQ ID NO: 1936512
uccaaucaaauaaaccuuu

SEQ ID NO: 1936514 - RNA, 19 nt, Artificial Sequence
  Description of Artificial Sequence: Synthetic oligonucleotide
  Sense strand starting at position 2629 of SEQ ID NO: 1879859
ugaucuaauguugaucuua

SEQ ID NO: 1936515 - RNA, 19 nt, Artificial Sequence
  Description of Artificial Sequence: Synthetic oligonucleotide
  Antisense strand to SEQ ID NO: 1936514
uaagaucaacauuagauca

SEQ ID NO: 1936516 - RNA, 19 nt, Artificial Sequence
  Description of Artificial Sequence: Synthetic oligonucleotide
  Sense strand starting at position 2983 of SEQ ID NO: 1879859
caccguaccugaccugaaa

SEQ ID NO: 1936517 - RNA, 19 nt, Artificial Sequence
  Description of Artificial Sequence: Synthetic oligonucleotide
  Antisense strand to SEQ ID NO: 1936516
uuucaggucagguacggug

SEQ ID NO: 1936518 - RNA, 19 nt, Artificial Sequence
  Description of Artificial Sequence: Synthetic oligonucleotide
  Sense strand starting at position 3085 of SEQ ID NO: 1879859
agagaauuaugcuuucuau

SEQ ID NO: 1936519 - RNA, 19 nt, Artificial Sequence
  Description of Artificial Sequence: Synthetic oligonucleotide
  Antisense strand to SEQ ID NO: 1936518
auagaaagcauaauucucu

SEQ ID NO: 1936520 - RNA, 19 nt, Artificial Sequence
  Description of Artificial Sequence: Synthetic oligonucleotide
  Sense strand starting at position 3154 of SEQ ID NO: 1879859
gagacuuuacuaugacuug

SEQ ID NO: 1936521 - RNA, 19 nt, Artificial Sequence
  Description of Artificial Sequence: Synthetic oligonucleotide
  Antisense strand to SEQ ID NO: 1936520
caagucauaguaaagucuc

SEQ ID NO: 1936522 - RNA, 19 nt, Artificial Sequence
  Description of Artificial Sequence: Synthetic oligonucleotide
  Sense strand starting at position 3258 of SEQ ID NO: 1879859
gccucuuuguaugucauuu

SEQ ID NO: 1936523 - RNA, 19 nt, Artificial Sequence
  Description of Artificial Sequence: Synthetic oligonucleotide
  Antisense strand to SEQ ID NO: 1936522
aaaugacauacaaagaggc

SEQ ID NO: 1936524 - RNA, 19 nt, Artificial Sequence
  Description of Artificial Sequence: Synthetic oligonucleotide
  Sense strand starting at position 3348 of SEQ ID NO: 1879859
uugauauucuaccuguuga

SEQ ID NO: 1936525 - RNA, 19 nt, Artificial Sequence
  Description of Artificial Sequence: Synthetic oligonucleotide
  Antisense strand to SEQ ID NO: 1936524
ucaacagguagaauaucaa

SEQ ID NO: 1936526 - RNA, 19 nt, Artificial Sequence
  Description of Artificial Sequence: Synthetic oligonucleotide
  Sense strand starting at position 3361 of SEQ ID NO: 1879859
uguugagagguuggaucua

SEQ ID NO: 1936527 - RNA, 19 nt, Artificial Sequence
  Description of Artificial Sequence: Synthetic oligonucleotide
  Antisense strand to SEQ ID NO: 1936526
uagauccaaccucucaaca

SEQ ID NO: 1936528 - RNA, 19 nt, Artificial Sequence
  Description of Artificial Sequence: Synthetic oligonucleotide
  Sense strand starting at position 3373 of SEQ ID NO: 1879859
ggaucuaugucccuuuacu

SEQ ID NO: 1936529 - RNA, 19 nt, Artificial Sequence
  Description of Artificial Sequence: Synthetic oligonucleotide
  Antisense strand to SEQ ID NO: 1936528
aguaaagggacauagaucc

SEQ ID NO: 1936530 - RNA, 19 nt, Artificial Sequence
  Description of Artificial Sequence: Synthetic oligonucleotide
  Sense strand starting at position 3389 of SEQ ID NO: 1879859
acuugaaucugggcaagua

SEQ ID NO: 1936531 - RNA, 19 nt, Artificial Sequence
  Description of Artificial Sequence: Synthetic oligonucleotide
  Antisense strand to SEQ ID NO: 1936530
uacuugcccagauucaagu

SEQ ID NO: 1936532 - RNA, 19 nt, Artificial Sequence
  Description of Artificial Sequence: Synthetic oligonucleotide
  Sense strand starting at position 3390 of SEQ ID NO: 1879859
cuugaaucugggcaaguau

SEQ ID NO: 1936533 - RNA, 19 nt, Artificial Sequence
  Description of Artificial Sequence: Synthetic oligonucleotide
  Antisense strand to SEQ ID NO: 1936532
auacuugcccagauucaag

SEQ ID NO: 1936534 - RNA, 19 nt, Artificial Sequence
  Description of Artificial Sequence: Synthetic oligonucleotide
  Sense strand starting at position 3500 of SEQ ID NO: 1879859
cuauuagggccaugaaagu

SEQ ID NO: 1936535 - RNA, 19 nt, Artificial Sequence
  Description of Artificial Sequence: Synthetic oligonucleotide
  Antisense strand to SEQ ID NO: 1936534
acuuucauggcccuaauag

SEQ ID NO: 1936536 - RNA, 19 nt, Artificial Sequence
  Description of Artificial Sequence: Synthetic oligonucleotide
  Sense strand starting at position 3510 of SEQ ID NO: 1879859
caugaaagugcagguauua

SEQ ID NO: 1936537 - RNA, 19 nt, Artificial Sequence
  Description of Artificial Sequence: Synthetic oligonucleotide
  Antisense strand to SEQ ID NO: 1936536
uaauaccugcacuuucaug

SEQ ID NO: 1936538 - RNA, 19 nt, Artificial Sequence
  Description of Artificial Sequence: Synthetic oligonucleotide
  Sense strand starting at position 3521 of SEQ ID NO: 1879859
agguauuaaugugugauac

SEQ ID NO: 1936539 - RNA, 19 nt, Artificial Sequence
  Description of Artificial Sequence: Synthetic oligonucleotide
  Antisense strand to SEQ ID NO: 1936538
guaucacacauuaauaccu

SEQ ID NO: 1936540 - RNA, 19 nt, Artificial Sequence
  Description of Artificial Sequence: Synthetic oligonucleotide
  Sense strand starting at position 3522 of SEQ ID NO: 1879859
gguauuaaugugugauaca

SEQ ID NO: 1936541 - RNA, 19 nt, Artificial Sequence
  Description of Artificial Sequence: Synthetic oligonucleotide
  Antisense strand to SEQ ID NO: 1936540
uguaucacacauuaauacc

SEQ ID NO: 1936542 - RNA, 19 nt, Artificial Sequence
  Description of Artificial Sequence: Synthetic oligonucleotide
  Sense strand starting at position 3670 of SEQ ID NO: 1879859
auguauucuuaccuggaau

SEQ ID NO: 1936543 - RNA, 19 nt, Artificial Sequence
  Description of Artificial Sequence: Synthetic oligonucleotide
  Antisense strand to SEQ ID NO: 1936542
auuccagguaagaauacau

SEQ ID NO: 1936544 - RNA, 19 nt, Artificial Sequence
  Description of Artificial Sequence: Synthetic oligonucleotide
  Sense strand starting at position 3683 of SEQ ID NO: 1879859
uggaaugccuucuuccaca

SEQ ID NO: 1936545 - RNA, 19 nt, Artificial Sequence
  Description of Artificial Sequence: Synthetic oligonucleotide
  Antisense strand to SEQ ID NO: 1936544
uguggaagaaggcauucca

SEQ ID NO: 1936546 - RNA, 19 nt, Artificial Sequence
  Description of Artificial Sequence: Synthetic oligonucleotide
  Sense strand starting at position 3852 of SEQ ID NO: 1879859
gugggaucuauaugaucac

SEQ ID NO: 1936547 - RNA, 19 nt, Artificial Sequence
  Description of Artificial Sequence: Synthetic oligonucleotide
  Antisense strand to SEQ ID NO: 1936546
gugaucauauagaucccac

SEQ ID NO: 1936548 - RNA, 19 nt, Artificial Sequence
  Description of Artificial Sequence: Synthetic oligonucleotide
  Sense strand starting at position 3958 of SEQ ID NO: 1879859
gggcucaauccugauugua

SEQ ID NO: 1936549 - RNA, 19 nt, Artificial Sequence
  Description of Artificial Sequence: Synthetic oligonucleotide
  Antisense strand to SEQ ID NO: 1936548
uacaaucaggauugagccc

SEQ ID NO: 1936550 - RNA, 19 nt, Artificial Sequence
  Description of Artificial Sequence: Synthetic oligonucleotide
  Sense strand starting at position 137 of SEQ ID NO: 1879860
gucccagauucuccuugaa

SEQ ID NO: 1936551 - RNA, 19 nt, Artificial Sequence
  Description of Artificial Sequence: Synthetic oligonucleotide
  Antisense strand to SEQ ID NO: 1936550
uucaaggagaaucugggac

SEQ ID NO: 1936552 - RNA, 19 nt, Artificial Sequence
  Description of Artificial Sequence: Synthetic oligonucleotide
  Sense strand starting at position 607 of SEQ ID NO: 1879860
aauaaauaggagugccaua

SEQ ID NO: 1936553 - RNA, 19 nt, Artificial Sequence
  Description of Artificial Sequence: Synthetic oligonucleotide
  Antisense strand to SEQ ID NO: 1936552
uauggcacuccuauuuauu

SEQ ID NO: 1936554 - RNA, 19 nt, Artificial Sequence
  Description of Artificial Sequence: Synthetic oligonucleotide
  Sense strand starting at position 655 of SEQ ID NO: 1879860
gagaaaggcuuccuagaug

SEQ ID NO: 1936555 - RNA, 19 nt, Artificial Sequence
  Description of Artificial Sequence: Synthetic oligonucleotide
  Antisense strand to SEQ ID NO: 1936554
caucuaggaagccuuucuc

SEQ ID NO: 1936556 - RNA, 19 nt, Artificial Sequence
  Description of Artificial Sequence: Synthetic oligonucleotide
  Sense strand starting at position 660 of SEQ ID NO: 1879860
aggcuuccuagaugagaug

SEQ ID NO: 1936557 - RNA, 19 nt, Artificial Sequence
  Description of Artificial Sequence: Synthetic oligonucleotide
  Antisense strand to SEQ ID NO: 1936556
caucucaucuaggaagccu

SEQ ID NO: 1936558 - RNA, 19 nt, Artificial Sequence
  Description of Artificial Sequence: Synthetic oligonucleotide
  Sense strand starting at position 702 of SEQ ID NO: 1879860
ugaagaaucagauguguac

SEQ ID NO: 1936559 - RNA, 19 nt, Artificial Sequence
  Description of Artificial Sequence: Synthetic oligonucleotide
  Antisense strand to SEQ ID NO: 1936558
guacacaucugauucuuca

SEQ ID NO: 1936560 - RNA, 19 nt, Artificial Sequence
  Description of Artificial Sequence: Synthetic oligonucleotide
  Sense strand starting at position 711 of SEQ ID NO: 1879860
agauguguacacuaagcaa

SEQ ID NO: 1936561 - RNA, 19 nt, Artificial Sequence
  Description of Artificial Sequence: Synthetic oligonucleotide
  Antisense strand to SEQ ID NO: 1936560
uugcuuaguguacacaucu

SEQ ID NO: 1936562 - RNA, 19 nt, Artificial Sequence
  Description of Artificial Sequence: Synthetic oligonucleotide
  Sense strand starting at position 794 of SEQ ID NO: 1879860
aauugagguaccuggugua

SEQ ID NO: 1936563 - RNA, 19 nt, Artificial Sequence
  Description of Artificial Sequence: Synthetic oligonucleotide
  Antisense strand to SEQ ID NO: 1936562
uacaccagguaccucaauu

SEQ ID NO: 1936564 - RNA, 19 nt, Artificial Sequence
  Description of Artificial Sequence: Synthetic oligonucleotide
  Sense strand starting at position 988 of SEQ ID NO: 1879860
gagcacuacccaugauaga

SEQ ID NO: 1936565 - RNA, 19 nt, Artificial Sequence
  Description of Artificial Sequence: Synthetic oligonucleotide
  Antisense strand to SEQ ID NO: 1936564
ucuaucauggguagugcuc

SEQ ID NO: 1936566 - RNA, 19 nt, Artificial Sequence
  Description of Artificial Sequence: Synthetic oligonucleotide
  Sense strand starting at position 2058 of SEQ ID NO: 1879860
uuucucauuuccgugggua

SEQ ID NO: 1936567 - RNA, 19 nt, Artificial Sequence
  Description of Artificial Sequence: Synthetic oligonucleotide
  Antisense strand to SEQ ID NO: 1936566
uacccacggaaaugagaaa

SEQ ID NO: 1936568 - RNA, 19 nt, Artificial Sequence
  Description of Artificial Sequence: Synthetic oligonucleotide
  Sense strand starting at position 2059 of SEQ ID NO: 1879860
uucucauuuccguggguaa

SEQ ID NO: 1936569 - RNA, 19 nt, Artificial Sequence
  Description of Artificial Sequence: Synthetic oligonucleotide
  Antisense strand to SEQ ID NO: 1936568
uuacccacggaaaugagaa

SEQ ID NO: 1936570 - RNA, 19 nt, Artificial Sequence
  Description of Artificial Sequence: Synthetic oligonucleotide
  Sense strand starting at position 2060 of SEQ ID NO: 1879860
ucucauuuccguggguaaa

SEQ ID NO: 1936571 - RNA, 19 nt, Artificial Sequence
  Description of Artificial Sequence: Synthetic oligonucleotide
  Antisense strand to SEQ ID NO: 1936570
uuuacccacggaaaugaga

SEQ ID NO: 1936572 - RNA, 19 nt, Artificial Sequence
  Description of Artificial Sequence: Synthetic oligonucleotide
  Sense strand starting at position 2164 of SEQ ID NO: 1879860
acagucauuucgucacaug

SEQ ID NO: 1936573 - RNA, 19 nt, Artificial Sequence
  Description of Artificial Sequence: Synthetic oligonucleotide
  Antisense strand to SEQ ID NO: 1936572
caugugacgaaaugacugu

SEQ ID NO: 1936574 - RNA, 19 nt, Artificial Sequence
  Description of Artificial Sequence: Synthetic oligonucleotide
  Sense strand starting at position 2528 of SEQ ID NO: 1879860
agcuacgugacuugggaaa

SEQ ID NO: 1936575 - RNA, 19 nt, Artificial Sequence
  Description of Artificial Sequence: Synthetic oligonucleotide
  Antisense strand to SEQ ID NO: 1936574
uuucccaagucacguagcu

SEQ ID NO: 1936576 - RNA, 19 nt, Artificial Sequence
  Description of Artificial Sequence: Synthetic oligonucleotide
  Sense strand starting at position 2566 of SEQ ID NO: 1879860
ucgaaagaacuccguggau

SEQ ID NO: 1936577 - RNA, 19 nt, Artificial Sequence
  Description of Artificial Sequence: Synthetic oligonucleotide
  Antisense strand to SEQ ID NO: 1936576
auccacggaguucuuucga

SEQ ID NO: 1936578 - RNA, 19 nt, Artificial Sequence
  Description of Artificial Sequence: Synthetic oligonucleotide
  Sense strand starting at position 2568 of SEQ ID NO: 1879860
gaaagaacuccguggauau

SEQ ID NO: 1936579 - RNA, 19 nt, Artificial Sequence
  Description of Artificial Sequence: Synthetic oligonucleotide
  Antisense strand to SEQ ID NO: 1936578
auauccacggaguucuuuc

SEQ ID NO: 1936580 - RNA, 19 nt, Artificial Sequence
  Description of Artificial Sequence: Synthetic oligonucleotide
  Sense strand starting at position 2569 of SEQ ID NO: 1879860
aaagaacuccguggauauu

SEQ ID NO: 1936581 - RNA, 19 nt, Artificial Sequence
  Description of Artificial Sequence: Synthetic oligonucleotide
  Antisense strand to SEQ ID NO: 1936580
aauauccacggaguucuuu

SEQ ID NO: 1936582 - RNA, 19 nt, Artificial Sequence
  Description of Artificial Sequence: Synthetic oligonucleotide
  Sense strand starting at position 2661 of SEQ ID NO: 1879860
agggauagaugauacuaau

SEQ ID NO: 1936583 - RNA, 19 nt, Artificial Sequence
  Description of Artificial Sequence: Synthetic oligonucleotide
  Antisense strand to SEQ ID NO: 1936582
auuaguaucaucuaucccu

SEQ ID NO: 1936584 - RNA, 19 nt, Artificial Sequence
  Description of Artificial Sequence: Synthetic oligonucleotide
  Sense strand starting at position 2676 of SEQ ID NO: 1879860
uaauuugcagguugucauu

SEQ ID NO: 1936585 - RNA, 19 nt, Artificial Sequence
  Description of Artificial Sequence: Synthetic oligonucleotide
  Antisense strand to SEQ ID NO: 1936584
aaugacaaccugcaaauua

SEQ ID NO: 1936586 - RNA, 19 nt, Artificial Sequence
  Description of Artificial Sequence: Synthetic oligonucleotide
  Sense strand starting at position 2678 of SEQ ID NO: 1879860
auuugcagguugucauuau

SEQ ID NO: 1936587 - RNA, 19 nt, Artificial Sequence
  Description of Artificial Sequence: Synthetic oligonucleotide
  Antisense strand to SEQ ID NO: 1936586
auaaugacaaccugcaaau

SEQ ID NO: 1936588 - RNA, 19 nt, Artificial Sequence
  Description of Artificial Sequence: Synthetic oligonucleotide
  Sense strand starting at position 2682 of SEQ ID NO: 1879860
gcagguugucauuaugaua

SEQ ID NO: 1936589 - RNA, 19 nt, Artificial Sequence
  Description of Artificial Sequence: Synthetic oligonucleotide
  Antisense strand to SEQ ID NO: 1936588
uaucauaaugacaaccugc

SEQ ID NO: 1936590 - RNA, 19 nt, Artificial Sequence
  Description of Artificial Sequence: Synthetic oligonucleotide
  Sense strand starting at position 2801 of SEQ ID NO: 1879860
ccaggaaagcccggauuau

SEQ ID NO: 1936591 - RNA, 19 nt, Artificial Sequence
  Description of Artificial Sequence: Synthetic oligonucleotide
  Antisense strand to SEQ ID NO: 1936590
auaauccgggcuuuccugg

SEQ ID NO: 1936592 - RNA, 19 nt, Artificial Sequence
  Description of Artificial Sequence: Synthetic oligonucleotide
  Sense strand starting at position 2872 of SEQ ID NO: 1879860
ucccuaaauguugauuagu

SEQ ID NO: 1936593 - RNA, 19 nt, Artificial Sequence
  Description of Artificial Sequence: Synthetic oligonucleotide
  Antisense strand to SEQ ID NO: 1936592
acuaaucaacauuuaggga

SEQ ID NO: 1936594 - RNA, 19 nt, Artificial Sequence
  Description of Artificial Sequence: Synthetic oligonucleotide
  Sense strand starting at position 2875 of SEQ ID NO: 1879860
cuaaauguugauuagugua

SEQ ID NO: 1936595 - RNA, 19 nt, Artificial Sequence
  Description of Artificial Sequence: Synthetic oligonucleotide
  Antisense strand to SEQ ID NO: 1936594
uacacuaaucaacauuuag

SEQ ID NO: 1936596 - RNA, 19 nt, Artificial Sequence
  Description of Artificial Sequence: Synthetic oligonucleotide
  Sense strand starting at position 2880 of SEQ ID NO: 1879860
uguugauuaguguacuaga

SEQ ID NO: 1936597 - RNA, 19 nt, Artificial Sequence
  Description of Artificial Sequence: Synthetic oligonucleotide
  Antisense strand to SEQ ID NO: 1936596
ucuaguacacuaaucaaca

SEQ ID NO: 1936598 - RNA, 19 nt, Artificial Sequence
  Description of Artificial Sequence: Synthetic oligonucleotide
  Sense strand starting at position 2885 of SEQ ID NO: 1879860
auuaguguacuagauccau

SEQ ID NO: 1936599 - RNA, 19 nt, Artificial Sequence
  Description of Artificial Sequence: Synthetic oligonucleotide
  Antisense strand to SEQ ID NO: 1936598
auggaucuaguacacuaau

SEQ ID NO: 1936600 - RNA, 19 nt, Artificial Sequence
  Description of Artificial Sequence: Synthetic oligonucleotide
  Sense strand starting at position 3228 of SEQ ID NO: 1879860
uguucccacccaugucaaa

SEQ ID NO: 1936601 - RNA, 19 nt, Artificial Sequence
  Description of Artificial Sequence: Synthetic oligonucleotide
  Antisense strand to SEQ ID NO: 1936600
uuugacaugggugggaaca

SEQ ID NO: 1936602 - RNA, 19 nt, Artificial Sequence
  Description of Artificial Sequence: Synthetic oligonucleotide
  Sense strand starting at position 3256 of SEQ ID NO: 1879860
uauguaugagugugggauu

SEQ ID NO: 1936603 - RNA, 19 nt, Artificial Sequence
  Description of Artificial Sequence: Synthetic oligonucleotide
  Antisense strand to SEQ ID NO: 1936602
aaucccacacucauacaua

SEQ ID NO: 1936604 - RNA, 19 nt, Artificial Sequence
  Description of Artificial Sequence: Synthetic oligonucleotide
  Sense strand starting at position 3372 of SEQ ID NO: 1879860
uggauacaguuaucauugu

SEQ ID NO: 1936605 - RNA, 19 nt, Artificial Sequence
  Description of Artificial Sequence: Synthetic oligonucleotide
  Antisense strand to SEQ ID NO: 1936604
acaaugauaacuguaucca

SEQ ID NO: 1936606 - RNA, 19 nt, Artificial Sequence
  Description of Artificial Sequence: Synthetic oligonucleotide
  Sense strand starting at position 3386 of SEQ ID NO: 1879860
auuguauagauuugugucu

SEQ ID NO: 1936607 - RNA, 19 nt, Artificial Sequence
  Description of Artificial Sequence: Synthetic oligonucleotide
  Antisense strand to SEQ ID NO: 1936606
agacacaaaucuauacaau

SEQ ID NO: 1936608 - RNA, 19 nt, Artificial Sequence
  Description of Artificial Sequence: Synthetic oligonucleotide
  Sense strand starting at position 3401 of SEQ ID NO: 1879860
gucuuauaaugagucccau

SEQ ID NO: 1936609 - RNA, 19 nt, Artificial Sequence
  Description of Artificial Sequence: Synthetic oligonucleotide
  Antisense strand to SEQ ID NO: 1936608
augggacucauuauaagac

SEQ ID NO: 1936610 - RNA, 19 nt, Artificial Sequence
  Description of Artificial Sequence: Synthetic oligonucleotide
  Sense strand starting at position 3441 of SEQ ID NO: 1879860
cgucuucuugcagcggaau

SEQ ID NO: 1936611 - RNA, 19 nt, Artificial Sequence
  Description of Artificial Sequence: Synthetic oligonucleotide
  Antisense strand to SEQ ID NO: 1936610
auuccgcugcaagaagacg

SEQ ID NO: 1936612 - RNA, 19 nt, Artificial Sequence
  Description of Artificial Sequence: Synthetic oligonucleotide
  Sense strand starting at position 3539 of SEQ ID NO: 1879860
gaacguugugaauaacauu

SEQ ID NO: 1936613 - RNA, 19 nt, Artificial Sequence
  Description of Artificial Sequence: Synthetic oligonucleotide
  Antisense strand to SEQ ID NO: 1936612
aauguuauucacaacguuc

SEQ ID NO: 1936614 - RNA, 19 nt, Artificial Sequence
  Description of Artificial Sequence: Synthetic oligonucleotide
  Sense strand starting at position 3566 of SEQ ID NO: 1879860
ucgaaaugcaauuaugagu

SEQ ID NO: 1936615 - RNA, 19 nt, Artificial Sequence
  Description of Artificial Sequence: Synthetic oligonucleotide
  Antisense strand to SEQ ID NO: 1936614
acucauaauugcauuucga

SEQ ID NO: 1936616 - RNA, 19 nt, Artificial Sequence
  Description of Artificial Sequence: Synthetic oligonucleotide
  Sense strand starting at position 3571 of SEQ ID NO: 1879860
augcaauuaugaguuaugu

SEQ ID NO: 1936617 - RNA, 19 nt, Artificial Sequence
  Description of Artificial Sequence: Synthetic oligonucleotide
  Antisense strand to SEQ ID NO: 1936616
acauaacucauaauugcau

SEQ ID NO: 1936618 - RNA, 19 nt, Artificial Sequence
  Description of Artificial Sequence: Synthetic oligonucleotide
  Sense strand starting at position 3573 of SEQ ID NO: 1879860
gcaauuaugaguuaugugu

SEQ ID NO: 1936619 - RNA, 19 nt, Artificial Sequence
  Description of Artificial Sequence: Synthetic oligonucleotide
  Antisense strand to SEQ ID NO: 1936618
acacauaacucauaauugc

SEQ ID NO: 1936620 - RNA, 19 nt, Artificial Sequence
  Description of Artificial Sequence: Synthetic oligonucleotide
  Sense strand starting at position 3581 of SEQ ID NO: 1879860
gaguuauguguugacaugu

SEQ ID NO: 1936621 - RNA, 19 nt, Artificial Sequence
  Description of Artificial Sequence: Synthetic oligonucleotide
  Antisense strand to SEQ ID NO: 1936620
acaugucaacacauaacuc

SEQ ID NO: 1936622 - RNA, 19 nt, Artificial Sequence
  Description of Artificial Sequence: Synthetic oligonucleotide
  Sense strand starting at position 3587 of SEQ ID NO: 1879860
uguguugacauguaaguac

SEQ ID NO: 1936623 - RNA, 19 nt, Artificial Sequence
  Description of Artificial Sequence: Synthetic oligonucleotide
  Antisense strand to SEQ ID NO: 1936622
guacuuacaugucaacaca

SEQ ID NO: 1936624 - RNA, 19 nt, Artificial Sequence
  Description of Artificial Sequence: Synthetic oligonucleotide
  Sense strand starting at position 3846 of SEQ ID NO: 1879860
gguccagcuguuuauugaa

SEQ ID NO: 1936625 - RNA, 19 nt, Artificial Sequence
  Description of Artificial Sequence: Synthetic oligonucleotide
  Antisense strand to SEQ ID NO: 1936624
uucaauaaacagcuggacc

SEQ ID NO: 1936626 - RNA, 19 nt, Artificial Sequence
  Description of Artificial Sequence: Synthetic oligonucleotide
  Sense strand starting at position 3866 of SEQ ID NO: 1879860
gcccaugggccacagaauu

SEQ ID NO: 1936627 - RNA, 19 nt, Artificial Sequence
  Description of Artificial Sequence: Synthetic oligonucleotide
  Antisense strand to SEQ ID NO: 1936626
aauucuguggcccaugggc

SEQ ID NO: 1936628 - RNA, 19 nt, Artificial Sequence
  Description of Artificial Sequence: Synthetic oligonucleotide
  Sense strand starting at position 3874 of SEQ ID NO: 1879860
gccacagaauuguucugaa

SEQ ID NO: 1936629 - RNA, 19 nt, Artificial Sequence
  Description of Artificial Sequence: Synthetic oligonucleotide
  Antisense strand to SEQ ID NO: 1936628
uucagaacaauucuguggc

SEQ ID NO: 1936630 - RNA, 19 nt, Artificial Sequence
  Description of Artificial Sequence: Synthetic oligonucleotide
  Sense strand starting at position 40 of SEQ ID NO: 1879861
ucucguuggucaucuggaa

SEQ ID NO: 1936631 - RNA, 19 nt, Artificial Sequence
  Description of Artificial Sequence: Synthetic oligonucleotide
  Antisense strand to SEQ ID NO: 1936630
uuccagaugaccaacgaga

SEQ ID NO: 1936632 - RNA, 19 nt, Artificial Sequence
  Description of Artificial Sequence: Synthetic oligonucleotide
  Sense strand starting at position 98 of SEQ ID NO: 1879861
gcgguagccagacaugaug

SEQ ID NO: 1936633 - RNA, 19 nt, Artificial Sequence
  Description of Artificial Sequence: Synthetic oligonucleotide
  Antisense strand to SEQ ID NO: 1936632
caucaugucuggcuaccgc

SEQ ID NO: 1936634 - RNA, 19 nt, Artificial Sequence
  Description of Artificial Sequence: Synthetic oligonucleotide
  Sense strand starting at position 399 of SEQ ID NO: 1879861
caagcuuguuccucagaga

SEQ ID NO: 1936635 - RNA, 19 nt, Artificial Sequence
  Description of Artificial Sequence: Synthetic oligonucleotide
  Antisense strand to SEQ ID NO: 1936634
ucucugaggaacaagcuug

SEQ ID NO: 1936636 - RNA, 19 nt, Artificial Sequence
  Description of Artificial Sequence: Synthetic oligonucleotide
  Sense strand starting at position 400 of SEQ ID NO: 1879861
aagcuuguuccucagagaa

SEQ ID NO: 1936637 - RNA, 19 nt, Artificial Sequence
  Description of Artificial Sequence: Synthetic oligonucleotide
  Antisense strand to SEQ ID NO: 1936636
uucucugaggaacaagcuu

SEQ ID NO: 1936638 - RNA, 19 nt, Artificial Sequence
  Description of Artificial Sequence: Synthetic oligonucleotide
  Sense strand starting at position 402 of SEQ ID NO: 1879861
gcuuguuccucagagaaca

SEQ ID NO: 1936639 - RNA, 19 nt, Artificial Sequence
  Description of Artificial Sequence: Synthetic oligonucleotide
  Antisense strand to SEQ ID NO: 1936638
uguucucugaggaacaagc

SEQ ID NO: 1936640 - RNA, 19 nt, Artificial Sequence
  Description of Artificial Sequence: Synthetic oligonucleotide
  Sense strand starting at position 423 of SEQ ID NO: 1879861
ggaagagucucacacugga

SEQ ID NO: 1936641 - RNA, 19 nt, Artificial Sequence
  Description of Artificial Sequence: Synthetic oligonucleotide
  Antisense strand to SEQ ID NO: 1936640
uccagugugagacucuucc

SEQ ID NO: 1936642 - RNA, 19 nt, Artificial Sequence
  Description of Artificial Sequence: Synthetic oligonucleotide
  Sense strand starting at position 448 of SEQ ID NO: 1879861
ggguaagaguucgccugca

SEQ ID NO: 1936643 - RNA, 19 nt, Artificial Sequence
  Description of Artificial Sequence: Synthetic oligonucleotide
  Antisense strand to SEQ ID NO: 1936642
ugcaggcgaacucuuaccc

SEQ ID NO: 1936644 - RNA, 19 nt, Artificial Sequence
  Description of Artificial Sequence: Synthetic oligonucleotide
  Sense strand starting at position 510 of SEQ ID NO: 1879861
uagucaguccucuagggaa

SEQ ID NO: 1936645 - RNA, 19 nt, Artificial Sequence
  Description of Artificial Sequence: Synthetic oligonucleotide
  Antisense strand to SEQ ID NO: 1936644
uucccuagaggacugacua

SEQ ID NO: 1936646 - RNA, 19 nt, Artificial Sequence
  Description of Artificial Sequence: Synthetic oligonucleotide
  Sense strand starting at position 512 of SEQ ID NO: 1879861
gucaguccucuagggaaug

SEQ ID NO: 1936647 - RNA, 19 nt, Artificial Sequence
  Description of Artificial Sequence: Synthetic oligonucleotide
  Antisense strand to SEQ ID NO: 1936646
cauucccuagaggacugac

SEQ ID NO: 1936648 - RNA, 19 nt, Artificial Sequence
  Description of Artificial Sequence: Synthetic oligonucleotide
  Sense strand starting at position 911 of SEQ ID NO: 1879861
ccgggaggcugccucaaau

SEQ ID NO: 1936649 - RNA, 19 nt, Artificial Sequence
  Description of Artificial Sequence: Synthetic oligonucleotide
  Antisense strand to SEQ ID NO: 1936648
auuugaggcagccucccgg

SEQ ID NO: 1936650 - RNA, 19 nt, Artificial Sequence
  Description of Artificial Sequence: Synthetic oligonucleotide
  Sense strand starting at position 917 of SEQ ID NO: 1879861
ggcugccucaaauagugau

SEQ ID NO: 1936651 - RNA, 19 nt, Artificial Sequence
  Description of Artificial Sequence: Synthetic oligonucleotide
  Antisense strand to SEQ ID NO: 1936650
aucacuauuugaggcagcc

SEQ ID NO: 1936652 - RNA, 19 nt, Artificial Sequence
  Description of Artificial Sequence: Synthetic oligonucleotide
  Sense strand starting at position 1080 of SEQ ID NO: 1879861
cuccgaaucucuggagaag

SEQ ID NO: 1936653 - RNA, 19 nt, Artificial Sequence
  Description of Artificial Sequence: Synthetic oligonucleotide
  Antisense strand to SEQ ID NO: 1936652
cuucuccagagauucggag

SEQ ID NO: 1936654 - RNA, 19 nt, Artificial Sequence
  Description of Artificial Sequence: Synthetic oligonucleotide
  Sense strand starting at position 1280 of SEQ ID NO: 1879861
ggcacauuccuuggcacaa

SEQ ID NO: 1936655 - RNA, 19 nt, Artificial Sequence
  Description of Artificial Sequence: Synthetic oligonucleotide
  Antisense strand to SEQ ID NO: 1936654
uugugccaaggaaugugcc

SEQ ID NO: 1936656 - RNA, 19 nt, Artificial Sequence
  Description of Artificial Sequence: Synthetic oligonucleotide
  Sense strand starting at position 1636 of SEQ ID NO: 1879861
cugagugcugcccaucuau

SEQ ID NO: 1936657 - RNA, 19 nt, Artificial Sequence
  Description of Artificial Sequence: Synthetic oligonucleotide
  Antisense strand to SEQ ID NO: 1936656
auagaugggcagcacucag

SEQ ID NO: 1936658 - RNA, 19 nt, Artificial Sequence
  Description of Artificial Sequence: Synthetic oligonucleotide
  Sense strand starting at position 1699 of SEQ ID NO: 1879861
ggugccuucccuuaguagu

SEQ ID NO: 1936659 - RNA, 19 nt, Artificial Sequence
  Description of Artificial Sequence: Synthetic oligonucleotide
  Antisense strand to SEQ ID NO: 1936658
acuacuaagggaaggcacc

SEQ ID NO: 1936660 - RNA, 19 nt, Artificial Sequence
  Description of Artificial Sequence: Synthetic oligonucleotide
  Sense strand starting at position 1712 of SEQ ID NO: 1879861
aguaguaggguuuggagau

SEQ ID NO: 1936661 - RNA, 19 nt, Artificial Sequence
  Description of Artificial Sequence: Synthetic oligonucleotide
  Antisense strand to SEQ ID NO: 1936660
aucuccaaacccuacuacu

SEQ ID NO: 1936662 - RNA, 19 nt, Artificial Sequence
  Description of Artificial Sequence: Synthetic oligonucleotide
  Sense strand starting at position 1725 of SEQ ID NO: 1879861
ggagaucucuggaguggag

SEQ ID NO: 1936663 - RNA, 19 nt, Artificial Sequence
  Description of Artificial Sequence: Synthetic oligonucleotide
  Antisense strand to SEQ ID NO: 1936662
cuccacuccagagaucucc

SEQ ID NO: 1936664 - RNA, 19 nt, Artificial Sequence
  Description of Artificial Sequence: Synthetic oligonucleotide
  Sense strand starting at position 1745 of SEQ ID NO: 1879861
gugugcaguugcuauggaa

SEQ ID NO: 1936665 - RNA, 19 nt, Artificial Sequence
  Description of Artificial Sequence: Synthetic oligonucleotide
  Antisense strand to SEQ ID NO: 1936664
uuccauagcaacugcacac

SEQ ID NO: 1936666 - RNA, 19 nt, Artificial Sequence
  Description of Artificial Sequence: Synthetic oligonucleotide
  Sense strand starting at position 1748 of SEQ ID NO: 1879861
ugcaguugcuauggaaaug

SEQ ID NO: 1936667 - RNA, 19 nt, Artificial Sequence
  Description of Artificial Sequence: Synthetic oligonucleotide
  Antisense strand to SEQ ID NO: 1936666
cauuuccauagcaacugca

SEQ ID NO: 1936668 - RNA, 19 nt, Artificial Sequence
  Description of Artificial Sequence: Synthetic oligonucleotide
  Sense strand starting at position 1781 of SEQ ID NO: 1879861
ggagcaagaugcuuuaccu

SEQ ID NO: 1936669 - RNA, 19 nt, Artificial Sequence
  Description of Artificial Sequence: Synthetic oligonucleotide
  Antisense strand to SEQ ID NO: 1936668
agguaaagcaucuugcucc

SEQ ID NO: 1936670 - RNA, 19 nt, Artificial Sequence
  Description of Artificial Sequence: Synthetic oligonucleotide
  Sense strand starting at position 1824 of SEQ ID NO: 1879861
aggugagcuuccuuaccca

SEQ ID NO: 1936671 - RNA, 19 nt, Artificial Sequence
  Description of Artificial Sequence: Synthetic oligonucleotide
  Antisense strand to SEQ ID NO: 1936670
uggguaaggaagcucaccu

SEQ ID NO: 1936672 - RNA, 19 nt, Artificial Sequence
  Description of Artificial Sequence: Synthetic oligonucleotide
  Sense strand starting at position 2350 of SEQ ID NO: 1879861
gcaaacugccuuugguaaa

SEQ ID NO: 1936673 - RNA, 19 nt, Artificial Sequence
  Description of Artificial Sequence: Synthetic oligonucleotide
  Antisense strand to SEQ ID NO: 1936672
uuuaccaaaggcaguuugc

SEQ ID NO: 1936674 - RNA, 19 nt, Artificial Sequence
  Description of Artificial Sequence: Synthetic oligonucleotide
  Sense strand starting at position 2361 of SEQ ID NO: 1879861
uugguaaauguugguucua

SEQ ID NO: 1936675 - RNA, 19 nt, Artificial Sequence
  Description of Artificial Sequence: Synthetic oligonucleotide
  Antisense strand to SEQ ID NO: 1936674
uagaaccaacauuuaccaa

SEQ ID NO: 1936676 - RNA, 19 nt, Artificial Sequence
  Description of Artificial Sequence: Synthetic oligonucleotide
  Sense strand starting at position 2362 of SEQ ID NO: 1879861
ugguaaauguugguucuau

SEQ ID NO: 1936677 - RNA, 19 nt, Artificial Sequence
  Description of Artificial Sequence: Synthetic oligonucleotide
  Antisense strand to SEQ ID NO: 1936676
auagaaccaacauuuacca

SEQ ID NO: 1936678 - RNA, 19 nt, Artificial Sequence
  Description of Artificial Sequence: Synthetic oligonucleotide
  Sense strand starting at position 2363 of SEQ ID NO: 1879861
gguaaauguugguucuauc

SEQ ID NO: 1936679 - RNA, 19 nt, Artificial Sequence
  Description of Artificial Sequence: Synthetic oligonucleotide
  Antisense strand to SEQ ID NO: 1936678
gauagaaccaacauuuacc

SEQ ID NO: 1936680 - RNA, 19 nt, Artificial Sequence
  Description of Artificial Sequence: Synthetic oligonucleotide
  Sense strand starting at position 2366 of SEQ ID NO: 1879861
aaauguugguucuaucaug

SEQ ID NO: 1936681 - RNA, 19 nt, Artificial Sequence
  Description of Artificial Sequence: Synthetic oligonucleotide
  Antisense strand to SEQ ID NO: 1936680
caugauagaaccaacauuu

SEQ ID NO: 1936682 - RNA, 19 nt, Artificial Sequence
  Description of Artificial Sequence: Synthetic oligonucleotide
  Sense strand starting at position 2786 of SEQ ID NO: 1879861
gccagaggcugguuucaag

SEQ ID NO: 1936683 - RNA, 19 nt, Artificial Sequence
  Description of Artificial Sequence: Synthetic oligonucleotide
  Antisense strand to SEQ ID NO: 1936682
cuugaaaccagccucuggc

SEQ ID NO: 1936684 - RNA, 19 nt, Artificial Sequence
  Description of Artificial Sequence: Synthetic oligonucleotide
  Sense strand starting at position 2867 of SEQ ID NO: 1879861
agcgauguugcuggcaaga

SEQ ID NO: 1936685 - RNA, 19 nt, Artificial Sequence
  Description of Artificial Sequence: Synthetic oligonucleotide
  Antisense strand to SEQ ID NO: 1936684
ucuugccagcaacaucgcu

SEQ ID NO: 1936686 - RNA, 19 nt, Artificial Sequence
  Description of Artificial Sequence: Synthetic oligonucleotide
  Sense strand starting at position 2869 of SEQ ID NO: 1879861
cgauguugcuggcaagaga

SEQ ID NO: 1936687 - RNA, 19 nt, Artificial Sequence
  Description of Artificial Sequence: Synthetic oligonucleotide
  Antisense strand to SEQ ID NO: 1936686
ucucuugccagcaacaucg

SEQ ID NO: 1936688 - RNA, 19 nt, Artificial Sequence
  Description of Artificial Sequence: Synthetic oligonucleotide
  Sense strand starting at position 2937 of SEQ ID NO: 1879861
acuugacagugccuaucaa

SEQ ID NO: 1936689 - RNA, 19 nt, Artificial Sequence
  Description of Artificial Sequence: Synthetic oligonucleotide
  Antisense strand to SEQ ID NO: 1936688
uugauaggcacugucaagu

SEQ ID NO: 1936690 - RNA, 19 nt, Artificial Sequence
  Description of Artificial Sequence: Synthetic oligonucleotide
  Sense strand starting at position 2938 of SEQ ID NO: 1879861
cuugacagugccuaucaaa

SEQ ID NO: 1936691 - RNA, 19 nt, Artificial Sequence
  Description of Artificial Sequence: Synthetic oligonucleotide
  Antisense strand to SEQ ID NO: 1936690
uuugauaggcacugucaag

SEQ ID NO: 1936692 - RNA, 19 nt, Artificial Sequence
  Description of Artificial Sequence: Synthetic oligonucleotide
  Sense strand starting at position 3118 of SEQ ID NO: 1879861
ggguuuauuaagugaugcu

SEQ ID NO: 1936693 - RNA, 19 nt, Artificial Sequence
  Description of Artificial Sequence: Synthetic oligonucleotide
  Antisense strand to SEQ ID NO: 1936692
agcaucacuuaauaaaccc

SEQ ID NO: 1936694 - RNA, 19 nt, Artificial Sequence
  Description of Artificial Sequence: Synthetic oligonucleotide
  Sense strand starting at position 3119 of SEQ ID NO: 1879861
gguuuauuaagugaugcuu

SEQ ID NO: 1936695 - RNA, 19 nt, Artificial Sequence
  Description of Artificial Sequence: Synthetic oligonucleotide
  Antisense strand to SEQ ID NO: 1936694
aagcaucacuuaauaaacc

SEQ ID NO: 1936696 - RNA, 19 nt, Artificial Sequence
  Description of Artificial Sequence: Synthetic oligonucleotide
  Sense strand starting at position 3480 of SEQ ID NO: 1879861
ggucuucaguccugcggaa

SEQ ID NO: 1936697 - RNA, 19 nt, Artificial Sequence
  Description of Artificial Sequence: Synthetic oligonucleotide
  Antisense strand to SEQ ID NO: 1936696
uuccgcaggacugaagacc

SEQ ID NO: 1936698 - RNA, 19 nt, Artificial Sequence
  Description of Artificial Sequence: Synthetic oligonucleotide
  Sense strand starting at position 3896 of SEQ ID NO: 1879861
aggccuugcuucucuaaca

SEQ ID NO: 1936699 - RNA, 19 nt, Artificial Sequence
  Description of Artificial Sequence: Synthetic oligonucleotide
  Antisense strand to SEQ ID NO: 1936698
uguuagagaagcaaggccu

SEQ ID NO: 1936700 - RNA, 19 nt, Artificial Sequence
  Description of Artificial Sequence: Synthetic oligonucleotide
  Sense strand starting at position 3967 of SEQ ID NO: 1879861
gaggaugggugauccuuga

SEQ ID NO: 1936701 - RNA, 19 nt, Artificial Sequence
  Description of Artificial Sequence: Synthetic oligonucleotide
  Antisense strand to SEQ ID NO: 1936700
ucaaggaucacccauccuc

SEQ ID NO: 1936702 - RNA, 19 nt, Artificial Sequence
  Description of Artificial Sequence: Synthetic oligonucleotide
  Sense strand starting at position 3971 of SEQ ID NO: 1879861
augggugauccuugaggag

SEQ ID NO: 1936703 - RNA, 19 nt, Artificial Sequence
  Description of Artificial Sequence: Synthetic oligonucleotide
  Antisense strand to SEQ ID NO: 1936702
cuccucaaggaucacccau

SEQ ID NO: 1936704 - RNA, 19 nt, Artificial Sequence
  Description of Artificial Sequence: Synthetic oligonucleotide
  Sense strand starting at position 183 of SEQ ID NO: 1879862
aggauugcuccuugggagu

SEQ ID NO: 1936705 - RNA, 19 nt, Artificial Sequence
  Description of Artificial Sequence: Synthetic oligonucleotide
  Antisense strand to SEQ ID NO: 1936704
acucccaaggagcaauccu

SEQ ID NO: 1936706 - RNA, 19 nt, Artificial Sequence
  Description of Artificial Sequence: Synthetic oligonucleotide
  Sense strand starting at position 402 of SEQ ID NO: 1879862
gcaguuacccuggaucuca

SEQ ID NO: 1936707 - RNA, 19 nt, Artificial Sequence
  Description of Artificial Sequence: Synthetic oligonucleotide
  Antisense strand to SEQ ID NO: 1936706
ugagauccaggguaacugc

SEQ ID NO: 1936708 - RNA, 19 nt, Artificial Sequence
  Description of Artificial Sequence: Synthetic oligonucleotide
  Sense strand starting at position 417 of SEQ ID NO: 1879862
cucaguugggcugagucau

SEQ ID NO: 1936709 - RNA, 19 nt, Artificial Sequence
  Description of Artificial Sequence: Synthetic oligonucleotide
  Antisense strand to SEQ ID NO: 1936708
augacucagcccaacugag

SEQ ID NO: 1936710 - RNA, 19 nt, Artificial Sequence
  Description of Artificial Sequence: Synthetic oligonucleotide
  Sense strand starting at position 423 of SEQ ID NO: 1879862
ugggcugagucaucagaga

SEQ ID NO: 1936711 - RNA, 19 nt, Artificial Sequence
  Description of Artificial Sequence: Synthetic oligonucleotide
  Antisense strand to SEQ ID NO: 1936710
ucucugaugacucagccca

SEQ ID NO: 1936712 - RNA, 19 nt, Artificial Sequence
  Description of Artificial Sequence: Synthetic oligonucleotide
  Sense strand starting at position 483 of SEQ ID NO: 1879862
agagguauuuauuaguuac

SEQ ID NO: 1936713 - RNA, 19 nt, Artificial Sequence
  Description of Artificial Sequence: Synthetic oligonucleotide
  Antisense strand to SEQ ID NO: 1936712
guaacuaauaaauaccucu

SEQ ID NO: 1936714 - RNA, 19 nt, Artificial Sequence
  Description of Artificial Sequence: Synthetic oligonucleotide
  Sense strand starting at position 656 of SEQ ID NO: 1879862
agcaguagacgauagcaua

SEQ ID NO: 1936715 - RNA, 19 nt, Artificial Sequence
  Description of Artificial Sequence: Synthetic oligonucleotide
  Antisense strand to SEQ ID NO: 1936714
uaugcuaucgucuacugcu

SEQ ID NO: 1936716 - RNA, 19 nt, Artificial Sequence
  Description of Artificial Sequence: Synthetic oligonucleotide
  Sense strand starting at position 684 of SEQ ID NO: 1879862
gcugguucccgggaauuaa

SEQ ID NO: 1936717 - RNA, 19 nt, Artificial Sequence
  Description of Artificial Sequence: Synthetic oligonucleotide
  Antisense strand to SEQ ID NO: 1936716
uuaauucccgggaaccagc

SEQ ID NO: 1936718 - RNA, 19 nt, Artificial Sequence
  Description of Artificial Sequence: Synthetic oligonucleotide
  Sense strand starting at position 802 of SEQ ID NO: 1879862
uguggucaaccagauucuu

SEQ ID NO: 1936719 - RNA, 19 nt, Artificial Sequence
  Description of Artificial Sequence: Synthetic oligonucleotide
  Antisense strand to SEQ ID NO: 1936718
aagaaucugguugaccaca

SEQ ID NO: 1936720 - RNA, 19 nt, Artificial Sequence
  Description of Artificial Sequence: Synthetic oligonucleotide
  Sense strand starting at position 811 of SEQ ID NO: 1879862
ccagauucuucuuugucca

SEQ ID NO: 1936721 - RNA, 19 nt, Artificial Sequence
  Description of Artificial Sequence: Synthetic oligonucleotide
  Antisense strand to SEQ ID NO: 1936720
uggacaaagaagaaucugg

SEQ ID NO: 1936722 - RNA, 19 nt, Artificial Sequence
  Description of Artificial Sequence: Synthetic oligonucleotide
  Sense strand starting at position 849 of SEQ ID NO: 1879862
gccaaugguagccacagaa

SEQ ID NO: 1936723 - RNA, 19 nt, Artificial Sequence
  Description of Artificial Sequence: Synthetic oligonucleotide
  Antisense strand to SEQ ID NO: 1936722
uucuguggcuaccauuggc

SEQ ID NO: 1936724 - RNA, 19 nt, Artificial Sequence
  Description of Artificial Sequence: Synthetic oligonucleotide
  Sense strand starting at position 956 of SEQ ID NO: 1879862
ccucuagaggcuuacaauc

SEQ ID NO: 1936725 - RNA, 19 nt, Artificial Sequence
  Description of Artificial Sequence: Synthetic oligonucleotide
  Antisense strand to SEQ ID NO: 1936724
gauuguaagccucuagagg

SEQ ID NO: 1936726 - RNA, 19 nt, Artificial Sequence
  Description of Artificial Sequence: Synthetic oligonucleotide
  Sense strand starting at position 2136 of SEQ ID NO: 1879862
gagggaucccuccgcccau

SEQ ID NO: 1936727 - RNA, 19 nt, Artificial Sequence
  Description of Artificial Sequence: Synthetic oligonucleotide
  Antisense strand to SEQ ID NO: 1936726
augggcggagggaucccuc

SEQ ID NO: 1936728 - RNA, 19 nt, Artificial Sequence
  Description of Artificial Sequence: Synthetic oligonucleotide
  Sense strand starting at position 2313 of SEQ ID NO: 1879862
cugaucugggagcgauaga

SEQ ID NO: 1936729 - RNA, 19 nt, Artificial Sequence
  Description of Artificial Sequence: Synthetic oligonucleotide
  Antisense strand to SEQ ID NO: 1936728
ucuaucgcucccagaucag

SEQ ID NO: 1936730 - RNA, 19 nt, Artificial Sequence
  Description of Artificial Sequence: Synthetic oligonucleotide
  Sense strand starting at position 2411 of SEQ ID NO: 1879862
guaggacgcagcugagaau

SEQ ID NO: 1936731 - RNA, 19 nt, Artificial Sequence
  Description of Artificial Sequence: Synthetic oligonucleotide
  Antisense strand to SEQ ID NO: 1936730
auucucagcugcguccuac

SEQ ID NO: 1936732 - RNA, 19 nt, Artificial Sequence
  Description of Artificial Sequence: Synthetic oligonucleotide
  Sense strand starting at position 2418 of SEQ ID NO: 1879862
gcagcugagaauugggaaa

SEQ ID NO: 1936733 - RNA, 19 nt, Artificial Sequence
  Description of Artificial Sequence: Synthetic oligonucleotide
  Antisense strand to SEQ ID NO: 1936732
uuucccaauucucagcugc

SEQ ID NO: 1936734 - RNA, 19 nt, Artificial Sequence
  Description of Artificial Sequence: Synthetic oligonucleotide
  Sense strand starting at position 2459 of SEQ ID NO: 1879862
cuguccaucucaguuaaau

SEQ ID NO: 1936735 - RNA, 19 nt, Artificial Sequence
  Description of Artificial Sequence: Synthetic oligonucleotide
  Antisense strand to SEQ ID NO: 1936734
auuuaacugagauggacag

SEQ ID NO: 1936736 - RNA, 19 nt, Artificial Sequence
  Description of Artificial Sequence: Synthetic oligonucleotide
  Sense strand starting at position 2640 of SEQ ID NO: 1879862
aagagccaucgacgauaau

SEQ ID NO: 1936737 - RNA, 19 nt, Artificial Sequence
  Description of Artificial Sequence: Synthetic oligonucleotide
  Antisense strand to SEQ ID NO: 1936736
auuaucgucgauggcucuu

SEQ ID NO: 1936738 - RNA, 19 nt, Artificial Sequence
  Description of Artificial Sequence: Synthetic oligonucleotide
  Sense strand starting at position 2641 of SEQ ID NO: 1879862
agagccaucgacgauaauu

SEQ ID NO: 1936739 - RNA, 19 nt, Artificial Sequence
  Description of Artificial Sequence: Synthetic oligonucleotide
  Antisense strand to SEQ ID NO: 1936738
aauuaucgucgauggcucu

SEQ ID NO: 1936740 - RNA, 19 nt, Artificial Sequence
  Description of Artificial Sequence: Synthetic oligonucleotide
  Sense strand starting at position 2761 of SEQ ID NO: 1879862
ugccacaucgcauaucuau

SEQ ID NO: 1936741 - RNA, 19 nt, Artificial Sequence
  Description of Artificial Sequence: Synthetic oligonucleotide
  Antisense strand to SEQ ID NO: 1936740
auagauaugcgauguggca

SEQ ID NO: 1936742 - RNA, 19 nt, Artificial Sequence
  Description of Artificial Sequence: Synthetic oligonucleotide
  Sense strand starting at position 2826 of SEQ ID NO: 1879862
uugacucuccauugcagua

SEQ ID NO: 1936743 - RNA, 19 nt, Artificial Sequence
  Description of Artificial Sequence: Synthetic oligonucleotide
  Antisense strand to SEQ ID NO: 1936742
uacugcaauggagagucaa

SEQ ID NO: 1936744 - RNA, 19 nt, Artificial Sequence
  Description of Artificial Sequence: Synthetic oligonucleotide
  Sense strand starting at position 2894 of SEQ ID NO: 1879862
ggaauacguucucccagga

SEQ ID NO: 1936745 - RNA, 19 nt, Artificial Sequence
  Description of Artificial Sequence: Synthetic oligonucleotide
  Antisense strand to SEQ ID NO: 1936744
uccugggagaacguauucc

SEQ ID NO: 1936746 - RNA, 19 nt, Artificial Sequence
  Description of Artificial Sequence: Synthetic oligonucleotide
  Sense strand starting at position 3008 of SEQ ID NO: 1879862
auugaagacuucuuaagca

SEQ ID NO: 1936747 - RNA, 19 nt, Artificial Sequence
  Description of Artificial Sequence: Synthetic oligonucleotide
  Antisense strand to SEQ ID NO: 1936746
ugcuuaagaagucuucaau

SEQ ID NO: 1936748 - RNA, 19 nt, Artificial Sequence
  Description of Artificial Sequence: Synthetic oligonucleotide
  Sense strand starting at position 3018 of SEQ ID NO: 1879862
ucuuaagcauaagagauuu

SEQ ID NO: 1936749 - RNA, 19 nt, Artificial Sequence
  Description of Artificial Sequence: Synthetic oligonucleotide
  Antisense strand to SEQ ID NO: 1936748
aaaucucuuaugcuuaaga

SEQ ID NO: 1936750 - RNA, 19 nt, Artificial Sequence
  Description of Artificial Sequence: Synthetic oligonucleotide
  Sense strand starting at position 3035 of SEQ ID NO: 1879862
uuccuuccacuaggugaau

SEQ ID NO: 1936751 - RNA, 19 nt, Artificial Sequence
  Description of Artificial Sequence: Synthetic oligonucleotide
  Antisense strand to SEQ ID NO: 1936750
auucaccuaguggaaggaa

SEQ ID NO: 1936752 - RNA, 19 nt, Artificial Sequence
  Description of Artificial Sequence: Synthetic oligonucleotide
  Sense strand starting at position 3099 of SEQ ID NO: 1879862
ggcagcuuucuggaugaaa

SEQ ID NO: 1936753 - RNA, 19 nt, Artificial Sequence
  Description of Artificial Sequence: Synthetic oligonucleotide
  Antisense strand to SEQ ID NO: 1936752
uuucauccagaaagcugcc

SEQ ID NO: 1936754 - RNA, 19 nt, Artificial Sequence
  Description of Artificial Sequence: Synthetic oligonucleotide
  Sense strand starting at position 3101 of SEQ ID NO: 1879862
cagcuuucuggaugaaaga

SEQ ID NO: 1936755 - RNA, 19 nt, Artificial Sequence
  Description of Artificial Sequence: Synthetic oligonucleotide
  Antisense strand to SEQ ID NO: 1936754
ucuuucauccagaaagcug

SEQ ID NO: 1936756 - RNA, 19 nt, Artificial Sequence
  Description of Artificial Sequence: Synthetic oligonucleotide
  Sense strand starting at position 3319 of SEQ ID NO: 1879862
caauauggugguugugaag

SEQ ID NO: 1936757 - RNA, 19 nt, Artificial Sequence
  Description of Artificial Sequence: Synthetic oligonucleotide
  Antisense strand to SEQ ID NO: 1936756
cuucacaaccaccauauug

SEQ ID NO: 1936758 - RNA, 19 nt, Artificial Sequence
  Description of Artificial Sequence: Synthetic oligonucleotide
  Sense strand starting at position 3362 of SEQ ID NO: 1879862
gcguuuagagcagugcuuu

SEQ ID NO: 1936759 - RNA, 19 nt, Artificial Sequence
  Description of Artificial Sequence: Synthetic oligonucleotide
  Antisense strand to SEQ ID NO: 1936758
aaagcacugcucuaaacgc

SEQ ID NO: 1936760 - RNA, 19 nt, Artificial Sequence
  Description of Artificial Sequence: Synthetic oligonucleotide
  Sense strand starting at position 3503 of SEQ ID NO: 1879862
guguauuucuaccuguaug

SEQ ID NO: 1936761 - RNA, 19 nt, Artificial Sequence
  Description of Artificial Sequence: Synthetic oligonucleotide
  Antisense strand to SEQ ID NO: 1936760
cauacagguagaaauacac

SEQ ID NO: 1936762 - RNA, 19 nt, Artificial Sequence
  Description of Artificial Sequence: Synthetic oligonucleotide
  Sense strand starting at position 3585 of SEQ ID NO: 1879862
acucgccuucuguauauaa

SEQ ID NO: 1936763 - RNA, 19 nt, Artificial Sequence
  Description of Artificial Sequence: Synthetic oligonucleotide
  Antisense strand to SEQ ID NO: 1936762
uuauauacagaaggcgagu

SEQ ID NO: 1936764 - RNA, 19 nt, Artificial Sequence
  Description of Artificial Sequence: Synthetic oligonucleotide
  Sense strand starting at position 3587 of SEQ ID NO: 1879862
ucgccuucuguauauaauu

SEQ ID NO: 1936765 - RNA, 19 nt, Artificial Sequence
  Description of Artificial Sequence: Synthetic oligonucleotide
  Antisense strand to SEQ ID NO: 1936764
aauuauauacagaaggcga

SEQ ID NO: 1936766 - RNA, 19 nt, Artificial Sequence
  Description of Artificial Sequence: Synthetic oligonucleotide
  Sense strand starting at position 3700 of SEQ ID NO: 1879862
cugucacuauguccuaauu

SEQ ID NO: 1936767 - RNA, 19 nt, Artificial Sequence
  Description of Artificial Sequence: Synthetic oligonucleotide
  Antisense strand to SEQ ID NO: 1936766
aauuaggacauagugacag

SEQ ID NO: 1936768 - RNA, 19 nt, Artificial Sequence
  Description of Artificial Sequence: Synthetic oligonucleotide
  Sense strand starting at position 3782 of SEQ ID NO: 1879862
aucauuccuugucuggauu

SEQ ID NO: 1936769 - RNA, 19 nt, Artificial Sequence
  Description of Artificial Sequence: Synthetic oligonucleotide
  Antisense strand to SEQ ID NO: 1936768
aauccagacaaggaaugau

SEQ ID NO: 1936770 - RNA, 19 nt, Artificial Sequence
  Description of Artificial Sequence: Synthetic oligonucleotide
  Sense strand starting at position 3783 of SEQ ID NO: 1879862
ucauuccuugucuggauua

SEQ ID NO: 1936771 - RNA, 19 nt, Artificial Sequence
  Description of Artificial Sequence: Synthetic oligonucleotide
  Antisense strand to SEQ ID NO: 1936770
uaauccagacaaggaauga

SEQ ID NO: 1936772 - RNA, 19 nt, Artificial Sequence
  Description of Artificial Sequence: Synthetic oligonucleotide
  Sense strand starting at position 3785 of SEQ ID NO: 1879862
auuccuugucuggauuauu

SEQ ID NO: 1936773 - RNA, 19 nt, Artificial Sequence
  Description of Artificial Sequence: Synthetic oligonucleotide
  Antisense strand to SEQ ID NO: 1936772
aauaauccagacaaggaau

SEQ ID NO: 1936774 - RNA, 19 nt, Artificial Sequence
  Description of Artificial Sequence: Synthetic oligonucleotide
  Sense strand starting at position 3826 of SEQ ID NO: 1879862
gucugaccucgucauagac

SEQ ID NO: 1936775 - RNA, 19 nt, Artificial Sequence
  Description of Artificial Sequence: Synthetic oligonucleotide
  Antisense strand to SEQ ID NO: 1936774
gucuaugacgaggucagac

SEQ ID NO: 1936776 - RNA, 19 nt, Artificial Sequence
  Description of Artificial Sequence: Synthetic oligonucleotide
  Sense strand starting at position 3836 of SEQ ID NO: 1879862
gucauagacuguuugugga

SEQ ID NO: 1936777 - RNA, 19 nt, Artificial Sequence
  Description of Artificial Sequence: Synthetic oligonucleotide
  Antisense strand to SEQ ID NO: 1936776
uccacaaacagucuaugac

SEQ ID NO: 1936778 - RNA, 19 nt, Artificial Sequence
  Description of Artificial Sequence: Synthetic oligonucleotide
  Sense strand starting at position 3843 of SEQ ID NO: 1879862
acuguuuguggaugauuau

SEQ ID NO: 1936779 - RNA, 19 nt, Artificial Sequence
  Description of Artificial Sequence: Synthetic oligonucleotide
  Antisense strand to SEQ ID NO: 1936778
auaaucauccacaaacagu

SEQ ID NO: 1936780 - RNA, 19 nt, Artificial Sequence
  Description of Artificial Sequence: Synthetic oligonucleotide
  Sense strand starting at position 3844 of SEQ ID NO: 1879862
cuguuuguggaugauuauu

SEQ ID NO: 1936781 - RNA, 19 nt, Artificial Sequence
  Description of Artificial Sequence: Synthetic oligonucleotide
  Antisense strand to SEQ ID NO: 1936780
aauaaucauccacaaacag

SEQ ID NO: 1936782 - RNA, 19 nt, Artificial Sequence
  Description of Artificial Sequence: Synthetic oligonucleotide
  Sense strand starting at position 3921 of SEQ ID NO: 1879862
uggcaaauugcuuaaccua

SEQ ID NO: 1936783 - RNA, 19 nt, Artificial Sequence
  Description of Artificial Sequence: Synthetic oligonucleotide
  Antisense strand to SEQ ID NO: 1936782
uagguuaagcaauuugcca

SEQ ID NO: 1936784 - RNA, 19 nt, Artificial Sequence
  Description of Artificial Sequence: Synthetic oligonucleotide
  Sense strand starting at position 281 of SEQ ID NO: 1879863
guggacaugugcuccuuau

SEQ ID NO: 1936785 - RNA, 19 nt, Artificial Sequence
  Description of Artificial Sequence: Synthetic oligonucleotide
  Antisense strand to SEQ ID NO: 1936784
auaaggagcacauguccac

SEQ ID NO: 1936786 - RNA, 19 nt, Artificial Sequence
  Description of Artificial Sequence: Synthetic oligonucleotide
  Sense strand starting at position 340 of SEQ ID NO: 1879863
gguaccuccuaauccuaga

SEQ ID NO: 1936787 - RNA, 19 nt, Artificial Sequence
  Description of Artificial Sequence: Synthetic oligonucleotide
  Antisense strand to SEQ ID NO: 1936786
ucuaggauuaggagguacc

SEQ ID NO: 1936788 - RNA, 19 nt, Artificial Sequence
  Description of Artificial Sequence: Synthetic oligonucleotide
  Sense strand starting at position 454 of SEQ ID NO: 1879863
gggagaguacucugugcag

SEQ ID NO: 1936789 - RNA, 19 nt, Artificial Sequence
  Description of Artificial Sequence: Synthetic oligonucleotide
  Antisense strand to SEQ ID NO: 1936788
cugcacagaguacucuccc

SEQ ID NO: 1936790 - RNA, 19 nt, Artificial Sequence
  Description of Artificial Sequence: Synthetic oligonucleotide
  Sense strand starting at position 456 of SEQ ID NO: 1879863
gagaguacucugugcagug

SEQ ID NO: 1936791 - RNA, 19 nt, Artificial Sequence
  Description of Artificial Sequence: Synthetic oligonucleotide
  Antisense strand to SEQ ID NO: 1936790
cacugcacagaguacucuc

SEQ ID NO: 1936792 - RNA, 19 nt, Artificial Sequence
  Description of Artificial Sequence: Synthetic oligonucleotide
  Sense strand starting at position 708 of SEQ ID NO: 1879863
cuugguucagguggucaua

SEQ ID NO: 1936793 - RNA, 19 nt, Artificial Sequence
  Description of Artificial Sequence: Synthetic oligonucleotide
  Antisense strand to SEQ ID NO: 1936792
uaugaccaccugaaccaag

SEQ ID NO: 1936794 - RNA, 19 nt, Artificial Sequence
  Description of Artificial Sequence: Synthetic oligonucleotide
  Sense strand starting at position 879 of SEQ ID NO: 1879863
gggcuauacugagcugagu

SEQ ID NO: 1936795 - RNA, 19 nt, Artificial Sequence
  Description of Artificial Sequence: Synthetic oligonucleotide
  Antisense strand to SEQ ID NO: 1936794
acucagcucaguauagccc

SEQ ID NO: 1936796 - RNA, 19 nt, Artificial Sequence
  Description of Artificial Sequence: Synthetic oligonucleotide
  Sense strand starting at position 881 of SEQ ID NO: 1879863
gcuauacugagcugaguaa

SEQ ID NO: 1936797 - RNA, 19 nt, Artificial Sequence
  Description of Artificial Sequence: Synthetic oligonucleotide
  Antisense strand to SEQ ID NO: 1936796
uuacucagcucaguauagc

SEQ ID NO: 1936798 - RNA, 19 nt, Artificial Sequence
  Description of Artificial Sequence: Synthetic oligonucleotide
  Sense strand starting at position 893 of SEQ ID NO: 1879863
ugaguaaggacuugccauc

SEQ ID NO: 1936799 - RNA, 19 nt, Artificial Sequence
  Description of Artificial Sequence: Synthetic oligonucleotide
  Antisense strand to SEQ ID NO: 1936798
gauggcaaguccuuacuca

SEQ ID NO: 1936800 - RNA, 19 nt, Artificial Sequence
  Description of Artificial Sequence: Synthetic oligonucleotide
  Sense strand starting at position 1140 of SEQ ID NO: 1879863
ggacgauugucaccucccu

SEQ ID NO: 1936801 - RNA, 19 nt, Artificial Sequence
  Description of Artificial Sequence: Synthetic oligonucleotide
  Antisense strand to SEQ ID NO: 1936800
agggaggugacaaucgucc

SEQ ID NO: 1936802 - RNA, 19 nt, Artificial Sequence
  Description of Artificial Sequence: Synthetic oligonucleotide
  Sense strand starting at position 1184 of SEQ ID NO: 1879863
aaggauaagugacuuguca

SEQ ID NO: 1936803 - RNA, 19 nt, Artificial Sequence
  Description of Artificial Sequence: Synthetic oligonucleotide
  Antisense strand to SEQ ID NO: 1936802
ugacaagucacuuauccuu

SEQ ID NO: 1936804 - RNA, 19 nt, Artificial Sequence
  Description of Artificial Sequence: Synthetic oligonucleotide
  Sense strand starting at position 1186 of SEQ ID NO: 1879863
ggauaagugacuugucaag

SEQ ID NO: 1936805 - RNA, 19 nt, Artificial Sequence
  Description of Artificial Sequence: Synthetic oligonucleotide
  Antisense strand to SEQ ID NO: 1936804
cuugacaagucacuuaucc

SEQ ID NO: 1936806 - RNA, 19 nt, Artificial Sequence
  Description of Artificial Sequence: Synthetic oligonucleotide
  Sense strand starting at position 1188 of SEQ ID NO: 1879863
auaagugacuugucaagca

SEQ ID NO: 1936807 - RNA, 19 nt, Artificial Sequence
  Description of Artificial Sequence: Synthetic oligonucleotide
  Antisense strand to SEQ ID NO: 1936806
ugcuugacaagucacuuau

SEQ ID NO: 1936808 - RNA, 19 nt, Artificial Sequence
  Description of Artificial Sequence: Synthetic oligonucleotide
  Sense strand starting at position 1280 of SEQ ID NO: 1879863
aaguccugggcugguaaua

SEQ ID NO: 1936809 - RNA, 19 nt, Artificial Sequence
  Description of Artificial Sequence: Synthetic oligonucleotide
  Antisense strand to SEQ ID NO: 1936808
uauuaccagcccaggacuu

SEQ ID NO: 1936810 - RNA, 19 nt, Artificial Sequence
  Description of Artificial Sequence: Synthetic oligonucleotide
  Sense strand starting at position 1362 of SEQ ID NO: 1879863
ggcagaguuguugagcaaa

SEQ ID NO: 1936811 - RNA, 19 nt, Artificial Sequence
  Description of Artificial Sequence: Synthetic oligonucleotide
  Antisense strand to SEQ ID NO: 1936810
uuugcucaacaacucugcc

SEQ ID NO: 1936812 - RNA, 19 nt, Artificial Sequence
  Description of Artificial Sequence: Synthetic oligonucleotide
  Sense strand starting at position 1364 of SEQ ID NO: 1879863
cagaguuguugagcaaacu

SEQ ID NO: 1936813 - RNA, 19 nt, Artificial Sequence
  Description of Artificial Sequence: Synthetic oligonucleotide
  Antisense strand to SEQ ID NO: 1936812
aguuugcucaacaacucug

SEQ ID NO: 1936814 - RNA, 19 nt, Artificial Sequence
  Description of Artificial Sequence: Synthetic oligonucleotide
  Sense strand starting at position 1365 of SEQ ID NO: 1879863
agaguuguugagcaaacuc

SEQ ID NO: 1936815 - RNA, 19 nt, Artificial Sequence
  Description of Artificial Sequence: Synthetic oligonucleotide
  Antisense strand to SEQ ID NO: 1936814
gaguuugcucaacaacucu

SEQ ID NO: 1936816 - RNA, 19 nt, Artificial Sequence
  Description of Artificial Sequence: Synthetic oligonucleotide
  Sense strand starting at position 1514 of SEQ ID NO: 1879863
gccaaugggccucgagaau

SEQ ID NO: 1936817 - RNA, 19 nt, Artificial Sequence
  Description of Artificial Sequence: Synthetic oligonucleotide
  Antisense strand to SEQ ID NO: 1936816
auucucgaggcccauuggc

SEQ ID NO: 1936818 - RNA, 19 nt, Artificial Sequence
  Description of Artificial Sequence: Synthetic oligonucleotide
  Sense strand starting at position 1602 of SEQ ID NO: 1879863
gcaugaguucugugucaua

SEQ ID NO: 1936819 - RNA, 19 nt, Artificial Sequence
  Description of Artificial Sequence: Synthetic oligonucleotide
  Antisense strand to SEQ ID NO: 1936818
uaugacacagaacucaugc

SEQ ID NO: 1936820 - RNA, 19 nt, Artificial Sequence
  Description of Artificial Sequence: Synthetic oligonucleotide
  Sense strand starting at position 2744 of SEQ ID NO: 1879863
ggacgauccuaucugauua

SEQ ID NO: 1936821 - RNA, 19 nt, Artificial Sequence
  Description of Artificial Sequence: Synthetic oligonucleotide
  Antisense strand to SEQ ID NO: 1936820
uaaucagauaggaucgucc

SEQ ID NO: 1936822 - RNA, 19 nt, Artificial Sequence
  Description of Artificial Sequence: Synthetic oligonucleotide
  Sense strand starting at position 2813 of SEQ ID NO: 1879863
cccaaacagcgucagauua

SEQ ID NO: 1936823 - RNA, 19 nt, Artificial Sequence
  Description of Artificial Sequence: Synthetic oligonucleotide
  Antisense strand to SEQ ID NO: 1936822
uaaucugacgcuguuuggg

SEQ ID NO: 1936824 - RNA, 19 nt, Artificial Sequence
  Description of Artificial Sequence: Synthetic oligonucleotide
  Sense strand starting at position 2991 of SEQ ID NO: 1879863
ccugcugaccagugagacu

SEQ ID NO: 1936825 - RNA, 19 nt, Artificial Sequence
  Description of Artificial Sequence: Synthetic oligonucleotide
  Antisense strand to SEQ ID NO: 1936824
agucucacuggucagcagg

SEQ ID NO: 1936826 - RNA, 19 nt, Artificial Sequence
  Description of Artificial Sequence: Synthetic oligonucleotide
  Sense strand starting at position 3146 of SEQ ID NO: 1879863
acuagcugcuccuugaaga

SEQ ID NO: 1936827 - RNA, 19 nt, Artificial Sequence
  Description of Artificial Sequence: Synthetic oligonucleotide
  Antisense strand to SEQ ID NO: 1936826
ucuucaaggagcagcuagu

SEQ ID NO: 1936828 - RNA, 19 nt, Artificial Sequence
  Description of Artificial Sequence: Synthetic oligonucleotide
  Sense strand starting at position 3159 of SEQ ID NO: 1879863
ugaagagauugcuugcuuu

SEQ ID NO: 1936829 - RNA, 19 nt, Artificial Sequence
  Description of Artificial Sequence: Synthetic oligonucleotide
  Antisense strand to SEQ ID NO: 1936828
aaagcaagcaaucucuuca

SEQ ID NO: 1936830 - RNA, 19 nt, Artificial Sequence
  Description of Artificial Sequence: Synthetic oligonucleotide
  Sense strand starting at position 3237 of SEQ ID NO: 1879863
uugcaaagacgucauauag

SEQ ID NO: 1936831 - RNA, 19 nt, Artificial Sequence
  Description of Artificial Sequence: Synthetic oligonucleotide
  Antisense strand to SEQ ID NO: 1936830
cuauaugacgucuuugcaa

SEQ ID NO: 1936832 - RNA, 19 nt, Artificial Sequence
  Description of Artificial Sequence: Synthetic oligonucleotide
  Sense strand starting at position 3243 of SEQ ID NO: 1879863
agacgucauauagguacau

SEQ ID NO: 1936833 - RNA, 19 nt, Artificial Sequence
  Description of Artificial Sequence: Synthetic oligonucleotide
  Antisense strand to SEQ ID NO: 1936832
auguaccuauaugacgucu

SEQ ID NO: 1936834 - RNA, 19 nt, Artificial Sequence
  Description of Artificial Sequence: Synthetic oligonucleotide
  Sense strand starting at position 3244 of SEQ ID NO: 1879863
gacgucauauagguacauu

SEQ ID NO: 1936835 - RNA, 19 nt, Artificial Sequence
  Description of Artificial Sequence: Synthetic oligonucleotide
  Antisense strand to SEQ ID NO: 1936834
aauguaccuauaugacguc

SEQ ID NO: 1936836 - RNA, 19 nt, Artificial Sequence
  Description of Artificial Sequence: Synthetic oligonucleotide
  Sense strand starting at position 3286 of SEQ ID NO: 1879863
cucagcuuuccagaagauu

SEQ ID NO: 1936837 - RNA, 19 nt, Artificial Sequence
  Description of Artificial Sequence: Synthetic oligonucleotide
  Antisense strand to SEQ ID NO: 1936836
aaucuucuggaaagcugag

SEQ ID NO: 1936838 - RNA, 19 nt, Artificial Sequence
  Description of Artificial Sequence: Synthetic oligonucleotide
  Sense strand starting at position 3408 of SEQ ID NO: 1879863
gagagcuccuggccucaga

SEQ ID NO: 1936839 - RNA, 19 nt, Artificial Sequence
  Description of Artificial Sequence: Synthetic oligonucleotide
  Antisense strand to SEQ ID NO: 1936838
ucugaggccaggagcucuc

SEQ ID NO: 1936840 - RNA, 19 nt, Artificial Sequence
  Description of Artificial Sequence: Synthetic oligonucleotide
  Sense strand starting at position 3422 of SEQ ID NO: 1879863
ucagauuguacauguggca

SEQ ID NO: 1936841 - RNA, 19 nt, Artificial Sequence
  Description of Artificial Sequence: Synthetic oligonucleotide
  Antisense strand to SEQ ID NO: 1936840
ugccacauguacaaucuga

SEQ ID NO: 1936842 - RNA, 19 nt, Artificial Sequence
  Description of Artificial Sequence: Synthetic oligonucleotide
  Sense strand starting at position 3429 of SEQ ID NO: 1879863
guacauguggcaugacaug

SEQ ID NO: 1936843 - RNA, 19 nt, Artificial Sequence
  Description of Artificial Sequence: Synthetic oligonucleotide
  Antisense strand to SEQ ID NO: 1936842
caugucaugccacauguac

SEQ ID NO: 1936844 - RNA, 19 nt, Artificial Sequence
  Description of Artificial Sequence: Synthetic oligonucleotide
  Sense strand starting at position 3447 of SEQ ID NO: 1879863
gaggcuugcucuuucugga

SEQ ID NO: 1936845 - RNA, 19 nt, Artificial Sequence
  Description of Artificial Sequence: Synthetic oligonucleotide
  Antisense strand to SEQ ID NO: 1936844
uccagaaagagcaagccuc

SEQ ID NO: 1936846 - RNA, 19 nt, Artificial Sequence
  Description of Artificial Sequence: Synthetic oligonucleotide
  Sense strand starting at position 3527 of SEQ ID NO: 1879863
gcagauuccgagugaaaug

SEQ ID NO: 1936847 - RNA, 19 nt, Artificial Sequence
  Description of Artificial Sequence: Synthetic oligonucleotide
  Antisense strand to SEQ ID NO: 1936846
cauuucacucggaaucugc

SEQ ID NO: 1936848 - RNA, 19 nt, Artificial Sequence
  Description of Artificial Sequence: Synthetic oligonucleotide
  Sense strand starting at position 3562 of SEQ ID NO: 1879863
ggugcuggaguccaaaguu

SEQ ID NO: 1936849 - RNA, 19 nt, Artificial Sequence
  Description of Artificial Sequence: Synthetic oligonucleotide
  Antisense strand to SEQ ID NO: 1936848
aacuuuggacuccagcacc

SEQ ID NO: 1936850 - RNA, 19 nt, Artificial Sequence
  Description of Artificial Sequence: Synthetic oligonucleotide
  Sense strand starting at position 3577 of SEQ ID NO: 1879863
aguugaugcucuuuccacu

SEQ ID NO: 1936851 - RNA, 19 nt, Artificial Sequence
  Description of Artificial Sequence: Synthetic oligonucleotide
  Antisense strand to SEQ ID NO: 1936850
aguggaaagagcaucaacu

SEQ ID NO: 1936852 - RNA, 19 nt, Artificial Sequence
  Description of Artificial Sequence: Synthetic oligonucleotide
  Sense strand starting at position 3590 of SEQ ID NO: 1879863
uccacuuuguuugcaaaga

SEQ ID NO: 1936853 - RNA, 19 nt, Artificial Sequence
  Description of Artificial Sequence: Synthetic oligonucleotide
  Antisense strand to SEQ ID NO: 1936852
ucuuugcaaacaaagugga

SEQ ID NO: 1936854 - RNA, 19 nt, Artificial Sequence
  Description of Artificial Sequence: Synthetic oligonucleotide
  Sense strand starting at position 3715 of SEQ ID NO: 1879863
agaguaggagcucaugguu

SEQ ID NO: 1936855 - RNA, 19 nt, Artificial Sequence
  Description of Artificial Sequence: Synthetic oligonucleotide
  Antisense strand to SEQ ID NO: 1936854
aaccaugagcuccuacucu

SEQ ID NO: 1936856 - RNA, 19 nt, Artificial Sequence
  Description of Artificial Sequence: Synthetic oligonucleotide
  Sense strand starting at position 3768 of SEQ ID NO: 1879863
uguugccuguaauuggaau

SEQ ID NO: 1936857 - RNA, 19 nt, Artificial Sequence
  Description of Artificial Sequence: Synthetic oligonucleotide
  Antisense strand to SEQ ID NO: 1936856
auuccaauuacaggcaaca

SEQ ID NO: 1936858 - RNA, 19 nt, Artificial Sequence
  Description of Artificial Sequence: Synthetic oligonucleotide
  Sense strand starting at position 3769 of SEQ ID NO: 1879863
guugccuguaauuggaauu

SEQ ID NO: 1936859 - RNA, 19 nt, Artificial Sequence
  Description of Artificial Sequence: Synthetic oligonucleotide
  Antisense strand to SEQ ID NO: 1936858
aauuccaauuacaggcaac

SEQ ID NO: 1936860 - RNA, 19 nt, Artificial Sequence
  Description of Artificial Sequence: Synthetic oligonucleotide
  Sense strand starting at position 3805 of SEQ ID NO: 1879863
uuggcagcuuccucaucaa

SEQ ID NO: 1936861 - RNA, 19 nt, Artificial Sequence
  Description of Artificial Sequence: Synthetic oligonucleotide
  Antisense strand to SEQ ID NO: 1936860
uugaugaggaagcugccaa

SEQ ID NO: 1936862 - RNA, 19 nt, Artificial Sequence
  Description of Artificial Sequence: Synthetic oligonucleotide
  Sense strand starting at position 3840 of SEQ ID NO: 1879863
aagaauagaugggagcuaa

SEQ ID NO: 1936863 - RNA, 19 nt, Artificial Sequence
  Description of Artificial Sequence: Synthetic oligonucleotide
  Antisense strand to SEQ ID NO: 1936862
uuagcucccaucuauucuu

SEQ ID NO: 1936864 - RNA, 19 nt, Artificial Sequence
  Description of Artificial Sequence: Synthetic oligonucleotide
  Sense strand starting at position 2069 of SEQ ID NO: 1879864
gcucuucuagacugugaca

SEQ ID NO: 1936865 - RNA, 19 nt, Artificial Sequence
  Description of Artificial Sequence: Synthetic oligonucleotide
  Antisense strand to SEQ ID NO: 1936864
ugucacagucuagaagagc

SEQ ID NO: 1936866 - RNA, 19 nt, Artificial Sequence
  Description of Artificial Sequence: Synthetic oligonucleotide
  Sense strand starting at position 2114 of SEQ ID NO: 1879864
uggccuugauaguucugaa

SEQ ID NO: 1936867 - RNA, 19 nt, Artificial Sequence
  Description of Artificial Sequence: Synthetic oligonucleotide
  Antisense strand to SEQ ID NO: 1936866
uucagaacuaucaaggcca

SEQ ID NO: 1936868 - RNA, 19 nt, Artificial Sequence
  Description of Artificial Sequence: Synthetic oligonucleotide
  Sense strand starting at position 2158 of SEQ ID NO: 1879864
uugagauugucugauauuu

SEQ ID NO: 1936869 - RNA, 19 nt, Artificial Sequence
  Description of Artificial Sequence: Synthetic oligonucleotide
  Antisense strand to SEQ ID NO: 1936868
aaauaucagacaaucucaa

SEQ ID NO: 1936870 - RNA, 19 nt, Artificial Sequence
  Description of Artificial Sequence: Synthetic oligonucleotide
  Sense strand starting at position 2160 of SEQ ID NO: 1879864
gagauugucugauauuucu

SEQ ID NO: 1936871 - RNA, 19 nt, Artificial Sequence
  Description of Artificial Sequence: Synthetic oligonucleotide
  Antisense strand to SEQ ID NO: 1936870
agaaauaucagacaaucuc

SEQ ID NO: 1936872 - RNA, 19 nt, Artificial Sequence
  Description of Artificial Sequence: Synthetic oligonucleotide
  Sense strand starting at position 2259 of SEQ ID NO: 1879864
guuacaugccacuaaugac

SEQ ID NO: 1936873 - RNA, 19 nt, Artificial Sequence
  Description of Artificial Sequence: Synthetic oligonucleotide
  Antisense strand to SEQ ID NO: 1936872
gucauuaguggcauguaac

SEQ ID NO: 1936874 - RNA, 19 nt, Artificial Sequence
  Description of Artificial Sequence: Synthetic oligonucleotide
  Sense strand starting at position 2282 of SEQ ID NO: 1879864
uagagauguuagccuugau

SEQ ID NO: 1936875 - RNA, 19 nt, Artificial Sequence
  Description of Artificial Sequence: Synthetic oligonucleotide
  Antisense strand to SEQ ID NO: 1936874
aucaaggcuaacaucucua

SEQ ID NO: 1936876 - RNA, 19 nt, Artificial Sequence
  Description of Artificial Sequence: Synthetic oligonucleotide
  Sense strand starting at position 2285 of SEQ ID NO: 1879864
agauguuagccuugaucag

SEQ ID NO: 1936877 - RNA, 19 nt, Artificial Sequence
  Description of Artificial Sequence: Synthetic oligonucleotide
  Antisense strand to SEQ ID NO: 1936876
cugaucaaggcuaacaucu

SEQ ID NO: 1936878 - RNA, 19 nt, Artificial Sequence
  Description of Artificial Sequence: Synthetic oligonucleotide
  Sense strand starting at position 2386 of SEQ ID NO: 1879864
ggagaauuauguuccaucu

SEQ ID NO: 1936879 - RNA, 19 nt, Artificial Sequence
  Description of Artificial Sequence: Synthetic oligonucleotide
  Antisense strand to SEQ ID NO: 1936878
agauggaacauaauucucc

SEQ ID NO: 1936880 - RNA, 19 nt, Artificial Sequence
  Description of Artificial Sequence: Synthetic oligonucleotide
  Sense strand starting at position 2397 of SEQ ID NO: 1879864
uuccaucuucucgagggua

SEQ ID NO: 1936881 - RNA, 19 nt, Artificial Sequence
  Description of Artificial Sequence: Synthetic oligonucleotide
  Antisense strand to SEQ ID NO: 1936880
uacccucgagaagauggaa

SEQ ID NO: 1936882 - RNA, 19 nt, Artificial Sequence
  Description of Artificial Sequence: Synthetic oligonucleotide
  Sense strand starting at position 2399 of SEQ ID NO: 1879864
ccaucuucucgaggguaga

SEQ ID NO: 1936883 - RNA, 19 nt, Artificial Sequence
  Description of Artificial Sequence: Synthetic oligonucleotide
  Antisense strand to SEQ ID NO: 1936882
ucuacccucgagaagaugg

SEQ ID NO: 1936884 - RNA, 19 nt, Artificial Sequence
  Description of Artificial Sequence: Synthetic oligonucleotide
  Sense strand starting at position 2484 of SEQ ID NO: 1879864
uuacuuguaucaguaugaa

SEQ ID NO: 1936885 - RNA, 19 nt, Artificial Sequence
  Description of Artificial Sequence: Synthetic oligonucleotide
  Antisense strand to SEQ ID NO: 1936884
uucauacugauacaaguaa

SEQ ID NO: 1936886 - RNA, 19 nt, Artificial Sequence
  Description of Artificial Sequence: Synthetic oligonucleotide
  Sense strand starting at position 2487 of SEQ ID NO: 1879864
cuuguaucaguaugaacuc

SEQ ID NO: 1936887 - RNA, 19 nt, Artificial Sequence
  Description of Artificial Sequence: Synthetic oligonucleotide
  Antisense strand to SEQ ID NO: 1936886
gaguucauacugauacaag

SEQ ID NO: 1936888 - RNA, 19 nt, Artificial Sequence
  Description of Artificial Sequence: Synthetic oligonucleotide
  Sense strand starting at position 2496 of SEQ ID NO: 1879864
guaugaacucauggaucuu

SEQ ID NO: 1936889 - RNA, 19 nt, Artificial Sequence
  Description of Artificial Sequence: Synthetic oligonucleotide
  Antisense strand to SEQ ID NO: 1936888
aagauccaugaguucauac

SEQ ID NO: 1936890 - RNA, 19 nt, Artificial Sequence
  Description of Artificial Sequence: Synthetic oligonucleotide
  Sense strand starting at position 2528 of SEQ ID NO: 1879864
gguuaaauccaaugcugaa

SEQ ID NO: 1936891 - RNA, 19 nt, Artificial Sequence
  Description of Artificial Sequence: Synthetic oligonucleotide
  Antisense strand to SEQ ID NO: 1936890
uucagcauuggauuuaacc

SEQ ID NO: 1936892 - RNA, 19 nt, Artificial Sequence
  Description of Artificial Sequence: Synthetic oligonucleotide
  Sense strand starting at position 2748 of SEQ ID NO: 1879864
cccuuuguuggagaacagu

SEQ ID NO: 1936893 - RNA, 19 nt, Artificial Sequence
  Description of Artificial Sequence: Synthetic oligonucleotide
  Antisense strand to SEQ ID NO: 1936892
acuguucuccaacaaaggg

SEQ ID NO: 1936894 - RNA, 19 nt, Artificial Sequence
  Description of Artificial Sequence: Synthetic oligonucleotide
  Sense strand starting at position 2759 of SEQ ID NO: 1879864
agaacaguauuagaaacaa

SEQ ID NO: 1936895 - RNA, 19 nt, Artificial Sequence
  Description of Artificial Sequence: Synthetic oligonucleotide
  Antisense strand to SEQ ID NO: 1936894
uuguuucuaauacuguucu

SEQ ID NO: 1936896 - RNA, 19 nt, Artificial Sequence
  Description of Artificial Sequence: Synthetic oligonucleotide
  Sense strand starting at position 2845 of SEQ ID NO: 1879864
cuuggaaauauaugugugu

SEQ ID NO: 1936897 - RNA, 19 nt, Artificial Sequence
  Description of Artificial Sequence: Synthetic oligonucleotide
  Antisense strand to SEQ ID NO: 1936896
acacacauauauuuccaag

SEQ ID NO: 1936898 - RNA, 19 nt, Artificial Sequence
  Description of Artificial Sequence: Synthetic oligonucleotide
  Sense strand starting at position 2846 of SEQ ID NO: 1879864
uuggaaauauaugugugua

SEQ ID NO: 1936899 - RNA, 19 nt, Artificial Sequence
  Description of Artificial Sequence: Synthetic oligonucleotide
  Antisense strand to SEQ ID NO: 1936898
uacacacauauauuuccaa

SEQ ID NO: 1936900 - RNA, 19 nt, Artificial Sequence
  Description of Artificial Sequence: Synthetic oligonucleotide
  Sense strand starting at position 3168 of SEQ ID NO: 1879864
uccaguaauguauaucuau

SEQ ID NO: 1936901 - RNA, 19 nt, Artificial Sequence
  Description of Artificial Sequence: Synthetic oligonucleotide
  Antisense strand to SEQ ID NO: 1936900
auagauauacauuacugga

SEQ ID NO: 1936902 - RNA, 19 nt, Artificial Sequence
  Description of Artificial Sequence: Synthetic oligonucleotide
  Sense strand starting at position 3193 of SEQ ID NO: 1879864
agaggaaauuugcagugaa

SEQ ID NO: 1936903 - RNA, 19 nt, Artificial Sequence
  Description of Artificial Sequence: Synthetic oligonucleotide
  Antisense strand to SEQ ID NO: 1936902
uucacugcaaauuuccucu

SEQ ID NO: 1936904 - RNA, 19 nt, Artificial Sequence
  Description of Artificial Sequence: Synthetic oligonucleotide
  Sense strand starting at position 3218 of SEQ ID NO: 1879864
gucacaguaucacuauaca

SEQ ID NO: 1936905 - RNA, 19 nt, Artificial Sequence
  Description of Artificial Sequence: Synthetic oligonucleotide
  Antisense strand to SEQ ID NO: 1936904
uguauagugauacugugac

SEQ ID NO: 1936906 - RNA, 19 nt, Artificial Sequence
  Description of Artificial Sequence: Synthetic oligonucleotide
  Sense strand starting at position 3254 of SEQ ID NO: 1879864
uguaguaguuuccuuagag

SEQ ID NO: 1936907 - RNA, 19 nt, Artificial Sequence
  Description of Artificial Sequence: Synthetic oligonucleotide
  Antisense strand to SEQ ID NO: 1936906
cucuaaggaaacuacuaca

SEQ ID NO: 1936908 - RNA, 19 nt, Artificial Sequence
  Description of Artificial Sequence: Synthetic oligonucleotide
  Sense strand starting at position 3255 of SEQ ID NO: 1879864
guaguaguuuccuuagaga

SEQ ID NO: 1936909 - RNA, 19 nt, Artificial Sequence
  Description of Artificial Sequence: Synthetic oligonucleotide
  Antisense strand to SEQ ID NO: 1936908
ucucuaaggaaacuacuac

SEQ ID NO: 1936910 - RNA, 19 nt, Artificial Sequence
  Description of Artificial Sequence: Synthetic oligonucleotide
  Sense strand starting at position 3258 of SEQ ID NO: 1879864
guaguuuccuuagagauuu

SEQ ID NO: 1936911 - RNA, 19 nt, Artificial Sequence
  Description of Artificial Sequence: Synthetic oligonucleotide
  Antisense strand to SEQ ID NO: 1936910
aaaucucuaaggaaacuac

SEQ ID NO: 1936912 - RNA, 19 nt, Artificial Sequence
  Description of Artificial Sequence: Synthetic oligonucleotide
  Sense strand starting at position 3266 of SEQ ID NO: 1879864
cuuagagauuuccagagca

SEQ ID NO: 1936913 - RNA, 19 nt, Artificial Sequence
  Description of Artificial Sequence: Synthetic oligonucleotide
  Antisense strand to SEQ ID NO: 1936912
ugcucuggaaaucucuaag

SEQ ID NO: 1936914 - RNA, 19 nt, Artificial Sequence
  Description of Artificial Sequence: Synthetic oligonucleotide
  Sense strand starting at position 3340 of SEQ ID NO: 1879864
ucaaucaagguuuguugaa

SEQ ID NO: 1936915 - RNA, 19 nt, Artificial Sequence
  Description of Artificial Sequence: Synthetic oligonucleotide
  Antisense strand to SEQ ID NO: 1936914
uucaacaaaccuugauuga

SEQ ID NO: 1936916 - RNA, 19 nt, Artificial Sequence
  Description of Artificial Sequence: Synthetic oligonucleotide
  Sense strand starting at position 3341 of SEQ ID NO: 1879864
caaucaagguuuguugaaa

SEQ ID NO: 1936917 - RNA, 19 nt, Artificial Sequence
  Description of Artificial Sequence: Synthetic oligonucleotide
  Antisense strand to SEQ ID NO: 1936916
uuucaacaaaccuugauug

SEQ ID NO: 1936918 - RNA, 19 nt, Artificial Sequence
  Description of Artificial Sequence: Synthetic oligonucleotide
  Sense strand starting at position 3342 of SEQ ID NO: 1879864
aaucaagguuuguugaaau

SEQ ID NO: 1936919 - RNA, 19 nt, Artificial Sequence
  Description of Artificial Sequence: Synthetic oligonucleotide
  Antisense strand to SEQ ID NO: 1936918
auuucaacaaaccuugauu

SEQ ID NO: 1936920 - RNA, 19 nt, Artificial Sequence
  Description of Artificial Sequence: Synthetic oligonucleotide
  Sense strand starting at position 3462 of SEQ ID NO: 1879864
ggugguucugaggaucaca

SEQ ID NO: 1936921 - RNA, 19 nt, Artificial Sequence
  Description of Artificial Sequence: Synthetic oligonucleotide
  Antisense strand to SEQ ID NO: 1936920
ugugauccucagaaccacc

SEQ ID NO: 1936922 - RNA, 19 nt, Artificial Sequence
  Description of Artificial Sequence: Synthetic oligonucleotide
  Sense strand starting at position 3472 of SEQ ID NO: 1879864
aggaucacaugauagaauu

SEQ ID NO: 1936923 - RNA, 19 nt, Artificial Sequence
  Description of Artificial Sequence: Synthetic oligonucleotide
  Antisense strand to SEQ ID NO: 1936922
aauucuaucaugugauccu

SEQ ID NO: 1936924 - RNA, 19 nt, Artificial Sequence
  Description of Artificial Sequence: Synthetic oligonucleotide
  Sense strand starting at position 3562 of SEQ ID NO: 1879864
uugggucuaucuuccuuua

SEQ ID NO: 1936925 - RNA, 19 nt, Artificial Sequence
  Description of Artificial Sequence: Synthetic oligonucleotide
  Antisense strand to SEQ ID NO: 1936924
uaaaggaagauagacccaa

SEQ ID NO: 1936926 - RNA, 19 nt, Artificial Sequence
  Description of Artificial Sequence: Synthetic oligonucleotide
  Sense strand starting at position 3565 of SEQ ID NO: 1879864
ggucuaucuuccuuuaggu

SEQ ID NO: 1936927 - RNA, 19 nt, Artificial Sequence
  Description of Artificial Sequence: Synthetic oligonucleotide
  Antisense strand to SEQ ID NO: 1936926
accuaaaggaagauagacc

SEQ ID NO: 1936928 - RNA, 19 nt, Artificial Sequence
  Description of Artificial Sequence: Synthetic oligonucleotide
  Sense strand starting at position 3567 of SEQ ID NO: 1879864
ucuaucuuccuuuagguga

SEQ ID NO: 1936929 - RNA, 19 nt, Artificial Sequence
  Description of Artificial Sequence: Synthetic oligonucleotide
  Antisense strand to SEQ ID NO: 1936928
ucaccuaaaggaagauaga

SEQ ID NO: 1936930 - RNA, 19 nt, Artificial Sequence
  Description of Artificial Sequence: Synthetic oligonucleotide
  Sense strand starting at position 3574 of SEQ ID NO: 1879864
uccuuuaggugagcagaau

SEQ ID NO: 1936931 - RNA, 19 nt, Artificial Sequence
  Description of Artificial Sequence: Synthetic oligonucleotide
  Antisense strand to SEQ ID NO: 1936930
auucugcucaccuaaagga

SEQ ID NO: 1936932 - RNA, 19 nt, Artificial Sequence
  Description of Artificial Sequence: Synthetic oligonucleotide
  Sense strand starting at position 3583 of SEQ ID NO: 1879864
ugagcagaaucacuauuau

SEQ ID NO: 1936933 - RNA, 19 nt, Artificial Sequence
  Description of Artificial Sequence: Synthetic oligonucleotide
  Antisense strand to SEQ ID NO: 1936932
auaauagugauucugcuca

SEQ ID NO: 1936934 - RNA, 19 nt, Artificial Sequence
  Description of Artificial Sequence: Synthetic oligonucleotide
  Sense strand starting at position 3595 of SEQ ID NO: 1879864
cuauuauuucucugccugu

SEQ ID NO: 1936935 - RNA, 19 nt, Artificial Sequence
  Description of Artificial Sequence: Synthetic oligonucleotide
  Antisense strand to SEQ ID NO: 1936934
acaggcagagaaauaauag

SEQ ID NO: 1936936 - RNA, 19 nt, Artificial Sequence
  Description of Artificial Sequence: Synthetic oligonucleotide
  Sense strand starting at position 3598 of SEQ ID NO: 1879864
uuauuucucugccuguaua

SEQ ID NO: 1936937 - RNA, 19 nt, Artificial Sequence
  Description of Artificial Sequence: Synthetic oligonucleotide
  Antisense strand to SEQ ID NO: 1936936
uauacaggcagagaaauaa

SEQ ID NO: 1936938 - RNA, 19 nt, Artificial Sequence
  Description of Artificial Sequence: Synthetic oligonucleotide
  Sense strand starting at position 3663 of SEQ ID NO: 1879864
uaguuuacccaaugguuga

SEQ ID NO: 1936939 - RNA, 19 nt, Artificial Sequence
  Description of Artificial Sequence: Synthetic oligonucleotide
  Antisense strand to SEQ ID NO: 1936938
ucaaccauuggguaaacua

SEQ ID NO: 1936940 - RNA, 19 nt, Artificial Sequence
  Description of Artificial Sequence: Synthetic oligonucleotide
  Sense strand starting at position 3782 of SEQ ID NO: 1879864
uuguacaguuugguaagua

SEQ ID NO: 1936941 - RNA, 19 nt, Artificial Sequence
  Description of Artificial Sequence: Synthetic oligonucleotide
  Antisense strand to SEQ ID NO: 1936940
uacuuaccaaacuguacaa

SEQ ID NO: 1936942 - RNA, 19 nt, Artificial Sequence
  Description of Artificial Sequence: Synthetic oligonucleotide
  Sense strand starting at position 3786 of SEQ ID NO: 1879864
acaguuugguaaguaucaa

SEQ ID NO: 1936943 - RNA, 19 nt, Artificial Sequence
  Description of Artificial Sequence: Synthetic oligonucleotide
  Antisense strand to SEQ ID NO: 1936942
uugauacuuaccaaacugu

SEQ ID NO: 1936944 - RNA, 19 nt, Artificial Sequence
  Description of Artificial Sequence: Synthetic oligonucleotide
  Sense strand starting at position 18 of SEQ ID NO: 1879865
augugacuauauucggaca

SEQ ID NO: 1936945 - RNA, 19 nt, Artificial Sequence
  Description of Artificial Sequence: Synthetic oligonucleotide
  Antisense strand to SEQ ID NO: 1936944
uguccgaauauagucacau

SEQ ID NO: 1936946 - RNA, 19 nt, Artificial Sequence
  Description of Artificial Sequence: Synthetic oligonucleotide
  Sense strand starting at position 19 of SEQ ID NO: 1879865
ugugacuauauucggacaa

SEQ ID NO: 1936947 - RNA, 19 nt, Artificial Sequence
  Description of Artificial Sequence: Synthetic oligonucleotide
  Antisense strand to SEQ ID NO: 1936946
uuguccgaauauagucaca

SEQ ID NO: 1936948 - RNA, 19 nt, Artificial Sequence
  Description of Artificial Sequence: Synthetic oligonucleotide
  Sense strand starting at position 20 of SEQ ID NO: 1879865
gugacuauauucggacaau

SEQ ID NO: 1936949 - RNA, 19 nt, Artificial Sequence
  Description of Artificial Sequence: Synthetic oligonucleotide
  Antisense strand to SEQ ID NO: 1936948
auuguccgaauauagucac

SEQ ID NO: 1936950 - RNA, 19 nt, Artificial Sequence
  Description of Artificial Sequence: Synthetic oligonucleotide
  Sense strand starting at position 21 of SEQ ID NO: 1879865
ugacuauauucggacaaug

SEQ ID NO: 1936951 - RNA, 19 nt, Artificial Sequence
  Description of Artificial Sequence: Synthetic oligonucleotide
  Antisense strand to SEQ ID NO: 1936950
cauuguccgaauauaguca

SEQ ID NO: 1936952 - RNA, 19 nt, Artificial Sequence
  Description of Artificial Sequence: Synthetic oligonucleotide
  Sense strand starting at position 379 of SEQ ID NO: 1879865
cgccuucuuccaggaagac

SEQ ID NO: 1936953 - RNA, 19 nt, Artificial Sequence
  Description of Artificial Sequence: Synthetic oligonucleotide
  Antisense strand to SEQ ID NO: 1936952
gucuuccuggaagaaggcg

SEQ ID NO: 1936954 - RNA, 19 nt, Artificial Sequence
  Description of Artificial Sequence: Synthetic oligonucleotide
  Sense strand starting at position 402 of SEQ ID NO: 1879865
ccugcuuucuucugauguu

SEQ ID NO: 1936955 - RNA, 19 nt, Artificial Sequence
  Description of Artificial Sequence: Synthetic oligonucleotide
  Antisense strand to SEQ ID NO: 1936954
aacaucagaagaaagcagg

SEQ ID NO: 1936956 - RNA, 19 nt, Artificial Sequence
  Description of Artificial Sequence: Synthetic oligonucleotide
  Sense strand starting at position 405 of SEQ ID NO: 1879865
gcuuucuucugauguuggu

SEQ ID NO: 1936957 - RNA, 19 nt, Artificial Sequence
  Description of Artificial Sequence: Synthetic oligonucleotide
  Antisense strand to SEQ ID NO: 1936956
accaacaucagaagaaagc

SEQ ID NO: 1936958 - RNA, 19 nt, Artificial Sequence
  Description of Artificial Sequence: Synthetic oligonucleotide
  Sense strand starting at position 408 of SEQ ID NO: 1879865
uucuucugauguugguaga

SEQ ID NO: 1936959 - RNA, 19 nt, Artificial Sequence
  Description of Artificial Sequence: Synthetic oligonucleotide
  Antisense strand to SEQ ID NO: 1936958
ucuaccaacaucagaagaa

SEQ ID NO: 1936960 - RNA, 19 nt, Artificial Sequence
  Description of Artificial Sequence: Synthetic oligonucleotide
  Sense strand starting at position 411 of SEQ ID NO: 1879865
uucugauguugguagagac

SEQ ID NO: 1936961 - RNA, 19 nt, Artificial Sequence
  Description of Artificial Sequence: Synthetic oligonucleotide
  Antisense strand to SEQ ID NO: 1936960
gucucuaccaacaucagaa

SEQ ID NO: 1936962 - RNA, 19 nt, Artificial Sequence
  Description of Artificial Sequence: Synthetic oligonucleotide
  Sense strand starting at position 438 of SEQ ID NO: 1879865
gcgcaucguccucgagcau

SEQ ID NO: 1936963 - RNA, 19 nt, Artificial Sequence
  Description of Artificial Sequence: Synthetic oligonucleotide
  Antisense strand to SEQ ID NO: 1936962
augcucgaggacgaugcgc

SEQ ID NO: 1936964 - RNA, 19 nt, Artificial Sequence
  Description of Artificial Sequence: Synthetic oligonucleotide
  Sense strand starting at position 439 of SEQ ID NO: 1879865
cgcaucguccucgagcauu

SEQ ID NO: 1936965 - RNA, 19 nt, Artificial Sequence
  Description of Artificial Sequence: Synthetic oligonucleotide
  Antisense strand to SEQ ID NO: 1936964
aaugcucgaggacgaugcg

SEQ ID NO: 1936966 - RNA, 19 nt, Artificial Sequence
  Description of Artificial Sequence: Synthetic oligonucleotide
  Sense strand starting at position 570 of SEQ ID NO: 1879865
aggagcauuucccgagugu

SEQ ID NO: 1936967 - RNA, 19 nt, Artificial Sequence
  Description of Artificial Sequence: Synthetic oligonucleotide
  Antisense strand to SEQ ID NO: 1936966
acacucgggaaaugcuccu

SEQ ID NO: 1936968 - RNA, 19 nt, Artificial Sequence
  Description of Artificial Sequence: Synthetic oligonucleotide
  Sense strand starting at position 571 of SEQ ID NO: 1879865
ggagcauuucccgaguguc

SEQ ID NO: 1936969 - RNA, 19 nt, Artificial Sequence
  Description of Artificial Sequence: Synthetic oligonucleotide
  Antisense strand to SEQ ID NO: 1936968
gacacucgggaaaugcucc

SEQ ID NO: 1936970 - RNA, 19 nt, Artificial Sequence
  Description of Artificial Sequence: Synthetic oligonucleotide
  Sense strand starting at position 574 of SEQ ID NO: 1879865
gcauuucccgagugucuuu

SEQ ID NO: 1936971 - RNA, 19 nt, Artificial Sequence
  Description of Artificial Sequence: Synthetic oligonucleotide
  Antisense strand to SEQ ID NO: 1936970
aaagacacucgggaaaugc

SEQ ID NO: 1936972 - RNA, 19 nt, Artificial Sequence
  Description of Artificial Sequence: Synthetic oligonucleotide
  Sense strand starting at position 581 of SEQ ID NO: 1879865
ccgagugucuuucaugggu

SEQ ID NO: 1936973 - RNA, 19 nt, Artificial Sequence
  Description of Artificial Sequence: Synthetic oligonucleotide
  Antisense strand to SEQ ID NO: 1936972
acccaugaaagacacucgg

SEQ ID NO: 1936974 - RNA, 19 nt, Artificial Sequence
  Description of Artificial Sequence: Synthetic oligonucleotide
  Sense strand starting at position 584 of SEQ ID NO: 1879865
agugucuuucauggguaag

SEQ ID NO: 1936975 - RNA, 19 nt, Artificial Sequence
  Description of Artificial Sequence: Synthetic oligonucleotide
  Antisense strand to SEQ ID NO: 1936974
cuuacccaugaaagacacu

SEQ ID NO: 1936976 - RNA, 19 nt, Artificial Sequence
  Description of Artificial Sequence: Synthetic oligonucleotide
  Sense strand starting at position 586 of SEQ ID NO: 1879865
ugucuuucauggguaagag

SEQ ID NO: 1936977 - RNA, 19 nt, Artificial Sequence
  Description of Artificial Sequence: Synthetic oligonucleotide
  Antisense strand to SEQ ID NO: 1936976
cucuuacccaugaaagaca

SEQ ID NO: 1936978 - RNA, 19 nt, Artificial Sequence
  Description of Artificial Sequence: Synthetic oligonucleotide
  Sense strand starting at position 587 of SEQ ID NO: 1879865
gucuuucauggguaagagu

SEQ ID NO: 1936979 - RNA, 19 nt, Artificial Sequence
  Description of Artificial Sequence: Synthetic oligonucleotide
  Antisense strand to SEQ ID NO: 1936978
acucuuacccaugaaagac

SEQ ID NO: 1936980 - RNA, 19 nt, Artificial Sequence
  Description of Artificial Sequence: Synthetic oligonucleotide
  Sense strand starting at position 809 of SEQ ID NO: 1879865
uuaagagacgugcauccaa

SEQ ID NO: 1936981 - RNA, 19 nt, Artificial Sequence
  Description of Artificial Sequence: Synthetic oligonucleotide
  Antisense strand to SEQ ID NO: 1936980
uuggaugcacgucucuuaa

SEQ ID NO: 1936982 - RNA, 19 nt, Artificial Sequence
  Description of Artificial Sequence: Synthetic oligonucleotide
  Sense strand starting at position 918 of SEQ ID NO: 1879865
ccgguugagauaugugaag

SEQ ID NO: 1936983 - RNA, 19 nt, Artificial Sequence
  Description of Artificial Sequence: Synthetic oligonucleotide
  Antisense strand to SEQ ID NO: 1936982
cuucacauaucucaaccgg

SEQ ID NO: 1936984 - RNA, 19 nt, Artificial Sequence
  Description of Artificial Sequence: Synthetic oligonucleotide
  Sense strand starting at position 920 of SEQ ID NO: 1879865
gguugagauaugugaagca

SEQ ID NO: 1936985 - RNA, 19 nt, Artificial Sequence
  Description of Artificial Sequence: Synthetic oligonucleotide
  Antisense strand to SEQ ID NO: 1936984
ugcuucacauaucucaacc

SEQ ID NO: 1936986 - RNA, 19 nt, Artificial Sequence
  Description of Artificial Sequence: Synthetic oligonucleotide
  Sense strand starting at position 256 of SEQ ID NO: 1879866
uggugaagauauccaucau

SEQ ID NO: 1936987 - RNA, 19 nt, Artificial Sequence
  Description of Artificial Sequence: Synthetic oligonucleotide
  Antisense strand to SEQ ID NO: 1936986
augauggauaucuucacca

SEQ ID NO: 1936988 - RNA, 19 nt, Artificial Sequence
  Description of Artificial Sequence: Synthetic oligonucleotide
  Sense strand starting at position 275 of SEQ ID NO: 1879866
gacauugugcgugaggauc

SEQ ID NO: 1936989 - RNA, 19 nt, Artificial Sequence
  Description of Artificial Sequence: Synthetic oligonucleotide
  Antisense strand to SEQ ID NO: 1936988
gauccucacgcacaauguc

SEQ ID NO: 1936990 - RNA, 19 nt, Artificial Sequence
  Description of Artificial Sequence: Synthetic oligonucleotide
  Sense strand starting at position 286 of SEQ ID NO: 1879866
ugaggaucugugugagaga

SEQ ID NO: 1936991 - RNA, 19 nt, Artificial Sequence
  Description of Artificial Sequence: Synthetic oligonucleotide
  Antisense strand to SEQ ID NO: 1936990
ucucucacacagauccuca

SEQ ID NO: 1936992 - RNA, 19 nt, Artificial Sequence
  Description of Artificial Sequence: Synthetic oligonucleotide
  Sense strand starting at position 310 of SEQ ID NO: 1879866
gcgcucugugauucuguga

SEQ ID NO: 1936993 - RNA, 19 nt, Artificial Sequence
  Description of Artificial Sequence: Synthetic oligonucleotide
  Antisense strand to SEQ ID NO: 1936992
ucacagaaucacagagcgc

SEQ ID NO: 1936994 - RNA, 19 nt, Artificial Sequence
  Description of Artificial Sequence: Synthetic oligonucleotide
  Sense strand starting at position 357 of SEQ ID NO: 1879866
acaugaugggcacggaauu

SEQ ID NO: 1936995 - RNA, 19 nt, Artificial Sequence
  Description of Artificial Sequence: Synthetic oligonucleotide
  Antisense strand to SEQ ID NO: 1936994
aauuccgugcccaucaugu

SEQ ID NO: 1936996 - RNA, 19 nt, Artificial Sequence
  Description of Artificial Sequence: Synthetic oligonucleotide
  Sense strand starting at position 644 of SEQ ID NO: 1879866
ucuagaccucucuggagau

SEQ ID NO: 1936997 - RNA, 19 nt, Artificial Sequence
  Description of Artificial Sequence: Synthetic oligonucleotide
  Antisense strand to SEQ ID NO: 1936996
aucuccagagaggucuaga

SEQ ID NO: 1936998 - RNA, 19 nt, Artificial Sequence
  Description of Artificial Sequence: Synthetic oligonucleotide
  Sense strand starting at position 714 of SEQ ID NO: 1879866
ccauucuuggcugacucau

SEQ ID NO: 1936999 - RNA, 19 nt, Artificial Sequence
  Description of Artificial Sequence: Synthetic oligonucleotide
  Antisense strand to SEQ ID NO: 1936998
augagucagccaagaaugg

SEQ ID NO: 1937000 - RNA, 19 nt, Artificial Sequence
  Description of Artificial Sequence: Synthetic oligonucleotide
  Sense strand starting at position 784 of SEQ ID NO: 1879866
ggccacucuuacccagaaa

SEQ ID NO: 1937001 - RNA, 19 nt, Artificial Sequence
  Description of Artificial Sequence: Synthetic oligonucleotide
  Antisense strand to SEQ ID NO: 1937000
uuucuggguaagaguggcc

SEQ ID NO: 1937002 - RNA, 19 nt, Artificial Sequence
  Description of Artificial Sequence: Synthetic oligonucleotide
  Sense strand starting at position 894 of SEQ ID NO: 1879866
ccuuguguuagaggaauga

SEQ ID NO: 1937003 - RNA, 19 nt, Artificial Sequence
  Description of Artificial Sequence: Synthetic oligonucleotide
  Antisense strand to SEQ ID NO: 1937002
ucauuccucuaacacaagg

SEQ ID NO: 1937004 - RNA, 19 nt, Artificial Sequence
  Description of Artificial Sequence: Synthetic oligonucleotide
  Sense strand starting at position 1152 of SEQ ID NO: 1879866
ugugauuuggagugugcua

SEQ ID NO: 1937005 - RNA, 19 nt, Artificial Sequence
  Description of Artificial Sequence: Synthetic oligonucleotide
  Antisense strand to SEQ ID NO: 1937004
uagcacacuccaaaucaca

SEQ ID NO: 1937006 - RNA, 19 nt, Artificial Sequence
  Description of Artificial Sequence: Synthetic oligonucleotide
  Sense strand starting at position 1159 of SEQ ID NO: 1879866
uggagugugcuagacuaug

SEQ ID NO: 1937007 - RNA, 19 nt, Artificial Sequence
  Description of Artificial Sequence: Synthetic oligonucleotide
  Antisense strand to SEQ ID NO: 1937006
cauagucuagcacacucca

SEQ ID NO: 1937008 - RNA, 19 nt, Artificial Sequence
  Description of Artificial Sequence: Synthetic oligonucleotide
  Sense strand starting at position 1167 of SEQ ID NO: 1879866
gcuagacuauguguauaag

SEQ ID NO: 1937009 - RNA, 19 nt, Artificial Sequence
  Description of Artificial Sequence: Synthetic oligonucleotide
  Antisense strand to SEQ ID NO: 1937008
cuuauacacauagucuagc

SEQ ID NO: 1937010 - RNA, 19 nt, Artificial Sequence
  Description of Artificial Sequence: Synthetic oligonucleotide
  Sense strand starting at position 1168 of SEQ ID NO: 1879866
cuagacuauguguauaagu

SEQ ID NO: 1937011 - RNA, 19 nt, Artificial Sequence
  Description of Artificial Sequence: Synthetic oligonucleotide
  Antisense strand to SEQ ID NO: 1937010
acuuauacacauagucuag

SEQ ID NO: 1937012 - RNA, 19 nt, Artificial Sequence
  Description of Artificial Sequence: Synthetic oligonucleotide
  Sense strand starting at position 1170 of SEQ ID NO: 1879866
agacuauguguauaaguca

SEQ ID NO: 1937013 - RNA, 19 nt, Artificial Sequence
  Description of Artificial Sequence: Synthetic oligonucleotide
  Antisense strand to SEQ ID NO: 1937012
ugacuuauacacauagucu

SEQ ID NO: 1937014 - RNA, 19 nt, Artificial Sequence
  Description of Artificial Sequence: Synthetic oligonucleotide
  Sense strand starting at position 1173 of SEQ ID NO: 1879866
cuauguguauaagucacau

SEQ ID NO: 1937015 - RNA, 19 nt, Artificial Sequence
  Description of Artificial Sequence: Synthetic oligonucleotide
  Antisense strand to SEQ ID NO: 1937014
augugacuuauacacauag

SEQ ID NO: 1937016 - RNA, 19 nt, Artificial Sequence
  Description of Artificial Sequence: Synthetic oligonucleotide
  Sense strand starting at position 1209 of SEQ ID NO: 1879866
ugugcuggcgugccuuaua

SEQ ID NO: 1937017 - RNA, 19 nt, Artificial Sequence
  Description of Artificial Sequence: Synthetic oligonucleotide
  Antisense strand to SEQ ID NO: 1937016
uauaaggcacgccagcaca

SEQ ID NO: 1937018 - RNA, 19 nt, Artificial Sequence
  Description of Artificial Sequence: Synthetic oligonucleotide
  Sense strand starting at position 1233 of SEQ ID NO: 1879866
gcguguuucccugucaguu

SEQ ID NO: 1937019 - RNA, 19 nt, Artificial Sequence
  Description of Artificial Sequence: Synthetic oligonucleotide
  Antisense strand to SEQ ID NO: 1937018
aacugacagggaaacacgc

SEQ ID NO: 1937020 - RNA, 19 nt, Artificial Sequence
  Description of Artificial Sequence: Synthetic oligonucleotide
  Sense strand starting at position 1234 of SEQ ID NO: 1879866
cguguuucccugucaguuu

SEQ ID NO: 1937021 - RNA, 19 nt, Artificial Sequence
  Description of Artificial Sequence: Synthetic oligonucleotide
  Antisense strand to SEQ ID NO: 1937020
aaacugacagggaaacacg

SEQ ID NO: 1937022 - RNA, 19 nt, Artificial Sequence
  Description of Artificial Sequence: Synthetic oligonucleotide
  Sense strand starting at position 2150 of SEQ ID NO: 1879866
gcgaaacaauucucauauu

SEQ ID NO: 1937023 - RNA, 19 nt, Artificial Sequence
  Description of Artificial Sequence: Synthetic oligonucleotide
  Antisense strand to SEQ ID NO: 1937022
aauaugagaauuguuucgc

SEQ ID NO: 1937024 - RNA, 19 nt, Artificial Sequence
  Description of Artificial Sequence: Synthetic oligonucleotide
  Sense strand starting at position 2436 of SEQ ID NO: 1879866
cuucucuuuccaggaugau

SEQ ID NO: 1937025 - RNA, 19 nt, Artificial Sequence
  Description of Artificial Sequence: Synthetic oligonucleotide
  Antisense strand to SEQ ID NO: 1937024
aucauccuggaaagagaag

SEQ ID NO: 1937026 - RNA, 19 nt, Artificial Sequence
  Description of Artificial Sequence: Synthetic oligonucleotide
  Sense strand starting at position 2555 of SEQ ID NO: 1879866
gcagcagugagcucagcau

SEQ ID NO: 1937027 - RNA, 19 nt, Artificial Sequence
  Description of Artificial Sequence: Synthetic oligonucleotide
  Antisense strand to SEQ ID NO: 1937026
augcugagcucacugcugc

SEQ ID NO: 1937028 - RNA, 19 nt, Artificial Sequence
  Description of Artificial Sequence: Synthetic oligonucleotide
  Sense strand starting at position 2790 of SEQ ID NO: 1879866
aggguuuggcccuggaaag

SEQ ID NO: 1937029 - RNA, 19 nt, Artificial Sequence
  Description of Artificial Sequence: Synthetic oligonucleotide
  Antisense strand to SEQ ID NO: 1937028
cuuuccagggccaaacccu

SEQ ID NO: 1937030 - RNA, 19 nt, Artificial Sequence
  Description of Artificial Sequence: Synthetic oligonucleotide
  Sense strand starting at position 2791 of SEQ ID NO: 1879866
ggguuuggcccuggaaaga

SEQ ID NO: 1937031 - RNA, 19 nt, Artificial Sequence
  Description of Artificial Sequence: Synthetic oligonucleotide
  Antisense strand to SEQ ID NO: 1937030
ucuuuccagggccaaaccc

SEQ ID NO: 1937032 - RNA, 19 nt, Artificial Sequence
  Description of Artificial Sequence: Synthetic oligonucleotide
  Sense strand starting at position 2925 of SEQ ID NO: 1879866
ggcagagacuccuccagaa

SEQ ID NO: 1937033 - RNA, 19 nt, Artificial Sequence
  Description of Artificial Sequence: Synthetic oligonucleotide
  Antisense strand to SEQ ID NO: 1937032
uucuggaggagucucugcc

SEQ ID NO: 1937034 - RNA, 19 nt, Artificial Sequence
  Description of Artificial Sequence: Synthetic oligonucleotide
  Sense strand starting at position 3070 of SEQ ID NO: 1879866
aucauuugccuuuguauau

SEQ ID NO: 1937035 - RNA, 19 nt, Artificial Sequence
  Description of Artificial Sequence: Synthetic oligonucleotide
  Antisense strand to SEQ ID NO: 1937034
auauacaaaggcaaaugau

SEQ ID NO: 1937036 - RNA, 19 nt, Artificial Sequence
  Description of Artificial Sequence: Synthetic oligonucleotide
  Sense strand starting at position 3071 of SEQ ID NO: 1879866
ucauuugccuuuguauaua

SEQ ID NO: 1937037 - RNA, 19 nt, Artificial Sequence
  Description of Artificial Sequence: Synthetic oligonucleotide
  Antisense strand to SEQ ID NO: 1937036
uauauacaaaggcaaauga

SEQ ID NO: 1937038 - RNA, 19 nt, Artificial Sequence
  Description of Artificial Sequence: Synthetic oligonucleotide
  Sense strand starting at position 3074 of SEQ ID NO: 1879866
uuugccuuuguauauauca

SEQ ID NO: 1937039 - RNA, 19 nt, Artificial Sequence
  Description of Artificial Sequence: Synthetic oligonucleotide
  Antisense strand to SEQ ID NO: 1937038
ugauauauacaaaggcaaa

SEQ ID NO: 1937040 - RNA, 19 nt, Artificial Sequence
  Description of Artificial Sequence: Synthetic oligonucleotide
  Sense strand starting at position 3129 of SEQ ID NO: 1879866
uugacccaucuuugagacu

SEQ ID NO: 1937041 - RNA, 19 nt, Artificial Sequence
  Description of Artificial Sequence: Synthetic oligonucleotide
  Antisense strand to SEQ ID NO: 1937040
agucucaaagaugggucaa

SEQ ID NO: 1937042 - RNA, 19 nt, Artificial Sequence
  Description of Artificial Sequence: Synthetic oligonucleotide
  Sense strand starting at position 3143 of SEQ ID NO: 1879866
agacucauguaguuucuaa

SEQ ID NO: 1937043 - RNA, 19 nt, Artificial Sequence
  Description of Artificial Sequence: Synthetic oligonucleotide
  Antisense strand to SEQ ID NO: 1937042
uuagaaacuacaugagucu

SEQ ID NO: 1937044 - RNA, 19 nt, Artificial Sequence
  Description of Artificial Sequence: Synthetic oligonucleotide
  Sense strand starting at position 3150 of SEQ ID NO: 1879866
uguaguuucuaagugaaag

SEQ ID NO: 1937045 - RNA, 19 nt, Artificial Sequence
  Description of Artificial Sequence: Synthetic oligonucleotide
  Antisense strand to SEQ ID NO: 1937044
cuuucacuuagaaacuaca

SEQ ID NO: 1937046 - RNA, 19 nt, Artificial Sequence
  Description of Artificial Sequence: Synthetic oligonucleotide
  Sense strand starting at position 3151 of SEQ ID NO: 1879866
guaguuucuaagugaaagg

SEQ ID NO: 1937047 - RNA, 19 nt, Artificial Sequence
  Description of Artificial Sequence: Synthetic oligonucleotide
  Antisense strand to SEQ ID NO: 1937046
ccuuucacuuagaaacuac

SEQ ID NO: 1937048 - RNA, 19 nt, Artificial Sequence
  Description of Artificial Sequence: Synthetic oligonucleotide
  Sense strand starting at position 3224 of SEQ ID NO: 1879866
ccauuccuugggcaaguua

SEQ ID NO: 1937049 - RNA, 19 nt, Artificial Sequence
  Description of Artificial Sequence: Synthetic oligonucleotide
  Antisense strand to SEQ ID NO: 1937048
uaacuugcccaaggaaugg

SEQ ID NO: 1937050 - RNA, 19 nt, Artificial Sequence
  Description of Artificial Sequence: Synthetic oligonucleotide
  Sense strand starting at position 3270 of SEQ ID NO: 1879866
gucagaucagggugccaau

SEQ ID NO: 1937051 - RNA, 19 nt, Artificial Sequence
  Description of Artificial Sequence: Synthetic oligonucleotide
  Antisense strand to SEQ ID NO: 1937050
auuggcacccugaucugac

SEQ ID NO: 1937052 - RNA, 19 nt, Artificial Sequence
  Description of Artificial Sequence: Synthetic oligonucleotide
  Sense strand starting at position 3321 of SEQ ID NO: 1879866
aauaguaagucucuaggga

SEQ ID NO: 1937053 - RNA, 19 nt, Artificial Sequence
  Description of Artificial Sequence: Synthetic oligonucleotide
  Antisense strand to SEQ ID NO: 1937052
ucccuagagacuuacuauu

SEQ ID NO: 1937054 - RNA, 19 nt, Artificial Sequence
  Description of Artificial Sequence: Synthetic oligonucleotide
  Sense strand starting at position 3392 of SEQ ID NO: 1879866
uccacugaccuaugcuaga

SEQ ID NO: 1937055 - RNA, 19 nt, Artificial Sequence
  Description of Artificial Sequence: Synthetic oligonucleotide
  Antisense strand to SEQ ID NO: 1937054
ucuagcauaggucagugga

SEQ ID NO: 1937056 - RNA, 19 nt, Artificial Sequence
  Description of Artificial Sequence: Synthetic oligonucleotide
  Sense strand starting at position 3397 of SEQ ID NO: 1879866
ugaccuaugcuagacagua

SEQ ID NO: 1937057 - RNA, 19 nt, Artificial Sequence
  Description of Artificial Sequence: Synthetic oligonucleotide
  Antisense strand to SEQ ID NO: 1937056
uacugucuagcauagguca

SEQ ID NO: 1937058 - RNA, 19 nt, Artificial Sequence
  Description of Artificial Sequence: Synthetic oligonucleotide
  Sense strand starting at position 3524 of SEQ ID NO: 1879866
cugccacauucucuaggaa

SEQ ID NO: 1937059 - RNA, 19 nt, Artificial Sequence
  Description of Artificial Sequence: Synthetic oligonucleotide
  Antisense strand to SEQ ID NO: 1937058
uuccuagagaauguggcag

SEQ ID NO: 1937060 - RNA, 19 nt, Artificial Sequence
  Description of Artificial Sequence: Synthetic oligonucleotide
  Sense strand starting at position 3549 of SEQ ID NO: 1879866
cuggacuugucuguggaga

SEQ ID NO: 1937061 - RNA, 19 nt, Artificial Sequence
  Description of Artificial Sequence: Synthetic oligonucleotide
  Antisense strand to SEQ ID NO: 1937060
ucuccacagacaaguccag

SEQ ID NO: 1937062 - RNA, 19 nt, Artificial Sequence
  Description of Artificial Sequence: Synthetic oligonucleotide
  Sense strand starting at position 3550 of SEQ ID NO: 1879866
uggacuugucuguggagag

SEQ ID NO: 1937063 - RNA, 19 nt, Artificial Sequence
  Description of Artificial Sequence: Synthetic oligonucleotide
  Antisense strand to SEQ ID NO: 1937062
cucuccacagacaagucca

SEQ ID NO: 1937064 - RNA, 19 nt, Artificial Sequence
  Description of Artificial Sequence: Synthetic oligonucleotide
  Sense strand starting at position 3595 of SEQ ID NO: 1879866
aucuuuccguacuuagaaa

SEQ ID NO: 1937065 - RNA, 19 nt, Artificial Sequence
  Description of Artificial Sequence: Synthetic oligonucleotide
  Antisense strand to SEQ ID NO: 1937064
uuucuaaguacggaaagau

SEQ ID NO: 1937066 - RNA, 19 nt, Artificial Sequence
  Description of Artificial Sequence: Synthetic oligonucleotide
  Sense strand starting at position 13 of SEQ ID NO: 1879868
cuggaugauuuacaaugua

SEQ ID NO: 1937067 - RNA, 19 nt, Artificial Sequence
  Description of Artificial Sequence: Synthetic oligonucleotide
  Antisense strand to SEQ ID NO: 1937066
uacauuguaaaucauccag

SEQ ID NO: 1937068 - RNA, 19 nt, Artificial Sequence
  Description of Artificial Sequence: Synthetic oligonucleotide
  Sense strand starting at position 55 of SEQ ID NO: 1879868
aauagcuuguggucaauaa

SEQ ID NO: 1937069 - RNA, 19 nt, Artificial Sequence
  Description of Artificial Sequence: Synthetic oligonucleotide
  Antisense strand to SEQ ID NO: 1937068
uuauugaccacaagcuauu

SEQ ID NO: 1937070 - RNA, 19 nt, Artificial Sequence
  Description of Artificial Sequence: Synthetic oligonucleotide
  Sense strand starting at position 59 of SEQ ID NO: 1879868
gcuuguggucaauaaacuu

SEQ ID NO: 1937071 - RNA, 19 nt, Artificial Sequence
  Description of Artificial Sequence: Synthetic oligonucleotide
  Antisense strand to SEQ ID NO: 1937070
aaguuuauugaccacaagc

SEQ ID NO: 1937072 - RNA, 19 nt, Artificial Sequence
  Description of Artificial Sequence: Synthetic oligonucleotide
  Sense strand starting at position 250 of SEQ ID NO: 1879868
ucucucuaaggaugcaaua

SEQ ID NO: 1937073 - RNA, 19 nt, Artificial Sequence
  Description of Artificial Sequence: Synthetic oligonucleotide
  Antisense strand to SEQ ID NO: 1937072
uauugcauccuuagagaga

SEQ ID NO: 1937074 - RNA, 19 nt, Artificial Sequence
  Description of Artificial Sequence: Synthetic oligonucleotide
  Sense strand starting at position 372 of SEQ ID NO: 1879868
ggguaauaauaccugcaug

SEQ ID NO: 1937075 - RNA, 19 nt, Artificial Sequence
  Description of Artificial Sequence: Synthetic oligonucleotide
  Antisense strand to SEQ ID NO: 1937074
caugcagguauuauuaccc

SEQ ID NO: 1937076 - RNA, 19 nt, Artificial Sequence
  Description of Artificial Sequence: Synthetic oligonucleotide
  Sense strand starting at position 421 of SEQ ID NO: 1879868
agguccaaacacuguguaa

SEQ ID NO: 1937077 - RNA, 19 nt, Artificial Sequence
  Description of Artificial Sequence: Synthetic oligonucleotide
  Antisense strand to SEQ ID NO: 1937076
uuacacaguguuuggaccu

SEQ ID NO: 1937078 - RNA, 19 nt, Artificial Sequence
  Description of Artificial Sequence: Synthetic oligonucleotide
  Sense strand starting at position 502 of SEQ ID NO: 1879868
uugagcacuguguaauaua

SEQ ID NO: 1937079 - RNA, 19 nt, Artificial Sequence
  Description of Artificial Sequence: Synthetic oligonucleotide
  Antisense strand to SEQ ID NO: 1937078
uauauuacacagugcucaa

SEQ ID NO: 1937080 - RNA, 19 nt, Artificial Sequence
  Description of Artificial Sequence: Synthetic oligonucleotide
  Sense strand starting at position 541 of SEQ ID NO: 1879868
acauuucguuuauggauuu

SEQ ID NO: 1937081 - RNA, 19 nt, Artificial Sequence
  Description of Artificial Sequence: Synthetic oligonucleotide
  Antisense strand to SEQ ID NO: 1937080
aaauccauaaacgaaaugu

SEQ ID NO: 1937082 - RNA, 19 nt, Artificial Sequence
  Description of Artificial Sequence: Synthetic oligonucleotide
  Sense strand starting at position 565 of SEQ ID NO: 1879868
ccuaaauaacugugugauc

SEQ ID NO: 1937083 - RNA, 19 nt, Artificial Sequence
  Description of Artificial Sequence: Synthetic oligonucleotide
  Antisense strand to SEQ ID NO: 1937082
gaucacacaguuauuuagg

SEQ ID NO: 1937084 - RNA, 19 nt, Artificial Sequence
  Description of Artificial Sequence: Synthetic oligonucleotide
  Sense strand starting at position 762 of SEQ ID NO: 1879868
cuuuaugaggcagauccua

SEQ ID NO: 1937085 - RNA, 19 nt, Artificial Sequence
  Description of Artificial Sequence: Synthetic oligonucleotide
  Antisense strand to SEQ ID NO: 1937084
uaggaucugccucauaaag

SEQ ID NO: 1937086 - RNA, 19 nt, Artificial Sequence
  Description of Artificial Sequence: Synthetic oligonucleotide
  Sense strand starting at position 958 of SEQ ID NO: 1879868
ugcgguauuccugacugaa

SEQ ID NO: 1937087 - RNA, 19 nt, Artificial Sequence
  Description of Artificial Sequence: Synthetic oligonucleotide
  Antisense strand to SEQ ID NO: 1937086
uucagucaggaauaccgca

SEQ ID NO: 1937088 - RNA, 19 nt, Artificial Sequence
  Description of Artificial Sequence: Synthetic oligonucleotide
  Sense strand starting at position 960 of SEQ ID NO: 1879868
cgguauuccugacugaauc

SEQ ID NO: 1937089 - RNA, 19 nt, Artificial Sequence
  Description of Artificial Sequence: Synthetic oligonucleotide
  Antisense strand to SEQ ID NO: 1937088
gauucagucaggaauaccg

SEQ ID NO: 1937090 - RNA, 19 nt, Artificial Sequence
  Description of Artificial Sequence: Synthetic oligonucleotide
  Sense strand starting at position 961 of SEQ ID NO: 1879868
gguauuccugacugaauca

SEQ ID NO: 1937091 - RNA, 19 nt, Artificial Sequence
  Description of Artificial Sequence: Synthetic oligonucleotide
  Antisense strand to SEQ ID NO: 1937090
ugauucagucaggaauacc

SEQ ID NO: 1937092 - RNA, 19 nt, Artificial Sequence
  Description of Artificial Sequence: Synthetic oligonucleotide
  Sense strand starting at position 1113 of SEQ ID NO: 1879868
ugaacuaagucagugguca

SEQ ID NO: 1937093 - RNA, 19 nt, Artificial Sequence
  Description of Artificial Sequence: Synthetic oligonucleotide
  Antisense strand to SEQ ID NO: 1937092
ugaccacugacuuaguuca

SEQ ID NO: 1937094 - RNA, 19 nt, Artificial Sequence
  Description of Artificial Sequence: Synthetic oligonucleotide
  Sense strand starting at position 1114 of SEQ ID NO: 1879868
gaacuaagucaguggucaa

SEQ ID NO: 1937095 - RNA, 19 nt, Artificial Sequence
  Description of Artificial Sequence: Synthetic oligonucleotide
  Antisense strand to SEQ ID NO: 1937094
uugaccacugacuuaguuc

SEQ ID NO: 1937096 - RNA, 19 nt, Artificial Sequence
  Description of Artificial Sequence: Synthetic oligonucleotide
  Sense strand starting at position 1169 of SEQ ID NO: 1879868
uccugaugacucugaugca

SEQ ID NO: 1937097 - RNA, 19 nt, Artificial Sequence
  Description of Artificial Sequence: Synthetic oligonucleotide
  Antisense strand to SEQ ID NO: 1937096
ugcaucagagucaucagga

SEQ ID NO: 1937098 - RNA, 19 nt, Artificial Sequence
  Description of Artificial Sequence: Synthetic oligonucleotide
  Sense strand starting at position 1409 of SEQ ID NO: 1879868
gcgaaugugcgguccuuca

SEQ ID NO: 1937099 - RNA, 19 nt, Artificial Sequence
  Description of Artificial Sequence: Synthetic oligonucleotide
  Antisense strand to SEQ ID NO: 1937098
ugaaggaccgcacauucgc

SEQ ID NO: 1937100 - RNA, 19 nt, Artificial Sequence
  Description of Artificial Sequence: Synthetic oligonucleotide
  Sense strand starting at position 1811 of SEQ ID NO: 1879868
gagcuaagugauugaugga

SEQ ID NO: 1937101 - RNA, 19 nt, Artificial Sequence
  Description of Artificial Sequence: Synthetic oligonucleotide
  Antisense strand to SEQ ID NO: 1937100
uccaucaaucacuuagcuc

SEQ ID NO: 1937102 - RNA, 19 nt, Artificial Sequence
  Description of Artificial Sequence: Synthetic oligonucleotide
  Sense strand starting at position 1900 of SEQ ID NO: 1879868
agguggucagguugggaaa

SEQ ID NO: 1937103 - RNA, 19 nt, Artificial Sequence
  Description of Artificial Sequence: Synthetic oligonucleotide
  Antisense strand to SEQ ID NO: 1937102
uuucccaaccugaccaccu

SEQ ID NO: 1937104 - RNA, 19 nt, Artificial Sequence
  Description of Artificial Sequence: Synthetic oligonucleotide
  Sense strand starting at position 1901 of SEQ ID NO: 1879868
gguggucagguugggaaau

SEQ ID NO: 1937105 - RNA, 19 nt, Artificial Sequence
  Description of Artificial Sequence: Synthetic oligonucleotide
  Antisense strand to SEQ ID NO: 1937104
auuucccaaccugaccacc

SEQ ID NO: 1937106 - RNA, 19 nt, Artificial Sequence
  Description of Artificial Sequence: Synthetic oligonucleotide
  Sense strand starting at position 1912 of SEQ ID NO: 1879868
ugggaaauuuagugagaag

SEQ ID NO: 1937107 - RNA, 19 nt, Artificial Sequence
  Description of Artificial Sequence: Synthetic oligonucleotide
  Antisense strand to SEQ ID NO: 1937106
cuucucacuaaauuuccca

SEQ ID NO: 1937108 - RNA, 19 nt, Artificial Sequence
  Description of Artificial Sequence: Synthetic oligonucleotide
  Sense strand starting at position 1915 of SEQ ID NO: 1879868
gaaauuuagugagaagccu

SEQ ID NO: 1937109 - RNA, 19 nt, Artificial Sequence
  Description of Artificial Sequence: Synthetic oligonucleotide
  Antisense strand to SEQ ID NO: 1937108
aggcuucucacuaaauuuc

SEQ ID NO: 1937110 - RNA, 19 nt, Artificial Sequence
  Description of Artificial Sequence: Synthetic oligonucleotide
  Sense strand starting at position 1958 of SEQ ID NO: 1879868
auguuauaaccuggcaaau

SEQ ID NO: 1937111 - RNA, 19 nt, Artificial Sequence
  Description of Artificial Sequence: Synthetic oligonucleotide
  Antisense strand to SEQ ID NO: 1937110
auuugccagguuauaacau

SEQ ID NO: 1937112 - RNA, 19 nt, Artificial Sequence
  Description of Artificial Sequence: Synthetic oligonucleotide
  Sense strand starting at position 1971 of SEQ ID NO: 1879868
gcaaaugggacgcaugaua

SEQ ID NO: 1937113 - RNA, 19 nt, Artificial Sequence
  Description of Artificial Sequence: Synthetic oligonucleotide
  Antisense strand to SEQ ID NO: 1937112
uaucaugcgucccauuugc

SEQ ID NO: 1937114 - RNA, 19 nt, Artificial Sequence
  Description of Artificial Sequence: Synthetic oligonucleotide
  Sense strand starting at position 2004 of SEQ ID NO: 1879868
ggaguagcuccugaguuuc

SEQ ID NO: 1937115 - RNA, 19 nt, Artificial Sequence
  Description of Artificial Sequence: Synthetic oligonucleotide
  Antisense strand to SEQ ID NO: 1937114
gaaacucaggagcuacucc

SEQ ID NO: 1937116 - RNA, 19 nt, Artificial Sequence
  Description of Artificial Sequence: Synthetic oligonucleotide
  Sense strand starting at position 2122 of SEQ ID NO: 1879868
cggaauuacuccucuaaug

SEQ ID NO: 1937117 - RNA, 19 nt, Artificial Sequence
  Description of Artificial Sequence: Synthetic oligonucleotide
  Antisense strand to SEQ ID NO: 1937116
cauuagaggaguaauuccg

SEQ ID NO: 1937118 - RNA, 19 nt, Artificial Sequence
  Description of Artificial Sequence: Synthetic oligonucleotide
  Sense strand starting at position 2165 of SEQ ID NO: 1879868
acccuuguagugggauaca

SEQ ID NO: 1937119 - RNA, 19 nt, Artificial Sequence
  Description of Artificial Sequence: Synthetic oligonucleotide
  Antisense strand to SEQ ID NO: 1937118
uguaucccacuacaagggu

SEQ ID NO: 1937120 - RNA, 19 nt, Artificial Sequence
  Description of Artificial Sequence: Synthetic oligonucleotide
  Sense strand starting at position 2168 of SEQ ID NO: 1879868
cuuguagugggauacagau

SEQ ID NO: 1937121 - RNA, 19 nt, Artificial Sequence
  Description of Artificial Sequence: Synthetic oligonucleotide
  Antisense strand to SEQ ID NO: 1937120
aucuguaucccacuacaag

SEQ ID NO: 1937122 - RNA, 19 nt, Artificial Sequence
  Description of Artificial Sequence: Synthetic oligonucleotide
  Sense strand starting at position 2178 of SEQ ID NO: 1879868
gauacagaucuguggucuu

SEQ ID NO: 1937123 - RNA, 19 nt, Artificial Sequence
  Description of Artificial Sequence: Synthetic oligonucleotide
  Antisense strand to SEQ ID NO: 1937122
aagaccacagaucuguauc

SEQ ID NO: 1937124 - RNA, 19 nt, Artificial Sequence
  Description of Artificial Sequence: Synthetic oligonucleotide
  Sense strand starting at position 2404 of SEQ ID NO: 1879868
gagugaucucagcaccaug

SEQ ID NO: 1937125 - RNA, 19 nt, Artificial Sequence
  Description of Artificial Sequence: Synthetic oligonucleotide
  Antisense strand to SEQ ID NO: 1937124
cauggugcugagaucacuc

SEQ ID NO: 1937126 - RNA, 19 nt, Artificial Sequence
  Description of Artificial Sequence: Synthetic oligonucleotide
  Sense strand starting at position 2469 of SEQ ID NO: 1879868
uuugauuucuuugucaagu

SEQ ID NO: 1937127 - RNA, 19 nt, Artificial Sequence
  Description of Artificial Sequence: Synthetic oligonucleotide
  Antisense strand to SEQ ID NO: 1937126
acuugacaaagaaaucaaa

SEQ ID NO: 1937128 - RNA, 19 nt, Artificial Sequence
  Description of Artificial Sequence: Synthetic oligonucleotide
  Sense strand starting at position 2470 of SEQ ID NO: 1879868
uugauuucuuugucaaguu

SEQ ID NO: 1937129 - RNA, 19 nt, Artificial Sequence
  Description of Artificial Sequence: Synthetic oligonucleotide
  Antisense strand to SEQ ID NO: 1937128
aacuugacaaagaaaucaa

SEQ ID NO: 1937130 - RNA, 19 nt, Artificial Sequence
  Description of Artificial Sequence: Synthetic oligonucleotide
  Sense strand starting at position 2551 of SEQ ID NO: 1879868
agcgacugacacgauuauu

SEQ ID NO: 1937131 - RNA, 19 nt, Artificial Sequence
  Description of Artificial Sequence: Synthetic oligonucleotide
  Antisense strand to SEQ ID NO: 1937130
aauaaucgugucagucgcu

SEQ ID NO: 1937132 - RNA, 19 nt, Artificial Sequence
  Description of Artificial Sequence: Synthetic oligonucleotide
  Sense strand starting at position 3108 of SEQ ID NO: 1879868
guguaugugcucuccucau

SEQ ID NO: 1937133 - RNA, 19 nt, Artificial Sequence
  Description of Artificial Sequence: Synthetic oligonucleotide
  Antisense strand to SEQ ID NO: 1937132
augaggagagcacauacac

SEQ ID NO: 1937134 - RNA, 19 nt, Artificial Sequence
  Description of Artificial Sequence: Synthetic oligonucleotide
  Sense strand starting at position 3500 of SEQ ID NO: 1879868
cccuuagcuccagaguuag

SEQ ID NO: 1937135 - RNA, 19 nt, Artificial Sequence
  Description of Artificial Sequence: Synthetic oligonucleotide
  Antisense strand to SEQ ID NO: 1937134
cuaacucuggagcuaaggg

SEQ ID NO: 1937136 - RNA, 19 nt, Artificial Sequence
  Description of Artificial Sequence: Synthetic oligonucleotide
  Sense strand starting at position 3777 of SEQ ID NO: 1879868
gcacuaucacuguagucca

SEQ ID NO: 1937137 - RNA, 19 nt, Artificial Sequence
  Description of Artificial Sequence: Synthetic oligonucleotide
  Antisense strand to SEQ ID NO: 1937136
uggacuacagugauagugc

SEQ ID NO: 1937138 - RNA, 19 nt, Artificial Sequence
  Description of Artificial Sequence: Synthetic oligonucleotide
  Sense strand starting at position 3780 of SEQ ID NO: 1879868
cuaucacuguaguccaaga

SEQ ID NO: 1937139 - RNA, 19 nt, Artificial Sequence
  Description of Artificial Sequence: Synthetic oligonucleotide
  Antisense strand to SEQ ID NO: 1937138
ucuuggacuacagugauag

SEQ ID NO: 1937140 - RNA, 19 nt, Artificial Sequence
  Description of Artificial Sequence: Synthetic oligonucleotide
  Sense strand starting at position 3785 of SEQ ID NO: 1879868
acuguaguccaagacacua

SEQ ID NO: 1937141 - RNA, 19 nt, Artificial Sequence
  Description of Artificial Sequence: Synthetic oligonucleotide
  Antisense strand to SEQ ID NO: 1937140
uagugucuuggacuacagu

SEQ ID NO: 1937142 - RNA, 19 nt, Artificial Sequence
  Description of Artificial Sequence: Synthetic oligonucleotide
  Sense strand starting at position 3810 of SEQ ID NO: 1879868
gugccuggaucacuacaau

SEQ ID NO: 1937143 - RNA, 19 nt, Artificial Sequence
  Description of Artificial Sequence: Synthetic oligonucleotide
  Antisense strand to SEQ ID NO: 1937142
auuguagugauccaggcac

SEQ ID NO: 1937144 - RNA, 19 nt, Artificial Sequence
  Description of Artificial Sequence: Synthetic oligonucleotide
  Sense strand starting at position 3893 of SEQ ID NO: 1879868
cagagugguuaucuuauuc

SEQ ID NO: 1937145 - RNA, 19 nt, Artificial Sequence
  Description of Artificial Sequence: Synthetic oligonucleotide
  Antisense strand to SEQ ID NO: 1937144
gaauaagauaaccacucug

SEQ ID NO: 1937146 - RNA, 19 nt, Artificial Sequence
  Description of Artificial Sequence: Synthetic oligonucleotide
  Sense strand starting at position 99 of SEQ ID NO: 1879867
gcagcauggcaucaugaga

SEQ ID NO: 1937147 - RNA, 19 nt, Artificial Sequence
  Description of Artificial Sequence: Synthetic oligonucleotide
  Antisense strand to SEQ ID NO: 1937146
ucucaugaugccaugcugc

SEQ ID NO: 1937148 - RNA, 19 nt, Artificial Sequence
  Description of Artificial Sequence: Synthetic oligonucleotide
  Sense strand starting at position 299 of SEQ ID NO: 1879867
guaauacagcuagaauucu

SEQ ID NO: 1937149 - RNA, 19 nt, Artificial Sequence
  Description of Artificial Sequence: Synthetic oligonucleotide
  Antisense strand to SEQ ID NO: 1937148
agaauucuagcuguauuac

SEQ ID NO: 1937150 - RNA, 19 nt, Artificial Sequence
  Description of Artificial Sequence: Synthetic oligonucleotide
  Sense strand starting at position 386 of SEQ ID NO: 1879867
uguagauuccuggguacag

SEQ ID NO: 1937151 - RNA, 19 nt, Artificial Sequence
  Description of Artificial Sequence: Synthetic oligonucleotide
  Antisense strand to SEQ ID NO: 1937150
cuguacccaggaaucuaca

SEQ ID NO: 1937152 - RNA, 19 nt, Artificial Sequence
  Description of Artificial Sequence: Synthetic oligonucleotide
  Sense strand starting at position 387 of SEQ ID NO: 1879867
guagauuccuggguacaga

SEQ ID NO: 1937153 - RNA, 19 nt, Artificial Sequence
  Description of Artificial Sequence: Synthetic oligonucleotide
  Antisense strand to SEQ ID NO: 1937152
ucuguacccaggaaucuac

SEQ ID NO: 1937154 - RNA, 19 nt, Artificial Sequence
  Description of Artificial Sequence: Synthetic oligonucleotide
  Sense strand starting at position 486 of SEQ ID NO: 1879867
gaaacaaggcgcuaugaau

SEQ ID NO: 1937155 - RNA, 19 nt, Artificial Sequence
  Description of Artificial Sequence: Synthetic oligonucleotide
  Antisense strand to SEQ ID NO: 1937154
auucauagcgccuuguuuc

SEQ ID NO: 1937156 - RNA, 19 nt, Artificial Sequence
  Description of Artificial Sequence: Synthetic oligonucleotide
  Sense strand starting at position 578 of SEQ ID NO: 1879867
ggcggaguuucuaugguua

SEQ ID NO: 1937157 - RNA, 19 nt, Artificial Sequence
  Description of Artificial Sequence: Synthetic oligonucleotide
  Antisense strand to SEQ ID NO: 1937156
uaaccauagaaacuccgcc

SEQ ID NO: 1937158 - RNA, 19 nt, Artificial Sequence
  Description of Artificial Sequence: Synthetic oligonucleotide
  Sense strand starting at position 582 of SEQ ID NO: 1879867
gaguuucuaugguuagaua

SEQ ID NO: 1937159 - RNA, 19 nt, Artificial Sequence
  Description of Artificial Sequence: Synthetic oligonucleotide
  Antisense strand to SEQ ID NO: 1937158
uaucuaaccauagaaacuc

SEQ ID NO: 1937160 - RNA, 19 nt, Artificial Sequence
  Description of Artificial Sequence: Synthetic oligonucleotide
  Sense strand starting at position 583 of SEQ ID NO: 1879867
aguuucuaugguuagauau

SEQ ID NO: 1937161 - RNA, 19 nt, Artificial Sequence
  Description of Artificial Sequence: Synthetic oligonucleotide
  Antisense strand to SEQ ID NO: 1937160
auaucuaaccauagaaacu

SEQ ID NO: 1937162 - RNA, 19 nt, Artificial Sequence
  Description of Artificial Sequence: Synthetic oligonucleotide
  Sense strand starting at position 590 of SEQ ID NO: 1879867
augguuagauauguuuaag

SEQ ID NO: 1937163 - RNA, 19 nt, Artificial Sequence
  Description of Artificial Sequence: Synthetic oligonucleotide
  Antisense strand to SEQ ID NO: 1937162
cuuaaacauaucuaaccau

SEQ ID NO: 1937164 - RNA, 19 nt, Artificial Sequence
  Description of Artificial Sequence: Synthetic oligonucleotide
  Sense strand starting at position 633 of SEQ ID NO: 1879867
cuggaugauuuacaaugua

SEQ ID NO: 1937165 - RNA, 19 nt, Artificial Sequence
  Description of Artificial Sequence: Synthetic oligonucleotide
  Antisense strand to SEQ ID NO: 1937164
uacauuguaaaucauccag

SEQ ID NO: 1937166 - RNA, 19 nt, Artificial Sequence
  Description of Artificial Sequence: Synthetic oligonucleotide
  Sense strand starting at position 679 of SEQ ID NO: 1879867
gcuuguggucaauaaacuu

SEQ ID NO: 1937167 - RNA, 19 nt, Artificial Sequence
  Description of Artificial Sequence: Synthetic oligonucleotide
  Antisense strand to SEQ ID NO: 1937166
aaguuuauugaccacaagc

SEQ ID NO: 1937168 - RNA, 19 nt, Artificial Sequence
  Description of Artificial Sequence: Synthetic oligonucleotide
  Sense strand starting at position 870 of SEQ ID NO: 1879867
ucucucuaaggaugcaaua

SEQ ID NO: 1937169 - RNA, 19 nt, Artificial Sequence
  Description of Artificial Sequence: Synthetic oligonucleotide
  Antisense strand to SEQ ID NO: 1937168
uauugcauccuuagagaga

SEQ ID NO: 1937170 - RNA, 19 nt, Artificial Sequence
  Description of Artificial Sequence: Synthetic oligonucleotide
  Sense strand starting at position 992 of SEQ ID NO: 1879867
ggguaauaauaccugcaug

SEQ ID NO: 1937171 - RNA, 19 nt, Artificial Sequence
  Description of Artificial Sequence: Synthetic oligonucleotide
  Antisense strand to SEQ ID NO: 1937170
caugcagguauuauuaccc

SEQ ID NO: 1937172 - RNA, 19 nt, Artificial Sequence
  Description of Artificial Sequence: Synthetic oligonucleotide
  Sense strand starting at position 1041 of SEQ ID NO: 1879867
agguccaaacacuguguaa

SEQ ID NO: 1937173 - RNA, 19 nt, Artificial Sequence
  Description of Artificial Sequence: Synthetic oligonucleotide
  Antisense strand to SEQ ID NO: 1937172
uuacacaguguuuggaccu

SEQ ID NO: 1937174 - RNA, 19 nt, Artificial Sequence
  Description of Artificial Sequence: Synthetic oligonucleotide
  Sense strand starting at position 1122 of SEQ ID NO: 1879867
uugagcacuguguaauaua

SEQ ID NO: 1937175 - RNA, 19 nt, Artificial Sequence
  Description of Artificial Sequence: Synthetic oligonucleotide
  Antisense strand to SEQ ID NO: 1937174
uauauuacacagugcucaa

SEQ ID NO: 1937176 - RNA, 19 nt, Artificial Sequence
  Description of Artificial Sequence: Synthetic oligonucleotide
  Sense strand starting at position 1161 of SEQ ID NO: 1879867
acauuucguuuauggauuu

SEQ ID NO: 1937177 - RNA, 19 nt, Artificial Sequence
  Description of Artificial Sequence: Synthetic oligonucleotide
  Antisense strand to SEQ ID NO: 1937176
aaauccauaaacgaaaugu

SEQ ID NO: 1937178 - RNA, 19 nt, Artificial Sequence
  Description of Artificial Sequence: Synthetic oligonucleotide
  Sense strand starting at position 1185 of SEQ ID NO: 1879867
ccuaaauaacugugugauc

SEQ ID NO: 1937179 - RNA, 19 nt, Artificial Sequence
  Description of Artificial Sequence: Synthetic oligonucleotide
  Antisense strand to SEQ ID NO: 1937178
gaucacacaguuauuuagg

SEQ ID NO: 1937180 - RNA, 19 nt, Artificial Sequence
  Description of Artificial Sequence: Synthetic oligonucleotide
  Sense strand starting at position 1382 of SEQ ID NO: 1879867
cuuuaugaggcagauccua

SEQ ID NO: 1937181 - RNA, 19 nt, Artificial Sequence
  Description of Artificial Sequence: Synthetic oligonucleotide
  Antisense strand to SEQ ID NO: 1937180
uaggaucugccucauaaag

SEQ ID NO: 1937182 - RNA, 19 nt, Artificial Sequence
  Description of Artificial Sequence: Synthetic oligonucleotide
  Sense strand starting at position 1578 of SEQ ID NO: 1879867
ugcgguauuccugacugaa

SEQ ID NO: 1937183 - RNA, 19 nt, Artificial Sequence
  Description of Artificial Sequence: Synthetic oligonucleotide
  Antisense strand to SEQ ID NO: 1937182
uucagucaggaauaccgca

SEQ ID NO: 1937184 - RNA, 19 nt, Artificial Sequence
  Description of Artificial Sequence: Synthetic oligonucleotide
  Sense strand starting at position 1581 of SEQ ID NO: 1879867
gguauuccugacugaauca

SEQ ID NO: 1937185 - RNA, 19 nt, Artificial Sequence
  Description of Artificial Sequence: Synthetic oligonucleotide
  Antisense strand to SEQ ID NO: 1937184
ugauucagucaggaauacc

SEQ ID NO: 1937186 - RNA, 19 nt, Artificial Sequence
  Description of Artificial Sequence: Synthetic oligonucleotide
  Sense strand starting at position 1733 of SEQ ID NO: 1879867
ugaacuaagucagugguca

SEQ ID NO: 1937187 - RNA, 19 nt, Artificial Sequence
  Description of Artificial Sequence: Synthetic oligonucleotide
  Antisense strand to SEQ ID NO: 1937186
ugaccacugacuuaguuca

SEQ ID NO: 1937188 - RNA, 19 nt, Artificial Sequence
  Description of Artificial Sequence: Synthetic oligonucleotide
  Sense strand starting at position 1734 of SEQ ID NO: 1879867
gaacuaagucaguggucaa

SEQ ID NO: 1937189 - RNA, 19 nt, Artificial Sequence
  Description of Artificial Sequence: Synthetic oligonucleotide
  Antisense strand to SEQ ID NO: 1937188
uugaccacugacuuaguuc

SEQ ID NO: 1937190 - RNA, 19 nt, Artificial Sequence
  Description of Artificial Sequence: Synthetic oligonucleotide
  Sense strand starting at position 1789 of SEQ ID NO: 1879867
uccugaugacucugaugca

SEQ ID NO: 1937191 - RNA, 19 nt, Artificial Sequence
  Description of Artificial Sequence: Synthetic oligonucleotide
  Antisense strand to SEQ ID NO: 1937190
ugcaucagagucaucagga

SEQ ID NO: 1937192 - RNA, 19 nt, Artificial Sequence
  Description of Artificial Sequence: Synthetic oligonucleotide
  Sense strand starting at position 2029 of SEQ ID NO: 1879867
gcgaaugugcgguccuuca

SEQ ID NO: 1937193 - RNA, 19 nt, Artificial Sequence
  Description of Artificial Sequence: Synthetic oligonucleotide
  Antisense strand to SEQ ID NO: 1937192
ugaaggaccgcacauucgc

SEQ ID NO: 1937194 - RNA, 19 nt, Artificial Sequence
  Description of Artificial Sequence: Synthetic oligonucleotide
  Sense strand starting at position 2431 of SEQ ID NO: 1879867
gagcuaagugauugaugga

SEQ ID NO: 1937195 - RNA, 19 nt, Artificial Sequence
  Description of Artificial Sequence: Synthetic oligonucleotide
  Antisense strand to SEQ ID NO: 1937194
uccaucaaucacuuagcuc

SEQ ID NO: 1937196 - RNA, 19 nt, Artificial Sequence
  Description of Artificial Sequence: Synthetic oligonucleotide
  Sense strand starting at position 2520 of SEQ ID NO: 1879867
agguggucagguugggaaa

SEQ ID NO: 1937197 - RNA, 19 nt, Artificial Sequence
  Description of Artificial Sequence: Synthetic oligonucleotide
  Antisense strand to SEQ ID NO: 1937196
uuucccaaccugaccaccu

SEQ ID NO: 1937198 - RNA, 19 nt, Artificial Sequence
  Description of Artificial Sequence: Synthetic oligonucleotide
  Sense strand starting at position 2521 of SEQ ID NO: 1879867
gguggucagguugggaaau

SEQ ID NO: 1937199 - RNA, 19 nt, Artificial Sequence
  Description of Artificial Sequence: Synthetic oligonucleotide
  Antisense strand to SEQ ID NO: 1937198
auuucccaaccugaccacc

SEQ ID NO: 1937200 - RNA, 19 nt, Artificial Sequence
  Description of Artificial Sequence: Synthetic oligonucleotide
  Sense strand starting at position 2532 of SEQ ID NO: 1879867
ugggaaauuuagugagaag

SEQ ID NO: 1937201 - RNA, 19 nt, Artificial Sequence
  Description of Artificial Sequence: Synthetic oligonucleotide
  Antisense strand to SEQ ID NO: 1937200
cuucucacuaaauuuccca

SEQ ID NO: 1937202 - RNA, 19 nt, Artificial Sequence
  Description of Artificial Sequence: Synthetic oligonucleotide
  Sense strand starting at position 2535 of SEQ ID NO: 1879867
gaaauuuagugagaagccu

SEQ ID NO: 1937203 - RNA, 19 nt, Artificial Sequence
  Description of Artificial Sequence: Synthetic oligonucleotide
  Antisense strand to SEQ ID NO: 1937202
aggcuucucacuaaauuuc

SEQ ID NO: 1937204 - RNA, 19 nt, Artificial Sequence
  Description of Artificial Sequence: Synthetic oligonucleotide
  Sense strand starting at position 2578 of SEQ ID NO: 1879867
auguuauaaccuggcaaau

SEQ ID NO: 1937205 - RNA, 19 nt, Artificial Sequence
  Description of Artificial Sequence: Synthetic oligonucleotide
  Antisense strand to SEQ ID NO: 1937204
auuugccagguuauaacau

SEQ ID NO: 1937206 - RNA, 19 nt, Artificial Sequence
  Description of Artificial Sequence: Synthetic oligonucleotide
  Sense strand starting at position 2591 of SEQ ID NO: 1879867
gcaaaugggacgcaugaua

SEQ ID NO: 1937207 - RNA, 19 nt, Artificial Sequence
  Description of Artificial Sequence: Synthetic oligonucleotide
  Antisense strand to SEQ ID NO: 1937206
uaucaugcgucccauuugc

SEQ ID NO: 1937208 - RNA, 19 nt, Artificial Sequence
  Description of Artificial Sequence: Synthetic oligonucleotide
  Sense strand starting at position 2742 of SEQ ID NO: 1879867
cggaauuacuccucuaaug

SEQ ID NO: 1937209 - RNA, 19 nt, Artificial Sequence
  Description of Artificial Sequence: Synthetic oligonucleotide
  Antisense strand to SEQ ID NO: 1937208
cauuagaggaguaauuccg

SEQ ID NO: 1937210 - RNA, 19 nt, Artificial Sequence
  Description of Artificial Sequence: Synthetic oligonucleotide
  Sense strand starting at position 2785 of SEQ ID NO: 1879867
acccuuguagugggauaca

SEQ ID NO: 1937211 - RNA, 19 nt, Artificial Sequence
  Description of Artificial Sequence: Synthetic oligonucleotide
  Antisense strand to SEQ ID NO: 1937210
uguaucccacuacaagggu

SEQ ID NO: 1937212 - RNA, 19 nt, Artificial Sequence
  Description of Artificial Sequence: Synthetic oligonucleotide
  Sense strand starting at position 2788 of SEQ ID NO: 1879867
cuuguagugggauacagau

SEQ ID NO: 1937213 - RNA, 19 nt, Artificial Sequence
  Description of Artificial Sequence: Synthetic oligonucleotide
  Antisense strand to SEQ ID NO: 1937212
aucuguaucccacuacaag

SEQ ID NO: 1937214 - RNA, 19 nt, Artificial Sequence
  Description of Artificial Sequence: Synthetic oligonucleotide
  Sense strand starting at position 2798 of SEQ ID NO: 1879867
gauacagaucuguggucuu

SEQ ID NO: 1937215 - RNA, 19 nt, Artificial Sequence
  Description of Artificial Sequence: Synthetic oligonucleotide
  Antisense strand to SEQ ID NO: 1937214
aagaccacagaucuguauc

SEQ ID NO: 1937216 - RNA, 19 nt, Artificial Sequence
  Description of Artificial Sequence: Synthetic oligonucleotide
  Sense strand starting at position 3024 of SEQ ID NO: 1879867
gagugaucucagcaccaug

SEQ ID NO: 1937217 - RNA, 19 nt, Artificial Sequence
  Description of Artificial Sequence: Synthetic oligonucleotide
  Antisense strand to SEQ ID NO: 1937216
cauggugcugagaucacuc

SEQ ID NO: 1937218 - RNA, 19 nt, Artificial Sequence
  Description of Artificial Sequence: Synthetic oligonucleotide
  Sense strand starting at position 3089 of SEQ ID NO: 1879867
uuugauuucuuugucaagu

SEQ ID NO: 1937219 - RNA, 19 nt, Artificial Sequence
  Description of Artificial Sequence: Synthetic oligonucleotide
  Antisense strand to SEQ ID NO: 1937218
acuugacaaagaaaucaaa

SEQ ID NO: 1937220 - RNA, 19 nt, Artificial Sequence
  Description of Artificial Sequence: Synthetic oligonucleotide
  Sense strand starting at position 3090 of SEQ ID NO: 1879867
uugauuucuuugucaaguu

SEQ ID NO: 1937221 - RNA, 19 nt, Artificial Sequence
  Description of Artificial Sequence: Synthetic oligonucleotide
  Antisense strand to SEQ ID NO: 1937220
aacuugacaaagaaaucaa

SEQ ID NO: 1937222 - RNA, 19 nt, Artificial Sequence
  Description of Artificial Sequence: Synthetic oligonucleotide
  Sense strand starting at position 3171 of SEQ ID NO: 1879867
agcgacugacacgauuauu

SEQ ID NO: 1937223 - RNA, 19 nt, Artificial Sequence
  Description of Artificial Sequence: Synthetic oligonucleotide
  Antisense strand to SEQ ID NO: 1937222
aauaaucgugucagucgcu

SEQ ID NO: 1937224 - RNA, 19 nt, Artificial Sequence
  Description of Artificial Sequence: Synthetic oligonucleotide
  Sense strand starting at position 3728 of SEQ ID NO: 1879867
guguaugugcucuccucau

SEQ ID NO: 1937225 - RNA, 19 nt, Artificial Sequence
  Description of Artificial Sequence: Synthetic oligonucleotide
  Antisense strand to SEQ ID NO: 1937224
augaggagagcacauacac

SEQ ID NO: 1937226 - RNA, 19 nt, Artificial Sequence
  Description of Artificial Sequence: Synthetic oligonucleotide
  Sense strand starting at position 22 of SEQ ID NO: 1879870
aggacaacaucugauaggu

SEQ ID NO: 1937227 - RNA, 19 nt, Artificial Sequence
  Description of Artificial Sequence: Synthetic oligonucleotide
  Antisense strand to SEQ ID NO: 1937226
accuaucagauguuguccu

SEQ ID NO: 1937228 - RNA, 19 nt, Artificial Sequence
  Description of Artificial Sequence: Synthetic oligonucleotide
  Sense strand starting at position 24 of SEQ ID NO: 1879870
gacaacaucugauagguga

SEQ ID NO: 1937229 - RNA, 19 nt, Artificial Sequence
  Description of Artificial Sequence: Synthetic oligonucleotide
  Antisense strand to SEQ ID NO: 1937228
ucaccuaucagauguuguc

SEQ ID NO: 1937230 - RNA, 19 nt, Artificial Sequence
  Description of Artificial Sequence: Synthetic oligonucleotide
  Sense strand starting at position 63 of SEQ ID NO: 1879870
aagggcaucugcugaguua

SEQ ID NO: 1937231 - RNA, 19 nt, Artificial Sequence
  Description of Artificial Sequence: Synthetic oligonucleotide
  Antisense strand to SEQ ID NO: 1937230
uaacucagcagaugcccuu

SEQ ID NO: 1937232 - RNA, 19 nt, Artificial Sequence
  Description of Artificial Sequence: Synthetic oligonucleotide
  Sense strand starting at position 76 of SEQ ID NO: 1879870
gaguuacccaggcguagaa

SEQ ID NO: 1937233 - RNA, 19 nt, Artificial Sequence
  Description of Artificial Sequence: Synthetic oligonucleotide
  Antisense strand to SEQ ID NO: 1937232
uucuacgccuggguaacuc

SEQ ID NO: 1937234 - RNA, 19 nt, Artificial Sequence
  Description of Artificial Sequence: Synthetic oligonucleotide
  Sense strand starting at position 88 of SEQ ID NO: 1879870
cguagaacuuguggagauu

SEQ ID NO: 1937235 - RNA, 19 nt, Artificial Sequence
  Description of Artificial Sequence: Synthetic oligonucleotide
  Antisense strand to SEQ ID NO: 1937234
aaucuccacaaguucuacg

SEQ ID NO: 1937236 - RNA, 19 nt, Artificial Sequence
  Description of Artificial Sequence: Synthetic oligonucleotide
  Sense strand starting at position 797 of SEQ ID NO: 1879870
uggcucuccaguugucgaa

SEQ ID NO: 1937237 - RNA, 19 nt, Artificial Sequence
  Description of Artificial Sequence: Synthetic oligonucleotide
  Antisense strand to SEQ ID NO: 1937236
uucgacaacuggagagcca

SEQ ID NO: 1937238 - RNA, 19 nt, Artificial Sequence
  Description of Artificial Sequence: Synthetic oligonucleotide
  Sense strand starting at position 809 of SEQ ID NO: 1879870
ugucgaaucuguuucugua

SEQ ID NO: 1937239 - RNA, 19 nt, Artificial Sequence
  Description of Artificial Sequence: Synthetic oligonucleotide
  Antisense strand to SEQ ID NO: 1937238
uacagaaacagauucgaca

SEQ ID NO: 1937240 - RNA, 19 nt, Artificial Sequence
  Description of Artificial Sequence: Synthetic oligonucleotide
  Sense strand starting at position 812 of SEQ ID NO: 1879870
cgaaucuguuucuguaacu

SEQ ID NO: 1937241 - RNA, 19 nt, Artificial Sequence
  Description of Artificial Sequence: Synthetic oligonucleotide
  Antisense strand to SEQ ID NO: 1937240
aguuacagaaacagauucg

SEQ ID NO: 1937242 - RNA, 19 nt, Artificial Sequence
  Description of Artificial Sequence: Synthetic oligonucleotide
  Sense strand starting at position 983 of SEQ ID NO: 1879870
uucccaguuugagaacacu

SEQ ID NO: 1937243 - RNA, 19 nt, Artificial Sequence
  Description of Artificial Sequence: Synthetic oligonucleotide
  Antisense strand to SEQ ID NO: 1937242
aguguucucaaacugggaa

SEQ ID NO: 1937244 - RNA, 19 nt, Artificial Sequence
  Description of Artificial Sequence: Synthetic oligonucleotide
  Sense strand starting at position 1092 of SEQ ID NO: 1879870
gggagcacuauugaauguu

SEQ ID NO: 1937245 - RNA, 19 nt, Artificial Sequence
  Description of Artificial Sequence: Synthetic oligonucleotide
  Antisense strand to SEQ ID NO: 1937244
aacauucaauagugcuccc

SEQ ID NO: 1937246 - RNA, 19 nt, Artificial Sequence
  Description of Artificial Sequence: Synthetic oligonucleotide
  Sense strand starting at position 1098 of SEQ ID NO: 1879870
acuauugaauguugagcaa

SEQ ID NO: 1937247 - RNA, 19 nt, Artificial Sequence
  Description of Artificial Sequence: Synthetic oligonucleotide
  Antisense strand to SEQ ID NO: 1937246
uugcucaacauucaauagu

SEQ ID NO: 1937248 - RNA, 19 nt, Artificial Sequence
  Description of Artificial Sequence: Synthetic oligonucleotide
  Sense strand starting at position 1101 of SEQ ID NO: 1879870
auugaauguugagcaaauu

SEQ ID NO: 1937249 - RNA, 19 nt, Artificial Sequence
  Description of Artificial Sequence: Synthetic oligonucleotide
  Antisense strand to SEQ ID NO: 1937248
aauuugcucaacauucaau

SEQ ID NO: 1937250 - RNA, 19 nt, Artificial Sequence
  Description of Artificial Sequence: Synthetic oligonucleotide
  Sense strand starting at position 1102 of SEQ ID NO: 1879870
uugaauguugagcaaauua

SEQ ID NO: 1937251 - RNA, 19 nt, Artificial Sequence
  Description of Artificial Sequence: Synthetic oligonucleotide
  Antisense strand to SEQ ID NO: 1937250
uaauuugcucaacauucaa

SEQ ID NO: 1937252 - RNA, 19 nt, Artificial Sequence
  Description of Artificial Sequence: Synthetic oligonucleotide
  Sense strand starting at position 1179 of SEQ ID NO: 1879870
agcacaucagcgugagcau

SEQ ID NO: 1937253 - RNA, 19 nt, Artificial Sequence
  Description of Artificial Sequence: Synthetic oligonucleotide
  Antisense strand to SEQ ID NO: 1937252
augcucacgcugaugugcu

SEQ ID NO: 1937254 - RNA, 19 nt, Artificial Sequence
  Description of Artificial Sequence: Synthetic oligonucleotide
  Sense strand starting at position 1191 of SEQ ID NO: 1879870
ugagcauguacgugaucga

SEQ ID NO: 1937255 - RNA, 19 nt, Artificial Sequence
  Description of Artificial Sequence: Synthetic oligonucleotide
  Antisense strand to SEQ ID NO: 1937254
ucgaucacguacaugcuca

SEQ ID NO: 1937256 - RNA, 19 nt, Artificial Sequence
  Description of Artificial Sequence: Synthetic oligonucleotide
  Sense strand starting at position 1192 of SEQ ID NO: 1879870
gagcauguacgugaucgau

SEQ ID NO: 1937257 - RNA, 19 nt, Artificial Sequence
  Description of Artificial Sequence: Synthetic oligonucleotide
  Antisense strand to SEQ ID NO: 1937256
aucgaucacguacaugcuc

SEQ ID NO: 1937258 - RNA, 19 nt, Artificial Sequence
  Description of Artificial Sequence: Synthetic oligonucleotide
  Sense strand starting at position 1194 of SEQ ID NO: 1879870
gcauguacgugaucgauga

SEQ ID NO: 1937259 - RNA, 19 nt, Artificial Sequence
  Description of Artificial Sequence: Synthetic oligonucleotide
  Antisense strand to SEQ ID NO: 1937258
ucaucgaucacguacaugc

SEQ ID NO: 1937260 - RNA, 19 nt, Artificial Sequence
  Description of Artificial Sequence: Synthetic oligonucleotide
  Sense strand starting at position 1411 of SEQ ID NO: 1879870
gcgaaugcuccucauucca

SEQ ID NO: 1937261 - RNA, 19 nt, Artificial Sequence
  Description of Artificial Sequence: Synthetic oligonucleotide
  Antisense strand to SEQ ID NO: 1937260
uggaaugaggagcauucgc

SEQ ID NO: 1937262 - RNA, 19 nt, Artificial Sequence
  Description of Artificial Sequence: Synthetic oligonucleotide
  Sense strand starting at position 1443 of SEQ ID NO: 1879870
aggacacugucggucuuau

SEQ ID NO: 1937263 - RNA, 19 nt, Artificial Sequence
  Description of Artificial Sequence: Synthetic oligonucleotide
  Antisense strand to SEQ ID NO: 1937262
auaagaccgacaguguccu

SEQ ID NO: 1937264 - RNA, 19 nt, Artificial Sequence
  Description of Artificial Sequence: Synthetic oligonucleotide
  Sense strand starting at position 1635 of SEQ ID NO: 1879870
cugacuucgccucacuaga

SEQ ID NO: 1937265 - RNA, 19 nt, Artificial Sequence
  Description of Artificial Sequence: Synthetic oligonucleotide
  Antisense strand to SEQ ID NO: 1937264
ucuagugaggcgaagucag

SEQ ID NO: 1937266 - RNA, 19 nt, Artificial Sequence
  Description of Artificial Sequence: Synthetic oligonucleotide
  Sense strand starting at position 1651 of SEQ ID NO: 1879870
agagucuuccucuguccau

SEQ ID NO: 1937267 - RNA, 19 nt, Artificial Sequence
  Description of Artificial Sequence: Synthetic oligonucleotide
  Antisense strand to SEQ ID NO: 1937266
auggacagaggaagacucu

SEQ ID NO: 1937268 - RNA, 19 nt, Artificial Sequence
  Description of Artificial Sequence: Synthetic oligonucleotide
  Sense strand starting at position 1894 of SEQ ID NO: 1879870
gcggaauuucaggacgcga

SEQ ID NO: 1937269 - RNA, 19 nt, Artificial Sequence
  Description of Artificial Sequence: Synthetic oligonucleotide
  Antisense strand to SEQ ID NO: 1937268
ucgcguccugaaauuccgc

SEQ ID NO: 1937270 - RNA, 19 nt, Artificial Sequence
  Description of Artificial Sequence: Synthetic oligonucleotide
  Sense strand starting at position 1907 of SEQ ID NO: 1879870
acgcgaaacucgugucuuu

SEQ ID NO: 1937271 - RNA, 19 nt, Artificial Sequence
  Description of Artificial Sequence: Synthetic oligonucleotide
  Antisense strand to SEQ ID NO: 1937270
aaagacacgaguuucgcgu

SEQ ID NO: 1937272 - RNA, 19 nt, Artificial Sequence
  Description of Artificial Sequence: Synthetic oligonucleotide
  Sense strand starting at position 1927 of SEQ ID NO: 1879870
gagccuccaucuguguauu

SEQ ID NO: 1937273 - RNA, 19 nt, Artificial Sequence
  Description of Artificial Sequence: Synthetic oligonucleotide
  Antisense strand to SEQ ID NO: 1937272
aauacacagauggaggcuc

SEQ ID NO: 1937274 - RNA, 19 nt, Artificial Sequence
  Description of Artificial Sequence: Synthetic oligonucleotide
  Sense strand starting at position 1928 of SEQ ID NO: 1879870
agccuccaucuguguauua

SEQ ID NO: 1937275 - RNA, 19 nt, Artificial Sequence
  Description of Artificial Sequence: Synthetic oligonucleotide
  Antisense strand to SEQ ID NO: 1937274
uaauacacagauggaggcu

SEQ ID NO: 1937276 - RNA, 19 nt, Artificial Sequence
  Description of Artificial Sequence: Synthetic oligonucleotide
  Sense strand starting at position 1930 of SEQ ID NO: 1879870
ccuccaucuguguauuacu

SEQ ID NO: 1937277 - RNA, 19 nt, Artificial Sequence
  Description of Artificial Sequence: Synthetic oligonucleotide
  Antisense strand to SEQ ID NO: 1937276
aguaauacacagauggagg

SEQ ID NO: 1937278 - RNA, 19 nt, Artificial Sequence
  Description of Artificial Sequence: Synthetic oligonucleotide
  Sense strand starting at position 1938 of SEQ ID NO: 1879870
uguguauuacugugcgugu

SEQ ID NO: 1937279 - RNA, 19 nt, Artificial Sequence
  Description of Artificial Sequence: Synthetic oligonucleotide
  Antisense strand to SEQ ID NO: 1937278
acacgcacaguaauacaca

SEQ ID NO: 1937280 - RNA, 19 nt, Artificial Sequence
  Description of Artificial Sequence: Synthetic oligonucleotide
  Sense strand starting at position 2010 of SEQ ID NO: 1879870
gcggcaccuucuucuuuaa

SEQ ID NO: 1937281 - RNA, 19 nt, Artificial Sequence
  Description of Artificial Sequence: Synthetic oligonucleotide
  Antisense strand to SEQ ID NO: 1937280
uuaaagaagaaggugccgc

SEQ ID NO: 1937282 - RNA, 19 nt, Artificial Sequence
  Description of Artificial Sequence: Synthetic oligonucleotide
  Sense strand starting at position 2073 of SEQ ID NO: 1879870
gagaaagcgccgcagugau

SEQ ID NO: 1937283 - RNA, 19 nt, Artificial Sequence
  Description of Artificial Sequence: Synthetic oligonucleotide
  Antisense strand to SEQ ID NO: 1937282
aucacugcggcgcuuucuc

SEQ ID NO: 1937284 - RNA, 19 nt, Artificial Sequence
  Description of Artificial Sequence: Synthetic oligonucleotide
  Sense strand starting at position 2085 of SEQ ID NO: 1879870
cagugaucuccacgucuug

SEQ ID NO: 1937285 - RNA, 19 nt, Artificial Sequence
  Description of Artificial Sequence: Synthetic oligonucleotide
  Antisense strand to SEQ ID NO: 1937284
caagacguggagaucacug

SEQ ID NO: 1937286 - RNA, 19 nt, Artificial Sequence
  Description of Artificial Sequence: Synthetic oligonucleotide
  Sense strand starting at position 2977 of SEQ ID NO: 1879870
gugagugaccuaggacuca

SEQ ID NO: 1937287 - RNA, 19 nt, Artificial Sequence
  Description of Artificial Sequence: Synthetic oligonucleotide
  Antisense strand to SEQ ID NO: 1937286
ugaguccuaggucacucac

SEQ ID NO: 1937288 - RNA, 19 nt, Artificial Sequence
  Description of Artificial Sequence: Synthetic oligonucleotide
  Sense strand starting at position 3018 of SEQ ID NO: 1879870
ggguccauagcaugaguua

SEQ ID NO: 1937289 - RNA, 19 nt, Artificial Sequence
  Description of Artificial Sequence: Synthetic oligonucleotide
  Antisense strand to SEQ ID NO: 1937288
uaacucaugcuauggaccc

SEQ ID NO: 1937290 - RNA, 19 nt, Artificial Sequence
  Description of Artificial Sequence: Synthetic oligonucleotide
  Sense strand starting at position 3019 of SEQ ID NO: 1879870
gguccauagcaugaguuaa

SEQ ID NO: 1937291 - RNA, 19 nt, Artificial Sequence
  Description of Artificial Sequence: Synthetic oligonucleotide
  Antisense strand to SEQ ID NO: 1937290
uuaacucaugcuauggacc

SEQ ID NO: 1937292 - RNA, 19 nt, Artificial Sequence
  Description of Artificial Sequence: Synthetic oligonucleotide
  Sense strand starting at position 3059 of SEQ ID NO: 1879870
agccauuaauucucaggga

SEQ ID NO: 1937293 - RNA, 19 nt, Artificial Sequence
  Description of Artificial Sequence: Synthetic oligonucleotide
  Antisense strand to SEQ ID NO: 1937292
ucccugagaauuaauggcu

SEQ ID NO: 1937294 - RNA, 19 nt, Artificial Sequence
  Description of Artificial Sequence: Synthetic oligonucleotide
  Sense strand starting at position 3060 of SEQ ID NO: 1879870
gccauuaauucucagggag

SEQ ID NO: 1937295 - RNA, 19 nt, Artificial Sequence
  Description of Artificial Sequence: Synthetic oligonucleotide
  Antisense strand to SEQ ID NO: 1937294
cucccugagaauuaauggc

SEQ ID NO: 1937296 - RNA, 19 nt, Artificial Sequence
  Description of Artificial Sequence: Synthetic oligonucleotide
  Sense strand starting at position 3062 of SEQ ID NO: 1879870
cauuaauucucagggagua

SEQ ID NO: 1937297 - RNA, 19 nt, Artificial Sequence
  Description of Artificial Sequence: Synthetic oligonucleotide
  Antisense strand to SEQ ID NO: 1937296
uacucccugagaauuaaug

SEQ ID NO: 1937298 - RNA, 19 nt, Artificial Sequence
  Description of Artificial Sequence: Synthetic oligonucleotide
  Sense strand starting at position 3063 of SEQ ID NO: 1879870
auuaauucucagggaguaa

SEQ ID NO: 1937299 - RNA, 19 nt, Artificial Sequence
  Description of Artificial Sequence: Synthetic oligonucleotide
  Antisense strand to SEQ ID NO: 1937298
uuacucccugagaauuaau

SEQ ID NO: 1937300 - RNA, 19 nt, Artificial Sequence
  Description of Artificial Sequence: Synthetic oligonucleotide
  Sense strand starting at position 3397 of SEQ ID NO: 1879870
uucgauuccucagggaucu

SEQ ID NO: 1937301 - RNA, 19 nt, Artificial Sequence
  Description of Artificial Sequence: Synthetic oligonucleotide
  Antisense strand to SEQ ID NO: 1937300
agaucccugaggaaucgaa

SEQ ID NO: 1937302 - RNA, 19 nt, Artificial Sequence
  Description of Artificial Sequence: Synthetic oligonucleotide
  Sense strand starting at position 88 of SEQ ID NO: 1879869
gggaauaaccugugguaua

SEQ ID NO: 1937303 - RNA, 19 nt, Artificial Sequence
  Description of Artificial Sequence: Synthetic oligonucleotide
  Antisense strand to SEQ ID NO: 1937302
uauaccacagguuauuccc

SEQ ID NO: 1937304 - RNA, 19 nt, Artificial Sequence
  Description of Artificial Sequence: Synthetic oligonucleotide
  Sense strand starting at position 91 of SEQ ID NO: 1879869
aauaaccugugguauagaa

SEQ ID NO: 1937305 - RNA, 19 nt, Artificial Sequence
  Description of Artificial Sequence: Synthetic oligonucleotide
  Antisense strand to SEQ ID NO: 1937304
uucuauaccacagguuauu

SEQ ID NO: 1937306 - RNA, 19 nt, Artificial Sequence
  Description of Artificial Sequence: Synthetic oligonucleotide
  Sense strand starting at position 99 of SEQ ID NO: 1879869
gugguauagaagcacaauu

SEQ ID NO: 1937307 - RNA, 19 nt, Artificial Sequence
  Description of Artificial Sequence: Synthetic oligonucleotide
  Antisense strand to SEQ ID NO: 1937306
aauugugcuucuauaccac

SEQ ID NO: 1937308 - RNA, 19 nt, Artificial Sequence
  Description of Artificial Sequence: Synthetic oligonucleotide
  Sense strand starting at position 194 of SEQ ID NO: 1879869
uuugauauucuccgauagu

SEQ ID NO: 1937309 - RNA, 19 nt, Artificial Sequence
  Description of Artificial Sequence: Synthetic oligonucleotide
  Antisense strand to SEQ ID NO: 1937308
acuaucggagaauaucaaa

SEQ ID NO: 1937310 - RNA, 19 nt, Artificial Sequence
  Description of Artificial Sequence: Synthetic oligonucleotide
  Sense strand starting at position 197 of SEQ ID NO: 1879869
gauauucuccgauaguuua

SEQ ID NO: 1937311 - RNA, 19 nt, Artificial Sequence
  Description of Artificial Sequence: Synthetic oligonucleotide
  Antisense strand to SEQ ID NO: 1937310
uaaacuaucggagaauauc

SEQ ID NO: 1937312 - RNA, 19 nt, Artificial Sequence
  Description of Artificial Sequence: Synthetic oligonucleotide
  Sense strand starting at position 200 of SEQ ID NO: 1879869
auucuccgauaguuuaaga

SEQ ID NO: 1937313 - RNA, 19 nt, Artificial Sequence
  Description of Artificial Sequence: Synthetic oligonucleotide
  Antisense strand to SEQ ID NO: 1937312
ucuuaaacuaucggagaau

SEQ ID NO: 1937314 - RNA, 19 nt, Artificial Sequence
  Description of Artificial Sequence: Synthetic oligonucleotide
  Sense strand starting at position 235 of SEQ ID NO: 1879869
ccaagugacugaucaagac

SEQ ID NO: 1937315 - RNA, 19 nt, Artificial Sequence
  Description of Artificial Sequence: Synthetic oligonucleotide
  Antisense strand to SEQ ID NO: 1937314
gucuugaucagucacuugg

SEQ ID NO: 1937316 - RNA, 19 nt, Artificial Sequence
  Description of Artificial Sequence: Synthetic oligonucleotide
  Sense strand starting at position 253 of SEQ ID NO: 1879869
cuuauauacucuggaaaga

SEQ ID NO: 1937317 - RNA, 19 nt, Artificial Sequence
  Description of Artificial Sequence: Synthetic oligonucleotide
  Antisense strand to SEQ ID NO: 1937316
ucuuuccagaguauauaag

SEQ ID NO: 1937318 - RNA, 19 nt, Artificial Sequence
  Description of Artificial Sequence: Synthetic oligonucleotide
  Sense strand starting at position 429 of SEQ ID NO: 1879869
cauugucacaggcgaagua

SEQ ID NO: 1937319 - RNA, 19 nt, Artificial Sequence
  Description of Artificial Sequence: Synthetic oligonucleotide
  Antisense strand to SEQ ID NO: 1937318
uacuucgccugugacaaug

SEQ ID NO: 1937320 - RNA, 19 nt, Artificial Sequence
  Description of Artificial Sequence: Synthetic oligonucleotide
  Sense strand starting at position 452 of SEQ ID NO: 1879869
gcucgauugaggugacuaa

SEQ ID NO: 1937321 - RNA, 19 nt, Artificial Sequence
  Description of Artificial Sequence: Synthetic oligonucleotide
  Antisense strand to SEQ ID NO: 1937320
uuagucaccucaaucgagc

SEQ ID NO: 1937322 - RNA, 19 nt, Artificial Sequence
  Description of Artificial Sequence: Synthetic oligonucleotide
  Sense strand starting at position 459 of SEQ ID NO: 1879869
ugaggugacuaacagugau

SEQ ID NO: 1937323 - RNA, 19 nt, Artificial Sequence
  Description of Artificial Sequence: Synthetic oligonucleotide
  Antisense strand to SEQ ID NO: 1937322
aucacuguuagucaccuca

SEQ ID NO: 1937324 - RNA, 19 nt, Artificial Sequence
  Description of Artificial Sequence: Synthetic oligonucleotide
  Sense strand starting at position 462 of SEQ ID NO: 1879869
ggugacuaacagugaugca

SEQ ID NO: 1937325 - RNA, 19 nt, Artificial Sequence
  Description of Artificial Sequence: Synthetic oligonucleotide
  Antisense strand to SEQ ID NO: 1937324
ugcaucacuguuagucacc

SEQ ID NO: 1937326 - RNA, 19 nt, Artificial Sequence
  Description of Artificial Sequence: Synthetic oligonucleotide
  Sense strand starting at position 488 of SEQ ID NO: 1879869
aggacaacaucugauaggu

SEQ ID NO: 1937327 - RNA, 19 nt, Artificial Sequence
  Description of Artificial Sequence: Synthetic oligonucleotide
  Antisense strand to SEQ ID NO: 1937326
accuaucagauguuguccu

SEQ ID NO: 1937328 - RNA, 19 nt, Artificial Sequence
  Description of Artificial Sequence: Synthetic oligonucleotide
  Sense strand starting at position 490 of SEQ ID NO: 1879869
gacaacaucugauagguga

SEQ ID NO: 1937329 - RNA, 19 nt, Artificial Sequence
  Description of Artificial Sequence: Synthetic oligonucleotide
  Antisense strand to SEQ ID NO: 1937328
ucaccuaucagauguuguc

SEQ ID NO: 1937330 - RNA, 19 nt, Artificial Sequence
  Description of Artificial Sequence: Synthetic oligonucleotide
  Sense strand starting at position 542 of SEQ ID NO: 1879869
gaguuacccaggcguagaa

SEQ ID NO: 1937331 - RNA, 19 nt, Artificial Sequence
  Description of Artificial Sequence: Synthetic oligonucleotide
  Antisense strand to SEQ ID NO: 1937330
uucuacgccuggguaacuc

SEQ ID NO: 1937332 - RNA, 19 nt, Artificial Sequence
  Description of Artificial Sequence: Synthetic oligonucleotide
  Sense strand starting at position 1263 of SEQ ID NO: 1879869
uggcucuccaguugucgaa

SEQ ID NO: 1937333 - RNA, 19 nt, Artificial Sequence
  Description of Artificial Sequence: Synthetic oligonucleotide
  Antisense strand to SEQ ID NO: 1937332
uucgacaacuggagagcca

SEQ ID NO: 1937334 - RNA, 19 nt, Artificial Sequence
  Description of Artificial Sequence: Synthetic oligonucleotide
  Sense strand starting at position 1275 of SEQ ID NO: 1879869
ugucgaaucuguuucugua

SEQ ID NO: 1937335 - RNA, 19 nt, Artificial Sequence
  Description of Artificial Sequence: Synthetic oligonucleotide
  Antisense strand to SEQ ID NO: 1937334
uacagaaacagauucgaca

SEQ ID NO: 1937336 - RNA, 19 nt, Artificial Sequence
  Description of Artificial Sequence: Synthetic oligonucleotide
  Sense strand starting at position 1558 of SEQ ID NO: 1879869
gggagcacuauugaauguu

SEQ ID NO: 1937337 - RNA, 19 nt, Artificial Sequence
  Description of Artificial Sequence: Synthetic oligonucleotide
  Antisense strand to SEQ ID NO: 1937336
aacauucaauagugcuccc

SEQ ID NO: 1937338 - RNA, 19 nt, Artificial Sequence
  Description of Artificial Sequence: Synthetic oligonucleotide
  Sense strand starting at position 1567 of SEQ ID NO: 1879869
auugaauguugagcaaauu

SEQ ID NO: 1937339 - RNA, 19 nt, Artificial Sequence
  Description of Artificial Sequence: Synthetic oligonucleotide
  Antisense strand to SEQ ID NO: 1937338
aauuugcucaacauucaau

SEQ ID NO: 1937340 - RNA, 19 nt, Artificial Sequence
  Description of Artificial Sequence: Synthetic oligonucleotide
  Sense strand starting at position 1568 of SEQ ID NO: 1879869
uugaauguugagcaaauua

SEQ ID NO: 1937341 - RNA, 19 nt, Artificial Sequence
  Description of Artificial Sequence: Synthetic oligonucleotide
  Antisense strand to SEQ ID NO: 1937340
uaauuugcucaacauucaa

SEQ ID NO: 1937342 - RNA, 19 nt, Artificial Sequence
  Description of Artificial Sequence: Synthetic oligonucleotide
  Sense strand starting at position 1645 of SEQ ID NO: 1879869
agcacaucagcgugagcau

SEQ ID NO: 1937343 - RNA, 19 nt, Artificial Sequence
  Description of Artificial Sequence: Synthetic oligonucleotide
  Antisense strand to SEQ ID NO: 1937342
augcucacgcugaugugcu

SEQ ID NO: 1937344 - RNA, 19 nt, Artificial Sequence
  Description of Artificial Sequence: Synthetic oligonucleotide
  Sense strand starting at position 1657 of SEQ ID NO: 1879869
ugagcauguacgugaucga

SEQ ID NO: 1937345 - RNA, 19 nt, Artificial Sequence
  Description of Artificial Sequence: Synthetic oligonucleotide
  Antisense strand to SEQ ID NO: 1937344
ucgaucacguacaugcuca

SEQ ID NO: 1937346 - RNA, 19 nt, Artificial Sequence
  Description of Artificial Sequence: Synthetic oligonucleotide
  Sense strand starting at position 1658 of SEQ ID NO: 1879869
gagcauguacgugaucgau

SEQ ID NO: 1937347 - RNA, 19 nt, Artificial Sequence
  Description of Artificial Sequence: Synthetic oligonucleotide
  Antisense strand to SEQ ID NO: 1937346
aucgaucacguacaugcuc

SEQ ID NO: 1937348 - RNA, 19 nt, Artificial Sequence
  Description of Artificial Sequence: Synthetic oligonucleotide
  Sense strand starting at position 1660 of SEQ ID NO: 1879869
gcauguacgugaucgauga

SEQ ID NO: 1937349 - RNA, 19 nt, Artificial Sequence
  Description of Artificial Sequence: Synthetic oligonucleotide
  Antisense strand to SEQ ID NO: 1937348
ucaucgaucacguacaugc

SEQ ID NO: 1937350 - RNA, 19 nt, Artificial Sequence
  Description of Artificial Sequence: Synthetic oligonucleotide
  Sense strand starting at position 1877 of SEQ ID NO: 1879869
gcgaaugcuccucauucca

SEQ ID NO: 1937351 - RNA, 19 nt, Artificial Sequence
  Description of Artificial Sequence: Synthetic oligonucleotide
  Antisense strand to SEQ ID NO: 1937350
uggaaugaggagcauucgc

SEQ ID NO: 1937352 - RNA, 19 nt, Artificial Sequence
  Description of Artificial Sequence: Synthetic oligonucleotide
  Sense strand starting at position 1909 of SEQ ID NO: 1879869
aggacacugucggucuuau

SEQ ID NO: 1937353 - RNA, 19 nt, Artificial Sequence
  Description of Artificial Sequence: Synthetic oligonucleotide
  Antisense strand to SEQ ID NO: 1937352
auaagaccgacaguguccu

SEQ ID NO: 1937354 - RNA, 19 nt, Artificial Sequence
  Description of Artificial Sequence: Synthetic oligonucleotide
  Sense strand starting at position 2101 of SEQ ID NO: 1879869
cugacuucgccucacuaga

SEQ ID NO: 1937355 - RNA, 19 nt, Artificial Sequence
  Description of Artificial Sequence: Synthetic oligonucleotide
  Antisense strand to SEQ ID NO: 1937354
ucuagugaggcgaagucag

SEQ ID NO: 1937356 - RNA, 19 nt, Artificial Sequence
  Description of Artificial Sequence: Synthetic oligonucleotide
  Sense strand starting at position 2117 of SEQ ID NO: 1879869
agagucuuccucuguccau

SEQ ID NO: 1937357 - RNA, 19 nt, Artificial Sequence
  Description of Artificial Sequence: Synthetic oligonucleotide
  Antisense strand to SEQ ID NO: 1937356
auggacagaggaagacucu

SEQ ID NO: 1937358 - RNA, 19 nt, Artificial Sequence
  Description of Artificial Sequence: Synthetic oligonucleotide
  Sense strand starting at position 2360 of SEQ ID NO: 1879869
gcggaauuucaggacgcga

SEQ ID NO: 1937359 - RNA, 19 nt, Artificial Sequence
  Description of Artificial Sequence: Synthetic oligonucleotide
  Antisense strand to SEQ ID NO: 1937358
ucgcguccugaaauuccgc

SEQ ID NO: 1937360 - RNA, 19 nt, Artificial Sequence
  Description of Artificial Sequence: Synthetic oligonucleotide
  Sense strand starting at position 2393 of SEQ ID NO: 1879869
gagccuccaucuguguauu

SEQ ID NO: 1937361 - RNA, 19 nt, Artificial Sequence
  Description of Artificial Sequence: Synthetic oligonucleotide
  Antisense strand to SEQ ID NO: 1937360
aauacacagauggaggcuc

SEQ ID NO: 1937362 - RNA, 19 nt, Artificial Sequence
  Description of Artificial Sequence: Synthetic oligonucleotide
  Sense strand starting at position 2394 of SEQ ID NO: 1879869
agccuccaucuguguauua

SEQ ID NO: 1937363 - RNA, 19 nt, Artificial Sequence
  Description of Artificial Sequence: Synthetic oligonucleotide
  Antisense strand to SEQ ID NO: 1937362
uaauacacagauggaggcu

SEQ ID NO: 1937364 - RNA, 19 nt, Artificial Sequence
  Description of Artificial Sequence: Synthetic oligonucleotide
  Sense strand starting at position 2396 of SEQ ID NO: 1879869
ccuccaucuguguauuacu

SEQ ID NO: 1937365 - RNA, 19 nt, Artificial Sequence
  Description of Artificial Sequence: Synthetic oligonucleotide
  Antisense strand to SEQ ID NO: 1937364
aguaauacacagauggagg

SEQ ID NO: 1937366 - RNA, 19 nt, Artificial Sequence
  Description of Artificial Sequence: Synthetic oligonucleotide
  Sense strand starting at position 2476 of SEQ ID NO: 1879869
gcggcaccuucuucuuuaa

SEQ ID NO: 1937367 - RNA, 19 nt, Artificial Sequence
  Description of Artificial Sequence: Synthetic oligonucleotide
  Antisense strand to SEQ ID NO: 1937366
uuaaagaagaaggugccgc

SEQ ID NO: 1937368 - RNA, 19 nt, Artificial Sequence
  Description of Artificial Sequence: Synthetic oligonucleotide
  Sense strand starting at position 2539 of SEQ ID NO: 1879869
gagaaagcgccgcagugau

SEQ ID NO: 1937369 - RNA, 19 nt, Artificial Sequence
  Description of Artificial Sequence: Synthetic oligonucleotide
  Antisense strand to SEQ ID NO: 1937368
aucacugcggcgcuuucuc

SEQ ID NO: 1937370 - RNA, 19 nt, Artificial Sequence
  Description of Artificial Sequence: Synthetic oligonucleotide
  Sense strand starting at position 2551 of SEQ ID NO: 1879869
cagugaucuccacgucuug

SEQ ID NO: 1937371 - RNA, 19 nt, Artificial Sequence
  Description of Artificial Sequence: Synthetic oligonucleotide
  Antisense strand to SEQ ID NO: 1937370
caagacguggagaucacug

SEQ ID NO: 1937372 - RNA, 19 nt, Artificial Sequence
  Description of Artificial Sequence: Synthetic oligonucleotide
  Sense strand starting at position 3443 of SEQ ID NO: 1879869
gugagugaccuaggacuca

SEQ ID NO: 1937373 - RNA, 19 nt, Artificial Sequence
  Description of Artificial Sequence: Synthetic oligonucleotide
  Antisense strand to SEQ ID NO: 1937372
ugaguccuaggucacucac

SEQ ID NO: 1937374 - RNA, 19 nt, Artificial Sequence
  Description of Artificial Sequence: Synthetic oligonucleotide
  Sense strand starting at position 3484 of SEQ ID NO: 1879869
ggguccauagcaugaguua

SEQ ID NO: 1937375 - RNA, 19 nt, Artificial Sequence
  Description of Artificial Sequence: Synthetic oligonucleotide
  Antisense strand to SEQ ID NO: 1937374
uaacucaugcuauggaccc

SEQ ID NO: 1937376 - RNA, 19 nt, Artificial Sequence
  Description of Artificial Sequence: Synthetic oligonucleotide
  Sense strand starting at position 3485 of SEQ ID NO: 1879869
gguccauagcaugaguuaa

SEQ ID NO: 1937377 - RNA, 19 nt, Artificial Sequence
  Description of Artificial Sequence: Synthetic oligonucleotide
  Antisense strand to SEQ ID NO: 1937376
uuaacucaugcuauggacc

SEQ ID NO: 1937378 - RNA, 19 nt, Artificial Sequence
  Description of Artificial Sequence: Synthetic oligonucleotide
  Sense strand starting at position 3525 of SEQ ID NO: 1879869
agccauuaauucucaggga

SEQ ID NO: 1937379 - RNA, 19 nt, Artificial Sequence
  Description of Artificial Sequence: Synthetic oligonucleotide
  Antisense strand to SEQ ID NO: 1937378
ucccugagaauuaauggcu

SEQ ID NO: 1937380 - RNA, 19 nt, Artificial Sequence
  Description of Artificial Sequence: Synthetic oligonucleotide
  Sense strand starting at position 3529 of SEQ ID NO: 1879869
auuaauucucagggaguaa

SEQ ID NO: 1937381 - RNA, 19 nt, Artificial Sequence
  Description of Artificial Sequence: Synthetic oligonucleotide
  Antisense strand to SEQ ID NO: 1937380
uuacucccugagaauuaau

SEQ ID NO: 1937382 - RNA, 19 nt, Artificial Sequence
  Description of Artificial Sequence: Synthetic oligonucleotide
  Sense strand starting at position 7 of SEQ ID NO: 1879871
gcaccuggccucugauaga

SEQ ID NO: 1937383 - RNA, 19 nt, Artificial Sequence
  Description of Artificial Sequence: Synthetic oligonucleotide
  Antisense strand to SEQ ID NO: 1937382
ucuaucagaggccaggugc

SEQ ID NO: 1937384 - RNA, 19 nt, Artificial Sequence
  Description of Artificial Sequence: Synthetic oligonucleotide
  Sense strand starting at position 115 of SEQ ID NO: 1879871
aaagguaucuagucauuga

SEQ ID NO: 1937385 - RNA, 19 nt, Artificial Sequence
  Description of Artificial Sequence: Synthetic oligonucleotide
  Antisense strand to SEQ ID NO: 1937384
ucaaugacuagauaccuuu

SEQ ID NO: 1937386 - RNA, 19 nt, Artificial Sequence
  Description of Artificial Sequence: Synthetic oligonucleotide
  Sense strand starting at position 118 of SEQ ID NO: 1879871
gguaucuagucauugaagg

SEQ ID NO: 1937387 - RNA, 19 nt, Artificial Sequence
  Description of Artificial Sequence: Synthetic oligonucleotide
  Antisense strand to SEQ ID NO: 1937386
ccuucaaugacuagauacc

SEQ ID NO: 1937388 - RNA, 19 nt, Artificial Sequence
  Description of Artificial Sequence: Synthetic oligonucleotide
  Sense strand starting at position 119 of SEQ ID NO: 1879871
guaucuagucauugaagga

SEQ ID NO: 1937389 - RNA, 19 nt, Artificial Sequence
  Description of Artificial Sequence: Synthetic oligonucleotide
  Antisense strand to SEQ ID NO: 1937388
uccuucaaugacuagauac

SEQ ID NO: 1937390 - RNA, 19 nt, Artificial Sequence
  Description of Artificial Sequence: Synthetic oligonucleotide
  Sense strand starting at position 136 of SEQ ID NO: 1879871
gaggguaugggauggcaua

SEQ ID NO: 1937391 - RNA, 19 nt, Artificial Sequence
  Description of Artificial Sequence: Synthetic oligonucleotide
  Antisense strand to SEQ ID NO: 1937390
uaugccaucccauacccuc

SEQ ID NO: 1937392 - RNA, 19 nt, Artificial Sequence
  Description of Artificial Sequence: Synthetic oligonucleotide
  Sense strand starting at position 456 of SEQ ID NO: 1879871
aggguuuggcuuuaucgaa

SEQ ID NO: 1937393 - RNA, 19 nt, Artificial Sequence
  Description of Artificial Sequence: Synthetic oligonucleotide
  Antisense strand to SEQ ID NO: 1937392
uucgauaaagccaaacccu

SEQ ID NO: 1937394 - RNA, 19 nt, Artificial Sequence
  Description of Artificial Sequence: Synthetic oligonucleotide
  Sense strand starting at position 513 of SEQ ID NO: 1879871
guguguuggcgacagauga

SEQ ID NO: 1937395 - RNA, 19 nt, Artificial Sequence
  Description of Artificial Sequence: Synthetic oligonucleotide
  Antisense strand to SEQ ID NO: 1937394
ucaucugucgccaacacac

SEQ ID NO: 1937396 - RNA, 19 nt, Artificial Sequence
  Description of Artificial Sequence: Synthetic oligonucleotide
  Sense strand starting at position 517 of SEQ ID NO: 1879871
guuggcgacagaugagaau

SEQ ID NO: 1937397 - RNA, 19 nt, Artificial Sequence
  Description of Artificial Sequence: Synthetic oligonucleotide
  Antisense strand to SEQ ID NO: 1937396
auucucaucugucgccaac

SEQ ID NO: 1937398 - RNA, 19 nt, Artificial Sequence
  Description of Artificial Sequence: Synthetic oligonucleotide
  Sense strand starting at position 548 of SEQ ID NO: 1879871
gggugguuucugggcaaag

SEQ ID NO: 1937399 - RNA, 19 nt, Artificial Sequence
  Description of Artificial Sequence: Synthetic oligonucleotide
  Antisense strand to SEQ ID NO: 1937398
cuuugcccagaaaccaccc

SEQ ID NO: 1937400 - RNA, 19 nt, Artificial Sequence
  Description of Artificial Sequence: Synthetic oligonucleotide
  Sense strand starting at position 550 of SEQ ID NO: 1879871
gugguuucugggcaaagca

SEQ ID NO: 1937401 - RNA, 19 nt, Artificial Sequence
  Description of Artificial Sequence: Synthetic oligonucleotide
  Antisense strand to SEQ ID NO: 1937400
ugcuuugcccagaaaccac

SEQ ID NO: 1937402 - RNA, 19 nt, Artificial Sequence
  Description of Artificial Sequence: Synthetic oligonucleotide
  Sense strand starting at position 675 of SEQ ID NO: 1879871
cuaauuuauugugagcaaa

SEQ ID NO: 1937403 - RNA, 19 nt, Artificial Sequence
  Description of Artificial Sequence: Synthetic oligonucleotide
  Antisense strand to SEQ ID NO: 1937402
uuugcucacaauaaauuag

SEQ ID NO: 1937404 - RNA, 19 nt, Artificial Sequence
  Description of Artificial Sequence: Synthetic oligonucleotide
  Sense strand starting at position 801 of SEQ ID NO: 1879871
cccuaacgauucccuagaa

SEQ ID NO: 1937405 - RNA, 19 nt, Artificial Sequence
  Description of Artificial Sequence: Synthetic oligonucleotide
  Antisense strand to SEQ ID NO: 1937404
uucuagggaaucguuaggg

SEQ ID NO: 1937406 - RNA, 19 nt, Artificial Sequence
  Description of Artificial Sequence: Synthetic oligonucleotide
  Sense strand starting at position 802 of SEQ ID NO: 1879871
ccuaacgauucccuagaaa

SEQ ID NO: 1937407 - RNA, 19 nt, Artificial Sequence
  Description of Artificial Sequence: Synthetic oligonucleotide
  Antisense strand to SEQ ID NO: 1937406
uuucuagggaaucguuagg

SEQ ID NO: 1937408 - RNA, 19 nt, Artificial Sequence
  Description of Artificial Sequence: Synthetic oligonucleotide
  Sense strand starting at position 988 of SEQ ID NO: 1879871
augguacggcauuaaacua

SEQ ID NO: 1937409 - RNA, 19 nt, Artificial Sequence
  Description of Artificial Sequence: Synthetic oligonucleotide
  Antisense strand to SEQ ID NO: 1937408
uaguuuaaugccguaccau

SEQ ID NO: 1937410 - RNA, 19 nt, Artificial Sequence
  Description of Artificial Sequence: Synthetic oligonucleotide
  Sense strand starting at position 1060 of SEQ ID NO: 1879871
uggccugaucucugcagau

SEQ ID NO: 1937411 - RNA, 19 nt, Artificial Sequence
  Description of Artificial Sequence: Synthetic oligonucleotide
  Antisense strand to SEQ ID NO: 1937410
aucugcagagaucaggcca

SEQ ID NO: 1937412 - RNA, 19 nt, Artificial Sequence
  Description of Artificial Sequence: Synthetic oligonucleotide
  Sense strand starting at position 1062 of SEQ ID NO: 1879871
gccugaucucugcagauaa

SEQ ID NO: 1937413 - RNA, 19 nt, Artificial Sequence
  Description of Artificial Sequence: Synthetic oligonucleotide
  Antisense strand to SEQ ID NO: 1937412
uuaucugcagagaucaggc

SEQ ID NO: 1937414 - RNA, 19 nt, Artificial Sequence
  Description of Artificial Sequence: Synthetic oligonucleotide
  Sense strand starting at position 1072 of SEQ ID NO: 1879871
ugcagauaaccguacacua

SEQ ID NO: 1937415 - RNA, 19 nt, Artificial Sequence
  Description of Artificial Sequence: Synthetic oligonucleotide
  Antisense strand to SEQ ID NO: 1937414
uaguguacgguuaucugca

SEQ ID NO: 1937416 - RNA, 19 nt, Artificial Sequence
  Description of Artificial Sequence: Synthetic oligonucleotide
  Sense strand starting at position 1143 of SEQ ID NO: 1879871
cccacaucuccgugauuga

SEQ ID NO: 1937417 - RNA, 19 nt, Artificial Sequence
  Description of Artificial Sequence: Synthetic oligonucleotide
  Antisense strand to SEQ ID NO: 1937416
ucaaucacggagauguggg

SEQ ID NO: 1937418 - RNA, 19 nt, Artificial Sequence
  Description of Artificial Sequence: Synthetic oligonucleotide
  Sense strand starting at position 1144 of SEQ ID NO: 1879871
ccacaucuccgugauugag

SEQ ID NO: 1937419 - RNA, 19 nt, Artificial Sequence
  Description of Artificial Sequence: Synthetic oligonucleotide
  Antisense strand to SEQ ID NO: 1937418
cucaaucacggagaugugg

SEQ ID NO: 1937420 - RNA, 19 nt, Artificial Sequence
  Description of Artificial Sequence: Synthetic oligonucleotide
  Sense strand starting at position 1153 of SEQ ID NO: 1879871
cgugauugagcaagcgauu

SEQ ID NO: 1937421 - RNA, 19 nt, Artificial Sequence
  Description of Artificial Sequence: Synthetic oligonucleotide
  Antisense strand to SEQ ID NO: 1937420
aaucgcuugcucaaucacg

SEQ ID NO: 1937422 - RNA, 19 nt, Artificial Sequence
  Description of Artificial Sequence: Synthetic oligonucleotide
  Sense strand starting at position 1159 of SEQ ID NO: 1879871
ugagcaagcgauuacaaau

SEQ ID NO: 1937423 - RNA, 19 nt, Artificial Sequence
  Description of Artificial Sequence: Synthetic oligonucleotide
  Antisense strand to SEQ ID NO: 1937422
auuuguaaucgcuugcuca

SEQ ID NO: 1937424 - RNA, 19 nt, Artificial Sequence
  Description of Artificial Sequence: Synthetic oligonucleotide
  Sense strand starting at position 1307 of SEQ ID NO: 1879871
cgucuuucaggagggugaa

SEQ ID NO: 1937425 - RNA, 19 nt, Artificial Sequence
  Description of Artificial Sequence: Synthetic oligonucleotide
  Antisense strand to SEQ ID NO: 1937424
uucacccuccugaaagacg

SEQ ID NO: 1937426 - RNA, 19 nt, Artificial Sequence
  Description of Artificial Sequence: Synthetic oligonucleotide
  Sense strand starting at position 1383 of SEQ ID NO: 1879871
gcuugagcuacugacaaga

SEQ ID NO: 1937427 - RNA, 19 nt, Artificial Sequence
  Description of Artificial Sequence: Synthetic oligonucleotide
  Antisense strand to SEQ ID NO: 1937426
ucuugucaguagcucaagc

SEQ ID NO: 1937428 - RNA, 19 nt, Artificial Sequence
  Description of Artificial Sequence: Synthetic oligonucleotide
  Sense strand starting at position 1464 of SEQ ID NO: 1879871
uuucguguuaaggaagaca

SEQ ID NO: 1937429 - RNA, 19 nt, Artificial Sequence
  Description of Artificial Sequence: Synthetic oligonucleotide
  Antisense strand to SEQ ID NO: 1937428
ugucuuccuuaacacgaaa

SEQ ID NO: 1937430 - RNA, 19 nt, Artificial Sequence
  Description of Artificial Sequence: Synthetic oligonucleotide
  Sense strand starting at position 1512 of SEQ ID NO: 1879871
cuugcuaggaguuaaugua

SEQ ID NO: 1937431 - RNA, 19 nt, Artificial Sequence
  Description of Artificial Sequence: Synthetic oligonucleotide
  Antisense strand to SEQ ID NO: 1937430
uacauuaacuccuagcaag

SEQ ID NO: 1937432 - RNA, 19 nt, Artificial Sequence
  Description of Artificial Sequence: Synthetic oligonucleotide
  Sense strand starting at position 1520 of SEQ ID NO: 1879871
gaguuaauguaagcaauca

SEQ ID NO: 1937433 - RNA, 19 nt, Artificial Sequence
  Description of Artificial Sequence: Synthetic oligonucleotide
  Antisense strand to SEQ ID NO: 1937432
ugauugcuuacauuaacuc

SEQ ID NO: 1937434 - RNA, 19 nt, Artificial Sequence
  Description of Artificial Sequence: Synthetic oligonucleotide
  Sense strand starting at position 1630 of SEQ ID NO: 1879871
agaggaguuugaagaggua

SEQ ID NO: 1937435 - RNA, 19 nt, Artificial Sequence
  Description of Artificial Sequence: Synthetic oligonucleotide
  Antisense strand to SEQ ID NO: 1937434
uaccucuucaaacuccucu

SEQ ID NO: 1937436 - RNA, 19 nt, Artificial Sequence
  Description of Artificial Sequence: Synthetic oligonucleotide
  Sense strand starting at position 1895 of SEQ ID NO: 1879871
ggcucuuacuuuccagaag

SEQ ID NO: 1937437 - RNA, 19 nt, Artificial Sequence
  Description of Artificial Sequence: Synthetic oligonucleotide
  Antisense strand to SEQ ID NO: 1937436
cuucuggaaaguaagagcc

SEQ ID NO: 1937438 - RNA, 19 nt, Artificial Sequence
  Description of Artificial Sequence: Synthetic oligonucleotide
  Sense strand starting at position 2059 of SEQ ID NO: 1879871
ucggguaaccaaugguauu

SEQ ID NO: 1937439 - RNA, 19 nt, Artificial Sequence
  Description of Artificial Sequence: Synthetic oligonucleotide
  Antisense strand to SEQ ID NO: 1937438
aauaccauugguuacccga

SEQ ID NO: 1937440 - RNA, 19 nt, Artificial Sequence
  Description of Artificial Sequence: Synthetic oligonucleotide
  Sense strand starting at position 2075 of SEQ ID NO: 1879871
auuguugaccagugcggaa

SEQ ID NO: 1937441 - RNA, 19 nt, Artificial Sequence
  Description of Artificial Sequence: Synthetic oligonucleotide
  Antisense strand to SEQ ID NO: 1937440
uuccgcacuggucaacaau

SEQ ID NO: 1937442 - RNA, 19 nt, Artificial Sequence
  Description of Artificial Sequence: Synthetic oligonucleotide
  Sense strand starting at position 2162 of SEQ ID NO: 1879871
gaaacagaauuagggauaa

SEQ ID NO: 1937443 - RNA, 19 nt, Artificial Sequence
  Description of Artificial Sequence: Synthetic oligonucleotide
  Antisense strand to SEQ ID NO: 1937442
uuaucccuaauucuguuuc

SEQ ID NO: 1937444 - RNA, 19 nt, Artificial Sequence
  Description of Artificial Sequence: Synthetic oligonucleotide
  Sense strand starting at position 3102 of SEQ ID NO: 1879871
gggcaauucgaaugcagua

SEQ ID NO: 1937445 - RNA, 19 nt, Artificial Sequence
  Description of Artificial Sequence: Synthetic oligonucleotide
  Antisense strand to SEQ ID NO: 1937444
uacugcauucgaauugccc

SEQ ID NO: 1937446 - RNA, 19 nt, Artificial Sequence
  Description of Artificial Sequence: Synthetic oligonucleotide
  Sense strand starting at position 3107 of SEQ ID NO: 1879871
auucgaaugcaguaguaau

SEQ ID NO: 1937447 - RNA, 19 nt, Artificial Sequence
  Description of Artificial Sequence: Synthetic oligonucleotide
  Antisense strand to SEQ ID NO: 1937446
auuacuacugcauucgaau

SEQ ID NO: 1937448 - RNA, 19 nt, Artificial Sequence
  Description of Artificial Sequence: Synthetic oligonucleotide
  Sense strand starting at position 3645 of SEQ ID NO: 1879871
uauuaugaacugugaguua

SEQ ID NO: 1937449 - RNA, 19 nt, Artificial Sequence
  Description of Artificial Sequence: Synthetic oligonucleotide
  Antisense strand to SEQ ID NO: 1937448
uaacucacaguucauaaua

SEQ ID NO: 1937450 - RNA, 19 nt, Artificial Sequence
  Description of Artificial Sequence: Synthetic oligonucleotide
  Sense strand starting at position 3648 of SEQ ID NO: 1879871
uaugaacugugaguuagaa

SEQ ID NO: 1937451 - RNA, 19 nt, Artificial Sequence
  Description of Artificial Sequence: Synthetic oligonucleotide
  Antisense strand to SEQ ID NO: 1937450
uucuaacucacaguucaua

SEQ ID NO: 1937452 - RNA, 19 nt, Artificial Sequence
  Description of Artificial Sequence: Synthetic oligonucleotide
  Sense strand starting at position 3814 of SEQ ID NO: 1879871
acacguguaucuccaauau

SEQ ID NO: 1937453 - RNA, 19 nt, Artificial Sequence
  Description of Artificial Sequence: Synthetic oligonucleotide
  Antisense strand to SEQ ID NO: 1937452
auauuggagauacacgugu

SEQ ID NO: 1937454 - RNA, 19 nt, Artificial Sequence
  Description of Artificial Sequence: Synthetic oligonucleotide
  Sense strand starting at position 3818 of SEQ ID NO: 1879871
guguaucuccaauauggcu

SEQ ID NO: 1937455 - RNA, 19 nt, Artificial Sequence
  Description of Artificial Sequence: Synthetic oligonucleotide
  Antisense strand to SEQ ID NO: 1937454
agccauauuggagauacac

SEQ ID NO: 1937456 - RNA, 19 nt, Artificial Sequence
  Description of Artificial Sequence: Synthetic oligonucleotide
  Sense strand starting at position 3823 of SEQ ID NO: 1879871
ucuccaauauggcuauagu

SEQ ID NO: 1937457 - RNA, 19 nt, Artificial Sequence
  Description of Artificial Sequence: Synthetic oligonucleotide
  Antisense strand to SEQ ID NO: 1937456
acuauagccauauuggaga

SEQ ID NO: 1937458 - RNA, 19 nt, Artificial Sequence
  Description of Artificial Sequence: Synthetic oligonucleotide
  Sense strand starting at position 3824 of SEQ ID NO: 1879871
cuccaauauggcuauaguu

SEQ ID NO: 1937459 - RNA, 19 nt, Artificial Sequence
  Description of Artificial Sequence: Synthetic oligonucleotide
  Antisense strand to SEQ ID NO: 1937458
aacuauagccauauuggag

SEQ ID NO: 1937460 - RNA, 19 nt, Artificial Sequence
  Description of Artificial Sequence: Synthetic oligonucleotide
  Sense strand starting at position 3826 of SEQ ID NO: 1879871
ccaauauggcuauaguugu

SEQ ID NO: 1937461 - RNA, 19 nt, Artificial Sequence
  Description of Artificial Sequence: Synthetic oligonucleotide
  Antisense strand to SEQ ID NO: 1937460
acaacuauagccauauugg

SEQ ID NO: 1937462 - RNA, 19 nt, Artificial Sequence
  Description of Artificial Sequence: Synthetic oligonucleotide
  Sense strand starting at position 704 of SEQ ID NO: 1879872
gcaguaguuccguuagugu

SEQ ID NO: 1937463 - RNA, 19 nt, Artificial Sequence
  Description of Artificial Sequence: Synthetic oligonucleotide
  Antisense strand to SEQ ID NO: 1937462
acacuaacggaacuacugc

SEQ ID NO: 1937464 - RNA, 19 nt, Artificial Sequence
  Description of Artificial Sequence: Synthetic oligonucleotide
  Sense strand starting at position 1041 of SEQ ID NO: 1879872
gcuuaauauuucuaguagg

SEQ ID NO: 1937465 - RNA, 19 nt, Artificial Sequence
  Description of Artificial Sequence: Synthetic oligonucleotide
  Antisense strand to SEQ ID NO: 1937464
ccuacuagaaauauuaagc

SEQ ID NO: 1937466 - RNA, 19 nt, Artificial Sequence
  Description of Artificial Sequence: Synthetic oligonucleotide
  Sense strand starting at position 1121 of SEQ ID NO: 1879872
uaagcaagucgguauugaa

SEQ ID NO: 1937467 - RNA, 19 nt, Artificial Sequence
  Description of Artificial Sequence: Synthetic oligonucleotide
  Antisense strand to SEQ ID NO: 1937466
uucaauaccgacuugcuua

SEQ ID NO: 1937468 - RNA, 19 nt, Artificial Sequence
  Description of Artificial Sequence: Synthetic oligonucleotide
  Sense strand starting at position 1124 of SEQ ID NO: 1879872
gcaagucgguauugaagaa

SEQ ID NO: 1937469 - RNA, 19 nt, Artificial Sequence
  Description of Artificial Sequence: Synthetic oligonucleotide
  Antisense strand to SEQ ID NO: 1937468
uucuucaauaccgacuugc

SEQ ID NO: 1937470 - RNA, 19 nt, Artificial Sequence
  Description of Artificial Sequence: Synthetic oligonucleotide
  Sense strand starting at position 1128 of SEQ ID NO: 1879872
gucgguauugaagaagcaa

SEQ ID NO: 1937471 - RNA, 19 nt, Artificial Sequence
  Description of Artificial Sequence: Synthetic oligonucleotide
  Antisense strand to SEQ ID NO: 1937470
uugcuucuucaauaccgac

SEQ ID NO: 1937472 - RNA, 19 nt, Artificial Sequence
  Description of Artificial Sequence: Synthetic oligonucleotide
  Sense strand starting at position 1155 of SEQ ID NO: 1879872
aggacuuacucugcuagau

SEQ ID NO: 1937473 - RNA, 19 nt, Artificial Sequence
  Description of Artificial Sequence: Synthetic oligonucleotide
  Antisense strand to SEQ ID NO: 1937472
aucuagcagaguaaguccu

SEQ ID NO: 1937474 - RNA, 19 nt, Artificial Sequence
  Description of Artificial Sequence: Synthetic oligonucleotide
  Sense strand starting at position 1213 of SEQ ID NO: 1879872
uaguaauggugucaguauu

SEQ ID NO: 1937475 - RNA, 19 nt, Artificial Sequence
  Description of Artificial Sequence: Synthetic oligonucleotide
  Antisense strand to SEQ ID NO: 1937474
aauacugacaccauuacua

SEQ ID NO: 1937476 - RNA, 19 nt, Artificial Sequence
  Description of Artificial Sequence: Synthetic oligonucleotide
  Sense strand starting at position 1435 of SEQ ID NO: 1879872
gcaauaagguguguggagu

SEQ ID NO: 1937477 - RNA, 19 nt, Artificial Sequence
  Description of Artificial Sequence: Synthetic oligonucleotide
  Antisense strand to SEQ ID NO: 1937476
acuccacacaccuuauugc

SEQ ID NO: 1937478 - RNA, 19 nt, Artificial Sequence
  Description of Artificial Sequence: Synthetic oligonucleotide
  Sense strand starting at position 1436 of SEQ ID NO: 1879872
caauaagguguguggagua

SEQ ID NO: 1937479 - RNA, 19 nt, Artificial Sequence
  Description of Artificial Sequence: Synthetic oligonucleotide
  Antisense strand to SEQ ID NO: 1937478
uacuccacacaccuuauug

SEQ ID NO: 1937480 - RNA, 19 nt, Artificial Sequence
  Description of Artificial Sequence: Synthetic oligonucleotide
  Sense strand starting at position 1451 of SEQ ID NO: 1879872
aguaaugacuccugaaauu

SEQ ID NO: 1937481 - RNA, 19 nt, Artificial Sequence
  Description of Artificial Sequence: Synthetic oligonucleotide
  Antisense strand to SEQ ID NO: 1937480
aauuucaggagucauuacu

SEQ ID NO: 1937482 - RNA, 19 nt, Artificial Sequence
  Description of Artificial Sequence: Synthetic oligonucleotide
  Sense strand starting at position 1580 of SEQ ID NO: 1879872
uaacauuacuugucgauga

SEQ ID NO: 1937483 - RNA, 19 nt, Artificial Sequence
  Description of Artificial Sequence: Synthetic oligonucleotide
  Antisense strand to SEQ ID NO: 1937482
ucaucgacaaguaauguua

SEQ ID NO: 1937484 - RNA, 19 nt, Artificial Sequence
  Description of Artificial Sequence: Synthetic oligonucleotide
  Sense strand starting at position 1581 of SEQ ID NO: 1879872
aacauuacuugucgaugaa

SEQ ID NO: 1937485 - RNA, 19 nt, Artificial Sequence
  Description of Artificial Sequence: Synthetic oligonucleotide
  Antisense strand to SEQ ID NO: 1937484
uucaucgacaaguaauguu

SEQ ID NO: 1937486 - RNA, 19 nt, Artificial Sequence
  Description of Artificial Sequence: Synthetic oligonucleotide
  Sense strand starting at position 1582 of SEQ ID NO: 1879872
acauuacuugucgaugaaa

SEQ ID NO: 1937487 - RNA, 19 nt, Artificial Sequence
  Description of Artificial Sequence: Synthetic oligonucleotide
  Antisense strand to SEQ ID NO: 1937486
uuucaucgacaaguaaugu

SEQ ID NO: 1937488 - RNA, 19 nt, Artificial Sequence
  Description of Artificial Sequence: Synthetic oligonucleotide
  Sense strand starting at position 1584 of SEQ ID NO: 1879872
auuacuugucgaugaaauu

SEQ ID NO: 1937489 - RNA, 19 nt, Artificial Sequence
  Description of Artificial Sequence: Synthetic oligonucleotide
  Antisense strand to SEQ ID NO: 1937488
aauuucaucgacaaguaau

SEQ ID NO: 1937490 - RNA, 19 nt, Artificial Sequence
  Description of Artificial Sequence: Synthetic oligonucleotide
  Sense strand starting at position 1585 of SEQ ID NO: 1879872
uuacuugucgaugaaauug

SEQ ID NO: 1937491 - RNA, 19 nt, Artificial Sequence
  Description of Artificial Sequence: Synthetic oligonucleotide
  Antisense strand to SEQ ID NO: 1937490
caauuucaucgacaaguaa

SEQ ID NO: 1937492 - RNA, 19 nt, Artificial Sequence
  Description of Artificial Sequence: Synthetic oligonucleotide
  Sense strand starting at position 1593 of SEQ ID NO: 1879872
cgaugaaauugccauggau

SEQ ID NO: 1937493 - RNA, 19 nt, Artificial Sequence
  Description of Artificial Sequence: Synthetic oligonucleotide
  Antisense strand to SEQ ID NO: 1937492
auccauggcaauuucaucg

SEQ ID NO: 1937494 - RNA, 19 nt, Artificial Sequence
  Description of Artificial Sequence: Synthetic oligonucleotide
  Sense strand starting at position 1698 of SEQ ID NO: 1879872
uacgaagauccguggucaa

SEQ ID NO: 1937495 - RNA, 19 nt, Artificial Sequence
  Description of Artificial Sequence: Synthetic oligonucleotide
  Antisense strand to SEQ ID NO: 1937494
uugaccacggaucuucgua

SEQ ID NO: 1937496 - RNA, 19 nt, Artificial Sequence
  Description of Artificial Sequence: Synthetic oligonucleotide
  Sense strand starting at position 1701 of SEQ ID NO: 1879872
gaagauccguggucaauuc

SEQ ID NO: 1937497 - RNA, 19 nt, Artificial Sequence
  Description of Artificial Sequence: Synthetic oligonucleotide
  Antisense strand to SEQ ID NO: 1937496
gaauugaccacggaucuuc

SEQ ID NO: 1937498 - RNA, 19 nt, Artificial Sequence
  Description of Artificial Sequence: Synthetic oligonucleotide
  Sense strand starting at position 2255 of SEQ ID NO: 1879872
cguguauacagguauauau

SEQ ID NO: 1937499 - RNA, 19 nt, Artificial Sequence
  Description of Artificial Sequence: Synthetic oligonucleotide
  Antisense strand to SEQ ID NO: 1937498
auauauaccuguauacacg

SEQ ID NO: 1937500 - RNA, 19 nt, Artificial Sequence
  Description of Artificial Sequence: Synthetic oligonucleotide
  Sense strand starting at position 2644 of SEQ ID NO: 1879872
aucuuaagaugugaaaguu

SEQ ID NO: 1937501 - RNA, 19 nt, Artificial Sequence
  Description of Artificial Sequence: Synthetic oligonucleotide
  Antisense strand to SEQ ID NO: 1937500
aacuuucacaucuuaagau

SEQ ID NO: 1937502 - RNA, 19 nt, Artificial Sequence
  Description of Artificial Sequence: Synthetic oligonucleotide
  Sense strand starting at position 3011 of SEQ ID NO: 1879872
gcacauuaggcaugagaaa

SEQ ID NO: 1937503 - RNA, 19 nt, Artificial Sequence
  Description of Artificial Sequence: Synthetic oligonucleotide
  Antisense strand to SEQ ID NO: 1937502
uuucucaugccuaaugugc

SEQ ID NO: 1937504 - RNA, 19 nt, Artificial Sequence
  Description of Artificial Sequence: Synthetic oligonucleotide
  Sense strand starting at position 391 of SEQ ID NO: 1879873
gaagguucucaccagguga

SEQ ID NO: 1937505 - RNA, 19 nt, Artificial Sequence
  Description of Artificial Sequence: Synthetic oligonucleotide
  Antisense strand to SEQ ID NO: 1937504
ucaccuggugagaaccuuc

SEQ ID NO: 1937506 - RNA, 19 nt, Artificial Sequence
  Description of Artificial Sequence: Synthetic oligonucleotide
  Sense strand starting at position 568 of SEQ ID NO: 1879873
ccaaacuccugguuauuga

SEQ ID NO: 1937507 - RNA, 19 nt, Artificial Sequence
  Description of Artificial Sequence: Synthetic oligonucleotide
  Antisense strand to SEQ ID NO: 1937506
ucaauaaccaggaguuugg

SEQ ID NO: 1937508 - RNA, 19 nt, Artificial Sequence
  Description of Artificial Sequence: Synthetic oligonucleotide
  Sense strand starting at position 579 of SEQ ID NO: 1879873
guuauugacaacgauguua

SEQ ID NO: 1937509 - RNA, 19 nt, Artificial Sequence
  Description of Artificial Sequence: Synthetic oligonucleotide
  Antisense strand to SEQ ID NO: 1937508
uaacaucguugucaauaac

SEQ ID NO: 1937510 - RNA, 19 nt, Artificial Sequence
  Description of Artificial Sequence: Synthetic oligonucleotide
  Sense strand starting at position 581 of SEQ ID NO: 1879873
uauugacaacgauguuaug

SEQ ID NO: 1937511 - RNA, 19 nt, Artificial Sequence
  Description of Artificial Sequence: Synthetic oligonucleotide
  Antisense strand to SEQ ID NO: 1937510
cauaacaucguugucaaua

SEQ ID NO: 1937512 - RNA, 19 nt, Artificial Sequence
  Description of Artificial Sequence: Synthetic oligonucleotide
  Sense strand starting at position 615 of SEQ ID NO: 1879873
gacaguauggcuugacaau

SEQ ID NO: 1937513 - RNA, 19 nt, Artificial Sequence
  Description of Artificial Sequence: Synthetic oligonucleotide
  Antisense strand to SEQ ID NO: 1937512
auugucaagccauacuguc

SEQ ID NO: 1937514 - RNA, 19 nt, Artificial Sequence
  Description of Artificial Sequence: Synthetic oligonucleotide
  Sense strand starting at position 616 of SEQ ID NO: 1879873
acaguauggcuugacaauu

SEQ ID NO: 1937515 - RNA, 19 nt, Artificial Sequence
  Description of Artificial Sequence: Synthetic oligonucleotide
  Antisense strand to SEQ ID NO: 1937514
aauugucaagccauacugu

SEQ ID NO: 1937516 - RNA, 19 nt, Artificial Sequence
  Description of Artificial Sequence: Synthetic oligonucleotide
  Sense strand starting at position 662 of SEQ ID NO: 1879873
gacuaaugugcacagggua

SEQ ID NO: 1937517 - RNA, 19 nt, Artificial Sequence
  Description of Artificial Sequence: Synthetic oligonucleotide
  Antisense strand to SEQ ID NO: 1937516
uacccugugcacauuaguc

SEQ ID NO: 1937518 - RNA, 19 nt, Artificial Sequence
  Description of Artificial Sequence: Synthetic oligonucleotide
  Sense strand starting at position 891 of SEQ ID NO: 1879873
cugaacaaucuaugugcaa

SEQ ID NO: 1937519 - RNA, 19 nt, Artificial Sequence
  Description of Artificial Sequence: Synthetic oligonucleotide
  Antisense strand to SEQ ID NO: 1937518
uugcacauagauuguucag

SEQ ID NO: 1937520 - RNA, 19 nt, Artificial Sequence
  Description of Artificial Sequence: Synthetic oligonucleotide
  Sense strand starting at position 892 of SEQ ID NO: 1879873
ugaacaaucuaugugcaag

SEQ ID NO: 1937521 - RNA, 19 nt, Artificial Sequence
  Description of Artificial Sequence: Synthetic oligonucleotide
  Antisense strand to SEQ ID NO: 1937520
cuugcacauagauuguuca

SEQ ID NO: 1937522 - RNA, 19 nt, Artificial Sequence
  Description of Artificial Sequence: Synthetic oligonucleotide
  Sense strand starting at position 895 of SEQ ID NO: 1879873
acaaucuaugugcaagaau

SEQ ID NO: 1937523 - RNA, 19 nt, Artificial Sequence
  Description of Artificial Sequence: Synthetic oligonucleotide
  Antisense strand to SEQ ID NO: 1937522
auucuugcacauagauugu

SEQ ID NO: 1937524 - RNA, 19 nt, Artificial Sequence
  Description of Artificial Sequence: Synthetic oligonucleotide
  Sense strand starting at position 898 of SEQ ID NO: 1879873
aucuaugugcaagaaugau

SEQ ID NO: 1937525 - RNA, 19 nt, Artificial Sequence
  Description of Artificial Sequence: Synthetic oligonucleotide
  Antisense strand to SEQ ID NO: 1937524
aucauucuugcacauagau

SEQ ID NO: 1937526 - RNA, 19 nt, Artificial Sequence
  Description of Artificial Sequence: Synthetic oligonucleotide
  Sense strand starting at position 1022 of SEQ ID NO: 1879873
guguguuuccagagggcag

SEQ ID NO: 1937527 - RNA, 19 nt, Artificial Sequence
  Description of Artificial Sequence: Synthetic oligonucleotide
  Antisense strand to SEQ ID NO: 1937526
cugcccucuggaaacacac

SEQ ID NO: 1937528 - RNA, 19 nt, Artificial Sequence
  Description of Artificial Sequence: Synthetic oligonucleotide
  Sense strand starting at position 1140 of SEQ ID NO: 1879873
ugggaugaaggcugaauua

SEQ ID NO: 1937529 - RNA, 19 nt, Artificial Sequence
  Description of Artificial Sequence: Synthetic oligonucleotide
  Antisense strand to SEQ ID NO: 1937528
uaauucagccuucauccca

SEQ ID NO: 1937530 - RNA, 19 nt, Artificial Sequence
  Description of Artificial Sequence: Synthetic oligonucleotide
  Sense strand starting at position 1223 of SEQ ID NO: 1879873
ucucuaauaguguaagacu

SEQ ID NO: 1937531 - RNA, 19 nt, Artificial Sequence
  Description of Artificial Sequence: Synthetic oligonucleotide
  Antisense strand to SEQ ID NO: 1937530
agucuuacacuauuagaga

SEQ ID NO: 1937532 - RNA, 19 nt, Artificial Sequence
  Description of Artificial Sequence: Synthetic oligonucleotide
  Sense strand starting at position 1331 of SEQ ID NO: 1879873
cugccacucccauaggaua

SEQ ID NO: 1937533 - RNA, 19 nt, Artificial Sequence
  Description of Artificial Sequence: Synthetic oligonucleotide
  Antisense strand to SEQ ID NO: 1937532
uauccuaugggaguggcag

SEQ ID NO: 1937534 - RNA, 19 nt, Artificial Sequence
  Description of Artificial Sequence: Synthetic oligonucleotide
  Sense strand starting at position 1343 of SEQ ID NO: 1879873
uaggauaguccauagguuu

SEQ ID NO: 1937535 - RNA, 19 nt, Artificial Sequence
  Description of Artificial Sequence: Synthetic oligonucleotide
  Antisense strand to SEQ ID NO: 1937534
aaaccuauggacuauccua

SEQ ID NO: 1937536 - RNA, 19 nt, Artificial Sequence
  Description of Artificial Sequence: Synthetic oligonucleotide
  Sense strand starting at position 1464 of SEQ ID NO: 1879873
acacgugaaggcuacuuau

SEQ ID NO: 1937537 - RNA, 19 nt, Artificial Sequence
  Description of Artificial Sequence: Synthetic oligonucleotide
  Antisense strand to SEQ ID NO: 1937536
auaaguagccuucacgugu

SEQ ID NO: 1937538 - RNA, 19 nt, Artificial Sequence
  Description of Artificial Sequence: Synthetic oligonucleotide
  Sense strand starting at position 1522 of SEQ ID NO: 1879873
ggcaucacccuagaucuuu

SEQ ID NO: 1937539 - RNA, 19 nt, Artificial Sequence
  Description of Artificial Sequence: Synthetic oligonucleotide
  Antisense strand to SEQ ID NO: 1937538
aaagaucuagggugaugcc

SEQ ID NO: 1937540 - RNA, 19 nt, Artificial Sequence
  Description of Artificial Sequence: Synthetic oligonucleotide
  Sense strand starting at position 1606 of SEQ ID NO: 1879873
cugaccauucccugagaga

SEQ ID NO: 1937541 - RNA, 19 nt, Artificial Sequence
  Description of Artificial Sequence: Synthetic oligonucleotide
  Antisense strand to SEQ ID NO: 1937540
ucucucagggaauggucag

SEQ ID NO: 1937542 - RNA, 19 nt, Artificial Sequence
  Description of Artificial Sequence: Synthetic oligonucleotide
  Sense strand starting at position 1621 of SEQ ID NO: 1879873
gagaaagauugccucagac

SEQ ID NO: 1937543 - RNA, 19 nt, Artificial Sequence
  Description of Artificial Sequence: Synthetic oligonucleotide
  Antisense strand to SEQ ID NO: 1937542
gucugaggcaaucuuucuc

SEQ ID NO: 1937544 - RNA, 19 nt, Artificial Sequence
  Description of Artificial Sequence: Synthetic oligonucleotide
  Sense strand starting at position 1631 of SEQ ID NO: 1879873
gccucagacuuaccagaaa

SEQ ID NO: 1937545 - RNA, 19 nt, Artificial Sequence
  Description of Artificial Sequence: Synthetic oligonucleotide
  Antisense strand to SEQ ID NO: 1937544
uuucugguaagucugaggc

SEQ ID NO: 1937546 - RNA, 19 nt, Artificial Sequence
  Description of Artificial Sequence: Synthetic oligonucleotide
  Sense strand starting at position 2141 of SEQ ID NO: 1879873
augagaggcuuaucccaca

SEQ ID NO: 1937547 - RNA, 19 nt, Artificial Sequence
  Description of Artificial Sequence: Synthetic oligonucleotide
  Antisense strand to SEQ ID NO: 1937546
ugugggauaagccucucau

SEQ ID NO: 1937548 - RNA, 19 nt, Artificial Sequence
  Description of Artificial Sequence: Synthetic oligonucleotide
  Sense strand starting at position 2146 of SEQ ID NO: 1879873
aggcuuaucccacaaguuu

SEQ ID NO: 1937549 - RNA, 19 nt, Artificial Sequence
  Description of Artificial Sequence: Synthetic oligonucleotide
  Antisense strand to SEQ ID NO: 1937548
aaacuugugggauaagccu

SEQ ID NO: 1937550 - RNA, 19 nt, Artificial Sequence
  Description of Artificial Sequence: Synthetic oligonucleotide
  Sense strand starting at position 2755 of SEQ ID NO: 1879873
cuuggugggcuugagaaua

SEQ ID NO: 1937551 - RNA, 19 nt, Artificial Sequence
  Description of Artificial Sequence: Synthetic oligonucleotide
  Antisense strand to SEQ ID NO: 1937550
uauucucaagcccaccaag

SEQ ID NO: 1937552 - RNA, 19 nt, Artificial Sequence
  Description of Artificial Sequence: Synthetic oligonucleotide
  Sense strand starting at position 2849 of SEQ ID NO: 1879873
gccugacauccucacaugu

SEQ ID NO: 1937553 - RNA, 19 nt, Artificial Sequence
  Description of Artificial Sequence: Synthetic oligonucleotide
  Antisense strand to SEQ ID NO: 1937552
acaugugaggaugucaggc

SEQ ID NO: 1937554 - RNA, 19 nt, Artificial Sequence
  Description of Artificial Sequence: Synthetic oligonucleotide
  Sense strand starting at position 2917 of SEQ ID NO: 1879873
cucaguugacuugaacauu

SEQ ID NO: 1937555 - RNA, 19 nt, Artificial Sequence
  Description of Artificial Sequence: Synthetic oligonucleotide
  Antisense strand to SEQ ID NO: 1937554
aauguucaagucaacugag

SEQ ID NO: 1937556 - RNA, 19 nt, Artificial Sequence
  Description of Artificial Sequence: Synthetic oligonucleotide
  Sense strand starting at position 3079 of SEQ ID NO: 1879873
gagacuuugguuuaguaac

SEQ ID NO: 1937557 - RNA, 19 nt, Artificial Sequence
  Description of Artificial Sequence: Synthetic oligonucleotide
  Antisense strand to SEQ ID NO: 1937556
guuacuaaaccaaagucuc

SEQ ID NO: 1937558 - RNA, 19 nt, Artificial Sequence
  Description of Artificial Sequence: Synthetic oligonucleotide
  Sense strand starting at position 3081 of SEQ ID NO: 1879873
gacuuugguuuaguaacua

SEQ ID NO: 1937559 - RNA, 19 nt, Artificial Sequence
  Description of Artificial Sequence: Synthetic oligonucleotide
  Antisense strand to SEQ ID NO: 1937558
uaguuacuaaaccaaaguc

SEQ ID NO: 1937560 - RNA, 19 nt, Artificial Sequence
  Description of Artificial Sequence: Synthetic oligonucleotide
  Sense strand starting at position 3110 of SEQ ID NO: 1879873
acagcuaaugagcaguaua

SEQ ID NO: 1937561 - RNA, 19 nt, Artificial Sequence
  Description of Artificial Sequence: Synthetic oligonucleotide
  Antisense strand to SEQ ID NO: 1937560
uauacugcucauuagcugu

SEQ ID NO: 1937562 - RNA, 19 nt, Artificial Sequence
  Description of Artificial Sequence: Synthetic oligonucleotide
  Sense strand starting at position 3115 of SEQ ID NO: 1879873
uaaugagcaguauaaguga

SEQ ID NO: 1937563 - RNA, 19 nt, Artificial Sequence
  Description of Artificial Sequence: Synthetic oligonucleotide
  Antisense strand to SEQ ID NO: 1937562
ucacuuauacugcucauua

SEQ ID NO: 1937564 - RNA, 19 nt, Artificial Sequence
  Description of Artificial Sequence: Synthetic oligonucleotide
  Sense strand starting at position 3122 of SEQ ID NO: 1879873
caguauaagugaguaucua

SEQ ID NO: 1937565 - RNA, 19 nt, Artificial Sequence
  Description of Artificial Sequence: Synthetic oligonucleotide
  Antisense strand to SEQ ID NO: 1937564
uagauacucacuuauacug

SEQ ID NO: 1937566 - RNA, 19 nt, Artificial Sequence
  Description of Artificial Sequence: Synthetic oligonucleotide
  Sense strand starting at position 3123 of SEQ ID NO: 1879873
aguauaagugaguaucuaa

SEQ ID NO: 1937567 - RNA, 19 nt, Artificial Sequence
  Description of Artificial Sequence: Synthetic oligonucleotide
  Antisense strand to SEQ ID NO: 1937566
uuagauacucacuuauacu

SEQ ID NO: 1937568 - RNA, 19 nt, Artificial Sequence
  Description of Artificial Sequence: Synthetic oligonucleotide
  Sense strand starting at position 3139 of SEQ ID NO: 1879873
uaagaauggugguuauaca

SEQ ID NO: 1937569 - RNA, 19 nt, Artificial Sequence
  Description of Artificial Sequence: Synthetic oligonucleotide
  Antisense strand to SEQ ID NO: 1937568
uguauaaccaccauucuua

SEQ ID NO: 1937570 - RNA, 19 nt, Artificial Sequence
  Description of Artificial Sequence: Synthetic oligonucleotide
  Sense strand starting at position 3148 of SEQ ID NO: 1879873
ugguuauacaaggguuaug

SEQ ID NO: 1937571 - RNA, 19 nt, Artificial Sequence
  Description of Artificial Sequence: Synthetic oligonucleotide
  Antisense strand to SEQ ID NO: 1937570
cauaacccuuguauaacca

SEQ ID NO: 1937572 - RNA, 19 nt, Artificial Sequence
  Description of Artificial Sequence: Synthetic oligonucleotide
  Sense strand starting at position 3234 of SEQ ID NO: 1879873
uugaaauaauacuuggcaa

SEQ ID NO: 1937573 - RNA, 19 nt, Artificial Sequence
  Description of Artificial Sequence: Synthetic oligonucleotide
  Antisense strand to SEQ ID NO: 1937572
uugccaaguauuauuucaa

SEQ ID NO: 1937574 - RNA, 19 nt, Artificial Sequence
  Description of Artificial Sequence: Synthetic oligonucleotide
  Sense strand starting at position 3278 of SEQ ID NO: 1879873
cagaaacgucuccaguaca

SEQ ID NO: 1937575 - RNA, 19 nt, Artificial Sequence
  Description of Artificial Sequence: Synthetic oligonucleotide
  Antisense strand to SEQ ID NO: 1937574
uguacuggagacguuucug

SEQ ID NO: 1937576 - RNA, 19 nt, Artificial Sequence
  Description of Artificial Sequence: Synthetic oligonucleotide
  Sense strand starting at position 3528 of SEQ ID NO: 1879873
gaauuccugguguggaaua

SEQ ID NO: 1937577 - RNA, 19 nt, Artificial Sequence
  Description of Artificial Sequence: Synthetic oligonucleotide
  Antisense strand to SEQ ID NO: 1937576
uauuccacaccaggaauuc

SEQ ID NO: 1937578 - RNA, 19 nt, Artificial Sequence
  Description of Artificial Sequence: Synthetic oligonucleotide
  Sense strand starting at position 3530 of SEQ ID NO: 1879873
auuccugguguggaauaga

SEQ ID NO: 1937579 - RNA, 19 nt, Artificial Sequence
  Description of Artificial Sequence: Synthetic oligonucleotide
  Antisense strand to SEQ ID NO: 1937578
ucuauuccacaccaggaau

SEQ ID NO: 1937580 - RNA, 19 nt, Artificial Sequence
  Description of Artificial Sequence: Synthetic oligonucleotide
  Sense strand starting at position 3565 of SEQ ID NO: 1879873
ggguauuguguuuauauau

SEQ ID NO: 1937581 - RNA, 19 nt, Artificial Sequence
  Description of Artificial Sequence: Synthetic oligonucleotide
  Antisense strand to SEQ ID NO: 1937580
auauauaaacacaauaccc

SEQ ID NO: 1937582 - RNA, 19 nt, Artificial Sequence
  Description of Artificial Sequence: Synthetic oligonucleotide
  Sense strand starting at position 3893 of SEQ ID NO: 1879873
gagagauguaggcaagcaa

SEQ ID NO: 1937583 - RNA, 19 nt, Artificial Sequence
  Description of Artificial Sequence: Synthetic oligonucleotide
  Antisense strand to SEQ ID NO: 1937582
uugcuugccuacaucucuc

SEQ ID NO: 1937584 - RNA, 19 nt, Artificial Sequence
  Description of Artificial Sequence: Synthetic oligonucleotide
  Sense strand starting at position 640 of SEQ ID NO: 1879874
cuucgccaucugggagaua

SEQ ID NO: 1937585 - RNA, 19 nt, Artificial Sequence
  Description of Artificial Sequence: Synthetic oligonucleotide
  Antisense strand to SEQ ID NO: 1937584
uaucucccagauggcgaag

SEQ ID NO: 1937586 - RNA, 19 nt, Artificial Sequence
  Description of Artificial Sequence: Synthetic oligonucleotide
  Sense strand starting at position 651 of SEQ ID NO: 1879874
gggagauacugucuuucua

SEQ ID NO: 1937587 - RNA, 19 nt, Artificial Sequence
  Description of Artificial Sequence: Synthetic oligonucleotide
  Antisense strand to SEQ ID NO: 1937586
uagaaagacaguaucuccc

SEQ ID NO: 1937588 - RNA, 19 nt, Artificial Sequence
  Description of Artificial Sequence: Synthetic oligonucleotide
  Sense strand starting at position 682 of SEQ ID NO: 1879874
gcucaaacuuuaugacaag

SEQ ID NO: 1937589 - RNA, 19 nt, Artificial Sequence
  Description of Artificial Sequence: Synthetic oligonucleotide
  Antisense strand to SEQ ID NO: 1937588
cuugucauaaaguuugagc

SEQ ID NO: 1937590 - RNA, 19 nt, Artificial Sequence
  Description of Artificial Sequence: Synthetic oligonucleotide
  Sense strand starting at position 1070 of SEQ ID NO: 1879874
gauguccggcucugaagua

SEQ ID NO: 1937591 - RNA, 19 nt, Artificial Sequence
  Description of Artificial Sequence: Synthetic oligonucleotide
  Antisense strand to SEQ ID NO: 1937590
uacuucagagccggacauc

SEQ ID NO: 1937592 - RNA, 19 nt, Artificial Sequence
  Description of Artificial Sequence: Synthetic oligonucleotide
  Sense strand starting at position 1086 of SEQ ID NO: 1879874
guagaaugcuaguccucau

SEQ ID NO: 1937593 - RNA, 19 nt, Artificial Sequence
  Description of Artificial Sequence: Synthetic oligonucleotide
  Antisense strand to SEQ ID NO: 1937592
augaggacuagcauucuac

SEQ ID NO: 1937594 - RNA, 19 nt, Artificial Sequence
  Description of Artificial Sequence: Synthetic oligonucleotide
  Sense strand starting at position 1318 of SEQ ID NO: 1879874
gggugaucugggcguucca

SEQ ID NO: 1937595 - RNA, 19 nt, Artificial Sequence
  Description of Artificial Sequence: Synthetic oligonucleotide
  Antisense strand to SEQ ID NO: 1937594
uggaacgcccagaucaccc

SEQ ID NO: 1937596 - RNA, 19 nt, Artificial Sequence
  Description of Artificial Sequence: Synthetic oligonucleotide
  Sense strand starting at position 1384 of SEQ ID NO: 1879874
cggucaccagcgugaagua

SEQ ID NO: 1937597 - RNA, 19 nt, Artificial Sequence
  Description of Artificial Sequence: Synthetic oligonucleotide
  Antisense strand to SEQ ID NO: 1937596
uacuucacgcuggugaccg

SEQ ID NO: 1937598 - RNA, 19 nt, Artificial Sequence
  Description of Artificial Sequence: Synthetic oligonucleotide
  Sense strand starting at position 2288 of SEQ ID NO: 1879874
gcgcaucuccucgauugga

SEQ ID NO: 1937599 - RNA, 19 nt, Artificial Sequence
  Description of Artificial Sequence: Synthetic oligonucleotide
  Antisense strand to SEQ ID NO: 1937598
uccaaucgaggagaugcgc

SEQ ID NO: 1937600 - RNA, 19 nt, Artificial Sequence
  Description of Artificial Sequence: Synthetic oligonucleotide
  Sense strand starting at position 2362 of SEQ ID NO: 1879874
uugcauguuaggcgucaga

SEQ ID NO: 1937601 - RNA, 19 nt, Artificial Sequence
  Description of Artificial Sequence: Synthetic oligonucleotide
  Antisense strand to SEQ ID NO: 1937600
ucugacgccuaacaugcaa

SEQ ID NO: 1937602 - RNA, 19 nt, Artificial Sequence
  Description of Artificial Sequence: Synthetic oligonucleotide
  Sense strand starting at position 2455 of SEQ ID NO: 1879874
gcccgauuucucugugcag

SEQ ID NO: 1937603 - RNA, 19 nt, Artificial Sequence
  Description of Artificial Sequence: Synthetic oligonucleotide
  Antisense strand to SEQ ID NO: 1937602
cugcacagagaaaucgggc

SEQ ID NO: 1937604 - RNA, 19 nt, Artificial Sequence
  Description of Artificial Sequence: Synthetic oligonucleotide
  Sense strand starting at position 2457 of SEQ ID NO: 1879874
ccgauuucucugugcagca

SEQ ID NO: 1937605 - RNA, 19 nt, Artificial Sequence
  Description of Artificial Sequence: Synthetic oligonucleotide
  Antisense strand to SEQ ID NO: 1937604
ugcugcacagagaaaucgg

SEQ ID NO: 1937606 - RNA, 19 nt, Artificial Sequence
  Description of Artificial Sequence: Synthetic oligonucleotide
  Sense strand starting at position 2805 of SEQ ID NO: 1879874
ggacuucucccgcauacag

SEQ ID NO: 1937607 - RNA, 19 nt, Artificial Sequence
  Description of Artificial Sequence: Synthetic oligonucleotide
  Antisense strand to SEQ ID NO: 1937606
cuguaugcgggagaagucc

SEQ ID NO: 1937608 - RNA, 19 nt, Artificial Sequence
  Description of Artificial Sequence: Synthetic oligonucleotide
  Sense strand starting at position 2853 of SEQ ID NO: 1879874
ucuuucuguucuggcuaga

SEQ ID NO: 1937609 - RNA, 19 nt, Artificial Sequence
  Description of Artificial Sequence: Synthetic oligonucleotide
  Antisense strand to SEQ ID NO: 1937608
ucuagccagaacagaaaga

SEQ ID NO: 1937610 - RNA, 19 nt, Artificial Sequence
  Description of Artificial Sequence: Synthetic oligonucleotide
  Sense strand starting at position 2856 of SEQ ID NO: 1879874
uucuguucuggcuagaaua

SEQ ID NO: 1937611 - RNA, 19 nt, Artificial Sequence
  Description of Artificial Sequence: Synthetic oligonucleotide
  Antisense strand to SEQ ID NO: 1937610
uauucuagccagaacagaa

SEQ ID NO: 1937612 - RNA, 19 nt, Artificial Sequence
  Description of Artificial Sequence: Synthetic oligonucleotide
  Sense strand starting at position 2858 of SEQ ID NO: 1879874
cuguucuggcuagaauauu

SEQ ID NO: 1937613 - RNA, 19 nt, Artificial Sequence
  Description of Artificial Sequence: Synthetic oligonucleotide
  Antisense strand to SEQ ID NO: 1937612
aauauucuagccagaacag

SEQ ID NO: 1937614 - RNA, 19 nt, Artificial Sequence
  Description of Artificial Sequence: Synthetic oligonucleotide
  Sense strand starting at position 2864 of SEQ ID NO: 1879874
uggcuagaauauuguguaa

SEQ ID NO: 1937615 - RNA, 19 nt, Artificial Sequence
  Description of Artificial Sequence: Synthetic oligonucleotide
  Antisense strand to SEQ ID NO: 1937614
uuacacaauauucuagcca

SEQ ID NO: 1937616 - RNA, 19 nt, Artificial Sequence
  Description of Artificial Sequence: Synthetic oligonucleotide
  Sense strand starting at position 2866 of SEQ ID NO: 1879874
gcuagaauauuguguaaac

SEQ ID NO: 1937617 - RNA, 19 nt, Artificial Sequence
  Description of Artificial Sequence: Synthetic oligonucleotide
  Antisense strand to SEQ ID NO: 1937616
guuuacacaauauucuagc

SEQ ID NO: 1937618 - RNA, 19 nt, Artificial Sequence
  Description of Artificial Sequence: Synthetic oligonucleotide
  Sense strand starting at position 2867 of SEQ ID NO: 1879874
cuagaauauuguguaaaca

SEQ ID NO: 1937619 - RNA, 19 nt, Artificial Sequence
  Description of Artificial Sequence: Synthetic oligonucleotide
  Antisense strand to SEQ ID NO: 1937618
uguuuacacaauauucuag

SEQ ID NO: 1937620 - RNA, 19 nt, Artificial Sequence
  Description of Artificial Sequence: Synthetic oligonucleotide
  Sense strand starting at position 2885 of SEQ ID NO: 1879874
acaagagcuuugcagaguu

SEQ ID NO: 1937621 - RNA, 19 nt, Artificial Sequence
  Description of Artificial Sequence: Synthetic oligonucleotide
  Antisense strand to SEQ ID NO: 1937620
aacucugcaaagcucuugu

SEQ ID NO: 1937622 - RNA, 19 nt, Artificial Sequence
  Description of Artificial Sequence: Synthetic oligonucleotide
  Sense strand starting at position 2887 of SEQ ID NO: 1879874
aagagcuuugcagaguuga

SEQ ID NO: 1937623 - RNA, 19 nt, Artificial Sequence
  Description of Artificial Sequence: Synthetic oligonucleotide
  Antisense strand to SEQ ID NO: 1937622
ucaacucugcaaagcucuu

SEQ ID NO: 1937624 - RNA, 19 nt, Artificial Sequence
  Description of Artificial Sequence: Synthetic oligonucleotide
  Sense strand starting at position 2956 of SEQ ID NO: 1879874
uuuacugaccuccgucaau

SEQ ID NO: 1937625 - RNA, 19 nt, Artificial Sequence
  Description of Artificial Sequence: Synthetic oligonucleotide
  Antisense strand to SEQ ID NO: 1937624
auugacggaggucaguaaa

SEQ ID NO: 1937626 - RNA, 19 nt, Artificial Sequence
  Description of Artificial Sequence: Synthetic oligonucleotide
  Sense strand starting at position 2984 of SEQ ID NO: 1879874
ugucgaauaggaggauuaa

SEQ ID NO: 1937627 - RNA, 19 nt, Artificial Sequence
  Description of Artificial Sequence: Synthetic oligonucleotide
  Antisense strand to SEQ ID NO: 1937626
uuaauccuccuauucgaca

SEQ ID NO: 1937628 - RNA, 19 nt, Artificial Sequence
  Description of Artificial Sequence: Synthetic oligonucleotide
  Sense strand starting at position 3021 of SEQ ID NO: 1879874
gguuguccugaugaauaag

SEQ ID NO: 1937629 - RNA, 19 nt, Artificial Sequence
  Description of Artificial Sequence: Synthetic oligonucleotide
  Antisense strand to SEQ ID NO: 1937628
cuuauucaucaggacaacc

SEQ ID NO: 1937630 - RNA, 19 nt, Artificial Sequence
  Description of Artificial Sequence: Synthetic oligonucleotide
  Sense strand starting at position 3031 of SEQ ID NO: 1879874
augaauaaguuggauaaca

SEQ ID NO: 1937631 - RNA, 19 nt, Artificial Sequence
  Description of Artificial Sequence: Synthetic oligonucleotide
  Antisense strand to SEQ ID NO: 1937630
uguuauccaacuuauucau

SEQ ID NO: 1937632 - RNA, 19 nt, Artificial Sequence
  Description of Artificial Sequence: Synthetic oligonucleotide
  Sense strand starting at position 3042 of SEQ ID NO: 1879874
ggauaacauuugugaaaga

SEQ ID NO: 1937633 - RNA, 19 nt, Artificial Sequence
  Description of Artificial Sequence: Synthetic oligonucleotide
  Antisense strand to SEQ ID NO: 1937632
ucuuucacaaauguuaucc

SEQ ID NO: 1937634 - RNA, 19 nt, Artificial Sequence
  Description of Artificial Sequence: Synthetic oligonucleotide
  Sense strand starting at position 3043 of SEQ ID NO: 1879874
gauaacauuugugaaagac

SEQ ID NO: 1937635 - RNA, 19 nt, Artificial Sequence
  Description of Artificial Sequence: Synthetic oligonucleotide
  Antisense strand to SEQ ID NO: 1937634
gucuuucacaaauguuauc

SEQ ID NO: 1937636 - RNA, 19 nt, Artificial Sequence
  Description of Artificial Sequence: Synthetic oligonucleotide
  Sense strand starting at position 3073 of SEQ ID NO: 1879874
ccugacaacucuugagucu

SEQ ID NO: 1937637 - RNA, 19 nt, Artificial Sequence
  Description of Artificial Sequence: Synthetic oligonucleotide
  Antisense strand to SEQ ID NO: 1937636
agacucaagaguugucagg

SEQ ID NO: 1937638 - RNA, 19 nt, Artificial Sequence
  Description of Artificial Sequence: Synthetic oligonucleotide
  Sense strand starting at position 3080 of SEQ ID NO: 1879874
acucuugagucucaagaaa

SEQ ID NO: 1937639 - RNA, 19 nt, Artificial Sequence
  Description of Artificial Sequence: Synthetic oligonucleotide
  Antisense strand to SEQ ID NO: 1937638
uuucuugagacucaagagu

SEQ ID NO: 1937640 - RNA, 19 nt, Artificial Sequence
  Description of Artificial Sequence: Synthetic oligonucleotide
  Sense strand starting at position 3228 of SEQ ID NO: 1879874
cccacaguuucuuaaaggu

SEQ ID NO: 1937641 - RNA, 19 nt, Artificial Sequence
  Description of Artificial Sequence: Synthetic oligonucleotide
  Antisense strand to SEQ ID NO: 1937640
accuuuaagaaacuguggg

SEQ ID NO: 1937642 - RNA, 19 nt, Artificial Sequence
  Description of Artificial Sequence: Synthetic oligonucleotide
  Sense strand starting at position 3265 of SEQ ID NO: 1879874
auaauagauucuuacggga

SEQ ID NO: 1937643 - RNA, 19 nt, Artificial Sequence
  Description of Artificial Sequence: Synthetic oligonucleotide
  Antisense strand to SEQ ID NO: 1937642
ucccguaagaaucuauuau

SEQ ID NO: 1937644 - RNA, 19 nt, Artificial Sequence
  Description of Artificial Sequence: Synthetic oligonucleotide
  Sense strand starting at position 3267 of SEQ ID NO: 1879874
aauagauucuuacgggagu

SEQ ID NO: 1937645 - RNA, 19 nt, Artificial Sequence
  Description of Artificial Sequence: Synthetic oligonucleotide
  Antisense strand to SEQ ID NO: 1937644
acucccguaagaaucuauu

SEQ ID NO: 1937646 - RNA, 19 nt, Artificial Sequence
  Description of Artificial Sequence: Synthetic oligonucleotide
  Sense strand starting at position 3268 of SEQ ID NO: 1879874
auagauucuuacgggagua

SEQ ID NO: 1937647 - RNA, 19 nt, Artificial Sequence
  Description of Artificial Sequence: Synthetic oligonucleotide
  Antisense strand to SEQ ID NO: 1937646
uacucccguaagaaucuau

SEQ ID NO: 1937648 - RNA, 19 nt, Artificial Sequence
  Description of Artificial Sequence: Synthetic oligonucleotide
  Sense strand starting at position 3273 of SEQ ID NO: 1879874
uucuuacgggaguaaugau

SEQ ID NO: 1937649 - RNA, 19 nt, Artificial Sequence
  Description of Artificial Sequence: Synthetic oligonucleotide
  Antisense strand to SEQ ID NO: 1937648
aucauuacucccguaagaa

SEQ ID NO: 1937650 - RNA, 19 nt, Artificial Sequence
  Description of Artificial Sequence: Synthetic oligonucleotide
  Sense strand starting at position 3445 of SEQ ID NO: 1879874
gggaacugucagugucuca

SEQ ID NO: 1937651 - RNA, 19 nt, Artificial Sequence
  Description of Artificial Sequence: Synthetic oligonucleotide
  Antisense strand to SEQ ID NO: 1937650
ugagacacugacaguuccc

SEQ ID NO: 1937652 - RNA, 19 nt, Artificial Sequence
  Description of Artificial Sequence: Synthetic oligonucleotide
  Sense strand starting at position 3450 of SEQ ID NO: 1879874
cugucagugucucauccau

SEQ ID NO: 1937653 - RNA, 19 nt, Artificial Sequence
  Description of Artificial Sequence: Synthetic oligonucleotide
  Antisense strand to SEQ ID NO: 1937652
auggaugagacacugacag

SEQ ID NO: 1937654 - RNA, 19 nt, Artificial Sequence
  Description of Artificial Sequence: Synthetic oligonucleotide
  Sense strand starting at position 3452 of SEQ ID NO: 1879874
gucagugucucauccauaa

SEQ ID NO: 1937655 - RNA, 19 nt, Artificial Sequence
  Description of Artificial Sequence: Synthetic oligonucleotide
  Antisense strand to SEQ ID NO: 1937654
uuauggaugagacacugac

SEQ ID NO: 1937656 - RNA, 19 nt, Artificial Sequence
  Description of Artificial Sequence: Synthetic oligonucleotide
  Sense strand starting at position 3456 of SEQ ID NO: 1879874
gugucucauccauaacucu

SEQ ID NO: 1937657 - RNA, 19 nt, Artificial Sequence
  Description of Artificial Sequence: Synthetic oligonucleotide
  Antisense strand to SEQ ID NO: 1937656
agaguuauggaugagacac

SEQ ID NO: 1937658 - RNA, 19 nt, Artificial Sequence
  Description of Artificial Sequence: Synthetic oligonucleotide
  Sense strand starting at position 3554 of SEQ ID NO: 1879874
gggaauagacaguggcauu

SEQ ID NO: 1937659 - RNA, 19 nt, Artificial Sequence
  Description of Artificial Sequence: Synthetic oligonucleotide
  Antisense strand to SEQ ID NO: 1937658
aaugccacugucuauuccc

SEQ ID NO: 1937660 - RNA, 19 nt, Artificial Sequence
  Description of Artificial Sequence: Synthetic oligonucleotide
  Sense strand starting at position 3555 of SEQ ID NO: 1879874
ggaauagacaguggcauua

SEQ ID NO: 1937661 - RNA, 19 nt, Artificial Sequence
  Description of Artificial Sequence: Synthetic oligonucleotide
  Antisense strand to SEQ ID NO: 1937660
uaaugccacugucuauucc

SEQ ID NO: 1937662 - RNA, 19 nt, Artificial Sequence
  Description of Artificial Sequence: Synthetic oligonucleotide
  Sense strand starting at position 3557 of SEQ ID NO: 1879874
aauagacaguggcauuaaa

SEQ ID NO: 1937663 - RNA, 19 nt, Artificial Sequence
  Description of Artificial Sequence: Synthetic oligonucleotide
  Antisense strand to SEQ ID NO: 1937662
uuuaaugccacugucuauu

SEQ ID NO: 1937664 - RNA, 19 nt, Artificial Sequence
  Description of Artificial Sequence: Synthetic oligonucleotide
  Sense strand starting at position 38 of SEQ ID NO: 1879875
gucauuuccuguuuccaag

SEQ ID NO: 1937665 - RNA, 19 nt, Artificial Sequence
  Description of Artificial Sequence: Synthetic oligonucleotide
  Antisense strand to SEQ ID NO: 1937664
cuuggaaacaggaaaugac

SEQ ID NO: 1937666 - RNA, 19 nt, Artificial Sequence
  Description of Artificial Sequence: Synthetic oligonucleotide
  Sense strand starting at position 68 of SEQ ID NO: 1879875
uauguuacagagugauaug

SEQ ID NO: 1937667 - RNA, 19 nt, Artificial Sequence
  Description of Artificial Sequence: Synthetic oligonucleotide
  Antisense strand to SEQ ID NO: 1937666
cauaucacucuguaacaua

SEQ ID NO: 1937668 - RNA, 19 nt, Artificial Sequence
  Description of Artificial Sequence: Synthetic oligonucleotide
  Sense strand starting at position 69 of SEQ ID NO: 1879875
auguuacagagugauaugu

SEQ ID NO: 1937669 - RNA, 19 nt, Artificial Sequence
  Description of Artificial Sequence: Synthetic oligonucleotide
  Antisense strand to SEQ ID NO: 1937668
acauaucacucuguaacau

SEQ ID NO: 1937670 - RNA, 19 nt, Artificial Sequence
  Description of Artificial Sequence: Synthetic oligonucleotide
  Sense strand starting at position 101 of SEQ ID NO: 1879875
uaaagccuuccagguagaa

SEQ ID NO: 1937671 - RNA, 19 nt, Artificial Sequence
  Description of Artificial Sequence: Synthetic oligonucleotide
  Antisense strand to SEQ ID NO: 1937670
uucuaccuggaaggcuuua

SEQ ID NO: 1937672 - RNA, 19 nt, Artificial Sequence
  Description of Artificial Sequence: Synthetic oligonucleotide
  Sense strand starting at position 180 of SEQ ID NO: 1879875
agaaauaagucuucgguag

SEQ ID NO: 1937673 - RNA, 19 nt, Artificial Sequence
  Description of Artificial Sequence: Synthetic oligonucleotide
  Antisense strand to SEQ ID NO: 1937672
cuaccgaagacuuauuucu

SEQ ID NO: 1937674 - RNA, 19 nt, Artificial Sequence
  Description of Artificial Sequence: Synthetic oligonucleotide
  Sense strand starting at position 181 of SEQ ID NO: 1879875
gaaauaagucuucgguagg

SEQ ID NO: 1937675 - RNA, 19 nt, Artificial Sequence
  Description of Artificial Sequence: Synthetic oligonucleotide
  Antisense strand to SEQ ID NO: 1937674
ccuaccgaagacuuauuuc

SEQ ID NO: 1937676 - RNA, 19 nt, Artificial Sequence
  Description of Artificial Sequence: Synthetic oligonucleotide
  Sense strand starting at position 184 of SEQ ID NO: 1879875
auaagucuucgguagguag

SEQ ID NO: 1937677 - RNA, 19 nt, Artificial Sequence
  Description of Artificial Sequence: Synthetic oligonucleotide
  Antisense strand to SEQ ID NO: 1937676
cuaccuaccgaagacuuau

SEQ ID NO: 1937678 - RNA, 19 nt, Artificial Sequence
  Description of Artificial Sequence: Synthetic oligonucleotide
  Sense strand starting at position 317 of SEQ ID NO: 1879875
acaccucacugagagauuu

SEQ ID NO: 1937679 - RNA, 19 nt, Artificial Sequence
  Description of Artificial Sequence: Synthetic oligonucleotide
  Antisense strand to SEQ ID NO: 1937678
aaaucucucagugaggugu

SEQ ID NO: 1937680 - RNA, 19 nt, Artificial Sequence
  Description of Artificial Sequence: Synthetic oligonucleotide
  Sense strand starting at position 378 of SEQ ID NO: 1879875
aaugucguccaauaagaga

SEQ ID NO: 1937681 - RNA, 19 nt, Artificial Sequence
  Description of Artificial Sequence: Synthetic oligonucleotide
  Antisense strand to SEQ ID NO: 1937680
ucucuuauuggacgacauu

SEQ ID NO: 1937682 - RNA, 19 nt, Artificial Sequence
  Description of Artificial Sequence: Synthetic oligonucleotide
  Sense strand starting at position 603 of SEQ ID NO: 1879875
gcauauuugcaauguuaau

SEQ ID NO: 1937683 - RNA, 19 nt, Artificial Sequence
  Description of Artificial Sequence: Synthetic oligonucleotide
  Antisense strand to SEQ ID NO: 1937682
auuaacauugcaaauaugc

SEQ ID NO: 1937684 - RNA, 19 nt, Artificial Sequence
  Description of Artificial Sequence: Synthetic oligonucleotide
  Sense strand starting at position 953 of SEQ ID NO: 1879875
cgcauagucagagaacauc

SEQ ID NO: 1937685 - RNA, 19 nt, Artificial Sequence
  Description of Artificial Sequence: Synthetic oligonucleotide
  Antisense strand to SEQ ID NO: 1937684
gauguucucugacuaugcg

SEQ ID NO: 1937686 - RNA, 19 nt, Artificial Sequence
  Description of Artificial Sequence: Synthetic oligonucleotide
  Sense strand starting at position 979 of SEQ ID NO: 1879875
ucgaaauggagugagcuua

SEQ ID NO: 1937687 - RNA, 19 nt, Artificial Sequence
  Description of Artificial Sequence: Synthetic oligonucleotide
  Antisense strand to SEQ ID NO: 1937686
uaagcucacuccauuucga

SEQ ID NO: 1937688 - RNA, 19 nt, Artificial Sequence
  Description of Artificial Sequence: Synthetic oligonucleotide
  Sense strand starting at position 985 of SEQ ID NO: 1879875
uggagugagcuuagugugu

SEQ ID NO: 1937689 - RNA, 19 nt, Artificial Sequence
  Description of Artificial Sequence: Synthetic oligonucleotide
  Antisense strand to SEQ ID NO: 1937688
acacacuaagcucacucca

SEQ ID NO: 1937690 - RNA, 19 nt, Artificial Sequence
  Description of Artificial Sequence: Synthetic oligonucleotide
  Sense strand starting at position 1015 of SEQ ID NO: 1879875
ccuucucugcaagggauua

SEQ ID NO: 1937691 - RNA, 19 nt, Artificial Sequence
  Description of Artificial Sequence: Synthetic oligonucleotide
  Antisense strand to SEQ ID NO: 1937690
uaaucccuugcagagaagg

SEQ ID NO: 1937692 - RNA, 19 nt, Artificial Sequence
  Description of Artificial Sequence: Synthetic oligonucleotide
  Sense strand starting at position 1026 of SEQ ID NO: 1879875
agggauuauucuuuauugu

SEQ ID NO: 1937693 - RNA, 19 nt, Artificial Sequence
  Description of Artificial Sequence: Synthetic oligonucleotide
  Antisense strand to SEQ ID NO: 1937692
acaauaaagaauaaucccu

SEQ ID NO: 1937694 - RNA, 19 nt, Artificial Sequence
  Description of Artificial Sequence: Synthetic oligonucleotide
  Sense strand starting at position 1027 of SEQ ID NO: 1879875
gggauuauucuuuauuguc

SEQ ID NO: 1937695 - RNA, 19 nt, Artificial Sequence
  Description of Artificial Sequence: Synthetic oligonucleotide
  Antisense strand to SEQ ID NO: 1937694
gacaauaaagaauaauccc

SEQ ID NO: 1937696 - RNA, 19 nt, Artificial Sequence
  Description of Artificial Sequence: Synthetic oligonucleotide
  Sense strand starting at position 1106 of SEQ ID NO: 1879875
ggguguggcuggauacgua

SEQ ID NO: 1937697 - RNA, 19 nt, Artificial Sequence
  Description of Artificial Sequence: Synthetic oligonucleotide
  Antisense strand to SEQ ID NO: 1937696
uacguauccagccacaccc

SEQ ID NO: 1937698 - RNA, 19 nt, Artificial Sequence
  Description of Artificial Sequence: Synthetic oligonucleotide
  Sense strand starting at position 1113 of SEQ ID NO: 1879875
gcuggauacguagacuaua

SEQ ID NO: 1937699 - RNA, 19 nt, Artificial Sequence
  Description of Artificial Sequence: Synthetic oligonucleotide
  Antisense strand to SEQ ID NO: 1937698
uauagucuacguauccagc

SEQ ID NO: 1937700 - RNA, 19 nt, Artificial Sequence
  Description of Artificial Sequence: Synthetic oligonucleotide
  Sense strand starting at position 1126 of SEQ ID NO: 1879875
acuauaggacauugccaua

SEQ ID NO: 1937701 - RNA, 19 nt, Artificial Sequence
  Description of Artificial Sequence: Synthetic oligonucleotide
  Antisense strand to SEQ ID NO: 1937700
uauggcaauguccuauagu

SEQ ID NO: 1937702 - RNA, 19 nt, Artificial Sequence
  Description of Artificial Sequence: Synthetic oligonucleotide
  Sense strand starting at position 1131 of SEQ ID NO: 1879875
aggacauugccauauauuc

SEQ ID NO: 1937703 - RNA, 19 nt, Artificial Sequence
  Description of Artificial Sequence: Synthetic oligonucleotide
  Antisense strand to SEQ ID NO: 1937702
gaauauauggcaauguccu

SEQ ID NO: 1937704 - RNA, 19 nt, Artificial Sequence
  Description of Artificial Sequence: Synthetic oligonucleotide
  Sense strand starting at position 1178 of SEQ ID NO: 1879875
agcugaacuuacucuaaug

SEQ ID NO: 1937705 - RNA, 19 nt, Artificial Sequence
  Description of Artificial Sequence: Synthetic oligonucleotide
  Antisense strand to SEQ ID NO: 1937704
cauuagaguaaguucagcu

SEQ ID NO: 1937706 - RNA, 19 nt, Artificial Sequence
  Description of Artificial Sequence: Synthetic oligonucleotide
  Sense strand starting at position 1496 of SEQ ID NO: 1879875
ggaggugaauacucacauc

SEQ ID NO: 1937707 - RNA, 19 nt, Artificial Sequence
  Description of Artificial Sequence: Synthetic oligonucleotide
  Antisense strand to SEQ ID NO: 1937706
gaugugaguauucaccucc

SEQ ID NO: 1937708 - RNA, 19 nt, Artificial Sequence
  Description of Artificial Sequence: Synthetic oligonucleotide
  Sense strand starting at position 2236 of SEQ ID NO: 1879875
ucagaaugucccgaagucu

SEQ ID NO: 1937709 - RNA, 19 nt, Artificial Sequence
  Description of Artificial Sequence: Synthetic oligonucleotide
  Antisense strand to SEQ ID NO: 1937708
agacuucgggacauucuga

SEQ ID NO: 1937710 - RNA, 19 nt, Artificial Sequence
  Description of Artificial Sequence: Synthetic oligonucleotide
  Sense strand starting at position 2363 of SEQ ID NO: 1879875
cagcuaguuccauauuagg

SEQ ID NO: 1937711 - RNA, 19 nt, Artificial Sequence
  Description of Artificial Sequence: Synthetic oligonucleotide
  Antisense strand to SEQ ID NO: 1937710
ccuaauauggaacuagcug

SEQ ID NO: 1937712 - RNA, 19 nt, Artificial Sequence
  Description of Artificial Sequence: Synthetic oligonucleotide
  Sense strand starting at position 2501 of SEQ ID NO: 1879875
guagaaugccacggaauca

SEQ ID NO: 1937713 - RNA, 19 nt, Artificial Sequence
  Description of Artificial Sequence: Synthetic oligonucleotide
  Antisense strand to SEQ ID NO: 1937712
ugauuccguggcauucuac

SEQ ID NO: 1937714 - RNA, 19 nt, Artificial Sequence
  Description of Artificial Sequence: Synthetic oligonucleotide
  Sense strand starting at position 2679 of SEQ ID NO: 1879875
ggugacauacgacagguua

SEQ ID NO: 1937715 - RNA, 19 nt, Artificial Sequence
  Description of Artificial Sequence: Synthetic oligonucleotide
  Antisense strand to SEQ ID NO: 1937714
uaaccugucguaugucacc

SEQ ID NO: 1937716 - RNA, 19 nt, Artificial Sequence
  Description of Artificial Sequence: Synthetic oligonucleotide
  Sense strand starting at position 2681 of SEQ ID NO: 1879875
ugacauacgacagguuauu

SEQ ID NO: 1937717 - RNA, 19 nt, Artificial Sequence
  Description of Artificial Sequence: Synthetic oligonucleotide
  Antisense strand to SEQ ID NO: 1937716
aauaaccugucguauguca

SEQ ID NO: 1937718 - RNA, 19 nt, Artificial Sequence
  Description of Artificial Sequence: Synthetic oligonucleotide
  Sense strand starting at position 2692 of SEQ ID NO: 1879875
agguuauuaucacugaaga

SEQ ID NO: 1937719 - RNA, 19 nt, Artificial Sequence
  Description of Artificial Sequence: Synthetic oligonucleotide
  Antisense strand to SEQ ID NO: 1937718
ucuucagugauaauaaccu

SEQ ID NO: 1937720 - RNA, 19 nt, Artificial Sequence
  Description of Artificial Sequence: Synthetic oligonucleotide
  Sense strand starting at position 2693 of SEQ ID NO: 1879875
gguuauuaucacugaagau

SEQ ID NO: 1937721 - RNA, 19 nt, Artificial Sequence
  Description of Artificial Sequence: Synthetic oligonucleotide
  Antisense strand to SEQ ID NO: 1937720
aucuucagugauaauaacc

SEQ ID NO: 1937722 - RNA, 19 nt, Artificial Sequence
  Description of Artificial Sequence: Synthetic oligonucleotide
  Sense strand starting at position 2760 of SEQ ID NO: 1879875
cuuugucauggauauuaac

SEQ ID NO: 1937723 - RNA, 19 nt, Artificial Sequence
  Description of Artificial Sequence: Synthetic oligonucleotide
  Antisense strand to SEQ ID NO: 1937722
guuaauauccaugacaaag

SEQ ID NO: 1937724 - RNA, 19 nt, Artificial Sequence
  Description of Artificial Sequence: Synthetic oligonucleotide
  Sense strand starting at position 2802 of SEQ ID NO: 1879875
uuaggauggcuuuaggagu

SEQ ID NO: 1937725 - RNA, 19 nt, Artificial Sequence
  Description of Artificial Sequence: Synthetic oligonucleotide
  Antisense strand to SEQ ID NO: 1937724
acuccuaaagccauccuaa

SEQ ID NO: 1937726 - RNA, 19 nt, Artificial Sequence
  Description of Artificial Sequence: Synthetic oligonucleotide
  Sense strand starting at position 2821 of SEQ ID NO: 1879875
uguccagguguuagagguu

SEQ ID NO: 1937727 - RNA, 19 nt, Artificial Sequence
  Description of Artificial Sequence: Synthetic oligonucleotide
  Antisense strand to SEQ ID NO: 1937726
aaccucuaacaccuggaca

SEQ ID NO: 1937728 - RNA, 19 nt, Artificial Sequence
  Description of Artificial Sequence: Synthetic oligonucleotide
  Sense strand starting at position 2827 of SEQ ID NO: 1879875
gguguuagagguuaacaga

SEQ ID NO: 1937729 - RNA, 19 nt, Artificial Sequence
  Description of Artificial Sequence: Synthetic oligonucleotide
  Antisense strand to SEQ ID NO: 1937728
ucuguuaaccucuaacacc

SEQ ID NO: 1937730 - RNA, 19 nt, Artificial Sequence
  Description of Artificial Sequence: Synthetic oligonucleotide
  Sense strand starting at position 2998 of SEQ ID NO: 1879875
uuggaaauuuguggaagaa

SEQ ID NO: 1937731 - RNA, 19 nt, Artificial Sequence
  Description of Artificial Sequence: Synthetic oligonucleotide
  Antisense strand to SEQ ID NO: 1937730
uucuuccacaaauuuccaa

SEQ ID NO: 1937732 - RNA, 19 nt, Artificial Sequence
  Description of Artificial Sequence: Synthetic oligonucleotide
  Sense strand starting at position 3380 of SEQ ID NO: 1879875
acccauuacuuagugauga

SEQ ID NO: 1937733 - RNA, 19 nt, Artificial Sequence
  Description of Artificial Sequence: Synthetic oligonucleotide
  Antisense strand to SEQ ID NO: 1937732
ucaucacuaaguaaugggu

SEQ ID NO: 1937734 - RNA, 19 nt, Artificial Sequence
  Description of Artificial Sequence: Synthetic oligonucleotide
  Sense strand starting at position 3388 of SEQ ID NO: 1879875
cuuagugaugaggauguuu

SEQ ID NO: 1937735 - RNA, 19 nt, Artificial Sequence
  Description of Artificial Sequence: Synthetic oligonucleotide
  Antisense strand to SEQ ID NO: 1937734
aaacauccucaucacuaag

SEQ ID NO: 1937736 - RNA, 19 nt, Artificial Sequence
  Description of Artificial Sequence: Synthetic oligonucleotide
  Sense strand starting at position 3440 of SEQ ID NO: 1879875
gcgaacgucauagacuaua

SEQ ID NO: 1937737 - RNA, 19 nt, Artificial Sequence
  Description of Artificial Sequence: Synthetic oligonucleotide
  Antisense strand to SEQ ID NO: 1937736
uauagucuaugacguucgc

SEQ ID NO: 1937738 - RNA, 19 nt, Artificial Sequence
  Description of Artificial Sequence: Synthetic oligonucleotide
  Sense strand starting at position 3761 of SEQ ID NO: 1879875
ugguauggauuugaugauu

SEQ ID NO: 1937739 - RNA, 19 nt, Artificial Sequence
  Description of Artificial Sequence: Synthetic oligonucleotide
  Antisense strand to SEQ ID NO: 1937738
aaucaucaaauccauacca

SEQ ID NO: 1937740 - RNA, 19 nt, Artificial Sequence
  Description of Artificial Sequence: Synthetic oligonucleotide
  Sense strand starting at position 3905 of SEQ ID NO: 1879875
ccauucuuacuuugguaga

SEQ ID NO: 1937741 - RNA, 19 nt, Artificial Sequence
  Description of Artificial Sequence: Synthetic oligonucleotide
  Antisense strand to SEQ ID NO: 1937740
ucuaccaaaguaagaaugg

SEQ ID NO: 1937742 - RNA, 19 nt, Artificial Sequence
  Description of Artificial Sequence: Synthetic oligonucleotide
  Sense strand starting at position 3936 of SEQ ID NO: 1879875
agacuaauucuccagcuga

SEQ ID NO: 1937743 - RNA, 19 nt, Artificial Sequence
  Description of Artificial Sequence: Synthetic oligonucleotide
  Antisense strand to SEQ ID NO: 1937742
ucagcuggagaauuagucu

SEQ ID NO: 1937744 - RNA, 19 nt, Artificial Sequence
  Description of Artificial Sequence: Synthetic oligonucleotide
  Sense strand starting at position 459 of SEQ ID NO: 1879876
aaguccuaccucugagaug

SEQ ID NO: 1937745 - RNA, 19 nt, Artificial Sequence
  Description of Artificial Sequence: Synthetic oligonucleotide
  Antisense strand to SEQ ID NO: 1937744
caucucagagguaggacuu

SEQ ID NO: 1937746 - RNA, 19 nt, Artificial Sequence
  Description of Artificial Sequence: Synthetic oligonucleotide
  Sense strand starting at position 571 of SEQ ID NO: 1879876
guuuacugcucccuaggga

SEQ ID NO: 1937747 - RNA, 19 nt, Artificial Sequence
  Description of Artificial Sequence: Synthetic oligonucleotide
  Antisense strand to SEQ ID NO: 1937746
ucccuagggagcaguaaac

SEQ ID NO: 1937748 - RNA, 19 nt, Artificial Sequence
  Description of Artificial Sequence: Synthetic oligonucleotide
  Sense strand starting at position 614 of SEQ ID NO: 1879876
ugcucucuuccaggagagu

SEQ ID NO: 1937749 - RNA, 19 nt, Artificial Sequence
  Description of Artificial Sequence: Synthetic oligonucleotide
  Antisense strand to SEQ ID NO: 1937748
acucuccuggaagagagca

SEQ ID NO: 1937750 - RNA, 19 nt, Artificial Sequence
  Description of Artificial Sequence: Synthetic oligonucleotide
  Sense strand starting at position 661 of SEQ ID NO: 1879876
cuugguguucuugacaauu

SEQ ID NO: 1937751 - RNA, 19 nt, Artificial Sequence
  Description of Artificial Sequence: Synthetic oligonucleotide
  Antisense strand to SEQ ID NO: 1937750
aauugucaagaacaccaag

SEQ ID NO: 1937752 - RNA, 19 nt, Artificial Sequence
  Description of Artificial Sequence: Synthetic oligonucleotide
  Sense strand starting at position 683 of SEQ ID NO: 1879876
ugguaccaucgggacauua

SEQ ID NO: 1937753 - RNA, 19 nt, Artificial Sequence
  Description of Artificial Sequence: Synthetic oligonucleotide
  Antisense strand to SEQ ID NO: 1937752
uaaugucccgaugguacca

SEQ ID NO: 1937754 - RNA, 19 nt, Artificial Sequence
  Description of Artificial Sequence: Synthetic oligonucleotide
  Sense strand starting at position 685 of SEQ ID NO: 1879876
guaccaucgggacauuacu

SEQ ID NO: 1937755 - RNA, 19 nt, Artificial Sequence
  Description of Artificial Sequence: Synthetic oligonucleotide
  Antisense strand to SEQ ID NO: 1937754
aguaaugucccgaugguac

SEQ ID NO: 1937756 - RNA, 19 nt, Artificial Sequence
  Description of Artificial Sequence: Synthetic oligonucleotide
  Sense strand starting at position 707 of SEQ ID NO: 1879876
caaagaacuggucguucuu

SEQ ID NO: 1937757 - RNA, 19 nt, Artificial Sequence
  Description of Artificial Sequence: Synthetic oligonucleotide
  Antisense strand to SEQ ID NO: 1937756
aagaacgaccaguucuuug

SEQ ID NO: 1937758 - RNA, 19 nt, Artificial Sequence
  Description of Artificial Sequence: Synthetic oligonucleotide
  Sense strand starting at position 757 of SEQ ID NO: 1879876
agcugagugguguugucuu

SEQ ID NO: 1937759 - RNA, 19 nt, Artificial Sequence
  Description of Artificial Sequence: Synthetic oligonucleotide
  Antisense strand to SEQ ID NO: 1937758
aagacaacaccacucagcu

SEQ ID NO: 1937760 - RNA, 19 nt, Artificial Sequence
  Description of Artificial Sequence: Synthetic oligonucleotide
  Sense strand starting at position 839 of SEQ ID NO: 1879876
acaaguaguuucuccagga

SEQ ID NO: 1937761 - RNA, 19 nt, Artificial Sequence
  Description of Artificial Sequence: Synthetic oligonucleotide
  Antisense strand to SEQ ID NO: 1937760
uccuggagaaacuacuugu

SEQ ID NO: 1937762 - RNA, 19 nt, Artificial Sequence
  Description of Artificial Sequence: Synthetic oligonucleotide
  Sense strand starting at position 840 of SEQ ID NO: 1879876
caaguaguuucuccaggau

SEQ ID NO: 1937763 - RNA, 19 nt, Artificial Sequence
  Description of Artificial Sequence: Synthetic oligonucleotide
  Antisense strand to SEQ ID NO: 1937762
auccuggagaaacuacuug

SEQ ID NO: 1937764 - RNA, 19 nt, Artificial Sequence
  Description of Artificial Sequence: Synthetic oligonucleotide
  Sense strand starting at position 917 of SEQ ID NO: 1879876
gaaggagaauguccuagua

SEQ ID NO: 1937765 - RNA, 19 nt, Artificial Sequence
  Description of Artificial Sequence: Synthetic oligonucleotide
  Antisense strand to SEQ ID NO: 1937764
uacuaggacauucuccuuc

SEQ ID NO: 1937766 - RNA, 19 nt, Artificial Sequence
  Description of Artificial Sequence: Synthetic oligonucleotide
  Sense strand starting at position 985 of SEQ ID NO: 1879876
cuaagauacccuugagacu

SEQ ID NO: 1937767 - RNA, 19 nt, Artificial Sequence
  Description of Artificial Sequence: Synthetic oligonucleotide
  Antisense strand to SEQ ID NO: 1937766
agucucaaggguaucuuag

SEQ ID NO: 1937768 - RNA, 19 nt, Artificial Sequence
  Description of Artificial Sequence: Synthetic oligonucleotide
  Sense strand starting at position 994 of SEQ ID NO: 1879876
ccuugagacuccucuguaa

SEQ ID NO: 1937769 - RNA, 19 nt, Artificial Sequence
  Description of Artificial Sequence: Synthetic oligonucleotide
  Antisense strand to SEQ ID NO: 1937768
uuacagaggagucucaagg

SEQ ID NO: 1937770 - RNA, 19 nt, Artificial Sequence
  Description of Artificial Sequence: Synthetic oligonucleotide
  Sense strand starting at position 996 of SEQ ID NO: 1879876
uugagacuccucuguaaca

SEQ ID NO: 1937771 - RNA, 19 nt, Artificial Sequence
  Description of Artificial Sequence: Synthetic oligonucleotide
  Antisense strand to SEQ ID NO: 1937770
uguuacagaggagucucaa

SEQ ID NO: 1937772 - RNA, 19 nt, Artificial Sequence
  Description of Artificial Sequence: Synthetic oligonucleotide
  Sense strand starting at position 1046 of SEQ ID NO: 1879876
uuugauugauguguugagu

SEQ ID NO: 1937773 - RNA, 19 nt, Artificial Sequence
  Description of Artificial Sequence: Synthetic oligonucleotide
  Antisense strand to SEQ ID NO: 1937772
acucaacacaucaaucaaa

SEQ ID NO: 1937774 - RNA, 19 nt, Artificial Sequence
  Description of Artificial Sequence: Synthetic oligonucleotide
  Sense strand starting at position 1473 of SEQ ID NO: 1879876
agagcccaucucugagaaa

SEQ ID NO: 1937775 - RNA, 19 nt, Artificial Sequence
  Description of Artificial Sequence: Synthetic oligonucleotide
  Antisense strand to SEQ ID NO: 1937774
uuucucagagaugggcucu

SEQ ID NO: 1937776 - RNA, 19 nt, Artificial Sequence
  Description of Artificial Sequence: Synthetic oligonucleotide
  Sense strand starting at position 1510 of SEQ ID NO: 1879876
uugccugcuccagagacaa

SEQ ID NO: 1937777 - RNA, 19 nt, Artificial Sequence
  Description of Artificial Sequence: Synthetic oligonucleotide
  Antisense strand to SEQ ID NO: 1937776
uugucucuggagcaggcaa

SEQ ID NO: 1937778 - RNA, 19 nt, Artificial Sequence
  Description of Artificial Sequence: Synthetic oligonucleotide
  Sense strand starting at position 1608 of SEQ ID NO: 1879876
ucacuuagauguuucugga

SEQ ID NO: 1937779 - RNA, 19 nt, Artificial Sequence
  Description of Artificial Sequence: Synthetic oligonucleotide
  Antisense strand to SEQ ID NO: 1937778
uccagaaacaucuaaguga

SEQ ID NO: 1937780 - RNA, 19 nt, Artificial Sequence
  Description of Artificial Sequence: Synthetic oligonucleotide
  Sense strand starting at position 1763 of SEQ ID NO: 1879876
ccgauaccauguuuagcaa

SEQ ID NO: 1937781 - RNA, 19 nt, Artificial Sequence
  Description of Artificial Sequence: Synthetic oligonucleotide
  Antisense strand to SEQ ID NO: 1937780
uugcuaaacaugguaucgg

SEQ ID NO: 1937782 - RNA, 19 nt, Artificial Sequence
  Description of Artificial Sequence: Synthetic oligonucleotide
  Sense strand starting at position 1776 of SEQ ID NO: 1879876
uagcaaguguuuccugaga

SEQ ID NO: 1937783 - RNA, 19 nt, Artificial Sequence
  Description of Artificial Sequence: Synthetic oligonucleotide
  Antisense strand to SEQ ID NO: 1937782
ucucaggaaacacuugcua

SEQ ID NO: 1937784 - RNA, 19 nt, Artificial Sequence
  Description of Artificial Sequence: Synthetic oligonucleotide
  Sense strand starting at position 1918 of SEQ ID NO: 1879876
acaacuguccgauggaauu

SEQ ID NO: 1937785 - RNA, 19 nt, Artificial Sequence
  Description of Artificial Sequence: Synthetic oligonucleotide
  Antisense strand to SEQ ID NO: 1937784
aauuccaucggacaguugu

SEQ ID NO: 1937786 - RNA, 19 nt, Artificial Sequence
  Description of Artificial Sequence: Synthetic oligonucleotide
  Sense strand starting at position 1990 of SEQ ID NO: 1879876
acuuaaauugcacagugaa

SEQ ID NO: 1937787 - RNA, 19 nt, Artificial Sequence
  Description of Artificial Sequence: Synthetic oligonucleotide
  Antisense strand to SEQ ID NO: 1937786
uucacugugcaauuuaagu

SEQ ID NO: 1937788 - RNA, 19 nt, Artificial Sequence
  Description of Artificial Sequence: Synthetic oligonucleotide
  Sense strand starting at position 2010 of SEQ ID NO: 1879876
gggagaagugaaugugcaa

SEQ ID NO: 1937789 - RNA, 19 nt, Artificial Sequence
  Description of Artificial Sequence: Synthetic oligonucleotide
  Antisense strand to SEQ ID NO: 1937788
uugcacauucacuucuccc

SEQ ID NO: 1937790 - RNA, 19 nt, Artificial Sequence
  Description of Artificial Sequence: Synthetic oligonucleotide
  Sense strand starting at position 2044 of SEQ ID NO: 1879876
cccuuuggcuggguuauuu

SEQ ID NO: 1937791 - RNA, 19 nt, Artificial Sequence
  Description of Artificial Sequence: Synthetic oligonucleotide
  Antisense strand to SEQ ID NO: 1937790
aaauaacccagccaaaggg

SEQ ID NO: 1937792 - RNA, 19 nt, Artificial Sequence
  Description of Artificial Sequence: Synthetic oligonucleotide
  Sense strand starting at position 2295 of SEQ ID NO: 1879876
gaauaucugucucuacgaa

SEQ ID NO: 1937793 - RNA, 19 nt, Artificial Sequence
  Description of Artificial Sequence: Synthetic oligonucleotide
  Antisense strand to SEQ ID NO: 1937792
uucguagagacagauauuc

SEQ ID NO: 1937794 - RNA, 19 nt, Artificial Sequence
  Description of Artificial Sequence: Synthetic oligonucleotide
  Sense strand starting at position 2622 of SEQ ID NO: 1879876
ggcccuauccacuggagga

SEQ ID NO: 1937795 - RNA, 19 nt, Artificial Sequence
  Description of Artificial Sequence: Synthetic oligonucleotide
  Antisense strand to SEQ ID NO: 1937794
uccuccaguggauagggcc

SEQ ID NO: 1937796 - RNA, 19 nt, Artificial Sequence
  Description of Artificial Sequence: Synthetic oligonucleotide
  Sense strand starting at position 2623 of SEQ ID NO: 1879876
gcccuauccacuggaggau

SEQ ID NO: 1937797 - RNA, 19 nt, Artificial Sequence
  Description of Artificial Sequence: Synthetic oligonucleotide
  Antisense strand to SEQ ID NO: 1937796
auccuccaguggauagggc

SEQ ID NO: 1937798 - RNA, 19 nt, Artificial Sequence
  Description of Artificial Sequence: Synthetic oligonucleotide
  Sense strand starting at position 2653 of SEQ ID NO: 1879876
gcuuguuugaaagggagga

SEQ ID NO: 1937799 - RNA, 19 nt, Artificial Sequence
  Description of Artificial Sequence: Synthetic oligonucleotide
  Antisense strand to SEQ ID NO: 1937798
uccucccuuucaaacaagc

SEQ ID NO: 1937800 - RNA, 19 nt, Artificial Sequence
  Description of Artificial Sequence: Synthetic oligonucleotide
  Sense strand starting at position 2744 of SEQ ID NO: 1879876
uacaguuaacgcuaagacu

SEQ ID NO: 1937801 - RNA, 19 nt, Artificial Sequence
  Description of Artificial Sequence: Synthetic oligonucleotide
  Antisense strand to SEQ ID NO: 1937800
agucuuagcguuaacugua

SEQ ID NO: 1937802 - RNA, 19 nt, Artificial Sequence
  Description of Artificial Sequence: Synthetic oligonucleotide
  Sense strand starting at position 2757 of SEQ ID NO: 1879876
aagacugaguugucuuuag

SEQ ID NO: 1937803 - RNA, 19 nt, Artificial Sequence
  Description of Artificial Sequence: Synthetic oligonucleotide
  Antisense strand to SEQ ID NO: 1937802
cuaaagacaacucagucuu

SEQ ID NO: 1937804 - RNA, 19 nt, Artificial Sequence
  Description of Artificial Sequence: Synthetic oligonucleotide
  Sense strand starting at position 2761 of SEQ ID NO: 1879876
cugaguugucuuuaguuug

SEQ ID NO: 1937805 - RNA, 19 nt, Artificial Sequence
  Description of Artificial Sequence: Synthetic oligonucleotide
  Antisense strand to SEQ ID NO: 1937804
caaacuaaagacaacucag

SEQ ID NO: 1937806 - RNA, 19 nt, Artificial Sequence
  Description of Artificial Sequence: Synthetic oligonucleotide
  Sense strand starting at position 2771 of SEQ ID NO: 1879876
uuuaguuugguugguggaa

SEQ ID NO: 1937807 - RNA, 19 nt, Artificial Sequence
  Description of Artificial Sequence: Synthetic oligonucleotide
  Antisense strand to SEQ ID NO: 1937806
uuccaccaaccaaacuaaa

SEQ ID NO: 1937808 - RNA, 19 nt, Artificial Sequence
  Description of Artificial Sequence: Synthetic oligonucleotide
  Sense strand starting at position 2772 of SEQ ID NO: 1879876
uuaguuugguugguggaaa

SEQ ID NO: 1937809 - RNA, 19 nt, Artificial Sequence
  Description of Artificial Sequence: Synthetic oligonucleotide
  Antisense strand to SEQ ID NO: 1937808
uuuccaccaaccaaacuaa

SEQ ID NO: 1937810 - RNA, 19 nt, Artificial Sequence
  Description of Artificial Sequence: Synthetic oligonucleotide
  Sense strand starting at position 2954 of SEQ ID NO: 1879876
gucccuagggccugugaaa

SEQ ID NO: 1937811 - RNA, 19 nt, Artificial Sequence
  Description of Artificial Sequence: Synthetic oligonucleotide
  Antisense strand to SEQ ID NO: 1937810
uuucacaggcccuagggac

SEQ ID NO: 1937812 - RNA, 19 nt, Artificial Sequence
  Description of Artificial Sequence: Synthetic oligonucleotide
  Sense strand starting at position 2995 of SEQ ID NO: 1879876
cuggauaugcgugaaacuc

SEQ ID NO: 1937813 - RNA, 19 nt, Artificial Sequence
  Description of Artificial Sequence: Synthetic oligonucleotide
  Antisense strand to SEQ ID NO: 1937812
gaguuucacgcauauccag

SEQ ID NO: 1937814 - RNA, 19 nt, Artificial Sequence
  Description of Artificial Sequence: Synthetic oligonucleotide
  Sense strand starting at position 3368 of SEQ ID NO: 1879876
cccagagcgcuaggauuaa

SEQ ID NO: 1937815 - RNA, 19 nt, Artificial Sequence
  Description of Artificial Sequence: Synthetic oligonucleotide
  Antisense strand to SEQ ID NO: 1937814
uuaauccuagcgcucuggg

SEQ ID NO: 1937816 - RNA, 19 nt, Artificial Sequence
  Description of Artificial Sequence: Synthetic oligonucleotide
  Sense strand starting at position 3446 of SEQ ID NO: 1879876
gagugaaggguguggcauu

SEQ ID NO: 1937817 - RNA, 19 nt, Artificial Sequence
  Description of Artificial Sequence: Synthetic oligonucleotide
  Antisense strand to SEQ ID NO: 1937816
aaugccacacccuucacuc

SEQ ID NO: 1937818 - RNA, 19 nt, Artificial Sequence
  Description of Artificial Sequence: Synthetic oligonucleotide
  Sense strand starting at position 3470 of SEQ ID NO: 1879876
agugguauuucgguuggcu

SEQ ID NO: 1937819 - RNA, 19 nt, Artificial Sequence
  Description of Artificial Sequence: Synthetic oligonucleotide
  Antisense strand to SEQ ID NO: 1937818
agccaaccgaaauaccacu

SEQ ID NO: 1937820 - RNA, 19 nt, Artificial Sequence
  Description of Artificial Sequence: Synthetic oligonucleotide
  Sense strand starting at position 3762 of SEQ ID NO: 1879876
caaggagcuuuguauuuga

SEQ ID NO: 1937821 - RNA, 19 nt, Artificial Sequence
  Description of Artificial Sequence: Synthetic oligonucleotide
  Antisense strand to SEQ ID NO: 1937820
ucaaauacaaagcuccuug

SEQ ID NO: 1937822 - RNA, 19 nt, Artificial Sequence
  Description of Artificial Sequence: Synthetic oligonucleotide
  Sense strand starting at position 3837 of SEQ ID NO: 1879876
augcucaaccaguguuaac

SEQ ID NO: 1937823 - RNA, 19 nt, Artificial Sequence
  Description of Artificial Sequence: Synthetic oligonucleotide
  Antisense strand to SEQ ID NO: 1937822
guuaacacugguugagcau

SEQ ID NO: 1937824 - RNA, 19 nt, Artificial Sequence
  Description of Artificial Sequence: Synthetic oligonucleotide
  Sense strand starting at position 148 of SEQ ID NO: 1879877
ugacuauugacaggugcua

SEQ ID NO: 1937825 - RNA, 19 nt, Artificial Sequence
  Description of Artificial Sequence: Synthetic oligonucleotide
  Antisense strand to SEQ ID NO: 1937824
uagcaccugucaauaguca

SEQ ID NO: 1937826 - RNA, 19 nt, Artificial Sequence
  Description of Artificial Sequence: Synthetic oligonucleotide
  Sense strand starting at position 339 of SEQ ID NO: 1879877
ggugucuuaccugaccaca

SEQ ID NO: 1937827 - RNA, 19 nt, Artificial Sequence
  Description of Artificial Sequence: Synthetic oligonucleotide
  Antisense strand to SEQ ID NO: 1937826
uguggucagguaagacacc

SEQ ID NO: 1937828 - RNA, 19 nt, Artificial Sequence
  Description of Artificial Sequence: Synthetic oligonucleotide
  Sense strand starting at position 361 of SEQ ID NO: 1879877
agaaaugcugaaugccaau

SEQ ID NO: 1937829 - RNA, 19 nt, Artificial Sequence
  Description of Artificial Sequence: Synthetic oligonucleotide
  Antisense strand to SEQ ID NO: 1937828
auuggcauucagcauuucu

SEQ ID NO: 1937830 - RNA, 19 nt, Artificial Sequence
  Description of Artificial Sequence: Synthetic oligonucleotide
  Sense strand starting at position 376 of SEQ ID NO: 1879877
caauuugaguuagaaagag

SEQ ID NO: 1937831 - RNA, 19 nt, Artificial Sequence
  Description of Artificial Sequence: Synthetic oligonucleotide
  Antisense strand to SEQ ID NO: 1937830
cucuuucuaacucaaauug

SEQ ID NO: 1937832 - RNA, 19 nt, Artificial Sequence
  Description of Artificial Sequence: Synthetic oligonucleotide
  Sense strand starting at position 388 of SEQ ID NO: 1879877
gaaagagaauagcagaauu

SEQ ID NO: 1937833 - RNA, 19 nt, Artificial Sequence
  Description of Artificial Sequence: Synthetic oligonucleotide
  Antisense strand to SEQ ID NO: 1937832
aauucugcuauucucuuuc

SEQ ID NO: 1937834 - RNA, 19 nt, Artificial Sequence
  Description of Artificial Sequence: Synthetic oligonucleotide
  Sense strand starting at position 424 of SEQ ID NO: 1879877
uaggauauuggugagcauu

SEQ ID NO: 1937835 - RNA, 19 nt, Artificial Sequence
  Description of Artificial Sequence: Synthetic oligonucleotide
  Antisense strand to SEQ ID NO: 1937834
aaugcucaccaauauccua

SEQ ID NO: 1937836 - RNA, 19 nt, Artificial Sequence
  Description of Artificial Sequence: Synthetic oligonucleotide
  Sense strand starting at position 444 of SEQ ID NO: 1879877
gggagaagcugagauuuca

SEQ ID NO: 1937837 - RNA, 19 nt, Artificial Sequence
  Description of Artificial Sequence: Synthetic oligonucleotide
  Antisense strand to SEQ ID NO: 1937836
ugaaaucucagcuucuccc

SEQ ID NO: 1937838 - RNA, 19 nt, Artificial Sequence
  Description of Artificial Sequence: Synthetic oligonucleotide
  Sense strand starting at position 510 of SEQ ID NO: 1879877
gggagaagugacugaugca

SEQ ID NO: 1937839 - RNA, 19 nt, Artificial Sequence
  Description of Artificial Sequence: Synthetic oligonucleotide
  Antisense strand to SEQ ID NO: 1937838
ugcaucagucacuucuccc

SEQ ID NO: 1937840 - RNA, 19 nt, Artificial Sequence
  Description of Artificial Sequence: Synthetic oligonucleotide
  Sense strand starting at position 588 of SEQ ID NO: 1879877
agcagaggcucauuugguu

SEQ ID NO: 1937841 - RNA, 19 nt, Artificial Sequence
  Description of Artificial Sequence: Synthetic oligonucleotide
  Antisense strand to SEQ ID NO: 1937840
aaccaaaugagccucugcu

SEQ ID NO: 1937842 - RNA, 19 nt, Artificial Sequence
  Description of Artificial Sequence: Synthetic oligonucleotide
  Sense strand starting at position 706 of SEQ ID NO: 1879877
agacuucugggccaagcaa

SEQ ID NO: 1937843 - RNA, 19 nt, Artificial Sequence
  Description of Artificial Sequence: Synthetic oligonucleotide
  Antisense strand to SEQ ID NO: 1937842
uugcuuggcccagaagucu

SEQ ID NO: 1937844 - RNA, 19 nt, Artificial Sequence
  Description of Artificial Sequence: Synthetic oligonucleotide
  Sense strand starting at position 916 of SEQ ID NO: 1879877
ccgugcccgccuuaauuua

SEQ ID NO: 1937845 - RNA, 19 nt, Artificial Sequence
  Description of Artificial Sequence: Synthetic oligonucleotide
  Antisense strand to SEQ ID NO: 1937844
uaaauuaaggcgggcacgg

SEQ ID NO: 1937846 - RNA, 19 nt, Artificial Sequence
  Description of Artificial Sequence: Synthetic oligonucleotide
  Sense strand starting at position 923 of SEQ ID NO: 1879877
cgccuuaauuuacucugau

SEQ ID NO: 1937847 - RNA, 19 nt, Artificial Sequence
  Description of Artificial Sequence: Synthetic oligonucleotide
  Antisense strand to SEQ ID NO: 1937846
aucagaguaaauuaaggcg

SEQ ID NO: 1937848 - RNA, 19 nt, Artificial Sequence
  Description of Artificial Sequence: Synthetic oligonucleotide
  Sense strand starting at position 1073 of SEQ ID NO: 1879877
ccaggucuacucugauauu

SEQ ID NO: 1937849 - RNA, 19 nt, Artificial Sequence
  Description of Artificial Sequence: Synthetic oligonucleotide
  Antisense strand to SEQ ID NO: 1937848
aauaucagaguagaccugg

SEQ ID NO: 1937850 - RNA, 19 nt, Artificial Sequence
  Description of Artificial Sequence: Synthetic oligonucleotide
  Sense strand starting at position 1076 of SEQ ID NO: 1879877
ggucuacucugauauuuaa

SEQ ID NO: 1937851 - RNA, 19 nt, Artificial Sequence
  Description of Artificial Sequence: Synthetic oligonucleotide
  Antisense strand to SEQ ID NO: 1937850
uuaaauaucagaguagacc

SEQ ID NO: 1937852 - RNA, 19 nt, Artificial Sequence
  Description of Artificial Sequence: Synthetic oligonucleotide
  Sense strand starting at position 1162 of SEQ ID NO: 1879877
gaagguaccugagcuguga

SEQ ID NO: 1937853 - RNA, 19 nt, Artificial Sequence
  Description of Artificial Sequence: Synthetic oligonucleotide
  Antisense strand to SEQ ID NO: 1937852
ucacagcucagguaccuuc

SEQ ID NO: 1937854 - RNA, 19 nt, Artificial Sequence
  Description of Artificial Sequence: Synthetic oligonucleotide
  Sense strand starting at position 1166 of SEQ ID NO: 1879877
guaccugagcugugaacaa

SEQ ID NO: 1937855 - RNA, 19 nt, Artificial Sequence
  Description of Artificial Sequence: Synthetic oligonucleotide
  Antisense strand to SEQ ID NO: 1937854
uuguucacagcucagguac

SEQ ID NO: 1937856 - RNA, 19 nt, Artificial Sequence
  Description of Artificial Sequence: Synthetic oligonucleotide
  Sense strand starting at position 1275 of SEQ ID NO: 1879877
augugugagagccaauacu

SEQ ID NO: 1937857 - RNA, 19 nt, Artificial Sequence
  Description of Artificial Sequence: Synthetic oligonucleotide
  Antisense strand to SEQ ID NO: 1937856
aguauuggcucucacacau

SEQ ID NO: 1937858 - RNA, 19 nt, Artificial Sequence
  Description of Artificial Sequence: Synthetic oligonucleotide
  Sense strand starting at position 1588 of SEQ ID NO: 1879877
uccauccaugcuggagaua

SEQ ID NO: 1937859 - RNA, 19 nt, Artificial Sequence
  Description of Artificial Sequence: Synthetic oligonucleotide
  Antisense strand to SEQ ID NO: 1937858
uaucuccagcauggaugga

SEQ ID NO: 1937860 - RNA, 19 nt, Artificial Sequence
  Description of Artificial Sequence: Synthetic oligonucleotide
  Sense strand starting at position 1702 of SEQ ID NO: 1879877
gcucgucugcccuuuggaa

SEQ ID NO: 1937861 - RNA, 19 nt, Artificial Sequence
  Description of Artificial Sequence: Synthetic oligonucleotide
  Antisense strand to SEQ ID NO: 1937860
uuccaaagggcagacgagc

SEQ ID NO: 1937862 - RNA, 19 nt, Artificial Sequence
  Description of Artificial Sequence: Synthetic oligonucleotide
  Sense strand starting at position 1733 of SEQ ID NO: 1879877
guccuagcccugggaucau

SEQ ID NO: 1937863 - RNA, 19 nt, Artificial Sequence
  Description of Artificial Sequence: Synthetic oligonucleotide
  Antisense strand to SEQ ID NO: 1937862
augaucccagggcuaggac

SEQ ID NO: 1937864 - RNA, 19 nt, Artificial Sequence
  Description of Artificial Sequence: Synthetic oligonucleotide
  Sense strand starting at position 1745 of SEQ ID NO: 1879877
ggaucauuguacuuaccag

SEQ ID NO: 1937865 - RNA, 19 nt, Artificial Sequence
  Description of Artificial Sequence: Synthetic oligonucleotide
  Antisense strand to SEQ ID NO: 1937864
cugguaaguacaaugaucc

SEQ ID NO: 1937866 - RNA, 19 nt, Artificial Sequence
  Description of Artificial Sequence: Synthetic oligonucleotide
  Sense strand starting at position 1834 of SEQ ID NO: 1879877
guggcugauuucucaucuu

SEQ ID NO: 1937867 - RNA, 19 nt, Artificial Sequence
  Description of Artificial Sequence: Synthetic oligonucleotide
  Antisense strand to SEQ ID NO: 1937866
aagaugagaaaucagccac

SEQ ID NO: 1937868 - RNA, 19 nt, Artificial Sequence
  Description of Artificial Sequence: Synthetic oligonucleotide
  Sense strand starting at position 2060 of SEQ ID NO: 1879877
ucucccgggaucugugaaa

SEQ ID NO: 1937869 - RNA, 19 nt, Artificial Sequence
  Description of Artificial Sequence: Synthetic oligonucleotide
  Antisense strand to SEQ ID NO: 1937868
uuucacagaucccgggaga

SEQ ID NO: 1937870 - RNA, 19 nt, Artificial Sequence
  Description of Artificial Sequence: Synthetic oligonucleotide
  Sense strand starting at position 2168 of SEQ ID NO: 1879877
cuguguguccguuuacaug

SEQ ID NO: 1937871 - RNA, 19 nt, Artificial Sequence
  Description of Artificial Sequence: Synthetic oligonucleotide
  Antisense strand to SEQ ID NO: 1937870
cauguaaacggacacacag

SEQ ID NO: 1937872 - RNA, 19 nt, Artificial Sequence
  Description of Artificial Sequence: Synthetic oligonucleotide
  Sense strand starting at position 2494 of SEQ ID NO: 1879877
gggcuucuucgagauucuc

SEQ ID NO: 1937873 - RNA, 19 nt, Artificial Sequence
  Description of Artificial Sequence: Synthetic oligonucleotide
  Antisense strand to SEQ ID NO: 1937872
gagaaucucgaagaagccc

SEQ ID NO: 1937874 - RNA, 19 nt, Artificial Sequence
  Description of Artificial Sequence: Synthetic oligonucleotide
  Sense strand starting at position 2575 of SEQ ID NO: 1879877
gagcucaucugccugggau

SEQ ID NO: 1937875 - RNA, 19 nt, Artificial Sequence
  Description of Artificial Sequence: Synthetic oligonucleotide
  Antisense strand to SEQ ID NO: 1937874
aucccaggcagaugagcuc

SEQ ID NO: 1937876 - RNA, 19 nt, Artificial Sequence
  Description of Artificial Sequence: Synthetic oligonucleotide
  Sense strand starting at position 2750 of SEQ ID NO: 1879877
ggcuguggacccgaaagaa

SEQ ID NO: 1937877 - RNA, 19 nt, Artificial Sequence
  Description of Artificial Sequence: Synthetic oligonucleotide
  Antisense strand to SEQ ID NO: 1937876
uucuuucggguccacagcc

SEQ ID NO: 1937878 - RNA, 19 nt, Artificial Sequence
  Description of Artificial Sequence: Synthetic oligonucleotide
  Sense strand starting at position 2840 of SEQ ID NO: 1879877
gcgcuagcucugcccaaga

SEQ ID NO: 1937879 - RNA, 19 nt, Artificial Sequence
  Description of Artificial Sequence: Synthetic oligonucleotide
  Antisense strand to SEQ ID NO: 1937878
ucuugggcagagcuagcgc

SEQ ID NO: 1937880 - RNA, 19 nt, Artificial Sequence
  Description of Artificial Sequence: Synthetic oligonucleotide
  Sense strand starting at position 2871 of SEQ ID NO: 1879877
aguguuugugugaguacgu

SEQ ID NO: 1937881 - RNA, 19 nt, Artificial Sequence
  Description of Artificial Sequence: Synthetic oligonucleotide
  Antisense strand to SEQ ID NO: 1937880
acguacucacacaaacacu

SEQ ID NO: 1937882 - RNA, 19 nt, Artificial Sequence
  Description of Artificial Sequence: Synthetic oligonucleotide
  Sense strand starting at position 2953 of SEQ ID NO: 1879877
ucuaucuuacaguguagau

SEQ ID NO: 1937883 - RNA, 19 nt, Artificial Sequence
  Description of Artificial Sequence: Synthetic oligonucleotide
  Antisense strand to SEQ ID NO: 1937882
aucuacacuguaagauaga

SEQ ID NO: 1937884 - RNA, 19 nt, Artificial Sequence
  Description of Artificial Sequence: Synthetic oligonucleotide
  Sense strand starting at position 2962 of SEQ ID NO: 1879877
caguguagaugccuggaua

SEQ ID NO: 1937885 - RNA, 19 nt, Artificial Sequence
  Description of Artificial Sequence: Synthetic oligonucleotide
  Antisense strand to SEQ ID NO: 1937884
uauccaggcaucuacacug

SEQ ID NO: 1937886 - RNA, 19 nt, Artificial Sequence
  Description of Artificial Sequence: Synthetic oligonucleotide
  Sense strand starting at position 2963 of SEQ ID NO: 1879877
aguguagaugccuggauaa

SEQ ID NO: 1937887 - RNA, 19 nt, Artificial Sequence
  Description of Artificial Sequence: Synthetic oligonucleotide
  Antisense strand to SEQ ID NO: 1937886
uuauccaggcaucuacacu

SEQ ID NO: 1937888 - RNA, 19 nt, Artificial Sequence
  Description of Artificial Sequence: Synthetic oligonucleotide
  Sense strand starting at position 3304 of SEQ ID NO: 1879877
gauugucucgguguuguua

SEQ ID NO: 1937889 - RNA, 19 nt, Artificial Sequence
  Description of Artificial Sequence: Synthetic oligonucleotide
  Antisense strand to SEQ ID NO: 1937888
uaacaacaccgagacaauc

SEQ ID NO: 1937890 - RNA, 19 nt, Artificial Sequence
  Description of Artificial Sequence: Synthetic oligonucleotide
  Sense strand starting at position 3337 of SEQ ID NO: 1879877
cccguuguaauggauagau

SEQ ID NO: 1937891 - RNA, 19 nt, Artificial Sequence
  Description of Artificial Sequence: Synthetic oligonucleotide
  Antisense strand to SEQ ID NO: 1937890
aucuauccauuacaacggg

SEQ ID NO: 1937892 - RNA, 19 nt, Artificial Sequence
  Description of Artificial Sequence: Synthetic oligonucleotide
  Sense strand starting at position 3341 of SEQ ID NO: 1879877
uuguaauggauagaugcau

SEQ ID NO: 1937893 - RNA, 19 nt, Artificial Sequence
  Description of Artificial Sequence: Synthetic oligonucleotide
  Antisense strand to SEQ ID NO: 1937892
augcaucuauccauuacaa

SEQ ID NO: 1937894 - RNA, 19 nt, Artificial Sequence
  Description of Artificial Sequence: Synthetic oligonucleotide
  Sense strand starting at position 3481 of SEQ ID NO: 1879877
uggccaauuacucgaguga

SEQ ID NO: 1937895 - RNA, 19 nt, Artificial Sequence
  Description of Artificial Sequence: Synthetic oligonucleotide
  Antisense strand to SEQ ID NO: 1937894
ucacucgaguaauuggcca

SEQ ID NO: 1937896 - RNA, 19 nt, Artificial Sequence
  Description of Artificial Sequence: Synthetic oligonucleotide
  Sense strand starting at position 3482 of SEQ ID NO: 1879877
ggccaauuacucgagugag

SEQ ID NO: 1937897 - RNA, 19 nt, Artificial Sequence
  Description of Artificial Sequence: Synthetic oligonucleotide
  Antisense strand to SEQ ID NO: 1937896
cucacucgaguaauuggcc

SEQ ID NO: 1937898 - RNA, 19 nt, Artificial Sequence
  Description of Artificial Sequence: Synthetic oligonucleotide
  Sense strand starting at position 3485 of SEQ ID NO: 1879877
caauuacucgagugagucu

SEQ ID NO: 1937899 - RNA, 19 nt, Artificial Sequence
  Description of Artificial Sequence: Synthetic oligonucleotide
  Antisense strand to SEQ ID NO: 1937898
agacucacucgaguaauug

SEQ ID NO: 1937900 - RNA, 19 nt, Artificial Sequence
  Description of Artificial Sequence: Synthetic oligonucleotide
  Sense strand starting at position 3610 of SEQ ID NO: 1879877
gcagguggcgcuuucuauu

SEQ ID NO: 1937901 - RNA, 19 nt, Artificial Sequence
  Description of Artificial Sequence: Synthetic oligonucleotide
  Antisense strand to SEQ ID NO: 1937900
aauagaaagcgccaccugc

SEQ ID NO: 1937902 - RNA, 19 nt, Artificial Sequence
  Description of Artificial Sequence: Synthetic oligonucleotide
  Sense strand starting at position 3616 of SEQ ID NO: 1879877
ggcgcuuucuauuuauuga

SEQ ID NO: 1937903 - RNA, 19 nt, Artificial Sequence
  Description of Artificial Sequence: Synthetic oligonucleotide
  Antisense strand to SEQ ID NO: 1937902
ucaauaaauagaaagcgcc

SEQ ID NO: 1937904 - RNA, 19 nt, Artificial Sequence
  Description of Artificial Sequence: Synthetic oligonucleotide
  Sense strand starting at position 116 of SEQ ID NO: 1879878
augacuuaacuuggaguuu

SEQ ID NO: 1937905 - RNA, 19 nt, Artificial Sequence
  Description of Artificial Sequence: Synthetic oligonucleotide
  Antisense strand to SEQ ID NO: 1937904
aaacuccaaguuaagucau

SEQ ID NO: 1937906 - RNA, 19 nt, Artificial Sequence
  Description of Artificial Sequence: Synthetic oligonucleotide
  Sense strand starting at position 249 of SEQ ID NO: 1879878
gcccaaagaugguugugaa

SEQ ID NO: 1937907 - RNA, 19 nt, Artificial Sequence
  Description of Artificial Sequence: Synthetic oligonucleotide
  Antisense strand to SEQ ID NO: 1937906
uucacaaccaucuuugggc

SEQ ID NO: 1937908 - RNA, 19 nt, Artificial Sequence
  Description of Artificial Sequence: Synthetic oligonucleotide
  Sense strand starting at position 250 of SEQ ID NO: 1879878
cccaaagaugguugugaaa

SEQ ID NO: 1937909 - RNA, 19 nt, Artificial Sequence
  Description of Artificial Sequence: Synthetic oligonucleotide
  Antisense strand to SEQ ID NO: 1937908
uuucacaaccaucuuuggg

SEQ ID NO: 1937910 - RNA, 19 nt, Artificial Sequence
  Description of Artificial Sequence: Synthetic oligonucleotide
  Sense strand starting at position 261 of SEQ ID NO: 1879878
uugugaaaccuuggccaau

SEQ ID NO: 1937911 - RNA, 19 nt, Artificial Sequence
  Description of Artificial Sequence: Synthetic oligonucleotide
  Antisense strand to SEQ ID NO: 1937910
auuggccaagguuucacaa

SEQ ID NO: 1937912 - RNA, 19 nt, Artificial Sequence
  Description of Artificial Sequence: Synthetic oligonucleotide
  Sense strand starting at position 405 of SEQ ID NO: 1879878
gggaauauggaguggcaga

SEQ ID NO: 1937913 - RNA, 19 nt, Artificial Sequence
  Description of Artificial Sequence: Synthetic oligonucleotide
  Antisense strand to SEQ ID NO: 1937912
ucugccacuccauauuccc

SEQ ID NO: 1937914 - RNA, 19 nt, Artificial Sequence
  Description of Artificial Sequence: Synthetic oligonucleotide
  Sense strand starting at position 406 of SEQ ID NO: 1879878
ggaauauggaguggcagau

SEQ ID NO: 1937915 - RNA, 19 nt, Artificial Sequence
  Description of Artificial Sequence: Synthetic oligonucleotide
  Antisense strand to SEQ ID NO: 1937914
aucugccacuccauauucc

SEQ ID NO: 1937916 - RNA, 19 nt, Artificial Sequence
  Description of Artificial Sequence: Synthetic oligonucleotide
  Sense strand starting at position 415 of SEQ ID NO: 1879878
aguggcagauucucucaaa

SEQ ID NO: 1937917 - RNA, 19 nt, Artificial Sequence
  Description of Artificial Sequence: Synthetic oligonucleotide
  Antisense strand to SEQ ID NO: 1937916
uuugagagaaucugccacu

SEQ ID NO: 1937918 - RNA, 19 nt, Artificial Sequence
  Description of Artificial Sequence: Synthetic oligonucleotide
  Sense strand starting at position 416 of SEQ ID NO: 1879878
guggcagauucucucaaac

SEQ ID NO: 1937919 - RNA, 19 nt, Artificial Sequence
  Description of Artificial Sequence: Synthetic oligonucleotide
  Antisense strand to SEQ ID NO: 1937918
guuugagagaaucugccac

SEQ ID NO: 1937920 - RNA, 19 nt, Artificial Sequence
  Description of Artificial Sequence: Synthetic oligonucleotide
  Sense strand starting at position 566 of SEQ ID NO: 1879878
uugacuugacuguauaguu

SEQ ID NO: 1937921 - RNA, 19 nt, Artificial Sequence
  Description of Artificial Sequence: Synthetic oligonucleotide
  Antisense strand to SEQ ID NO: 1937920
aacuauacagucaagucaa

SEQ ID NO: 1937922 - RNA, 19 nt, Artificial Sequence
  Description of Artificial Sequence: Synthetic oligonucleotide
  Sense strand starting at position 677 of SEQ ID NO: 1879878
acugaugucccaggagagu

SEQ ID NO: 1937923 - RNA, 19 nt, Artificial Sequence
  Description of Artificial Sequence: Synthetic oligonucleotide
  Antisense strand to SEQ ID NO: 1937922
acucuccugggacaucagu

SEQ ID NO: 1937924 - RNA, 19 nt, Artificial Sequence
  Description of Artificial Sequence: Synthetic oligonucleotide
  Sense strand starting at position 825 of SEQ ID NO: 1879878
aggacuuaucuuuguauag

SEQ ID NO: 1937925 - RNA, 19 nt, Artificial Sequence
  Description of Artificial Sequence: Synthetic oligonucleotide
  Antisense strand to SEQ ID NO: 1937924
cuauacaaagauaaguccu

SEQ ID NO: 1937926 - RNA, 19 nt, Artificial Sequence
  Description of Artificial Sequence: Synthetic oligonucleotide
  Sense strand starting at position 826 of SEQ ID NO: 1879878
ggacuuaucuuuguauagg

SEQ ID NO: 1937927 - RNA, 19 nt, Artificial Sequence
  Description of Artificial Sequence: Synthetic oligonucleotide
  Antisense strand to SEQ ID NO: 1937926
ccuauacaaagauaagucc

SEQ ID NO: 1937928 - RNA, 19 nt, Artificial Sequence
  Description of Artificial Sequence: Synthetic oligonucleotide
  Sense strand starting at position 829 of SEQ ID NO: 1879878
cuuaucuuuguauaggaua

SEQ ID NO: 1937929 - RNA, 19 nt, Artificial Sequence
  Description of Artificial Sequence: Synthetic oligonucleotide
  Antisense strand to SEQ ID NO: 1937928
uauccuauacaaagauaag

SEQ ID NO: 1937930 - RNA, 19 nt, Artificial Sequence
  Description of Artificial Sequence: Synthetic oligonucleotide
  Sense strand starting at position 874 of SEQ ID NO: 1879878
guauaauaguguuuccaga

SEQ ID NO: 1937931 - RNA, 19 nt, Artificial Sequence
  Description of Artificial Sequence: Synthetic oligonucleotide
  Antisense strand to SEQ ID NO: 1937930
ucuggaaacacuauuauac

SEQ ID NO: 1937932 - RNA, 19 nt, Artificial Sequence
  Description of Artificial Sequence: Synthetic oligonucleotide
  Sense strand starting at position 876 of SEQ ID NO: 1879878
auaauaguguuuccagacu

SEQ ID NO: 1937933 - RNA, 19 nt, Artificial Sequence
  Description of Artificial Sequence: Synthetic oligonucleotide
  Antisense strand to SEQ ID NO: 1937932
agucuggaaacacuauuau

SEQ ID NO: 1937934 - RNA, 19 nt, Artificial Sequence
  Description of Artificial Sequence: Synthetic oligonucleotide
  Sense strand starting at position 2049 of SEQ ID NO: 1879878
acauuuggcugcuugugua

SEQ ID NO: 1937935 - RNA, 19 nt, Artificial Sequence
  Description of Artificial Sequence: Synthetic oligonucleotide
  Antisense strand to SEQ ID NO: 1937934
uacacaagcagccaaaugu

SEQ ID NO: 1937936 - RNA, 19 nt, Artificial Sequence
  Description of Artificial Sequence: Synthetic oligonucleotide
  Sense strand starting at position 2110 of SEQ ID NO: 1879878
acugcagagccugaaacau

SEQ ID NO: 1937937 - RNA, 19 nt, Artificial Sequence
  Description of Artificial Sequence: Synthetic oligonucleotide
  Antisense strand to SEQ ID NO: 1937936
auguuucaggcucugcagu

SEQ ID NO: 1937938 - RNA, 19 nt, Artificial Sequence
  Description of Artificial Sequence: Synthetic oligonucleotide
  Sense strand starting at position 2145 of SEQ ID NO: 1879878
ccugguggcaguuagaauu

SEQ ID NO: 1937939 - RNA, 19 nt, Artificial Sequence
  Description of Artificial Sequence: Synthetic oligonucleotide
  Antisense strand to SEQ ID NO: 1937938
aauucuaacugccaccagg

SEQ ID NO: 1937940 - RNA, 19 nt, Artificial Sequence
  Description of Artificial Sequence: Synthetic oligonucleotide
  Sense strand starting at position 2172 of SEQ ID NO: 1879878
cucuguagauacuuucuga

SEQ ID NO: 1937941 - RNA, 19 nt, Artificial Sequence
  Description of Artificial Sequence: Synthetic oligonucleotide
  Antisense strand to SEQ ID NO: 1937940
ucagaaaguaucuacagag

SEQ ID NO: 1937942 - RNA, 19 nt, Artificial Sequence
  Description of Artificial Sequence: Synthetic oligonucleotide
  Sense strand starting at position 2175 of SEQ ID NO: 1879878
uguagauacuuucugacca

SEQ ID NO: 1937943 - RNA, 19 nt, Artificial Sequence
  Description of Artificial Sequence: Synthetic oligonucleotide
  Antisense strand to SEQ ID NO: 1937942
uggucagaaaguaucuaca

SEQ ID NO: 1937944 - RNA, 19 nt, Artificial Sequence
  Description of Artificial Sequence: Synthetic oligonucleotide
  Sense strand starting at position 2380 of SEQ ID NO: 1879878
cuacuauuccuuugacagu

SEQ ID NO: 1937945 - RNA, 19 nt, Artificial Sequence
  Description of Artificial Sequence: Synthetic oligonucleotide
  Antisense strand to SEQ ID NO: 1937944
acugucaaaggaauaguag

SEQ ID NO: 1937946 - RNA, 19 nt, Artificial Sequence
  Description of Artificial Sequence: Synthetic oligonucleotide
  Sense strand starting at position 2445 of SEQ ID NO: 1879878
aaagcugucccauaggguu

SEQ ID NO: 1937947 - RNA, 19 nt, Artificial Sequence
  Description of Artificial Sequence: Synthetic oligonucleotide
  Antisense strand to SEQ ID NO: 1937946
aacccuaugggacagcuuu

SEQ ID NO: 1937948 - RNA, 19 nt, Artificial Sequence
  Description of Artificial Sequence: Synthetic oligonucleotide
  Sense strand starting at position 2531 of SEQ ID NO: 1879878
uuauuuauaugaccguagu

SEQ ID NO: 1937949 - RNA, 19 nt, Artificial Sequence
  Description of Artificial Sequence: Synthetic oligonucleotide
  Antisense strand to SEQ ID NO: 1937948
acuacggucauauaaauaa

SEQ ID NO: 1937950 - RNA, 19 nt, Artificial Sequence
  Description of Artificial Sequence: Synthetic oligonucleotide
  Sense strand starting at position 2532 of SEQ ID NO: 1879878
uauuuauaugaccguaguu

SEQ ID NO: 1937951 - RNA, 19 nt, Artificial Sequence
  Description of Artificial Sequence: Synthetic oligonucleotide
  Antisense strand to SEQ ID NO: 1937950
aacuacggucauauaaaua

SEQ ID NO: 1937952 - RNA, 19 nt, Artificial Sequence
  Description of Artificial Sequence: Synthetic oligonucleotide
  Sense strand starting at position 2692 of SEQ ID NO: 1879878
aguauuauuggcuguauuu

SEQ ID NO: 1937953 - RNA, 19 nt, Artificial Sequence
  Description of Artificial Sequence: Synthetic oligonucleotide
  Antisense strand to SEQ ID NO: 1937952
aaauacagccaauaauacu

SEQ ID NO: 1937954 - RNA, 19 nt, Artificial Sequence
  Description of Artificial Sequence: Synthetic oligonucleotide
  Sense strand starting at position 3087 of SEQ ID NO: 1879878
acugguuaauucuuugaca

SEQ ID NO: 1937955 - RNA, 19 nt, Artificial Sequence
  Description of Artificial Sequence: Synthetic oligonucleotide
  Antisense strand to SEQ ID NO: 1937954
ugucaaagaauuaaccagu

SEQ ID NO: 1937956 - RNA, 19 nt, Artificial Sequence
  Description of Artificial Sequence: Synthetic oligonucleotide
  Sense strand starting at position 3088 of SEQ ID NO: 1879878
cugguuaauucuuugacau

SEQ ID NO: 1937957 - RNA, 19 nt, Artificial Sequence
  Description of Artificial Sequence: Synthetic oligonucleotide
  Antisense strand to SEQ ID NO: 1937956
augucaaagaauuaaccag

SEQ ID NO: 1937958 - RNA, 19 nt, Artificial Sequence
  Description of Artificial Sequence: Synthetic oligonucleotide
  Sense strand starting at position 3089 of SEQ ID NO: 1879878
ugguuaauucuuugacaua

SEQ ID NO: 1937959 - RNA, 19 nt, Artificial Sequence
  Description of Artificial Sequence: Synthetic oligonucleotide
  Antisense strand to SEQ ID NO: 1937958
uaugucaaagaauuaacca

SEQ ID NO: 1937960 - RNA, 19 nt, Artificial Sequence
  Description of Artificial Sequence: Synthetic oligonucleotide
  Sense strand starting at position 3130 of SEQ ID NO: 1879878
ggauguuuagcacauccua

SEQ ID NO: 1937961 - RNA, 19 nt, Artificial Sequence
  Description of Artificial Sequence: Synthetic oligonucleotide
  Antisense strand to SEQ ID NO: 1937960
uaggaugugcuaaacaucc

SEQ ID NO: 1937962 - RNA, 19 nt, Artificial Sequence
  Description of Artificial Sequence: Synthetic oligonucleotide
  Sense strand starting at position 3220 of SEQ ID NO: 1879878
ugacaagugccacgauaaa

SEQ ID NO: 1937963 - RNA, 19 nt, Artificial Sequence
  Description of Artificial Sequence: Synthetic oligonucleotide
  Antisense strand to SEQ ID NO: 1937962
uuuaucguggcacuuguca

SEQ ID NO: 1937964 - RNA, 19 nt, Artificial Sequence
  Description of Artificial Sequence: Synthetic oligonucleotide
  Sense strand starting at position 3441 of SEQ ID NO: 1879878
gagauuguagcucgagaua

SEQ ID NO: 1937965 - RNA, 19 nt, Artificial Sequence
  Description of Artificial Sequence: Synthetic oligonucleotide
  Antisense strand to SEQ ID NO: 1937964
uaucucgagcuacaaucuc

SEQ ID NO: 1937966 - RNA, 19 nt, Artificial Sequence
  Description of Artificial Sequence: Synthetic oligonucleotide
  Sense strand starting at position 3452 of SEQ ID NO: 1879878
ucgagauagcauuaugcac

SEQ ID NO: 1937967 - RNA, 19 nt, Artificial Sequence
  Description of Artificial Sequence: Synthetic oligonucleotide
  Antisense strand to SEQ ID NO: 1937966
gugcauaaugcuaucucga

SEQ ID NO: 1937968 - RNA, 19 nt, Artificial Sequence
  Description of Artificial Sequence: Synthetic oligonucleotide
  Sense strand starting at position 3514 of SEQ ID NO: 1879878
uuugguccaaagugaagaa

SEQ ID NO: 1937969 - RNA, 19 nt, Artificial Sequence
  Description of Artificial Sequence: Synthetic oligonucleotide
  Antisense strand to SEQ ID NO: 1937968
uucuucacuuuggaccaaa

SEQ ID NO: 1937970 - RNA, 19 nt, Artificial Sequence
  Description of Artificial Sequence: Synthetic oligonucleotide
  Sense strand starting at position 3651 of SEQ ID NO: 1879878
augagauaauuguuuguug

SEQ ID NO: 1937971 - RNA, 19 nt, Artificial Sequence
  Description of Artificial Sequence: Synthetic oligonucleotide
  Antisense strand to SEQ ID NO: 1937970
caacaaacaauuaucucau

SEQ ID NO: 1937972 - RNA, 19 nt, Artificial Sequence
  Description of Artificial Sequence: Synthetic oligonucleotide
  Sense strand starting at position 3680 of SEQ ID NO: 1879878
ucuugugcacucuaagaug

SEQ ID NO: 1937973 - RNA, 19 nt, Artificial Sequence
  Description of Artificial Sequence: Synthetic oligonucleotide
  Antisense strand to SEQ ID NO: 1937972
caucuuagagugcacaaga

SEQ ID NO: 1937974 - RNA, 19 nt, Artificial Sequence
  Description of Artificial Sequence: Synthetic oligonucleotide
  Sense strand starting at position 3695 of SEQ ID NO: 1879878
gauguuuagcagcauccaa

SEQ ID NO: 1937975 - RNA, 19 nt, Artificial Sequence
  Description of Artificial Sequence: Synthetic oligonucleotide
  Antisense strand to SEQ ID NO: 1937974
uuggaugcugcuaaacauc

SEQ ID NO: 1937976 - RNA, 19 nt, Artificial Sequence
  Description of Artificial Sequence: Synthetic oligonucleotide
  Sense strand starting at position 3746 of SEQ ID NO: 1879878
aguuguuaccaucacaaug

SEQ ID NO: 1937977 - RNA, 19 nt, Artificial Sequence
  Description of Artificial Sequence: Synthetic oligonucleotide
  Antisense strand to SEQ ID NO: 1937976
cauugugaugguaacaacu

SEQ ID NO: 1937978 - RNA, 19 nt, Artificial Sequence
  Description of Artificial Sequence: Synthetic oligonucleotide
  Sense strand starting at position 3784 of SEQ ID NO: 1879878
gucuccucucuuuacugau

SEQ ID NO: 1937979 - RNA, 19 nt, Artificial Sequence
  Description of Artificial Sequence: Synthetic oligonucleotide
  Antisense strand to SEQ ID NO: 1937978
aucaguaaagagaggagac

SEQ ID NO: 1937980 - RNA, 19 nt, Artificial Sequence
  Description of Artificial Sequence: Synthetic oligonucleotide
  Sense strand starting at position 3791 of SEQ ID NO: 1879878
cucuuuacugauugucaga

SEQ ID NO: 1937981 - RNA, 19 nt, Artificial Sequence
  Description of Artificial Sequence: Synthetic oligonucleotide
  Antisense strand to SEQ ID NO: 1937980
ucugacaaucaguaaagag

SEQ ID NO: 1937982 - RNA, 19 nt, Artificial Sequence
  Description of Artificial Sequence: Synthetic oligonucleotide
  Sense strand starting at position 3793 of SEQ ID NO: 1879878
cuuuacugauugucagaaa

SEQ ID NO: 1937983 - RNA, 19 nt, Artificial Sequence
  Description of Artificial Sequence: Synthetic oligonucleotide
  Antisense strand to SEQ ID NO: 1937982
uuucugacaaucaguaaag

SEQ ID NO: 1937984 - RNA, 19 nt, Artificial Sequence
  Description of Artificial Sequence: Synthetic oligonucleotide
  Sense strand starting at position 82 of SEQ ID NO: 1879879
ggcaguauuugucaccuga

SEQ ID NO: 1937985 - RNA, 19 nt, Artificial Sequence
  Description of Artificial Sequence: Synthetic oligonucleotide
  Antisense strand to SEQ ID NO: 1937984
ucaggugacaaauacugcc

SEQ ID NO: 1937986 - RNA, 19 nt, Artificial Sequence
  Description of Artificial Sequence: Synthetic oligonucleotide
  Sense strand starting at position 84 of SEQ ID NO: 1879879
caguauuugucaccugagu

SEQ ID NO: 1937987 - RNA, 19 nt, Artificial Sequence
  Description of Artificial Sequence: Synthetic oligonucleotide
  Antisense strand to SEQ ID NO: 1937986
acucaggugacaaauacug

SEQ ID NO: 1937988 - RNA, 19 nt, Artificial Sequence
  Description of Artificial Sequence: Synthetic oligonucleotide
  Sense strand starting at position 105 of SEQ ID NO: 1879879
agggcaucaguaggagaua

SEQ ID NO: 1937989 - RNA, 19 nt, Artificial Sequence
  Description of Artificial Sequence: Synthetic oligonucleotide
  Antisense strand to SEQ ID NO: 1937988
uaucuccuacugaugcccu

SEQ ID NO: 1937990 - RNA, 19 nt, Artificial Sequence
  Description of Artificial Sequence: Synthetic oligonucleotide
  Sense strand starting at position 179 of SEQ ID NO: 1879879
caggcuuuggguugagacu

SEQ ID NO: 1937991 - RNA, 19 nt, Artificial Sequence
  Description of Artificial Sequence: Synthetic oligonucleotide
  Antisense strand to SEQ ID NO: 1937990
agucucaacccaaagccug

SEQ ID NO: 1937992 - RNA, 19 nt, Artificial Sequence
  Description of Artificial Sequence: Synthetic oligonucleotide
  Sense strand starting at position 185 of SEQ ID NO: 1879879
uuggguugagacuguguua

SEQ ID NO: 1937993 - RNA, 19 nt, Artificial Sequence
  Description of Artificial Sequence: Synthetic oligonucleotide
  Antisense strand to SEQ ID NO: 1937992
uaacacagucucaacccaa

SEQ ID NO: 1937994 - RNA, 19 nt, Artificial Sequence
  Description of Artificial Sequence: Synthetic oligonucleotide
  Sense strand starting at position 188 of SEQ ID NO: 1879879
gguugagacuguguuaaca

SEQ ID NO: 1937995 - RNA, 19 nt, Artificial Sequence
  Description of Artificial Sequence: Synthetic oligonucleotide
  Antisense strand to SEQ ID NO: 1937994
uguuaacacagucucaacc

SEQ ID NO: 1937996 - RNA, 19 nt, Artificial Sequence
  Description of Artificial Sequence: Synthetic oligonucleotide
  Sense strand starting at position 190 of SEQ ID NO: 1879879
uugagacuguguuaacaga

SEQ ID NO: 1937997 - RNA, 19 nt, Artificial Sequence
  Description of Artificial Sequence: Synthetic oligonucleotide
  Antisense strand to SEQ ID NO: 1937996
ucuguuaacacagucucaa

SEQ ID NO: 1937998 - RNA, 19 nt, Artificial Sequence
  Description of Artificial Sequence: Synthetic oligonucleotide
  Sense strand starting at position 197 of SEQ ID NO: 1879879
uguguuaacagauguucua

SEQ ID NO: 1937999 - RNA, 19 nt, Artificial Sequence
  Description of Artificial Sequence: Synthetic oligonucleotide
  Antisense strand to SEQ ID NO: 1937998
uagaacaucuguuaacaca

SEQ ID NO: 1938000 - RNA, 19 nt, Artificial Sequence
  Description of Artificial Sequence: Synthetic oligonucleotide
  Sense strand starting at position 1340 of SEQ ID NO: 1879879
ccagcacugucaucuagau

SEQ ID NO: 1938001 - RNA, 19 nt, Artificial Sequence
  Description of Artificial Sequence: Synthetic oligonucleotide
  Antisense strand to SEQ ID NO: 1938000
aucuagaugacagugcugg

SEQ ID NO: 1938002 - RNA, 19 nt, Artificial Sequence
  Description of Artificial Sequence: Synthetic oligonucleotide
  Sense strand starting at position 1408 of SEQ ID NO: 1879879
ucuuguauccuuugaggag

SEQ ID NO: 1938003 - RNA, 19 nt, Artificial Sequence
  Description of Artificial Sequence: Synthetic oligonucleotide
  Antisense strand to SEQ ID NO: 1938002
cuccucaaaggauacaaga

SEQ ID NO: 1938004 - RNA, 19 nt, Artificial Sequence
  Description of Artificial Sequence: Synthetic oligonucleotide
  Sense strand starting at position 1409 of SEQ ID NO: 1879879
cuuguauccuuugaggaga

SEQ ID NO: 1938005 - RNA, 19 nt, Artificial Sequence
  Description of Artificial Sequence: Synthetic oligonucleotide
  Antisense strand to SEQ ID NO: 1938004
ucuccucaaaggauacaag

SEQ ID NO: 1938006 - RNA, 19 nt, Artificial Sequence
  Description of Artificial Sequence: Synthetic oligonucleotide
  Sense strand starting at position 1414 of SEQ ID NO: 1879879
auccuuugaggagacguua

SEQ ID NO: 1938007 - RNA, 19 nt, Artificial Sequence
  Description of Artificial Sequence: Synthetic oligonucleotide
  Antisense strand to SEQ ID NO: 1938006
uaacgucuccucaaaggau

SEQ ID NO: 1938008 - RNA, 19 nt, Artificial Sequence
  Description of Artificial Sequence: Synthetic oligonucleotide
  Sense strand starting at position 1576 of SEQ ID NO: 1879879
aggugaaguuugagggcaa

SEQ ID NO: 1938009 - RNA, 19 nt, Artificial Sequence
  Description of Artificial Sequence: Synthetic oligonucleotide
  Antisense strand to SEQ ID NO: 1938008
uugcccucaaacuucaccu

SEQ ID NO: 1938010 - RNA, 19 nt, Artificial Sequence
  Description of Artificial Sequence: Synthetic oligonucleotide
  Sense strand starting at position 1590 of SEQ ID NO: 1879879
ggcaacaucucgcuuuauu

SEQ ID NO: 1938011 - RNA, 19 nt, Artificial Sequence
  Description of Artificial Sequence: Synthetic oligonucleotide
  Antisense strand to SEQ ID NO: 1938010
aauaaagcgagauguugcc

SEQ ID NO: 1938012 - RNA, 19 nt, Artificial Sequence
  Description of Artificial Sequence: Synthetic oligonucleotide
  Sense strand starting at position 1650 of SEQ ID NO: 1879879
gagacagagucuuaacacu

SEQ ID NO: 1938013 - RNA, 19 nt, Artificial Sequence
  Description of Artificial Sequence: Synthetic oligonucleotide
  Antisense strand to SEQ ID NO: 1938012
aguguuaagacucugucuc

SEQ ID NO: 1938014 - RNA, 19 nt, Artificial Sequence
  Description of Artificial Sequence: Synthetic oligonucleotide
  Sense strand starting at position 2072 of SEQ ID NO: 1879879
agguaaaguugugccauuu

SEQ ID NO: 1938015 - RNA, 19 nt, Artificial Sequence
  Description of Artificial Sequence: Synthetic oligonucleotide
  Antisense strand to SEQ ID NO: 1938014
aaauggcacaacuuuaccu

SEQ ID NO: 1938016 - RNA, 19 nt, Artificial Sequence
  Description of Artificial Sequence: Synthetic oligonucleotide
  Sense strand starting at position 2421 of SEQ ID NO: 1879879
ugcuuaccugaguggaaga

SEQ ID NO: 1938017 - RNA, 19 nt, Artificial Sequence
  Description of Artificial Sequence: Synthetic oligonucleotide
  Antisense strand to SEQ ID NO: 1938016
ucuuccacucagguaagca

SEQ ID NO: 1938018 - RNA, 19 nt, Artificial Sequence
  Description of Artificial Sequence: Synthetic oligonucleotide
  Sense strand starting at position 2453 of SEQ ID NO: 1879879
uagccuagccgguuguaau

SEQ ID NO: 1938019 - RNA, 19 nt, Artificial Sequence
  Description of Artificial Sequence: Synthetic oligonucleotide
  Antisense strand to SEQ ID NO: 1938018
auuacaaccggcuaggcua

SEQ ID NO: 1938020 - RNA, 19 nt, Artificial Sequence
  Description of Artificial Sequence: Synthetic oligonucleotide
  Sense strand starting at position 2454 of SEQ ID NO: 1879879
agccuagccgguuguaauc

SEQ ID NO: 1938021 - RNA, 19 nt, Artificial Sequence
  Description of Artificial Sequence: Synthetic oligonucleotide
  Antisense strand to SEQ ID NO: 1938020
gauuacaaccggcuaggcu

SEQ ID NO: 1938022 - RNA, 19 nt, Artificial Sequence
  Description of Artificial Sequence: Synthetic oligonucleotide
  Sense strand starting at position 2524 of SEQ ID NO: 1879879
guauuugccaccugcggaa

SEQ ID NO: 1938023 - RNA, 19 nt, Artificial Sequence
  Description of Artificial Sequence: Synthetic oligonucleotide
  Antisense strand to SEQ ID NO: 1938022
uuccgcagguggcaaauac

SEQ ID NO: 1938024 - RNA, 19 nt, Artificial Sequence
  Description of Artificial Sequence: Synthetic oligonucleotide
  Sense strand starting at position 2667 of SEQ ID NO: 1879879
ucaggaagguccucacaaa

SEQ ID NO: 1938025 - RNA, 19 nt, Artificial Sequence
  Description of Artificial Sequence: Synthetic oligonucleotide
  Antisense strand to SEQ ID NO: 1938024
uuugugaggaccuuccuga

SEQ ID NO: 1938026 - RNA, 19 nt, Artificial Sequence
  Description of Artificial Sequence: Synthetic oligonucleotide
  Sense strand starting at position 2685 of SEQ ID NO: 1879879
aaggaucaaugcggacaaa

SEQ ID NO: 1938027 - RNA, 19 nt, Artificial Sequence
  Description of Artificial Sequence: Synthetic oligonucleotide
  Antisense strand to SEQ ID NO: 1938026
uuuguccgcauugauccuu

SEQ ID NO: 1938028 - RNA, 19 nt, Artificial Sequence
  Description of Artificial Sequence: Synthetic oligonucleotide
  Sense strand starting at position 2708 of SEQ ID NO: 1879879
agcugaaugucaucgccau

SEQ ID NO: 1938029 - RNA, 19 nt, Artificial Sequence
  Description of Artificial Sequence: Synthetic oligonucleotide
  Antisense strand to SEQ ID NO: 1938028
auggcgaugacauucagcu

SEQ ID NO: 1938030 - RNA, 19 nt, Artificial Sequence
  Description of Artificial Sequence: Synthetic oligonucleotide
  Sense strand starting at position 2709 of SEQ ID NO: 1879879
gcugaaugucaucgccauc

SEQ ID NO: 1938031 - RNA, 19 nt, Artificial Sequence
  Description of Artificial Sequence: Synthetic oligonucleotide
  Antisense strand to SEQ ID NO: 1938030
gauggcgaugacauucagc

SEQ ID NO: 1938032 - RNA, 19 nt, Artificial Sequence
  Description of Artificial Sequence: Synthetic oligonucleotide
  Sense strand starting at position 2712 of SEQ ID NO: 1879879
gaaugucaucgccaucaaa

SEQ ID NO: 1938033 - RNA, 19 nt, Artificial Sequence
  Description of Artificial Sequence: Synthetic oligonucleotide
  Antisense strand to SEQ ID NO: 1938032
uuugauggcgaugacauuc

SEQ ID NO: 1938034 - RNA, 19 nt, Artificial Sequence
  Description of Artificial Sequence: Synthetic oligonucleotide
  Sense strand starting at position 2757 of SEQ ID NO: 1879879
gcuggaucacgaugcuaua

SEQ ID NO: 1938035 - RNA, 19 nt, Artificial Sequence
  Description of Artificial Sequence: Synthetic oligonucleotide
  Antisense strand to SEQ ID NO: 1938034
uauagcaucgugauccagc

SEQ ID NO: 1938036 - RNA, 19 nt, Artificial Sequence
  Description of Artificial Sequence: Synthetic oligonucleotide
  Sense strand starting at position 2768 of SEQ ID NO: 1879879
augcuauacuccugagaua

SEQ ID NO: 1938037 - RNA, 19 nt, Artificial Sequence
  Description of Artificial Sequence: Synthetic oligonucleotide
  Antisense strand to SEQ ID NO: 1938036
uaucucaggaguauagcau

SEQ ID NO: 1938038 - RNA, 19 nt, Artificial Sequence
  Description of Artificial Sequence: Synthetic oligonucleotide
  Sense strand starting at position 2769 of SEQ ID NO: 1879879
ugcuauacuccugagauaa

SEQ ID NO: 1938039 - RNA, 19 nt, Artificial Sequence
  Description of Artificial Sequence: Synthetic oligonucleotide
  Antisense strand to SEQ ID NO: 1938038
uuaucucaggaguauagca

SEQ ID NO: 1938040 - RNA, 19 nt, Artificial Sequence
  Description of Artificial Sequence: Synthetic oligonucleotide
  Sense strand starting at position 3107 of SEQ ID NO: 1879879
cgcuuucucuugccuaaca

SEQ ID NO: 1938041 - RNA, 19 nt, Artificial Sequence
  Description of Artificial Sequence: Synthetic oligonucleotide
  Antisense strand to SEQ ID NO: 1938040
uguuaggcaagagaaagcg

SEQ ID NO: 1938042 - RNA, 19 nt, Artificial Sequence
  Description of Artificial Sequence: Synthetic oligonucleotide
  Sense strand starting at position 3171 of SEQ ID NO: 1879879
ggcagaguuaaucagugaa

SEQ ID NO: 1938043 - RNA, 19 nt, Artificial Sequence
  Description of Artificial Sequence: Synthetic oligonucleotide
  Antisense strand to SEQ ID NO: 1938042
uucacugauuaacucugcc

SEQ ID NO: 1938044 - RNA, 19 nt, Artificial Sequence
  Description of Artificial Sequence: Synthetic oligonucleotide
  Sense strand starting at position 3240 of SEQ ID NO: 1879879
aagugcuccuauuaggaca

SEQ ID NO: 1938045 - RNA, 19 nt, Artificial Sequence
  Description of Artificial Sequence: Synthetic oligonucleotide
  Antisense strand to SEQ ID NO: 1938044
uguccuaauaggagcacuu

SEQ ID NO: 1938046 - RNA, 19 nt, Artificial Sequence
  Description of Artificial Sequence: Synthetic oligonucleotide
  Sense strand starting at position 3245 of SEQ ID NO: 1879879
cuccuauuaggacaucagu

SEQ ID NO: 1938047 - RNA, 19 nt, Artificial Sequence
  Description of Artificial Sequence: Synthetic oligonucleotide
  Antisense strand to SEQ ID NO: 1938046
acugauguccuaauaggag

SEQ ID NO: 1938048 - RNA, 19 nt, Artificial Sequence
  Description of Artificial Sequence: Synthetic oligonucleotide
  Sense strand starting at position 3295 of SEQ ID NO: 1879879
ugcuuagguguagggauua

SEQ ID NO: 1938049 - RNA, 19 nt, Artificial Sequence
  Description of Artificial Sequence: Synthetic oligonucleotide
  Antisense strand to SEQ ID NO: 1938048
uaaucccuacaccuaagca

SEQ ID NO: 1938050 - RNA, 19 nt, Artificial Sequence
  Description of Artificial Sequence: Synthetic oligonucleotide
  Sense strand starting at position 3433 of SEQ ID NO: 1879879
ccacuaggucagugacagu

SEQ ID NO: 1938051 - RNA, 19 nt, Artificial Sequence
  Description of Artificial Sequence: Synthetic oligonucleotide
  Antisense strand to SEQ ID NO: 1938050
acugucacugaccuagugg

SEQ ID NO: 1938052 - RNA, 19 nt, Artificial Sequence
  Description of Artificial Sequence: Synthetic oligonucleotide
  Sense strand starting at position 3560 of SEQ ID NO: 1879879
auaguugccugucugggaa

SEQ ID NO: 1938053 - RNA, 19 nt, Artificial Sequence
  Description of Artificial Sequence: Synthetic oligonucleotide
  Antisense strand to SEQ ID NO: 1938052
uucccagacaggcaacuau

SEQ ID NO: 1938054 - RNA, 19 nt, Artificial Sequence
  Description of Artificial Sequence: Synthetic oligonucleotide
  Sense strand starting at position 3677 of SEQ ID NO: 1879879
uagcgaaguucugccugua

SEQ ID NO: 1938055 - RNA, 19 nt, Artificial Sequence
  Description of Artificial Sequence: Synthetic oligonucleotide
  Antisense strand to SEQ ID NO: 1938054
uacaggcagaacuucgcua

SEQ ID NO: 1938056 - RNA, 19 nt, Artificial Sequence
  Description of Artificial Sequence: Synthetic oligonucleotide
  Sense strand starting at position 3761 of SEQ ID NO: 1879879
guugcuugucaucugcaca

SEQ ID NO: 1938057 - RNA, 19 nt, Artificial Sequence
  Description of Artificial Sequence: Synthetic oligonucleotide
  Antisense strand to SEQ ID NO: 1938056
ugugcagaugacaagcaac

SEQ ID NO: 1938058 - RNA, 19 nt, Artificial Sequence
  Description of Artificial Sequence: Synthetic oligonucleotide
  Sense strand starting at position 3764 of SEQ ID NO: 1879879
gcuugucaucugcacaaca

SEQ ID NO: 1938059 - RNA, 19 nt, Artificial Sequence
  Description of Artificial Sequence: Synthetic oligonucleotide
  Antisense strand to SEQ ID NO: 1938058
uguugugcagaugacaagc

SEQ ID NO: 1938060 - RNA, 19 nt, Artificial Sequence
  Description of Artificial Sequence: Synthetic oligonucleotide
  Sense strand starting at position 3879 of SEQ ID NO: 1879879
gcaauaaagcccugaaaua

SEQ ID NO: 1938061 - RNA, 19 nt, Artificial Sequence
  Description of Artificial Sequence: Synthetic oligonucleotide
  Antisense strand to SEQ ID NO: 1938060
uauuucagggcuuuauugc

SEQ ID NO: 1938062 - RNA, 19 nt, Artificial Sequence
  Description of Artificial Sequence: Synthetic oligonucleotide
  Sense strand starting at position 3890 of SEQ ID NO: 1879879
cugaaauaaucugacagca

SEQ ID NO: 1938063 - RNA, 19 nt, Artificial Sequence
  Description of Artificial Sequence: Synthetic oligonucleotide
  Antisense strand to SEQ ID NO: 1938062
ugcugucagauuauuucag

SEQ ID NO: 1938064 - RNA, 19 nt, Artificial Sequence
  Description of Artificial Sequence: Synthetic oligonucleotide
  Sense strand starting at position 195 of SEQ ID NO: 1879880
uuacuaaguagucagguua

SEQ ID NO: 1938065 - RNA, 19 nt, Artificial Sequence
  Description of Artificial Sequence: Synthetic oligonucleotide
  Antisense strand to SEQ ID NO: 1938064
uaaccugacuacuuaguaa

SEQ ID NO: 1938066 - RNA, 19 nt, Artificial Sequence
  Description of Artificial Sequence: Synthetic oligonucleotide
  Sense strand starting at position 339 of SEQ ID NO: 1879880
uguacaguucuccaguaca

SEQ ID NO: 1938067 - RNA, 19 nt, Artificial Sequence
  Description of Artificial Sequence: Synthetic oligonucleotide
  Antisense strand to SEQ ID NO: 1938066
uguacuggagaacuguaca

SEQ ID NO: 1938068 - RNA, 19 nt, Artificial Sequence
  Description of Artificial Sequence: Synthetic oligonucleotide
  Sense strand starting at position 390 of SEQ ID NO: 1879880
ucuuaaaggccguacauua

SEQ ID NO: 1938069 - RNA, 19 nt, Artificial Sequence
  Description of Artificial Sequence: Synthetic oligonucleotide
  Antisense strand to SEQ ID NO: 1938068
uaauguacggccuuuaaga

SEQ ID NO: 1938070 - RNA, 19 nt, Artificial Sequence
  Description of Artificial Sequence: Synthetic oligonucleotide
  Sense strand starting at position 421 of SEQ ID NO: 1879880
gauccagccgcuuacauuu

SEQ ID NO: 1938071 - RNA, 19 nt, Artificial Sequence
  Description of Artificial Sequence: Synthetic oligonucleotide
  Antisense strand to SEQ ID NO: 1938070
aaauguaagcggcuggauc

SEQ ID NO: 1938072 - RNA, 19 nt, Artificial Sequence
  Description of Artificial Sequence: Synthetic oligonucleotide
  Sense strand starting at position 478 of SEQ ID NO: 1879880
caccuuaacuggucgagaa

SEQ ID NO: 1938073 - RNA, 19 nt, Artificial Sequence
  Description of Artificial Sequence: Synthetic oligonucleotide
  Antisense strand to SEQ ID NO: 1938072
uucucgaccaguuaaggug

SEQ ID NO: 1938074 - RNA, 19 nt, Artificial Sequence
  Description of Artificial Sequence: Synthetic oligonucleotide
  Sense strand starting at position 479 of SEQ ID NO: 1879880
accuuaacuggucgagaag

SEQ ID NO: 1938075 - RNA, 19 nt, Artificial Sequence
  Description of Artificial Sequence: Synthetic oligonucleotide
  Antisense strand to SEQ ID NO: 1938074
cuucucgaccaguuaaggu

SEQ ID NO: 1938076 - RNA, 19 nt, Artificial Sequence
  Description of Artificial Sequence: Synthetic oligonucleotide
  Sense strand starting at position 511 of SEQ ID NO: 1879880
uggguuugagggugagcaa

SEQ ID NO: 1938077 - RNA, 19 nt, Artificial Sequence
  Description of Artificial Sequence: Synthetic oligonucleotide
  Antisense strand to SEQ ID NO: 1938076
uugcucacccucaaaccca

SEQ ID NO: 1938078 - RNA, 19 nt, Artificial Sequence
  Description of Artificial Sequence: Synthetic oligonucleotide
  Sense strand starting at position 512 of SEQ ID NO: 1879880
ggguuugagggugagcaaa

SEQ ID NO: 1938079 - RNA, 19 nt, Artificial Sequence
  Description of Artificial Sequence: Synthetic oligonucleotide
  Antisense strand to SEQ ID NO: 1938078
uuugcucacccucaaaccc

SEQ ID NO: 1938080 - RNA, 19 nt, Artificial Sequence
  Description of Artificial Sequence: Synthetic oligonucleotide
  Sense strand starting at position 530 of SEQ ID NO: 1879880
aaggcaagauuauuaguuu

SEQ ID NO: 1938081 - RNA, 19 nt, Artificial Sequence
  Description of Artificial Sequence: Synthetic oligonucleotide
  Antisense strand to SEQ ID NO: 1938080
aaacuaauaaucuugccuu

SEQ ID NO: 1938082 - RNA, 19 nt, Artificial Sequence
  Description of Artificial Sequence: Synthetic oligonucleotide
  Sense strand starting at position 614 of SEQ ID NO: 1879880
uuggguuauggagguuaga

SEQ ID NO: 1938083 - RNA, 19 nt, Artificial Sequence
  Description of Artificial Sequence: Synthetic oligonucleotide
  Antisense strand to SEQ ID NO: 1938082
ucuaaccuccauaacccaa

SEQ ID NO: 1938084 - RNA, 19 nt, Artificial Sequence
  Description of Artificial Sequence: Synthetic oligonucleotide
  Sense strand starting at position 644 of SEQ ID NO: 1879880
uaaaguuaggcccaaguuu

SEQ ID NO: 1938085 - RNA, 19 nt, Artificial Sequence
  Description of Artificial Sequence: Synthetic oligonucleotide
  Antisense strand to SEQ ID NO: 1938084
aaacuugggccuaacuuua

SEQ ID NO: 1938086 - RNA, 19 nt, Artificial Sequence
  Description of Artificial Sequence: Synthetic oligonucleotide
  Sense strand starting at position 738 of SEQ ID NO: 1879880
ucccgaguucuagcguuca

SEQ ID NO: 1938087 - RNA, 19 nt, Artificial Sequence
  Description of Artificial Sequence: Synthetic oligonucleotide
  Antisense strand to SEQ ID NO: 1938086
ugaacgcuagaacucggga

SEQ ID NO: 1938088 - RNA, 19 nt, Artificial Sequence
  Description of Artificial Sequence: Synthetic oligonucleotide
  Sense strand starting at position 1540 of SEQ ID NO: 1879880
cggaaacuccgggauguca

SEQ ID NO: 1938089 - RNA, 19 nt, Artificial Sequence
  Description of Artificial Sequence: Synthetic oligonucleotide
  Antisense strand to SEQ ID NO: 1938088
ugacaucccggaguuuccg

SEQ ID NO: 1938090 - RNA, 19 nt, Artificial Sequence
  Description of Artificial Sequence: Synthetic oligonucleotide
  Sense strand starting at position 1549 of SEQ ID NO: 1879880
cgggaugucacucgggaaa

SEQ ID NO: 1938091 - RNA, 19 nt, Artificial Sequence
  Description of Artificial Sequence: Synthetic oligonucleotide
  Antisense strand to SEQ ID NO: 1938090
uuucccgagugacaucccg

SEQ ID NO: 1938092 - RNA, 19 nt, Artificial Sequence
  Description of Artificial Sequence: Synthetic oligonucleotide
  Sense strand starting at position 1645 of SEQ ID NO: 1879880
uuugauucugccuaccaga

SEQ ID NO: 1938093 - RNA, 19 nt, Artificial Sequence
  Description of Artificial Sequence: Synthetic oligonucleotide
  Antisense strand to SEQ ID NO: 1938092
ucugguaggcagaaucaaa

SEQ ID NO: 1938094 - RNA, 19 nt, Artificial Sequence
  Description of Artificial Sequence: Synthetic oligonucleotide
  Sense strand starting at position 1947 of SEQ ID NO: 1879880
aaacgagucucaccaaaug

SEQ ID NO: 1938095 - RNA, 19 nt, Artificial Sequence
  Description of Artificial Sequence: Synthetic oligonucleotide
  Antisense strand to SEQ ID NO: 1938094
cauuuggugagacucguuu

SEQ ID NO: 1938096 - RNA, 19 nt, Artificial Sequence
  Description of Artificial Sequence: Synthetic oligonucleotide
  Sense strand starting at position 2200 of SEQ ID NO: 1879880
ugagaaagcagucgacuaa

SEQ ID NO: 1938097 - RNA, 19 nt, Artificial Sequence
  Description of Artificial Sequence: Synthetic oligonucleotide
  Antisense strand to SEQ ID NO: 1938096
uuagucgacugcuuucuca

SEQ ID NO: 1938098 - RNA, 19 nt, Artificial Sequence
  Description of Artificial Sequence: Synthetic oligonucleotide
  Sense strand starting at position 2269 of SEQ ID NO: 1879880
cgcuuaguuaagucauguc

SEQ ID NO: 1938099 - RNA, 19 nt, Artificial Sequence
  Description of Artificial Sequence: Synthetic oligonucleotide
  Antisense strand to SEQ ID NO: 1938098
gacaugacuuaacuaagcg

SEQ ID NO: 1938100 - RNA, 19 nt, Artificial Sequence
  Description of Artificial Sequence: Synthetic oligonucleotide
  Sense strand starting at position 2290 of SEQ ID NO: 1879880
guagcaauguuauuuccca

SEQ ID NO: 1938101 - RNA, 19 nt, Artificial Sequence
  Description of Artificial Sequence: Synthetic oligonucleotide
  Antisense strand to SEQ ID NO: 1938100
ugggaaauaacauugcuac

SEQ ID NO: 1938102 - RNA, 19 nt, Artificial Sequence
  Description of Artificial Sequence: Synthetic oligonucleotide
  Sense strand starting at position 2325 of SEQ ID NO: 1879880
ugauaauguaggcacgauu

SEQ ID NO: 1938103 - RNA, 19 nt, Artificial Sequence
  Description of Artificial Sequence: Synthetic oligonucleotide
  Antisense strand to SEQ ID NO: 1938102
aaucgugccuacauuauca

SEQ ID NO: 1938104 - RNA, 19 nt, Artificial Sequence
  Description of Artificial Sequence: Synthetic oligonucleotide
  Sense strand starting at position 2344 of SEQ ID NO: 1879880
uucuuuagaucucuauggu

SEQ ID NO: 1938105 - RNA, 19 nt, Artificial Sequence
  Description of Artificial Sequence: Synthetic oligonucleotide
  Antisense strand to SEQ ID NO: 1938104
accauagagaucuaaagaa

SEQ ID NO: 1938106 - RNA, 19 nt, Artificial Sequence
  Description of Artificial Sequence: Synthetic oligonucleotide
  Sense strand starting at position 2345 of SEQ ID NO: 1879880
ucuuuagaucucuauggug

SEQ ID NO: 1938107 - RNA, 19 nt, Artificial Sequence
  Description of Artificial Sequence: Synthetic oligonucleotide
  Antisense strand to SEQ ID NO: 1938106
caccauagagaucuaaaga

SEQ ID NO: 1938108 - RNA, 19 nt, Artificial Sequence
  Description of Artificial Sequence: Synthetic oligonucleotide
  Sense strand starting at position 2406 of SEQ ID NO: 1879880
gggaguguuccagagaugu

SEQ ID NO: 1938109 - RNA, 19 nt, Artificial Sequence
  Description of Artificial Sequence: Synthetic oligonucleotide
  Antisense strand to SEQ ID NO: 1938108
acaucucuggaacacuccc

SEQ ID NO: 1938110 - RNA, 19 nt, Artificial Sequence
  Description of Artificial Sequence: Synthetic oligonucleotide
  Sense strand starting at position 2408 of SEQ ID NO: 1879880
gaguguuccagagauguuu

SEQ ID NO: 1938111 - RNA, 19 nt, Artificial Sequence
  Description of Artificial Sequence: Synthetic oligonucleotide
  Antisense strand to SEQ ID NO: 1938110
aaacaucucuggaacacuc

SEQ ID NO: 1938112 - RNA, 19 nt, Artificial Sequence
  Description of Artificial Sequence: Synthetic oligonucleotide
  Sense strand starting at position 2479 of SEQ ID NO: 1879880
cuacucaaagauuguagau

SEQ ID NO: 1938113 - RNA, 19 nt, Artificial Sequence
  Description of Artificial Sequence: Synthetic oligonucleotide
  Antisense strand to SEQ ID NO: 1938112
aucuacaaucuuugaguag

SEQ ID NO: 1938114 - RNA, 19 nt, Artificial Sequence
  Description of Artificial Sequence: Synthetic oligonucleotide
  Sense strand starting at position 2587 of SEQ ID NO: 1879880
uucugaagaguugauguca

SEQ ID NO: 1938115 - RNA, 19 nt, Artificial Sequence
  Description of Artificial Sequence: Synthetic oligonucleotide
  Antisense strand to SEQ ID NO: 1938114
ugacaucaacucuucagaa

SEQ ID NO: 1938116 - RNA, 19 nt, Artificial Sequence
  Description of Artificial Sequence: Synthetic oligonucleotide
  Sense strand starting at position 2712 of SEQ ID NO: 1879880
uugguauaaugguugauau

SEQ ID NO: 1938117 - RNA, 19 nt, Artificial Sequence
  Description of Artificial Sequence: Synthetic oligonucleotide
  Antisense strand to SEQ ID NO: 1938116
auaucaaccauuauaccaa

SEQ ID NO: 1938118 - RNA, 19 nt, Artificial Sequence
  Description of Artificial Sequence: Synthetic oligonucleotide
  Sense strand starting at position 2713 of SEQ ID NO: 1879880
ugguauaaugguugauauu

SEQ ID NO: 1938119 - RNA, 19 nt, Artificial Sequence
  Description of Artificial Sequence: Synthetic oligonucleotide
  Antisense strand to SEQ ID NO: 1938118
aauaucaaccauuauacca

SEQ ID NO: 1938120 - RNA, 19 nt, Artificial Sequence
  Description of Artificial Sequence: Synthetic oligonucleotide
  Sense strand starting at position 2784 of SEQ ID NO: 1879880
uuuagaauccuuugguaau

SEQ ID NO: 1938121 - RNA, 19 nt, Artificial Sequence
  Description of Artificial Sequence: Synthetic oligonucleotide
  Antisense strand to SEQ ID NO: 1938120
auuaccaaaggauucuaaa

SEQ ID NO: 1938122 - RNA, 19 nt, Artificial Sequence
  Description of Artificial Sequence: Synthetic oligonucleotide
  Sense strand starting at position 2895 of SEQ ID NO: 1879880
uugcuaaaugaauggaauu

SEQ ID NO: 1938123 - RNA, 19 nt, Artificial Sequence
  Description of Artificial Sequence: Synthetic oligonucleotide
  Antisense strand to SEQ ID NO: 1938122
aauuccauucauuuagcaa

SEQ ID NO: 1938124 - RNA, 19 nt, Artificial Sequence
  Description of Artificial Sequence: Synthetic oligonucleotide
  Sense strand starting at position 2993 of SEQ ID NO: 1879880
uugccuggucuugaaccau

SEQ ID NO: 1938125 - RNA, 19 nt, Artificial Sequence
  Description of Artificial Sequence: Synthetic oligonucleotide
  Antisense strand to SEQ ID NO: 1938124
augguucaagaccaggcaa

SEQ ID NO: 1938126 - RNA, 19 nt, Artificial Sequence
  Description of Artificial Sequence: Synthetic oligonucleotide
  Sense strand starting at position 3064 of SEQ ID NO: 1879880
ugaauugagcaguguuaga

SEQ ID NO: 1938127 - RNA, 19 nt, Artificial Sequence
  Description of Artificial Sequence: Synthetic oligonucleotide
  Antisense strand to SEQ ID NO: 1938126
ucuaacacugcucaauuca

SEQ ID NO: 1938128 - RNA, 19 nt, Artificial Sequence
  Description of Artificial Sequence: Synthetic oligonucleotide
  Sense strand starting at position 3114 of SEQ ID NO: 1879880
guuauagaaaguuggcaua

SEQ ID NO: 1938129 - RNA, 19 nt, Artificial Sequence
  Description of Artificial Sequence: Synthetic oligonucleotide
  Antisense strand to SEQ ID NO: 1938128
uaugccaacuuucuauaac

SEQ ID NO: 1938130 - RNA, 19 nt, Artificial Sequence
  Description of Artificial Sequence: Synthetic oligonucleotide
  Sense strand starting at position 3116 of SEQ ID NO: 1879880
uauagaaaguuggcauaaa

SEQ ID NO: 1938131 - RNA, 19 nt, Artificial Sequence
  Description of Artificial Sequence: Synthetic oligonucleotide
  Antisense strand to SEQ ID NO: 1938130
uuuaugccaacuuucuaua

SEQ ID NO: 1938132 - RNA, 19 nt, Artificial Sequence
  Description of Artificial Sequence: Synthetic oligonucleotide
  Sense strand starting at position 3373 of SEQ ID NO: 1879880
ccuuauagguugucauaua

SEQ ID NO: 1938133 - RNA, 19 nt, Artificial Sequence
  Description of Artificial Sequence: Synthetic oligonucleotide
  Antisense strand to SEQ ID NO: 1938132
uauaugacaaccuauaagg

SEQ ID NO: 1938134 - RNA, 19 nt, Artificial Sequence
  Description of Artificial Sequence: Synthetic oligonucleotide
  Sense strand starting at position 3470 of SEQ ID NO: 1879880
aauguuugcgacuauuacu

SEQ ID NO: 1938135 - RNA, 19 nt, Artificial Sequence
  Description of Artificial Sequence: Synthetic oligonucleotide
  Antisense strand to SEQ ID NO: 1938134
aguaauagucgcaaacauu

SEQ ID NO: 1938136 - RNA, 19 nt, Artificial Sequence
  Description of Artificial Sequence: Synthetic oligonucleotide
  Sense strand starting at position 3569 of SEQ ID NO: 1879880
gguccugaaacuuagugua

SEQ ID NO: 1938137 - RNA, 19 nt, Artificial Sequence
  Description of Artificial Sequence: Synthetic oligonucleotide
  Antisense strand to SEQ ID NO: 1938136
uacacuaaguuucaggacc

SEQ ID NO: 1938138 - RNA, 19 nt, Artificial Sequence
  Description of Artificial Sequence: Synthetic oligonucleotide
  Sense strand starting at position 3571 of SEQ ID NO: 1879880
uccugaaacuuaguguaca

SEQ ID NO: 1938139 - RNA, 19 nt, Artificial Sequence
  Description of Artificial Sequence: Synthetic oligonucleotide
  Antisense strand to SEQ ID NO: 1938138
uguacacuaaguuucagga

SEQ ID NO: 1938140 - RNA, 19 nt, Artificial Sequence
  Description of Artificial Sequence: Synthetic oligonucleotide
  Sense strand starting at position 3796 of SEQ ID NO: 1879880
aggaauacuuguuuacucu

SEQ ID NO: 1938141 - RNA, 19 nt, Artificial Sequence
  Description of Artificial Sequence: Synthetic oligonucleotide
  Antisense strand to SEQ ID NO: 1938140
agaguaaacaaguauuccu

SEQ ID NO: 1938142 - RNA, 19 nt, Artificial Sequence
  Description of Artificial Sequence: Synthetic oligonucleotide
  Sense strand starting at position 3802 of SEQ ID NO: 1879880
acuuguuuacucugaaagu

SEQ ID NO: 1938143 - RNA, 19 nt, Artificial Sequence
  Description of Artificial Sequence: Synthetic oligonucleotide
  Antisense strand to SEQ ID NO: 1938142
acuuucagaguaaacaagu

SEQ ID NO: 1938144 - RNA, 19 nt, Artificial Sequence
  Description of Artificial Sequence: Synthetic oligonucleotide
  Sense strand starting at position 150 of SEQ ID NO: 1879881
cagaguugauacuuagcua

SEQ ID NO: 1938145 - RNA, 19 nt, Artificial Sequence
  Description of Artificial Sequence: Synthetic oligonucleotide
  Antisense strand to SEQ ID NO: 1938144
uagcuaaguaucaacucug

SEQ ID NO: 1938146 - RNA, 19 nt, Artificial Sequence
  Description of Artificial Sequence: Synthetic oligonucleotide
  Sense strand starting at position 151 of SEQ ID NO: 1879881
agaguugauacuuagcuag

SEQ ID NO: 1938147 - RNA, 19 nt, Artificial Sequence
  Description of Artificial Sequence: Synthetic oligonucleotide
  Antisense strand to SEQ ID NO: 1938146
cuagcuaaguaucaacucu

SEQ ID NO: 1938148 - RNA, 19 nt, Artificial Sequence
  Description of Artificial Sequence: Synthetic oligonucleotide
  Sense strand starting at position 153 of SEQ ID NO: 1879881
aguugauacuuagcuagga

SEQ ID NO: 1938149 - RNA, 19 nt, Artificial Sequence
  Description of Artificial Sequence: Synthetic oligonucleotide
  Antisense strand to SEQ ID NO: 1938148
uccuagcuaaguaucaacu

SEQ ID NO: 1938150 - RNA, 19 nt, Artificial Sequence
  Description of Artificial Sequence: Synthetic oligonucleotide
  Sense strand starting at position 1506 of SEQ ID NO: 1879881
agcagcuaugaauauguaa

SEQ ID NO: 1938151 - RNA, 19 nt, Artificial Sequence
  Description of Artificial Sequence: Synthetic oligonucleotide
  Antisense strand to SEQ ID NO: 1938150
uuacauauucauagcugcu

SEQ ID NO: 1938152 - RNA, 19 nt, Artificial Sequence
  Description of Artificial Sequence: Synthetic oligonucleotide
  Sense strand starting at position 2562 of SEQ ID NO: 1879881
gguuuccgcgcaguugaaa

SEQ ID NO: 1938153 - RNA, 19 nt, Artificial Sequence
  Description of Artificial Sequence: Synthetic oligonucleotide
  Antisense strand to SEQ ID NO: 1938152
uuucaacugcgcggaaacc

SEQ ID NO: 1938154 - RNA, 19 nt, Artificial Sequence
  Description of Artificial Sequence: Synthetic oligonucleotide
  Sense strand starting at position 2574 of SEQ ID NO: 1879881
guugaaacauuggcaacaa

SEQ ID NO: 1938155 - RNA, 19 nt, Artificial Sequence
  Description of Artificial Sequence: Synthetic oligonucleotide
  Antisense strand to SEQ ID NO: 1938154
uuguugccaauguuucaac

SEQ ID NO: 1938156 - RNA, 19 nt, Artificial Sequence
  Description of Artificial Sequence: Synthetic oligonucleotide
  Sense strand starting at position 2603 of SEQ ID NO: 1879881
gcuccucgcuagguaauuu

SEQ ID NO: 1938157 - RNA, 19 nt, Artificial Sequence
  Description of Artificial Sequence: Synthetic oligonucleotide
  Antisense strand to SEQ ID NO: 1938156
aaauuaccuagcgaggagc

SEQ ID NO: 1938158 - RNA, 19 nt, Artificial Sequence
  Description of Artificial Sequence: Synthetic oligonucleotide
  Sense strand starting at position 2695 of SEQ ID NO: 1879881
gcgggccucccgcuuuaaa

SEQ ID NO: 1938159 - RNA, 19 nt, Artificial Sequence
  Description of Artificial Sequence: Synthetic oligonucleotide
  Antisense strand to SEQ ID NO: 1938158
uuuaaagcgggaggcccgc

SEQ ID NO: 1938160 - RNA, 19 nt, Artificial Sequence
  Description of Artificial Sequence: Synthetic oligonucleotide
  Sense strand starting at position 2696 of SEQ ID NO: 1879881
cgggccucccgcuuuaaau

SEQ ID NO: 1938161 - RNA, 19 nt, Artificial Sequence
  Description of Artificial Sequence: Synthetic oligonucleotide
  Antisense strand to SEQ ID NO: 1938160
auuuaaagcgggaggcccg

SEQ ID NO: 1938162 - RNA, 19 nt, Artificial Sequence
  Description of Artificial Sequence: Synthetic oligonucleotide
  Sense strand starting at position 2698 of SEQ ID NO: 1879881
ggccucccgcuuuaaauuu

SEQ ID NO: 1938163 - RNA, 19 nt, Artificial Sequence
  Description of Artificial Sequence: Synthetic oligonucleotide
  Antisense strand to SEQ ID NO: 1938162
aaauuuaaagcgggaggcc

SEQ ID NO: 1938164 - RNA, 19 nt, Artificial Sequence
  Description of Artificial Sequence: Synthetic oligonucleotide
  Sense strand starting at position 2874 of SEQ ID NO: 1879881
cuuauuaagucgcuaauuu

SEQ ID NO: 1938165 - RNA, 19 nt, Artificial Sequence
  Description of Artificial Sequence: Synthetic oligonucleotide
  Antisense strand to SEQ ID NO: 1938164
aaauuagcgacuuaauaag

SEQ ID NO: 1938166 - RNA, 19 nt, Artificial Sequence
  Description of Artificial Sequence: Synthetic oligonucleotide
  Sense strand starting at position 3019 of SEQ ID NO: 1879881
caguaagcugaugacuaau

SEQ ID NO: 1938167 - RNA, 19 nt, Artificial Sequence
  Description of Artificial Sequence: Synthetic oligonucleotide
  Antisense strand to SEQ ID NO: 1938166
auuagucaucagcuuacug

SEQ ID NO: 1938168 - RNA, 19 nt, Artificial Sequence
  Description of Artificial Sequence: Synthetic oligonucleotide
  Sense strand starting at position 3021 of SEQ ID NO: 1879881
guaagcugaugacuaauaa

SEQ ID NO: 1938169 - RNA, 19 nt, Artificial Sequence
  Description of Artificial Sequence: Synthetic oligonucleotide
  Antisense strand to SEQ ID NO: 1938168
uuauuagucaucagcuuac

SEQ ID NO: 1938170 - RNA, 19 nt, Artificial Sequence
  Description of Artificial Sequence: Synthetic oligonucleotide
  Sense strand starting at position 3082 of SEQ ID NO: 1879881
uguuucucagaguaaauau

SEQ ID NO: 1938171 - RNA, 19 nt, Artificial Sequence
  Description of Artificial Sequence: Synthetic oligonucleotide
  Antisense strand to SEQ ID NO: 1938170
auauuuacucugagaaaca

SEQ ID NO: 1938172 - RNA, 19 nt, Artificial Sequence
  Description of Artificial Sequence: Synthetic oligonucleotide
  Sense strand starting at position 3111 of SEQ ID NO: 1879881
aaagguuucgcguugcaca

SEQ ID NO: 1938173 - RNA, 19 nt, Artificial Sequence
  Description of Artificial Sequence: Synthetic oligonucleotide
  Antisense strand to SEQ ID NO: 1938172
ugugcaacgcgaaaccuuu

SEQ ID NO: 1938174 - RNA, 19 nt, Artificial Sequence
  Description of Artificial Sequence: Synthetic oligonucleotide
  Sense strand starting at position 3113 of SEQ ID NO: 1879881
agguuucgcguugcacaua

SEQ ID NO: 1938175 - RNA, 19 nt, Artificial Sequence
  Description of Artificial Sequence: Synthetic oligonucleotide
  Antisense strand to SEQ ID NO: 1938174
uaugugcaacgcgaaaccu

SEQ ID NO: 1938176 - RNA, 19 nt, Artificial Sequence
  Description of Artificial Sequence: Synthetic oligonucleotide
  Sense strand starting at position 3133 of SEQ ID NO: 1879881
cuuucuugguaacuagaca

SEQ ID NO: 1938177 - RNA, 19 nt, Artificial Sequence
  Description of Artificial Sequence: Synthetic oligonucleotide
  Antisense strand to SEQ ID NO: 1938176
ugucuaguuaccaagaaag

SEQ ID NO: 1938178 - RNA, 19 nt, Artificial Sequence
  Description of Artificial Sequence: Synthetic oligonucleotide
  Sense strand starting at position 3181 of SEQ ID NO: 1879881
uggcgaaauucccuggaca

SEQ ID NO: 1938179 - RNA, 19 nt, Artificial Sequence
  Description of Artificial Sequence: Synthetic oligonucleotide
  Antisense strand to SEQ ID NO: 1938178
uguccagggaauuucgcca

SEQ ID NO: 1938180 - RNA, 19 nt, Artificial Sequence
  Description of Artificial Sequence: Synthetic oligonucleotide
  Sense strand starting at position 3182 of SEQ ID NO: 1879881
ggcgaaauucccuggacaa

SEQ ID NO: 1938181 - RNA, 19 nt, Artificial Sequence
  Description of Artificial Sequence: Synthetic oligonucleotide
  Antisense strand to SEQ ID NO: 1938180
uuguccagggaauuucgcc

SEQ ID NO: 1938182 - RNA, 19 nt, Artificial Sequence
  Description of Artificial Sequence: Synthetic oligonucleotide
  Sense strand starting at position 3183 of SEQ ID NO: 1879881
gcgaaauucccuggacaaa

SEQ ID NO: 1938183 - RNA, 19 nt, Artificial Sequence
  Description of Artificial Sequence: Synthetic oligonucleotide
  Antisense strand to SEQ ID NO: 1938182
uuuguccagggaauuucgc

SEQ ID NO: 1938184 - RNA, 19 nt, Artificial Sequence
  Description of Artificial Sequence: Synthetic oligonucleotide
  Sense strand starting at position 3196 of SEQ ID NO: 1879881
gacaaagucccaggucuaa

SEQ ID NO: 1938185 - RNA, 19 nt, Artificial Sequence
  Description of Artificial Sequence: Synthetic oligonucleotide
  Antisense strand to SEQ ID NO: 1938184
uuagaccugggacuuuguc

SEQ ID NO: 1938186 - RNA, 19 nt, Artificial Sequence
  Description of Artificial Sequence: Synthetic oligonucleotide
  Sense strand starting at position 3276 of SEQ ID NO: 1879881
gguguauuucaugguaagc

SEQ ID NO: 1938187 - RNA, 19 nt, Artificial Sequence
  Description of Artificial Sequence: Synthetic oligonucleotide
  Antisense strand to SEQ ID NO: 1938186
gcuuaccaugaaauacacc

SEQ ID NO: 1938188 - RNA, 19 nt, Artificial Sequence
  Description of Artificial Sequence: Synthetic oligonucleotide
  Sense strand starting at position 3317 of SEQ ID NO: 1879881
uaguuaaucugucuugaga

SEQ ID NO: 1938189 - RNA, 19 nt, Artificial Sequence
  Description of Artificial Sequence: Synthetic oligonucleotide
  Antisense strand to SEQ ID NO: 1938188
ucucaagacagauuaacua

SEQ ID NO: 1938190 - RNA, 19 nt, Artificial Sequence
  Description of Artificial Sequence: Synthetic oligonucleotide
  Sense strand starting at position 3347 of SEQ ID NO: 1879881
aguuuaaauuggguagaac

SEQ ID NO: 1938191 - RNA, 19 nt, Artificial Sequence
  Description of Artificial Sequence: Synthetic oligonucleotide
  Antisense strand to SEQ ID NO: 1938190
guucuacccaauuuaaacu

SEQ ID NO: 1938192 - RNA, 19 nt, Artificial Sequence
  Description of Artificial Sequence: Synthetic oligonucleotide
  Sense strand starting at position 3360 of SEQ ID NO: 1879881
uagaacugcugguucuaca

SEQ ID NO: 1938193 - RNA, 19 nt, Artificial Sequence
  Description of Artificial Sequence: Synthetic oligonucleotide
  Antisense strand to SEQ ID NO: 1938192
uguagaaccagcaguucua

SEQ ID NO: 1938194 - RNA, 19 nt, Artificial Sequence
  Description of Artificial Sequence: Synthetic oligonucleotide
  Sense strand starting at position 3437 of SEQ ID NO: 1879881
ucaucaguccuagaaugcu

SEQ ID NO: 1938195 - RNA, 19 nt, Artificial Sequence
  Description of Artificial Sequence: Synthetic oligonucleotide
  Antisense strand to SEQ ID NO: 1938194
agcauucuaggacugauga

SEQ ID NO: 1938196 - RNA, 19 nt, Artificial Sequence
  Description of Artificial Sequence: Synthetic oligonucleotide
  Sense strand starting at position 3489 of SEQ ID NO: 1879881
aagcuauugucagugacag

SEQ ID NO: 1938197 - RNA, 19 nt, Artificial Sequence
  Description of Artificial Sequence: Synthetic oligonucleotide
  Antisense strand to SEQ ID NO: 1938196
cugucacugacaauagcuu

SEQ ID NO: 1938198 - RNA, 19 nt, Artificial Sequence
  Description of Artificial Sequence: Synthetic oligonucleotide
  Sense strand starting at position 3522 of SEQ ID NO: 1879881
gugggauugauuuguucgu

SEQ ID NO: 1938199 - RNA, 19 nt, Artificial Sequence
  Description of Artificial Sequence: Synthetic oligonucleotide
  Antisense strand to SEQ ID NO: 1938198
acgaacaaaucaaucccac

SEQ ID NO: 1938200 - RNA, 19 nt, Artificial Sequence
  Description of Artificial Sequence: Synthetic oligonucleotide
  Sense strand starting at position 3526 of SEQ ID NO: 1879881
gauugauuuguucguggua

SEQ ID NO: 1938201 - RNA, 19 nt, Artificial Sequence
  Description of Artificial Sequence: Synthetic oligonucleotide
  Antisense strand to SEQ ID NO: 1938200
uaccacgaacaaaucaauc

SEQ ID NO: 1938202 - RNA, 19 nt, Artificial Sequence
  Description of Artificial Sequence: Synthetic oligonucleotide
  Sense strand starting at position 3527 of SEQ ID NO: 1879881
auugauuuguucgugguaa

SEQ ID NO: 1938203 - RNA, 19 nt, Artificial Sequence
  Description of Artificial Sequence: Synthetic oligonucleotide
  Antisense strand to SEQ ID NO: 1938202
uuaccacgaacaaaucaau

SEQ ID NO: 1938204 - RNA, 19 nt, Artificial Sequence
  Description of Artificial Sequence: Synthetic oligonucleotide
  Sense strand starting at position 3529 of SEQ ID NO: 1879881
ugauuuguucgugguaauu

SEQ ID NO: 1938205 - RNA, 19 nt, Artificial Sequence
  Description of Artificial Sequence: Synthetic oligonucleotide
  Antisense strand to SEQ ID NO: 1938204
aauuaccacgaacaaauca

SEQ ID NO: 1938206 - RNA, 19 nt, Artificial Sequence
  Description of Artificial Sequence: Synthetic oligonucleotide
  Sense strand starting at position 3542 of SEQ ID NO: 1879881
guaauuaagccuuagggug

SEQ ID NO: 1938207 - RNA, 19 nt, Artificial Sequence
  Description of Artificial Sequence: Synthetic oligonucleotide
  Antisense strand to SEQ ID NO: 1938206
cacccuaaggcuuaauuac

SEQ ID NO: 1938208 - RNA, 19 nt, Artificial Sequence
  Description of Artificial Sequence: Synthetic oligonucleotide
  Sense strand starting at position 3653 of SEQ ID NO: 1879881
uuaacuaguuaaucuggaa

SEQ ID NO: 1938209 - RNA, 19 nt, Artificial Sequence
  Description of Artificial Sequence: Synthetic oligonucleotide
  Antisense strand to SEQ ID NO: 1938208
uuccagauuaacuaguuaa

SEQ ID NO: 1938210 - RNA, 19 nt, Artificial Sequence
  Description of Artificial Sequence: Synthetic oligonucleotide
  Sense strand starting at position 3666 of SEQ ID NO: 1879881
cuggaaauauggccuaagu

SEQ ID NO: 1938211 - RNA, 19 nt, Artificial Sequence
  Description of Artificial Sequence: Synthetic oligonucleotide
  Antisense strand to SEQ ID NO: 1938210
acuuaggccauauuuccag

SEQ ID NO: 1938212 - RNA, 19 nt, Artificial Sequence
  Description of Artificial Sequence: Synthetic oligonucleotide
  Sense strand starting at position 3693 of SEQ ID NO: 1879881
ccagcauuacuguaaggga

SEQ ID NO: 1938213 - RNA, 19 nt, Artificial Sequence
  Description of Artificial Sequence: Synthetic oligonucleotide
  Antisense strand to SEQ ID NO: 1938212
ucccuuacaguaaugcugg

SEQ ID NO: 1938214 - RNA, 19 nt, Artificial Sequence
  Description of Artificial Sequence: Synthetic oligonucleotide
  Sense strand starting at position 3877 of SEQ ID NO: 1879881
uaauaugaccuucggaaag

SEQ ID NO: 1938215 - RNA, 19 nt, Artificial Sequence
  Description of Artificial Sequence: Synthetic oligonucleotide
  Antisense strand to SEQ ID NO: 1938214
cuuuccgaaggucauauua

SEQ ID NO: 1938216 - RNA, 19 nt, Artificial Sequence
  Description of Artificial Sequence: Synthetic oligonucleotide
  Sense strand starting at position 3888 of SEQ ID NO: 1879881
ucggaaagucauugaagcu

SEQ ID NO: 1938217 - RNA, 19 nt, Artificial Sequence
  Description of Artificial Sequence: Synthetic oligonucleotide
  Antisense strand to SEQ ID NO: 1938216
agcuucaaugacuuuccga

SEQ ID NO: 1938218 - RNA, 19 nt, Artificial Sequence
  Description of Artificial Sequence: Synthetic oligonucleotide
  Sense strand starting at position 3889 of SEQ ID NO: 1879881
cggaaagucauugaagcua

SEQ ID NO: 1938219 - RNA, 19 nt, Artificial Sequence
  Description of Artificial Sequence: Synthetic oligonucleotide
  Antisense strand to SEQ ID NO: 1938218
uagcuucaaugacuuuccg

SEQ ID NO: 1938220 - RNA, 19 nt, Artificial Sequence
  Description of Artificial Sequence: Synthetic oligonucleotide
  Sense strand starting at position 3894 of SEQ ID NO: 1879881
agucauugaagcuagugua

SEQ ID NO: 1938221 - RNA, 19 nt, Artificial Sequence
  Description of Artificial Sequence: Synthetic oligonucleotide
  Antisense strand to SEQ ID NO: 1938220
uacacuagcuucaaugacu

SEQ ID NO: 1938222 - RNA, 19 nt, Artificial Sequence
  Description of Artificial Sequence: Synthetic oligonucleotide
  Sense strand starting at position 3983 of SEQ ID NO: 1879881
aaggauaguucugugagaa

SEQ ID NO: 1938223 - RNA, 19 nt, Artificial Sequence
  Description of Artificial Sequence: Synthetic oligonucleotide
  Antisense strand to SEQ ID NO: 1938222
uucucacagaacuauccuu

SEQ ID NO: 1938224 - RNA, 19 nt, Artificial Sequence
  Description of Artificial Sequence: Synthetic oligonucleotide
  Sense strand starting at position 677 of SEQ ID NO: 1879882
uacugugucccaggcuuaa

SEQ ID NO: 1938225 - RNA, 19 nt, Artificial Sequence
  Description of Artificial Sequence: Synthetic oligonucleotide
  Antisense strand to SEQ ID NO: 1938224
uuaagccugggacacagua

SEQ ID NO: 1938226 - RNA, 19 nt, Artificial Sequence
  Description of Artificial Sequence: Synthetic oligonucleotide
  Sense strand starting at position 681 of SEQ ID NO: 1879882
gugucccaggcuuaagaaa

SEQ ID NO: 1938227 - RNA, 19 nt, Artificial Sequence
  Description of Artificial Sequence: Synthetic oligonucleotide
  Antisense strand to SEQ ID NO: 1938226
uuucuuaagccugggacac

SEQ ID NO: 1938228 - RNA, 19 nt, Artificial Sequence
  Description of Artificial Sequence: Synthetic oligonucleotide
  Sense strand starting at position 2076 of SEQ ID NO: 1879882
uuugguaucucugucauag

SEQ ID NO: 1938229 - RNA, 19 nt, Artificial Sequence
  Description of Artificial Sequence: Synthetic oligonucleotide
  Antisense strand to SEQ ID NO: 1938228
cuaugacagagauaccaaa

SEQ ID NO: 1938230 - RNA, 19 nt, Artificial Sequence
  Description of Artificial Sequence: Synthetic oligonucleotide
  Sense strand starting at position 2088 of SEQ ID NO: 1879882
gucauagcaguuuaauuau

SEQ ID NO: 1938231 - RNA, 19 nt, Artificial Sequence
  Description of Artificial Sequence: Synthetic oligonucleotide
  Antisense strand to SEQ ID NO: 1938230
auaauuaaacugcuaugac

SEQ ID NO: 1938232 - RNA, 19 nt, Artificial Sequence
  Description of Artificial Sequence: Synthetic oligonucleotide
  Sense strand starting at position 2130 of SEQ ID NO: 1879882
gaggaugauuucugccuuu

SEQ ID NO: 1938233 - RNA, 19 nt, Artificial Sequence
  Description of Artificial Sequence: Synthetic oligonucleotide
  Antisense strand to SEQ ID NO: 1938232
aaaggcagaaaucauccuc

SEQ ID NO: 1938234 - RNA, 19 nt, Artificial Sequence
  Description of Artificial Sequence: Synthetic oligonucleotide
  Sense strand starting at position 2144 of SEQ ID NO: 1879882
ccuuuacuguaguuugaga

SEQ ID NO: 1938235 - RNA, 19 nt, Artificial Sequence
  Description of Artificial Sequence: Synthetic oligonucleotide
  Antisense strand to SEQ ID NO: 1938234
ucucaaacuacaguaaagg

SEQ ID NO: 1938236 - RNA, 19 nt, Artificial Sequence
  Description of Artificial Sequence: Synthetic oligonucleotide
  Sense strand starting at position 2146 of SEQ ID NO: 1879882
uuuacuguaguuugagaca

SEQ ID NO: 1938237 - RNA, 19 nt, Artificial Sequence
  Description of Artificial Sequence: Synthetic oligonucleotide
  Antisense strand to SEQ ID NO: 1938236
ugucucaaacuacaguaaa

SEQ ID NO: 1938238 - RNA, 19 nt, Artificial Sequence
  Description of Artificial Sequence: Synthetic oligonucleotide
  Sense strand starting at position 2151 of SEQ ID NO: 1879882
uguaguuugagacaucuug

SEQ ID NO: 1938239 - RNA, 19 nt, Artificial Sequence
  Description of Artificial Sequence: Synthetic oligonucleotide
  Antisense strand to SEQ ID NO: 1938238
caagaugucucaaacuaca

SEQ ID NO: 1938240 - RNA, 19 nt, Artificial Sequence
  Description of Artificial Sequence: Synthetic oligonucleotide
  Sense strand starting at position 2169 of SEQ ID NO: 1879882
gaccauuuauguuaggaag

SEQ ID NO: 1938241 - RNA, 19 nt, Artificial Sequence
  Description of Artificial Sequence: Synthetic oligonucleotide
  Antisense strand to SEQ ID NO: 1938240
cuuccuaacauaaaugguc

SEQ ID NO: 1938242 - RNA, 19 nt, Artificial Sequence
  Description of Artificial Sequence: Synthetic oligonucleotide
  Sense strand starting at position 2172 of SEQ ID NO: 1879882
cauuuauguuaggaagggu

SEQ ID NO: 1938243 - RNA, 19 nt, Artificial Sequence
  Description of Artificial Sequence: Synthetic oligonucleotide
  Antisense strand to SEQ ID NO: 1938242
acccuuccuaacauaaaug

SEQ ID NO: 1938244 - RNA, 19 nt, Artificial Sequence
  Description of Artificial Sequence: Synthetic oligonucleotide
  Sense strand starting at position 2175 of SEQ ID NO: 1879882
uuauguuaggaagggucau

SEQ ID NO: 1938245 - RNA, 19 nt, Artificial Sequence
  Description of Artificial Sequence: Synthetic oligonucleotide
  Antisense strand to SEQ ID NO: 1938244
augacccuuccuaacauaa

SEQ ID NO: 1938246 - RNA, 19 nt, Artificial Sequence
  Description of Artificial Sequence: Synthetic oligonucleotide
  Sense strand starting at position 2181 of SEQ ID NO: 1879882
uaggaagggucaucuuuaa

SEQ ID NO: 1938247 - RNA, 19 nt, Artificial Sequence
  Description of Artificial Sequence: Synthetic oligonucleotide
  Antisense strand to SEQ ID NO: 1938246
uuaaagaugacccuuccua

SEQ ID NO: 1938248 - RNA, 19 nt, Artificial Sequence
  Description of Artificial Sequence: Synthetic oligonucleotide
  Sense strand starting at position 2222 of SEQ ID NO: 1879882
ucaucagccuggguaacau

SEQ ID NO: 1938249 - RNA, 19 nt, Artificial Sequence
  Description of Artificial Sequence: Synthetic oligonucleotide
  Antisense strand to SEQ ID NO: 1938248
auguuacccaggcugauga

SEQ ID NO: 1938250 - RNA, 19 nt, Artificial Sequence
  Description of Artificial Sequence: Synthetic oligonucleotide
  Sense strand starting at position 2481 of SEQ ID NO: 1879882
cuaguaucauggucagcaa

SEQ ID NO: 1938251 - RNA, 19 nt, Artificial Sequence
  Description of Artificial Sequence: Synthetic oligonucleotide
  Antisense strand to SEQ ID NO: 1938250
uugcugaccaugauacuag

SEQ ID NO: 1938252 - RNA, 19 nt, Artificial Sequence
  Description of Artificial Sequence: Synthetic oligonucleotide
  Sense strand starting at position 2482 of SEQ ID NO: 1879882
uaguaucauggucagcaaa

SEQ ID NO: 1938253 - RNA, 19 nt, Artificial Sequence
  Description of Artificial Sequence: Synthetic oligonucleotide
  Antisense strand to SEQ ID NO: 1938252
uuugcugaccaugauacua

SEQ ID NO: 1938254 - RNA, 19 nt, Artificial Sequence
  Description of Artificial Sequence: Synthetic oligonucleotide
  Sense strand starting at position 2520 of SEQ ID NO: 1879882
acaagauuguauucugaga

SEQ ID NO: 1938255 - RNA, 19 nt, Artificial Sequence
  Description of Artificial Sequence: Synthetic oligonucleotide
  Antisense strand to SEQ ID NO: 1938254
ucucagaauacaaucuugu

SEQ ID NO: 1938256 - RNA, 19 nt, Artificial Sequence
  Description of Artificial Sequence: Synthetic oligonucleotide
  Sense strand starting at position 2525 of SEQ ID NO: 1879882
auuguauucugagauuuga

SEQ ID NO: 1938257 - RNA, 19 nt, Artificial Sequence
  Description of Artificial Sequence: Synthetic oligonucleotide
  Antisense strand to SEQ ID NO: 1938256
ucaaaucucagaauacaau

SEQ ID NO: 1938258 - RNA, 19 nt, Artificial Sequence
  Description of Artificial Sequence: Synthetic oligonucleotide
  Sense strand starting at position 2578 of SEQ ID NO: 1879882
ucaagagauuguguaggga

SEQ ID NO: 1938259 - RNA, 19 nt, Artificial Sequence
  Description of Artificial Sequence: Synthetic oligonucleotide
  Antisense strand to SEQ ID NO: 1938258
ucccuacacaaucucuuga

SEQ ID NO: 1938260 - RNA, 19 nt, Artificial Sequence
  Description of Artificial Sequence: Synthetic oligonucleotide
  Sense strand starting at position 2582 of SEQ ID NO: 1879882
gagauuguguagggaagga

SEQ ID NO: 1938261 - RNA, 19 nt, Artificial Sequence
  Description of Artificial Sequence: Synthetic oligonucleotide
  Antisense strand to SEQ ID NO: 1938260
uccuucccuacacaaucuc

SEQ ID NO: 1938262 - RNA, 19 nt, Artificial Sequence
  Description of Artificial Sequence: Synthetic oligonucleotide
  Sense strand starting at position 2606 of SEQ ID NO: 1879882
cacacugaguucccagaga

SEQ ID NO: 1938263 - RNA, 19 nt, Artificial Sequence
  Description of Artificial Sequence: Synthetic oligonucleotide
  Antisense strand to SEQ ID NO: 1938262
ucucugggaacucagugug

SEQ ID NO: 1938264 - RNA, 19 nt, Artificial Sequence
  Description of Artificial Sequence: Synthetic oligonucleotide
  Sense strand starting at position 2611 of SEQ ID NO: 1879882
ugaguucccagagauagca

SEQ ID NO: 1938265 - RNA, 19 nt, Artificial Sequence
  Description of Artificial Sequence: Synthetic oligonucleotide
  Antisense strand to SEQ ID NO: 1938264
ugcuaucucugggaacuca

SEQ ID NO: 1938266 - RNA, 19 nt, Artificial Sequence
  Description of Artificial Sequence: Synthetic oligonucleotide
  Sense strand starting at position 2648 of SEQ ID NO: 1879882
cuaauuggagcuuacacua

SEQ ID NO: 1938267 - RNA, 19 nt, Artificial Sequence
  Description of Artificial Sequence: Synthetic oligonucleotide
  Antisense strand to SEQ ID NO: 1938266
uaguguaagcuccaauuag

SEQ ID NO: 1938268 - RNA, 19 nt, Artificial Sequence
  Description of Artificial Sequence: Synthetic oligonucleotide
  Sense strand starting at position 2704 of SEQ ID NO: 1879882
auuaguauuuguuggaaga

SEQ ID NO: 1938269 - RNA, 19 nt, Artificial Sequence
  Description of Artificial Sequence: Synthetic oligonucleotide
  Antisense strand to SEQ ID NO: 1938268
ucuuccaacaaauacuaau

SEQ ID NO: 1938270 - RNA, 19 nt, Artificial Sequence
  Description of Artificial Sequence: Synthetic oligonucleotide
  Sense strand starting at position 2706 of SEQ ID NO: 1879882
uaguauuuguuggaagauu

SEQ ID NO: 1938271 - RNA, 19 nt, Artificial Sequence
  Description of Artificial Sequence: Synthetic oligonucleotide
  Antisense strand to SEQ ID NO: 1938270
aaucuuccaacaaauacua

SEQ ID NO: 1938272 - RNA, 19 nt, Artificial Sequence
  Description of Artificial Sequence: Synthetic oligonucleotide
  Sense strand starting at position 2714 of SEQ ID NO: 1879882
guuggaagauuauuauguu

SEQ ID NO: 1938273 - RNA, 19 nt, Artificial Sequence
  Description of Artificial Sequence: Synthetic oligonucleotide
  Antisense strand to SEQ ID NO: 1938272
aacauaauaaucuuccaac

SEQ ID NO: 1938274 - RNA, 19 nt, Artificial Sequence
  Description of Artificial Sequence: Synthetic oligonucleotide
  Sense strand starting at position 2809 of SEQ ID NO: 1879882
ugcuauuaugaagaguuac

SEQ ID NO: 1938275 - RNA, 19 nt, Artificial Sequence
  Description of Artificial Sequence: Synthetic oligonucleotide
  Antisense strand to SEQ ID NO: 1938274
guaacucuucauaauagca

SEQ ID NO: 1938276 - RNA, 19 nt, Artificial Sequence
  Description of Artificial Sequence: Synthetic oligonucleotide
  Sense strand starting at position 2819 of SEQ ID NO: 1879882
aagaguuacuuagaguuau

SEQ ID NO: 1938277 - RNA, 19 nt, Artificial Sequence
  Description of Artificial Sequence: Synthetic oligonucleotide
  Antisense strand to SEQ ID NO: 1938276
auaacucuaaguaacucuu

SEQ ID NO: 1938278 - RNA, 19 nt, Artificial Sequence
  Description of Artificial Sequence: Synthetic oligonucleotide
  Sense strand starting at position 2825 of SEQ ID NO: 1879882
uacuuagaguuauaagagu

SEQ ID NO: 1938279 - RNA, 19 nt, Artificial Sequence
  Description of Artificial Sequence: Synthetic oligonucleotide
  Antisense strand to SEQ ID NO: 1938278
acucuuauaacucuaagua

SEQ ID NO: 1938280 - RNA, 19 nt, Artificial Sequence
  Description of Artificial Sequence: Synthetic oligonucleotide
  Sense strand starting at position 2831 of SEQ ID NO: 1879882
gaguuauaagaguacugua

SEQ ID NO: 1938281 - RNA, 19 nt, Artificial Sequence
  Description of Artificial Sequence: Synthetic oligonucleotide
  Antisense strand to SEQ ID NO: 1938280
uacaguacucuuauaacuc

SEQ ID NO: 1938282 - RNA, 19 nt, Artificial Sequence
  Description of Artificial Sequence: Synthetic oligonucleotide
  Sense strand starting at position 3022 of SEQ ID NO: 1879882
aguagaguagcaugggaua

SEQ ID NO: 1938283 - RNA, 19 nt, Artificial Sequence
  Description of Artificial Sequence: Synthetic oligonucleotide
  Antisense strand to SEQ ID NO: 1938282
uaucccaugcuacucuacu

SEQ ID NO: 1938284 - RNA, 19 nt, Artificial Sequence
  Description of Artificial Sequence: Synthetic oligonucleotide
  Sense strand starting at position 3037 of SEQ ID NO: 1879882
gauacagauagagguugua

SEQ ID NO: 1938285 - RNA, 19 nt, Artificial Sequence
  Description of Artificial Sequence: Synthetic oligonucleotide
  Antisense strand to SEQ ID NO: 1938284
uacaaccucuaucuguauc

SEQ ID NO: 1938286 - RNA, 19 nt, Artificial Sequence
  Description of Artificial Sequence: Synthetic oligonucleotide
  Sense strand starting at position 3057 of SEQ ID NO: 1879882
ggaucagauugugccaaga

SEQ ID NO: 1938287 - RNA, 19 nt, Artificial Sequence
  Description of Artificial Sequence: Synthetic oligonucleotide
  Antisense strand to SEQ ID NO: 1938286
ucuuggcacaaucugaucc

SEQ ID NO: 1938288 - RNA, 19 nt, Artificial Sequence
  Description of Artificial Sequence: Synthetic oligonucleotide
  Sense strand starting at position 3059 of SEQ ID NO: 1879882
aucagauugugccaagaac

SEQ ID NO: 1938289 - RNA, 19 nt, Artificial Sequence
  Description of Artificial Sequence: Synthetic oligonucleotide
  Antisense strand to SEQ ID NO: 1938288
guucuuggcacaaucugau

SEQ ID NO: 1938290 - RNA, 19 nt, Artificial Sequence
  Description of Artificial Sequence: Synthetic oligonucleotide
  Sense strand starting at position 3068 of SEQ ID NO: 1879882
ugccaagaaccuuguauga

SEQ ID NO: 1938291 - RNA, 19 nt, Artificial Sequence
  Description of Artificial Sequence: Synthetic oligonucleotide
  Antisense strand to SEQ ID NO: 1938290
ucauacaagguucuuggca

SEQ ID NO: 1938292 - RNA, 19 nt, Artificial Sequence
  Description of Artificial Sequence: Synthetic oligonucleotide
  Sense strand starting at position 3070 of SEQ ID NO: 1879882
ccaagaaccuuguaugaua

SEQ ID NO: 1938293 - RNA, 19 nt, Artificial Sequence
  Description of Artificial Sequence: Synthetic oligonucleotide
  Antisense strand to SEQ ID NO: 1938292
uaucauacaagguucuugg

SEQ ID NO: 1938294 - RNA, 19 nt, Artificial Sequence
  Description of Artificial Sequence: Synthetic oligonucleotide
  Sense strand starting at position 3073 of SEQ ID NO: 1879882
agaaccuuguaugauauau

SEQ ID NO: 1938295 - RNA, 19 nt, Artificial Sequence
  Description of Artificial Sequence: Synthetic oligonucleotide
  Antisense strand to SEQ ID NO: 1938294
auauaucauacaagguucu

SEQ ID NO: 1938296 - RNA, 19 nt, Artificial Sequence
  Description of Artificial Sequence: Synthetic oligonucleotide
  Sense strand starting at position 3103 of SEQ ID NO: 1879882
gucacuauuuguugauuaa

SEQ ID NO: 1938297 - RNA, 19 nt, Artificial Sequence
  Description of Artificial Sequence: Synthetic oligonucleotide
  Antisense strand to SEQ ID NO: 1938296
uuaaucaacaaauagugac

SEQ ID NO: 1938298 - RNA, 19 nt, Artificial Sequence
  Description of Artificial Sequence: Synthetic oligonucleotide
  Sense strand starting at position 3141 of SEQ ID NO: 1879882
ggaagaauuuaaugguuau

SEQ ID NO: 1938299 - RNA, 19 nt, Artificial Sequence
  Description of Artificial Sequence: Synthetic oligonucleotide
  Antisense strand to SEQ ID NO: 1938298
auaaccauuaaauucuucc

SEQ ID NO: 1938300 - RNA, 19 nt, Artificial Sequence
  Description of Artificial Sequence: Synthetic oligonucleotide
  Sense strand starting at position 3390 of SEQ ID NO: 1879882
caaagaacuguuuguuugu

SEQ ID NO: 1938301 - RNA, 19 nt, Artificial Sequence
  Description of Artificial Sequence: Synthetic oligonucleotide
  Antisense strand to SEQ ID NO: 1938300
acaaacaaacaguucuuug

SEQ ID NO: 1938302 - RNA, 19 nt, Artificial Sequence
  Description of Artificial Sequence: Synthetic oligonucleotide
  Sense strand starting at position 3858 of SEQ ID NO: 1879882
gugugaccuugccucuaaa

SEQ ID NO: 1938303 - RNA, 19 nt, Artificial Sequence
  Description of Artificial Sequence: Synthetic oligonucleotide
  Antisense strand to SEQ ID NO: 1938302
uuuagaggcaaggucacac

SEQ ID NO: 1938304 - RNA, 19 nt, Artificial Sequence
  Description of Artificial Sequence: Synthetic oligonucleotide
  Sense strand starting at position 42 of SEQ ID NO: 1879883
aaucauaugcaagguugau

SEQ ID NO: 1938305 - RNA, 19 nt, Artificial Sequence
  Description of Artificial Sequence: Synthetic oligonucleotide
  Antisense strand to SEQ ID NO: 1938304
aucaaccuugcauaugauu

SEQ ID NO: 1938306 - RNA, 19 nt, Artificial Sequence
  Description of Artificial Sequence: Synthetic oligonucleotide
  Sense strand starting at position 218 of SEQ ID NO: 1879883
cccgcugccucauuuaaua

SEQ ID NO: 1938307 - RNA, 19 nt, Artificial Sequence
  Description of Artificial Sequence: Synthetic oligonucleotide
  Antisense strand to SEQ ID NO: 1938306
uauuaaaugaggcagcggg

SEQ ID NO: 1938308 - RNA, 19 nt, Artificial Sequence
  Description of Artificial Sequence: Synthetic oligonucleotide
  Sense strand starting at position 325 of SEQ ID NO: 1879883
ucccuacuggucuauugaa

SEQ ID NO: 1938309 - RNA, 19 nt, Artificial Sequence
  Description of Artificial Sequence: Synthetic oligonucleotide
  Antisense strand to SEQ ID NO: 1938308
uucaauagaccaguaggga

SEQ ID NO: 1938310 - RNA, 19 nt, Artificial Sequence
  Description of Artificial Sequence: Synthetic oligonucleotide
  Sense strand starting at position 435 of SEQ ID NO: 1879883
agaucacugucaccagaca

SEQ ID NO: 1938311 - RNA, 19 nt, Artificial Sequence
  Description of Artificial Sequence: Synthetic oligonucleotide
  Antisense strand to SEQ ID NO: 1938310
ugucuggugacagugaucu

SEQ ID NO: 1938312 - RNA, 19 nt, Artificial Sequence
  Description of Artificial Sequence: Synthetic oligonucleotide
  Sense strand starting at position 460 of SEQ ID NO: 1879883
ugaacuuaccuguagugua

SEQ ID NO: 1938313 - RNA, 19 nt, Artificial Sequence
  Description of Artificial Sequence: Synthetic oligonucleotide
  Antisense strand to SEQ ID NO: 1938312
uacacuacagguaaguuca

SEQ ID NO: 1938314 - RNA, 19 nt, Artificial Sequence
  Description of Artificial Sequence: Synthetic oligonucleotide
  Sense strand starting at position 465 of SEQ ID NO: 1879883
uuaccuguaguguauacua

SEQ ID NO: 1938315 - RNA, 19 nt, Artificial Sequence
  Description of Artificial Sequence: Synthetic oligonucleotide
  Antisense strand to SEQ ID NO: 1938314
uaguauacacuacagguaa

SEQ ID NO: 1938316 - RNA, 19 nt, Artificial Sequence
  Description of Artificial Sequence: Synthetic oligonucleotide
  Sense strand starting at position 473 of SEQ ID NO: 1879883
aguguauacuaaccauauu

SEQ ID NO: 1938317 - RNA, 19 nt, Artificial Sequence
  Description of Artificial Sequence: Synthetic oligonucleotide
  Antisense strand to SEQ ID NO: 1938316
aauaugguuaguauacacu

SEQ ID NO: 1938318 - RNA, 19 nt, Artificial Sequence
  Description of Artificial Sequence: Synthetic oligonucleotide
  Sense strand starting at position 506 of SEQ ID NO: 1879883
agaauugugaugugacuuu

SEQ ID NO: 1938319 - RNA, 19 nt, Artificial Sequence
  Description of Artificial Sequence: Synthetic oligonucleotide
  Antisense strand to SEQ ID NO: 1938318
aaagucacaucacaauucu

SEQ ID NO: 1938320 - RNA, 19 nt, Artificial Sequence
  Description of Artificial Sequence: Synthetic oligonucleotide
  Sense strand starting at position 551 of SEQ ID NO: 1879883
gaggauucugaacgugaga

SEQ ID NO: 1938321 - RNA, 19 nt, Artificial Sequence
  Description of Artificial Sequence: Synthetic oligonucleotide
  Antisense strand to SEQ ID NO: 1938320
ucucacguucagaauccuc

SEQ ID NO: 1938322 - RNA, 19 nt, Artificial Sequence
  Description of Artificial Sequence: Synthetic oligonucleotide
  Sense strand starting at position 553 of SEQ ID NO: 1879883
ggauucugaacgugagaga

SEQ ID NO: 1938323 - RNA, 19 nt, Artificial Sequence
  Description of Artificial Sequence: Synthetic oligonucleotide
  Antisense strand to SEQ ID NO: 1938322
ucucucacguucagaaucc

SEQ ID NO: 1938324 - RNA, 19 nt, Artificial Sequence
  Description of Artificial Sequence: Synthetic oligonucleotide
  Sense strand starting at position 784 of SEQ ID NO: 1879883
ucaguucuuuggguaaaca

SEQ ID NO: 1938325 - RNA, 19 nt, Artificial Sequence
  Description of Artificial Sequence: Synthetic oligonucleotide
  Antisense strand to SEQ ID NO: 1938324
uguuuacccaaagaacuga

SEQ ID NO: 1938326 - RNA, 19 nt, Artificial Sequence
  Description of Artificial Sequence: Synthetic oligonucleotide
  Sense strand starting at position 785 of SEQ ID NO: 1879883
caguucuuuggguaaacaa

SEQ ID NO: 1938327 - RNA, 19 nt, Artificial Sequence
  Description of Artificial Sequence: Synthetic oligonucleotide
  Antisense strand to SEQ ID NO: 1938326
uuguuuacccaaagaacug

SEQ ID NO: 1938328 - RNA, 19 nt, Artificial Sequence
  Description of Artificial Sequence: Synthetic oligonucleotide
  Sense strand starting at position 875 of SEQ ID NO: 1879883
ucaucuaguccugggauua

SEQ ID NO: 1938329 - RNA, 19 nt, Artificial Sequence
  Description of Artificial Sequence: Synthetic oligonucleotide
  Antisense strand to SEQ ID NO: 1938328
uaaucccaggacuagauga

SEQ ID NO: 1938330 - RNA, 19 nt, Artificial Sequence
  Description of Artificial Sequence: Synthetic oligonucleotide
  Sense strand starting at position 876 of SEQ ID NO: 1879883
caucuaguccugggauuac

SEQ ID NO: 1938331 - RNA, 19 nt, Artificial Sequence
  Description of Artificial Sequence: Synthetic oligonucleotide
  Antisense strand to SEQ ID NO: 1938330
guaaucccaggacuagaug

SEQ ID NO: 1938332 - RNA, 19 nt, Artificial Sequence
  Description of Artificial Sequence: Synthetic oligonucleotide
  Sense strand starting at position 946 of SEQ ID NO: 1879883
agccaacuagaaugaucuu

SEQ ID NO: 1938333 - RNA, 19 nt, Artificial Sequence
  Description of Artificial Sequence: Synthetic oligonucleotide
  Antisense strand to SEQ ID NO: 1938332
aagaucauucuaguuggcu

SEQ ID NO: 1938334 - RNA, 19 nt, Artificial Sequence
  Description of Artificial Sequence: Synthetic oligonucleotide
  Sense strand starting at position 1018 of SEQ ID NO: 1879883
ucccacuguccucaggaua

SEQ ID NO: 1938335 - RNA, 19 nt, Artificial Sequence
  Description of Artificial Sequence: Synthetic oligonucleotide
  Antisense strand to SEQ ID NO: 1938334
uauccugaggacaguggga

SEQ ID NO: 1938336 - RNA, 19 nt, Artificial Sequence
  Description of Artificial Sequence: Synthetic oligonucleotide
  Sense strand starting at position 1249 of SEQ ID NO: 1879883
cucgcuucuccagauggau

SEQ ID NO: 1938337 - RNA, 19 nt, Artificial Sequence
  Description of Artificial Sequence: Synthetic oligonucleotide
  Antisense strand to SEQ ID NO: 1938336
auccaucuggagaagcgag

SEQ ID NO: 1938338 - RNA, 19 nt, Artificial Sequence
  Description of Artificial Sequence: Synthetic oligonucleotide
  Sense strand starting at position 1257 of SEQ ID NO: 1879883
uccagauggaugggucauu

SEQ ID NO: 1938339 - RNA, 19 nt, Artificial Sequence
  Description of Artificial Sequence: Synthetic oligonucleotide
  Antisense strand to SEQ ID NO: 1938338
aaugacccauccaucugga

SEQ ID NO: 1938340 - RNA, 19 nt, Artificial Sequence
  Description of Artificial Sequence: Synthetic oligonucleotide
  Sense strand starting at position 1332 of SEQ ID NO: 1879883
aagugugcuacugagguaa

SEQ ID NO: 1938341 - RNA, 19 nt, Artificial Sequence
  Description of Artificial Sequence: Synthetic oligonucleotide
  Antisense strand to SEQ ID NO: 1938340
uuaccucaguagcacacuu

SEQ ID NO: 1938342 - RNA, 19 nt, Artificial Sequence
  Description of Artificial Sequence: Synthetic oligonucleotide
  Sense strand starting at position 1461 of SEQ ID NO: 1879883
gggccauaauacuccuuua

SEQ ID NO: 1938343 - RNA, 19 nt, Artificial Sequence
  Description of Artificial Sequence: Synthetic oligonucleotide
  Antisense strand to SEQ ID NO: 1938342
uaaaggaguauuauggccc

SEQ ID NO: 1938344 - RNA, 19 nt, Artificial Sequence
  Description of Artificial Sequence: Synthetic oligonucleotide
  Sense strand starting at position 1569 of SEQ ID NO: 1879883
ggcuguucacugcaaggga

SEQ ID NO: 1938345 - RNA, 19 nt, Artificial Sequence
  Description of Artificial Sequence: Synthetic oligonucleotide
  Antisense strand to SEQ ID NO: 1938344
ucccuugcagugaacagcc

SEQ ID NO: 1938346 - RNA, 19 nt, Artificial Sequence
  Description of Artificial Sequence: Synthetic oligonucleotide
  Sense strand starting at position 1602 of SEQ ID NO: 1879883
ggcccaaaggugugaaaua

SEQ ID NO: 1938347 - RNA, 19 nt, Artificial Sequence
  Description of Artificial Sequence: Synthetic oligonucleotide
  Antisense strand to SEQ ID NO: 1938346
uauuucacaccuuugggcc

SEQ ID NO: 1938348 - RNA, 19 nt, Artificial Sequence
  Description of Artificial Sequence: Synthetic oligonucleotide
  Sense strand starting at position 2163 of SEQ ID NO: 1879883
agggaaaccuuggccgaau

SEQ ID NO: 1938349 - RNA, 19 nt, Artificial Sequence
  Description of Artificial Sequence: Synthetic oligonucleotide
  Antisense strand to SEQ ID NO: 1938348
auucggccaagguuucccu

SEQ ID NO: 1938350 - RNA, 19 nt, Artificial Sequence
  Description of Artificial Sequence: Synthetic oligonucleotide
  Sense strand starting at position 2166 of SEQ ID NO: 1879883
gaaaccuuggccgaaucaa

SEQ ID NO: 1938351 - RNA, 19 nt, Artificial Sequence
  Description of Artificial Sequence: Synthetic oligonucleotide
  Antisense strand to SEQ ID NO: 1938350
uugauucggccaagguuuc

SEQ ID NO: 1938352 - RNA, 19 nt, Artificial Sequence
  Description of Artificial Sequence: Synthetic oligonucleotide
  Sense strand starting at position 2176 of SEQ ID NO: 1879883
ccgaaucaacccgauuauu

SEQ ID NO: 1938353 - RNA, 19 nt, Artificial Sequence
  Description of Artificial Sequence: Synthetic oligonucleotide
  Antisense strand to SEQ ID NO: 1938352
aauaaucggguugauucgg

SEQ ID NO: 1938354 - RNA, 19 nt, Artificial Sequence
  Description of Artificial Sequence: Synthetic oligonucleotide
  Sense strand starting at position 2186 of SEQ ID NO: 1879883
ccgauuauuaugggcaaac

SEQ ID NO: 1938355 - RNA, 19 nt, Artificial Sequence
  Description of Artificial Sequence: Synthetic oligonucleotide
  Antisense strand to SEQ ID NO: 1938354
guuugcccauaauaaucgg

SEQ ID NO: 1938356 - RNA, 19 nt, Artificial Sequence
  Description of Artificial Sequence: Synthetic oligonucleotide
  Sense strand starting at position 2805 of SEQ ID NO: 1879883
uugucuacucguguuaggu

SEQ ID NO: 1938357 - RNA, 19 nt, Artificial Sequence
  Description of Artificial Sequence: Synthetic oligonucleotide
  Antisense strand to SEQ ID NO: 1938356
accuaacacgaguagacaa

SEQ ID NO: 1938358 - RNA, 19 nt, Artificial Sequence
  Description of Artificial Sequence: Synthetic oligonucleotide
  Sense strand starting at position 2806 of SEQ ID NO: 1879883
ugucuacucguguuagguu

SEQ ID NO: 1938359 - RNA, 19 nt, Artificial Sequence
  Description of Artificial Sequence: Synthetic oligonucleotide
  Antisense strand to SEQ ID NO: 1938358
aaccuaacacgaguagaca

SEQ ID NO: 1938360 - RNA, 19 nt, Artificial Sequence
  Description of Artificial Sequence: Synthetic oligonucleotide
  Sense strand starting at position 3032 of SEQ ID NO: 1879883
ugccuagcaggauauugau

SEQ ID NO: 1938361 - RNA, 19 nt, Artificial Sequence
  Description of Artificial Sequence: Synthetic oligonucleotide
  Antisense strand to SEQ ID NO: 1938360
aucaauauccugcuaggca

SEQ ID NO: 1938362 - RNA, 19 nt, Artificial Sequence
  Description of Artificial Sequence: Synthetic oligonucleotide
  Sense strand starting at position 3049 of SEQ ID NO: 1879883
auauaaagauguucucaug

SEQ ID NO: 1938363 - RNA, 19 nt, Artificial Sequence
  Description of Artificial Sequence: Synthetic oligonucleotide
  Antisense strand to SEQ ID NO: 1938362
caugagaacaucuuuauau

SEQ ID NO: 1938364 - RNA, 19 nt, Artificial Sequence
  Description of Artificial Sequence: Synthetic oligonucleotide
  Sense strand starting at position 3136 of SEQ ID NO: 1879883
auaugagagggauguuucu

SEQ ID NO: 1938365 - RNA, 19 nt, Artificial Sequence
  Description of Artificial Sequence: Synthetic oligonucleotide
  Antisense strand to SEQ ID NO: 1938364
agaaacaucccucucauau

SEQ ID NO: 1938366 - RNA, 19 nt, Artificial Sequence
  Description of Artificial Sequence: Synthetic oligonucleotide
  Sense strand starting at position 3239 of SEQ ID NO: 1879883
ugaccaaggucugcagaau

SEQ ID NO: 1938367 - RNA, 19 nt, Artificial Sequence
  Description of Artificial Sequence: Synthetic oligonucleotide
  Antisense strand to SEQ ID NO: 1938366
auucugcagaccuugguca

SEQ ID NO: 1938368 - RNA, 19 nt, Artificial Sequence
  Description of Artificial Sequence: Synthetic oligonucleotide
  Sense strand starting at position 3274 of SEQ ID NO: 1879883
aauggugcaguuuagagua

SEQ ID NO: 1938369 - RNA, 19 nt, Artificial Sequence
  Description of Artificial Sequence: Synthetic oligonucleotide
  Antisense strand to SEQ ID NO: 1938368
uacucuaaacugcaccauu

SEQ ID NO: 1938370 - RNA, 19 nt, Artificial Sequence
  Description of Artificial Sequence: Synthetic oligonucleotide
  Sense strand starting at position 3279 of SEQ ID NO: 1879883
ugcaguuuagaguaacauc

SEQ ID NO: 1938371 - RNA, 19 nt, Artificial Sequence
  Description of Artificial Sequence: Synthetic oligonucleotide
  Antisense strand to SEQ ID NO: 1938370
gauguuacucuaaacugca

SEQ ID NO: 1938372 - RNA, 19 nt, Artificial Sequence
  Description of Artificial Sequence: Synthetic oligonucleotide
  Sense strand starting at position 3288 of SEQ ID NO: 1879883
gaguaacaucuuggacuaa

SEQ ID NO: 1938373 - RNA, 19 nt, Artificial Sequence
  Description of Artificial Sequence: Synthetic oligonucleotide
  Antisense strand to SEQ ID NO: 1938372
uuaguccaagauguuacuc

SEQ ID NO: 1938374 - RNA, 19 nt, Artificial Sequence
  Description of Artificial Sequence: Synthetic oligonucleotide
  Sense strand starting at position 3329 of SEQ ID NO: 1879883
gguugacauagugguagga

SEQ ID NO: 1938375 - RNA, 19 nt, Artificial Sequence
  Description of Artificial Sequence: Synthetic oligonucleotide
  Antisense strand to SEQ ID NO: 1938374
uccuaccacuaugucaacc

SEQ ID NO: 1938376 - RNA, 19 nt, Artificial Sequence
  Description of Artificial Sequence: Synthetic oligonucleotide
  Sense strand starting at position 3506 of SEQ ID NO: 1879883
gggcauaucaggugggaaa

SEQ ID NO: 1938377 - RNA, 19 nt, Artificial Sequence
  Description of Artificial Sequence: Synthetic oligonucleotide
  Antisense strand to SEQ ID NO: 1938376
uuucccaccugauaugccc

SEQ ID NO: 1938378 - RNA, 19 nt, Artificial Sequence
  Description of Artificial Sequence: Synthetic oligonucleotide
  Sense strand starting at position 3556 of SEQ ID NO: 1879883
guaagccuucuggaagauu

SEQ ID NO: 1938379 - RNA, 19 nt, Artificial Sequence
  Description of Artificial Sequence: Synthetic oligonucleotide
  Antisense strand to SEQ ID NO: 1938378
aaucuuccagaaggcuuac

SEQ ID NO: 1938380 - RNA, 19 nt, Artificial Sequence
  Description of Artificial Sequence: Synthetic oligonucleotide
  Sense strand starting at position 3584 of SEQ ID NO: 1879883
ugagaagcugcugaaguua

SEQ ID NO: 1938381 - RNA, 19 nt, Artificial Sequence
  Description of Artificial Sequence: Synthetic oligonucleotide
  Antisense strand to SEQ ID NO: 1938380
uaacuucagcagcuucuca

SEQ ID NO: 1938382 - RNA, 19 nt, Artificial Sequence
  Description of Artificial Sequence: Synthetic oligonucleotide
  Sense strand starting at position 3610 of SEQ ID NO: 1879883
agaguuacaugcucacauc

SEQ ID NO: 1938383 - RNA, 19 nt, Artificial Sequence
  Description of Artificial Sequence: Synthetic oligonucleotide
  Antisense strand to SEQ ID NO: 1938382
gaugugagcauguaacucu

SEQ ID NO: 1938384 - RNA, 19 nt, Artificial Sequence
  Description of Artificial Sequence: Synthetic oligonucleotide
  Sense strand starting at position 955 of SEQ ID NO: 1879884
gcagaaucagaauaucugu

SEQ ID NO: 1938385 - RNA, 19 nt, Artificial Sequence
  Description of Artificial Sequence: Synthetic oligonucleotide
  Antisense strand to SEQ ID NO: 1938384
acagauauucugauucugc

SEQ ID NO: 1938386 - RNA, 19 nt, Artificial Sequence
  Description of Artificial Sequence: Synthetic oligonucleotide
  Sense strand starting at position 958 of SEQ ID NO: 1879884
gaaucagaauaucugugau

SEQ ID NO: 1938387 - RNA, 19 nt, Artificial Sequence
  Description of Artificial Sequence: Synthetic oligonucleotide
  Antisense strand to SEQ ID NO: 1938386
aucacagauauucugauuc

SEQ ID NO: 1938388 - RNA, 19 nt, Artificial Sequence
  Description of Artificial Sequence: Synthetic oligonucleotide
  Sense strand starting at position 960 of SEQ ID NO: 1879884
aucagaauaucugugaugu

SEQ ID NO: 1938389 - RNA, 19 nt, Artificial Sequence
  Description of Artificial Sequence: Synthetic oligonucleotide
  Antisense strand to SEQ ID NO: 1938388
acaucacagauauucugau

SEQ ID NO: 1938390 - RNA, 19 nt, Artificial Sequence
  Description of Artificial Sequence: Synthetic oligonucleotide
  Sense strand starting at position 961 of SEQ ID NO: 1879884
ucagaauaucugugauguu

SEQ ID NO: 1938391 - RNA, 19 nt, Artificial Sequence
  Description of Artificial Sequence: Synthetic oligonucleotide
  Antisense strand to SEQ ID NO: 1938390
aacaucacagauauucuga

SEQ ID NO: 1938392 - RNA, 19 nt, Artificial Sequence
  Description of Artificial Sequence: Synthetic oligonucleotide
  Sense strand starting at position 1087 of SEQ ID NO: 1879884
ccuuguuaacaugagcaca

SEQ ID NO: 1938393 - RNA, 19 nt, Artificial Sequence
  Description of Artificial Sequence: Synthetic oligonucleotide
  Antisense strand to SEQ ID NO: 1938392
ugugcucauguuaacaagg

SEQ ID NO: 1938394 - RNA, 19 nt, Artificial Sequence
  Description of Artificial Sequence: Synthetic oligonucleotide
  Sense strand starting at position 1132 of SEQ ID NO: 1879884
auacucuucuggguauaac

SEQ ID NO: 1938395 - RNA, 19 nt, Artificial Sequence
  Description of Artificial Sequence: Synthetic oligonucleotide
  Antisense strand to SEQ ID NO: 1938394
guuauacccagaagaguau

SEQ ID NO: 1938396 - RNA, 19 nt, Artificial Sequence
  Description of Artificial Sequence: Synthetic oligonucleotide
  Sense strand starting at position 1210 of SEQ ID NO: 1879884
cugguuuauggugacaauu

SEQ ID NO: 1938397 - RNA, 19 nt, Artificial Sequence
  Description of Artificial Sequence: Synthetic oligonucleotide
  Antisense strand to SEQ ID NO: 1938396
aauugucaccauaaaccag

SEQ ID NO: 1938398 - RNA, 19 nt, Artificial Sequence
  Description of Artificial Sequence: Synthetic oligonucleotide
  Sense strand starting at position 1212 of SEQ ID NO: 1879884
gguuuauggugacaauuuc

SEQ ID NO: 1938399 - RNA, 19 nt, Artificial Sequence
  Description of Artificial Sequence: Synthetic oligonucleotide
  Antisense strand to SEQ ID NO: 1938398
gaaauugucaccauaaacc

SEQ ID NO: 1938400 - RNA, 19 nt, Artificial Sequence
  Description of Artificial Sequence: Synthetic oligonucleotide
  Sense strand starting at position 1220 of SEQ ID NO: 1879884
gugacaauuuccugaaugg

SEQ ID NO: 1938401 - RNA, 19 nt, Artificial Sequence
  Description of Artificial Sequence: Synthetic oligonucleotide
  Antisense strand to SEQ ID NO: 1938400
ccauucaggaaauugucac

SEQ ID NO: 1938402 - RNA, 19 nt, Artificial Sequence
  Description of Artificial Sequence: Synthetic oligonucleotide
  Sense strand starting at position 1289 of SEQ ID NO: 1879884
uuauauuacucuucugguu

SEQ ID NO: 1938403 - RNA, 19 nt, Artificial Sequence
  Description of Artificial Sequence: Synthetic oligonucleotide
  Antisense strand to SEQ ID NO: 1938402
aaccagaagaguaauauaa

SEQ ID NO: 1938404 - RNA, 19 nt, Artificial Sequence
  Description of Artificial Sequence: Synthetic oligonucleotide
  Sense strand starting at position 1294 of SEQ ID NO: 1879884
uuacucuucugguugguau

SEQ ID NO: 1938405 - RNA, 19 nt, Artificial Sequence
  Description of Artificial Sequence: Synthetic oligonucleotide
  Antisense strand to SEQ ID NO: 1938404
auaccaaccagaagaguaa

SEQ ID NO: 1938406 - RNA, 19 nt, Artificial Sequence
  Description of Artificial Sequence: Synthetic oligonucleotide
  Sense strand starting at position 1357 of SEQ ID NO: 1879884
cuuaguauagcauauacua

SEQ ID NO: 1938407 - RNA, 19 nt, Artificial Sequence
  Description of Artificial Sequence: Synthetic oligonucleotide
  Antisense strand to SEQ ID NO: 1938406
uaguauaugcuauacuaag

SEQ ID NO: 1938408 - RNA, 19 nt, Artificial Sequence
  Description of Artificial Sequence: Synthetic oligonucleotide
  Sense strand starting at position 1617 of SEQ ID NO: 1879884
ucucguaauuucccagcua

SEQ ID NO: 1938409 - RNA, 19 nt, Artificial Sequence
  Description of Artificial Sequence: Synthetic oligonucleotide
  Antisense strand to SEQ ID NO: 1938408
uagcugggaaauuacgaga

SEQ ID NO: 1938410 - RNA, 19 nt, Artificial Sequence
  Description of Artificial Sequence: Synthetic oligonucleotide
  Sense strand starting at position 1640 of SEQ ID NO: 1879884
gggaccuccuuccucuaau

SEQ ID NO: 1938411 - RNA, 19 nt, Artificial Sequence
  Description of Artificial Sequence: Synthetic oligonucleotide
  Antisense strand to SEQ ID NO: 1938410
auuagaggaaggagguccc

SEQ ID NO: 1938412 - RNA, 19 nt, Artificial Sequence
  Description of Artificial Sequence: Synthetic oligonucleotide
  Sense strand starting at position 1666 of SEQ ID NO: 1879884
agcuguggaguuuguggaa

SEQ ID NO: 1938413 - RNA, 19 nt, Artificial Sequence
  Description of Artificial Sequence: Synthetic oligonucleotide
  Antisense strand to SEQ ID NO: 1938412
uuccacaaacuccacagcu

SEQ ID NO: 1938414 - RNA, 19 nt, Artificial Sequence
  Description of Artificial Sequence: Synthetic oligonucleotide
  Sense strand starting at position 1670 of SEQ ID NO: 1879884
guggaguuuguggaacgaa

SEQ ID NO: 1938415 - RNA, 19 nt, Artificial Sequence
  Description of Artificial Sequence: Synthetic oligonucleotide
  Antisense strand to SEQ ID NO: 1938414
uucguuccacaaacuccac

SEQ ID NO: 1938416 - RNA, 19 nt, Artificial Sequence
  Description of Artificial Sequence: Synthetic oligonucleotide
  Sense strand starting at position 1671 of SEQ ID NO: 1879884
uggaguuuguggaacgaac

SEQ ID NO: 1938417 - RNA, 19 nt, Artificial Sequence
  Description of Artificial Sequence: Synthetic oligonucleotide
  Antisense strand to SEQ ID NO: 1938416
guucguuccacaaacucca

SEQ ID NO: 1938418 - RNA, 19 nt, Artificial Sequence
  Description of Artificial Sequence: Synthetic oligonucleotide
  Sense strand starting at position 2528 of SEQ ID NO: 1879884
ugcaaagggaugugaucuu

SEQ ID NO: 1938419 - RNA, 19 nt, Artificial Sequence
  Description of Artificial Sequence: Synthetic oligonucleotide
  Antisense strand to SEQ ID NO: 1938418
aagaucacaucccuuugca

SEQ ID NO: 1938420 - RNA, 19 nt, Artificial Sequence
  Description of Artificial Sequence: Synthetic oligonucleotide
  Sense strand starting at position 2535 of SEQ ID NO: 1879884
ggaugugaucuuggccuuu

SEQ ID NO: 1938421 - RNA, 19 nt, Artificial Sequence
  Description of Artificial Sequence: Synthetic oligonucleotide
  Antisense strand to SEQ ID NO: 1938420
aaaggccaagaucacaucc

SEQ ID NO: 1938422 - RNA, 19 nt, Artificial Sequence
  Description of Artificial Sequence: Synthetic oligonucleotide
  Sense strand starting at position 2537 of SEQ ID NO: 1879884
augugaucuuggccuuuag

SEQ ID NO: 1938423 - RNA, 19 nt, Artificial Sequence
  Description of Artificial Sequence: Synthetic oligonucleotide
  Antisense strand to SEQ ID NO: 1938422
cuaaaggccaagaucacau

SEQ ID NO: 1938424 - RNA, 19 nt, Artificial Sequence
  Description of Artificial Sequence: Synthetic oligonucleotide
  Sense strand starting at position 2546 of SEQ ID NO: 1879884
uggccuuuaggaugucauu

SEQ ID NO: 1938425 - RNA, 19 nt, Artificial Sequence
  Description of Artificial Sequence: Synthetic oligonucleotide
  Antisense strand to SEQ ID NO: 1938424
aaugacauccuaaaggcca

SEQ ID NO: 1938426 - RNA, 19 nt, Artificial Sequence
  Description of Artificial Sequence: Synthetic oligonucleotide
  Sense strand starting at position 2793 of SEQ ID NO: 1879884
cugggaucugcagaucuca

SEQ ID NO: 1938427 - RNA, 19 nt, Artificial Sequence
  Description of Artificial Sequence: Synthetic oligonucleotide
  Antisense strand to SEQ ID NO: 1938426
ugagaucugcagaucccag

SEQ ID NO: 1938428 - RNA, 19 nt, Artificial Sequence
  Description of Artificial Sequence: Synthetic oligonucleotide
  Sense strand starting at position 2898 of SEQ ID NO: 1879884
cucuguucccucuaaguua

SEQ ID NO: 1938429 - RNA, 19 nt, Artificial Sequence
  Description of Artificial Sequence: Synthetic oligonucleotide
  Antisense strand to SEQ ID NO: 1938428
uaacuuagagggaacagag

SEQ ID NO: 1938430 - RNA, 19 nt, Artificial Sequence
  Description of Artificial Sequence: Synthetic oligonucleotide
  Sense strand starting at position 2901 of SEQ ID NO: 1879884
uguucccucuaaguuaaau

SEQ ID NO: 1938431 - RNA, 19 nt, Artificial Sequence
  Description of Artificial Sequence: Synthetic oligonucleotide
  Antisense strand to SEQ ID NO: 1938430
auuuaacuuagagggaaca

SEQ ID NO: 1938432 - RNA, 19 nt, Artificial Sequence
  Description of Artificial Sequence: Synthetic oligonucleotide
  Sense strand starting at position 3022 of SEQ ID NO: 1879884
agaauaaacuaucacugga

SEQ ID NO: 1938433 - RNA, 19 nt, Artificial Sequence
  Description of Artificial Sequence: Synthetic oligonucleotide
  Antisense strand to SEQ ID NO: 1938432
uccagugauaguuuauucu

SEQ ID NO: 1938434 - RNA, 19 nt, Artificial Sequence
  Description of Artificial Sequence: Synthetic oligonucleotide
  Sense strand starting at position 3138 of SEQ ID NO: 1879884
uuuauugggaaacguaaga

SEQ ID NO: 1938435 - RNA, 19 nt, Artificial Sequence
  Description of Artificial Sequence: Synthetic oligonucleotide
  Antisense strand to SEQ ID NO: 1938434
ucuuacguuucccaauaaa

SEQ ID NO: 1938436 - RNA, 19 nt, Artificial Sequence
  Description of Artificial Sequence: Synthetic oligonucleotide
  Sense strand starting at position 3148 of SEQ ID NO: 1879884
aacguaagacuuggguaca

SEQ ID NO: 1938437 - RNA, 19 nt, Artificial Sequence
  Description of Artificial Sequence: Synthetic oligonucleotide
  Antisense strand to SEQ ID NO: 1938436
uguacccaagucuuacguu

SEQ ID NO: 1938438 - RNA, 19 nt, Artificial Sequence
  Description of Artificial Sequence: Synthetic oligonucleotide
  Sense strand starting at position 3331 of SEQ ID NO: 1879884
auuuguaauccuugguguu

SEQ ID NO: 1938439 - RNA, 19 nt, Artificial Sequence
  Description of Artificial Sequence: Synthetic oligonucleotide
  Antisense strand to SEQ ID NO: 1938438
aacaccaaggauuacaaau

SEQ ID NO: 1938440 - RNA, 19 nt, Artificial Sequence
  Description of Artificial Sequence: Synthetic oligonucleotide
  Sense strand starting at position 3344 of SEQ ID NO: 1879884
gguguugagguccauagga

SEQ ID NO: 1938441 - RNA, 19 nt, Artificial Sequence
  Description of Artificial Sequence: Synthetic oligonucleotide
  Antisense strand to SEQ ID NO: 1938440
uccuauggaccucaacacc

SEQ ID NO: 1938442 - RNA, 19 nt, Artificial Sequence
  Description of Artificial Sequence: Synthetic oligonucleotide
  Sense strand starting at position 3346 of SEQ ID NO: 1879884
uguugagguccauaggaca

SEQ ID NO: 1938443 - RNA, 19 nt, Artificial Sequence
  Description of Artificial Sequence: Synthetic oligonucleotide
  Antisense strand to SEQ ID NO: 1938442
uguccuauggaccucaaca

SEQ ID NO: 1938444 - RNA, 19 nt, Artificial Sequence
  Description of Artificial Sequence: Synthetic oligonucleotide
  Sense strand starting at position 3570 of SEQ ID NO: 1879884
uccuguguacuguacaaca

SEQ ID NO: 1938445 - RNA, 19 nt, Artificial Sequence
  Description of Artificial Sequence: Synthetic oligonucleotide
  Antisense strand to SEQ ID NO: 1938444
uguuguacaguacacagga

SEQ ID NO: 1938446 - RNA, 19 nt, Artificial Sequence
  Description of Artificial Sequence: Synthetic oligonucleotide
  Sense strand starting at position 3572 of SEQ ID NO: 1879884
cuguguacuguacaacauu

SEQ ID NO: 1938447 - RNA, 19 nt, Artificial Sequence
  Description of Artificial Sequence: Synthetic oligonucleotide
  Antisense strand to SEQ ID NO: 1938446
aauguuguacaguacacag

SEQ ID NO: 1938448 - RNA, 19 nt, Artificial Sequence
  Description of Artificial Sequence: Synthetic oligonucleotide
  Sense strand starting at position 3647 of SEQ ID NO: 1879884
gagggucaugacuaugcca

SEQ ID NO: 1938449 - RNA, 19 nt, Artificial Sequence
  Description of Artificial Sequence: Synthetic oligonucleotide
  Antisense strand to SEQ ID NO: 1938448
uggcauagucaugacccuc

SEQ ID NO: 1938450 - RNA, 19 nt, Artificial Sequence
  Description of Artificial Sequence: Synthetic oligonucleotide
  Sense strand starting at position 3649 of SEQ ID NO: 1879884
gggucaugacuaugccaag

SEQ ID NO: 1938451 - RNA, 19 nt, Artificial Sequence
  Description of Artificial Sequence: Synthetic oligonucleotide
  Antisense strand to SEQ ID NO: 1938450
cuuggcauagucaugaccc

SEQ ID NO: 1938452 - RNA, 19 nt, Artificial Sequence
  Description of Artificial Sequence: Synthetic oligonucleotide
  Sense strand starting at position 3650 of SEQ ID NO: 1879884
ggucaugacuaugccaagu

SEQ ID NO: 1938453 - RNA, 19 nt, Artificial Sequence
  Description of Artificial Sequence: Synthetic oligonucleotide
  Antisense strand to SEQ ID NO: 1938452
acuuggcauagucaugacc

SEQ ID NO: 1938454 - RNA, 19 nt, Artificial Sequence
  Description of Artificial Sequence: Synthetic oligonucleotide
  Sense strand starting at position 3813 of SEQ ID NO: 1879884
guccacaguccucaugaua

SEQ ID NO: 1938455 - RNA, 19 nt, Artificial Sequence
  Description of Artificial Sequence: Synthetic oligonucleotide
  Antisense strand to SEQ ID NO: 1938454
uaucaugaggacuguggac

SEQ ID NO: 1938456 - RNA, 19 nt, Artificial Sequence
  Description of Artificial Sequence: Synthetic oligonucleotide
  Sense strand starting at position 3846 of SEQ ID NO: 1879884
acacacuccguguaacuaa

SEQ ID NO: 1938457 - RNA, 19 nt, Artificial Sequence
  Description of Artificial Sequence: Synthetic oligonucleotide
  Antisense strand to SEQ ID NO: 1938456
uuaguuacacggagugugu

SEQ ID NO: 1938458 - RNA, 19 nt, Artificial Sequence
  Description of Artificial Sequence: Synthetic oligonucleotide
  Sense strand starting at position 3856 of SEQ ID NO: 1879884
uguaacuaacuguacuuau

SEQ ID NO: 1938459 - RNA, 19 nt, Artificial Sequence
  Description of Artificial Sequence: Synthetic oligonucleotide
  Antisense strand to SEQ ID NO: 1938458
auaaguacaguuaguuaca

SEQ ID NO: 1938460 - RNA, 19 nt, Artificial Sequence
  Description of Artificial Sequence: Synthetic oligonucleotide
  Sense strand starting at position 3873 of SEQ ID NO: 1879884
auuguauucccagagcuaa

SEQ ID NO: 1938461 - RNA, 19 nt, Artificial Sequence
  Description of Artificial Sequence: Synthetic oligonucleotide
  Antisense strand to SEQ ID NO: 1938460
uuagcucugggaauacaau

SEQ ID NO: 1938462 - RNA, 19 nt, Artificial Sequence
  Description of Artificial Sequence: Synthetic oligonucleotide
  Sense strand starting at position 3888 of SEQ ID NO: 1879884
cuaagcagugagcauauau

SEQ ID NO: 1938463 - RNA, 19 nt, Artificial Sequence
  Description of Artificial Sequence: Synthetic oligonucleotide
  Antisense strand to SEQ ID NO: 1938462
auauaugcucacugcuuag

SEQ ID NO: 1938464 - RNA, 19 nt, Artificial Sequence
  Description of Artificial Sequence: Synthetic oligonucleotide
  Sense strand starting at position 135 of SEQ ID NO: 1879885
ucaaacagcucugagcaaa

SEQ ID NO: 1938465 - RNA, 19 nt, Artificial Sequence
  Description of Artificial Sequence: Synthetic oligonucleotide
  Antisense strand to SEQ ID NO: 1938464
uuugcucagagcuguuuga

SEQ ID NO: 1938466 - RNA, 19 nt, Artificial Sequence
  Description of Artificial Sequence: Synthetic oligonucleotide
  Sense strand starting at position 146 of SEQ ID NO: 1879885
ugagcaaauggauguccaa

SEQ ID NO: 1938467 - RNA, 19 nt, Artificial Sequence
  Description of Artificial Sequence: Synthetic oligonucleotide
  Antisense strand to SEQ ID NO: 1938466
uuggacauccauuugcuca

SEQ ID NO: 1938468 - RNA, 19 nt, Artificial Sequence
  Description of Artificial Sequence: Synthetic oligonucleotide
  Sense strand starting at position 283 of SEQ ID NO: 1879885
cuuagagauucuggguuua

SEQ ID NO: 1938469 - RNA, 19 nt, Artificial Sequence
  Description of Artificial Sequence: Synthetic oligonucleotide
  Antisense strand to SEQ ID NO: 1938468
uaaacccagaaucucuaag

SEQ ID NO: 1938470 - RNA, 19 nt, Artificial Sequence
  Description of Artificial Sequence: Synthetic oligonucleotide
  Sense strand starting at position 285 of SEQ ID NO: 1879885
uagagauucuggguuuaag

SEQ ID NO: 1938471 - RNA, 19 nt, Artificial Sequence
  Description of Artificial Sequence: Synthetic oligonucleotide
  Antisense strand to SEQ ID NO: 1938470
cuuaaacccagaaucucua

SEQ ID NO: 1938472 - RNA, 19 nt, Artificial Sequence
  Description of Artificial Sequence: Synthetic oligonucleotide
  Sense strand starting at position 312 of SEQ ID NO: 1879885
cagcgauucugcuccaucu

SEQ ID NO: 1938473 - RNA, 19 nt, Artificial Sequence
  Description of Artificial Sequence: Synthetic oligonucleotide
  Antisense strand to SEQ ID NO: 1938472
agauggagcagaaucgcug

SEQ ID NO: 1938474 - RNA, 19 nt, Artificial Sequence
  Description of Artificial Sequence: Synthetic oligonucleotide
  Sense strand starting at position 328 of SEQ ID NO: 1879885
ucuagugcacuuugagaaa

SEQ ID NO: 1938475 - RNA, 19 nt, Artificial Sequence
  Description of Artificial Sequence: Synthetic oligonucleotide
  Antisense strand to SEQ ID NO: 1938474
uuucucaaagugcacuaga

SEQ ID NO: 1938476 - RNA, 19 nt, Artificial Sequence
  Description of Artificial Sequence: Synthetic oligonucleotide
  Sense strand starting at position 331 of SEQ ID NO: 1879885
agugcacuuugagaaaggu

SEQ ID NO: 1938477 - RNA, 19 nt, Artificial Sequence
  Description of Artificial Sequence: Synthetic oligonucleotide
  Antisense strand to SEQ ID NO: 1938476
accuuucucaaagugcacu

SEQ ID NO: 1938478 - RNA, 19 nt, Artificial Sequence
  Description of Artificial Sequence: Synthetic oligonucleotide
  Sense strand starting at position 472 of SEQ ID NO: 1879885
uccaaauuaccugaggcua

SEQ ID NO: 1938479 - RNA, 19 nt, Artificial Sequence
  Description of Artificial Sequence: Synthetic oligonucleotide
  Antisense strand to SEQ ID NO: 1938478
uagccucagguaauuugga

SEQ ID NO: 1938480 - RNA, 19 nt, Artificial Sequence
  Description of Artificial Sequence: Synthetic oligonucleotide
  Sense strand starting at position 484 of SEQ ID NO: 1879885
gaggcuaggccucaaguua

SEQ ID NO: 1938481 - RNA, 19 nt, Artificial Sequence
  Description of Artificial Sequence: Synthetic oligonucleotide
  Antisense strand to SEQ ID NO: 1938480
uaacuugaggccuagccuc

SEQ ID NO: 1938482 - RNA, 19 nt, Artificial Sequence
  Description of Artificial Sequence: Synthetic oligonucleotide
  Sense strand starting at position 492 of SEQ ID NO: 1879885
gccucaaguuacuccaaga

SEQ ID NO: 1938483 - RNA, 19 nt, Artificial Sequence
  Description of Artificial Sequence: Synthetic oligonucleotide
  Antisense strand to SEQ ID NO: 1938482
ucuuggaguaacuugaggc

SEQ ID NO: 1938484 - RNA, 19 nt, Artificial Sequence
  Description of Artificial Sequence: Synthetic oligonucleotide
  Sense strand starting at position 623 of SEQ ID NO: 1879885
agggccuggucaugagaua

SEQ ID NO: 1938485 - RNA, 19 nt, Artificial Sequence
  Description of Artificial Sequence: Synthetic oligonucleotide
  Antisense strand to SEQ ID NO: 1938484
uaucucaugaccaggcccu

SEQ ID NO: 1938486 - RNA, 19 nt, Artificial Sequence
  Description of Artificial Sequence: Synthetic oligonucleotide
  Sense strand starting at position 624 of SEQ ID NO: 1879885
gggccuggucaugagauaa

SEQ ID NO: 1938487 - RNA, 19 nt, Artificial Sequence
  Description of Artificial Sequence: Synthetic oligonucleotide
  Antisense strand to SEQ ID NO: 1938486
uuaucucaugaccaggccc

SEQ ID NO: 1938488 - RNA, 19 nt, Artificial Sequence
  Description of Artificial Sequence: Synthetic oligonucleotide
  Sense strand starting at position 762 of SEQ ID NO: 1879885
cgaccacugucuuugaaac

SEQ ID NO: 1938489 - RNA, 19 nt, Artificial Sequence
  Description of Artificial Sequence: Synthetic oligonucleotide
  Antisense strand to SEQ ID NO: 1938488
guuucaaagacaguggucg

SEQ ID NO: 1938490 - RNA, 19 nt, Artificial Sequence
  Description of Artificial Sequence: Synthetic oligonucleotide
  Sense strand starting at position 764 of SEQ ID NO: 1879885
accacugucuuugaaacgu

SEQ ID NO: 1938491 - RNA, 19 nt, Artificial Sequence
  Description of Artificial Sequence: Synthetic oligonucleotide
  Antisense strand to SEQ ID NO: 1938490
acguuucaaagacaguggu

SEQ ID NO: 1938492 - RNA, 19 nt, Artificial Sequence
  Description of Artificial Sequence: Synthetic oligonucleotide
  Sense strand starting at position 802 of SEQ ID NO: 1879885
gugcauuucuuauucucca

SEQ ID NO: 1938493 - RNA, 19 nt, Artificial Sequence
  Description of Artificial Sequence: Synthetic oligonucleotide
  Antisense strand to SEQ ID NO: 1938492
uggagaauaagaaaugcac

SEQ ID NO: 1938494 - RNA, 19 nt, Artificial Sequence
  Description of Artificial Sequence: Synthetic oligonucleotide
  Sense strand starting at position 807 of SEQ ID NO: 1879885
uuucuuauucuccaggugu

SEQ ID NO: 1938495 - RNA, 19 nt, Artificial Sequence
  Description of Artificial Sequence: Synthetic oligonucleotide
  Antisense strand to SEQ ID NO: 1938494
acaccuggagaauaagaaa

SEQ ID NO: 1938496 - RNA, 19 nt, Artificial Sequence
  Description of Artificial Sequence: Synthetic oligonucleotide
  Sense strand starting at position 809 of SEQ ID NO: 1879885
ucuuauucuccagguguaa

SEQ ID NO: 1938497 - RNA, 19 nt, Artificial Sequence
  Description of Artificial Sequence: Synthetic oligonucleotide
  Antisense strand to SEQ ID NO: 1938496
uuacaccuggagaauaaga

SEQ ID NO: 1938498 - RNA, 19 nt, Artificial Sequence
  Description of Artificial Sequence: Synthetic oligonucleotide
  Sense strand starting at position 1050 of SEQ ID NO: 1879885
cuggaacucaagugauuga

SEQ ID NO: 1938499 - RNA, 19 nt, Artificial Sequence
  Description of Artificial Sequence: Synthetic oligonucleotide
  Antisense strand to SEQ ID NO: 1938498
ucaaucacuugaguuccag

SEQ ID NO: 1938500 - RNA, 19 nt, Artificial Sequence
  Description of Artificial Sequence: Synthetic oligonucleotide
  Sense strand starting at position 1053 of SEQ ID NO: 1879885
gaacucaagugauugagcu

SEQ ID NO: 1938501 - RNA, 19 nt, Artificial Sequence
  Description of Artificial Sequence: Synthetic oligonucleotide
  Antisense strand to SEQ ID NO: 1938500
agcucaaucacuugaguuc

SEQ ID NO: 1938502 - RNA, 19 nt, Artificial Sequence
  Description of Artificial Sequence: Synthetic oligonucleotide
  Sense strand starting at position 1054 of SEQ ID NO: 1879885
aacucaagugauugagcuu

SEQ ID NO: 1938503 - RNA, 19 nt, Artificial Sequence
  Description of Artificial Sequence: Synthetic oligonucleotide
  Antisense strand to SEQ ID NO: 1938502
aagcucaaucacuugaguu

SEQ ID NO: 1938504 - RNA, 19 nt, Artificial Sequence
  Description of Artificial Sequence: Synthetic oligonucleotide
  Sense strand starting at position 1061 of SEQ ID NO: 1879885
gugauugagcuucguaguu

SEQ ID NO: 1938505 - RNA, 19 nt, Artificial Sequence
  Description of Artificial Sequence: Synthetic oligonucleotide
  Antisense strand to SEQ ID NO: 1938504
aacuacgaagcucaaucac

SEQ ID NO: 1938506 - RNA, 19 nt, Artificial Sequence
  Description of Artificial Sequence: Synthetic oligonucleotide
  Sense strand starting at position 1066 of SEQ ID NO: 1879885
ugagcuucguaguucucau

SEQ ID NO: 1938507 - RNA, 19 nt, Artificial Sequence
  Description of Artificial Sequence: Synthetic oligonucleotide
  Antisense strand to SEQ ID NO: 1938506
augagaacuacgaagcuca

SEQ ID NO: 1938508 - RNA, 19 nt, Artificial Sequence
  Description of Artificial Sequence: Synthetic oligonucleotide
  Sense strand starting at position 1129 of SEQ ID NO: 1879885
ugcagaguuaaaugagaca

SEQ ID NO: 1938509 - RNA, 19 nt, Artificial Sequence
  Description of Artificial Sequence: Synthetic oligonucleotide
  Antisense strand to SEQ ID NO: 1938508
ugucucauuuaacucugca

SEQ ID NO: 1938510 - RNA, 19 nt, Artificial Sequence
  Description of Artificial Sequence: Synthetic oligonucleotide
  Sense strand starting at position 1132 of SEQ ID NO: 1879885
agaguuaaaugagacaauc

SEQ ID NO: 1938511 - RNA, 19 nt, Artificial Sequence
  Description of Artificial Sequence: Synthetic oligonucleotide
  Antisense strand to SEQ ID NO: 1938510
gauugucucauuuaacucu

SEQ ID NO: 1938512 - RNA, 19 nt, Artificial Sequence
  Description of Artificial Sequence: Synthetic oligonucleotide
  Sense strand starting at position 1262 of SEQ ID NO: 1879885
uucaguaagcguugauuag

SEQ ID NO: 1938513 - RNA, 19 nt, Artificial Sequence
  Description of Artificial Sequence: Synthetic oligonucleotide
  Antisense strand to SEQ ID NO: 1938512
cuaaucaacgcuuacugaa

SEQ ID NO: 1938514 - RNA, 19 nt, Artificial Sequence
  Description of Artificial Sequence: Synthetic oligonucleotide
  Sense strand starting at position 1263 of SEQ ID NO: 1879885
ucaguaagcguugauuaga

SEQ ID NO: 1938515 - RNA, 19 nt, Artificial Sequence
  Description of Artificial Sequence: Synthetic oligonucleotide
  Antisense strand to SEQ ID NO: 1938514
ucuaaucaacgcuuacuga

SEQ ID NO: 1938516 - RNA, 19 nt, Artificial Sequence
  Description of Artificial Sequence: Synthetic oligonucleotide
  Sense strand starting at position 1266 of SEQ ID NO: 1879885
guaagcguugauuagacau

SEQ ID NO: 1938517 - RNA, 19 nt, Artificial Sequence
  Description of Artificial Sequence: Synthetic oligonucleotide
  Antisense strand to SEQ ID NO: 1938516
augucuaaucaacgcuuac

SEQ ID NO: 1938518 - RNA, 19 nt, Artificial Sequence
  Description of Artificial Sequence: Synthetic oligonucleotide
  Sense strand starting at position 1268 of SEQ ID NO: 1879885
aagcguugauuagacauga

SEQ ID NO: 1938519 - RNA, 19 nt, Artificial Sequence
  Description of Artificial Sequence: Synthetic oligonucleotide
  Antisense strand to SEQ ID NO: 1938518
ucaugucuaaucaacgcuu

SEQ ID NO: 1938520 - RNA, 19 nt, Artificial Sequence
  Description of Artificial Sequence: Synthetic oligonucleotide
  Sense strand starting at position 1272 of SEQ ID NO: 1879885
guugauuagacaugaccug

SEQ ID NO: 1938521 - RNA, 19 nt, Artificial Sequence
  Description of Artificial Sequence: Synthetic oligonucleotide
  Antisense strand to SEQ ID NO: 1938520
caggucaugucuaaucaac

SEQ ID NO: 1938522 - RNA, 19 nt, Artificial Sequence
  Description of Artificial Sequence: Synthetic oligonucleotide
  Sense strand starting at position 2832 of SEQ ID NO: 1879885
gaauuugaccugugcagcu

SEQ ID NO: 1938523 - RNA, 19 nt, Artificial Sequence
  Description of Artificial Sequence: Synthetic oligonucleotide
  Antisense strand to SEQ ID NO: 1938522
agcugcacaggucaaauuc

SEQ ID NO: 1938524 - RNA, 19 nt, Artificial Sequence
  Description of Artificial Sequence: Synthetic oligonucleotide
  Sense strand starting at position 3029 of SEQ ID NO: 1879885
agagucuaaugaggaagau

SEQ ID NO: 1938525 - RNA, 19 nt, Artificial Sequence
  Description of Artificial Sequence: Synthetic oligonucleotide
  Antisense strand to SEQ ID NO: 1938524
aucuuccucauuagacucu

SEQ ID NO: 1938526 - RNA, 19 nt, Artificial Sequence
  Description of Artificial Sequence: Synthetic oligonucleotide
  Sense strand starting at position 3195 of SEQ ID NO: 1879885
aacauuagagucugugcaa

SEQ ID NO: 1938527 - RNA, 19 nt, Artificial Sequence
  Description of Artificial Sequence: Synthetic oligonucleotide
  Antisense strand to SEQ ID NO: 1938526
uugcacagacucuaauguu

SEQ ID NO: 1938528 - RNA, 19 nt, Artificial Sequence
  Description of Artificial Sequence: Synthetic oligonucleotide
  Sense strand starting at position 3196 of SEQ ID NO: 1879885
acauuagagucugugcaaa

SEQ ID NO: 1938529 - RNA, 19 nt, Artificial Sequence
  Description of Artificial Sequence: Synthetic oligonucleotide
  Antisense strand to SEQ ID NO: 1938528
uuugcacagacucuaaugu

SEQ ID NO: 1938530 - RNA, 19 nt, Artificial Sequence
  Description of Artificial Sequence: Synthetic oligonucleotide
  Sense strand starting at position 3198 of SEQ ID NO: 1879885
auuagagucugugcaaaga

SEQ ID NO: 1938531 - RNA, 19 nt, Artificial Sequence
  Description of Artificial Sequence: Synthetic oligonucleotide
  Antisense strand to SEQ ID NO: 1938530
ucuuugcacagacucuaau

SEQ ID NO: 1938532 - RNA, 19 nt, Artificial Sequence
  Description of Artificial Sequence: Synthetic oligonucleotide
  Sense strand starting at position 3229 of SEQ ID NO: 1879885
augcaaugugcgugaugug

SEQ ID NO: 1938533 - RNA, 19 nt, Artificial Sequence
  Description of Artificial Sequence: Synthetic oligonucleotide
  Antisense strand to SEQ ID NO: 1938532
cacaucacgcacauugcau

SEQ ID NO: 1938534 - RNA, 19 nt, Artificial Sequence
  Description of Artificial Sequence: Synthetic oligonucleotide
  Sense strand starting at position 3234 of SEQ ID NO: 1879885
augugcgugaugugugaaa

SEQ ID NO: 1938535 - RNA, 19 nt, Artificial Sequence
  Description of Artificial Sequence: Synthetic oligonucleotide
  Antisense strand to SEQ ID NO: 1938534
uuucacacaucacgcacau

SEQ ID NO: 1938536 - RNA, 19 nt, Artificial Sequence
  Description of Artificial Sequence: Synthetic oligonucleotide
  Sense strand starting at position 3237 of SEQ ID NO: 1879885
ugcgugaugugugaaagga

SEQ ID NO: 1938537 - RNA, 19 nt, Artificial Sequence
  Description of Artificial Sequence: Synthetic oligonucleotide
  Antisense strand to SEQ ID NO: 1938536
uccuuucacacaucacgca

SEQ ID NO: 1938538 - RNA, 19 nt, Artificial Sequence
  Description of Artificial Sequence: Synthetic oligonucleotide
  Sense strand starting at position 3239 of SEQ ID NO: 1879885
cgugaugugugaaaggaag

SEQ ID NO: 1938539 - RNA, 19 nt, Artificial Sequence
  Description of Artificial Sequence: Synthetic oligonucleotide
  Antisense strand to SEQ ID NO: 1938538
cuuccuuucacacaucacg

SEQ ID NO: 1938540 - RNA, 19 nt, Artificial Sequence
  Description of Artificial Sequence: Synthetic oligonucleotide
  Sense strand starting at position 3374 of SEQ ID NO: 1879885
ggcuguuacccuuaccaug

SEQ ID NO: 1938541 - RNA, 19 nt, Artificial Sequence
  Description of Artificial Sequence: Synthetic oligonucleotide
  Antisense strand to SEQ ID NO: 1938540
caugguaaggguaacagcc

SEQ ID NO: 1938542 - RNA, 19 nt, Artificial Sequence
  Description of Artificial Sequence: Synthetic oligonucleotide
  Sense strand starting at position 3451 of SEQ ID NO: 1879885
cuggguccuccugagucau

SEQ ID NO: 1938543 - RNA, 19 nt, Artificial Sequence
  Description of Artificial Sequence: Synthetic oligonucleotide
  Antisense strand to SEQ ID NO: 1938542
augacucaggaggacccag

SEQ ID NO: 1938544 - RNA, 19 nt, Artificial Sequence
  Description of Artificial Sequence: Synthetic oligonucleotide
  Sense strand starting at position 286 of SEQ ID NO: 1879886
ccaggcugugaugauguua

SEQ ID NO: 1938545 - RNA, 19 nt, Artificial Sequence
  Description of Artificial Sequence: Synthetic oligonucleotide
  Antisense strand to SEQ ID NO: 1938544
uaacaucaucacagccugg

SEQ ID NO: 1938546 - RNA, 19 nt, Artificial Sequence
  Description of Artificial Sequence: Synthetic oligonucleotide
  Sense strand starting at position 412 of SEQ ID NO: 1879886
augaaaugauaggaaacau

SEQ ID NO: 1938547 - RNA, 19 nt, Artificial Sequence
  Description of Artificial Sequence: Synthetic oligonucleotide
  Antisense strand to SEQ ID NO: 1938546
auguuuccuaucauuucau

SEQ ID NO: 1938548 - RNA, 19 nt, Artificial Sequence
  Description of Artificial Sequence: Synthetic oligonucleotide
  Sense strand starting at position 479 of SEQ ID NO: 1879886
gucagucuaccuggaggaa

SEQ ID NO: 1938549 - RNA, 19 nt, Artificial Sequence
  Description of Artificial Sequence: Synthetic oligonucleotide
  Antisense strand to SEQ ID NO: 1938548
uuccuccagguagacugac

SEQ ID NO: 1938550 - RNA, 19 nt, Artificial Sequence
  Description of Artificial Sequence: Synthetic oligonucleotide
  Sense strand starting at position 482 of SEQ ID NO: 1879886
agucuaccuggaggaauua

SEQ ID NO: 1938551 - RNA, 19 nt, Artificial Sequence
  Description of Artificial Sequence: Synthetic oligonucleotide
  Antisense strand to SEQ ID NO: 1938550
uaauuccuccagguagacu

SEQ ID NO: 1938552 - RNA, 19 nt, Artificial Sequence
  Description of Artificial Sequence: Synthetic oligonucleotide
  Sense strand starting at position 602 of SEQ ID NO: 1879886
uguucucuuccugaaaguc

SEQ ID NO: 1938553 - RNA, 19 nt, Artificial Sequence
  Description of Artificial Sequence: Synthetic oligonucleotide
  Antisense strand to SEQ ID NO: 1938552
gacuuucaggaagagaaca

SEQ ID NO: 1938554 - RNA, 19 nt, Artificial Sequence
  Description of Artificial Sequence: Synthetic oligonucleotide
  Sense strand starting at position 610 of SEQ ID NO: 1879886
uccugaaaguccuuggaau

SEQ ID NO: 1938555 - RNA, 19 nt, Artificial Sequence
  Description of Artificial Sequence: Synthetic oligonucleotide
  Antisense strand to SEQ ID NO: 1938554
auuccaaggacuuucagga

SEQ ID NO: 1938556 - RNA, 19 nt, Artificial Sequence
  Description of Artificial Sequence: Synthetic oligonucleotide
  Sense strand starting at position 612 of SEQ ID NO: 1879886
cugaaaguccuuggaauug

SEQ ID NO: 1938557 - RNA, 19 nt, Artificial Sequence
  Description of Artificial Sequence: Synthetic oligonucleotide
  Antisense strand to SEQ ID NO: 1938556
caauuccaaggacuuucag

SEQ ID NO: 1938558 - RNA, 19 nt, Artificial Sequence
  Description of Artificial Sequence: Synthetic oligonucleotide
  Sense strand starting at position 702 of SEQ ID NO: 1879886
gaguaaacaagucguggaa

SEQ ID NO: 1938559 - RNA, 19 nt, Artificial Sequence
  Description of Artificial Sequence: Synthetic oligonucleotide
  Antisense strand to SEQ ID NO: 1938558
uuccacgacuuguuuacuc

SEQ ID NO: 1938560 - RNA, 19 nt, Artificial Sequence
  Description of Artificial Sequence: Synthetic oligonucleotide
  Sense strand starting at position 705 of SEQ ID NO: 1879886
uaaacaagucguggaauca

SEQ ID NO: 1938561 - RNA, 19 nt, Artificial Sequence
  Description of Artificial Sequence: Synthetic oligonucleotide
  Antisense strand to SEQ ID NO: 1938560
ugauuccacgacuuguuua

SEQ ID NO: 1938562 - RNA, 19 nt, Artificial Sequence
  Description of Artificial Sequence: Synthetic oligonucleotide
  Sense strand starting at position 706 of SEQ ID NO: 1879886
aaacaagucguggaaucau

SEQ ID NO: 1938563 - RNA, 19 nt, Artificial Sequence
  Description of Artificial Sequence: Synthetic oligonucleotide
  Antisense strand to SEQ ID NO: 1938562
augauuccacgacuuguuu

SEQ ID NO: 1938564 - RNA, 19 nt, Artificial Sequence
  Description of Artificial Sequence: Synthetic oligonucleotide
  Sense strand starting at position 1052 of SEQ ID NO: 1879886
gaaguuguccaccagggau

SEQ ID NO: 1938565 - RNA, 19 nt, Artificial Sequence
  Description of Artificial Sequence: Synthetic oligonucleotide
  Antisense strand to SEQ ID NO: 1938564
aucccugguggacaacuuc

SEQ ID NO: 1938566 - RNA, 19 nt, Artificial Sequence
  Description of Artificial Sequence: Synthetic oligonucleotide
  Sense strand starting at position 1054 of SEQ ID NO: 1879886
aguuguccaccagggauua

SEQ ID NO: 1938567 - RNA, 19 nt, Artificial Sequence
  Description of Artificial Sequence: Synthetic oligonucleotide
  Antisense strand to SEQ ID NO: 1938566
uaaucccugguggacaacu

SEQ ID NO: 1938568 - RNA, 19 nt, Artificial Sequence
  Description of Artificial Sequence: Synthetic oligonucleotide
  Sense strand starting at position 1168 of SEQ ID NO: 1879886
gccaacagauuagucagaa

SEQ ID NO: 1938569 - RNA, 19 nt, Artificial Sequence
  Description of Artificial Sequence: Synthetic oligonucleotide
  Antisense strand to SEQ ID NO: 1938568
uucugacuaaucuguuggc

SEQ ID NO: 1938570 - RNA, 19 nt, Artificial Sequence
  Description of Artificial Sequence: Synthetic oligonucleotide
  Sense strand starting at position 1229 of SEQ ID NO: 1879886
gcggcacuucaagaggaau

SEQ ID NO: 1938571 - RNA, 19 nt, Artificial Sequence
  Description of Artificial Sequence: Synthetic oligonucleotide
  Antisense strand to SEQ ID NO: 1938570
auuccucuugaagugccgc

SEQ ID NO: 1938572 - RNA, 19 nt, Artificial Sequence
  Description of Artificial Sequence: Synthetic oligonucleotide
  Sense strand starting at position 1880 of SEQ ID NO: 1879886
auggcuguucugcagauca

SEQ ID NO: 1938573 - RNA, 19 nt, Artificial Sequence
  Description of Artificial Sequence: Synthetic oligonucleotide
  Antisense strand to SEQ ID NO: 1938572
ugaucugcagaacagccau

SEQ ID NO: 1938574 - RNA, 19 nt, Artificial Sequence
  Description of Artificial Sequence: Synthetic oligonucleotide
  Sense strand starting at position 1946 of SEQ ID NO: 1879886
accagcgauuccuccuaaa

SEQ ID NO: 1938575 - RNA, 19 nt, Artificial Sequence
  Description of Artificial Sequence: Synthetic oligonucleotide
  Antisense strand to SEQ ID NO: 1938574
uuuaggaggaaucgcuggu

SEQ ID NO: 1938576 - RNA, 19 nt, Artificial Sequence
  Description of Artificial Sequence: Synthetic oligonucleotide
  Sense strand starting at position 2145 of SEQ ID NO: 1879886
gacugcgcccgggauaaua

SEQ ID NO: 1938577 - RNA, 19 nt, Artificial Sequence
  Description of Artificial Sequence: Synthetic oligonucleotide
  Antisense strand to SEQ ID NO: 1938576
uauuaucccgggcgcaguc

SEQ ID NO: 1938578 - RNA, 19 nt, Artificial Sequence
  Description of Artificial Sequence: Synthetic oligonucleotide
  Sense strand starting at position 2341 of SEQ ID NO: 1879886
ggguuccuuauagggaaua

SEQ ID NO: 1938579 - RNA, 19 nt, Artificial Sequence
  Description of Artificial Sequence: Synthetic oligonucleotide
  Antisense strand to SEQ ID NO: 1938578
uauucccuauaaggaaccc

SEQ ID NO: 1938580 - RNA, 19 nt, Artificial Sequence
  Description of Artificial Sequence: Synthetic oligonucleotide
  Sense strand starting at position 2392 of SEQ ID NO: 1879886
gaaggaagcaguggucauu

SEQ ID NO: 1938581 - RNA, 19 nt, Artificial Sequence
  Description of Artificial Sequence: Synthetic oligonucleotide
  Antisense strand to SEQ ID NO: 1938580
aaugaccacugcuuccuuc

SEQ ID NO: 1938582 - RNA, 19 nt, Artificial Sequence
  Description of Artificial Sequence: Synthetic oligonucleotide
  Sense strand starting at position 2403 of SEQ ID NO: 1879886
uggucauugcuggagguua

SEQ ID NO: 1938583 - RNA, 19 nt, Artificial Sequence
  Description of Artificial Sequence: Synthetic oligonucleotide
  Antisense strand to SEQ ID NO: 1938582
uaaccuccagcaaugacca

SEQ ID NO: 1938584 - RNA, 19 nt, Artificial Sequence
  Description of Artificial Sequence: Synthetic oligonucleotide
  Sense strand starting at position 2405 of SEQ ID NO: 1879886
gucauugcuggagguuaaa

SEQ ID NO: 1938585 - RNA, 19 nt, Artificial Sequence
  Description of Artificial Sequence: Synthetic oligonucleotide
  Antisense strand to SEQ ID NO: 1938584
uuuaaccuccagcaaugac

SEQ ID NO: 1938586 - RNA, 19 nt, Artificial Sequence
  Description of Artificial Sequence: Synthetic oligonucleotide
  Sense strand starting at position 2870 of SEQ ID NO: 1879886
gcucuccuaggcuaagaaa

SEQ ID NO: 1938587 - RNA, 19 nt, Artificial Sequence
  Description of Artificial Sequence: Synthetic oligonucleotide
  Antisense strand to SEQ ID NO: 1938586
uuucuuagccuaggagagc

SEQ ID NO: 1938588 - RNA, 19 nt, Artificial Sequence
  Description of Artificial Sequence: Synthetic oligonucleotide
  Sense strand starting at position 2889 of SEQ ID NO: 1879886
cagcauacacagugagaaa

SEQ ID NO: 1938589 - RNA, 19 nt, Artificial Sequence
  Description of Artificial Sequence: Synthetic oligonucleotide
  Antisense strand to SEQ ID NO: 1938588
uuucucacuguguaugcug

SEQ ID NO: 1938590 - RNA, 19 nt, Artificial Sequence
  Description of Artificial Sequence: Synthetic oligonucleotide
  Sense strand starting at position 3045 of SEQ ID NO: 1879886
gguacuuaccuuuguauua

SEQ ID NO: 1938591 - RNA, 19 nt, Artificial Sequence
  Description of Artificial Sequence: Synthetic oligonucleotide
  Antisense strand to SEQ ID NO: 1938590
uaauacaaagguaaguacc

SEQ ID NO: 1938592 - RNA, 19 nt, Artificial Sequence
  Description of Artificial Sequence: Synthetic oligonucleotide
  Sense strand starting at position 3084 of SEQ ID NO: 1879886
ucuagaaacguuuaucacu

SEQ ID NO: 1938593 - RNA, 19 nt, Artificial Sequence
  Description of Artificial Sequence: Synthetic oligonucleotide
  Antisense strand to SEQ ID NO: 1938592
agugauaaacguuucuaga

SEQ ID NO: 1938594 - RNA, 19 nt, Artificial Sequence
  Description of Artificial Sequence: Synthetic oligonucleotide
  Sense strand starting at position 3119 of SEQ ID NO: 1879886
agcaguguuggcgucaacu

SEQ ID NO: 1938595 - RNA, 19 nt, Artificial Sequence
  Description of Artificial Sequence: Synthetic oligonucleotide
  Antisense strand to SEQ ID NO: 1938594
aguugacgccaacacugcu

SEQ ID NO: 1938596 - RNA, 19 nt, Artificial Sequence
  Description of Artificial Sequence: Synthetic oligonucleotide
  Sense strand starting at position 3203 of SEQ ID NO: 1879886
aucacauuaaaguguguga

SEQ ID NO: 1938597 - RNA, 19 nt, Artificial Sequence
  Description of Artificial Sequence: Synthetic oligonucleotide
  Antisense strand to SEQ ID NO: 1938596
ucacacacuuuaaugugau

SEQ ID NO: 1938598 - RNA, 19 nt, Artificial Sequence
  Description of Artificial Sequence: Synthetic oligonucleotide
  Sense strand starting at position 3205 of SEQ ID NO: 1879886
cacauuaaagugugugaga

SEQ ID NO: 1938599 - RNA, 19 nt, Artificial Sequence
  Description of Artificial Sequence: Synthetic oligonucleotide
  Antisense strand to SEQ ID NO: 1938598
ucucacacacuuuaaugug

SEQ ID NO: 1938600 - RNA, 19 nt, Artificial Sequence
  Description of Artificial Sequence: Synthetic oligonucleotide
  Sense strand starting at position 3206 of SEQ ID NO: 1879886
acauuaaagugugugagaa

SEQ ID NO: 1938601 - RNA, 19 nt, Artificial Sequence
  Description of Artificial Sequence: Synthetic oligonucleotide
  Antisense strand to SEQ ID NO: 1938600
uucucacacacuuuaaugu

SEQ ID NO: 1938602 - RNA, 19 nt, Artificial Sequence
  Description of Artificial Sequence: Synthetic oligonucleotide
  Sense strand starting at position 3331 of SEQ ID NO: 1879886
caggaauacuguuuacugu

SEQ ID NO: 1938603 - RNA, 19 nt, Artificial Sequence
  Description of Artificial Sequence: Synthetic oligonucleotide
  Antisense strand to SEQ ID NO: 1938602
acaguaaacaguauuccug

SEQ ID NO: 1938604 - RNA, 19 nt, Artificial Sequence
  Description of Artificial Sequence: Synthetic oligonucleotide
  Sense strand starting at position 3332 of SEQ ID NO: 1879886
aggaauacuguuuacugua

SEQ ID NO: 1938605 - RNA, 19 nt, Artificial Sequence
  Description of Artificial Sequence: Synthetic oligonucleotide
  Antisense strand to SEQ ID NO: 1938604
uacaguaaacaguauuccu

SEQ ID NO: 1938606 - RNA, 19 nt, Artificial Sequence
  Description of Artificial Sequence: Synthetic oligonucleotide
  Sense strand starting at position 3423 of SEQ ID NO: 1879886
cacccuuucugagugagca

SEQ ID NO: 1938607 - RNA, 19 nt, Artificial Sequence
  Description of Artificial Sequence: Synthetic oligonucleotide
  Antisense strand to SEQ ID NO: 1938606
ugcucacucagaaagggug

SEQ ID NO: 1938608 - RNA, 19 nt, Artificial Sequence
  Description of Artificial Sequence: Synthetic oligonucleotide
  Sense strand starting at position 3439 of SEQ ID NO: 1879886
gcagcucuauuugcugaaa

SEQ ID NO: 1938609 - RNA, 19 nt, Artificial Sequence
  Description of Artificial Sequence: Synthetic oligonucleotide
  Antisense strand to SEQ ID NO: 1938608
uuucagcaaauagagcugc

SEQ ID NO: 1938610 - RNA, 19 nt, Artificial Sequence
  Description of Artificial Sequence: Synthetic oligonucleotide
  Sense strand starting at position 3442 of SEQ ID NO: 1879886
gcucuauuugcugaaacgu

SEQ ID NO: 1938611 - RNA, 19 nt, Artificial Sequence
  Description of Artificial Sequence: Synthetic oligonucleotide
  Antisense strand to SEQ ID NO: 1938610
acguuucagcaaauagagc

SEQ ID NO: 1938612 - RNA, 19 nt, Artificial Sequence
  Description of Artificial Sequence: Synthetic oligonucleotide
  Sense strand starting at position 3636 of SEQ ID NO: 1879886
cuuuaugucugaguacaug

SEQ ID NO: 1938613 - RNA, 19 nt, Artificial Sequence
  Description of Artificial Sequence: Synthetic oligonucleotide
  Antisense strand to SEQ ID NO: 1938612
cauguacucagacauaaag

SEQ ID NO: 1938614 - RNA, 19 nt, Artificial Sequence
  Description of Artificial Sequence: Synthetic oligonucleotide
  Sense strand starting at position 3714 of SEQ ID NO: 1879886
aagcaaggcccuugaagau

SEQ ID NO: 1938615 - RNA, 19 nt, Artificial Sequence
  Description of Artificial Sequence: Synthetic oligonucleotide
  Antisense strand to SEQ ID NO: 1938614
aucuucaagggccuugcuu

SEQ ID NO: 1938616 - RNA, 19 nt, Artificial Sequence
  Description of Artificial Sequence: Synthetic oligonucleotide
  Sense strand starting at position 3748 of SEQ ID NO: 1879886
ccuugacuuguguaguauu

SEQ ID NO: 1938617 - RNA, 19 nt, Artificial Sequence
  Description of Artificial Sequence: Synthetic oligonucleotide
  Antisense strand to SEQ ID NO: 1938616
aauacuacacaagucaagg

SEQ ID NO: 1938618 - RNA, 19 nt, Artificial Sequence
  Description of Artificial Sequence: Synthetic oligonucleotide
  Sense strand starting at position 3803 of SEQ ID NO: 1879886
auaauauguccuugguaug

SEQ ID NO: 1938619 - RNA, 19 nt, Artificial Sequence
  Description of Artificial Sequence: Synthetic oligonucleotide
  Antisense strand to SEQ ID NO: 1938618
cauaccaaggacauauuau

SEQ ID NO: 1938620 - RNA, 19 nt, Artificial Sequence
  Description of Artificial Sequence: Synthetic oligonucleotide
  Sense strand starting at position 3817 of SEQ ID NO: 1879886
guauguauuuccuugcagu

SEQ ID NO: 1938621 - RNA, 19 nt, Artificial Sequence
  Description of Artificial Sequence: Synthetic oligonucleotide
  Antisense strand to SEQ ID NO: 1938620
acugcaaggaaauacauac

SEQ ID NO: 1938622 - RNA, 19 nt, Artificial Sequence
  Description of Artificial Sequence: Synthetic oligonucleotide
  Sense strand starting at position 3837 of SEQ ID NO: 1879886
gucaaaucagccuagcaga

SEQ ID NO: 1938623 - RNA, 19 nt, Artificial Sequence
  Description of Artificial Sequence: Synthetic oligonucleotide
  Antisense strand to SEQ ID NO: 1938622
ucugcuaggcugauuugac

SEQ ID NO: 1938624 - RNA, 19 nt, Artificial Sequence
  Description of Artificial Sequence: Synthetic oligonucleotide
  Sense strand starting at position 167 of SEQ ID NO: 1879887
guaagaggauuccaaauuu

SEQ ID NO: 1938625 - RNA, 19 nt, Artificial Sequence
  Description of Artificial Sequence: Synthetic oligonucleotide
  Antisense strand to SEQ ID NO: 1938624
aaauuuggaauccucuuac

SEQ ID NO: 1938626 - RNA, 19 nt, Artificial Sequence
  Description of Artificial Sequence: Synthetic oligonucleotide
  Sense strand starting at position 369 of SEQ ID NO: 1879887
uugugcggucugucaaguu

SEQ ID NO: 1938627 - RNA, 19 nt, Artificial Sequence
  Description of Artificial Sequence: Synthetic oligonucleotide
  Antisense strand to SEQ ID NO: 1938626
aacuugacagaccgcacaa

SEQ ID NO: 1938628 - RNA, 19 nt, Artificial Sequence
  Description of Artificial Sequence: Synthetic oligonucleotide
  Sense strand starting at position 523 of SEQ ID NO: 1879887
cuacauaauuugcagggaa

SEQ ID NO: 1938629 - RNA, 19 nt, Artificial Sequence
  Description of Artificial Sequence: Synthetic oligonucleotide
  Antisense strand to SEQ ID NO: 1938628
uucccugcaaauuauguag

SEQ ID NO: 1938630 - RNA, 19 nt, Artificial Sequence
  Description of Artificial Sequence: Synthetic oligonucleotide
  Sense strand starting at position 637 of SEQ ID NO: 1879887
auuuauggcgauugagcau

SEQ ID NO: 1938631 - RNA, 19 nt, Artificial Sequence
  Description of Artificial Sequence: Synthetic oligonucleotide
  Antisense strand to SEQ ID NO: 1938630
augcucaaucgccauaaau

SEQ ID NO: 1938632 - RNA, 19 nt, Artificial Sequence
  Description of Artificial Sequence: Synthetic oligonucleotide
  Sense strand starting at position 644 of SEQ ID NO: 1879887
gcgauugagcaugauuaau

SEQ ID NO: 1938633 - RNA, 19 nt, Artificial Sequence
  Description of Artificial Sequence: Synthetic oligonucleotide
  Antisense strand to SEQ ID NO: 1938632
auuaaucaugcucaaucgc

SEQ ID NO: 1938634 - RNA, 19 nt, Artificial Sequence
  Description of Artificial Sequence: Synthetic oligonucleotide
  Sense strand starting at position 646 of SEQ ID NO: 1879887
gauugagcaugauuaauag

SEQ ID NO: 1938635 - RNA, 19 nt, Artificial Sequence
  Description of Artificial Sequence: Synthetic oligonucleotide
  Antisense strand to SEQ ID NO: 1938634
cuauuaaucaugcucaauc

SEQ ID NO: 1938636 - RNA, 19 nt, Artificial Sequence
  Description of Artificial Sequence: Synthetic oligonucleotide
  Sense strand starting at position 825 of SEQ ID NO: 1879887
gggcccagauaauucuaaa

SEQ ID NO: 1938637 - RNA, 19 nt, Artificial Sequence
  Description of Artificial Sequence: Synthetic oligonucleotide
  Antisense strand to SEQ ID NO: 1938636
uuuagaauuaucugggccc

SEQ ID NO: 1938638 - RNA, 19 nt, Artificial Sequence
  Description of Artificial Sequence: Synthetic oligonucleotide
  Sense strand starting at position 2286 of SEQ ID NO: 1879887
ugcggugugcuugcuaaua

SEQ ID NO: 1938639 - RNA, 19 nt, Artificial Sequence
  Description of Artificial Sequence: Synthetic oligonucleotide
  Antisense strand to SEQ ID NO: 1938638
uauuagcaagcacaccgca

SEQ ID NO: 1938640 - RNA, 19 nt, Artificial Sequence
  Description of Artificial Sequence: Synthetic oligonucleotide
  Sense strand starting at position 2311 of SEQ ID NO: 1879887
cucugacuucugcagagua

SEQ ID NO: 1938641 - RNA, 19 nt, Artificial Sequence
  Description of Artificial Sequence: Synthetic oligonucleotide
  Antisense strand to SEQ ID NO: 1938640
uacucugcagaagucagag

SEQ ID NO: 1938642 - RNA, 19 nt, Artificial Sequence
  Description of Artificial Sequence: Synthetic oligonucleotide
  Sense strand starting at position 2313 of SEQ ID NO: 1879887
cugacuucugcagaguauc

SEQ ID NO: 1938643 - RNA, 19 nt, Artificial Sequence
  Description of Artificial Sequence: Synthetic oligonucleotide
  Antisense strand to SEQ ID NO: 1938642
gauacucugcagaagucag

SEQ ID NO: 1938644 - RNA, 19 nt, Artificial Sequence
  Description of Artificial Sequence: Synthetic oligonucleotide
  Sense strand starting at position 2360 of SEQ ID NO: 1879887
uaagguucucuggaaggua

SEQ ID NO: 1938645 - RNA, 19 nt, Artificial Sequence
  Description of Artificial Sequence: Synthetic oligonucleotide
  Antisense strand to SEQ ID NO: 1938644
uaccuuccagagaaccuua

SEQ ID NO: 1938646 - RNA, 19 nt, Artificial Sequence
  Description of Artificial Sequence: Synthetic oligonucleotide
  Sense strand starting at position 2363 of SEQ ID NO: 1879887
gguucucuggaagguacaa

SEQ ID NO: 1938647 - RNA, 19 nt, Artificial Sequence
  Description of Artificial Sequence: Synthetic oligonucleotide
  Antisense strand to SEQ ID NO: 1938646
uuguaccuuccagagaacc

SEQ ID NO: 1938648 - RNA, 19 nt, Artificial Sequence
  Description of Artificial Sequence: Synthetic oligonucleotide
  Sense strand starting at position 2393 of SEQ ID NO: 1879887
cccacuccuccaggagauu

SEQ ID NO: 1938649 - RNA, 19 nt, Artificial Sequence
  Description of Artificial Sequence: Synthetic oligonucleotide
  Antisense strand to SEQ ID NO: 1938648
aaucuccuggaggaguggg

SEQ ID NO: 1938650 - RNA, 19 nt, Artificial Sequence
  Description of Artificial Sequence: Synthetic oligonucleotide
  Sense strand starting at position 2506 of SEQ ID NO: 1879887
uguugugagcauugaaaga

SEQ ID NO: 1938651 - RNA, 19 nt, Artificial Sequence
  Description of Artificial Sequence: Synthetic oligonucleotide
  Antisense strand to SEQ ID NO: 1938650
ucuuucaaugcucacaaca

SEQ ID NO: 1938652 - RNA, 19 nt, Artificial Sequence
  Description of Artificial Sequence: Synthetic oligonucleotide
  Sense strand starting at position 2592 of SEQ ID NO: 1879887
ugcuccagaucuuuggauu

SEQ ID NO: 1938653 - RNA, 19 nt, Artificial Sequence
  Description of Artificial Sequence: Synthetic oligonucleotide
  Antisense strand to SEQ ID NO: 1938652
aauccaaagaucuggagca

SEQ ID NO: 1938654 - RNA, 19 nt, Artificial Sequence
  Description of Artificial Sequence: Synthetic oligonucleotide
  Sense strand starting at position 2593 of SEQ ID NO: 1879887
gcuccagaucuuuggauuc

SEQ ID NO: 1938655 - RNA, 19 nt, Artificial Sequence
  Description of Artificial Sequence: Synthetic oligonucleotide
  Antisense strand to SEQ ID NO: 1938654
gaauccaaagaucuggagc

SEQ ID NO: 1938656 - RNA, 19 nt, Artificial Sequence
  Description of Artificial Sequence: Synthetic oligonucleotide
  Sense strand starting at position 2611 of SEQ ID NO: 1879887
cuaggaauguauccggagu

SEQ ID NO: 1938657 - RNA, 19 nt, Artificial Sequence
  Description of Artificial Sequence: Synthetic oligonucleotide
  Antisense strand to SEQ ID NO: 1938656
acuccggauacauuccuag

SEQ ID NO: 1938658 - RNA, 19 nt, Artificial Sequence
  Description of Artificial Sequence: Synthetic oligonucleotide
  Sense strand starting at position 2617 of SEQ ID NO: 1879887
auguauccggagugauaaa

SEQ ID NO: 1938659 - RNA, 19 nt, Artificial Sequence
  Description of Artificial Sequence: Synthetic oligonucleotide
  Antisense strand to SEQ ID NO: 1938658
uuuaucacuccggauacau

SEQ ID NO: 1938660 - RNA, 19 nt, Artificial Sequence
  Description of Artificial Sequence: Synthetic oligonucleotide
  Sense strand starting at position 2630 of SEQ ID NO: 1879887
gauaaacauugggcgagau

SEQ ID NO: 1938661 - RNA, 19 nt, Artificial Sequence
  Description of Artificial Sequence: Synthetic oligonucleotide
  Antisense strand to SEQ ID NO: 1938660
aucucgcccaauguuuauc

SEQ ID NO: 1938662 - RNA, 19 nt, Artificial Sequence
  Description of Artificial Sequence: Synthetic oligonucleotide
  Sense strand starting at position 2631 of SEQ ID NO: 1879887
auaaacauugggcgagaua

SEQ ID NO: 1938663 - RNA, 19 nt, Artificial Sequence
  Description of Artificial Sequence: Synthetic oligonucleotide
  Antisense strand to SEQ ID NO: 1938662
uaucucgcccaauguuuau

SEQ ID NO: 1938664 - RNA, 19 nt, Artificial Sequence
  Description of Artificial Sequence: Synthetic oligonucleotide
  Sense strand starting at position 2683 of SEQ ID NO: 1879887
ggaguuugaauguggcaau

SEQ ID NO: 1938665 - RNA, 19 nt, Artificial Sequence
  Description of Artificial Sequence: Synthetic oligonucleotide
  Antisense strand to SEQ ID NO: 1938664
auugccacauucaaacucc

SEQ ID NO: 1938666 - RNA, 19 nt, Artificial Sequence
  Description of Artificial Sequence: Synthetic oligonucleotide
  Sense strand starting at position 2833 of SEQ ID NO: 1879887
ccaagagacaguuguuuga

SEQ ID NO: 1938667 - RNA, 19 nt, Artificial Sequence
  Description of Artificial Sequence: Synthetic oligonucleotide
  Antisense strand to SEQ ID NO: 1938666
ucaaacaacugucucuugg

SEQ ID NO: 1938668 - RNA, 19 nt, Artificial Sequence
  Description of Artificial Sequence: Synthetic oligonucleotide
  Sense strand starting at position 2835 of SEQ ID NO: 1879887
aagagacaguuguuugaca

SEQ ID NO: 1938669 - RNA, 19 nt, Artificial Sequence
  Description of Artificial Sequence: Synthetic oligonucleotide
  Antisense strand to SEQ ID NO: 1938668
ugucaaacaacugucucuu

SEQ ID NO: 1938670 - RNA, 19 nt, Artificial Sequence
  Description of Artificial Sequence: Synthetic oligonucleotide
  Sense strand starting at position 2837 of SEQ ID NO: 1879887
gagacaguuguuugacaga

SEQ ID NO: 1938671 - RNA, 19 nt, Artificial Sequence
  Description of Artificial Sequence: Synthetic oligonucleotide
  Antisense strand to SEQ ID NO: 1938670
ucugucaaacaacugucuc

SEQ ID NO: 1938672 - RNA, 19 nt, Artificial Sequence
  Description of Artificial Sequence: Synthetic oligonucleotide
  Sense strand starting at position 2877 of SEQ ID NO: 1879887
aagugaauggagugauuga

SEQ ID NO: 1938673 - RNA, 19 nt, Artificial Sequence
  Description of Artificial Sequence: Synthetic oligonucleotide
  Antisense strand to SEQ ID NO: 1938672
ucaaucacuccauucacuu

SEQ ID NO: 1938674 - RNA, 19 nt, Artificial Sequence
  Description of Artificial Sequence: Synthetic oligonucleotide
  Sense strand starting at position 2884 of SEQ ID NO: 1879887
uggagugauugauuagugu

SEQ ID NO: 1938675 - RNA, 19 nt, Artificial Sequence
  Description of Artificial Sequence: Synthetic oligonucleotide
  Antisense strand to SEQ ID NO: 1938674
acacuaaucaaucacucca

SEQ ID NO: 1938676 - RNA, 19 nt, Artificial Sequence
  Description of Artificial Sequence: Synthetic oligonucleotide
  Sense strand starting at position 2905 of SEQ ID NO: 1879887
ggagcuguacgguacgaaa

SEQ ID NO: 1938677 - RNA, 19 nt, Artificial Sequence
  Description of Artificial Sequence: Synthetic oligonucleotide
  Antisense strand to SEQ ID NO: 1938676
uuucguaccguacagcucc

SEQ ID NO: 1938678 - RNA, 19 nt, Artificial Sequence
  Description of Artificial Sequence: Synthetic oligonucleotide
  Sense strand starting at position 3232 of SEQ ID NO: 1879887
augaucuuucuguauaguc

SEQ ID NO: 1938679 - RNA, 19 nt, Artificial Sequence
  Description of Artificial Sequence: Synthetic oligonucleotide
  Antisense strand to SEQ ID NO: 1938678
gacuauacagaaagaucau

SEQ ID NO: 1938680 - RNA, 19 nt, Artificial Sequence
  Description of Artificial Sequence: Synthetic oligonucleotide
  Sense strand starting at position 3279 of SEQ ID NO: 1879887
ggaugaagagcuugguaga

SEQ ID NO: 1938681 - RNA, 19 nt, Artificial Sequence
  Description of Artificial Sequence: Synthetic oligonucleotide
  Antisense strand to SEQ ID NO: 1938680
ucuaccaagcucuucaucc

SEQ ID NO: 1938682 - RNA, 19 nt, Artificial Sequence
  Description of Artificial Sequence: Synthetic oligonucleotide
  Sense strand starting at position 3294 of SEQ ID NO: 1879887
uagagagguugaguuugau

SEQ ID NO: 1938683 - RNA, 19 nt, Artificial Sequence
  Description of Artificial Sequence: Synthetic oligonucleotide
  Antisense strand to SEQ ID NO: 1938682
aucaaacucaaccucucua

SEQ ID NO: 1938684 - RNA, 19 nt, Artificial Sequence
  Description of Artificial Sequence: Synthetic oligonucleotide
  Sense strand starting at position 3297 of SEQ ID NO: 1879887
agagguugaguuugauauc

SEQ ID NO: 1938685 - RNA, 19 nt, Artificial Sequence
  Description of Artificial Sequence: Synthetic oligonucleotide
  Antisense strand to SEQ ID NO: 1938684
gauaucaaacucaaccucu

SEQ ID NO: 1938686 - RNA, 19 nt, Artificial Sequence
  Description of Artificial Sequence: Synthetic oligonucleotide
  Sense strand starting at position 3303 of SEQ ID NO: 1879887
ugaguuugauaucuaagug

SEQ ID NO: 1938687 - RNA, 19 nt, Artificial Sequence
  Description of Artificial Sequence: Synthetic oligonucleotide
  Antisense strand to SEQ ID NO: 1938686
cacuuagauaucaaacuca

SEQ ID NO: 1938688 - RNA, 19 nt, Artificial Sequence
  Description of Artificial Sequence: Synthetic oligonucleotide
  Sense strand starting at position 3336 of SEQ ID NO: 1879887
cucggagccagguauuaug

SEQ ID NO: 1938689 - RNA, 19 nt, Artificial Sequence
  Description of Artificial Sequence: Synthetic oligonucleotide
  Antisense strand to SEQ ID NO: 1938688
cauaauaccuggcuccgag

SEQ ID NO: 1938690 - RNA, 19 nt, Artificial Sequence
  Description of Artificial Sequence: Synthetic oligonucleotide
  Sense strand starting at position 3352 of SEQ ID NO: 1879887
augauaaagugcuuuaaca

SEQ ID NO: 1938691 - RNA, 19 nt, Artificial Sequence
  Description of Artificial Sequence: Synthetic oligonucleotide
  Antisense strand to SEQ ID NO: 1938690
uguuaaagcacuuuaucau

SEQ ID NO: 1938692 - RNA, 19 nt, Artificial Sequence
  Description of Artificial Sequence: Synthetic oligonucleotide
  Sense strand starting at position 3390 of SEQ ID NO: 1879887
acaggcugaagauguuauu

SEQ ID NO: 1938693 - RNA, 19 nt, Artificial Sequence
  Description of Artificial Sequence: Synthetic oligonucleotide
  Antisense strand to SEQ ID NO: 1938692
aauaacaucuucagccugu

SEQ ID NO: 1938694 - RNA, 19 nt, Artificial Sequence
  Description of Artificial Sequence: Synthetic oligonucleotide
  Sense strand starting at position 3469 of SEQ ID NO: 1879887
uauauaaagccguaaguuu

SEQ ID NO: 1938695 - RNA, 19 nt, Artificial Sequence
  Description of Artificial Sequence: Synthetic oligonucleotide
  Antisense strand to SEQ ID NO: 1938694
aaacuuacggcuuuauaua

SEQ ID NO: 1938696 - RNA, 19 nt, Artificial Sequence
  Description of Artificial Sequence: Synthetic oligonucleotide
  Sense strand starting at position 3621 of SEQ ID NO: 1879887
cacuuucugucaguagaga

SEQ ID NO: 1938697 - RNA, 19 nt, Artificial Sequence
  Description of Artificial Sequence: Synthetic oligonucleotide
  Antisense strand to SEQ ID NO: 1938696
ucucuacugacagaaagug

SEQ ID NO: 1938698 - RNA, 19 nt, Artificial Sequence
  Description of Artificial Sequence: Synthetic oligonucleotide
  Sense strand starting at position 3632 of SEQ ID NO: 1879887
aguagagacuaguuugcau

SEQ ID NO: 1938699 - RNA, 19 nt, Artificial Sequence
  Description of Artificial Sequence: Synthetic oligonucleotide
  Antisense strand to SEQ ID NO: 1938698
augcaaacuagucucuacu

SEQ ID NO: 1938700 - RNA, 19 nt, Artificial Sequence
  Description of Artificial Sequence: Synthetic oligonucleotide
  Sense strand starting at position 3876 of SEQ ID NO: 1879887
gugaacauuugugacuaga

SEQ ID NO: 1938701 - RNA, 19 nt, Artificial Sequence
  Description of Artificial Sequence: Synthetic oligonucleotide
  Antisense strand to SEQ ID NO: 1938700
ucuagucacaaauguucac

SEQ ID NO: 1938702 - RNA, 19 nt, Artificial Sequence
  Description of Artificial Sequence: Synthetic oligonucleotide
  Sense strand starting at position 3887 of SEQ ID NO: 1879887
ugacuagacugucuggauu

SEQ ID NO: 1938703 - RNA, 19 nt, Artificial Sequence
  Description of Artificial Sequence: Synthetic oligonucleotide
  Antisense strand to SEQ ID NO: 1938702
aauccagacagucuaguca

SEQ ID NO: 1938704 - RNA, 19 nt, Artificial Sequence
  Description of Artificial Sequence: Synthetic oligonucleotide
  Sense strand starting at position 40 of SEQ ID NO: 1879889
gacagagaggcuugcaaau

SEQ ID NO: 1938705 - RNA, 19 nt, Artificial Sequence
  Description of Artificial Sequence: Synthetic oligonucleotide
  Antisense strand to SEQ ID NO: 1938704
auuugcaagccucucuguc

SEQ ID NO: 1938706 - RNA, 19 nt, Artificial Sequence
  Description of Artificial Sequence: Synthetic oligonucleotide
  Sense strand starting at position 417 of SEQ ID NO: 1879889
aguugcaaguacucaagaa

SEQ ID NO: 1938707 - RNA, 19 nt, Artificial Sequence
  Description of Artificial Sequence: Synthetic oligonucleotide
  Antisense strand to SEQ ID NO: 1938706
uucuugaguacuugcaacu

SEQ ID NO: 1938708 - RNA, 19 nt, Artificial Sequence
  Description of Artificial Sequence: Synthetic oligonucleotide
  Sense strand starting at position 456 of SEQ ID NO: 1879889
aaguuuaaacgaugaguag

SEQ ID NO: 1938709 - RNA, 19 nt, Artificial Sequence
  Description of Artificial Sequence: Synthetic oligonucleotide
  Antisense strand to SEQ ID NO: 1938708
cuacucaucguuuaaacuu

SEQ ID NO: 1938710 - RNA, 19 nt, Artificial Sequence
  Description of Artificial Sequence: Synthetic oligonucleotide
  Sense strand starting at position 457 of SEQ ID NO: 1879889
aguuuaaacgaugaguagu

SEQ ID NO: 1938711 - RNA, 19 nt, Artificial Sequence
  Description of Artificial Sequence: Synthetic oligonucleotide
  Antisense strand to SEQ ID NO: 1938710
acuacucaucguuuaaacu

SEQ ID NO: 1938712 - RNA, 19 nt, Artificial Sequence
  Description of Artificial Sequence: Synthetic oligonucleotide
  Sense strand starting at position 891 of SEQ ID NO: 1879889
cuguuuauaugguccaacu

SEQ ID NO: 1938713 - RNA, 19 nt, Artificial Sequence
  Description of Artificial Sequence: Synthetic oligonucleotide
  Antisense strand to SEQ ID NO: 1938712
aguuggaccauauaaacag

SEQ ID NO: 1938714 - RNA, 19 nt, Artificial Sequence
  Description of Artificial Sequence: Synthetic oligonucleotide
  Sense strand starting at position 893 of SEQ ID NO: 1879889
guuuauaugguccaacuuu

SEQ ID NO: 1938715 - RNA, 19 nt, Artificial Sequence
  Description of Artificial Sequence: Synthetic oligonucleotide
  Antisense strand to SEQ ID NO: 1938714
aaaguuggaccauauaaac

SEQ ID NO: 1938716 - RNA, 19 nt, Artificial Sequence
  Description of Artificial Sequence: Synthetic oligonucleotide
  Sense strand starting at position 901 of SEQ ID NO: 1879889
gguccaacuuuacaaauga

SEQ ID NO: 1938717 - RNA, 19 nt, Artificial Sequence
  Description of Artificial Sequence: Synthetic oligonucleotide
  Antisense strand to SEQ ID NO: 1938716
ucauuuguaaaguuggacc

SEQ ID NO: 1938718 - RNA, 19 nt, Artificial Sequence
  Description of Artificial Sequence: Synthetic oligonucleotide
  Sense strand starting at position 944 of SEQ ID NO: 1879889
uuguuagcuacguuauagu

SEQ ID NO: 1938719 - RNA, 19 nt, Artificial Sequence
  Description of Artificial Sequence: Synthetic oligonucleotide
  Antisense strand to SEQ ID NO: 1938718
acuauaacguagcuaacaa

SEQ ID NO: 1938720 - RNA, 19 nt, Artificial Sequence
  Description of Artificial Sequence: Synthetic oligonucleotide
  Sense strand starting at position 1066 of SEQ ID NO: 1879889
agugacgauucugcaaaga

SEQ ID NO: 1938721 - RNA, 19 nt, Artificial Sequence
  Description of Artificial Sequence: Synthetic oligonucleotide
  Antisense strand to SEQ ID NO: 1938720
ucuuugcagaaucgucacu

SEQ ID NO: 1938722 - RNA, 19 nt, Artificial Sequence
  Description of Artificial Sequence: Synthetic oligonucleotide
  Sense strand starting at position 1212 of SEQ ID NO: 1879889
cacagaugauccgugacuu

SEQ ID NO: 1938723 - RNA, 19 nt, Artificial Sequence
  Description of Artificial Sequence: Synthetic oligonucleotide
  Antisense strand to SEQ ID NO: 1938722
aagucacggaucaucugug

SEQ ID NO: 1938724 - RNA, 19 nt, Artificial Sequence
  Description of Artificial Sequence: Synthetic oligonucleotide
  Sense strand starting at position 1213 of SEQ ID NO: 1879889
acagaugauccgugacuua

SEQ ID NO: 1938725 - RNA, 19 nt, Artificial Sequence
  Description of Artificial Sequence: Synthetic oligonucleotide
  Antisense strand to SEQ ID NO: 1938724
uaagucacggaucaucugu

SEQ ID NO: 1938726 - RNA, 19 nt, Artificial Sequence
  Description of Artificial Sequence: Synthetic oligonucleotide
  Sense strand starting at position 1224 of SEQ ID NO: 1879889
gugacuuaccuguacuguu

SEQ ID NO: 1938727 - RNA, 19 nt, Artificial Sequence
  Description of Artificial Sequence: Synthetic oligonucleotide
  Antisense strand to SEQ ID NO: 1938726
aacaguacagguaagucac

SEQ ID NO: 1938728 - RNA, 19 nt, Artificial Sequence
  Description of Artificial Sequence: Synthetic oligonucleotide
  Sense strand starting at position 1278 of SEQ ID NO: 1879889
gagacaacuugugguauuu

SEQ ID NO: 1938729 - RNA, 19 nt, Artificial Sequence
  Description of Artificial Sequence: Synthetic oligonucleotide
  Antisense strand to SEQ ID NO: 1938728
aaauaccacaaguugucuc

SEQ ID NO: 1938730 - RNA, 19 nt, Artificial Sequence
  Description of Artificial Sequence: Synthetic oligonucleotide
  Sense strand starting at position 1360 of SEQ ID NO: 1879889
ccaguauacugagauuaau

SEQ ID NO: 1938731 - RNA, 19 nt, Artificial Sequence
  Description of Artificial Sequence: Synthetic oligonucleotide
  Antisense strand to SEQ ID NO: 1938730
auuaaucucaguauacugg

SEQ ID NO: 1938732 - RNA, 19 nt, Artificial Sequence
  Description of Artificial Sequence: Synthetic oligonucleotide
  Sense strand starting at position 1386 of SEQ ID NO: 1879889
cgcuuaaacucuuuaguag

SEQ ID NO: 1938733 - RNA, 19 nt, Artificial Sequence
  Description of Artificial Sequence: Synthetic oligonucleotide
  Antisense strand to SEQ ID NO: 1938732
cuacuaaagaguuuaagcg

SEQ ID NO: 1938734 - RNA, 19 nt, Artificial Sequence
  Description of Artificial Sequence: Synthetic oligonucleotide
  Sense strand starting at position 1387 of SEQ ID NO: 1879889
gcuuaaacucuuuaguagu

SEQ ID NO: 1938735 - RNA, 19 nt, Artificial Sequence
  Description of Artificial Sequence: Synthetic oligonucleotide
  Antisense strand to SEQ ID NO: 1938734
acuacuaaagaguuuaagc

SEQ ID NO: 1938736 - RNA, 19 nt, Artificial Sequence
  Description of Artificial Sequence: Synthetic oligonucleotide
  Sense strand starting at position 1397 of SEQ ID NO: 1879889
uuuaguagucuccacagga

SEQ ID NO: 1938737 - RNA, 19 nt, Artificial Sequence
  Description of Artificial Sequence: Synthetic oligonucleotide
  Antisense strand to SEQ ID NO: 1938736
uccuguggagacuacuaaa

SEQ ID NO: 1938738 - RNA, 19 nt, Artificial Sequence
  Description of Artificial Sequence: Synthetic oligonucleotide
  Sense strand starting at position 1434 of SEQ ID NO: 1879889
ugaauucuagugcaaguuu

SEQ ID NO: 1938739 - RNA, 19 nt, Artificial Sequence
  Description of Artificial Sequence: Synthetic oligonucleotide
  Antisense strand to SEQ ID NO: 1938738
aaacuugcacuagaauuca

SEQ ID NO: 1938740 - RNA, 19 nt, Artificial Sequence
  Description of Artificial Sequence: Synthetic oligonucleotide
  Sense strand starting at position 1455 of SEQ ID NO: 1879889
acaucaauuuccguguuga

SEQ ID NO: 1938741 - RNA, 19 nt, Artificial Sequence
  Description of Artificial Sequence: Synthetic oligonucleotide
  Antisense strand to SEQ ID NO: 1938740
ucaacacggaaauugaugu

SEQ ID NO: 1938742 - RNA, 19 nt, Artificial Sequence
  Description of Artificial Sequence: Synthetic oligonucleotide
  Sense strand starting at position 1456 of SEQ ID NO: 1879889
caucaauuuccguguugau

SEQ ID NO: 1938743 - RNA, 19 nt, Artificial Sequence
  Description of Artificial Sequence: Synthetic oligonucleotide
  Antisense strand to SEQ ID NO: 1938742
aucaacacggaaauugaug

SEQ ID NO: 1938744 - RNA, 19 nt, Artificial Sequence
  Description of Artificial Sequence: Synthetic oligonucleotide
  Sense strand starting at position 1529 of SEQ ID NO: 1879889
gguaacaucuaggaugauu

SEQ ID NO: 1938745 - RNA, 19 nt, Artificial Sequence
  Description of Artificial Sequence: Synthetic oligonucleotide
  Antisense strand to SEQ ID NO: 1938744
aaucauccuagauguuacc

SEQ ID NO: 1938746 - RNA, 19 nt, Artificial Sequence
  Description of Artificial Sequence: Synthetic oligonucleotide
  Sense strand starting at position 1537 of SEQ ID NO: 1879889
cuaggaugauuugaauucu

SEQ ID NO: 1938747 - RNA, 19 nt, Artificial Sequence
  Description of Artificial Sequence: Synthetic oligonucleotide
  Antisense strand to SEQ ID NO: 1938746
agaauucaaaucauccuag

SEQ ID NO: 1938748 - RNA, 19 nt, Artificial Sequence
  Description of Artificial Sequence: Synthetic oligonucleotide
  Sense strand starting at position 1543 of SEQ ID NO: 1879889
ugauuugaauucugugaga

SEQ ID NO: 1938749 - RNA, 19 nt, Artificial Sequence
  Description of Artificial Sequence: Synthetic oligonucleotide
  Antisense strand to SEQ ID NO: 1938748
ucucacagaauucaaauca

SEQ ID NO: 1938750 - RNA, 19 nt, Artificial Sequence
  Description of Artificial Sequence: Synthetic oligonucleotide
  Sense strand starting at position 1554 of SEQ ID NO: 1879889
cugugagacuguguuaacu

SEQ ID NO: 1938751 - RNA, 19 nt, Artificial Sequence
  Description of Artificial Sequence: Synthetic oligonucleotide
  Antisense strand to SEQ ID NO: 1938750
aguuaacacagucucacag

SEQ ID NO: 1938752 - RNA, 19 nt, Artificial Sequence
  Description of Artificial Sequence: Synthetic oligonucleotide
  Sense strand starting at position 1682 of SEQ ID NO: 1879889
augauacuauguuuacacu

SEQ ID NO: 1938753 - RNA, 19 nt, Artificial Sequence
  Description of Artificial Sequence: Synthetic oligonucleotide
  Antisense strand to SEQ ID NO: 1938752
aguguaaacauaguaucau

SEQ ID NO: 1938754 - RNA, 19 nt, Artificial Sequence
  Description of Artificial Sequence: Synthetic oligonucleotide
  Sense strand starting at position 1781 of SEQ ID NO: 1879889
ucaggugugaagcauauga

SEQ ID NO: 1938755 - RNA, 19 nt, Artificial Sequence
  Description of Artificial Sequence: Synthetic oligonucleotide
  Antisense strand to SEQ ID NO: 1938754
ucauaugcuucacaccuga

SEQ ID NO: 1938756 - RNA, 19 nt, Artificial Sequence
  Description of Artificial Sequence: Synthetic oligonucleotide
  Sense strand starting at position 1785 of SEQ ID NO: 1879889
gugugaagcauaugagcga

SEQ ID NO: 1938757 - RNA, 19 nt, Artificial Sequence
  Description of Artificial Sequence: Synthetic oligonucleotide
  Antisense strand to SEQ ID NO: 1938756
ucgcucauaugcuucacac

SEQ ID NO: 1938758 - RNA, 19 nt, Artificial Sequence
  Description of Artificial Sequence: Synthetic oligonucleotide
  Sense strand starting at position 1789 of SEQ ID NO: 1879889
gaagcauaugagcgagaca

SEQ ID NO: 1938759 - RNA, 19 nt, Artificial Sequence
  Description of Artificial Sequence: Synthetic oligonucleotide
  Antisense strand to SEQ ID NO: 1938758
ugucucgcucauaugcuuc

SEQ ID NO: 1938760 - RNA, 19 nt, Artificial Sequence
  Description of Artificial Sequence: Synthetic oligonucleotide
  Sense strand starting at position 1804 of SEQ ID NO: 1879889
gacaucggucccuaccauu

SEQ ID NO: 1938761 - RNA, 19 nt, Artificial Sequence
  Description of Artificial Sequence: Synthetic oligonucleotide
  Antisense strand to SEQ ID NO: 1938760
aaugguagggaccgauguc

SEQ ID NO: 1938762 - RNA, 19 nt, Artificial Sequence
  Description of Artificial Sequence: Synthetic oligonucleotide
  Sense strand starting at position 1987 of SEQ ID NO: 1879889
ggccuuugcccaugugacu

SEQ ID NO: 1938763 - RNA, 19 nt, Artificial Sequence
  Description of Artificial Sequence: Synthetic oligonucleotide
  Antisense strand to SEQ ID NO: 1938762
agucacaugggcaaaggcc

SEQ ID NO: 1938764 - RNA, 19 nt, Artificial Sequence
  Description of Artificial Sequence: Synthetic oligonucleotide
  Sense strand starting at position 2000 of SEQ ID NO: 1879889
gugacugaugucggcuuca

SEQ ID NO: 1938765 - RNA, 19 nt, Artificial Sequence
  Description of Artificial Sequence: Synthetic oligonucleotide
  Antisense strand to SEQ ID NO: 1938764
ugaagccgacaucagucac

SEQ ID NO: 1938766 - RNA, 19 nt, Artificial Sequence
  Description of Artificial Sequence: Synthetic oligonucleotide
  Sense strand starting at position 3336 of SEQ ID NO: 1879889
acgagaccacuugguaaca

SEQ ID NO: 1938767 - RNA, 19 nt, Artificial Sequence
  Description of Artificial Sequence: Synthetic oligonucleotide
  Antisense strand to SEQ ID NO: 1938766
uguuaccaaguggucucgu

SEQ ID NO: 1938768 - RNA, 19 nt, Artificial Sequence
  Description of Artificial Sequence: Synthetic oligonucleotide
  Sense strand starting at position 3467 of SEQ ID NO: 1879889
auuagugugcgccuguaga

SEQ ID NO: 1938769 - RNA, 19 nt, Artificial Sequence
  Description of Artificial Sequence: Synthetic oligonucleotide
  Antisense strand to SEQ ID NO: 1938768
ucuacaggcgcacacuaau

SEQ ID NO: 1938770 - RNA, 19 nt, Artificial Sequence
  Description of Artificial Sequence: Synthetic oligonucleotide
  Sense strand starting at position 3469 of SEQ ID NO: 1879889
uagugugcgccuguagaaa

SEQ ID NO: 1938771 - RNA, 19 nt, Artificial Sequence
  Description of Artificial Sequence: Synthetic oligonucleotide
  Antisense strand to SEQ ID NO: 1938770
uuucuacaggcgcacacua

SEQ ID NO: 1938772 - RNA, 19 nt, Artificial Sequence
  Description of Artificial Sequence: Synthetic oligonucleotide
  Sense strand starting at position 3548 of SEQ ID NO: 1879889
auaguuggaguuuaacauu

SEQ ID NO: 1938773 - RNA, 19 nt, Artificial Sequence
  Description of Artificial Sequence: Synthetic oligonucleotide
  Antisense strand to SEQ ID NO: 1938772
aauguuaaacuccaacuau

SEQ ID NO: 1938774 - RNA, 19 nt, Artificial Sequence
  Description of Artificial Sequence: Synthetic oligonucleotide
  Sense strand starting at position 3557 of SEQ ID NO: 1879889
guuuaacauuuggaggcau

SEQ ID NO: 1938775 - RNA, 19 nt, Artificial Sequence
  Description of Artificial Sequence: Synthetic oligonucleotide
  Antisense strand to SEQ ID NO: 1938774
augccuccaaauguuaaac

SEQ ID NO: 1938776 - RNA, 19 nt, Artificial Sequence
  Description of Artificial Sequence: Synthetic oligonucleotide
  Sense strand starting at position 3598 of SEQ ID NO: 1879889
gugggaacaacugagucuu

SEQ ID NO: 1938777 - RNA, 19 nt, Artificial Sequence
  Description of Artificial Sequence: Synthetic oligonucleotide
  Antisense strand to SEQ ID NO: 1938776
aagacucaguuguucccac

SEQ ID NO: 1938778 - RNA, 19 nt, Artificial Sequence
  Description of Artificial Sequence: Synthetic oligonucleotide
  Sense strand starting at position 3616 of SEQ ID NO: 1879889
ucagauugguuagagaaag

SEQ ID NO: 1938779 - RNA, 19 nt, Artificial Sequence
  Description of Artificial Sequence: Synthetic oligonucleotide
  Antisense strand to SEQ ID NO: 1938778
cuuucucuaaccaaucuga

SEQ ID NO: 1938780 - RNA, 19 nt, Artificial Sequence
  Description of Artificial Sequence: Synthetic oligonucleotide
  Sense strand starting at position 3797 of SEQ ID NO: 1879889
cgacuuugccaguacccau

SEQ ID NO: 1938781 - RNA, 19 nt, Artificial Sequence
  Description of Artificial Sequence: Synthetic oligonucleotide
  Antisense strand to SEQ ID NO: 1938780
auggguacuggcaaagucg

SEQ ID NO: 1938782 - RNA, 19 nt, Artificial Sequence
  Description of Artificial Sequence: Synthetic oligonucleotide
  Sense strand starting at position 3966 of SEQ ID NO: 1879889
auccuuugcuaauuggaau

SEQ ID NO: 1938783 - RNA, 19 nt, Artificial Sequence
  Description of Artificial Sequence: Synthetic oligonucleotide
  Antisense strand to SEQ ID NO: 1938782
auuccaauuagcaaaggau

SEQ ID NO: 1938784 - RNA, 19 nt, Artificial Sequence
  Description of Artificial Sequence: Synthetic oligonucleotide
  Sense strand starting at position 33 of SEQ ID NO: 1879888
agugacgauucugcaaaga

SEQ ID NO: 1938785 - RNA, 19 nt, Artificial Sequence
  Description of Artificial Sequence: Synthetic oligonucleotide
  Antisense strand to SEQ ID NO: 1938784
ucuuugcagaaucgucacu

SEQ ID NO: 1938786 - RNA, 19 nt, Artificial Sequence
  Description of Artificial Sequence: Synthetic oligonucleotide
  Sense strand starting at position 179 of SEQ ID NO: 1879888
cacagaugauccgugacuu

SEQ ID NO: 1938787 - RNA, 19 nt, Artificial Sequence
  Description of Artificial Sequence: Synthetic oligonucleotide
  Antisense strand to SEQ ID NO: 1938786
aagucacggaucaucugug

SEQ ID NO: 1938788 - RNA, 19 nt, Artificial Sequence
  Description of Artificial Sequence: Synthetic oligonucleotide
  Sense strand starting at position 180 of SEQ ID NO: 1879888
acagaugauccgugacuua

SEQ ID NO: 1938789 - RNA, 19 nt, Artificial Sequence
  Description of Artificial Sequence: Synthetic oligonucleotide
  Antisense strand to SEQ ID NO: 1938788
uaagucacggaucaucugu

SEQ ID NO: 1938790 - RNA, 19 nt, Artificial Sequence
  Description of Artificial Sequence: Synthetic oligonucleotide
  Sense strand starting at position 191 of SEQ ID NO: 1879888
gugacuuaccuguacuguu

SEQ ID NO: 1938791 - RNA, 19 nt, Artificial Sequence
  Description of Artificial Sequence: Synthetic oligonucleotide
  Antisense strand to SEQ ID NO: 1938790
aacaguacagguaagucac

SEQ ID NO: 1938792 - RNA, 19 nt, Artificial Sequence
  Description of Artificial Sequence: Synthetic oligonucleotide
  Sense strand starting at position 353 of SEQ ID NO: 1879888
cgcuuaaacucuuuaguag

SEQ ID NO: 1938793 - RNA, 19 nt, Artificial Sequence
  Description of Artificial Sequence: Synthetic oligonucleotide
  Antisense strand to SEQ ID NO: 1938792
cuacuaaagaguuuaagcg

SEQ ID NO: 1938794 - RNA, 19 nt, Artificial Sequence
  Description of Artificial Sequence: Synthetic oligonucleotide
  Sense strand starting at position 354 of SEQ ID NO: 1879888
gcuuaaacucuuuaguagu

SEQ ID NO: 1938795 - RNA, 19 nt, Artificial Sequence
  Description of Artificial Sequence: Synthetic oligonucleotide
  Antisense strand to SEQ ID NO: 1938794
acuacuaaagaguuuaagc

SEQ ID NO: 1938796 - RNA, 19 nt, Artificial Sequence
  Description of Artificial Sequence: Synthetic oligonucleotide
  Sense strand starting at position 364 of SEQ ID NO: 1879888
uuuaguagucuccacagga

SEQ ID NO: 1938797 - RNA, 19 nt, Artificial Sequence
  Description of Artificial Sequence: Synthetic oligonucleotide
  Antisense strand to SEQ ID NO: 1938796
uccuguggagacuacuaaa

SEQ ID NO: 1938798 - RNA, 19 nt, Artificial Sequence
  Description of Artificial Sequence: Synthetic oligonucleotide
  Sense strand starting at position 401 of SEQ ID NO: 1879888
ugaauucuagugcaaguuu

SEQ ID NO: 1938799 - RNA, 19 nt, Artificial Sequence
  Description of Artificial Sequence: Synthetic oligonucleotide
  Antisense strand to SEQ ID NO: 1938798
aaacuugcacuagaauuca

SEQ ID NO: 1938800 - RNA, 19 nt, Artificial Sequence
  Description of Artificial Sequence: Synthetic oligonucleotide
  Sense strand starting at position 422 of SEQ ID NO: 1879888
acaucaauuuccguguuga

SEQ ID NO: 1938801 - RNA, 19 nt, Artificial Sequence
  Description of Artificial Sequence: Synthetic oligonucleotide
  Antisense strand to SEQ ID NO: 1938800
ucaacacggaaauugaugu

SEQ ID NO: 1938802 - RNA, 19 nt, Artificial Sequence
  Description of Artificial Sequence: Synthetic oligonucleotide
  Sense strand starting at position 423 of SEQ ID NO: 1879888
caucaauuuccguguugau

SEQ ID NO: 1938803 - RNA, 19 nt, Artificial Sequence
  Description of Artificial Sequence: Synthetic oligonucleotide
  Antisense strand to SEQ ID NO: 1938802
aucaacacggaaauugaug

SEQ ID NO: 1938804 - RNA, 19 nt, Artificial Sequence
  Description of Artificial Sequence: Synthetic oligonucleotide
  Sense strand starting at position 504 of SEQ ID NO: 1879888
cuaggaugauuugaauucu

SEQ ID NO: 1938805 - RNA, 19 nt, Artificial Sequence
  Description of Artificial Sequence: Synthetic oligonucleotide
  Antisense strand to SEQ ID NO: 1938804
agaauucaaaucauccuag

SEQ ID NO: 1938806 - RNA, 19 nt, Artificial Sequence
  Description of Artificial Sequence: Synthetic oligonucleotide
  Sense strand starting at position 510 of SEQ ID NO: 1879888
ugauuugaauucugugaga

SEQ ID NO: 1938807 - RNA, 19 nt, Artificial Sequence
  Description of Artificial Sequence: Synthetic oligonucleotide
  Antisense strand to SEQ ID NO: 1938806
ucucacagaauucaaauca

SEQ ID NO: 1938808 - RNA, 19 nt, Artificial Sequence
  Description of Artificial Sequence: Synthetic oligonucleotide
  Sense strand starting at position 521 of SEQ ID NO: 1879888
cugugagacuguguuaacu

SEQ ID NO: 1938809 - RNA, 19 nt, Artificial Sequence
  Description of Artificial Sequence: Synthetic oligonucleotide
  Antisense strand to SEQ ID NO: 1938808
aguuaacacagucucacag

SEQ ID NO: 1938810 - RNA, 19 nt, Artificial Sequence
  Description of Artificial Sequence: Synthetic oligonucleotide
  Sense strand starting at position 649 of SEQ ID NO: 1879888
augauacuauguuuacacu

SEQ ID NO: 1938811 - RNA, 19 nt, Artificial Sequence
  Description of Artificial Sequence: Synthetic oligonucleotide
  Antisense strand to SEQ ID NO: 1938810
aguguaaacauaguaucau

SEQ ID NO: 1938812 - RNA, 19 nt, Artificial Sequence
  Description of Artificial Sequence: Synthetic oligonucleotide
  Sense strand starting at position 748 of SEQ ID NO: 1879888
ucaggugugaagcauauga

SEQ ID NO: 1938813 - RNA, 19 nt, Artificial Sequence
  Description of Artificial Sequence: Synthetic oligonucleotide
  Antisense strand to SEQ ID NO: 1938812
ucauaugcuucacaccuga

SEQ ID NO: 1938814 - RNA, 19 nt, Artificial Sequence
  Description of Artificial Sequence: Synthetic oligonucleotide
  Sense strand starting at position 756 of SEQ ID NO: 1879888
gaagcauaugagcgagaca

SEQ ID NO: 1938815 - RNA, 19 nt, Artificial Sequence
  Description of Artificial Sequence: Synthetic oligonucleotide
  Antisense strand to SEQ ID NO: 1938814
ugucucgcucauaugcuuc

SEQ ID NO: 1938816 - RNA, 19 nt, Artificial Sequence
  Description of Artificial Sequence: Synthetic oligonucleotide
  Sense strand starting at position 771 of SEQ ID NO: 1879888
gacaucggucccuaccauu

SEQ ID NO: 1938817 - RNA, 19 nt, Artificial Sequence
  Description of Artificial Sequence: Synthetic oligonucleotide
  Antisense strand to SEQ ID NO: 1938816
aaugguagggaccgauguc

SEQ ID NO: 1938818 - RNA, 19 nt, Artificial Sequence
  Description of Artificial Sequence: Synthetic oligonucleotide
  Sense strand starting at position 2303 of SEQ ID NO: 1879888
acgagaccacuugguaaca

SEQ ID NO: 1938819 - RNA, 19 nt, Artificial Sequence
  Description of Artificial Sequence: Synthetic oligonucleotide
  Antisense strand to SEQ ID NO: 1938818
uguuaccaaguggucucgu

SEQ ID NO: 1938820 - RNA, 19 nt, Artificial Sequence
  Description of Artificial Sequence: Synthetic oligonucleotide
  Sense strand starting at position 2434 of SEQ ID NO: 1879888
auuagugugcgccuguaga

SEQ ID NO: 1938821 - RNA, 19 nt, Artificial Sequence
  Description of Artificial Sequence: Synthetic oligonucleotide
  Antisense strand to SEQ ID NO: 1938820
ucuacaggcgcacacuaau

SEQ ID NO: 1938822 - RNA, 19 nt, Artificial Sequence
  Description of Artificial Sequence: Synthetic oligonucleotide
  Sense strand starting at position 2436 of SEQ ID NO: 1879888
uagugugcgccuguagaaa

SEQ ID NO: 1938823 - RNA, 19 nt, Artificial Sequence
  Description of Artificial Sequence: Synthetic oligonucleotide
  Antisense strand to SEQ ID NO: 1938822
uuucuacaggcgcacacua

SEQ ID NO: 1938824 - RNA, 19 nt, Artificial Sequence
  Description of Artificial Sequence: Synthetic oligonucleotide
  Sense strand starting at position 2515 of SEQ ID NO: 1879888
auaguuggaguuuaacauu

SEQ ID NO: 1938825 - RNA, 19 nt, Artificial Sequence
  Description of Artificial Sequence: Synthetic oligonucleotide
  Antisense strand to SEQ ID NO: 1938824
aauguuaaacuccaacuau

SEQ ID NO: 1938826 - RNA, 19 nt, Artificial Sequence
  Description of Artificial Sequence: Synthetic oligonucleotide
  Sense strand starting at position 2524 of SEQ ID NO: 1879888
guuuaacauuuggaggcau

SEQ ID NO: 1938827 - RNA, 19 nt, Artificial Sequence
  Description of Artificial Sequence: Synthetic oligonucleotide
  Antisense strand to SEQ ID NO: 1938826
augccuccaaauguuaaac

SEQ ID NO: 1938828 - RNA, 19 nt, Artificial Sequence
  Description of Artificial Sequence: Synthetic oligonucleotide
  Sense strand starting at position 2565 of SEQ ID NO: 1879888
gugggaacaacugagucuu

SEQ ID NO: 1938829 - RNA, 19 nt, Artificial Sequence
  Description of Artificial Sequence: Synthetic oligonucleotide
  Antisense strand to SEQ ID NO: 1938828
aagacucaguuguucccac

SEQ ID NO: 1938830 - RNA, 19 nt, Artificial Sequence
  Description of Artificial Sequence: Synthetic oligonucleotide
  Sense strand starting at position 2583 of SEQ ID NO: 1879888
ucagauugguuagagaaag

SEQ ID NO: 1938831 - RNA, 19 nt, Artificial Sequence
  Description of Artificial Sequence: Synthetic oligonucleotide
  Antisense strand to SEQ ID NO: 1938830
cuuucucuaaccaaucuga

SEQ ID NO: 1938832 - RNA, 19 nt, Artificial Sequence
  Description of Artificial Sequence: Synthetic oligonucleotide
  Sense strand starting at position 2764 of SEQ ID NO: 1879888
cgacuuugccaguacccau

SEQ ID NO: 1938833 - RNA, 19 nt, Artificial Sequence
  Description of Artificial Sequence: Synthetic oligonucleotide
  Antisense strand to SEQ ID NO: 1938832
auggguacuggcaaagucg

SEQ ID NO: 1938834 - RNA, 19 nt, Artificial Sequence
  Description of Artificial Sequence: Synthetic oligonucleotide
  Sense strand starting at position 2933 of SEQ ID NO: 1879888
auccuuugcuaauuggaau

SEQ ID NO: 1938835 - RNA, 19 nt, Artificial Sequence
  Description of Artificial Sequence: Synthetic oligonucleotide
  Antisense strand to SEQ ID NO: 1938834
auuccaauuagcaaaggau

SEQ ID NO: 1938836 - RNA, 19 nt, Artificial Sequence
  Description of Artificial Sequence: Synthetic oligonucleotide
  Sense strand starting at position 3319 of SEQ ID NO: 1879888
agagcaucuuguccaaaca

SEQ ID NO: 1938837 - RNA, 19 nt, Artificial Sequence
  Description of Artificial Sequence: Synthetic oligonucleotide
  Antisense strand to SEQ ID NO: 1938836
uguuuggacaagaugcucu

SEQ ID NO: 1938838 - RNA, 19 nt, Artificial Sequence
  Description of Artificial Sequence: Synthetic oligonucleotide
  Sense strand starting at position 3388 of SEQ ID NO: 1879888
ugccuaugggauugucaau

SEQ ID NO: 1938839 - RNA, 19 nt, Artificial Sequence
  Description of Artificial Sequence: Synthetic oligonucleotide
  Antisense strand to SEQ ID NO: 1938838
auugacaaucccauaggca

SEQ ID NO: 1938840 - RNA, 19 nt, Artificial Sequence
  Description of Artificial Sequence: Synthetic oligonucleotide
  Sense strand starting at position 3395 of SEQ ID NO: 1879888
gggauugucaaucguuaaa

SEQ ID NO: 1938841 - RNA, 19 nt, Artificial Sequence
  Description of Artificial Sequence: Synthetic oligonucleotide
  Antisense strand to SEQ ID NO: 1938840
uuuaacgauugacaauccc

SEQ ID NO: 1938842 - RNA, 19 nt, Artificial Sequence
  Description of Artificial Sequence: Synthetic oligonucleotide
  Sense strand starting at position 3641 of SEQ ID NO: 1879888
cgagguugcggugagucaa

SEQ ID NO: 1938843 - RNA, 19 nt, Artificial Sequence
  Description of Artificial Sequence: Synthetic oligonucleotide
  Antisense strand to SEQ ID NO: 1938842
uugacucaccgcaaccucg

SEQ ID NO: 1938844 - RNA, 19 nt, Artificial Sequence
  Description of Artificial Sequence: Synthetic oligonucleotide
  Sense strand starting at position 3892 of SEQ ID NO: 1879888
ugguauuaauucuugguau

SEQ ID NO: 1938845 - RNA, 19 nt, Artificial Sequence
  Description of Artificial Sequence: Synthetic oligonucleotide
  Antisense strand to SEQ ID NO: 1938844
auaccaagaauuaauacca

SEQ ID NO: 1938846 - RNA, 19 nt, Artificial Sequence
  Description of Artificial Sequence: Synthetic oligonucleotide
  Sense strand starting at position 3894 of SEQ ID NO: 1879888
guauuaauucuugguauuc

SEQ ID NO: 1938847 - RNA, 19 nt, Artificial Sequence
  Description of Artificial Sequence: Synthetic oligonucleotide
  Antisense strand to SEQ ID NO: 1938846
gaauaccaagaauuaauac

SEQ ID NO: 1938848 - RNA, 19 nt, Artificial Sequence
  Description of Artificial Sequence: Synthetic oligonucleotide
  Sense strand starting at position 3914 of SEQ ID NO: 1879888
ccacauucgcucgaucgau

SEQ ID NO: 1938849 - RNA, 19 nt, Artificial Sequence
  Description of Artificial Sequence: Synthetic oligonucleotide
  Antisense strand to SEQ ID NO: 1938848
aucgaucgagcgaaugugg

SEQ ID NO: 1938850 - RNA, 19 nt, Artificial Sequence
  Description of Artificial Sequence: Synthetic oligonucleotide
  Sense strand starting at position 3920 of SEQ ID NO: 1879888
ucgcucgaucgauauugau

SEQ ID NO: 1938851 - RNA, 19 nt, Artificial Sequence
  Description of Artificial Sequence: Synthetic oligonucleotide
  Antisense strand to SEQ ID NO: 1938850
aucaauaucgaucgagcga

SEQ ID NO: 1938852 - RNA, 19 nt, Artificial Sequence
  Description of Artificial Sequence: Synthetic oligonucleotide
  Sense strand starting at position 3924 of SEQ ID NO: 1879888
ucgaucgauauugauugau

SEQ ID NO: 1938853 - RNA, 19 nt, Artificial Sequence
  Description of Artificial Sequence: Synthetic oligonucleotide
  Antisense strand to SEQ ID NO: 1938852
aucaaucaauaucgaucga

SEQ ID NO: 1938854 - RNA, 19 nt, Artificial Sequence
  Description of Artificial Sequence: Synthetic oligonucleotide
  Sense strand starting at position 3926 of SEQ ID NO: 1879888
gaucgauauugauugauug

SEQ ID NO: 1938855 - RNA, 19 nt, Artificial Sequence
  Description of Artificial Sequence: Synthetic oligonucleotide
  Antisense strand to SEQ ID NO: 1938854
caaucaaucaauaucgauc

SEQ ID NO: 1938856 - RNA, 19 nt, Artificial Sequence
  Description of Artificial Sequence: Synthetic oligonucleotide
  Sense strand starting at position 3928 of SEQ ID NO: 1879888
ucgauauugauugauuggu

SEQ ID NO: 1938857 - RNA, 19 nt, Artificial Sequence
  Description of Artificial Sequence: Synthetic oligonucleotide
  Antisense strand to SEQ ID NO: 1938856
accaaucaaucaauaucga

SEQ ID NO: 1938858 - RNA, 19 nt, Artificial Sequence
  Description of Artificial Sequence: Synthetic oligonucleotide
  Sense strand starting at position 3933 of SEQ ID NO: 1879888
auugauugauugguucuca

SEQ ID NO: 1938859 - RNA, 19 nt, Artificial Sequence
  Description of Artificial Sequence: Synthetic oligonucleotide
  Antisense strand to SEQ ID NO: 1938858
ugagaaccaaucaaucaau

SEQ ID NO: 1938860 - RNA, 19 nt, Artificial Sequence
  Description of Artificial Sequence: Synthetic oligonucleotide
  Sense strand starting at position 3937 of SEQ ID NO: 1879888
auugauugguucucacuuu

SEQ ID NO: 1938861 - RNA, 19 nt, Artificial Sequence
  Description of Artificial Sequence: Synthetic oligonucleotide
  Antisense strand to SEQ ID NO: 1938860
aaagugagaaccaaucaau

SEQ ID NO: 1938862 - RNA, 19 nt, Artificial Sequence
  Description of Artificial Sequence: Synthetic oligonucleotide
  Sense strand starting at position 3949 of SEQ ID NO: 1879888
ucacuuuaucuuggcaaag

SEQ ID NO: 1938863 - RNA, 19 nt, Artificial Sequence
  Description of Artificial Sequence: Synthetic oligonucleotide
  Antisense strand to SEQ ID NO: 1938862
cuuugccaagauaaaguga

SEQ ID NO: 1938864 - RNA, 19 nt, Artificial Sequence
  Description of Artificial Sequence: Synthetic oligonucleotide
  Sense strand starting at position 503 of SEQ ID NO: 1879890
acaauaucaggcuacaguu

SEQ ID NO: 1938865 - RNA, 19 nt, Artificial Sequence
  Description of Artificial Sequence: Synthetic oligonucleotide
  Antisense strand to SEQ ID NO: 1938864
aacuguagccugauauugu

SEQ ID NO: 1938866 - RNA, 19 nt, Artificial Sequence
  Description of Artificial Sequence: Synthetic oligonucleotide
  Sense strand starting at position 632 of SEQ ID NO: 1879890
ugaucucuaugugcucaua

SEQ ID NO: 1938867 - RNA, 19 nt, Artificial Sequence
  Description of Artificial Sequence: Synthetic oligonucleotide
  Antisense strand to SEQ ID NO: 1938866
uaugagcacauagagauca

SEQ ID NO: 1938868 - RNA, 19 nt, Artificial Sequence
  Description of Artificial Sequence: Synthetic oligonucleotide
  Sense strand starting at position 644 of SEQ ID NO: 1879890
gcucauaaacagugccuaa

SEQ ID NO: 1938869 - RNA, 19 nt, Artificial Sequence
  Description of Artificial Sequence: Synthetic oligonucleotide
  Antisense strand to SEQ ID NO: 1938868
uuaggcacuguuuaugagc

SEQ ID NO: 1938870 - RNA, 19 nt, Artificial Sequence
  Description of Artificial Sequence: Synthetic oligonucleotide
  Sense strand starting at position 1973 of SEQ ID NO: 1879890
acgccuuccucucugggaa

SEQ ID NO: 1938871 - RNA, 19 nt, Artificial Sequence
  Description of Artificial Sequence: Synthetic oligonucleotide
  Antisense strand to SEQ ID NO: 1938870
uucccagagaggaaggcgu

SEQ ID NO: 1938872 - RNA, 19 nt, Artificial Sequence
  Description of Artificial Sequence: Synthetic oligonucleotide
  Sense strand starting at position 1974 of SEQ ID NO: 1879890
cgccuuccucucugggaaa

SEQ ID NO: 1938873 - RNA, 19 nt, Artificial Sequence
  Description of Artificial Sequence: Synthetic oligonucleotide
  Antisense strand to SEQ ID NO: 1938872
uuucccagagaggaaggcg

SEQ ID NO: 1938874 - RNA, 19 nt, Artificial Sequence
  Description of Artificial Sequence: Synthetic oligonucleotide
  Sense strand starting at position 2215 of SEQ ID NO: 1879890
ccaguucuccgcuaaagug

SEQ ID NO: 1938875 - RNA, 19 nt, Artificial Sequence
  Description of Artificial Sequence: Synthetic oligonucleotide
  Antisense strand to SEQ ID NO: 1938874
cacuuuagcggagaacugg

SEQ ID NO: 1938876 - RNA, 19 nt, Artificial Sequence
  Description of Artificial Sequence: Synthetic oligonucleotide
  Sense strand starting at position 2351 of SEQ ID NO: 1879890
acgggauccuucuccugaa

SEQ ID NO: 1938877 - RNA, 19 nt, Artificial Sequence
  Description of Artificial Sequence: Synthetic oligonucleotide
  Antisense strand to SEQ ID NO: 1938876
uucaggagaaggaucccgu

SEQ ID NO: 1938878 - RNA, 19 nt, Artificial Sequence
  Description of Artificial Sequence: Synthetic oligonucleotide
  Sense strand starting at position 2364 of SEQ ID NO: 1879890
ccugaaguccuuuaguaac

SEQ ID NO: 1938879 - RNA, 19 nt, Artificial Sequence
  Description of Artificial Sequence: Synthetic oligonucleotide
  Antisense strand to SEQ ID NO: 1938878
guuacuaaaggacuucagg

SEQ ID NO: 1938880 - RNA, 19 nt, Artificial Sequence
  Description of Artificial Sequence: Synthetic oligonucleotide
  Sense strand starting at position 2398 of SEQ ID NO: 1879890
aucgccuguccuuaagcaa

SEQ ID NO: 1938881 - RNA, 19 nt, Artificial Sequence
  Description of Artificial Sequence: Synthetic oligonucleotide
  Antisense strand to SEQ ID NO: 1938880
uugcuuaaggacaggcgau

SEQ ID NO: 1938882 - RNA, 19 nt, Artificial Sequence
  Description of Artificial Sequence: Synthetic oligonucleotide
  Sense strand starting at position 2433 of SEQ ID NO: 1879890
cauagcugaucguuaacuu

SEQ ID NO: 1938883 - RNA, 19 nt, Artificial Sequence
  Description of Artificial Sequence: Synthetic oligonucleotide
  Antisense strand to SEQ ID NO: 1938882
aaguuaacgaucagcuaug

SEQ ID NO: 1938884 - RNA, 19 nt, Artificial Sequence
  Description of Artificial Sequence: Synthetic oligonucleotide
  Sense strand starting at position 2434 of SEQ ID NO: 1879890
auagcugaucguuaacuuu

SEQ ID NO: 1938885 - RNA, 19 nt, Artificial Sequence
  Description of Artificial Sequence: Synthetic oligonucleotide
  Antisense strand to SEQ ID NO: 1938884
aaaguuaacgaucagcuau

SEQ ID NO: 1938886 - RNA, 19 nt, Artificial Sequence
  Description of Artificial Sequence: Synthetic oligonucleotide
  Sense strand starting at position 2460 of SEQ ID NO: 1879890
ucugcuuugugacucuaga

SEQ ID NO: 1938887 - RNA, 19 nt, Artificial Sequence
  Description of Artificial Sequence: Synthetic oligonucleotide
  Antisense strand to SEQ ID NO: 1938886
ucuagagucacaaagcaga

SEQ ID NO: 1938888 - RNA, 19 nt, Artificial Sequence
  Description of Artificial Sequence: Synthetic oligonucleotide
  Sense strand starting at position 2468 of SEQ ID NO: 1879890
gugacucuagagugauuau

SEQ ID NO: 1938889 - RNA, 19 nt, Artificial Sequence
  Description of Artificial Sequence: Synthetic oligonucleotide
  Antisense strand to SEQ ID NO: 1938888
auaaucacucuagagucac

SEQ ID NO: 1938890 - RNA, 19 nt, Artificial Sequence
  Description of Artificial Sequence: Synthetic oligonucleotide
  Sense strand starting at position 2583 of SEQ ID NO: 1879890
aaauacaucggaugguuga

SEQ ID NO: 1938891 - RNA, 19 nt, Artificial Sequence
  Description of Artificial Sequence: Synthetic oligonucleotide
  Antisense strand to SEQ ID NO: 1938890
ucaaccauccgauguauuu

SEQ ID NO: 1938892 - RNA, 19 nt, Artificial Sequence
  Description of Artificial Sequence: Synthetic oligonucleotide
  Sense strand starting at position 2584 of SEQ ID NO: 1879890
aauacaucggaugguugaa

SEQ ID NO: 1938893 - RNA, 19 nt, Artificial Sequence
  Description of Artificial Sequence: Synthetic oligonucleotide
  Antisense strand to SEQ ID NO: 1938892
uucaaccauccgauguauu

SEQ ID NO: 1938894 - RNA, 19 nt, Artificial Sequence
  Description of Artificial Sequence: Synthetic oligonucleotide
  Sense strand starting at position 2675 of SEQ ID NO: 1879890
aaaggucagcuauggcaaa

SEQ ID NO: 1938895 - RNA, 19 nt, Artificial Sequence
  Description of Artificial Sequence: Synthetic oligonucleotide
  Antisense strand to SEQ ID NO: 1938894
uuugccauagcugaccuuu

SEQ ID NO: 1938896 - RNA, 19 nt, Artificial Sequence
  Description of Artificial Sequence: Synthetic oligonucleotide
  Sense strand starting at position 2722 of SEQ ID NO: 1879890
gcauaucugagguagugaa

SEQ ID NO: 1938897 - RNA, 19 nt, Artificial Sequence
  Description of Artificial Sequence: Synthetic oligonucleotide
  Antisense strand to SEQ ID NO: 1938896
uucacuaccucagauaugc

SEQ ID NO: 1938898 - RNA, 19 nt, Artificial Sequence
  Description of Artificial Sequence: Synthetic oligonucleotide
  Sense strand starting at position 2855 of SEQ ID NO: 1879890
agauguuaugaaggccuua

SEQ ID NO: 1938899 - RNA, 19 nt, Artificial Sequence
  Description of Artificial Sequence: Synthetic oligonucleotide
  Antisense strand to SEQ ID NO: 1938898
uaaggccuucauaacaucu

SEQ ID NO: 1938900 - RNA, 19 nt, Artificial Sequence
  Description of Artificial Sequence: Synthetic oligonucleotide
  Sense strand starting at position 2860 of SEQ ID NO: 1879890
uuaugaaggccuuaaucua

SEQ ID NO: 1938901 - RNA, 19 nt, Artificial Sequence
  Description of Artificial Sequence: Synthetic oligonucleotide
  Antisense strand to SEQ ID NO: 1938900
uagauuaaggccuucauaa

SEQ ID NO: 1938902 - RNA, 19 nt, Artificial Sequence
  Description of Artificial Sequence: Synthetic oligonucleotide
  Sense strand starting at position 2880 of SEQ ID NO: 1879890
auggaaacuuugccuuuga

SEQ ID NO: 1938903 - RNA, 19 nt, Artificial Sequence
  Description of Artificial Sequence: Synthetic oligonucleotide
  Antisense strand to SEQ ID NO: 1938902
ucaaaggcaaaguuuccau

SEQ ID NO: 1938904 - RNA, 19 nt, Artificial Sequence
  Description of Artificial Sequence: Synthetic oligonucleotide
  Sense strand starting at position 2881 of SEQ ID NO: 1879890
uggaaacuuugccuuugaa

SEQ ID NO: 1938905 - RNA, 19 nt, Artificial Sequence
  Description of Artificial Sequence: Synthetic oligonucleotide
  Antisense strand to SEQ ID NO: 1938904
uucaaaggcaaaguuucca

SEQ ID NO: 1938906 - RNA, 19 nt, Artificial Sequence
  Description of Artificial Sequence: Synthetic oligonucleotide
  Sense strand starting at position 2929 of SEQ ID NO: 1879890
cuugcuugccucguaacau

SEQ ID NO: 1938907 - RNA, 19 nt, Artificial Sequence
  Description of Artificial Sequence: Synthetic oligonucleotide
  Antisense strand to SEQ ID NO: 1938906
auguuacgaggcaagcaag

SEQ ID NO: 1938908 - RNA, 19 nt, Artificial Sequence
  Description of Artificial Sequence: Synthetic oligonucleotide
  Sense strand starting at position 3168 of SEQ ID NO: 1879890
augaauauuaacggugaga

SEQ ID NO: 1938909 - RNA, 19 nt, Artificial Sequence
  Description of Artificial Sequence: Synthetic oligonucleotide
  Antisense strand to SEQ ID NO: 1938908
ucucaccguuaauauucau

SEQ ID NO: 1938910 - RNA, 19 nt, Artificial Sequence
  Description of Artificial Sequence: Synthetic oligonucleotide
  Sense strand starting at position 3170 of SEQ ID NO: 1879890
gaauauuaacggugagauc

SEQ ID NO: 1938911 - RNA, 19 nt, Artificial Sequence
  Description of Artificial Sequence: Synthetic oligonucleotide
  Antisense strand to SEQ ID NO: 1938910
gaucucaccguuaauauuc

SEQ ID NO: 1938912 - RNA, 19 nt, Artificial Sequence
  Description of Artificial Sequence: Synthetic oligonucleotide
  Sense strand starting at position 3239 of SEQ ID NO: 1879890
uacacugucuaagagauga

SEQ ID NO: 1938913 - RNA, 19 nt, Artificial Sequence
  Description of Artificial Sequence: Synthetic oligonucleotide
  Antisense strand to SEQ ID NO: 1938912
ucaucucuuagacagugua

SEQ ID NO: 1938914 - RNA, 19 nt, Artificial Sequence
  Description of Artificial Sequence: Synthetic oligonucleotide
  Sense strand starting at position 3405 of SEQ ID NO: 1879890
gcugauguucuguaugggu

SEQ ID NO: 1938915 - RNA, 19 nt, Artificial Sequence
  Description of Artificial Sequence: Synthetic oligonucleotide
  Antisense strand to SEQ ID NO: 1938914
acccauacagaacaucagc

SEQ ID NO: 1938916 - RNA, 19 nt, Artificial Sequence
  Description of Artificial Sequence: Synthetic oligonucleotide
  Sense strand starting at position 3414 of SEQ ID NO: 1879890
cuguauggguguucuuaac

SEQ ID NO: 1938917 - RNA, 19 nt, Artificial Sequence
  Description of Artificial Sequence: Synthetic oligonucleotide
  Antisense strand to SEQ ID NO: 1938916
guuaagaacacccauacag

SEQ ID NO: 1938918 - RNA, 19 nt, Artificial Sequence
  Description of Artificial Sequence: Synthetic oligonucleotide
  Sense strand starting at position 3451 of SEQ ID NO: 1879890
agguaagaaugggauaugu

SEQ ID NO: 1938919 - RNA, 19 nt, Artificial Sequence
  Description of Artificial Sequence: Synthetic oligonucleotide
  Antisense strand to SEQ ID NO: 1938918
acauaucccauucuuaccu

SEQ ID NO: 1938920 - RNA, 19 nt, Artificial Sequence
  Description of Artificial Sequence: Synthetic oligonucleotide
  Sense strand starting at position 3460 of SEQ ID NO: 1879890
ugggauaugucccucugca

SEQ ID NO: 1938921 - RNA, 19 nt, Artificial Sequence
  Description of Artificial Sequence: Synthetic oligonucleotide
  Antisense strand to SEQ ID NO: 1938920
ugcagagggacauauccca

SEQ ID NO: 1938922 - RNA, 19 nt, Artificial Sequence
  Description of Artificial Sequence: Synthetic oligonucleotide
  Sense strand starting at position 3494 of SEQ ID NO: 1879890
ugucuugauucuguaugag

SEQ ID NO: 1938923 - RNA, 19 nt, Artificial Sequence
  Description of Artificial Sequence: Synthetic oligonucleotide
  Antisense strand to SEQ ID NO: 1938922
cucauacagaaucaagaca

SEQ ID NO: 1938924 - RNA, 19 nt, Artificial Sequence
  Description of Artificial Sequence: Synthetic oligonucleotide
  Sense strand starting at position 3497 of SEQ ID NO: 1879890
cuugauucuguaugagagu

SEQ ID NO: 1938925 - RNA, 19 nt, Artificial Sequence
  Description of Artificial Sequence: Synthetic oligonucleotide
  Antisense strand to SEQ ID NO: 1938924
acucucauacagaaucaag

SEQ ID NO: 1938926 - RNA, 19 nt, Artificial Sequence
  Description of Artificial Sequence: Synthetic oligonucleotide
  Sense strand starting at position 3677 of SEQ ID NO: 1879890
aaaugucacguuuacaaug

SEQ ID NO: 1938927 - RNA, 19 nt, Artificial Sequence
  Description of Artificial Sequence: Synthetic oligonucleotide
  Antisense strand to SEQ ID NO: 1938926
cauuguaaacgugacauuu

SEQ ID NO: 1938928 - RNA, 19 nt, Artificial Sequence
  Description of Artificial Sequence: Synthetic oligonucleotide
  Sense strand starting at position 3682 of SEQ ID NO: 1879890
ucacguuuacaaugggaac

SEQ ID NO: 1938929 - RNA, 19 nt, Artificial Sequence
  Description of Artificial Sequence: Synthetic oligonucleotide
  Antisense strand to SEQ ID NO: 1938928
guucccauuguaaacguga

SEQ ID NO: 1938930 - RNA, 19 nt, Artificial Sequence
  Description of Artificial Sequence: Synthetic oligonucleotide
  Sense strand starting at position 3684 of SEQ ID NO: 1879890
acguuuacaaugggaacaa

SEQ ID NO: 1938931 - RNA, 19 nt, Artificial Sequence
  Description of Artificial Sequence: Synthetic oligonucleotide
  Antisense strand to SEQ ID NO: 1938930
uuguucccauuguaaacgu

SEQ ID NO: 1938932 - RNA, 19 nt, Artificial Sequence
  Description of Artificial Sequence: Synthetic oligonucleotide
  Sense strand starting at position 3714 of SEQ ID NO: 1879890
ggugaaaugguuugauucu

SEQ ID NO: 1938933 - RNA, 19 nt, Artificial Sequence
  Description of Artificial Sequence: Synthetic oligonucleotide
  Antisense strand to SEQ ID NO: 1938932
agaaucaaaccauuucacc

SEQ ID NO: 1938934 - RNA, 19 nt, Artificial Sequence
  Description of Artificial Sequence: Synthetic oligonucleotide
  Sense strand starting at position 3779 of SEQ ID NO: 1879890
accuguauuugggauagua

SEQ ID NO: 1938935 - RNA, 19 nt, Artificial Sequence
  Description of Artificial Sequence: Synthetic oligonucleotide
  Antisense strand to SEQ ID NO: 1938934
uacuaucccaaauacaggu

SEQ ID NO: 1938936 - RNA, 19 nt, Artificial Sequence
  Description of Artificial Sequence: Synthetic oligonucleotide
  Sense strand starting at position 3863 of SEQ ID NO: 1879890
uccaaagcauuuggaugaa

SEQ ID NO: 1938937 - RNA, 19 nt, Artificial Sequence
  Description of Artificial Sequence: Synthetic oligonucleotide
  Antisense strand to SEQ ID NO: 1938936
uucauccaaaugcuuugga

SEQ ID NO: 1938938 - RNA, 19 nt, Artificial Sequence
  Description of Artificial Sequence: Synthetic oligonucleotide
  Sense strand starting at position 3875 of SEQ ID NO: 1879890
ggaugaaaguggcuaucaa

SEQ ID NO: 1938939 - RNA, 19 nt, Artificial Sequence
  Description of Artificial Sequence: Synthetic oligonucleotide
  Antisense strand to SEQ ID NO: 1938938
uugauagccacuuucaucc

SEQ ID NO: 1938940 - RNA, 19 nt, Artificial Sequence
  Description of Artificial Sequence: Synthetic oligonucleotide
  Sense strand starting at position 3885 of SEQ ID NO: 1879890
ggcuaucaaguuuauacca

SEQ ID NO: 1938941 - RNA, 19 nt, Artificial Sequence
  Description of Artificial Sequence: Synthetic oligonucleotide
  Antisense strand to SEQ ID NO: 1938940
ugguauaaacuugauagcc

SEQ ID NO: 1938942 - RNA, 19 nt, Artificial Sequence
  Description of Artificial Sequence: Synthetic oligonucleotide
  Sense strand starting at position 3976 of SEQ ID NO: 1879890
ggaagcaaggcuuaucuuu

SEQ ID NO: 1938943 - RNA, 19 nt, Artificial Sequence
  Description of Artificial Sequence: Synthetic oligonucleotide
  Antisense strand to SEQ ID NO: 1938942
aaagauaagccuugcuucc

SEQ ID NO: 1938944 - RNA, 19 nt, Artificial Sequence
  Description of Artificial Sequence: Synthetic oligonucleotide
  Sense strand starting at position 75 of SEQ ID NO: 1879891
aaggguagagauuguggau

SEQ ID NO: 1938945 - RNA, 19 nt, Artificial Sequence
  Description of Artificial Sequence: Synthetic oligonucleotide
  Antisense strand to SEQ ID NO: 1938944
auccacaaucucuacccuu

SEQ ID NO: 1938946 - RNA, 19 nt, Artificial Sequence
  Description of Artificial Sequence: Synthetic oligonucleotide
  Sense strand starting at position 77 of SEQ ID NO: 1879891
ggguagagauuguggauga

SEQ ID NO: 1938947 - RNA, 19 nt, Artificial Sequence
  Description of Artificial Sequence: Synthetic oligonucleotide
  Antisense strand to SEQ ID NO: 1938946
ucauccacaaucucuaccc

SEQ ID NO: 1938948 - RNA, 19 nt, Artificial Sequence
  Description of Artificial Sequence: Synthetic oligonucleotide
  Sense strand starting at position 78 of SEQ ID NO: 1879891
gguagagauuguggaugaa

SEQ ID NO: 1938949 - RNA, 19 nt, Artificial Sequence
  Description of Artificial Sequence: Synthetic oligonucleotide
  Antisense strand to SEQ ID NO: 1938948
uucauccacaaucucuacc

SEQ ID NO: 1938950 - RNA, 19 nt, Artificial Sequence
  Description of Artificial Sequence: Synthetic oligonucleotide
  Sense strand starting at position 211 of SEQ ID NO: 1879891
auguguucucuaggacgga

SEQ ID NO: 1938951 - RNA, 19 nt, Artificial Sequence
  Description of Artificial Sequence: Synthetic oligonucleotide
  Antisense strand to SEQ ID NO: 1938950
uccguccuagagaacacau

SEQ ID NO: 1938952 - RNA, 19 nt, Artificial Sequence
  Description of Artificial Sequence: Synthetic oligonucleotide
  Sense strand starting at position 212 of SEQ ID NO: 1879891
uguguucucuaggacggaa

SEQ ID NO: 1938953 - RNA, 19 nt, Artificial Sequence
  Description of Artificial Sequence: Synthetic oligonucleotide
  Antisense strand to SEQ ID NO: 1938952
uuccguccuagagaacaca

SEQ ID NO: 1938954 - RNA, 19 nt, Artificial Sequence
  Description of Artificial Sequence: Synthetic oligonucleotide
  Sense strand starting at position 245 of SEQ ID NO: 1879891
agaagccaucucugagcua

SEQ ID NO: 1938955 - RNA, 19 nt, Artificial Sequence
  Description of Artificial Sequence: Synthetic oligonucleotide
  Antisense strand to SEQ ID NO: 1938954
uagcucagagauggcuucu

SEQ ID NO: 1938956 - RNA, 19 nt, Artificial Sequence
  Description of Artificial Sequence: Synthetic oligonucleotide
  Sense strand starting at position 412 of SEQ ID NO: 1879891
gucucuguccagggaggua

SEQ ID NO: 1938957 - RNA, 19 nt, Artificial Sequence
  Description of Artificial Sequence: Synthetic oligonucleotide
  Antisense strand to SEQ ID NO: 1938956
uaccucccuggacagagac

SEQ ID NO: 1938958 - RNA, 19 nt, Artificial Sequence
  Description of Artificial Sequence: Synthetic oligonucleotide
  Sense strand starting at position 481 of SEQ ID NO: 1879891
cuguaaccgucacaggaaa

SEQ ID NO: 1938959 - RNA, 19 nt, Artificial Sequence
  Description of Artificial Sequence: Synthetic oligonucleotide
  Antisense strand to SEQ ID NO: 1938958
uuuccugugacgguuacag

SEQ ID NO: 1938960 - RNA, 19 nt, Artificial Sequence
  Description of Artificial Sequence: Synthetic oligonucleotide
  Sense strand starting at position 720 of SEQ ID NO: 1879891
gagggucucugguagcaga

SEQ ID NO: 1938961 - RNA, 19 nt, Artificial Sequence
  Description of Artificial Sequence: Synthetic oligonucleotide
  Antisense strand to SEQ ID NO: 1938960
ucugcuaccagagacccuc

SEQ ID NO: 1938962 - RNA, 19 nt, Artificial Sequence
  Description of Artificial Sequence: Synthetic oligonucleotide
  Sense strand starting at position 867 of SEQ ID NO: 1879891
cgcacucccuccuagagau

SEQ ID NO: 1938963 - RNA, 19 nt, Artificial Sequence
  Description of Artificial Sequence: Synthetic oligonucleotide
  Antisense strand to SEQ ID NO: 1938962
aucucuaggagggagugcg

SEQ ID NO: 1938964 - RNA, 19 nt, Artificial Sequence
  Description of Artificial Sequence: Synthetic oligonucleotide
  Sense strand starting at position 945 of SEQ ID NO: 1879891
ucagauacuuacugaagca

SEQ ID NO: 1938965 - RNA, 19 nt, Artificial Sequence
  Description of Artificial Sequence: Synthetic oligonucleotide
  Antisense strand to SEQ ID NO: 1938964
ugcuucaguaaguaucuga

SEQ ID NO: 1938966 - RNA, 19 nt, Artificial Sequence
  Description of Artificial Sequence: Synthetic oligonucleotide
  Sense strand starting at position 1015 of SEQ ID NO: 1879891
gucuuugagggcugagaag

SEQ ID NO: 1938967 - RNA, 19 nt, Artificial Sequence
  Description of Artificial Sequence: Synthetic oligonucleotide
  Antisense strand to SEQ ID NO: 1938966
cuucucagcccucaaagac

SEQ ID NO: 1938968 - RNA, 19 nt, Artificial Sequence
  Description of Artificial Sequence: Synthetic oligonucleotide
  Sense strand starting at position 1256 of SEQ ID NO: 1879891
cuguguuucuccucugggu

SEQ ID NO: 1938969 - RNA, 19 nt, Artificial Sequence
  Description of Artificial Sequence: Synthetic oligonucleotide
  Antisense strand to SEQ ID NO: 1938968
acccagaggagaaacacag

SEQ ID NO: 1938970 - RNA, 19 nt, Artificial Sequence
  Description of Artificial Sequence: Synthetic oligonucleotide
  Sense strand starting at position 1333 of SEQ ID NO: 1879891
ugugcugucccacaaagaa

SEQ ID NO: 1938971 - RNA, 19 nt, Artificial Sequence
  Description of Artificial Sequence: Synthetic oligonucleotide
  Antisense strand to SEQ ID NO: 1938970
uucuuugugggacagcaca

SEQ ID NO: 1938972 - RNA, 19 nt, Artificial Sequence
  Description of Artificial Sequence: Synthetic oligonucleotide
  Sense strand starting at position 2085 of SEQ ID NO: 1879891
gucaaauggugacagcaaa

SEQ ID NO: 1938973 - RNA, 19 nt, Artificial Sequence
  Description of Artificial Sequence: Synthetic oligonucleotide
  Antisense strand to SEQ ID NO: 1938972
uuugcugucaccauuugac

SEQ ID NO: 1938974 - RNA, 19 nt, Artificial Sequence
  Description of Artificial Sequence: Synthetic oligonucleotide
  Sense strand starting at position 2359 of SEQ ID NO: 1879891
ggguggguuucccugagga

SEQ ID NO: 1938975 - RNA, 19 nt, Artificial Sequence
  Description of Artificial Sequence: Synthetic oligonucleotide
  Antisense strand to SEQ ID NO: 1938974
uccucagggaaacccaccc

SEQ ID NO: 1938976 - RNA, 19 nt, Artificial Sequence
  Description of Artificial Sequence: Synthetic oligonucleotide
  Sense strand starting at position 2360 of SEQ ID NO: 1879891
gguggguuucccugaggag

SEQ ID NO: 1938977 - RNA, 19 nt, Artificial Sequence
  Description of Artificial Sequence: Synthetic oligonucleotide
  Antisense strand to SEQ ID NO: 1938976
cuccucagggaaacccacc

SEQ ID NO: 1938978 - RNA, 19 nt, Artificial Sequence
  Description of Artificial Sequence: Synthetic oligonucleotide
  Sense strand starting at position 2382 of SEQ ID NO: 1879891
gccgauuagggcugggaaa

SEQ ID NO: 1938979 - RNA, 19 nt, Artificial Sequence
  Description of Artificial Sequence: Synthetic oligonucleotide
  Antisense strand to SEQ ID NO: 1938978
uuucccagcccuaaucggc

SEQ ID NO: 1938980 - RNA, 19 nt, Artificial Sequence
  Description of Artificial Sequence: Synthetic oligonucleotide
  Sense strand starting at position 2596 of SEQ ID NO: 1879891
agccuaugcugauuguuau

SEQ ID NO: 1938981 - RNA, 19 nt, Artificial Sequence
  Description of Artificial Sequence: Synthetic oligonucleotide
  Antisense strand to SEQ ID NO: 1938980
auaacaaucagcauaggcu

SEQ ID NO: 1938982 - RNA, 19 nt, Artificial Sequence
  Description of Artificial Sequence: Synthetic oligonucleotide
  Sense strand starting at position 2597 of SEQ ID NO: 1879891
gccuaugcugauuguuauc

SEQ ID NO: 1938983 - RNA, 19 nt, Artificial Sequence
  Description of Artificial Sequence: Synthetic oligonucleotide
  Antisense strand to SEQ ID NO: 1938982
gauaacaaucagcauaggc

SEQ ID NO: 1938984 - RNA, 19 nt, Artificial Sequence
  Description of Artificial Sequence: Synthetic oligonucleotide
  Sense strand starting at position 2599 of SEQ ID NO: 1879891
cuaugcugauuguuaucaa

SEQ ID NO: 1938985 - RNA, 19 nt, Artificial Sequence
  Description of Artificial Sequence: Synthetic oligonucleotide
  Antisense strand to SEQ ID NO: 1938984
uugauaacaaucagcauag

SEQ ID NO: 1938986 - RNA, 19 nt, Artificial Sequence
  Description of Artificial Sequence: Synthetic oligonucleotide
  Sense strand starting at position 2600 of SEQ ID NO: 1879891
uaugcugauuguuaucaag

SEQ ID NO: 1938987 - RNA, 19 nt, Artificial Sequence
  Description of Artificial Sequence: Synthetic oligonucleotide
  Antisense strand to SEQ ID NO: 1938986
cuugauaacaaucagcaua

SEQ ID NO: 1938988 - RNA, 19 nt, Artificial Sequence
  Description of Artificial Sequence: Synthetic oligonucleotide
  Sense strand starting at position 2602 of SEQ ID NO: 1879891
ugcugauuguuaucaagaa

SEQ ID NO: 1938989 - RNA, 19 nt, Artificial Sequence
  Description of Artificial Sequence: Synthetic oligonucleotide
  Antisense strand to SEQ ID NO: 1938988
uucuugauaacaaucagca

SEQ ID NO: 1938990 - RNA, 19 nt, Artificial Sequence
  Description of Artificial Sequence: Synthetic oligonucleotide
  Sense strand starting at position 2603 of SEQ ID NO: 1879891
gcugauuguuaucaagaac

SEQ ID NO: 1938991 - RNA, 19 nt, Artificial Sequence
  Description of Artificial Sequence: Synthetic oligonucleotide
  Antisense strand to SEQ ID NO: 1938990
guucuugauaacaaucagc

SEQ ID NO: 1938992 - RNA, 19 nt, Artificial Sequence
  Description of Artificial Sequence: Synthetic oligonucleotide
  Sense strand starting at position 3004 of SEQ ID NO: 1879891
gcucaugagggcugaggau

SEQ ID NO: 1938993 - RNA, 19 nt, Artificial Sequence
  Description of Artificial Sequence: Synthetic oligonucleotide
  Antisense strand to SEQ ID NO: 1938992
auccucagcccucaugagc

SEQ ID NO: 1938994 - RNA, 19 nt, Artificial Sequence
  Description of Artificial Sequence: Synthetic oligonucleotide
  Sense strand starting at position 3043 of SEQ ID NO: 1879891
gcacaagacaugcgucauc

SEQ ID NO: 1938995 - RNA, 19 nt, Artificial Sequence
  Description of Artificial Sequence: Synthetic oligonucleotide
  Antisense strand to SEQ ID NO: 1938994
gaugacgcaugucuugugc

SEQ ID NO: 1938996 - RNA, 19 nt, Artificial Sequence
  Description of Artificial Sequence: Synthetic oligonucleotide
  Sense strand starting at position 3243 of SEQ ID NO: 1879891
cucgaaucgauuuguguuc

SEQ ID NO: 1938997 - RNA, 19 nt, Artificial Sequence
  Description of Artificial Sequence: Synthetic oligonucleotide
  Antisense strand to SEQ ID NO: 1938996
gaacacaaaucgauucgag

SEQ ID NO: 1938998 - RNA, 19 nt, Artificial Sequence
  Description of Artificial Sequence: Synthetic oligonucleotide
  Sense strand starting at position 3250 of SEQ ID NO: 1879891
cgauuuguguuccuggguu

SEQ ID NO: 1938999 - RNA, 19 nt, Artificial Sequence
  Description of Artificial Sequence: Synthetic oligonucleotide
  Antisense strand to SEQ ID NO: 1938998
aacccaggaacacaaaucg

SEQ ID NO: 1939000 - RNA, 19 nt, Artificial Sequence
  Description of Artificial Sequence: Synthetic oligonucleotide
  Sense strand starting at position 3252 of SEQ ID NO: 1879891
auuuguguuccuggguuga

SEQ ID NO: 1939001 - RNA, 19 nt, Artificial Sequence
  Description of Artificial Sequence: Synthetic oligonucleotide
  Antisense strand to SEQ ID NO: 1939000
ucaacccaggaacacaaau

SEQ ID NO: 1939002 - RNA, 19 nt, Artificial Sequence
  Description of Artificial Sequence: Synthetic oligonucleotide
  Sense strand starting at position 3254 of SEQ ID NO: 1879891
uuguguuccuggguugaga

SEQ ID NO: 1939003 - RNA, 19 nt, Artificial Sequence
  Description of Artificial Sequence: Synthetic oligonucleotide
  Antisense strand to SEQ ID NO: 1939002
ucucaacccaggaacacaa

SEQ ID NO: 1939004 - RNA, 19 nt, Artificial Sequence
  Description of Artificial Sequence: Synthetic oligonucleotide
  Sense strand starting at position 3256 of SEQ ID NO: 1879891
guguuccuggguugagauu

SEQ ID NO: 1939005 - RNA, 19 nt, Artificial Sequence
  Description of Artificial Sequence: Synthetic oligonucleotide
  Antisense strand to SEQ ID NO: 1939004
aaucucaacccaggaacac

SEQ ID NO: 1939006 - RNA, 19 nt, Artificial Sequence
  Description of Artificial Sequence: Synthetic oligonucleotide
  Sense strand starting at position 3265 of SEQ ID NO: 1879891
gguugagauuuagguucua

SEQ ID NO: 1939007 - RNA, 19 nt, Artificial Sequence
  Description of Artificial Sequence: Synthetic oligonucleotide
  Antisense strand to SEQ ID NO: 1939006
uagaaccuaaaucucaacc

SEQ ID NO: 1939008 - RNA, 19 nt, Artificial Sequence
  Description of Artificial Sequence: Synthetic oligonucleotide
  Sense strand starting at position 3300 of SEQ ID NO: 1879891
gagaaaguauaguaauagu

SEQ ID NO: 1939009 - RNA, 19 nt, Artificial Sequence
  Description of Artificial Sequence: Synthetic oligonucleotide
  Antisense strand to SEQ ID NO: 1939008
acuauuacuauacuuucuc

SEQ ID NO: 1939010 - RNA, 19 nt, Artificial Sequence
  Description of Artificial Sequence: Synthetic oligonucleotide
  Sense strand starting at position 3308 of SEQ ID NO: 1879891
auaguaauaguuggaaauc

SEQ ID NO: 1939011 - RNA, 19 nt, Artificial Sequence
  Description of Artificial Sequence: Synthetic oligonucleotide
  Antisense strand to SEQ ID NO: 1939010
gauuuccaacuauuacuau

SEQ ID NO: 1939012 - RNA, 19 nt, Artificial Sequence
  Description of Artificial Sequence: Synthetic oligonucleotide
  Sense strand starting at position 3309 of SEQ ID NO: 1879891
uaguaauaguuggaaauca

SEQ ID NO: 1939013 - RNA, 19 nt, Artificial Sequence
  Description of Artificial Sequence: Synthetic oligonucleotide
  Antisense strand to SEQ ID NO: 1939012
ugauuuccaacuauuacua

SEQ ID NO: 1939014 - RNA, 19 nt, Artificial Sequence
  Description of Artificial Sequence: Synthetic oligonucleotide
  Sense strand starting at position 3339 of SEQ ID NO: 1879891
gcauaaugagucuaaacgu

SEQ ID NO: 1939015 - RNA, 19 nt, Artificial Sequence
  Description of Artificial Sequence: Synthetic oligonucleotide
  Antisense strand to SEQ ID NO: 1939014
acguuuagacucauuaugc

SEQ ID NO: 1939016 - RNA, 19 nt, Artificial Sequence
  Description of Artificial Sequence: Synthetic oligonucleotide
  Sense strand starting at position 3345 of SEQ ID NO: 1879891
ugagucuaaacguagcuua

SEQ ID NO: 1939017 - RNA, 19 nt, Artificial Sequence
  Description of Artificial Sequence: Synthetic oligonucleotide
  Antisense strand to SEQ ID NO: 1939016
uaagcuacguuuagacuca

SEQ ID NO: 1939018 - RNA, 19 nt, Artificial Sequence
  Description of Artificial Sequence: Synthetic oligonucleotide
  Sense strand starting at position 3348 of SEQ ID NO: 1879891
gucuaaacguagcuuauua

SEQ ID NO: 1939019 - RNA, 19 nt, Artificial Sequence
  Description of Artificial Sequence: Synthetic oligonucleotide
  Antisense strand to SEQ ID NO: 1939018
uaauaagcuacguuuagac

SEQ ID NO: 1939020 - RNA, 19 nt, Artificial Sequence
  Description of Artificial Sequence: Synthetic oligonucleotide
  Sense strand starting at position 3815 of SEQ ID NO: 1879891
gagagucagccuuguccca

SEQ ID NO: 1939021 - RNA, 19 nt, Artificial Sequence
  Description of Artificial Sequence: Synthetic oligonucleotide
  Antisense strand to SEQ ID NO: 1939020
ugggacaaggcugacucuc

SEQ ID NO: 1939022 - RNA, 19 nt, Artificial Sequence
  Description of Artificial Sequence: Synthetic oligonucleotide
  Sense strand starting at position 3883 of SEQ ID NO: 1879891
cgucuugacucucuuguuu

SEQ ID NO: 1939023 - RNA, 19 nt, Artificial Sequence
  Description of Artificial Sequence: Synthetic oligonucleotide
  Antisense strand to SEQ ID NO: 1939022
aaacaagagagucaagacg

SEQ ID NO: 1939024 - RNA, 19 nt, Artificial Sequence
  Description of Artificial Sequence: Synthetic oligonucleotide
  Sense strand starting at position 19 of SEQ ID NO: 1879892
ccuguaauagaaugaguug

SEQ ID NO: 1939025 - RNA, 19 nt, Artificial Sequence
  Description of Artificial Sequence: Synthetic oligonucleotide
  Antisense strand to SEQ ID NO: 1939024
caacucauucuauuacagg

SEQ ID NO: 1939026 - RNA, 19 nt, Artificial Sequence
  Description of Artificial Sequence: Synthetic oligonucleotide
  Sense strand starting at position 22 of SEQ ID NO: 1879892
guaauagaaugaguugaau

SEQ ID NO: 1939027 - RNA, 19 nt, Artificial Sequence
  Description of Artificial Sequence: Synthetic oligonucleotide
  Antisense strand to SEQ ID NO: 1939026
auucaacucauucuauuac

SEQ ID NO: 1939028 - RNA, 19 nt, Artificial Sequence
  Description of Artificial Sequence: Synthetic oligonucleotide
  Sense strand starting at position 112 of SEQ ID NO: 1879892
uugggaaguuugccuggaa

SEQ ID NO: 1939029 - RNA, 19 nt, Artificial Sequence
  Description of Artificial Sequence: Synthetic oligonucleotide
  Antisense strand to SEQ ID NO: 1939028
uuccaggcaaacuucccaa

SEQ ID NO: 1939030 - RNA, 19 nt, Artificial Sequence
  Description of Artificial Sequence: Synthetic oligonucleotide
  Sense strand starting at position 113 of SEQ ID NO: 1879892
ugggaaguuugccuggaau

SEQ ID NO: 1939031 - RNA, 19 nt, Artificial Sequence
  Description of Artificial Sequence: Synthetic oligonucleotide
  Antisense strand to SEQ ID NO: 1939030
auuccaggcaaacuuccca

SEQ ID NO: 1939032 - RNA, 19 nt, Artificial Sequence
  Description of Artificial Sequence: Synthetic oligonucleotide
  Sense strand starting at position 115 of SEQ ID NO: 1879892
ggaaguuugccuggaauaa

SEQ ID NO: 1939033 - RNA, 19 nt, Artificial Sequence
  Description of Artificial Sequence: Synthetic oligonucleotide
  Antisense strand to SEQ ID NO: 1939032
uuauuccaggcaaacuucc

SEQ ID NO: 1939034 - RNA, 19 nt, Artificial Sequence
  Description of Artificial Sequence: Synthetic oligonucleotide
  Sense strand starting at position 215 of SEQ ID NO: 1879892
gucucaguauuucuuuaug

SEQ ID NO: 1939035 - RNA, 19 nt, Artificial Sequence
  Description of Artificial Sequence: Synthetic oligonucleotide
  Antisense strand to SEQ ID NO: 1939034
cauaaagaaauacugagac

SEQ ID NO: 1939036 - RNA, 19 nt, Artificial Sequence
  Description of Artificial Sequence: Synthetic oligonucleotide
  Sense strand starting at position 217 of SEQ ID NO: 1879892
cucaguauuucuuuaugcu

SEQ ID NO: 1939037 - RNA, 19 nt, Artificial Sequence
  Description of Artificial Sequence: Synthetic oligonucleotide
  Antisense strand to SEQ ID NO: 1939036
agcauaaagaaauacugag

SEQ ID NO: 1939038 - RNA, 19 nt, Artificial Sequence
  Description of Artificial Sequence: Synthetic oligonucleotide
  Sense strand starting at position 221 of SEQ ID NO: 1879892
guauuucuuuaugcucauu

SEQ ID NO: 1939039 - RNA, 19 nt, Artificial Sequence
  Description of Artificial Sequence: Synthetic oligonucleotide
  Antisense strand to SEQ ID NO: 1939038
aaugagcauaaagaaauac

SEQ ID NO: 1939040 - RNA, 19 nt, Artificial Sequence
  Description of Artificial Sequence: Synthetic oligonucleotide
  Sense strand starting at position 366 of SEQ ID NO: 1879892
gcuuuaaagggaugguaac

SEQ ID NO: 1939041 - RNA, 19 nt, Artificial Sequence
  Description of Artificial Sequence: Synthetic oligonucleotide
  Antisense strand to SEQ ID NO: 1939040
guuaccaucccuuuaaagc

SEQ ID NO: 1939042 - RNA, 19 nt, Artificial Sequence
  Description of Artificial Sequence: Synthetic oligonucleotide
  Sense strand starting at position 367 of SEQ ID NO: 1879892
cuuuaaagggaugguaacu

SEQ ID NO: 1939043 - RNA, 19 nt, Artificial Sequence
  Description of Artificial Sequence: Synthetic oligonucleotide
  Antisense strand to SEQ ID NO: 1939042
aguuaccaucccuuuaaag

SEQ ID NO: 1939044 - RNA, 19 nt, Artificial Sequence
  Description of Artificial Sequence: Synthetic oligonucleotide
  Sense strand starting at position 532 of SEQ ID NO: 1879892
agaaauugucaauguaaca

SEQ ID NO: 1939045 - RNA, 19 nt, Artificial Sequence
  Description of Artificial Sequence: Synthetic oligonucleotide
  Antisense strand to SEQ ID NO: 1939044
uguuacauugacaauuucu

SEQ ID NO: 1939046 - RNA, 19 nt, Artificial Sequence
  Description of Artificial Sequence: Synthetic oligonucleotide
  Sense strand starting at position 766 of SEQ ID NO: 1879892
auugaaauguacucaugau

SEQ ID NO: 1939047 - RNA, 19 nt, Artificial Sequence
  Description of Artificial Sequence: Synthetic oligonucleotide
  Antisense strand to SEQ ID NO: 1939046
aucaugaguacauuucaau

SEQ ID NO: 1939048 - RNA, 19 nt, Artificial Sequence
  Description of Artificial Sequence: Synthetic oligonucleotide
  Sense strand starting at position 821 of SEQ ID NO: 1879892
gaccauaaaugugcaaaga

SEQ ID NO: 1939049 - RNA, 19 nt, Artificial Sequence
  Description of Artificial Sequence: Synthetic oligonucleotide
  Antisense strand to SEQ ID NO: 1939048
ucuuugcacauuuaugguc

SEQ ID NO: 1939050 - RNA, 19 nt, Artificial Sequence
  Description of Artificial Sequence: Synthetic oligonucleotide
  Sense strand starting at position 935 of SEQ ID NO: 1879892
ucaucaaggcuguaauauu

SEQ ID NO: 1939051 - RNA, 19 nt, Artificial Sequence
  Description of Artificial Sequence: Synthetic oligonucleotide
  Antisense strand to SEQ ID NO: 1939050
aauauuacagccuugauga

SEQ ID NO: 1939052 - RNA, 19 nt, Artificial Sequence
  Description of Artificial Sequence: Synthetic oligonucleotide
  Sense strand starting at position 1190 of SEQ ID NO: 1879892
gagggaguggcuuacauac

SEQ ID NO: 1939053 - RNA, 19 nt, Artificial Sequence
  Description of Artificial Sequence: Synthetic oligonucleotide
  Antisense strand to SEQ ID NO: 1939052
guauguaagccacucccuc

SEQ ID NO: 1939054 - RNA, 19 nt, Artificial Sequence
  Description of Artificial Sequence: Synthetic oligonucleotide
  Sense strand starting at position 1349 of SEQ ID NO: 1879892
uuguaauaucuuugaacag

SEQ ID NO: 1939055 - RNA, 19 nt, Artificial Sequence
  Description of Artificial Sequence: Synthetic oligonucleotide
  Antisense strand to SEQ ID NO: 1939054
cuguucaaagauauuacaa

SEQ ID NO: 1939056 - RNA, 19 nt, Artificial Sequence
  Description of Artificial Sequence: Synthetic oligonucleotide
  Sense strand starting at position 1478 of SEQ ID NO: 1879892
cuaugucucccugagacaa

SEQ ID NO: 1939057 - RNA, 19 nt, Artificial Sequence
  Description of Artificial Sequence: Synthetic oligonucleotide
  Antisense strand to SEQ ID NO: 1939056
uugucucagggagacauag

SEQ ID NO: 1939058 - RNA, 19 nt, Artificial Sequence
  Description of Artificial Sequence: Synthetic oligonucleotide
  Sense strand starting at position 1759 of SEQ ID NO: 1879892
auuguuaucucuguagaag

SEQ ID NO: 1939059 - RNA, 19 nt, Artificial Sequence
  Description of Artificial Sequence: Synthetic oligonucleotide
  Antisense strand to SEQ ID NO: 1939058
cuucuacagagauaacaau

SEQ ID NO: 1939060 - RNA, 19 nt, Artificial Sequence
  Description of Artificial Sequence: Synthetic oligonucleotide
  Sense strand starting at position 1997 of SEQ ID NO: 1879892
guucuaagucaguagaaug

SEQ ID NO: 1939061 - RNA, 19 nt, Artificial Sequence
  Description of Artificial Sequence: Synthetic oligonucleotide
  Antisense strand to SEQ ID NO: 1939060
cauucuacugacuuagaac

SEQ ID NO: 1939062 - RNA, 19 nt, Artificial Sequence
  Description of Artificial Sequence: Synthetic oligonucleotide
  Sense strand starting at position 2002 of SEQ ID NO: 1879892
aagucaguagaauggcauu

SEQ ID NO: 1939063 - RNA, 19 nt, Artificial Sequence
  Description of Artificial Sequence: Synthetic oligonucleotide
  Antisense strand to SEQ ID NO: 1939062
aaugccauucuacugacuu

SEQ ID NO: 1939064 - RNA, 19 nt, Artificial Sequence
  Description of Artificial Sequence: Synthetic oligonucleotide
  Sense strand starting at position 2224 of SEQ ID NO: 1879892
ggguguuggcaagaugacu

SEQ ID NO: 1939065 - RNA, 19 nt, Artificial Sequence
  Description of Artificial Sequence: Synthetic oligonucleotide
  Antisense strand to SEQ ID NO: 1939064
agucaucuugccaacaccc

SEQ ID NO: 1939066 - RNA, 19 nt, Artificial Sequence
  Description of Artificial Sequence: Synthetic oligonucleotide
  Sense strand starting at position 2229 of SEQ ID NO: 1879892
uuggcaagaugacuuagua

SEQ ID NO: 1939067 - RNA, 19 nt, Artificial Sequence
  Description of Artificial Sequence: Synthetic oligonucleotide
  Antisense strand to SEQ ID NO: 1939066
uacuaagucaucuugccaa

SEQ ID NO: 1939068 - RNA, 19 nt, Artificial Sequence
  Description of Artificial Sequence: Synthetic oligonucleotide
  Sense strand starting at position 2314 of SEQ ID NO: 1879892
uuggcaacccaguaucauu

SEQ ID NO: 1939069 - RNA, 19 nt, Artificial Sequence
  Description of Artificial Sequence: Synthetic oligonucleotide
  Antisense strand to SEQ ID NO: 1939068
aaugauacuggguugccaa

SEQ ID NO: 1939070 - RNA, 19 nt, Artificial Sequence
  Description of Artificial Sequence: Synthetic oligonucleotide
  Sense strand starting at position 2440 of SEQ ID NO: 1879892
cacagauauccuugugaag

SEQ ID NO: 1939071 - RNA, 19 nt, Artificial Sequence
  Description of Artificial Sequence: Synthetic oligonucleotide
  Antisense strand to SEQ ID NO: 1939070
cuucacaaggauaucugug

SEQ ID NO: 1939072 - RNA, 19 nt, Artificial Sequence
  Description of Artificial Sequence: Synthetic oligonucleotide
  Sense strand starting at position 2465 of SEQ ID NO: 1879892
guggaaucagaaugucauu

SEQ ID NO: 1939073 - RNA, 19 nt, Artificial Sequence
  Description of Artificial Sequence: Synthetic oligonucleotide
  Antisense strand to SEQ ID NO: 1939072
aaugacauucugauuccac

SEQ ID NO: 1939074 - RNA, 19 nt, Artificial Sequence
  Description of Artificial Sequence: Synthetic oligonucleotide
  Sense strand starting at position 2522 of SEQ ID NO: 1879892
auguuucugugacuuaaga

SEQ ID NO: 1939075 - RNA, 19 nt, Artificial Sequence
  Description of Artificial Sequence: Synthetic oligonucleotide
  Antisense strand to SEQ ID NO: 1939074
ucuuaagucacagaaacau

SEQ ID NO: 1939076 - RNA, 19 nt, Artificial Sequence
  Description of Artificial Sequence: Synthetic oligonucleotide
  Sense strand starting at position 2524 of SEQ ID NO: 1879892
guuucugugacuuaagaug

SEQ ID NO: 1939077 - RNA, 19 nt, Artificial Sequence
  Description of Artificial Sequence: Synthetic oligonucleotide
  Antisense strand to SEQ ID NO: 1939076
caucuuaagucacagaaac

SEQ ID NO: 1939078 - RNA, 19 nt, Artificial Sequence
  Description of Artificial Sequence: Synthetic oligonucleotide
  Sense strand starting at position 2701 of SEQ ID NO: 1879892
cuuaguuaaguccaucuau

SEQ ID NO: 1939079 - RNA, 19 nt, Artificial Sequence
  Description of Artificial Sequence: Synthetic oligonucleotide
  Antisense strand to SEQ ID NO: 1939078
auagauggacuuaacuaag

SEQ ID NO: 1939080 - RNA, 19 nt, Artificial Sequence
  Description of Artificial Sequence: Synthetic oligonucleotide
  Sense strand starting at position 3058 of SEQ ID NO: 1879892
gcuuaaacucuagguaaua

SEQ ID NO: 1939081 - RNA, 19 nt, Artificial Sequence
  Description of Artificial Sequence: Synthetic oligonucleotide
  Antisense strand to SEQ ID NO: 1939080
uauuaccuagaguuuaagc

SEQ ID NO: 1939082 - RNA, 19 nt, Artificial Sequence
  Description of Artificial Sequence: Synthetic oligonucleotide
  Sense strand starting at position 3148 of SEQ ID NO: 1879892
uuacuaugugcaggaacua

SEQ ID NO: 1939083 - RNA, 19 nt, Artificial Sequence
  Description of Artificial Sequence: Synthetic oligonucleotide
  Antisense strand to SEQ ID NO: 1939082
uaguuccugcacauaguaa

SEQ ID NO: 1939084 - RNA, 19 nt, Artificial Sequence
  Description of Artificial Sequence: Synthetic oligonucleotide
  Sense strand starting at position 3241 of SEQ ID NO: 1879892
aucugugauguucagagag

SEQ ID NO: 1939085 - RNA, 19 nt, Artificial Sequence
  Description of Artificial Sequence: Synthetic oligonucleotide
  Antisense strand to SEQ ID NO: 1939084
cucucugaacaucacagau

SEQ ID NO: 1939086 - RNA, 19 nt, Artificial Sequence
  Description of Artificial Sequence: Synthetic oligonucleotide
  Sense strand starting at position 3253 of SEQ ID NO: 1879892
cagagagguuaguugaguu

SEQ ID NO: 1939087 - RNA, 19 nt, Artificial Sequence
  Description of Artificial Sequence: Synthetic oligonucleotide
  Antisense strand to SEQ ID NO: 1939086
aacucaacuaaccucucug

SEQ ID NO: 1939088 - RNA, 19 nt, Artificial Sequence
  Description of Artificial Sequence: Synthetic oligonucleotide
  Sense strand starting at position 3263 of SEQ ID NO: 1879892
aguugaguugccuaagauc

SEQ ID NO: 1939089 - RNA, 19 nt, Artificial Sequence
  Description of Artificial Sequence: Synthetic oligonucleotide
  Antisense strand to SEQ ID NO: 1939088
gaucuuaggcaacucaacu

SEQ ID NO: 1939090 - RNA, 19 nt, Artificial Sequence
  Description of Artificial Sequence: Synthetic oligonucleotide
  Sense strand starting at position 3487 of SEQ ID NO: 1879892
auaagauaacugugcaagu

SEQ ID NO: 1939091 - RNA, 19 nt, Artificial Sequence
  Description of Artificial Sequence: Synthetic oligonucleotide
  Antisense strand to SEQ ID NO: 1939090
acuugcacaguuaucuuau

SEQ ID NO: 1939092 - RNA, 19 nt, Artificial Sequence
  Description of Artificial Sequence: Synthetic oligonucleotide
  Sense strand starting at position 3488 of SEQ ID NO: 1879892
uaagauaacugugcaagua

SEQ ID NO: 1939093 - RNA, 19 nt, Artificial Sequence
  Description of Artificial Sequence: Synthetic oligonucleotide
  Antisense strand to SEQ ID NO: 1939092
uacuugcacaguuaucuua

SEQ ID NO: 1939094 - RNA, 19 nt, Artificial Sequence
  Description of Artificial Sequence: Synthetic oligonucleotide
  Sense strand starting at position 3489 of SEQ ID NO: 1879892
aagauaacugugcaaguaa

SEQ ID NO: 1939095 - RNA, 19 nt, Artificial Sequence
  Description of Artificial Sequence: Synthetic oligonucleotide
  Antisense strand to SEQ ID NO: 1939094
uuacuugcacaguuaucuu

SEQ ID NO: 1939096 - RNA, 19 nt, Artificial Sequence
  Description of Artificial Sequence: Synthetic oligonucleotide
  Sense strand starting at position 3660 of SEQ ID NO: 1879892
uucugugagcuugcuguua

SEQ ID NO: 1939097 - RNA, 19 nt, Artificial Sequence
  Description of Artificial Sequence: Synthetic oligonucleotide
  Antisense strand to SEQ ID NO: 1939096
uaacagcaagcucacagaa

SEQ ID NO: 1939098 - RNA, 19 nt, Artificial Sequence
  Description of Artificial Sequence: Synthetic oligonucleotide
  Sense strand starting at position 3759 of SEQ ID NO: 1879892
acucuauaacaaugugagu

SEQ ID NO: 1939099 - RNA, 19 nt, Artificial Sequence
  Description of Artificial Sequence: Synthetic oligonucleotide
  Antisense strand to SEQ ID NO: 1939098
acucacauuguuauagagu

SEQ ID NO: 1939100 - RNA, 19 nt, Artificial Sequence
  Description of Artificial Sequence: Synthetic oligonucleotide
  Sense strand starting at position 3930 of SEQ ID NO: 1879892
guguuaauccaacacauau

SEQ ID NO: 1939101 - RNA, 19 nt, Artificial Sequence
  Description of Artificial Sequence: Synthetic oligonucleotide
  Antisense strand to SEQ ID NO: 1939100
auauguguuggauuaacac

SEQ ID NO: 1939102 - RNA, 19 nt, Artificial Sequence
  Description of Artificial Sequence: Synthetic oligonucleotide
  Sense strand starting at position 3982 of SEQ ID NO: 1879892
gaguuuagugucuauagga

SEQ ID NO: 1939103 - RNA, 19 nt, Artificial Sequence
  Description of Artificial Sequence: Synthetic oligonucleotide
  Antisense strand to SEQ ID NO: 1939102
uccuauagacacuaaacuc

SEQ ID NO: 1939104 - RNA, 19 nt, Artificial Sequence
  Description of Artificial Sequence: Synthetic oligonucleotide
  Sense strand starting at position 388 of SEQ ID NO: 1879893
cuaugaggcucuggacuuu

SEQ ID NO: 1939105 - RNA, 19 nt, Artificial Sequence
  Description of Artificial Sequence: Synthetic oligonucleotide
  Antisense strand to SEQ ID NO: 1939104
aaaguccagagccucauag

SEQ ID NO: 1939106 - RNA, 19 nt, Artificial Sequence
  Description of Artificial Sequence: Synthetic oligonucleotide
  Sense strand starting at position 466 of SEQ ID NO: 1879893
uuaccuguccacugaugga

SEQ ID NO: 1939107 - RNA, 19 nt, Artificial Sequence
  Description of Artificial Sequence: Synthetic oligonucleotide
  Antisense strand to SEQ ID NO: 1939106
uccaucaguggacagguaa

SEQ ID NO: 1939108 - RNA, 19 nt, Artificial Sequence
  Description of Artificial Sequence: Synthetic oligonucleotide
  Sense strand starting at position 807 of SEQ ID NO: 1879893
uccuaaauaggucacugua

SEQ ID NO: 1939109 - RNA, 19 nt, Artificial Sequence
  Description of Artificial Sequence: Synthetic oligonucleotide
  Antisense strand to SEQ ID NO: 1939108
uacagugaccuauuuagga

SEQ ID NO: 1939110 - RNA, 19 nt, Artificial Sequence
  Description of Artificial Sequence: Synthetic oligonucleotide
  Sense strand starting at position 809 of SEQ ID NO: 1879893
cuaaauaggucacuguacu

SEQ ID NO: 1939111 - RNA, 19 nt, Artificial Sequence
  Description of Artificial Sequence: Synthetic oligonucleotide
  Antisense strand to SEQ ID NO: 1939110
aguacagugaccuauuuag

SEQ ID NO: 1939112 - RNA, 19 nt, Artificial Sequence
  Description of Artificial Sequence: Synthetic oligonucleotide
  Sense strand starting at position 815 of SEQ ID NO: 1879893
aggucacuguacuagacau

SEQ ID NO: 1939113 - RNA, 19 nt, Artificial Sequence
  Description of Artificial Sequence: Synthetic oligonucleotide
  Antisense strand to SEQ ID NO: 1939112
augucuaguacagugaccu

SEQ ID NO: 1939114 - RNA, 19 nt, Artificial Sequence
  Description of Artificial Sequence: Synthetic oligonucleotide
  Sense strand starting at position 817 of SEQ ID NO: 1879893
gucacuguacuagacauga

SEQ ID NO: 1939115 - RNA, 19 nt, Artificial Sequence
  Description of Artificial Sequence: Synthetic oligonucleotide
  Antisense strand to SEQ ID NO: 1939114
ucaugucuaguacagugac

SEQ ID NO: 1939116 - RNA, 19 nt, Artificial Sequence
  Description of Artificial Sequence: Synthetic oligonucleotide
  Sense strand starting at position 1016 of SEQ ID NO: 1879893
acaccagaucuuggaacuu

SEQ ID NO: 1939117 - RNA, 19 nt, Artificial Sequence
  Description of Artificial Sequence: Synthetic oligonucleotide
  Antisense strand to SEQ ID NO: 1939116
aaguuccaagaucuggugu

SEQ ID NO: 1939118 - RNA, 19 nt, Artificial Sequence
  Description of Artificial Sequence: Synthetic oligonucleotide
  Sense strand starting at position 1244 of SEQ ID NO: 1879893
gccuuucugccuuaaagaa

SEQ ID NO: 1939119 - RNA, 19 nt, Artificial Sequence
  Description of Artificial Sequence: Synthetic oligonucleotide
  Antisense strand to SEQ ID NO: 1939118
uucuuuaaggcagaaaggc

SEQ ID NO: 1939120 - RNA, 19 nt, Artificial Sequence
  Description of Artificial Sequence: Synthetic oligonucleotide
  Sense strand starting at position 1989 of SEQ ID NO: 1879893
uugggagccucauccugau

SEQ ID NO: 1939121 - RNA, 19 nt, Artificial Sequence
  Description of Artificial Sequence: Synthetic oligonucleotide
  Antisense strand to SEQ ID NO: 1939120
aucaggaugaggcucccaa

SEQ ID NO: 1939122 - RNA, 19 nt, Artificial Sequence
  Description of Artificial Sequence: Synthetic oligonucleotide
  Sense strand starting at position 1993 of SEQ ID NO: 1879893
gagccucauccugauagcu

SEQ ID NO: 1939123 - RNA, 19 nt, Artificial Sequence
  Description of Artificial Sequence: Synthetic oligonucleotide
  Antisense strand to SEQ ID NO: 1939122
agcuaucaggaugaggcuc

SEQ ID NO: 1939124 - RNA, 19 nt, Artificial Sequence
  Description of Artificial Sequence: Synthetic oligonucleotide
  Sense strand starting at position 2001 of SEQ ID NO: 1879893
uccugauagcugcagagua

SEQ ID NO: 1939125 - RNA, 19 nt, Artificial Sequence
  Description of Artificial Sequence: Synthetic oligonucleotide
  Antisense strand to SEQ ID NO: 1939124
uacucugcagcuaucagga

SEQ ID NO: 1939126 - RNA, 19 nt, Artificial Sequence
  Description of Artificial Sequence: Synthetic oligonucleotide
  Sense strand starting at position 2003 of SEQ ID NO: 1879893
cugauagcugcagaguaaa

SEQ ID NO: 1939127 - RNA, 19 nt, Artificial Sequence
  Description of Artificial Sequence: Synthetic oligonucleotide
  Antisense strand to SEQ ID NO: 1939126
uuuacucugcagcuaucag

SEQ ID NO: 1939128 - RNA, 19 nt, Artificial Sequence
  Description of Artificial Sequence: Synthetic oligonucleotide
  Sense strand starting at position 2258 of SEQ ID NO: 1879893
guggaaagggauugugacu

SEQ ID NO: 1939129 - RNA, 19 nt, Artificial Sequence
  Description of Artificial Sequence: Synthetic oligonucleotide
  Antisense strand to SEQ ID NO: 1939128
agucacaaucccuuuccac

SEQ ID NO: 1939130 - RNA, 19 nt, Artificial Sequence
  Description of Artificial Sequence: Synthetic oligonucleotide
  Sense strand starting at position 2694 of SEQ ID NO: 1879893
agccgacuugcgucuuaag

SEQ ID NO: 1939131 - RNA, 19 nt, Artificial Sequence
  Description of Artificial Sequence: Synthetic oligonucleotide
  Antisense strand to SEQ ID NO: 1939130
cuuaagacgcaagucggcu

SEQ ID NO: 1939132 - RNA, 19 nt, Artificial Sequence
  Description of Artificial Sequence: Synthetic oligonucleotide
  Sense strand starting at position 2695 of SEQ ID NO: 1879893
gccgacuugcgucuuaaga

SEQ ID NO: 1939133 - RNA, 19 nt, Artificial Sequence
  Description of Artificial Sequence: Synthetic oligonucleotide
  Antisense strand to SEQ ID NO: 1939132
ucuuaagacgcaagucggc

SEQ ID NO: 1939134 - RNA, 19 nt, Artificial Sequence
  Description of Artificial Sequence: Synthetic oligonucleotide
  Sense strand starting at position 2789 of SEQ ID NO: 1879893
ugauaaauugagcaagcgu

SEQ ID NO: 1939135 - RNA, 19 nt, Artificial Sequence
  Description of Artificial Sequence: Synthetic oligonucleotide
  Antisense strand to SEQ ID NO: 1939134
acgcuugcucaauuuauca

SEQ ID NO: 1939136 - RNA, 19 nt, Artificial Sequence
  Description of Artificial Sequence: Synthetic oligonucleotide
  Sense strand starting at position 2828 of SEQ ID NO: 1879893
acauguaucagcuaacgga

SEQ ID NO: 1939137 - RNA, 19 nt, Artificial Sequence
  Description of Artificial Sequence: Synthetic oligonucleotide
  Antisense strand to SEQ ID NO: 1939136
uccguuagcugauacaugu

SEQ ID NO: 1939138 - RNA, 19 nt, Artificial Sequence
  Description of Artificial Sequence: Synthetic oligonucleotide
  Sense strand starting at position 3135 of SEQ ID NO: 1879893
ucagcucuccagggaggaa

SEQ ID NO: 1939139 - RNA, 19 nt, Artificial Sequence
  Description of Artificial Sequence: Synthetic oligonucleotide
  Antisense strand to SEQ ID NO: 1939138
uuccucccuggagagcuga

SEQ ID NO: 1939140 - RNA, 19 nt, Artificial Sequence
  Description of Artificial Sequence: Synthetic oligonucleotide
  Sense strand starting at position 3149 of SEQ ID NO: 1879893
aggaaaguguccugugcuc

SEQ ID NO: 1939141 - RNA, 19 nt, Artificial Sequence
  Description of Artificial Sequence: Synthetic oligonucleotide
  Antisense strand to SEQ ID NO: 1939140
gagcacaggacacuuuccu

SEQ ID NO: 1939142 - RNA, 19 nt, Artificial Sequence
  Description of Artificial Sequence: Synthetic oligonucleotide
  Sense strand starting at position 3151 of SEQ ID NO: 1879893
gaaaguguccugugcucuu

SEQ ID NO: 1939143 - RNA, 19 nt, Artificial Sequence
  Description of Artificial Sequence: Synthetic oligonucleotide
  Antisense strand to SEQ ID NO: 1939142
aagagcacaggacacuuuc

SEQ ID NO: 1939144 - RNA, 19 nt, Artificial Sequence
  Description of Artificial Sequence: Synthetic oligonucleotide
  Sense strand starting at position 3273 of SEQ ID NO: 1879893
caccgagugcgagauagau

SEQ ID NO: 1939145 - RNA, 19 nt, Artificial Sequence
  Description of Artificial Sequence: Synthetic oligonucleotide
  Antisense strand to SEQ ID NO: 1939144
aucuaucucgcacucggug

SEQ ID NO: 1939146 - RNA, 19 nt, Artificial Sequence
  Description of Artificial Sequence: Synthetic oligonucleotide
  Sense strand starting at position 3279 of SEQ ID NO: 1879893
gugcgagauagauaguguu

SEQ ID NO: 1939147 - RNA, 19 nt, Artificial Sequence
  Description of Artificial Sequence: Synthetic oligonucleotide
  Antisense strand to SEQ ID NO: 1939146
aacacuaucuaucucgcac

SEQ ID NO: 1939148 - RNA, 19 nt, Artificial Sequence
  Description of Artificial Sequence: Synthetic oligonucleotide
  Sense strand starting at position 3282 of SEQ ID NO: 1879893
cgagauagauaguguuucu

SEQ ID NO: 1939149 - RNA, 19 nt, Artificial Sequence
  Description of Artificial Sequence: Synthetic oligonucleotide
  Antisense strand to SEQ ID NO: 1939148
agaaacacuaucuaucucg

SEQ ID NO: 1939150 - RNA, 19 nt, Artificial Sequence
  Description of Artificial Sequence: Synthetic oligonucleotide
  Sense strand starting at position 3307 of SEQ ID NO: 1879893
gugcguguggucuugguga

SEQ ID NO: 1939151 - RNA, 19 nt, Artificial Sequence
  Description of Artificial Sequence: Synthetic oligonucleotide
  Antisense strand to SEQ ID NO: 1939150
ucaccaagaccacacgcac

SEQ ID NO: 1939152 - RNA, 19 nt, Artificial Sequence
  Description of Artificial Sequence: Synthetic oligonucleotide
  Sense strand starting at position 3309 of SEQ ID NO: 1879893
gcguguggucuuggugaca

SEQ ID NO: 1939153 - RNA, 19 nt, Artificial Sequence
  Description of Artificial Sequence: Synthetic oligonucleotide
  Antisense strand to SEQ ID NO: 1939152
ugucaccaagaccacacgc

SEQ ID NO: 1939154 - RNA, 19 nt, Artificial Sequence
  Description of Artificial Sequence: Synthetic oligonucleotide
  Sense strand starting at position 3344 of SEQ ID NO: 1879893
uccuguguccuagguggau

SEQ ID NO: 1939155 - RNA, 19 nt, Artificial Sequence
  Description of Artificial Sequence: Synthetic oligonucleotide
  Antisense strand to SEQ ID NO: 1939154
auccaccuaggacacagga

SEQ ID NO: 1939156 - RNA, 19 nt, Artificial Sequence
  Description of Artificial Sequence: Synthetic oligonucleotide
  Sense strand starting at position 3386 of SEQ ID NO: 1879893
uuuguauauccauguggua

SEQ ID NO: 1939157 - RNA, 19 nt, Artificial Sequence
  Description of Artificial Sequence: Synthetic oligonucleotide
  Antisense strand to SEQ ID NO: 1939156
uaccacauggauauacaaa

SEQ ID NO: 1939158 - RNA, 19 nt, Artificial Sequence
  Description of Artificial Sequence: Synthetic oligonucleotide
  Sense strand starting at position 3437 of SEQ ID NO: 1879893
gcugcugagucacagcaau

SEQ ID NO: 1939159 - RNA, 19 nt, Artificial Sequence
  Description of Artificial Sequence: Synthetic oligonucleotide
  Antisense strand to SEQ ID NO: 1939158
auugcugugacucagcagc

SEQ ID NO: 1939160 - RNA, 19 nt, Artificial Sequence
  Description of Artificial Sequence: Synthetic oligonucleotide
  Sense strand starting at position 3501 of SEQ ID NO: 1879893
ccucaucacugccagauga

SEQ ID NO: 1939161 - RNA, 19 nt, Artificial Sequence
  Description of Artificial Sequence: Synthetic oligonucleotide
  Antisense strand to SEQ ID NO: 1939160
ucaucuggcagugaugagg

SEQ ID NO: 1939162 - RNA, 19 nt, Artificial Sequence
  Description of Artificial Sequence: Synthetic oligonucleotide
  Sense strand starting at position 3643 of SEQ ID NO: 1879893
gguccucucagcugggaau

SEQ ID NO: 1939163 - RNA, 19 nt, Artificial Sequence
  Description of Artificial Sequence: Synthetic oligonucleotide
  Antisense strand to SEQ ID NO: 1939162
auucccagcugagaggacc

SEQ ID NO: 1939164 - RNA, 19 nt, Artificial Sequence
  Description of Artificial Sequence: Synthetic oligonucleotide
  Sense strand starting at position 3657 of SEQ ID NO: 1879893
ggaauccucugaggagcaa

SEQ ID NO: 1939165 - RNA, 19 nt, Artificial Sequence
  Description of Artificial Sequence: Synthetic oligonucleotide
  Antisense strand to SEQ ID NO: 1939164
uugcuccucagaggauucc

SEQ ID NO: 1939166 - RNA, 19 nt, Artificial Sequence
  Description of Artificial Sequence: Synthetic oligonucleotide
  Sense strand starting at position 3809 of SEQ ID NO: 1879893
gaggccuggccucaaagau

SEQ ID NO: 1939167 - RNA, 19 nt, Artificial Sequence
  Description of Artificial Sequence: Synthetic oligonucleotide
  Antisense strand to SEQ ID NO: 1939166
aucuuugaggccaggccuc

SEQ ID NO: 1939168 - RNA, 19 nt, Artificial Sequence
  Description of Artificial Sequence: Synthetic oligonucleotide
  Sense strand starting at position 3843 of SEQ ID NO: 1879893
uugcuuuacuccugacuag

SEQ ID NO: 1939169 - RNA, 19 nt, Artificial Sequence
  Description of Artificial Sequence: Synthetic oligonucleotide
  Antisense strand to SEQ ID NO: 1939168
cuagucaggaguaaagcaa

SEQ ID NO: 1939170 - RNA, 19 nt, Artificial Sequence
  Description of Artificial Sequence: Synthetic oligonucleotide
  Sense strand starting at position 3844 of SEQ ID NO: 1879893
ugcuuuacuccugacuaga

SEQ ID NO: 1939171 - RNA, 19 nt, Artificial Sequence
  Description of Artificial Sequence: Synthetic oligonucleotide
  Antisense strand to SEQ ID NO: 1939170
ucuagucaggaguaaagca

SEQ ID NO: 1939172 - RNA, 19 nt, Artificial Sequence
  Description of Artificial Sequence: Synthetic oligonucleotide
  Sense strand starting at position 3959 of SEQ ID NO: 1879893
gagugaagcccaggacuca

SEQ ID NO: 1939173 - RNA, 19 nt, Artificial Sequence
  Description of Artificial Sequence: Synthetic oligonucleotide
  Antisense strand to SEQ ID NO: 1939172
ugaguccugggcuucacuc

SEQ ID NO: 1939174 - RNA, 19 nt, Artificial Sequence
  Description of Artificial Sequence: Synthetic oligonucleotide
  Sense strand starting at position 70 of SEQ ID NO: 1879894
ccauguuaugacugaacag

SEQ ID NO: 1939175 - RNA, 19 nt, Artificial Sequence
  Description of Artificial Sequence: Synthetic oligonucleotide
  Antisense strand to SEQ ID NO: 1939174
cuguucagucauaacaugg

SEQ ID NO: 1939176 - RNA, 19 nt, Artificial Sequence
  Description of Artificial Sequence: Synthetic oligonucleotide
  Sense strand starting at position 149 of SEQ ID NO: 1879894
guuggaacuaguugggaga

SEQ ID NO: 1939177 - RNA, 19 nt, Artificial Sequence
  Description of Artificial Sequence: Synthetic oligonucleotide
  Antisense strand to SEQ ID NO: 1939176
ucucccaacuaguuccaac

SEQ ID NO: 1939178 - RNA, 19 nt, Artificial Sequence
  Description of Artificial Sequence: Synthetic oligonucleotide
  Sense strand starting at position 231 of SEQ ID NO: 1879894
gcacuucuagaaggagcaa

SEQ ID NO: 1939179 - RNA, 19 nt, Artificial Sequence
  Description of Artificial Sequence: Synthetic oligonucleotide
  Antisense strand to SEQ ID NO: 1939178
uugcuccuucuagaagugc

SEQ ID NO: 1939180 - RNA, 19 nt, Artificial Sequence
  Description of Artificial Sequence: Synthetic oligonucleotide
  Sense strand starting at position 287 of SEQ ID NO: 1879894
aaacguguaggagguaaau

SEQ ID NO: 1939181 - RNA, 19 nt, Artificial Sequence
  Description of Artificial Sequence: Synthetic oligonucleotide
  Antisense strand to SEQ ID NO: 1939180
auuuaccuccuacacguuu

SEQ ID NO: 1939182 - RNA, 19 nt, Artificial Sequence
  Description of Artificial Sequence: Synthetic oligonucleotide
  Sense strand starting at position 414 of SEQ ID NO: 1879894
gaagguaugcacugaaguu

SEQ ID NO: 1939183 - RNA, 19 nt, Artificial Sequence
  Description of Artificial Sequence: Synthetic oligonucleotide
  Antisense strand to SEQ ID NO: 1939182
aacuucagugcauaccuuc

SEQ ID NO: 1939184 - RNA, 19 nt, Artificial Sequence
  Description of Artificial Sequence: Synthetic oligonucleotide
  Sense strand starting at position 486 of SEQ ID NO: 1879894
cagugcuggcaccagaaau

SEQ ID NO: 1939185 - RNA, 19 nt, Artificial Sequence
  Description of Artificial Sequence: Synthetic oligonucleotide
  Antisense strand to SEQ ID NO: 1939184
auuucuggugccagcacug

SEQ ID NO: 1939186 - RNA, 19 nt, Artificial Sequence
  Description of Artificial Sequence: Synthetic oligonucleotide
  Sense strand starting at position 573 of SEQ ID NO: 1879894
guauuuguauagcaagaau

SEQ ID NO: 1939187 - RNA, 19 nt, Artificial Sequence
  Description of Artificial Sequence: Synthetic oligonucleotide
  Antisense strand to SEQ ID NO: 1939186
auucuugcuauacaaauac

SEQ ID NO: 1939188 - RNA, 19 nt, Artificial Sequence
  Description of Artificial Sequence: Synthetic oligonucleotide
  Sense strand starting at position 576 of SEQ ID NO: 1879894
uuuguauagcaagaauacu

SEQ ID NO: 1939189 - RNA, 19 nt, Artificial Sequence
  Description of Artificial Sequence: Synthetic oligonucleotide
  Antisense strand to SEQ ID NO: 1939188
aguauucuugcuauacaaa

SEQ ID NO: 1939190 - RNA, 19 nt, Artificial Sequence
  Description of Artificial Sequence: Synthetic oligonucleotide
  Sense strand starting at position 700 of SEQ ID NO: 1879894
gcugacaacucucugaauu

SEQ ID NO: 1939191 - RNA, 19 nt, Artificial Sequence
  Description of Artificial Sequence: Synthetic oligonucleotide
  Antisense strand to SEQ ID NO: 1939190
aauucagagaguugucagc

SEQ ID NO: 1939192 - RNA, 19 nt, Artificial Sequence
  Description of Artificial Sequence: Synthetic oligonucleotide
  Sense strand starting at position 835 of SEQ ID NO: 1879894
gaagccagucuaugugaau

SEQ ID NO: 1939193 - RNA, 19 nt, Artificial Sequence
  Description of Artificial Sequence: Synthetic oligonucleotide
  Antisense strand to SEQ ID NO: 1939192
auucacauagacuggcuuc

SEQ ID NO: 1939194 - RNA, 19 nt, Artificial Sequence
  Description of Artificial Sequence: Synthetic oligonucleotide
  Sense strand starting at position 836 of SEQ ID NO: 1879894
aagccagucuaugugaauu

SEQ ID NO: 1939195 - RNA, 19 nt, Artificial Sequence
  Description of Artificial Sequence: Synthetic oligonucleotide
  Antisense strand to SEQ ID NO: 1939194
aauucacauagacuggcuu

SEQ ID NO: 1939196 - RNA, 19 nt, Artificial Sequence
  Description of Artificial Sequence: Synthetic oligonucleotide
  Sense strand starting at position 854 of SEQ ID NO: 1879894
uaacuagugggccaaacuu

SEQ ID NO: 1939197 - RNA, 19 nt, Artificial Sequence
  Description of Artificial Sequence: Synthetic oligonucleotide
  Antisense strand to SEQ ID NO: 1939196
aaguuuggcccacuaguua

SEQ ID NO: 1939198 - RNA, 19 nt, Artificial Sequence
  Description of Artificial Sequence: Synthetic oligonucleotide
  Sense strand starting at position 909 of SEQ ID NO: 1879894
uugagacaauuaggaaaga

SEQ ID NO: 1939199 - RNA, 19 nt, Artificial Sequence
  Description of Artificial Sequence: Synthetic oligonucleotide
  Antisense strand to SEQ ID NO: 1939198
ucuuuccuaauugucucaa

SEQ ID NO: 1939200 - RNA, 19 nt, Artificial Sequence
  Description of Artificial Sequence: Synthetic oligonucleotide
  Sense strand starting at position 955 of SEQ ID NO: 1879894
cagaauugucgugagacuc

SEQ ID NO: 1939201 - RNA, 19 nt, Artificial Sequence
  Description of Artificial Sequence: Synthetic oligonucleotide
  Antisense strand to SEQ ID NO: 1939200
gagucucacgacaauucug

SEQ ID NO: 1939202 - RNA, 19 nt, Artificial Sequence
  Description of Artificial Sequence: Synthetic oligonucleotide
  Sense strand starting at position 965 of SEQ ID NO: 1879894
gugagacucuuccugucua

SEQ ID NO: 1939203 - RNA, 19 nt, Artificial Sequence
  Description of Artificial Sequence: Synthetic oligonucleotide
  Antisense strand to SEQ ID NO: 1939202
uagacaggaagagucucac

SEQ ID NO: 1939204 - RNA, 19 nt, Artificial Sequence
  Description of Artificial Sequence: Synthetic oligonucleotide
  Sense strand starting at position 1027 of SEQ ID NO: 1879894
gggagacaauguucuucuu

SEQ ID NO: 1939205 - RNA, 19 nt, Artificial Sequence
  Description of Artificial Sequence: Synthetic oligonucleotide
  Antisense strand to SEQ ID NO: 1939204
aagaagaacauugucuccc

SEQ ID NO: 1939206 - RNA, 19 nt, Artificial Sequence
  Description of Artificial Sequence: Synthetic oligonucleotide
  Sense strand starting at position 1029 of SEQ ID NO: 1879894
gagacaauguucuucuuag

SEQ ID NO: 1939207 - RNA, 19 nt, Artificial Sequence
  Description of Artificial Sequence: Synthetic oligonucleotide
  Antisense strand to SEQ ID NO: 1939206
cuaagaagaacauugucuc

SEQ ID NO: 1939208 - RNA, 19 nt, Artificial Sequence
  Description of Artificial Sequence: Synthetic oligonucleotide
  Sense strand starting at position 1030 of SEQ ID NO: 1879894
agacaauguucuucuuagu

SEQ ID NO: 1939209 - RNA, 19 nt, Artificial Sequence
  Description of Artificial Sequence: Synthetic oligonucleotide
  Antisense strand to SEQ ID NO: 1939208
acuaagaagaacauugucu

SEQ ID NO: 1939210 - RNA, 19 nt, Artificial Sequence
  Description of Artificial Sequence: Synthetic oligonucleotide
  Sense strand starting at position 1407 of SEQ ID NO: 1879894
gagagaguucuagguggug

SEQ ID NO: 1939211 - RNA, 19 nt, Artificial Sequence
  Description of Artificial Sequence: Synthetic oligonucleotide
  Antisense strand to SEQ ID NO: 1939210
caccaccuagaacucucuc

SEQ ID NO: 1939212 - RNA, 19 nt, Artificial Sequence
  Description of Artificial Sequence: Synthetic oligonucleotide
  Sense strand starting at position 1457 of SEQ ID NO: 1879894
agagaagaguucuugugga

SEQ ID NO: 1939213 - RNA, 19 nt, Artificial Sequence
  Description of Artificial Sequence: Synthetic oligonucleotide
  Antisense strand to SEQ ID NO: 1939212
uccacaagaacucuucucu

SEQ ID NO: 1939214 - RNA, 19 nt, Artificial Sequence
  Description of Artificial Sequence: Synthetic oligonucleotide
  Sense strand starting at position 1525 of SEQ ID NO: 1879894
guugaagaguuaccugaag

SEQ ID NO: 1939215 - RNA, 19 nt, Artificial Sequence
  Description of Artificial Sequence: Synthetic oligonucleotide
  Antisense strand to SEQ ID NO: 1939214
cuucagguaacucuucaac

SEQ ID NO: 1939216 - RNA, 19 nt, Artificial Sequence
  Description of Artificial Sequence: Synthetic oligonucleotide
  Sense strand starting at position 1555 of SEQ ID NO: 1879894
gugagagguuugguuacua

SEQ ID NO: 1939217 - RNA, 19 nt, Artificial Sequence
  Description of Artificial Sequence: Synthetic oligonucleotide
  Antisense strand to SEQ ID NO: 1939216
uaguaaccaaaccucucac

SEQ ID NO: 1939218 - RNA, 19 nt, Artificial Sequence
  Description of Artificial Sequence: Synthetic oligonucleotide
  Sense strand starting at position 1559 of SEQ ID NO: 1879894
gagguuugguuacuauaca

SEQ ID NO: 1939219 - RNA, 19 nt, Artificial Sequence
  Description of Artificial Sequence: Synthetic oligonucleotide
  Antisense strand to SEQ ID NO: 1939218
uguauaguaaccaaaccuc

SEQ ID NO: 1939220 - RNA, 19 nt, Artificial Sequence
  Description of Artificial Sequence: Synthetic oligonucleotide
  Sense strand starting at position 1619 of SEQ ID NO: 1879894
acuagaauuuaggagccuu

SEQ ID NO: 1939221 - RNA, 19 nt, Artificial Sequence
  Description of Artificial Sequence: Synthetic oligonucleotide
  Antisense strand to SEQ ID NO: 1939220
aaggcuccuaaauucuagu

SEQ ID NO: 1939222 - RNA, 19 nt, Artificial Sequence
  Description of Artificial Sequence: Synthetic oligonucleotide
  Sense strand starting at position 1734 of SEQ ID NO: 1879894
accgaugguggagauguaa

SEQ ID NO: 1939223 - RNA, 19 nt, Artificial Sequence
  Description of Artificial Sequence: Synthetic oligonucleotide
  Antisense strand to SEQ ID NO: 1939222
uuacaucuccaccaucggu

SEQ ID NO: 1939224 - RNA, 19 nt, Artificial Sequence
  Description of Artificial Sequence: Synthetic oligonucleotide
  Sense strand starting at position 2135 of SEQ ID NO: 1879894
acagccuuucgguaauugu

SEQ ID NO: 1939225 - RNA, 19 nt, Artificial Sequence
  Description of Artificial Sequence: Synthetic oligonucleotide
  Antisense strand to SEQ ID NO: 1939224
acaauuaccgaaaggcugu

SEQ ID NO: 1939226 - RNA, 19 nt, Artificial Sequence
  Description of Artificial Sequence: Synthetic oligonucleotide
  Sense strand starting at position 2375 of SEQ ID NO: 1879894
gcuagaagaugaguuauca

SEQ ID NO: 1939227 - RNA, 19 nt, Artificial Sequence
  Description of Artificial Sequence: Synthetic oligonucleotide
  Antisense strand to SEQ ID NO: 1939226
ugauaacucaucuucuagc

SEQ ID NO: 1939228 - RNA, 19 nt, Artificial Sequence
  Description of Artificial Sequence: Synthetic oligonucleotide
  Sense strand starting at position 2383 of SEQ ID NO: 1879894
augaguuaucaucgguuuc

SEQ ID NO: 1939229 - RNA, 19 nt, Artificial Sequence
  Description of Artificial Sequence: Synthetic oligonucleotide
  Antisense strand to SEQ ID NO: 1939228
gaaaccgaugauaacucau

SEQ ID NO: 1939230 - RNA, 19 nt, Artificial Sequence
  Description of Artificial Sequence: Synthetic oligonucleotide
  Sense strand starting at position 2385 of SEQ ID NO: 1879894
gaguuaucaucgguuucug

SEQ ID NO: 1939231 - RNA, 19 nt, Artificial Sequence
  Description of Artificial Sequence: Synthetic oligonucleotide
  Antisense strand to SEQ ID NO: 1939230
cagaaaccgaugauaacuc

SEQ ID NO: 1939232 - RNA, 19 nt, Artificial Sequence
  Description of Artificial Sequence: Synthetic oligonucleotide
  Sense strand starting at position 2507 of SEQ ID NO: 1879894
guuauuuguugagucaguc

SEQ ID NO: 1939233 - RNA, 19 nt, Artificial Sequence
  Description of Artificial Sequence: Synthetic oligonucleotide
  Antisense strand to SEQ ID NO: 1939232
gacugacucaacaaauaac

SEQ ID NO: 1939234 - RNA, 19 nt, Artificial Sequence
  Description of Artificial Sequence: Synthetic oligonucleotide
  Sense strand starting at position 2627 of SEQ ID NO: 1879894
uuggaacgaucucucuuau

SEQ ID NO: 1939235 - RNA, 19 nt, Artificial Sequence
  Description of Artificial Sequence: Synthetic oligonucleotide
  Antisense strand to SEQ ID NO: 1939234
auaagagagaucguuccaa

SEQ ID NO: 1939236 - RNA, 19 nt, Artificial Sequence
  Description of Artificial Sequence: Synthetic oligonucleotide
  Sense strand starting at position 2657 of SEQ ID NO: 1879894
ugugauuucucugaccaaa

SEQ ID NO: 1939237 - RNA, 19 nt, Artificial Sequence
  Description of Artificial Sequence: Synthetic oligonucleotide
  Antisense strand to SEQ ID NO: 1939236
uuuggucagagaaaucaca

SEQ ID NO: 1939238 - RNA, 19 nt, Artificial Sequence
  Description of Artificial Sequence: Synthetic oligonucleotide
  Sense strand starting at position 2706 of SEQ ID NO: 1879894
aaugucauucuuuacguga

SEQ ID NO: 1939239 - RNA, 19 nt, Artificial Sequence
  Description of Artificial Sequence: Synthetic oligonucleotide
  Antisense strand to SEQ ID NO: 1939238
ucacguaaagaaugacauu

SEQ ID NO: 1939240 - RNA, 19 nt, Artificial Sequence
  Description of Artificial Sequence: Synthetic oligonucleotide
  Sense strand starting at position 2750 of SEQ ID NO: 1879894
ugcaguacuccugaaaucu

SEQ ID NO: 1939241 - RNA, 19 nt, Artificial Sequence
  Description of Artificial Sequence: Synthetic oligonucleotide
  Antisense strand to SEQ ID NO: 1939240
agauuucaggaguacugca

SEQ ID NO: 1939242 - RNA, 19 nt, Artificial Sequence
  Description of Artificial Sequence: Synthetic oligonucleotide
  Sense strand starting at position 2771 of SEQ ID NO: 1879894
cucaauaggccaugaaugu

SEQ ID NO: 1939243 - RNA, 19 nt, Artificial Sequence
  Description of Artificial Sequence: Synthetic oligonucleotide
  Antisense strand to SEQ ID NO: 1939242
acauucauggccuauugag

SEQ ID NO: 1939244 - RNA, 19 nt, Artificial Sequence
  Description of Artificial Sequence: Synthetic oligonucleotide
  Sense strand starting at position 3211 of SEQ ID NO: 1879894
uuauucuugcuauaugugu

SEQ ID NO: 1939245 - RNA, 19 nt, Artificial Sequence
  Description of Artificial Sequence: Synthetic oligonucleotide
  Antisense strand to SEQ ID NO: 1939244
acacauauagcaagaauaa

SEQ ID NO: 1939246 - RNA, 19 nt, Artificial Sequence
  Description of Artificial Sequence: Synthetic oligonucleotide
  Sense strand starting at position 3380 of SEQ ID NO: 1879894
uagugagacugcuucgaca

SEQ ID NO: 1939247 - RNA, 19 nt, Artificial Sequence
  Description of Artificial Sequence: Synthetic oligonucleotide
  Antisense strand to SEQ ID NO: 1939246
ugucgaagcagucucacua

SEQ ID NO: 1939248 - RNA, 19 nt, Artificial Sequence
  Description of Artificial Sequence: Synthetic oligonucleotide
  Sense strand starting at position 3382 of SEQ ID NO: 1879894
gugagacugcuucgacaaa

SEQ ID NO: 1939249 - RNA, 19 nt, Artificial Sequence
  Description of Artificial Sequence: Synthetic oligonucleotide
  Antisense strand to SEQ ID NO: 1939248
uuugucgaagcagucucac

SEQ ID NO: 1939250 - RNA, 19 nt, Artificial Sequence
  Description of Artificial Sequence: Synthetic oligonucleotide
  Sense strand starting at position 3738 of SEQ ID NO: 1879894
ccuguaauccucugggauu

SEQ ID NO: 1939251 - RNA, 19 nt, Artificial Sequence
  Description of Artificial Sequence: Synthetic oligonucleotide
  Antisense strand to SEQ ID NO: 1939250
aaucccagaggauuacagg

SEQ ID NO: 1939252 - RNA, 19 nt, Artificial Sequence
  Description of Artificial Sequence: Synthetic oligonucleotide
  Sense strand starting at position 3740 of SEQ ID NO: 1879894
uguaauccucugggauuac

SEQ ID NO: 1939253 - RNA, 19 nt, Artificial Sequence
  Description of Artificial Sequence: Synthetic oligonucleotide
  Antisense strand to SEQ ID NO: 1939252
guaaucccagaggauuaca

SEQ ID NO: 1939254 - RNA, 19 nt, Artificial Sequence
  Description of Artificial Sequence: Synthetic oligonucleotide
  Sense strand starting at position 83 of SEQ ID NO: 1879895
ugguucucuacaggaagaa

SEQ ID NO: 1939255 - RNA, 19 nt, Artificial Sequence
  Description of Artificial Sequence: Synthetic oligonucleotide
  Antisense strand to SEQ ID NO: 1939254
uucuuccuguagagaacca

SEQ ID NO: 1939256 - RNA, 19 nt, Artificial Sequence
  Description of Artificial Sequence: Synthetic oligonucleotide
  Sense strand starting at position 145 of SEQ ID NO: 1879895
ugaugaaggcaucgacuua

SEQ ID NO: 1939257 - RNA, 19 nt, Artificial Sequence
  Description of Artificial Sequence: Synthetic oligonucleotide
  Antisense strand to SEQ ID NO: 1939256
uaagucgaugccuucauca

SEQ ID NO: 1939258 - RNA, 19 nt, Artificial Sequence
  Description of Artificial Sequence: Synthetic oligonucleotide
  Sense strand starting at position 593 of SEQ ID NO: 1879895
uagacuacgcuccaugaga

SEQ ID NO: 1939259 - RNA, 19 nt, Artificial Sequence
  Description of Artificial Sequence: Synthetic oligonucleotide
  Antisense strand to SEQ ID NO: 1939258
ucucauggagcguagucua

SEQ ID NO: 1939260 - RNA, 19 nt, Artificial Sequence
  Description of Artificial Sequence: Synthetic oligonucleotide
  Sense strand starting at position 712 of SEQ ID NO: 1879895
gcagcaugccaggacagau

SEQ ID NO: 1939261 - RNA, 19 nt, Artificial Sequence
  Description of Artificial Sequence: Synthetic oligonucleotide
  Antisense strand to SEQ ID NO: 1939260
aucuguccuggcaugcugc

SEQ ID NO: 1939262 - RNA, 19 nt, Artificial Sequence
  Description of Artificial Sequence: Synthetic oligonucleotide
  Sense strand starting at position 745 of SEQ ID NO: 1879895
uuuggcuugagguauguaa

SEQ ID NO: 1939263 - RNA, 19 nt, Artificial Sequence
  Description of Artificial Sequence: Synthetic oligonucleotide
  Antisense strand to SEQ ID NO: 1939262
uuacauaccucaagccaaa

SEQ ID NO: 1939264 - RNA, 19 nt, Artificial Sequence
  Description of Artificial Sequence: Synthetic oligonucleotide
  Sense strand starting at position 842 of SEQ ID NO: 1879895
gugauuagggacugguaaa

SEQ ID NO: 1939265 - RNA, 19 nt, Artificial Sequence
  Description of Artificial Sequence: Synthetic oligonucleotide
  Antisense strand to SEQ ID NO: 1939264
uuuaccagucccuaaucac

SEQ ID NO: 1939266 - RNA, 19 nt, Artificial Sequence
  Description of Artificial Sequence: Synthetic oligonucleotide
  Sense strand starting at position 951 of SEQ ID NO: 1879895
cagcauaugcacugggaaa

SEQ ID NO: 1939267 - RNA, 19 nt, Artificial Sequence
  Description of Artificial Sequence: Synthetic oligonucleotide
  Antisense strand to SEQ ID NO: 1939266
uuucccagugcauaugcug

SEQ ID NO: 1939268 - RNA, 19 nt, Artificial Sequence
  Description of Artificial Sequence: Synthetic oligonucleotide
  Sense strand starting at position 1072 of SEQ ID NO: 1879895
cggucuuaagaaggagaca

SEQ ID NO: 1939269 - RNA, 19 nt, Artificial Sequence
  Description of Artificial Sequence: Synthetic oligonucleotide
  Antisense strand to SEQ ID NO: 1939268
ugucuccuucuuaagaccg

SEQ ID NO: 1939270 - RNA, 19 nt, Artificial Sequence
  Description of Artificial Sequence: Synthetic oligonucleotide
  Sense strand starting at position 1167 of SEQ ID NO: 1879895
gcaagaggucuccggagga

SEQ ID NO: 1939271 - RNA, 19 nt, Artificial Sequence
  Description of Artificial Sequence: Synthetic oligonucleotide
  Antisense strand to SEQ ID NO: 1939270
uccuccggagaccucuugc

SEQ ID NO: 1939272 - RNA, 19 nt, Artificial Sequence
  Description of Artificial Sequence: Synthetic oligonucleotide
  Sense strand starting at position 1190 of SEQ ID NO: 1879895
augaaugaauuagccuauu

SEQ ID NO: 1939273 - RNA, 19 nt, Artificial Sequence
  Description of Artificial Sequence: Synthetic oligonucleotide
  Antisense strand to SEQ ID NO: 1939272
aauaggcuaauucauucau

SEQ ID NO: 1939274 - RNA, 19 nt, Artificial Sequence
  Description of Artificial Sequence: Synthetic oligonucleotide
  Sense strand starting at position 1221 of SEQ ID NO: 1879895
cuguaaucccaauguaaag

SEQ ID NO: 1939275 - RNA, 19 nt, Artificial Sequence
  Description of Artificial Sequence: Synthetic oligonucleotide
  Antisense strand to SEQ ID NO: 1939274
cuuuacauugggauuacag

SEQ ID NO: 1939276 - RNA, 19 nt, Artificial Sequence
  Description of Artificial Sequence: Synthetic oligonucleotide
  Sense strand starting at position 1270 of SEQ ID NO: 1879895
ugaaguauuugaggaacac

SEQ ID NO: 1939277 - RNA, 19 nt, Artificial Sequence
  Description of Artificial Sequence: Synthetic oligonucleotide
  Antisense strand to SEQ ID NO: 1939276
guguuccucaaauacuuca

SEQ ID NO: 1939278 - RNA, 19 nt, Artificial Sequence
  Description of Artificial Sequence: Synthetic oligonucleotide
  Sense strand starting at position 2252 of SEQ ID NO: 1879895
gcaguccauuugccaaauu

SEQ ID NO: 1939279 - RNA, 19 nt, Artificial Sequence
  Description of Artificial Sequence: Synthetic oligonucleotide
  Antisense strand to SEQ ID NO: 1939278
aauuuggcaaauggacugc

SEQ ID NO: 1939280 - RNA, 19 nt, Artificial Sequence
  Description of Artificial Sequence: Synthetic oligonucleotide
  Sense strand starting at position 2289 of SEQ ID NO: 1879895
cguugucuucggucaucau

SEQ ID NO: 1939281 - RNA, 19 nt, Artificial Sequence
  Description of Artificial Sequence: Synthetic oligonucleotide
  Antisense strand to SEQ ID NO: 1939280
augaugaccgaagacaacg

SEQ ID NO: 1939282 - RNA, 19 nt, Artificial Sequence
  Description of Artificial Sequence: Synthetic oligonucleotide
  Sense strand starting at position 2355 of SEQ ID NO: 1879895
aggccagaacuugguuaau

SEQ ID NO: 1939283 - RNA, 19 nt, Artificial Sequence
  Description of Artificial Sequence: Synthetic oligonucleotide
  Antisense strand to SEQ ID NO: 1939282
auuaaccaaguucuggccu

SEQ ID NO: 1939284 - RNA, 19 nt, Artificial Sequence
  Description of Artificial Sequence: Synthetic oligonucleotide
  Sense strand starting at position 2364 of SEQ ID NO: 1879895
cuugguuaauguguaacaa

SEQ ID NO: 1939285 - RNA, 19 nt, Artificial Sequence
  Description of Artificial Sequence: Synthetic oligonucleotide
  Antisense strand to SEQ ID NO: 1939284
uuguuacacauuaaccaag

SEQ ID NO: 1939286 - RNA, 19 nt, Artificial Sequence
  Description of Artificial Sequence: Synthetic oligonucleotide
  Sense strand starting at position 2365 of SEQ ID NO: 1879895
uugguuaauguguaacaag

SEQ ID NO: 1939287 - RNA, 19 nt, Artificial Sequence
  Description of Artificial Sequence: Synthetic oligonucleotide
  Antisense strand to SEQ ID NO: 1939286
cuuguuacacauuaaccaa

SEQ ID NO: 1939288 - RNA, 19 nt, Artificial Sequence
  Description of Artificial Sequence: Synthetic oligonucleotide
  Sense strand starting at position 2551 of SEQ ID NO: 1879895
aggucaucgcaagacuaca

SEQ ID NO: 1939289 - RNA, 19 nt, Artificial Sequence
  Description of Artificial Sequence: Synthetic oligonucleotide
  Antisense strand to SEQ ID NO: 1939288
uguagucuugcgaugaccu

SEQ ID NO: 1939290 - RNA, 19 nt, Artificial Sequence
  Description of Artificial Sequence: Synthetic oligonucleotide
  Sense strand starting at position 2605 of SEQ ID NO: 1879895
cuggauuacgguugagaag

SEQ ID NO: 1939291 - RNA, 19 nt, Artificial Sequence
  Description of Artificial Sequence: Synthetic oligonucleotide
  Antisense strand to SEQ ID NO: 1939290
cuucucaaccguaauccag

SEQ ID NO: 1939292 - RNA, 19 nt, Artificial Sequence
  Description of Artificial Sequence: Synthetic oligonucleotide
  Sense strand starting at position 2606 of SEQ ID NO: 1879895
uggauuacgguugagaagu

SEQ ID NO: 1939293 - RNA, 19 nt, Artificial Sequence
  Description of Artificial Sequence: Synthetic oligonucleotide
  Antisense strand to SEQ ID NO: 1939292
acuucucaaccguaaucca

SEQ ID NO: 1939294 - RNA, 19 nt, Artificial Sequence
  Description of Artificial Sequence: Synthetic oligonucleotide
  Sense strand starting at position 2919 of SEQ ID NO: 1879895
uggauaguuugguuucaga

SEQ ID NO: 1939295 - RNA, 19 nt, Artificial Sequence
  Description of Artificial Sequence: Synthetic oligonucleotide
  Antisense strand to SEQ ID NO: 1939294
ucugaaaccaaacuaucca

SEQ ID NO: 1939296 - RNA, 19 nt, Artificial Sequence
  Description of Artificial Sequence: Synthetic oligonucleotide
  Sense strand starting at position 3028 of SEQ ID NO: 1879895
gagcuugaucagggccaca

SEQ ID NO: 1939297 - RNA, 19 nt, Artificial Sequence
  Description of Artificial Sequence: Synthetic oligonucleotide
  Antisense strand to SEQ ID NO: 1939296
uguggcccugaucaagcuc

SEQ ID NO: 1939298 - RNA, 19 nt, Artificial Sequence
  Description of Artificial Sequence: Synthetic oligonucleotide
  Sense strand starting at position 3231 of SEQ ID NO: 1879895
guggcuauuugggucggua

SEQ ID NO: 1939299 - RNA, 19 nt, Artificial Sequence
  Description of Artificial Sequence: Synthetic oligonucleotide
  Antisense strand to SEQ ID NO: 1939298
uaccgacccaaauagccac

SEQ ID NO: 1939300 - RNA, 19 nt, Artificial Sequence
  Description of Artificial Sequence: Synthetic oligonucleotide
  Sense strand starting at position 3233 of SEQ ID NO: 1879895
ggcuauuugggucgguauu

SEQ ID NO: 1939301 - RNA, 19 nt, Artificial Sequence
  Description of Artificial Sequence: Synthetic oligonucleotide
  Antisense strand to SEQ ID NO: 1939300
aauaccgacccaaauagcc

SEQ ID NO: 1939302 - RNA, 19 nt, Artificial Sequence
  Description of Artificial Sequence: Synthetic oligonucleotide
  Sense strand starting at position 3413 of SEQ ID NO: 1879895
ucugcaugucguguuugau

SEQ ID NO: 1939303 - RNA, 19 nt, Artificial Sequence
  Description of Artificial Sequence: Synthetic oligonucleotide
  Antisense strand to SEQ ID NO: 1939302
aucaaacacgacaugcaga

SEQ ID NO: 1939304 - RNA, 19 nt, Artificial Sequence
  Description of Artificial Sequence: Synthetic oligonucleotide
  Sense strand starting at position 3414 of SEQ ID NO: 1879895
cugcaugucguguuugauu

SEQ ID NO: 1939305 - RNA, 19 nt, Artificial Sequence
  Description of Artificial Sequence: Synthetic oligonucleotide
  Antisense strand to SEQ ID NO: 1939304
aaucaaacacgacaugcag

SEQ ID NO: 1939306 - RNA, 19 nt, Artificial Sequence
  Description of Artificial Sequence: Synthetic oligonucleotide
  Sense strand starting at position 3433 of SEQ ID NO: 1879895
uaggcuccugaguauaaca

SEQ ID NO: 1939307 - RNA, 19 nt, Artificial Sequence
  Description of Artificial Sequence: Synthetic oligonucleotide
  Antisense strand to SEQ ID NO: 1939306
uguuauacucaggagccua

SEQ ID NO: 1939308 - RNA, 19 nt, Artificial Sequence
  Description of Artificial Sequence: Synthetic oligonucleotide
  Sense strand starting at position 3435 of SEQ ID NO: 1879895
ggcuccugaguauaacaga

SEQ ID NO: 1939309 - RNA, 19 nt, Artificial Sequence
  Description of Artificial Sequence: Synthetic oligonucleotide
  Antisense strand to SEQ ID NO: 1939308
ucuguuauacucaggagcc

SEQ ID NO: 1939310 - RNA, 19 nt, Artificial Sequence
  Description of Artificial Sequence: Synthetic oligonucleotide
  Sense strand starting at position 3446 of SEQ ID NO: 1879895
auaacagauugguucugau

SEQ ID NO: 1939311 - RNA, 19 nt, Artificial Sequence
  Description of Artificial Sequence: Synthetic oligonucleotide
  Antisense strand to SEQ ID NO: 1939310
aucagaaccaaucuguuau

SEQ ID NO: 1939312 - RNA, 19 nt, Artificial Sequence
  Description of Artificial Sequence: Synthetic oligonucleotide
  Sense strand starting at position 3513 of SEQ ID NO: 1879895
acagcaucaccugaaguua

SEQ ID NO: 1939313 - RNA, 19 nt, Artificial Sequence
  Description of Artificial Sequence: Synthetic oligonucleotide
  Antisense strand to SEQ ID NO: 1939312
uaacuucaggugaugcugu

SEQ ID NO: 1939314 - RNA, 19 nt, Artificial Sequence
  Description of Artificial Sequence: Synthetic oligonucleotide
  Sense strand starting at position 3582 of SEQ ID NO: 1879895
gaaagaagucagugagcug

SEQ ID NO: 1939315 - RNA, 19 nt, Artificial Sequence
  Description of Artificial Sequence: Synthetic oligonucleotide
  Antisense strand to SEQ ID NO: 1939314
cagcucacugacuucuuuc

SEQ ID NO: 1939316 - RNA, 19 nt, Artificial Sequence
  Description of Artificial Sequence: Synthetic oligonucleotide
  Sense strand starting at position 3605 of SEQ ID NO: 1879895
gauaguuagcauuauugac

SEQ ID NO: 1939317 - RNA, 19 nt, Artificial Sequence
  Description of Artificial Sequence: Synthetic oligonucleotide
  Antisense strand to SEQ ID NO: 1939316
gucaauaaugcuaacuauc

SEQ ID NO: 1939318 - RNA, 19 nt, Artificial Sequence
  Description of Artificial Sequence: Synthetic oligonucleotide
  Sense strand starting at position 3612 of SEQ ID NO: 1879895
agcauuauugacugaaacu

SEQ ID NO: 1939319 - RNA, 19 nt, Artificial Sequence
  Description of Artificial Sequence: Synthetic oligonucleotide
  Antisense strand to SEQ ID NO: 1939318
aguuucagucaauaaugcu

SEQ ID NO: 1939320 - RNA, 19 nt, Artificial Sequence
  Description of Artificial Sequence: Synthetic oligonucleotide
  Sense strand starting at position 3732 of SEQ ID NO: 1879895
uagguaggccuuugggaaa

SEQ ID NO: 1939321 - RNA, 19 nt, Artificial Sequence
  Description of Artificial Sequence: Synthetic oligonucleotide
  Antisense strand to SEQ ID NO: 1939320
uuucccaaaggccuaccua

SEQ ID NO: 1939322 - RNA, 19 nt, Artificial Sequence
  Description of Artificial Sequence: Synthetic oligonucleotide
  Sense strand starting at position 3863 of SEQ ID NO: 1879895
aguauccuuggaugauacu

SEQ ID NO: 1939323 - RNA, 19 nt, Artificial Sequence
  Description of Artificial Sequence: Synthetic oligonucleotide
  Antisense strand to SEQ ID NO: 1939322
aguaucauccaaggauacu

SEQ ID NO: 1939324 - RNA, 19 nt, Artificial Sequence
  Description of Artificial Sequence: Synthetic oligonucleotide
  Sense strand starting at position 3881 of SEQ ID NO: 1879895
uguggaagauucuuugcau

SEQ ID NO: 1939325 - RNA, 19 nt, Artificial Sequence
  Description of Artificial Sequence: Synthetic oligonucleotide
  Antisense strand to SEQ ID NO: 1939324
augcaaagaaucuuccaca

SEQ ID NO: 1939326 - RNA, 19 nt, Artificial Sequence
  Description of Artificial Sequence: Synthetic oligonucleotide
  Sense strand starting at position 3884 of SEQ ID NO: 1879895
ggaagauucuuugcaucuc

SEQ ID NO: 1939327 - RNA, 19 nt, Artificial Sequence
  Description of Artificial Sequence: Synthetic oligonucleotide
  Antisense strand to SEQ ID NO: 1939326
gagaugcaaagaaucuucc

SEQ ID NO: 1939328 - RNA, 19 nt, Artificial Sequence
  Description of Artificial Sequence: Synthetic oligonucleotide
  Sense strand starting at position 3954 of SEQ ID NO: 1879895
uuuagagacugcuuugauu

SEQ ID NO: 1939329 - RNA, 19 nt, Artificial Sequence
  Description of Artificial Sequence: Synthetic oligonucleotide
  Antisense strand to SEQ ID NO: 1939328
aaucaaagcagucucuaaa

SEQ ID NO: 1939330 - RNA, 19 nt, Artificial Sequence
  Description of Artificial Sequence: Synthetic oligonucleotide
  Sense strand starting at position 3956 of SEQ ID NO: 1879895
uagagacugcuuugauucu

SEQ ID NO: 1939331 - RNA, 19 nt, Artificial Sequence
  Description of Artificial Sequence: Synthetic oligonucleotide
  Antisense strand to SEQ ID NO: 1939330
agaaucaaagcagucucua

SEQ ID NO: 1939332 - RNA, 19 nt, Artificial Sequence
  Description of Artificial Sequence: Synthetic oligonucleotide
  Sense strand starting at position 3974 of SEQ ID NO: 1879895
ugaggcacugcugauuaua

SEQ ID NO: 1939333 - RNA, 19 nt, Artificial Sequence
  Description of Artificial Sequence: Synthetic oligonucleotide
  Antisense strand to SEQ ID NO: 1939332
uauaaucagcagugccuca

SEQ ID NO: 1939334 - RNA, 19 nt, Artificial Sequence
  Description of Artificial Sequence: Synthetic oligonucleotide
  Sense strand starting at position 81 of SEQ ID NO: 1879896
cccacaaaucgguagacua

SEQ ID NO: 1939335 - RNA, 19 nt, Artificial Sequence
  Description of Artificial Sequence: Synthetic oligonucleotide
  Antisense strand to SEQ ID NO: 1939334
uagucuaccgauuuguggg

SEQ ID NO: 1939336 - RNA, 19 nt, Artificial Sequence
  Description of Artificial Sequence: Synthetic oligonucleotide
  Sense strand starting at position 145 of SEQ ID NO: 1879896
cuaaguuguuuacuacuuu

SEQ ID NO: 1939337 - RNA, 19 nt, Artificial Sequence
  Description of Artificial Sequence: Synthetic oligonucleotide
  Antisense strand to SEQ ID NO: 1939336
aaaguaguaaacaacuuag

SEQ ID NO: 1939338 - RNA, 19 nt, Artificial Sequence
  Description of Artificial Sequence: Synthetic oligonucleotide
  Sense strand starting at position 164 of SEQ ID NO: 1879896
uugcuaagauugucccaga

SEQ ID NO: 1939339 - RNA, 19 nt, Artificial Sequence
  Description of Artificial Sequence: Synthetic oligonucleotide
  Antisense strand to SEQ ID NO: 1939338
ucugggacaaucuuagcaa

SEQ ID NO: 1939340 - RNA, 19 nt, Artificial Sequence
  Description of Artificial Sequence: Synthetic oligonucleotide
  Sense strand starting at position 382 of SEQ ID NO: 1879896
gcccucucaguauagguaa

SEQ ID NO: 1939341 - RNA, 19 nt, Artificial Sequence
  Description of Artificial Sequence: Synthetic oligonucleotide
  Antisense strand to SEQ ID NO: 1939340
uuaccuauacugagagggc

SEQ ID NO: 1939342 - RNA, 19 nt, Artificial Sequence
  Description of Artificial Sequence: Synthetic oligonucleotide
  Sense strand starting at position 489 of SEQ ID NO: 1879896
cauggaguuggaugccauu

SEQ ID NO: 1939343 - RNA, 19 nt, Artificial Sequence
  Description of Artificial Sequence: Synthetic oligonucleotide
  Antisense strand to SEQ ID NO: 1939342
aauggcauccaacuccaug

SEQ ID NO: 1939344 - RNA, 19 nt, Artificial Sequence
  Description of Artificial Sequence: Synthetic oligonucleotide
  Sense strand starting at position 529 of SEQ ID NO: 1879896
acugcuuaugacugucaca

SEQ ID NO: 1939345 - RNA, 19 nt, Artificial Sequence
  Description of Artificial Sequence: Synthetic oligonucleotide
  Antisense strand to SEQ ID NO: 1939344
ugugacagucauaagcagu

SEQ ID NO: 1939346 - RNA, 19 nt, Artificial Sequence
  Description of Artificial Sequence: Synthetic oligonucleotide
  Sense strand starting at position 712 of SEQ ID NO: 1879896
gugguaaucucaucaaugu

SEQ ID NO: 1939347 - RNA, 19 nt, Artificial Sequence
  Description of Artificial Sequence: Synthetic oligonucleotide
  Antisense strand to SEQ ID NO: 1939346
acauugaugagauuaccac

SEQ ID NO: 1939348 - RNA, 19 nt, Artificial Sequence
  Description of Artificial Sequence: Synthetic oligonucleotide
  Sense strand starting at position 713 of SEQ ID NO: 1879896
ugguaaucucaucaauguu

SEQ ID NO: 1939349 - RNA, 19 nt, Artificial Sequence
  Description of Artificial Sequence: Synthetic oligonucleotide
  Antisense strand to SEQ ID NO: 1939348
aacauugaugagauuacca

SEQ ID NO: 1939350 - RNA, 19 nt, Artificial Sequence
  Description of Artificial Sequence: Synthetic oligonucleotide
  Sense strand starting at position 728 of SEQ ID NO: 1879896
uguuuaccucuacaacguu

SEQ ID NO: 1939351 - RNA, 19 nt, Artificial Sequence
  Description of Artificial Sequence: Synthetic oligonucleotide
  Antisense strand to SEQ ID NO: 1939350
aacguuguagagguaaaca

SEQ ID NO: 1939352 - RNA, 19 nt, Artificial Sequence
  Description of Artificial Sequence: Synthetic oligonucleotide
  Sense strand starting at position 865 of SEQ ID NO: 1879896
gcuugagccagggaaauua

SEQ ID NO: 1939353 - RNA, 19 nt, Artificial Sequence
  Description of Artificial Sequence: Synthetic oligonucleotide
  Antisense strand to SEQ ID NO: 1939352
uaauuucccuggcucaagc

SEQ ID NO: 1939354 - RNA, 19 nt, Artificial Sequence
  Description of Artificial Sequence: Synthetic oligonucleotide
  Sense strand starting at position 1228 of SEQ ID NO: 1879896
acgguuuacauguggcaga

SEQ ID NO: 1939355 - RNA, 19 nt, Artificial Sequence
  Description of Artificial Sequence: Synthetic oligonucleotide
  Antisense strand to SEQ ID NO: 1939354
ucugccacauguaaaccgu

SEQ ID NO: 1939356 - RNA, 19 nt, Artificial Sequence
  Description of Artificial Sequence: Synthetic oligonucleotide
  Sense strand starting at position 1293 of SEQ ID NO: 1879896
cgaauucuugcuuaaucaa

SEQ ID NO: 1939357 - RNA, 19 nt, Artificial Sequence
  Description of Artificial Sequence: Synthetic oligonucleotide
  Antisense strand to SEQ ID NO: 1939356
uugauuaagcaagaauucg

SEQ ID NO: 1939358 - RNA, 19 nt, Artificial Sequence
  Description of Artificial Sequence: Synthetic oligonucleotide
  Sense strand starting at position 1401 of SEQ ID NO: 1879896
uaauccgagucucuguauu

SEQ ID NO: 1939359 - RNA, 19 nt, Artificial Sequence
  Description of Artificial Sequence: Synthetic oligonucleotide
  Antisense strand to SEQ ID NO: 1939358
aauacagagacucggauua

SEQ ID NO: 1939360 - RNA, 19 nt, Artificial Sequence
  Description of Artificial Sequence: Synthetic oligonucleotide
  Sense strand starting at position 1407 of SEQ ID NO: 1879896
gagucucuguauuugcaga

SEQ ID NO: 1939361 - RNA, 19 nt, Artificial Sequence
  Description of Artificial Sequence: Synthetic oligonucleotide
  Antisense strand to SEQ ID NO: 1939360
ucugcaaauacagagacuc

SEQ ID NO: 1939362 - RNA, 19 nt, Artificial Sequence
  Description of Artificial Sequence: Synthetic oligonucleotide
  Sense strand starting at position 1433 of SEQ ID NO: 1879896
augugaugcggcucuaguu

SEQ ID NO: 1939363 - RNA, 19 nt, Artificial Sequence
  Description of Artificial Sequence: Synthetic oligonucleotide
  Antisense strand to SEQ ID NO: 1939362
aacuagagccgcaucacau

SEQ ID NO: 1939364 - RNA, 19 nt, Artificial Sequence
  Description of Artificial Sequence: Synthetic oligonucleotide
  Sense strand starting at position 1464 of SEQ ID NO: 1879896
auaucuuccucauugagag

SEQ ID NO: 1939365 - RNA, 19 nt, Artificial Sequence
  Description of Artificial Sequence: Synthetic oligonucleotide
  Antisense strand to SEQ ID NO: 1939364
cucucaaugaggaagauau

SEQ ID NO: 1939366 - RNA, 19 nt, Artificial Sequence
  Description of Artificial Sequence: Synthetic oligonucleotide
  Sense strand starting at position 1520 of SEQ ID NO: 1879896
ggaagugauuaaguaccga

SEQ ID NO: 1939367 - RNA, 19 nt, Artificial Sequence
  Description of Artificial Sequence: Synthetic oligonucleotide
  Antisense strand to SEQ ID NO: 1939366
ucgguacuuaaucacuucc

SEQ ID NO: 1939368 - RNA, 19 nt, Artificial Sequence
  Description of Artificial Sequence: Synthetic oligonucleotide
  Sense strand starting at position 1667 of SEQ ID NO: 1879896
cagaaaucgggcugcucaa

SEQ ID NO: 1939369 - RNA, 19 nt, Artificial Sequence
  Description of Artificial Sequence: Synthetic oligonucleotide
  Antisense strand to SEQ ID NO: 1939368
uugagcagcccgauuucug

SEQ ID NO: 1939370 - RNA, 19 nt, Artificial Sequence
  Description of Artificial Sequence: Synthetic oligonucleotide
  Sense strand starting at position 1842 of SEQ ID NO: 1879896
aggugaccagugugcuuaa

SEQ ID NO: 1939371 - RNA, 19 nt, Artificial Sequence
  Description of Artificial Sequence: Synthetic oligonucleotide
  Antisense strand to SEQ ID NO: 1939370
uuaagcacacuggucaccu

SEQ ID NO: 1939372 - RNA, 19 nt, Artificial Sequence
  Description of Artificial Sequence: Synthetic oligonucleotide
  Sense strand starting at position 2129 of SEQ ID NO: 1879896
accauaugcuugucccaua

SEQ ID NO: 1939373 - RNA, 19 nt, Artificial Sequence
  Description of Artificial Sequence: Synthetic oligonucleotide
  Antisense strand to SEQ ID NO: 1939372
uaugggacaagcauauggu

SEQ ID NO: 1939374 - RNA, 19 nt, Artificial Sequence
  Description of Artificial Sequence: Synthetic oligonucleotide
  Sense strand starting at position 2140 of SEQ ID NO: 1879896
gucccauagucacuccgau

SEQ ID NO: 1939375 - RNA, 19 nt, Artificial Sequence
  Description of Artificial Sequence: Synthetic oligonucleotide
  Antisense strand to SEQ ID NO: 1939374
aucggagugacuaugggac

SEQ ID NO: 1939376 - RNA, 19 nt, Artificial Sequence
  Description of Artificial Sequence: Synthetic oligonucleotide
  Sense strand starting at position 2186 of SEQ ID NO: 1879896
uuaaauaucugaguugcuu

SEQ ID NO: 1939377 - RNA, 19 nt, Artificial Sequence
  Description of Artificial Sequence: Synthetic oligonucleotide
  Antisense strand to SEQ ID NO: 1939376
aagcaacucagauauuuaa

SEQ ID NO: 1939378 - RNA, 19 nt, Artificial Sequence
  Description of Artificial Sequence: Synthetic oligonucleotide
  Sense strand starting at position 2408 of SEQ ID NO: 1879896
aaagauaauucggcgauua

SEQ ID NO: 1939379 - RNA, 19 nt, Artificial Sequence
  Description of Artificial Sequence: Synthetic oligonucleotide
  Antisense strand to SEQ ID NO: 1939378
uaaucgccgaauuaucuuu

SEQ ID NO: 1939380 - RNA, 19 nt, Artificial Sequence
  Description of Artificial Sequence: Synthetic oligonucleotide
  Sense strand starting at position 2409 of SEQ ID NO: 1879896
aagauaauucggcgauuag

SEQ ID NO: 1939381 - RNA, 19 nt, Artificial Sequence
  Description of Artificial Sequence: Synthetic oligonucleotide
  Antisense strand to SEQ ID NO: 1939380
cuaaucgccgaauuaucuu

SEQ ID NO: 1939382 - RNA, 19 nt, Artificial Sequence
  Description of Artificial Sequence: Synthetic oligonucleotide
  Sense strand starting at position 2410 of SEQ ID NO: 1879896
agauaauucggcgauuagg

SEQ ID NO: 1939383 - RNA, 19 nt, Artificial Sequence
  Description of Artificial Sequence: Synthetic oligonucleotide
  Antisense strand to SEQ ID NO: 1939382
ccuaaucgccgaauuaucu

SEQ ID NO: 1939384 - RNA, 19 nt, Artificial Sequence
  Description of Artificial Sequence: Synthetic oligonucleotide
  Sense strand starting at position 2530 of SEQ ID NO: 1879896
agaacugguugagccaaau

SEQ ID NO: 1939385 - RNA, 19 nt, Artificial Sequence
  Description of Artificial Sequence: Synthetic oligonucleotide
  Antisense strand to SEQ ID NO: 1939384
auuuggcucaaccaguucu

SEQ ID NO: 1939386 - RNA, 19 nt, Artificial Sequence
  Description of Artificial Sequence: Synthetic oligonucleotide
  Sense strand starting at position 2548 of SEQ ID NO: 1879896
uuaccaaucugggugguuu

SEQ ID NO: 1939387 - RNA, 19 nt, Artificial Sequence
  Description of Artificial Sequence: Synthetic oligonucleotide
  Antisense strand to SEQ ID NO: 1939386
aaaccacccagauugguaa

SEQ ID NO: 1939388 - RNA, 19 nt, Artificial Sequence
  Description of Artificial Sequence: Synthetic oligonucleotide
  Sense strand starting at position 2603 of SEQ ID NO: 1879896
ucaagaacuuaucuuaggu

SEQ ID NO: 1939389 - RNA, 19 nt, Artificial Sequence
  Description of Artificial Sequence: Synthetic oligonucleotide
  Antisense strand to SEQ ID NO: 1939388
accuaagauaaguucuuga

SEQ ID NO: 1939390 - RNA, 19 nt, Artificial Sequence
  Description of Artificial Sequence: Synthetic oligonucleotide
  Sense strand starting at position 3179 of SEQ ID NO: 1879896
gauggaauccguuaggucu

SEQ ID NO: 1939391 - RNA, 19 nt, Artificial Sequence
  Description of Artificial Sequence: Synthetic oligonucleotide
  Antisense strand to SEQ ID NO: 1939390
agaccuaacggauuccauc

SEQ ID NO: 1939392 - RNA, 19 nt, Artificial Sequence
  Description of Artificial Sequence: Synthetic oligonucleotide
  Sense strand starting at position 3185 of SEQ ID NO: 1879896
auccguuaggucugauuuc

SEQ ID NO: 1939393 - RNA, 19 nt, Artificial Sequence
  Description of Artificial Sequence: Synthetic oligonucleotide
  Antisense strand to SEQ ID NO: 1939392
gaaaucagaccuaacggau

SEQ ID NO: 1939394 - RNA, 19 nt, Artificial Sequence
  Description of Artificial Sequence: Synthetic oligonucleotide
  Sense strand starting at position 3406 of SEQ ID NO: 1879896
uacagugagcggugauaau

SEQ ID NO: 1939395 - RNA, 19 nt, Artificial Sequence
  Description of Artificial Sequence: Synthetic oligonucleotide
  Antisense strand to SEQ ID NO: 1939394
auuaucaccgcucacugua

SEQ ID NO: 1939396 - RNA, 19 nt, Artificial Sequence
  Description of Artificial Sequence: Synthetic oligonucleotide
  Sense strand starting at position 3512 of SEQ ID NO: 1879896
aucugaaauggcuguuaau

SEQ ID NO: 1939397 - RNA, 19 nt, Artificial Sequence
  Description of Artificial Sequence: Synthetic oligonucleotide
  Antisense strand to SEQ ID NO: 1939396
auuaacagccauuucagau

SEQ ID NO: 1939398 - RNA, 19 nt, Artificial Sequence
  Description of Artificial Sequence: Synthetic oligonucleotide
  Sense strand starting at position 3519 of SEQ ID NO: 1879896
auggcuguuaauuaguaga

SEQ ID NO: 1939399 - RNA, 19 nt, Artificial Sequence
  Description of Artificial Sequence: Synthetic oligonucleotide
  Antisense strand to SEQ ID NO: 1939398
ucuacuaauuaacagccau

SEQ ID NO: 1939400 - RNA, 19 nt, Artificial Sequence
  Description of Artificial Sequence: Synthetic oligonucleotide
  Sense strand starting at position 3521 of SEQ ID NO: 1879896
ggcuguuaauuaguagagu

SEQ ID NO: 1939401 - RNA, 19 nt, Artificial Sequence
  Description of Artificial Sequence: Synthetic oligonucleotide
  Antisense strand to SEQ ID NO: 1939400
acucuacuaauuaacagcc

SEQ ID NO: 1939402 - RNA, 19 nt, Artificial Sequence
  Description of Artificial Sequence: Synthetic oligonucleotide
  Sense strand starting at position 3540 of SEQ ID NO: 1879896
gccugcuuacacguaguaa

SEQ ID NO: 1939403 - RNA, 19 nt, Artificial Sequence
  Description of Artificial Sequence: Synthetic oligonucleotide
  Antisense strand to SEQ ID NO: 1939402
uuacuacguguaagcaggc

SEQ ID NO: 1939404 - RNA, 19 nt, Artificial Sequence
  Description of Artificial Sequence: Synthetic oligonucleotide
  Sense strand starting at position 3541 of SEQ ID NO: 1879896
ccugcuuacacguaguaag

SEQ ID NO: 1939405 - RNA, 19 nt, Artificial Sequence
  Description of Artificial Sequence: Synthetic oligonucleotide
  Antisense strand to SEQ ID NO: 1939404
cuuacuacguguaagcagg

SEQ ID NO: 1939406 - RNA, 19 nt, Artificial Sequence
  Description of Artificial Sequence: Synthetic oligonucleotide
  Sense strand starting at position 3611 of SEQ ID NO: 1879896
uccuguuugccuuaucuau

SEQ ID NO: 1939407 - RNA, 19 nt, Artificial Sequence
  Description of Artificial Sequence: Synthetic oligonucleotide
  Antisense strand to SEQ ID NO: 1939406
auagauaaggcaaacagga

SEQ ID NO: 1939408 - RNA, 19 nt, Artificial Sequence
  Description of Artificial Sequence: Synthetic oligonucleotide
  Sense strand starting at position 3708 of SEQ ID NO: 1879896
acaaacacuucuucggaga

SEQ ID NO: 1939409 - RNA, 19 nt, Artificial Sequence
  Description of Artificial Sequence: Synthetic oligonucleotide
  Antisense strand to SEQ ID NO: 1939408
ucuccgaagaaguguuugu

SEQ ID NO: 1939410 - RNA, 19 nt, Artificial Sequence
  Description of Artificial Sequence: Synthetic oligonucleotide
  Sense strand starting at position 3716 of SEQ ID NO: 1879896
uucuucggagagugcuaau

SEQ ID NO: 1939411 - RNA, 19 nt, Artificial Sequence
  Description of Artificial Sequence: Synthetic oligonucleotide
  Antisense strand to SEQ ID NO: 1939410
auuagcacucuccgaagaa

SEQ ID NO: 1939412 - RNA, 19 nt, Artificial Sequence
  Description of Artificial Sequence: Synthetic oligonucleotide
  Sense strand starting at position 3838 of SEQ ID NO: 1879896
guuggauugcugcacccau

SEQ ID NO: 1939413 - RNA, 19 nt, Artificial Sequence
  Description of Artificial Sequence: Synthetic oligonucleotide
  Antisense strand to SEQ ID NO: 1939412
augggugcagcaauccaac

SEQ ID NO: 1939414 - RNA, 19 nt, Artificial Sequence
  Description of Artificial Sequence: Synthetic oligonucleotide
  Sense strand starting at position 173 of SEQ ID NO: 1879897
uaagauaauugcuugggua

SEQ ID NO: 1939415 - RNA, 19 nt, Artificial Sequence
  Description of Artificial Sequence: Synthetic oligonucleotide
  Antisense strand to SEQ ID NO: 1939414
uacccaagcaauuaucuua

SEQ ID NO: 1939416 - RNA, 19 nt, Artificial Sequence
  Description of Artificial Sequence: Synthetic oligonucleotide
  Sense strand starting at position 174 of SEQ ID NO: 1879897
aagauaauugcuuggguaa

SEQ ID NO: 1939417 - RNA, 19 nt, Artificial Sequence
  Description of Artificial Sequence: Synthetic oligonucleotide
  Antisense strand to SEQ ID NO: 1939416
uuacccaagcaauuaucuu

SEQ ID NO: 1939418 - RNA, 19 nt, Artificial Sequence
  Description of Artificial Sequence: Synthetic oligonucleotide
  Sense strand starting at position 262 of SEQ ID NO: 1879897
ugucuaacuuauguuacca

SEQ ID NO: 1939419 - RNA, 19 nt, Artificial Sequence
  Description of Artificial Sequence: Synthetic oligonucleotide
  Antisense strand to SEQ ID NO: 1939418
ugguaacauaaguuagaca

SEQ ID NO: 1939420 - RNA, 19 nt, Artificial Sequence
  Description of Artificial Sequence: Synthetic oligonucleotide
  Sense strand starting at position 382 of SEQ ID NO: 1879897
uguuuacacguggaagacu

SEQ ID NO: 1939421 - RNA, 19 nt, Artificial Sequence
  Description of Artificial Sequence: Synthetic oligonucleotide
  Antisense strand to SEQ ID NO: 1939420
agucuuccacguguaaaca

SEQ ID NO: 1939422 - RNA, 19 nt, Artificial Sequence
  Description of Artificial Sequence: Synthetic oligonucleotide
  Sense strand starting at position 540 of SEQ ID NO: 1879897
aguaauauccauugaguca

SEQ ID NO: 1939423 - RNA, 19 nt, Artificial Sequence
  Description of Artificial Sequence: Synthetic oligonucleotide
  Antisense strand to SEQ ID NO: 1939422
ugacucaauggauauuacu

SEQ ID NO: 1939424 - RNA, 19 nt, Artificial Sequence
  Description of Artificial Sequence: Synthetic oligonucleotide
  Sense strand starting at position 547 of SEQ ID NO: 1879897
uccauugagucauugugga

SEQ ID NO: 1939425 - RNA, 19 nt, Artificial Sequence
  Description of Artificial Sequence: Synthetic oligonucleotide
  Antisense strand to SEQ ID NO: 1939424
uccacaaugacucaaugga

SEQ ID NO: 1939426 - RNA, 19 nt, Artificial Sequence
  Description of Artificial Sequence: Synthetic oligonucleotide
  Sense strand starting at position 552 of SEQ ID NO: 1879897
ugagucauuguggaacuau

SEQ ID NO: 1939427 - RNA, 19 nt, Artificial Sequence
  Description of Artificial Sequence: Synthetic oligonucleotide
  Antisense strand to SEQ ID NO: 1939426
auaguuccacaaugacuca

SEQ ID NO: 1939428 - RNA, 19 nt, Artificial Sequence
  Description of Artificial Sequence: Synthetic oligonucleotide
  Sense strand starting at position 871 of SEQ ID NO: 1879897
agcaacauguaauuaugaa

SEQ ID NO: 1939429 - RNA, 19 nt, Artificial Sequence
  Description of Artificial Sequence: Synthetic oligonucleotide
  Antisense strand to SEQ ID NO: 1939428
uucauaauuacauguugcu

SEQ ID NO: 1939430 - RNA, 19 nt, Artificial Sequence
  Description of Artificial Sequence: Synthetic oligonucleotide
  Sense strand starting at position 934 of SEQ ID NO: 1879897
ggagaucuacuauguccaa

SEQ ID NO: 1939431 - RNA, 19 nt, Artificial Sequence
  Description of Artificial Sequence: Synthetic oligonucleotide
  Antisense strand to SEQ ID NO: 1939430
uuggacauaguagaucucc

SEQ ID NO: 1939432 - RNA, 19 nt, Artificial Sequence
  Description of Artificial Sequence: Synthetic oligonucleotide
  Sense strand starting at position 996 of SEQ ID NO: 1879897
guuaacuugucaguaauuu

SEQ ID NO: 1939433 - RNA, 19 nt, Artificial Sequence
  Description of Artificial Sequence: Synthetic oligonucleotide
  Antisense strand to SEQ ID NO: 1939432
aaauuacugacaaguuaac

SEQ ID NO: 1939434 - RNA, 19 nt, Artificial Sequence
  Description of Artificial Sequence: Synthetic oligonucleotide
  Sense strand starting at position 1170 of SEQ ID NO: 1879897
agagaaacauguuugguua

SEQ ID NO: 1939435 - RNA, 19 nt, Artificial Sequence
  Description of Artificial Sequence: Synthetic oligonucleotide
  Antisense strand to SEQ ID NO: 1939434
uaaccaaacauguuucucu

SEQ ID NO: 1939436 - RNA, 19 nt, Artificial Sequence
  Description of Artificial Sequence: Synthetic oligonucleotide
  Sense strand starting at position 1171 of SEQ ID NO: 1879897
gagaaacauguuugguuaa

SEQ ID NO: 1939437 - RNA, 19 nt, Artificial Sequence
  Description of Artificial Sequence: Synthetic oligonucleotide
  Antisense strand to SEQ ID NO: 1939436
uuaaccaaacauguuucuc

SEQ ID NO: 1939438 - RNA, 19 nt, Artificial Sequence
  Description of Artificial Sequence: Synthetic oligonucleotide
  Sense strand starting at position 1173 of SEQ ID NO: 1879897
gaaacauguuugguuaaua

SEQ ID NO: 1939439 - RNA, 19 nt, Artificial Sequence
  Description of Artificial Sequence: Synthetic oligonucleotide
  Antisense strand to SEQ ID NO: 1939438
uauuaaccaaacauguuuc

SEQ ID NO: 1939440 - RNA, 19 nt, Artificial Sequence
  Description of Artificial Sequence: Synthetic oligonucleotide
  Sense strand starting at position 1184 of SEQ ID NO: 1879897
gguuaauacugggcuuuga

SEQ ID NO: 1939441 - RNA, 19 nt, Artificial Sequence
  Description of Artificial Sequence: Synthetic oligonucleotide
  Antisense strand to SEQ ID NO: 1939440
ucaaagcccaguauuaacc

SEQ ID NO: 1939442 - RNA, 19 nt, Artificial Sequence
  Description of Artificial Sequence: Synthetic oligonucleotide
  Sense strand starting at position 1188 of SEQ ID NO: 1879897
aauacugggcuuugaguau

SEQ ID NO: 1939443 - RNA, 19 nt, Artificial Sequence
  Description of Artificial Sequence: Synthetic oligonucleotide
  Antisense strand to SEQ ID NO: 1939442
auacucaaagcccaguauu

SEQ ID NO: 1939444 - RNA, 19 nt, Artificial Sequence
  Description of Artificial Sequence: Synthetic oligonucleotide
  Sense strand starting at position 1388 of SEQ ID NO: 1879897
gugacuguaagauaaagca

SEQ ID NO: 1939445 - RNA, 19 nt, Artificial Sequence
  Description of Artificial Sequence: Synthetic oligonucleotide
  Antisense strand to SEQ ID NO: 1939444
ugcuuuaucuuacagucac

SEQ ID NO: 1939446 - RNA, 19 nt, Artificial Sequence
  Description of Artificial Sequence: Synthetic oligonucleotide
  Sense strand starting at position 1414 of SEQ ID NO: 1879897
cgaucucuuuguccaauaa

SEQ ID NO: 1939447 - RNA, 19 nt, Artificial Sequence
  Description of Artificial Sequence: Synthetic oligonucleotide
  Antisense strand to SEQ ID NO: 1939446
uuauuggacaaagagaucg

SEQ ID NO: 1939448 - RNA, 19 nt, Artificial Sequence
  Description of Artificial Sequence: Synthetic oligonucleotide
  Sense strand starting at position 1433 of SEQ ID NO: 1879897
gaaagaaacguuggcccau

SEQ ID NO: 1939449 - RNA, 19 nt, Artificial Sequence
  Description of Artificial Sequence: Synthetic oligonucleotide
  Antisense strand to SEQ ID NO: 1939448
augggccaacguuucuuuc

SEQ ID NO: 1939450 - RNA, 19 nt, Artificial Sequence
  Description of Artificial Sequence: Synthetic oligonucleotide
  Sense strand starting at position 1434 of SEQ ID NO: 1879897
aaagaaacguuggcccaua

SEQ ID NO: 1939451 - RNA, 19 nt, Artificial Sequence
  Description of Artificial Sequence: Synthetic oligonucleotide
  Antisense strand to SEQ ID NO: 1939450
uaugggccaacguuucuuu

SEQ ID NO: 1939452 - RNA, 19 nt, Artificial Sequence
  Description of Artificial Sequence: Synthetic oligonucleotide
  Sense strand starting at position 1435 of SEQ ID NO: 1879897
aagaaacguuggcccauaa

SEQ ID NO: 1939453 - RNA, 19 nt, Artificial Sequence
  Description of Artificial Sequence: Synthetic oligonucleotide
  Antisense strand to SEQ ID NO: 1939452
uuaugggccaacguuucuu

SEQ ID NO: 1939454 - RNA, 19 nt, Artificial Sequence
  Description of Artificial Sequence: Synthetic oligonucleotide
  Sense strand starting at position 1439 of SEQ ID NO: 1879897
aacguuggcccauaaagaa

SEQ ID NO: 1939455 - RNA, 19 nt, Artificial Sequence
  Description of Artificial Sequence: Synthetic oligonucleotide
  Antisense strand to SEQ ID NO: 1939454
uucuuuaugggccaacguu

SEQ ID NO: 1939456 - RNA, 19 nt, Artificial Sequence
  Description of Artificial Sequence: Synthetic oligonucleotide
  Sense strand starting at position 1700 of SEQ ID NO: 1879897
uucguuacucgagugcaca

SEQ ID NO: 1939457 - RNA, 19 nt, Artificial Sequence
  Description of Artificial Sequence: Synthetic oligonucleotide
  Antisense strand to SEQ ID NO: 1939456
ugugcacucgaguaacgaa

SEQ ID NO: 1939458 - RNA, 19 nt, Artificial Sequence
  Description of Artificial Sequence: Synthetic oligonucleotide
  Sense strand starting at position 2877 of SEQ ID NO: 1879897
agggaugucacucaguaug

SEQ ID NO: 1939459 - RNA, 19 nt, Artificial Sequence
  Description of Artificial Sequence: Synthetic oligonucleotide
  Antisense strand to SEQ ID NO: 1939458
cauacugagugacaucccu

SEQ ID NO: 1939460 - RNA, 19 nt, Artificial Sequence
  Description of Artificial Sequence: Synthetic oligonucleotide
  Sense strand starting at position 2942 of SEQ ID NO: 1879897
ugggcuauccaagacguaa

SEQ ID NO: 1939461 - RNA, 19 nt, Artificial Sequence
  Description of Artificial Sequence: Synthetic oligonucleotide
  Antisense strand to SEQ ID NO: 1939460
uuacgucuuggauagccca

SEQ ID NO: 1939462 - RNA, 19 nt, Artificial Sequence
  Description of Artificial Sequence: Synthetic oligonucleotide
  Sense strand starting at position 3061 of SEQ ID NO: 1879897
uuuauuguugaaugaggca

SEQ ID NO: 1939463 - RNA, 19 nt, Artificial Sequence
  Description of Artificial Sequence: Synthetic oligonucleotide
  Antisense strand to SEQ ID NO: 1939462
ugccucauucaacaauaaa

SEQ ID NO: 1939464 - RNA, 19 nt, Artificial Sequence
  Description of Artificial Sequence: Synthetic oligonucleotide
  Sense strand starting at position 3224 of SEQ ID NO: 1879897
ggguguggauuguuucaga

SEQ ID NO: 1939465 - RNA, 19 nt, Artificial Sequence
  Description of Artificial Sequence: Synthetic oligonucleotide
  Antisense strand to SEQ ID NO: 1939464
ucugaaacaauccacaccc

SEQ ID NO: 1939466 - RNA, 19 nt, Artificial Sequence
  Description of Artificial Sequence: Synthetic oligonucleotide
  Sense strand starting at position 3443 of SEQ ID NO: 1879897
gauuuauagccuggcauuc

SEQ ID NO: 1939467 - RNA, 19 nt, Artificial Sequence
  Description of Artificial Sequence: Synthetic oligonucleotide
  Antisense strand to SEQ ID NO: 1939466
gaaugccaggcuauaaauc

SEQ ID NO: 1939468 - RNA, 19 nt, Artificial Sequence
  Description of Artificial Sequence: Synthetic oligonucleotide
  Sense strand starting at position 3550 of SEQ ID NO: 1879897
cugaguauaagauggcaaa

SEQ ID NO: 1939469 - RNA, 19 nt, Artificial Sequence
  Description of Artificial Sequence: Synthetic oligonucleotide
  Antisense strand to SEQ ID NO: 1939468
uuugccaucuuauacucag

SEQ ID NO: 1939470 - RNA, 19 nt, Artificial Sequence
  Description of Artificial Sequence: Synthetic oligonucleotide
  Sense strand starting at position 3551 of SEQ ID NO: 1879897
ugaguauaagauggcaaau

SEQ ID NO: 1939471 - RNA, 19 nt, Artificial Sequence
  Description of Artificial Sequence: Synthetic oligonucleotide
  Antisense strand to SEQ ID NO: 1939470
auuugccaucuuauacuca

SEQ ID NO: 1939472 - RNA, 19 nt, Artificial Sequence
  Description of Artificial Sequence: Synthetic oligonucleotide
  Sense strand starting at position 3553 of SEQ ID NO: 1879897
aguauaagauggcaaauuu

SEQ ID NO: 1939473 - RNA, 19 nt, Artificial Sequence
  Description of Artificial Sequence: Synthetic oligonucleotide
  Antisense strand to SEQ ID NO: 1939472
aaauuugccaucuuauacu

SEQ ID NO: 1939474 - RNA, 19 nt, Artificial Sequence
  Description of Artificial Sequence: Synthetic oligonucleotide
  Sense strand starting at position 3623 of SEQ ID NO: 1879897
caucuaagccuguagugau

SEQ ID NO: 1939475 - RNA, 19 nt, Artificial Sequence
  Description of Artificial Sequence: Synthetic oligonucleotide
  Antisense strand to SEQ ID NO: 1939474
aucacuacaggcuuagaug

SEQ ID NO: 1939476 - RNA, 19 nt, Artificial Sequence
  Description of Artificial Sequence: Synthetic oligonucleotide
  Sense strand starting at position 3630 of SEQ ID NO: 1879897
gccuguagugaucaaguac

SEQ ID NO: 1939477 - RNA, 19 nt, Artificial Sequence
  Description of Artificial Sequence: Synthetic oligonucleotide
  Antisense strand to SEQ ID NO: 1939476
guacuugaucacuacaggc

SEQ ID NO: 1939478 - RNA, 19 nt, Artificial Sequence
  Description of Artificial Sequence: Synthetic oligonucleotide
  Sense strand starting at position 3678 of SEQ ID NO: 1879897
caggguauaugcuuacuau

SEQ ID NO: 1939479 - RNA, 19 nt, Artificial Sequence
  Description of Artificial Sequence: Synthetic oligonucleotide
  Antisense strand to SEQ ID NO: 1939478
auaguaagcauauacccug

SEQ ID NO: 1939480 - RNA, 19 nt, Artificial Sequence
  Description of Artificial Sequence: Synthetic oligonucleotide
  Sense strand starting at position 3679 of SEQ ID NO: 1879897
aggguauaugcuuacuauu

SEQ ID NO: 1939481 - RNA, 19 nt, Artificial Sequence
  Description of Artificial Sequence: Synthetic oligonucleotide
  Antisense strand to SEQ ID NO: 1939480
aauaguaagcauauacccu

SEQ ID NO: 1939482 - RNA, 19 nt, Artificial Sequence
  Description of Artificial Sequence: Synthetic oligonucleotide
  Sense strand starting at position 3703 of SEQ ID NO: 1879897
gugaccaagacuuagguuu

SEQ ID NO: 1939483 - RNA, 19 nt, Artificial Sequence
  Description of Artificial Sequence: Synthetic oligonucleotide
  Antisense strand to SEQ ID NO: 1939482
aaaccuaagucuuggucac

SEQ ID NO: 1939484 - RNA, 19 nt, Artificial Sequence
  Description of Artificial Sequence: Synthetic oligonucleotide
  Sense strand starting at position 3748 of SEQ ID NO: 1879897
agacuuaauguccaucgca

SEQ ID NO: 1939485 - RNA, 19 nt, Artificial Sequence
  Description of Artificial Sequence: Synthetic oligonucleotide
  Antisense strand to SEQ ID NO: 1939484
ugcgauggacauuaagucu

SEQ ID NO: 1939486 - RNA, 19 nt, Artificial Sequence
  Description of Artificial Sequence: Synthetic oligonucleotide
  Sense strand starting at position 3819 of SEQ ID NO: 1879897
acuaaauggcuaugggauu

SEQ ID NO: 1939487 - RNA, 19 nt, Artificial Sequence
  Description of Artificial Sequence: Synthetic oligonucleotide
  Antisense strand to SEQ ID NO: 1939486
aaucccauagccauuuagu

SEQ ID NO: 1939488 - RNA, 19 nt, Artificial Sequence
  Description of Artificial Sequence: Synthetic oligonucleotide
  Sense strand starting at position 3878 of SEQ ID NO: 1879897
ucuguaaagugaguggauu

SEQ ID NO: 1939489 - RNA, 19 nt, Artificial Sequence
  Description of Artificial Sequence: Synthetic oligonucleotide
  Antisense strand to SEQ ID NO: 1939488
aauccacucacuuuacaga

SEQ ID NO: 1939490 - RNA, 19 nt, Artificial Sequence
  Description of Artificial Sequence: Synthetic oligonucleotide
  Sense strand starting at position 3884 of SEQ ID NO: 1879897
aagugaguggauuggauua

SEQ ID NO: 1939491 - RNA, 19 nt, Artificial Sequence
  Description of Artificial Sequence: Synthetic oligonucleotide
  Antisense strand to SEQ ID NO: 1939490
uaauccaauccacucacuu

SEQ ID NO: 1939492 - RNA, 19 nt, Artificial Sequence
  Description of Artificial Sequence: Synthetic oligonucleotide
  Sense strand starting at position 3972 of SEQ ID NO: 1879897
uguguaccacuuuguauuu

SEQ ID NO: 1939493 - RNA, 19 nt, Artificial Sequence
  Description of Artificial Sequence: Synthetic oligonucleotide
  Antisense strand to SEQ ID NO: 1939492
aaauacaaagugguacaca

SEQ ID NO: 1939494 - RNA, 19 nt, Artificial Sequence
  Description of Artificial Sequence: Synthetic oligonucleotide
  Sense strand starting at position 153 of SEQ ID NO: 1879898
gugugauggcgcgcccaua

SEQ ID NO: 1939495 - RNA, 19 nt, Artificial Sequence
  Description of Artificial Sequence: Synthetic oligonucleotide
  Antisense strand to SEQ ID NO: 1939494
uaugggcgcgccaucacac

SEQ ID NO: 1939496 - RNA, 19 nt, Artificial Sequence
  Description of Artificial Sequence: Synthetic oligonucleotide
  Sense strand starting at position 1191 of SEQ ID NO: 1879898
caaguauaggaauguuaau

SEQ ID NO: 1939497 - RNA, 19 nt, Artificial Sequence
  Description of Artificial Sequence: Synthetic oligonucleotide
  Antisense strand to SEQ ID NO: 1939496
auuaacauuccuauacuug

SEQ ID NO: 1939498 - RNA, 19 nt, Artificial Sequence
  Description of Artificial Sequence: Synthetic oligonucleotide
  Sense strand starting at position 1486 of SEQ ID NO: 1879898
cucucacugguauguaaga

SEQ ID NO: 1939499 - RNA, 19 nt, Artificial Sequence
  Description of Artificial Sequence: Synthetic oligonucleotide
  Antisense strand to SEQ ID NO: 1939498
ucuuacauaccagugagag

SEQ ID NO: 1939500 - RNA, 19 nt, Artificial Sequence
  Description of Artificial Sequence: Synthetic oligonucleotide
  Sense strand starting at position 1488 of SEQ ID NO: 1879898
cucacugguauguaagagu

SEQ ID NO: 1939501 - RNA, 19 nt, Artificial Sequence
  Description of Artificial Sequence: Synthetic oligonucleotide
  Antisense strand to SEQ ID NO: 1939500
acucuuacauaccagugag

SEQ ID NO: 1939502 - RNA, 19 nt, Artificial Sequence
  Description of Artificial Sequence: Synthetic oligonucleotide
  Sense strand starting at position 1502 of SEQ ID NO: 1879898
agagucaugaaagguuacu

SEQ ID NO: 1939503 - RNA, 19 nt, Artificial Sequence
  Description of Artificial Sequence: Synthetic oligonucleotide
  Antisense strand to SEQ ID NO: 1939502
aguaaccuuucaugacucu

SEQ ID NO: 1939504 - RNA, 19 nt, Artificial Sequence
  Description of Artificial Sequence: Synthetic oligonucleotide
  Sense strand starting at position 1570 of SEQ ID NO: 1879898
guaagaagauugcuuugua

SEQ ID NO: 1939505 - RNA, 19 nt, Artificial Sequence
  Description of Artificial Sequence: Synthetic oligonucleotide
  Antisense strand to SEQ ID NO: 1939504
uacaaagcaaucuucuuac

SEQ ID NO: 1939506 - RNA, 19 nt, Artificial Sequence
  Description of Artificial Sequence: Synthetic oligonucleotide
  Sense strand starting at position 1571 of SEQ ID NO: 1879898
uaagaagauugcuuuguau

SEQ ID NO: 1939507 - RNA, 19 nt, Artificial Sequence
  Description of Artificial Sequence: Synthetic oligonucleotide
  Antisense strand to SEQ ID NO: 1939506
auacaaagcaaucuucuua

SEQ ID NO: 1939508 - RNA, 19 nt, Artificial Sequence
  Description of Artificial Sequence: Synthetic oligonucleotide
  Sense strand starting at position 1593 of SEQ ID NO: 1879898
agugguucuaacgagcuau

SEQ ID NO: 1939509 - RNA, 19 nt, Artificial Sequence
  Description of Artificial Sequence: Synthetic oligonucleotide
  Antisense strand to SEQ ID NO: 1939508
auagcucguuagaaccacu

SEQ ID NO: 1939510 - RNA, 19 nt, Artificial Sequence
  Description of Artificial Sequence: Synthetic oligonucleotide
  Sense strand starting at position 1604 of SEQ ID NO: 1879898
cgagcuauucgggaagaaa

SEQ ID NO: 1939511 - RNA, 19 nt, Artificial Sequence
  Description of Artificial Sequence: Synthetic oligonucleotide
  Antisense strand to SEQ ID NO: 1939510
uuucuucccgaauagcucg

SEQ ID NO: 1939512 - RNA, 19 nt, Artificial Sequence
  Description of Artificial Sequence: Synthetic oligonucleotide
  Sense strand starting at position 1617 of SEQ ID NO: 1879898
aagaaagcccagugacuua

SEQ ID NO: 1939513 - RNA, 19 nt, Artificial Sequence
  Description of Artificial Sequence: Synthetic oligonucleotide
  Antisense strand to SEQ ID NO: 1939512
uaagucacugggcuuucuu

SEQ ID NO: 1939514 - RNA, 19 nt, Artificial Sequence
  Description of Artificial Sequence: Synthetic oligonucleotide
  Sense strand starting at position 1721 of SEQ ID NO: 1879898
augguguucgccgcgaaau

SEQ ID NO: 1939515 - RNA, 19 nt, Artificial Sequence
  Description of Artificial Sequence: Synthetic oligonucleotide
  Antisense strand to SEQ ID NO: 1939514
auuucgcggcgaacaccau

SEQ ID NO: 1939516 - RNA, 19 nt, Artificial Sequence
  Description of Artificial Sequence: Synthetic oligonucleotide
  Sense strand starting at position 1724 of SEQ ID NO: 1879898
guguucgccgcgaaauaag

SEQ ID NO: 1939517 - RNA, 19 nt, Artificial Sequence
  Description of Artificial Sequence: Synthetic oligonucleotide
  Antisense strand to SEQ ID NO: 1939516
cuuauuucgcggcgaacac

SEQ ID NO: 1939518 - RNA, 19 nt, Artificial Sequence
  Description of Artificial Sequence: Synthetic oligonucleotide
  Sense strand starting at position 1965 of SEQ ID NO: 1879898
ggccauucuuacuccaaag

SEQ ID NO: 1939519 - RNA, 19 nt, Artificial Sequence
  Description of Artificial Sequence: Synthetic oligonucleotide
  Antisense strand to SEQ ID NO: 1939518
cuuuggaguaagaauggcc

SEQ ID NO: 1939520 - RNA, 19 nt, Artificial Sequence
  Description of Artificial Sequence: Synthetic oligonucleotide
  Sense strand starting at position 2135 of SEQ ID NO: 1879898
ugguccucgccguuucaga

SEQ ID NO: 1939521 - RNA, 19 nt, Artificial Sequence
  Description of Artificial Sequence: Synthetic oligonucleotide
  Antisense strand to SEQ ID NO: 1939520
ucugaaacggcgaggacca

SEQ ID NO: 1939522 - RNA, 19 nt, Artificial Sequence
  Description of Artificial Sequence: Synthetic oligonucleotide
  Sense strand starting at position 2136 of SEQ ID NO: 1879898
gguccucgccguuucagaa

SEQ ID NO: 1939523 - RNA, 19 nt, Artificial Sequence
  Description of Artificial Sequence: Synthetic oligonucleotide
  Antisense strand to SEQ ID NO: 1939522
uucugaaacggcgaggacc

SEQ ID NO: 1939524 - RNA, 19 nt, Artificial Sequence
  Description of Artificial Sequence: Synthetic oligonucleotide
  Sense strand starting at position 2137 of SEQ ID NO: 1879898
guccucgccguuucagaaa

SEQ ID NO: 1939525 - RNA, 19 nt, Artificial Sequence
  Description of Artificial Sequence: Synthetic oligonucleotide
  Antisense strand to SEQ ID NO: 1939524
uuucugaaacggcgaggac

SEQ ID NO: 1939526 - RNA, 19 nt, Artificial Sequence
  Description of Artificial Sequence: Synthetic oligonucleotide
  Sense strand starting at position 2178 of SEQ ID NO: 1879898
acgucuucugggagugguu

SEQ ID NO: 1939527 - RNA, 19 nt, Artificial Sequence
  Description of Artificial Sequence: Synthetic oligonucleotide
  Antisense strand to SEQ ID NO: 1939526
aaccacucccagaagacgu

SEQ ID NO: 1939528 - RNA, 19 nt, Artificial Sequence
  Description of Artificial Sequence: Synthetic oligonucleotide
  Sense strand starting at position 2181 of SEQ ID NO: 1879898
ucuucugggagugguugaa

SEQ ID NO: 1939529 - RNA, 19 nt, Artificial Sequence
  Description of Artificial Sequence: Synthetic oligonucleotide
  Antisense strand to SEQ ID NO: 1939528
uucaaccacucccagaaga

SEQ ID NO: 1939530 - RNA, 19 nt, Artificial Sequence
  Description of Artificial Sequence: Synthetic oligonucleotide
  Sense strand starting at position 2265 of SEQ ID NO: 1879898
guagaauacugacuuguug

SEQ ID NO: 1939531 - RNA, 19 nt, Artificial Sequence
  Description of Artificial Sequence: Synthetic oligonucleotide
  Antisense strand to SEQ ID NO: 1939530
caacaagucaguauucuac

SEQ ID NO: 1939532 - RNA, 19 nt, Artificial Sequence
  Description of Artificial Sequence: Synthetic oligonucleotide
  Sense strand starting at position 2293 of SEQ ID NO: 1879898
gagggagguuuggcaagaa

SEQ ID NO: 1939533 - RNA, 19 nt, Artificial Sequence
  Description of Artificial Sequence: Synthetic oligonucleotide
  Antisense strand to SEQ ID NO: 1939532
uucuugccaaaccucccuc

SEQ ID NO: 1939534 - RNA, 19 nt, Artificial Sequence
  Description of Artificial Sequence: Synthetic oligonucleotide
  Sense strand starting at position 2347 of SEQ ID NO: 1879898
auuugcuaaucgcugugaa

SEQ ID NO: 1939535 - RNA, 19 nt, Artificial Sequence
  Description of Artificial Sequence: Synthetic oligonucleotide
  Antisense strand to SEQ ID NO: 1939534
uucacagcgauuagcaaau

SEQ ID NO: 1939536 - RNA, 19 nt, Artificial Sequence
  Description of Artificial Sequence: Synthetic oligonucleotide
  Sense strand starting at position 2392 of SEQ ID NO: 1879898
ucuugcaacuugucugaaa

SEQ ID NO: 1939537 - RNA, 19 nt, Artificial Sequence
  Description of Artificial Sequence: Synthetic oligonucleotide
  Antisense strand to SEQ ID NO: 1939536
uuucagacaaguugcaaga

SEQ ID NO: 1939538 - RNA, 19 nt, Artificial Sequence
  Description of Artificial Sequence: Synthetic oligonucleotide
  Sense strand starting at position 2393 of SEQ ID NO: 1879898
cuugcaacuugucugaaac

SEQ ID NO: 1939539 - RNA, 19 nt, Artificial Sequence
  Description of Artificial Sequence: Synthetic oligonucleotide
  Antisense strand to SEQ ID NO: 1939538
guuucagacaaguugcaag

SEQ ID NO: 1939540 - RNA, 19 nt, Artificial Sequence
  Description of Artificial Sequence: Synthetic oligonucleotide
  Sense strand starting at position 2394 of SEQ ID NO: 1879898
uugcaacuugucugaaaca

SEQ ID NO: 1939541 - RNA, 19 nt, Artificial Sequence
  Description of Artificial Sequence: Synthetic oligonucleotide
  Antisense strand to SEQ ID NO: 1939540
uguuucagacaaguugcaa

SEQ ID NO: 1939542 - RNA, 19 nt, Artificial Sequence
  Description of Artificial Sequence: Synthetic oligonucleotide
  Sense strand starting at position 2448 of SEQ ID NO: 1879898
gagucacgucaacauacaa

SEQ ID NO: 1939543 - RNA, 19 nt, Artificial Sequence
  Description of Artificial Sequence: Synthetic oligonucleotide
  Antisense strand to SEQ ID NO: 1939542
uuguauguugacgugacuc

SEQ ID NO: 1939544 - RNA, 19 nt, Artificial Sequence
  Description of Artificial Sequence: Synthetic oligonucleotide
  Sense strand starting at position 2489 of SEQ ID NO: 1879898
cugcuauucuaccuggaaa

SEQ ID NO: 1939545 - RNA, 19 nt, Artificial Sequence
  Description of Artificial Sequence: Synthetic oligonucleotide
  Antisense strand to SEQ ID NO: 1939544
uuuccagguagaauagcag

SEQ ID NO: 1939546 - RNA, 19 nt, Artificial Sequence
  Description of Artificial Sequence: Synthetic oligonucleotide
  Sense strand starting at position 2549 of SEQ ID NO: 1879898
cccgucuucccagacucau

SEQ ID NO: 1939547 - RNA, 19 nt, Artificial Sequence
  Description of Artificial Sequence: Synthetic oligonucleotide
  Antisense strand to SEQ ID NO: 1939546
augagucugggaagacggg

SEQ ID NO: 1939548 - RNA, 19 nt, Artificial Sequence
  Description of Artificial Sequence: Synthetic oligonucleotide
  Sense strand starting at position 2781 of SEQ ID NO: 1879898
ggaggauugcgugaggacu

SEQ ID NO: 1939549 - RNA, 19 nt, Artificial Sequence
  Description of Artificial Sequence: Synthetic oligonucleotide
  Antisense strand to SEQ ID NO: 1939548
aguccucacgcaauccucc

SEQ ID NO: 1939550 - RNA, 19 nt, Artificial Sequence
  Description of Artificial Sequence: Synthetic oligonucleotide
  Sense strand starting at position 2820 of SEQ ID NO: 1879898
ucgaucuagcgagacuuau

SEQ ID NO: 1939551 - RNA, 19 nt, Artificial Sequence
  Description of Artificial Sequence: Synthetic oligonucleotide
  Antisense strand to SEQ ID NO: 1939550
auaagucucgcuagaucga

SEQ ID NO: 1939552 - RNA, 19 nt, Artificial Sequence
  Description of Artificial Sequence: Synthetic oligonucleotide
  Sense strand starting at position 2826 of SEQ ID NO: 1879898
uagcgagacuuauucucua

SEQ ID NO: 1939553 - RNA, 19 nt, Artificial Sequence
  Description of Artificial Sequence: Synthetic oligonucleotide
  Antisense strand to SEQ ID NO: 1939552
uagagaauaagucucgcua

SEQ ID NO: 1939554 - RNA, 19 nt, Artificial Sequence
  Description of Artificial Sequence: Synthetic oligonucleotide
  Sense strand starting at position 2829 of SEQ ID NO: 1879898
cgagacuuauucucuacag

SEQ ID NO: 1939555 - RNA, 19 nt, Artificial Sequence
  Description of Artificial Sequence: Synthetic oligonucleotide
  Antisense strand to SEQ ID NO: 1939554
cuguagagaauaagucucg

SEQ ID NO: 1939556 - RNA, 19 nt, Artificial Sequence
  Description of Artificial Sequence: Synthetic oligonucleotide
  Sense strand starting at position 3087 of SEQ ID NO: 1879898
gucugcuuuaguguuaguu

SEQ ID NO: 1939557 - RNA, 19 nt, Artificial Sequence
  Description of Artificial Sequence: Synthetic oligonucleotide
  Antisense strand to SEQ ID NO: 1939556
aacuaacacuaaagcagac

SEQ ID NO: 1939558 - RNA, 19 nt, Artificial Sequence
  Description of Artificial Sequence: Synthetic oligonucleotide
  Sense strand starting at position 3103 of SEQ ID NO: 1879898
guuacagucucuuuagaug

SEQ ID NO: 1939559 - RNA, 19 nt, Artificial Sequence
  Description of Artificial Sequence: Synthetic oligonucleotide
  Antisense strand to SEQ ID NO: 1939558
caucuaaagagacuguaac

SEQ ID NO: 1939560 - RNA, 19 nt, Artificial Sequence
  Description of Artificial Sequence: Synthetic oligonucleotide
  Sense strand starting at position 3114 of SEQ ID NO: 1879898
uuuagauguaaaggcaaga

SEQ ID NO: 1939561 - RNA, 19 nt, Artificial Sequence
  Description of Artificial Sequence: Synthetic oligonucleotide
  Antisense strand to SEQ ID NO: 1939560
ucuugccuuuacaucuaaa

SEQ ID NO: 1939562 - RNA, 19 nt, Artificial Sequence
  Description of Artificial Sequence: Synthetic oligonucleotide
  Sense strand starting at position 3204 of SEQ ID NO: 1879898
auugacucucaggguaaua

SEQ ID NO: 1939563 - RNA, 19 nt, Artificial Sequence
  Description of Artificial Sequence: Synthetic oligonucleotide
  Antisense strand to SEQ ID NO: 1939562
uauuacccugagagucaau

SEQ ID NO: 1939564 - RNA, 19 nt, Artificial Sequence
  Description of Artificial Sequence: Synthetic oligonucleotide
  Sense strand starting at position 3244 of SEQ ID NO: 1879898
ccaauaguuugaguggcaa

SEQ ID NO: 1939565 - RNA, 19 nt, Artificial Sequence
  Description of Artificial Sequence: Synthetic oligonucleotide
  Antisense strand to SEQ ID NO: 1939564
uugccacucaaacuauugg

SEQ ID NO: 1939566 - RNA, 19 nt, Artificial Sequence
  Description of Artificial Sequence: Synthetic oligonucleotide
  Sense strand starting at position 3932 of SEQ ID NO: 1879898
ccaaguugacugggaauau

SEQ ID NO: 1939567 - RNA, 19 nt, Artificial Sequence
  Description of Artificial Sequence: Synthetic oligonucleotide
  Antisense strand to SEQ ID NO: 1939566
auauucccagucaacuugg

SEQ ID NO: 1939568 - RNA, 19 nt, Artificial Sequence
  Description of Artificial Sequence: Synthetic oligonucleotide
  Sense strand starting at position 3936 of SEQ ID NO: 1879898
guugacugggaauauaugu

SEQ ID NO: 1939569 - RNA, 19 nt, Artificial Sequence
  Description of Artificial Sequence: Synthetic oligonucleotide
  Antisense strand to SEQ ID NO: 1939568
acauauauucccagucaac

SEQ ID NO: 1939570 - RNA, 19 nt, Artificial Sequence
  Description of Artificial Sequence: Synthetic oligonucleotide
  Sense strand starting at position 3941 of SEQ ID NO: 1879898
cugggaauauaugugacuu

SEQ ID NO: 1939571 - RNA, 19 nt, Artificial Sequence
  Description of Artificial Sequence: Synthetic oligonucleotide
  Antisense strand to SEQ ID NO: 1939570
aagucacauauauucccag

SEQ ID NO: 1939572 - RNA, 19 nt, Artificial Sequence
  Description of Artificial Sequence: Synthetic oligonucleotide
  Sense strand starting at position 3942 of SEQ ID NO: 1879898
ugggaauauaugugacuuu

SEQ ID NO: 1939573 - RNA, 19 nt, Artificial Sequence
  Description of Artificial Sequence: Synthetic oligonucleotide
  Antisense strand to SEQ ID NO: 1939572
aaagucacauauauuccca

SEQ ID NO: 1939574 - RNA, 19 nt, Artificial Sequence
  Description of Artificial Sequence: Synthetic oligonucleotide
  Sense strand starting at position 129 of SEQ ID NO: 1879899
ucuauuaugugagucaaug

SEQ ID NO: 1939575 - RNA, 19 nt, Artificial Sequence
  Description of Artificial Sequence: Synthetic oligonucleotide
  Antisense strand to SEQ ID NO: 1939574
cauugacucacauaauaga

SEQ ID NO: 1939576 - RNA, 19 nt, Artificial Sequence
  Description of Artificial Sequence: Synthetic oligonucleotide
  Sense strand starting at position 165 of SEQ ID NO: 1879899
aacccagucugauugaugu

SEQ ID NO: 1939577 - RNA, 19 nt, Artificial Sequence
  Description of Artificial Sequence: Synthetic oligonucleotide
  Antisense strand to SEQ ID NO: 1939576
acaucaaucagacuggguu

SEQ ID NO: 1939578 - RNA, 19 nt, Artificial Sequence
  Description of Artificial Sequence: Synthetic oligonucleotide
  Sense strand starting at position 358 of SEQ ID NO: 1879899
gguggcagaucucuaugga

SEQ ID NO: 1939579 - RNA, 19 nt, Artificial Sequence
  Description of Artificial Sequence: Synthetic oligonucleotide
  Antisense strand to SEQ ID NO: 1939578
uccauagagaucugccacc

SEQ ID NO: 1939580 - RNA, 19 nt, Artificial Sequence
  Description of Artificial Sequence: Synthetic oligonucleotide
  Sense strand starting at position 359 of SEQ ID NO: 1879899
guggcagaucucuauggac

SEQ ID NO: 1939581 - RNA, 19 nt, Artificial Sequence
  Description of Artificial Sequence: Synthetic oligonucleotide
  Antisense strand to SEQ ID NO: 1939580
guccauagagaucugccac

SEQ ID NO: 1939582 - RNA, 19 nt, Artificial Sequence
  Description of Artificial Sequence: Synthetic oligonucleotide
  Sense strand starting at position 361 of SEQ ID NO: 1879899
ggcagaucucuauggaccu

SEQ ID NO: 1939583 - RNA, 19 nt, Artificial Sequence
  Description of Artificial Sequence: Synthetic oligonucleotide
  Antisense strand to SEQ ID NO: 1939582
agguccauagagaucugcc

SEQ ID NO: 1939584 - RNA, 19 nt, Artificial Sequence
  Description of Artificial Sequence: Synthetic oligonucleotide
  Sense strand starting at position 443 of SEQ ID NO: 1879899
cugguuguuugacuuagga

SEQ ID NO: 1939585 - RNA, 19 nt, Artificial Sequence
  Description of Artificial Sequence: Synthetic oligonucleotide
  Antisense strand to SEQ ID NO: 1939584
uccuaagucaaacaaccag

SEQ ID NO: 1939586 - RNA, 19 nt, Artificial Sequence
  Description of Artificial Sequence: Synthetic oligonucleotide
  Sense strand starting at position 445 of SEQ ID NO: 1879899
gguuguuugacuuaggauc

SEQ ID NO: 1939587 - RNA, 19 nt, Artificial Sequence
  Description of Artificial Sequence: Synthetic oligonucleotide
  Antisense strand to SEQ ID NO: 1939586
gauccuaagucaaacaacc

SEQ ID NO: 1939588 - RNA, 19 nt, Artificial Sequence
  Description of Artificial Sequence: Synthetic oligonucleotide
  Sense strand starting at position 485 of SEQ ID NO: 1879899
gugaacgugcaucagacau

SEQ ID NO: 1939589 - RNA, 19 nt, Artificial Sequence
  Description of Artificial Sequence: Synthetic oligonucleotide
  Antisense strand to SEQ ID NO: 1939588
augucugaugcacguucac

SEQ ID NO: 1939590 - RNA, 19 nt, Artificial Sequence
  Description of Artificial Sequence: Synthetic oligonucleotide
  Sense strand starting at position 535 of SEQ ID NO: 1879899
ccaaucucauuugauguga

SEQ ID NO: 1939591 - RNA, 19 nt, Artificial Sequence
  Description of Artificial Sequence: Synthetic oligonucleotide
  Antisense strand to SEQ ID NO: 1939590
ucacaucaaaugagauugg

SEQ ID NO: 1939592 - RNA, 19 nt, Artificial Sequence
  Description of Artificial Sequence: Synthetic oligonucleotide
  Sense strand starting at position 776 of SEQ ID NO: 1879899
gaugguugaggcuaugauu

SEQ ID NO: 1939593 - RNA, 19 nt, Artificial Sequence
  Description of Artificial Sequence: Synthetic oligonucleotide
  Antisense strand to SEQ ID NO: 1939592
aaucauagccucaaccauc

SEQ ID NO: 1939594 - RNA, 19 nt, Artificial Sequence
  Description of Artificial Sequence: Synthetic oligonucleotide
  Sense strand starting at position 898 of SEQ ID NO: 1879899
ugcuguguuagaggaauuu

SEQ ID NO: 1939595 - RNA, 19 nt, Artificial Sequence
  Description of Artificial Sequence: Synthetic oligonucleotide
  Antisense strand to SEQ ID NO: 1939594
aaauuccucuaacacagca

SEQ ID NO: 1939596 - RNA, 19 nt, Artificial Sequence
  Description of Artificial Sequence: Synthetic oligonucleotide
  Sense strand starting at position 930 of SEQ ID NO: 1879899
uuacuauaguccuuagagu

SEQ ID NO: 1939597 - RNA, 19 nt, Artificial Sequence
  Description of Artificial Sequence: Synthetic oligonucleotide
  Antisense strand to SEQ ID NO: 1939596
acucuaaggacuauaguaa

SEQ ID NO: 1939598 - RNA, 19 nt, Artificial Sequence
  Description of Artificial Sequence: Synthetic oligonucleotide
  Sense strand starting at position 931 of SEQ ID NO: 1879899
uacuauaguccuuagagug

SEQ ID NO: 1939599 - RNA, 19 nt, Artificial Sequence
  Description of Artificial Sequence: Synthetic oligonucleotide
  Antisense strand to SEQ ID NO: 1939598
cacucuaaggacuauagua

SEQ ID NO: 1939600 - RNA, 19 nt, Artificial Sequence
  Description of Artificial Sequence: Synthetic oligonucleotide
  Sense strand starting at position 983 of SEQ ID NO: 1879899
uaguuaaacgaaugaaagu

SEQ ID NO: 1939601 - RNA, 19 nt, Artificial Sequence
  Description of Artificial Sequence: Synthetic oligonucleotide
  Antisense strand to SEQ ID NO: 1939600
acuuucauucguuuaacua

SEQ ID NO: 1939602 - RNA, 19 nt, Artificial Sequence
  Description of Artificial Sequence: Synthetic oligonucleotide
  Sense strand starting at position 1102 of SEQ ID NO: 1879899
uggacauaccucggugacu

SEQ ID NO: 1939603 - RNA, 19 nt, Artificial Sequence
  Description of Artificial Sequence: Synthetic oligonucleotide
  Antisense strand to SEQ ID NO: 1939602
agucaccgagguaugucca

SEQ ID NO: 1939604 - RNA, 19 nt, Artificial Sequence
  Description of Artificial Sequence: Synthetic oligonucleotide
  Sense strand starting at position 1103 of SEQ ID NO: 1879899
ggacauaccucggugacua

SEQ ID NO: 1939605 - RNA, 19 nt, Artificial Sequence
  Description of Artificial Sequence: Synthetic oligonucleotide
  Antisense strand to SEQ ID NO: 1939604
uagucaccgagguaugucc

SEQ ID NO: 1939606 - RNA, 19 nt, Artificial Sequence
  Description of Artificial Sequence: Synthetic oligonucleotide
  Sense strand starting at position 1104 of SEQ ID NO: 1879899
gacauaccucggugacuau

SEQ ID NO: 1939607 - RNA, 19 nt, Artificial Sequence
  Description of Artificial Sequence: Synthetic oligonucleotide
  Antisense strand to SEQ ID NO: 1939606
auagucaccgagguauguc

SEQ ID NO: 1939608 - RNA, 19 nt, Artificial Sequence
  Description of Artificial Sequence: Synthetic oligonucleotide
  Sense strand starting at position 1191 of SEQ ID NO: 1879899
agggauuagaugugcugua

SEQ ID NO: 1939609 - RNA, 19 nt, Artificial Sequence
  Description of Artificial Sequence: Synthetic oligonucleotide
  Antisense strand to SEQ ID NO: 1939608
uacagcacaucuaaucccu

SEQ ID NO: 1939610 - RNA, 19 nt, Artificial Sequence
  Description of Artificial Sequence: Synthetic oligonucleotide
  Sense strand starting at position 1196 of SEQ ID NO: 1879899
uuagaugugcuguacacau

SEQ ID NO: 1939611 - RNA, 19 nt, Artificial Sequence
  Description of Artificial Sequence: Synthetic oligonucleotide
  Antisense strand to SEQ ID NO: 1939610
auguguacagcacaucuaa

SEQ ID NO: 1939612 - RNA, 19 nt, Artificial Sequence
  Description of Artificial Sequence: Synthetic oligonucleotide
  Sense strand starting at position 1246 of SEQ ID NO: 1879899
cgcugagugccuuugaugu

SEQ ID NO: 1939613 - RNA, 19 nt, Artificial Sequence
  Description of Artificial Sequence: Synthetic oligonucleotide
  Antisense strand to SEQ ID NO: 1939612
acaucaaaggcacucagcg

SEQ ID NO: 1939614 - RNA, 19 nt, Artificial Sequence
  Description of Artificial Sequence: Synthetic oligonucleotide
  Sense strand starting at position 1281 of SEQ ID NO: 1879899
ucacuuugccucugaaagg

SEQ ID NO: 1939615 - RNA, 19 nt, Artificial Sequence
  Description of Artificial Sequence: Synthetic oligonucleotide
  Antisense strand to SEQ ID NO: 1939614
ccuuucagaggcaaaguga

SEQ ID NO: 1939616 - RNA, 19 nt, Artificial Sequence
  Description of Artificial Sequence: Synthetic oligonucleotide
  Sense strand starting at position 1295 of SEQ ID NO: 1879899
aaaggucuugaguggguaa

SEQ ID NO: 1939617 - RNA, 19 nt, Artificial Sequence
  Description of Artificial Sequence: Synthetic oligonucleotide
  Antisense strand to SEQ ID NO: 1939616
uuacccacucaagaccuuu

SEQ ID NO: 1939618 - RNA, 19 nt, Artificial Sequence
  Description of Artificial Sequence: Synthetic oligonucleotide
  Sense strand starting at position 1296 of SEQ ID NO: 1879899
aaggucuugaguggguaau

SEQ ID NO: 1939619 - RNA, 19 nt, Artificial Sequence
  Description of Artificial Sequence: Synthetic oligonucleotide
  Antisense strand to SEQ ID NO: 1939618
auuacccacucaagaccuu

SEQ ID NO: 1939620 - RNA, 19 nt, Artificial Sequence
  Description of Artificial Sequence: Synthetic oligonucleotide
  Sense strand starting at position 1298 of SEQ ID NO: 1879899
ggucuugaguggguaauga

SEQ ID NO: 1939621 - RNA, 19 nt, Artificial Sequence
  Description of Artificial Sequence: Synthetic oligonucleotide
  Antisense strand to SEQ ID NO: 1939620
ucauuacccacucaagacc

SEQ ID NO: 1939622 - RNA, 19 nt, Artificial Sequence
  Description of Artificial Sequence: Synthetic oligonucleotide
  Sense strand starting at position 1494 of SEQ ID NO: 1879899
gggagaugagcccaguuau

SEQ ID NO: 1939623 - RNA, 19 nt, Artificial Sequence
  Description of Artificial Sequence: Synthetic oligonucleotide
  Antisense strand to SEQ ID NO: 1939622
auaacugggcucaucuccc

SEQ ID NO: 1939624 - RNA, 19 nt, Artificial Sequence
  Description of Artificial Sequence: Synthetic oligonucleotide
  Sense strand starting at position 1591 of SEQ ID NO: 1879899
gagcuuugucaucauaguu

SEQ ID NO: 1939625 - RNA, 19 nt, Artificial Sequence
  Description of Artificial Sequence: Synthetic oligonucleotide
  Antisense strand to SEQ ID NO: 1939624
aacuaugaugacaaagcuc

SEQ ID NO: 1939626 - RNA, 19 nt, Artificial Sequence
  Description of Artificial Sequence: Synthetic oligonucleotide
  Sense strand starting at position 1646 of SEQ ID NO: 1879899
cgguccuaucacugaaacu

SEQ ID NO: 1939627 - RNA, 19 nt, Artificial Sequence
  Description of Artificial Sequence: Synthetic oligonucleotide
  Antisense strand to SEQ ID NO: 1939626
aguuucagugauaggaccg

SEQ ID NO: 1939628 - RNA, 19 nt, Artificial Sequence
  Description of Artificial Sequence: Synthetic oligonucleotide
  Sense strand starting at position 1786 of SEQ ID NO: 1879899
gcauuaaacauguggauug

SEQ ID NO: 1939629 - RNA, 19 nt, Artificial Sequence
  Description of Artificial Sequence: Synthetic oligonucleotide
  Antisense strand to SEQ ID NO: 1939628
caauccacauguuuaaugc

SEQ ID NO: 1939630 - RNA, 19 nt, Artificial Sequence
  Description of Artificial Sequence: Synthetic oligonucleotide
  Sense strand starting at position 1791 of SEQ ID NO: 1879899
aaacauguggauuguauga

SEQ ID NO: 1939631 - RNA, 19 nt, Artificial Sequence
  Description of Artificial Sequence: Synthetic oligonucleotide
  Antisense strand to SEQ ID NO: 1939630
ucauacaauccacauguuu

SEQ ID NO: 1939632 - RNA, 19 nt, Artificial Sequence
  Description of Artificial Sequence: Synthetic oligonucleotide
  Sense strand starting at position 1801 of SEQ ID NO: 1879899
auuguaugacaacgguaga

SEQ ID NO: 1939633 - RNA, 19 nt, Artificial Sequence
  Description of Artificial Sequence: Synthetic oligonucleotide
  Antisense strand to SEQ ID NO: 1939632
ucuaccguugucauacaau

SEQ ID NO: 1939634 - RNA, 19 nt, Artificial Sequence
  Description of Artificial Sequence: Synthetic oligonucleotide
  Sense strand starting at position 1802 of SEQ ID NO: 1879899
uuguaugacaacgguagau

SEQ ID NO: 1939635 - RNA, 19 nt, Artificial Sequence
  Description of Artificial Sequence: Synthetic oligonucleotide
  Antisense strand to SEQ ID NO: 1939634
aucuaccguugucauacaa

SEQ ID NO: 1939636 - RNA, 19 nt, Artificial Sequence
  Description of Artificial Sequence: Synthetic oligonucleotide
  Sense strand starting at position 2138 of SEQ ID NO: 1879899
guaaccagcccugaguaaa

SEQ ID NO: 1939637 - RNA, 19 nt, Artificial Sequence
  Description of Artificial Sequence: Synthetic oligonucleotide
  Antisense strand to SEQ ID NO: 1939636
uuuacucagggcugguuac

SEQ ID NO: 1939638 - RNA, 19 nt, Artificial Sequence
  Description of Artificial Sequence: Synthetic oligonucleotide
  Sense strand starting at position 3050 of SEQ ID NO: 1879899
ugucuucuccaccaacgau

SEQ ID NO: 1939639 - RNA, 19 nt, Artificial Sequence
  Description of Artificial Sequence: Synthetic oligonucleotide
  Antisense strand to SEQ ID NO: 1939638
aucguugguggagaagaca

SEQ ID NO: 1939640 - RNA, 19 nt, Artificial Sequence
  Description of Artificial Sequence: Synthetic oligonucleotide
  Sense strand starting at position 3292 of SEQ ID NO: 1879899
ugaucuguuccagguugau

SEQ ID NO: 1939641 - RNA, 19 nt, Artificial Sequence
  Description of Artificial Sequence: Synthetic oligonucleotide
  Antisense strand to SEQ ID NO: 1939640
aucaaccuggaacagauca

SEQ ID NO: 1939642 - RNA, 19 nt, Artificial Sequence
  Description of Artificial Sequence: Synthetic oligonucleotide
  Sense strand starting at position 3333 of SEQ ID NO: 1879899
cugaucaucuccuuuagag

SEQ ID NO: 1939643 - RNA, 19 nt, Artificial Sequence
  Description of Artificial Sequence: Synthetic oligonucleotide
  Antisense strand to SEQ ID NO: 1939642
cucuaaaggagaugaucag

SEQ ID NO: 1939644 - RNA, 19 nt, Artificial Sequence
  Description of Artificial Sequence: Synthetic oligonucleotide
  Sense strand starting at position 3505 of SEQ ID NO: 1879899
cauagaagucucugaugua

SEQ ID NO: 1939645 - RNA, 19 nt, Artificial Sequence
  Description of Artificial Sequence: Synthetic oligonucleotide
  Antisense strand to SEQ ID NO: 1939644
uacaucagagacuucuaug

SEQ ID NO: 1939646 - RNA, 19 nt, Artificial Sequence
  Description of Artificial Sequence: Synthetic oligonucleotide
  Sense strand starting at position 3547 of SEQ ID NO: 1879899
auuuaucuguagcugugau

SEQ ID NO: 1939647 - RNA, 19 nt, Artificial Sequence
  Description of Artificial Sequence: Synthetic oligonucleotide
  Antisense strand to SEQ ID NO: 1939646
aucacagcuacagauaaau

SEQ ID NO: 1939648 - RNA, 19 nt, Artificial Sequence
  Description of Artificial Sequence: Synthetic oligonucleotide
  Sense strand starting at position 3560 of SEQ ID NO: 1879899
ugugauuacauacgaugua

SEQ ID NO: 1939649 - RNA, 19 nt, Artificial Sequence
  Description of Artificial Sequence: Synthetic oligonucleotide
  Antisense strand to SEQ ID NO: 1939648
uacaucguauguaaucaca

SEQ ID NO: 1939650 - RNA, 19 nt, Artificial Sequence
  Description of Artificial Sequence: Synthetic oligonucleotide
  Sense strand starting at position 3563 of SEQ ID NO: 1879899
gauuacauacgauguaaag

SEQ ID NO: 1939651 - RNA, 19 nt, Artificial Sequence
  Description of Artificial Sequence: Synthetic oligonucleotide
  Antisense strand to SEQ ID NO: 1939650
cuuuacaucguauguaauc

SEQ ID NO: 1939652 - RNA, 19 nt, Artificial Sequence
  Description of Artificial Sequence: Synthetic oligonucleotide
  Sense strand starting at position 3646 of SEQ ID NO: 1879899
ucaggagccagauaugcau

SEQ ID NO: 1939653 - RNA, 19 nt, Artificial Sequence
  Description of Artificial Sequence: Synthetic oligonucleotide
  Antisense strand to SEQ ID NO: 1939652
augcauaucuggcuccuga

SEQ ID NO: 1939654 - RNA, 19 nt, Artificial Sequence
  Description of Artificial Sequence: Synthetic oligonucleotide
  Sense strand starting at position 224 of SEQ ID NO: 1879900
gcaggagaaucacuuagca

SEQ ID NO: 1939655 - RNA, 19 nt, Artificial Sequence
  Description of Artificial Sequence: Synthetic oligonucleotide
  Antisense strand to SEQ ID NO: 1939654
ugcuaagugauucuccugc

SEQ ID NO: 1939656 - RNA, 19 nt, Artificial Sequence
  Description of Artificial Sequence: Synthetic oligonucleotide
  Sense strand starting at position 564 of SEQ ID NO: 1879900
guguauccacguuggacaa

SEQ ID NO: 1939657 - RNA, 19 nt, Artificial Sequence
  Description of Artificial Sequence: Synthetic oligonucleotide
  Antisense strand to SEQ ID NO: 1939656
uuguccaacguggauacac

SEQ ID NO: 1939658 - RNA, 19 nt, Artificial Sequence
  Description of Artificial Sequence: Synthetic oligonucleotide
  Sense strand starting at position 577 of SEQ ID NO: 1879900
ggacaaucaguguaacgca

SEQ ID NO: 1939659 - RNA, 19 nt, Artificial Sequence
  Description of Artificial Sequence: Synthetic oligonucleotide
  Antisense strand to SEQ ID NO: 1939658
ugcguuacacugauugucc

SEQ ID NO: 1939660 - RNA, 19 nt, Artificial Sequence
  Description of Artificial Sequence: Synthetic oligonucleotide
  Sense strand starting at position 592 of SEQ ID NO: 1879900
cgcauaaauuuacagaauc

SEQ ID NO: 1939661 - RNA, 19 nt, Artificial Sequence
  Description of Artificial Sequence: Synthetic oligonucleotide
  Antisense strand to SEQ ID NO: 1939660
gauucuguaaauuuaugcg

SEQ ID NO: 1939662 - RNA, 19 nt, Artificial Sequence
  Description of Artificial Sequence: Synthetic oligonucleotide
  Sense strand starting at position 709 of SEQ ID NO: 1879900
cgguuucuagacugguaac

SEQ ID NO: 1939663 - RNA, 19 nt, Artificial Sequence
  Description of Artificial Sequence: Synthetic oligonucleotide
  Antisense strand to SEQ ID NO: 1939662
guuaccagucuagaaaccg

SEQ ID NO: 1939664 - RNA, 19 nt, Artificial Sequence
  Description of Artificial Sequence: Synthetic oligonucleotide
  Sense strand starting at position 710 of SEQ ID NO: 1879900
gguuucuagacugguaaca

SEQ ID NO: 1939665 - RNA, 19 nt, Artificial Sequence
  Description of Artificial Sequence: Synthetic oligonucleotide
  Antisense strand to SEQ ID NO: 1939664
uguuaccagucuagaaacc

SEQ ID NO: 1939666 - RNA, 19 nt, Artificial Sequence
  Description of Artificial Sequence: Synthetic oligonucleotide
  Sense strand starting at position 712 of SEQ ID NO: 1879900
uuucuagacugguaacaug

SEQ ID NO: 1939667 - RNA, 19 nt, Artificial Sequence
  Description of Artificial Sequence: Synthetic oligonucleotide
  Antisense strand to SEQ ID NO: 1939666
cauguuaccagucuagaaa

SEQ ID NO: 1939668 - RNA, 19 nt, Artificial Sequence
  Description of Artificial Sequence: Synthetic oligonucleotide
  Sense strand starting at position 764 of SEQ ID NO: 1879900
cgguuaguacuauguggaa

SEQ ID NO: 1939669 - RNA, 19 nt, Artificial Sequence
  Description of Artificial Sequence: Synthetic oligonucleotide
  Antisense strand to SEQ ID NO: 1939668
uuccacauaguacuaaccg

SEQ ID NO: 1939670 - RNA, 19 nt, Artificial Sequence
  Description of Artificial Sequence: Synthetic oligonucleotide
  Sense strand starting at position 768 of SEQ ID NO: 1879900
uaguacuauguggaaggua

SEQ ID NO: 1939671 - RNA, 19 nt, Artificial Sequence
  Description of Artificial Sequence: Synthetic oligonucleotide
  Antisense strand to SEQ ID NO: 1939670
uaccuuccacauaguacua

SEQ ID NO: 1939672 - RNA, 19 nt, Artificial Sequence
  Description of Artificial Sequence: Synthetic oligonucleotide
  Sense strand starting at position 810 of SEQ ID NO: 1879900
aggcccagcuauccuaaau

SEQ ID NO: 1939673 - RNA, 19 nt, Artificial Sequence
  Description of Artificial Sequence: Synthetic oligonucleotide
  Antisense strand to SEQ ID NO: 1939672
auuuaggauagcugggccu

SEQ ID NO: 1939674 - RNA, 19 nt, Artificial Sequence
  Description of Artificial Sequence: Synthetic oligonucleotide
  Sense strand starting at position 1255 of SEQ ID NO: 1879900
acgacaaugugccuacuau

SEQ ID NO: 1939675 - RNA, 19 nt, Artificial Sequence
  Description of Artificial Sequence: Synthetic oligonucleotide
  Antisense strand to SEQ ID NO: 1939674
auaguaggcacauugucgu

SEQ ID NO: 1939676 - RNA, 19 nt, Artificial Sequence
  Description of Artificial Sequence: Synthetic oligonucleotide
  Sense strand starting at position 1256 of SEQ ID NO: 1879900
cgacaaugugccuacuaug

SEQ ID NO: 1939677 - RNA, 19 nt, Artificial Sequence
  Description of Artificial Sequence: Synthetic oligonucleotide
  Antisense strand to SEQ ID NO: 1939676
cauaguaggcacauugucg

SEQ ID NO: 1939678 - RNA, 19 nt, Artificial Sequence
  Description of Artificial Sequence: Synthetic oligonucleotide
  Sense strand starting at position 1511 of SEQ ID NO: 1879900
ggugguggaucaccggaaa

SEQ ID NO: 1939679 - RNA, 19 nt, Artificial Sequence
  Description of Artificial Sequence: Synthetic oligonucleotide
  Antisense strand to SEQ ID NO: 1939678
uuuccggugauccaccacc

SEQ ID NO: 1939680 - RNA, 19 nt, Artificial Sequence
  Description of Artificial Sequence: Synthetic oligonucleotide
  Sense strand starting at position 1761 of SEQ ID NO: 1879900
auaugaucuuccuagggaa

SEQ ID NO: 1939681 - RNA, 19 nt, Artificial Sequence
  Description of Artificial Sequence: Synthetic oligonucleotide
  Antisense strand to SEQ ID NO: 1939680
uucccuaggaagaucauau

SEQ ID NO: 1939682 - RNA, 19 nt, Artificial Sequence
  Description of Artificial Sequence: Synthetic oligonucleotide
  Sense strand starting at position 1783 of SEQ ID NO: 1879900
cggcuacugaucuauagca

SEQ ID NO: 1939683 - RNA, 19 nt, Artificial Sequence
  Description of Artificial Sequence: Synthetic oligonucleotide
  Antisense strand to SEQ ID NO: 1939682
ugcuauagaucaguagccg

SEQ ID NO: 1939684 - RNA, 19 nt, Artificial Sequence
  Description of Artificial Sequence: Synthetic oligonucleotide
  Sense strand starting at position 1785 of SEQ ID NO: 1879900
gcuacugaucuauagcauu

SEQ ID NO: 1939685 - RNA, 19 nt, Artificial Sequence
  Description of Artificial Sequence: Synthetic oligonucleotide
  Antisense strand to SEQ ID NO: 1939684
aaugcuauagaucaguagc

SEQ ID NO: 1939686 - RNA, 19 nt, Artificial Sequence
  Description of Artificial Sequence: Synthetic oligonucleotide
  Sense strand starting at position 1788 of SEQ ID NO: 1879900
acugaucuauagcauuaga

SEQ ID NO: 1939687 - RNA, 19 nt, Artificial Sequence
  Description of Artificial Sequence: Synthetic oligonucleotide
  Antisense strand to SEQ ID NO: 1939686
ucuaaugcuauagaucagu

SEQ ID NO: 1939688 - RNA, 19 nt, Artificial Sequence
  Description of Artificial Sequence: Synthetic oligonucleotide
  Sense strand starting at position 1822 of SEQ ID NO: 1879900
gcaagcaucugaucacacu

SEQ ID NO: 1939689 - RNA, 19 nt, Artificial Sequence
  Description of Artificial Sequence: Synthetic oligonucleotide
  Antisense strand to SEQ ID NO: 1939688
agugugaucagaugcuugc

SEQ ID NO: 1939690 - RNA, 19 nt, Artificial Sequence
  Description of Artificial Sequence: Synthetic oligonucleotide
  Sense strand starting at position 2106 of SEQ ID NO: 1879900
gggaauguacguuacagaa

SEQ ID NO: 1939691 - RNA, 19 nt, Artificial Sequence
  Description of Artificial Sequence: Synthetic oligonucleotide
  Antisense strand to SEQ ID NO: 1939690
uucuguaacguacauuccc

SEQ ID NO: 1939692 - RNA, 19 nt, Artificial Sequence
  Description of Artificial Sequence: Synthetic oligonucleotide
  Sense strand starting at position 2114 of SEQ ID NO: 1879900
acguuacagaaauagguuu

SEQ ID NO: 1939693 - RNA, 19 nt, Artificial Sequence
  Description of Artificial Sequence: Synthetic oligonucleotide
  Antisense strand to SEQ ID NO: 1939692
aaaccuauuucuguaacgu

SEQ ID NO: 1939694 - RNA, 19 nt, Artificial Sequence
  Description of Artificial Sequence: Synthetic oligonucleotide
  Sense strand starting at position 2120 of SEQ ID NO: 1879900
cagaaauagguuuguaggu

SEQ ID NO: 1939695 - RNA, 19 nt, Artificial Sequence
  Description of Artificial Sequence: Synthetic oligonucleotide
  Antisense strand to SEQ ID NO: 1939694
accuacaaaccuauuucug

SEQ ID NO: 1939696 - RNA, 19 nt, Artificial Sequence
  Description of Artificial Sequence: Synthetic oligonucleotide
  Sense strand starting at position 2121 of SEQ ID NO: 1879900
agaaauagguuuguaggua

SEQ ID NO: 1939697 - RNA, 19 nt, Artificial Sequence
  Description of Artificial Sequence: Synthetic oligonucleotide
  Antisense strand to SEQ ID NO: 1939696
uaccuacaaaccuauuucu

SEQ ID NO: 1939698 - RNA, 19 nt, Artificial Sequence
  Description of Artificial Sequence: Synthetic oligonucleotide
  Sense strand starting at position 2125 of SEQ ID NO: 1879900
auagguuuguagguaugua

SEQ ID NO: 1939699 - RNA, 19 nt, Artificial Sequence
  Description of Artificial Sequence: Synthetic oligonucleotide
  Antisense strand to SEQ ID NO: 1939698
uacauaccuacaaaccuau

SEQ ID NO: 1939700 - RNA, 19 nt, Artificial Sequence
  Description of Artificial Sequence: Synthetic oligonucleotide
  Sense strand starting at position 2133 of SEQ ID NO: 1879900
guagguauguagcugcaga

SEQ ID NO: 1939701 - RNA, 19 nt, Artificial Sequence
  Description of Artificial Sequence: Synthetic oligonucleotide
  Antisense strand to SEQ ID NO: 1939700
ucugcagcuacauaccuac

SEQ ID NO: 1939702 - RNA, 19 nt, Artificial Sequence
  Description of Artificial Sequence: Synthetic oligonucleotide
  Sense strand starting at position 2154 of SEQ ID NO: 1879900
acguuuacuucugugcaau

SEQ ID NO: 1939703 - RNA, 19 nt, Artificial Sequence
  Description of Artificial Sequence: Synthetic oligonucleotide
  Antisense strand to SEQ ID NO: 1939702
auugcacagaaguaaacgu

SEQ ID NO: 1939704 - RNA, 19 nt, Artificial Sequence
  Description of Artificial Sequence: Synthetic oligonucleotide
  Sense strand starting at position 2156 of SEQ ID NO: 1879900
guuuacuucugugcaauca

SEQ ID NO: 1939705 - RNA, 19 nt, Artificial Sequence
  Description of Artificial Sequence: Synthetic oligonucleotide
  Antisense strand to SEQ ID NO: 1939704
ugauugcacagaaguaaac

SEQ ID NO: 1939706 - RNA, 19 nt, Artificial Sequence
  Description of Artificial Sequence: Synthetic oligonucleotide
  Sense strand starting at position 2176 of SEQ ID NO: 1879900
uggacucagucuguaggau

SEQ ID NO: 1939707 - RNA, 19 nt, Artificial Sequence
  Description of Artificial Sequence: Synthetic oligonucleotide
  Antisense strand to SEQ ID NO: 1939706
auccuacagacugagucca

SEQ ID NO: 1939708 - RNA, 19 nt, Artificial Sequence
  Description of Artificial Sequence: Synthetic oligonucleotide
  Sense strand starting at position 2177 of SEQ ID NO: 1879900
ggacucagucuguaggaua

SEQ ID NO: 1939709 - RNA, 19 nt, Artificial Sequence
  Description of Artificial Sequence: Synthetic oligonucleotide
  Antisense strand to SEQ ID NO: 1939708
uauccuacagacugagucc

SEQ ID NO: 1939710 - RNA, 19 nt, Artificial Sequence
  Description of Artificial Sequence: Synthetic oligonucleotide
  Sense strand starting at position 2607 of SEQ ID NO: 1879900
cucugucaccugugaaaga

SEQ ID NO: 1939711 - RNA, 19 nt, Artificial Sequence
  Description of Artificial Sequence: Synthetic oligonucleotide
  Antisense strand to SEQ ID NO: 1939710
ucuuucacaggugacagag

SEQ ID NO: 1939712 - RNA, 19 nt, Artificial Sequence
  Description of Artificial Sequence: Synthetic oligonucleotide
  Sense strand starting at position 2631 of SEQ ID NO: 1879900
uuugauaaaugugaaggua

SEQ ID NO: 1939713 - RNA, 19 nt, Artificial Sequence
  Description of Artificial Sequence: Synthetic oligonucleotide
  Antisense strand to SEQ ID NO: 1939712
uaccuucacauuuaucaaa

SEQ ID NO: 1939714 - RNA, 19 nt, Artificial Sequence
  Description of Artificial Sequence: Synthetic oligonucleotide
  Sense strand starting at position 2643 of SEQ ID NO: 1879900
gaagguaaauaagaugaaa

SEQ ID NO: 1939715 - RNA, 19 nt, Artificial Sequence
  Description of Artificial Sequence: Synthetic oligonucleotide
  Antisense strand to SEQ ID NO: 1939714
uuucaucuuauuuaccuuc

SEQ ID NO: 1939716 - RNA, 19 nt, Artificial Sequence
  Description of Artificial Sequence: Synthetic oligonucleotide
  Sense strand starting at position 3474 of SEQ ID NO: 1879900
aguaaagaaugcuuacgau

SEQ ID NO: 1939717 - RNA, 19 nt, Artificial Sequence
  Description of Artificial Sequence: Synthetic oligonucleotide
  Antisense strand to SEQ ID NO: 1939716
aucguaagcauucuuuacu

SEQ ID NO: 1939718 - RNA, 19 nt, Artificial Sequence
  Description of Artificial Sequence: Synthetic oligonucleotide
  Sense strand starting at position 3584 of SEQ ID NO: 1879900
cugggcuaucuugaguagu

SEQ ID NO: 1939719 - RNA, 19 nt, Artificial Sequence
  Description of Artificial Sequence: Synthetic oligonucleotide
  Antisense strand to SEQ ID NO: 1939718
acuacucaagauagcccag

SEQ ID NO: 1939720 - RNA, 19 nt, Artificial Sequence
  Description of Artificial Sequence: Synthetic oligonucleotide
  Sense strand starting at position 3586 of SEQ ID NO: 1879900
gggcuaucuugaguaguaa

SEQ ID NO: 1939721 - RNA, 19 nt, Artificial Sequence
  Description of Artificial Sequence: Synthetic oligonucleotide
  Antisense strand to SEQ ID NO: 1939720
uuacuacucaagauagccc

SEQ ID NO: 1939722 - RNA, 19 nt, Artificial Sequence
  Description of Artificial Sequence: Synthetic oligonucleotide
  Sense strand starting at position 3587 of SEQ ID NO: 1879900
ggcuaucuugaguaguaac

SEQ ID NO: 1939723 - RNA, 19 nt, Artificial Sequence
  Description of Artificial Sequence: Synthetic oligonucleotide
  Antisense strand to SEQ ID NO: 1939722
guuacuacucaagauagcc

SEQ ID NO: 1939724 - RNA, 19 nt, Artificial Sequence
  Description of Artificial Sequence: Synthetic oligonucleotide
  Sense strand starting at position 3598 of SEQ ID NO: 1879900
guaguaacguuuauggugu

SEQ ID NO: 1939725 - RNA, 19 nt, Artificial Sequence
  Description of Artificial Sequence: Synthetic oligonucleotide
  Antisense strand to SEQ ID NO: 1939724
acaccauaaacguuacuac

SEQ ID NO: 1939726 - RNA, 19 nt, Artificial Sequence
  Description of Artificial Sequence: Synthetic oligonucleotide
  Sense strand starting at position 3613 of SEQ ID NO: 1879900
guguuccuccuacauauua

SEQ ID NO: 1939727 - RNA, 19 nt, Artificial Sequence
  Description of Artificial Sequence: Synthetic oligonucleotide
  Antisense strand to SEQ ID NO: 1939726
uaauauguaggaggaacac

SEQ ID NO: 1939728 - RNA, 19 nt, Artificial Sequence
  Description of Artificial Sequence: Synthetic oligonucleotide
  Sense strand starting at position 3641 of SEQ ID NO: 1879900
cugaaugcuuuauuacgua

SEQ ID NO: 1939729 - RNA, 19 nt, Artificial Sequence
  Description of Artificial Sequence: Synthetic oligonucleotide
  Antisense strand to SEQ ID NO: 1939728
uacguaauaaagcauucag

SEQ ID NO: 1939730 - RNA, 19 nt, Artificial Sequence
  Description of Artificial Sequence: Synthetic oligonucleotide
  Sense strand starting at position 3645 of SEQ ID NO: 1879900
augcuuuauuacguacauu

SEQ ID NO: 1939731 - RNA, 19 nt, Artificial Sequence
  Description of Artificial Sequence: Synthetic oligonucleotide
  Antisense strand to SEQ ID NO: 1939730
aauguacguaauaaagcau

SEQ ID NO: 1939732 - RNA, 19 nt, Artificial Sequence
  Description of Artificial Sequence: Synthetic oligonucleotide
  Sense strand starting at position 3666 of SEQ ID NO: 1879900
uuacuaucgcagcaauucu

SEQ ID NO: 1939733 - RNA, 19 nt, Artificial Sequence
  Description of Artificial Sequence: Synthetic oligonucleotide
  Antisense strand to SEQ ID NO: 1939732
agaauugcugcgauaguaa

SEQ ID NO: 1939734 - RNA, 19 nt, Artificial Sequence
  Description of Artificial Sequence: Synthetic oligonucleotide
  Sense strand starting at position 73 of SEQ ID NO: 1879901
gacuaaugucuagguugag

SEQ ID NO: 1939735 - RNA, 19 nt, Artificial Sequence
  Description of Artificial Sequence: Synthetic oligonucleotide
  Antisense strand to SEQ ID NO: 1939734
cucaaccuagacauuaguc

SEQ ID NO: 1939736 - RNA, 19 nt, Artificial Sequence
  Description of Artificial Sequence: Synthetic oligonucleotide
  Sense strand starting at position 74 of SEQ ID NO: 1879901
acuaaugucuagguugaga

SEQ ID NO: 1939737 - RNA, 19 nt, Artificial Sequence
  Description of Artificial Sequence: Synthetic oligonucleotide
  Antisense strand to SEQ ID NO: 1939736
ucucaaccuagacauuagu

SEQ ID NO: 1939738 - RNA, 19 nt, Artificial Sequence
  Description of Artificial Sequence: Synthetic oligonucleotide
  Sense strand starting at position 76 of SEQ ID NO: 1879901
uaaugucuagguugagaau

SEQ ID NO: 1939739 - RNA, 19 nt, Artificial Sequence
  Description of Artificial Sequence: Synthetic oligonucleotide
  Antisense strand to SEQ ID NO: 1939738
auucucaaccuagacauua

SEQ ID NO: 1939740 - RNA, 19 nt, Artificial Sequence
  Description of Artificial Sequence: Synthetic oligonucleotide
  Sense strand starting at position 394 of SEQ ID NO: 1879901
cuagauucucaacgacaau

SEQ ID NO: 1939741 - RNA, 19 nt, Artificial Sequence
  Description of Artificial Sequence: Synthetic oligonucleotide
  Antisense strand to SEQ ID NO: 1939740
auugucguugagaaucuag

SEQ ID NO: 1939742 - RNA, 19 nt, Artificial Sequence
  Description of Artificial Sequence: Synthetic oligonucleotide
  Sense strand starting at position 569 of SEQ ID NO: 1879901
caugauaccguauaaagca

SEQ ID NO: 1939743 - RNA, 19 nt, Artificial Sequence
  Description of Artificial Sequence: Synthetic oligonucleotide
  Antisense strand to SEQ ID NO: 1939742
ugcuuuauacgguaucaug

SEQ ID NO: 1939744 - RNA, 19 nt, Artificial Sequence
  Description of Artificial Sequence: Synthetic oligonucleotide
  Sense strand starting at position 576 of SEQ ID NO: 1879901
ccguauaaagcagauagaa

SEQ ID NO: 1939745 - RNA, 19 nt, Artificial Sequence
  Description of Artificial Sequence: Synthetic oligonucleotide
  Antisense strand to SEQ ID NO: 1939744
uucuaucugcuuuauacgg

SEQ ID NO: 1939746 - RNA, 19 nt, Artificial Sequence
  Description of Artificial Sequence: Synthetic oligonucleotide
  Sense strand starting at position 699 of SEQ ID NO: 1879901
ucccuuugaccguagagau

SEQ ID NO: 1939747 - RNA, 19 nt, Artificial Sequence
  Description of Artificial Sequence: Synthetic oligonucleotide
  Antisense strand to SEQ ID NO: 1939746
aucucuacggucaaaggga

SEQ ID NO: 1939748 - RNA, 19 nt, Artificial Sequence
  Description of Artificial Sequence: Synthetic oligonucleotide
  Sense strand starting at position 775 of SEQ ID NO: 1879901
guggaaauuaugcauguau

SEQ ID NO: 1939749 - RNA, 19 nt, Artificial Sequence
  Description of Artificial Sequence: Synthetic oligonucleotide
  Antisense strand to SEQ ID NO: 1939748
auacaugcauaauuuccac

SEQ ID NO: 1939750 - RNA, 19 nt, Artificial Sequence
  Description of Artificial Sequence: Synthetic oligonucleotide
  Sense strand starting at position 777 of SEQ ID NO: 1879901
ggaaauuaugcauguauca

SEQ ID NO: 1939751 - RNA, 19 nt, Artificial Sequence
  Description of Artificial Sequence: Synthetic oligonucleotide
  Antisense strand to SEQ ID NO: 1939750
ugauacaugcauaauuucc

SEQ ID NO: 1939752 - RNA, 19 nt, Artificial Sequence
  Description of Artificial Sequence: Synthetic oligonucleotide
  Sense strand starting at position 813 of SEQ ID NO: 1879901
gcaagugucaaugagacag

SEQ ID NO: 1939753 - RNA, 19 nt, Artificial Sequence
  Description of Artificial Sequence: Synthetic oligonucleotide
  Antisense strand to SEQ ID NO: 1939752
cugucucauugacacuugc

SEQ ID NO: 1939754 - RNA, 19 nt, Artificial Sequence
  Description of Artificial Sequence: Synthetic oligonucleotide
  Sense strand starting at position 817 of SEQ ID NO: 1879901
gugucaaugagacaggucu

SEQ ID NO: 1939755 - RNA, 19 nt, Artificial Sequence
  Description of Artificial Sequence: Synthetic oligonucleotide
  Antisense strand to SEQ ID NO: 1939754
agaccugucucauugacac

SEQ ID NO: 1939756 - RNA, 19 nt, Artificial Sequence
  Description of Artificial Sequence: Synthetic oligonucleotide
  Sense strand starting at position 1056 of SEQ ID NO: 1879901
agcggaauuugugucuaca

SEQ ID NO: 1939757 - RNA, 19 nt, Artificial Sequence
  Description of Artificial Sequence: Synthetic oligonucleotide
  Antisense strand to SEQ ID NO: 1939756
uguagacacaaauuccgcu

SEQ ID NO: 1939758 - RNA, 19 nt, Artificial Sequence
  Description of Artificial Sequence: Synthetic oligonucleotide
  Sense strand starting at position 1058 of SEQ ID NO: 1879901
cggaauuugugucuacauu

SEQ ID NO: 1939759 - RNA, 19 nt, Artificial Sequence
  Description of Artificial Sequence: Synthetic oligonucleotide
  Antisense strand to SEQ ID NO: 1939758
aauguagacacaaauuccg

SEQ ID NO: 1939760 - RNA, 19 nt, Artificial Sequence
  Description of Artificial Sequence: Synthetic oligonucleotide
  Sense strand starting at position 1157 of SEQ ID NO: 1879901
ucuacucugugaccagaua

SEQ ID NO: 1939761 - RNA, 19 nt, Artificial Sequence
  Description of Artificial Sequence: Synthetic oligonucleotide
  Antisense strand to SEQ ID NO: 1939760
uaucuggucacagaguaga

SEQ ID NO: 1939762 - RNA, 19 nt, Artificial Sequence
  Description of Artificial Sequence: Synthetic oligonucleotide
  Sense strand starting at position 1344 of SEQ ID NO: 1879901
cccuuaucugaagaaugca

SEQ ID NO: 1939763 - RNA, 19 nt, Artificial Sequence
  Description of Artificial Sequence: Synthetic oligonucleotide
  Antisense strand to SEQ ID NO: 1939762
ugcauucuucagauaaggg

SEQ ID NO: 1939764 - RNA, 19 nt, Artificial Sequence
  Description of Artificial Sequence: Synthetic oligonucleotide
  Sense strand starting at position 1522 of SEQ ID NO: 1879901
cggugaaagcgagaggauu

SEQ ID NO: 1939765 - RNA, 19 nt, Artificial Sequence
  Description of Artificial Sequence: Synthetic oligonucleotide
  Antisense strand to SEQ ID NO: 1939764
aauccucucgcuuucaccg

SEQ ID NO: 1939766 - RNA, 19 nt, Artificial Sequence
  Description of Artificial Sequence: Synthetic oligonucleotide
  Sense strand starting at position 1692 of SEQ ID NO: 1879901
ggaugauaguaucucucca

SEQ ID NO: 1939767 - RNA, 19 nt, Artificial Sequence
  Description of Artificial Sequence: Synthetic oligonucleotide
  Antisense strand to SEQ ID NO: 1939766
uggagagauacuaucaucc

SEQ ID NO: 1939768 - RNA, 19 nt, Artificial Sequence
  Description of Artificial Sequence: Synthetic oligonucleotide
  Sense strand starting at position 1744 of SEQ ID NO: 1879901
ugagaugaugcuuauaagc

SEQ ID NO: 1939769 - RNA, 19 nt, Artificial Sequence
  Description of Artificial Sequence: Synthetic oligonucleotide
  Antisense strand to SEQ ID NO: 1939768
gcuuauaagcaucaucuca

SEQ ID NO: 1939770 - RNA, 19 nt, Artificial Sequence
  Description of Artificial Sequence: Synthetic oligonucleotide
  Sense strand starting at position 1799 of SEQ ID NO: 1879901
aguuauuauuacucuggaa

SEQ ID NO: 1939771 - RNA, 19 nt, Artificial Sequence
  Description of Artificial Sequence: Synthetic oligonucleotide
  Antisense strand to SEQ ID NO: 1939770
uuccagaguaauaauaacu

SEQ ID NO: 1939772 - RNA, 19 nt, Artificial Sequence
  Description of Artificial Sequence: Synthetic oligonucleotide
  Sense strand starting at position 2564 of SEQ ID NO: 1879901
gcauacauuuaugugugau

SEQ ID NO: 1939773 - RNA, 19 nt, Artificial Sequence
  Description of Artificial Sequence: Synthetic oligonucleotide
  Antisense strand to SEQ ID NO: 1939772
aucacacauaaauguaugc

SEQ ID NO: 1939774 - RNA, 19 nt, Artificial Sequence
  Description of Artificial Sequence: Synthetic oligonucleotide
  Sense strand starting at position 2596 of SEQ ID NO: 1879901
gugguaaugugguuuauuu

SEQ ID NO: 1939775 - RNA, 19 nt, Artificial Sequence
  Description of Artificial Sequence: Synthetic oligonucleotide
  Antisense strand to SEQ ID NO: 1939774
aaauaaaccacauuaccac

SEQ ID NO: 1939776 - RNA, 19 nt, Artificial Sequence
  Description of Artificial Sequence: Synthetic oligonucleotide
  Sense strand starting at position 2605 of SEQ ID NO: 1879901
ugguuuauuuggcugcaga

SEQ ID NO: 1939777 - RNA, 19 nt, Artificial Sequence
  Description of Artificial Sequence: Synthetic oligonucleotide
  Antisense strand to SEQ ID NO: 1939776
ucugcagccaaauaaacca

SEQ ID NO: 1939778 - RNA, 19 nt, Artificial Sequence
  Description of Artificial Sequence: Synthetic oligonucleotide
  Sense strand starting at position 2606 of SEQ ID NO: 1879901
gguuuauuuggcugcagau

SEQ ID NO: 1939779 - RNA, 19 nt, Artificial Sequence
  Description of Artificial Sequence: Synthetic oligonucleotide
  Antisense strand to SEQ ID NO: 1939778
aucugcagccaaauaaacc

SEQ ID NO: 1939780 - RNA, 19 nt, Artificial Sequence
  Description of Artificial Sequence: Synthetic oligonucleotide
  Sense strand starting at position 2649 of SEQ ID NO: 1879901
cguugccaaacguuucuua

SEQ ID NO: 1939781 - RNA, 19 nt, Artificial Sequence
  Description of Artificial Sequence: Synthetic oligonucleotide
  Antisense strand to SEQ ID NO: 1939780
uaagaaacguuuggcaacg

SEQ ID NO: 1939782 - RNA, 19 nt, Artificial Sequence
  Description of Artificial Sequence: Synthetic oligonucleotide
  Sense strand starting at position 2824 of SEQ ID NO: 1879901
ggagccauuucuguuuauu

SEQ ID NO: 1939783 - RNA, 19 nt, Artificial Sequence
  Description of Artificial Sequence: Synthetic oligonucleotide
  Antisense strand to SEQ ID NO: 1939782
aauaaacagaaauggcucc

SEQ ID NO: 1939784 - RNA, 19 nt, Artificial Sequence
  Description of Artificial Sequence: Synthetic oligonucleotide
  Sense strand starting at position 2868 of SEQ ID NO: 1879901
cugugauguccacaaauag

SEQ ID NO: 1939785 - RNA, 19 nt, Artificial Sequence
  Description of Artificial Sequence: Synthetic oligonucleotide
  Antisense strand to SEQ ID NO: 1939784
cuauuuguggacaucacag

SEQ ID NO: 1939786 - RNA, 19 nt, Artificial Sequence
  Description of Artificial Sequence: Synthetic oligonucleotide
  Sense strand starting at position 2960 of SEQ ID NO: 1879901
uggugcugcaaauaaauga

SEQ ID NO: 1939787 - RNA, 19 nt, Artificial Sequence
  Description of Artificial Sequence: Synthetic oligonucleotide
  Antisense strand to SEQ ID NO: 1939786
ucauuuauuugcagcacca

SEQ ID NO: 1939788 - RNA, 19 nt, Artificial Sequence
  Description of Artificial Sequence: Synthetic oligonucleotide
  Sense strand starting at position 2989 of SEQ ID NO: 1879901
gaguaauuauagguuaauc

SEQ ID NO: 1939789 - RNA, 19 nt, Artificial Sequence
  Description of Artificial Sequence: Synthetic oligonucleotide
  Antisense strand to SEQ ID NO: 1939788
gauuaaccuauaauuacuc

SEQ ID NO: 1939790 - RNA, 19 nt, Artificial Sequence
  Description of Artificial Sequence: Synthetic oligonucleotide
  Sense strand starting at position 3012 of SEQ ID NO: 1879901
cuacucguuagacagagua

SEQ ID NO: 1939791 - RNA, 19 nt, Artificial Sequence
  Description of Artificial Sequence: Synthetic oligonucleotide
  Antisense strand to SEQ ID NO: 1939790
uacucugucuaacgaguag

SEQ ID NO: 1939792 - RNA, 19 nt, Artificial Sequence
  Description of Artificial Sequence: Synthetic oligonucleotide
  Sense strand starting at position 3014 of SEQ ID NO: 1879901
acucguuagacagaguauu

SEQ ID NO: 1939793 - RNA, 19 nt, Artificial Sequence
  Description of Artificial Sequence: Synthetic oligonucleotide
  Antisense strand to SEQ ID NO: 1939792
aauacucugucuaacgagu

SEQ ID NO: 1939794 - RNA, 19 nt, Artificial Sequence
  Description of Artificial Sequence: Synthetic oligonucleotide
  Sense strand starting at position 3022 of SEQ ID NO: 1879901
gacagaguauuacugcaua

SEQ ID NO: 1939795 - RNA, 19 nt, Artificial Sequence
  Description of Artificial Sequence: Synthetic oligonucleotide
  Antisense strand to SEQ ID NO: 1939794
uaugcaguaauacucuguc

SEQ ID NO: 1939796 - RNA, 19 nt, Artificial Sequence
  Description of Artificial Sequence: Synthetic oligonucleotide
  Sense strand starting at position 3025 of SEQ ID NO: 1879901
agaguauuacugcauauau

SEQ ID NO: 1939797 - RNA, 19 nt, Artificial Sequence
  Description of Artificial Sequence: Synthetic oligonucleotide
  Antisense strand to SEQ ID NO: 1939796
auauaugcaguaauacucu

SEQ ID NO: 1939798 - RNA, 19 nt, Artificial Sequence
  Description of Artificial Sequence: Synthetic oligonucleotide
  Sense strand starting at position 3081 of SEQ ID NO: 1879901
caaacuauguaguuggaaa

SEQ ID NO: 1939799 - RNA, 19 nt, Artificial Sequence
  Description of Artificial Sequence: Synthetic oligonucleotide
  Antisense strand to SEQ ID NO: 1939798
uuuccaacuacauaguuug

SEQ ID NO: 1939800 - RNA, 19 nt, Artificial Sequence
  Description of Artificial Sequence: Synthetic oligonucleotide
  Sense strand starting at position 3134 of SEQ ID NO: 1879901
cugaaauuguacuucgaaa

SEQ ID NO: 1939801 - RNA, 19 nt, Artificial Sequence
  Description of Artificial Sequence: Synthetic oligonucleotide
  Antisense strand to SEQ ID NO: 1939800
uuucgaaguacaauuucag

SEQ ID NO: 1939802 - RNA, 19 nt, Artificial Sequence
  Description of Artificial Sequence: Synthetic oligonucleotide
  Sense strand starting at position 3136 of SEQ ID NO: 1879901
gaaauuguacuucgaaaga

SEQ ID NO: 1939803 - RNA, 19 nt, Artificial Sequence
  Description of Artificial Sequence: Synthetic oligonucleotide
  Antisense strand to SEQ ID NO: 1939802
ucuuucgaaguacaauuuc

SEQ ID NO: 1939804 - RNA, 19 nt, Artificial Sequence
  Description of Artificial Sequence: Synthetic oligonucleotide
  Sense strand starting at position 3161 of SEQ ID NO: 1879901
gaauuuggauauuggagga

SEQ ID NO: 1939805 - RNA, 19 nt, Artificial Sequence
  Description of Artificial Sequence: Synthetic oligonucleotide
  Antisense strand to SEQ ID NO: 1939804
uccuccaauauccaaauuc

SEQ ID NO: 1939806 - RNA, 19 nt, Artificial Sequence
  Description of Artificial Sequence: Synthetic oligonucleotide
  Sense strand starting at position 3258 of SEQ ID NO: 1879901
gguuuagaagccuagcaga

SEQ ID NO: 1939807 - RNA, 19 nt, Artificial Sequence
  Description of Artificial Sequence: Synthetic oligonucleotide
  Antisense strand to SEQ ID NO: 1939806
ucugcuaggcuucuaaacc

SEQ ID NO: 1939808 - RNA, 19 nt, Artificial Sequence
  Description of Artificial Sequence: Synthetic oligonucleotide
  Sense strand starting at position 3295 of SEQ ID NO: 1879901
gguggguaaggugaguaau

SEQ ID NO: 1939809 - RNA, 19 nt, Artificial Sequence
  Description of Artificial Sequence: Synthetic oligonucleotide
  Antisense strand to SEQ ID NO: 1939808
auuacucaccuuacccacc

SEQ ID NO: 1939810 - RNA, 19 nt, Artificial Sequence
  Description of Artificial Sequence: Synthetic oligonucleotide
  Sense strand starting at position 3301 of SEQ ID NO: 1879901
uaaggugaguaauugaagu

SEQ ID NO: 1939811 - RNA, 19 nt, Artificial Sequence
  Description of Artificial Sequence: Synthetic oligonucleotide
  Antisense strand to SEQ ID NO: 1939810
acuucaauuacucaccuua

SEQ ID NO: 1939812 - RNA, 19 nt, Artificial Sequence
  Description of Artificial Sequence: Synthetic oligonucleotide
  Sense strand starting at position 3303 of SEQ ID NO: 1879901
aggugaguaauugaaguau

SEQ ID NO: 1939813 - RNA, 19 nt, Artificial Sequence
  Description of Artificial Sequence: Synthetic oligonucleotide
  Antisense strand to SEQ ID NO: 1939812
auacuucaauuacucaccu

SEQ ID NO: 1939814 - RNA, 19 nt, Artificial Sequence
  Description of Artificial Sequence: Synthetic oligonucleotide
  Sense strand starting at position 38 of SEQ ID NO: 1879902
gguaaugagagcuggaaau

SEQ ID NO: 1939815 - RNA, 19 nt, Artificial Sequence
  Description of Artificial Sequence: Synthetic oligonucleotide
  Antisense strand to SEQ ID NO: 1939814
auuuccagcucucauuacc

SEQ ID NO: 1939816 - RNA, 19 nt, Artificial Sequence
  Description of Artificial Sequence: Synthetic oligonucleotide
  Sense strand starting at position 76 of SEQ ID NO: 1879902
cacucuaggccuuguuuga

SEQ ID NO: 1939817 - RNA, 19 nt, Artificial Sequence
  Description of Artificial Sequence: Synthetic oligonucleotide
  Antisense strand to SEQ ID NO: 1939816
ucaaacaaggccuagagug

SEQ ID NO: 1939818 - RNA, 19 nt, Artificial Sequence
  Description of Artificial Sequence: Synthetic oligonucleotide
  Sense strand starting at position 89 of SEQ ID NO: 1879902
guuugaauguaucuccuuu

SEQ ID NO: 1939819 - RNA, 19 nt, Artificial Sequence
  Description of Artificial Sequence: Synthetic oligonucleotide
  Antisense strand to SEQ ID NO: 1939818
aaaggagauacauucaaac

SEQ ID NO: 1939820 - RNA, 19 nt, Artificial Sequence
  Description of Artificial Sequence: Synthetic oligonucleotide
  Sense strand starting at position 184 of SEQ ID NO: 1879902
gauaaauucugggagaucu

SEQ ID NO: 1939821 - RNA, 19 nt, Artificial Sequence
  Description of Artificial Sequence: Synthetic oligonucleotide
  Antisense strand to SEQ ID NO: 1939820
agaucucccagaauuuauc

SEQ ID NO: 1939822 - RNA, 19 nt, Artificial Sequence
  Description of Artificial Sequence: Synthetic oligonucleotide
  Sense strand starting at position 302 of SEQ ID NO: 1879902
ggagguuaacucugucuuu

SEQ ID NO: 1939823 - RNA, 19 nt, Artificial Sequence
  Description of Artificial Sequence: Synthetic oligonucleotide
  Antisense strand to SEQ ID NO: 1939822
aaagacagaguuaaccucc

SEQ ID NO: 1939824 - RNA, 19 nt, Artificial Sequence
  Description of Artificial Sequence: Synthetic oligonucleotide
  Sense strand starting at position 303 of SEQ ID NO: 1879902
gagguuaacucugucuuua

SEQ ID NO: 1939825 - RNA, 19 nt, Artificial Sequence
  Description of Artificial Sequence: Synthetic oligonucleotide
  Antisense strand to SEQ ID NO: 1939824
uaaagacagaguuaaccuc

SEQ ID NO: 1939826 - RNA, 19 nt, Artificial Sequence
  Description of Artificial Sequence: Synthetic oligonucleotide
  Sense strand starting at position 305 of SEQ ID NO: 1879902
gguuaacucugucuuuauu

SEQ ID NO: 1939827 - RNA, 19 nt, Artificial Sequence
  Description of Artificial Sequence: Synthetic oligonucleotide
  Antisense strand to SEQ ID NO: 1939826
aauaaagacagaguuaacc

SEQ ID NO: 1939828 - RNA, 19 nt, Artificial Sequence
  Description of Artificial Sequence: Synthetic oligonucleotide
  Sense strand starting at position 320 of SEQ ID NO: 1879902
uauugaaacuugucagcag

SEQ ID NO: 1939829 - RNA, 19 nt, Artificial Sequence
  Description of Artificial Sequence: Synthetic oligonucleotide
  Antisense strand to SEQ ID NO: 1939828
cugcugacaaguuucaaua

SEQ ID NO: 1939830 - RNA, 19 nt, Artificial Sequence
  Description of Artificial Sequence: Synthetic oligonucleotide
  Sense strand starting at position 361 of SEQ ID NO: 1879902
aguuuaggaugccugaguu

SEQ ID NO: 1939831 - RNA, 19 nt, Artificial Sequence
  Description of Artificial Sequence: Synthetic oligonucleotide
  Antisense strand to SEQ ID NO: 1939830
aacucaggcauccuaaacu

SEQ ID NO: 1939832 - RNA, 19 nt, Artificial Sequence
  Description of Artificial Sequence: Synthetic oligonucleotide
  Sense strand starting at position 402 of SEQ ID NO: 1879902
caugaugggugaucgugaa

SEQ ID NO: 1939833 - RNA, 19 nt, Artificial Sequence
  Description of Artificial Sequence: Synthetic oligonucleotide
  Antisense strand to SEQ ID NO: 1939832
uucacgaucacccaucaug

SEQ ID NO: 1939834 - RNA, 19 nt, Artificial Sequence
  Description of Artificial Sequence: Synthetic oligonucleotide
  Sense strand starting at position 406 of SEQ ID NO: 1879902
augggugaucgugaacaac

SEQ ID NO: 1939835 - RNA, 19 nt, Artificial Sequence
  Description of Artificial Sequence: Synthetic oligonucleotide
  Antisense strand to SEQ ID NO: 1939834
guuguucacgaucacccau

SEQ ID NO: 1939836 - RNA, 19 nt, Artificial Sequence
  Description of Artificial Sequence: Synthetic oligonucleotide
  Sense strand starting at position 446 of SEQ ID NO: 1879902
gcuucuccuucugugaaau

SEQ ID NO: 1939837 - RNA, 19 nt, Artificial Sequence
  Description of Artificial Sequence: Synthetic oligonucleotide
  Antisense strand to SEQ ID NO: 1939836
auuucacagaaggagaagc

SEQ ID NO: 1939838 - RNA, 19 nt, Artificial Sequence
  Description of Artificial Sequence: Synthetic oligonucleotide
  Sense strand starting at position 447 of SEQ ID NO: 1879902
cuucuccuucugugaaaug

SEQ ID NO: 1939839 - RNA, 19 nt, Artificial Sequence
  Description of Artificial Sequence: Synthetic oligonucleotide
  Antisense strand to SEQ ID NO: 1939838
cauuucacagaaggagaag

SEQ ID NO: 1939840 - RNA, 19 nt, Artificial Sequence
  Description of Artificial Sequence: Synthetic oligonucleotide
  Sense strand starting at position 513 of SEQ ID NO: 1879902
cugugauuagcagguagau

SEQ ID NO: 1939841 - RNA, 19 nt, Artificial Sequence
  Description of Artificial Sequence: Synthetic oligonucleotide
  Antisense strand to SEQ ID NO: 1939840
aucuaccugcuaaucacag

SEQ ID NO: 1939842 - RNA, 19 nt, Artificial Sequence
  Description of Artificial Sequence: Synthetic oligonucleotide
  Sense strand starting at position 525 of SEQ ID NO: 1879902
gguagauggugcuucauuu

SEQ ID NO: 1939843 - RNA, 19 nt, Artificial Sequence
  Description of Artificial Sequence: Synthetic oligonucleotide
  Antisense strand to SEQ ID NO: 1939842
aaaugaagcaccaucuacc

SEQ ID NO: 1939844 - RNA, 19 nt, Artificial Sequence
  Description of Artificial Sequence: Synthetic oligonucleotide
  Sense strand starting at position 1166 of SEQ ID NO: 1879902
uucucuuugucucugaaag

SEQ ID NO: 1939845 - RNA, 19 nt, Artificial Sequence
  Description of Artificial Sequence: Synthetic oligonucleotide
  Antisense strand to SEQ ID NO: 1939844
cuuucagagacaaagagaa

SEQ ID NO: 1939846 - RNA, 19 nt, Artificial Sequence
  Description of Artificial Sequence: Synthetic oligonucleotide
  Sense strand starting at position 1167 of SEQ ID NO: 1879902
ucucuuugucucugaaagg

SEQ ID NO: 1939847 - RNA, 19 nt, Artificial Sequence
  Description of Artificial Sequence: Synthetic oligonucleotide
  Antisense strand to SEQ ID NO: 1939846
ccuuucagagacaaagaga

SEQ ID NO: 1939848 - RNA, 19 nt, Artificial Sequence
  Description of Artificial Sequence: Synthetic oligonucleotide
  Sense strand starting at position 1208 of SEQ ID NO: 1879902
agaaaugccugaucccaac

SEQ ID NO: 1939849 - RNA, 19 nt, Artificial Sequence
  Description of Artificial Sequence: Synthetic oligonucleotide
  Antisense strand to SEQ ID NO: 1939848
guugggaucaggcauuucu

SEQ ID NO: 1939850 - RNA, 19 nt, Artificial Sequence
  Description of Artificial Sequence: Synthetic oligonucleotide
  Sense strand starting at position 1242 of SEQ ID NO: 1879902
acacgugugggcgauucau

SEQ ID NO: 1939851 - RNA, 19 nt, Artificial Sequence
  Description of Artificial Sequence: Synthetic oligonucleotide
  Antisense strand to SEQ ID NO: 1939850
augaaucgcccacacgugu

SEQ ID NO: 1939852 - RNA, 19 nt, Artificial Sequence
  Description of Artificial Sequence: Synthetic oligonucleotide
  Sense strand starting at position 1316 of SEQ ID NO: 1879902
gcaggauucucuuucccau

SEQ ID NO: 1939853 - RNA, 19 nt, Artificial Sequence
  Description of Artificial Sequence: Synthetic oligonucleotide
  Antisense strand to SEQ ID NO: 1939852
augggaaagagaauccugc

SEQ ID NO: 1939854 - RNA, 19 nt, Artificial Sequence
  Description of Artificial Sequence: Synthetic oligonucleotide
  Sense strand starting at position 1465 of SEQ ID NO: 1879902
cugacuugugacuguguga

SEQ ID NO: 1939855 - RNA, 19 nt, Artificial Sequence
  Description of Artificial Sequence: Synthetic oligonucleotide
  Antisense strand to SEQ ID NO: 1939854
ucacacagucacaagucag

SEQ ID NO: 1939856 - RNA, 19 nt, Artificial Sequence
  Description of Artificial Sequence: Synthetic oligonucleotide
  Sense strand starting at position 1533 of SEQ ID NO: 1879902
cucauagacuaagugagau

SEQ ID NO: 1939857 - RNA, 19 nt, Artificial Sequence
  Description of Artificial Sequence: Synthetic oligonucleotide
  Antisense strand to SEQ ID NO: 1939856
aucucacuuagucuaugag

SEQ ID NO: 1939858 - RNA, 19 nt, Artificial Sequence
  Description of Artificial Sequence: Synthetic oligonucleotide
  Sense strand starting at position 1568 of SEQ ID NO: 1879902
cacgguacccuggaucaua

SEQ ID NO: 1939859 - RNA, 19 nt, Artificial Sequence
  Description of Artificial Sequence: Synthetic oligonucleotide
  Antisense strand to SEQ ID NO: 1939858
uaugauccaggguaccgug

SEQ ID NO: 1939860 - RNA, 19 nt, Artificial Sequence
  Description of Artificial Sequence: Synthetic oligonucleotide
  Sense strand starting at position 1692 of SEQ ID NO: 1879902
accggagggucuuugcaaa

SEQ ID NO: 1939861 - RNA, 19 nt, Artificial Sequence
  Description of Artificial Sequence: Synthetic oligonucleotide
  Antisense strand to SEQ ID NO: 1939860
uuugcaaagacccuccggu

SEQ ID NO: 1939862 - RNA, 19 nt, Artificial Sequence
  Description of Artificial Sequence: Synthetic oligonucleotide
  Sense strand starting at position 2288 of SEQ ID NO: 1879902
acaugauguuacuuuagag

SEQ ID NO: 1939863 - RNA, 19 nt, Artificial Sequence
  Description of Artificial Sequence: Synthetic oligonucleotide
  Antisense strand to SEQ ID NO: 1939862
cucuaaaguaacaucaugu

SEQ ID NO: 1939864 - RNA, 19 nt, Artificial Sequence
  Description of Artificial Sequence: Synthetic oligonucleotide
  Sense strand starting at position 2298 of SEQ ID NO: 1879902
acuuuagagugucucccaa

SEQ ID NO: 1939865 - RNA, 19 nt, Artificial Sequence
  Description of Artificial Sequence: Synthetic oligonucleotide
  Antisense strand to SEQ ID NO: 1939864
uugggagacacucuaaagu

SEQ ID NO: 1939866 - RNA, 19 nt, Artificial Sequence
  Description of Artificial Sequence: Synthetic oligonucleotide
  Sense strand starting at position 2300 of SEQ ID NO: 1879902
uuuagagugucucccaaag

SEQ ID NO: 1939867 - RNA, 19 nt, Artificial Sequence
  Description of Artificial Sequence: Synthetic oligonucleotide
  Antisense strand to SEQ ID NO: 1939866
cuuugggagacacucuaaa

SEQ ID NO: 1939868 - RNA, 19 nt, Artificial Sequence
  Description of Artificial Sequence: Synthetic oligonucleotide
  Sense strand starting at position 2753 of SEQ ID NO: 1879902
gauaaauagugcucuccag

SEQ ID NO: 1939869 - RNA, 19 nt, Artificial Sequence
  Description of Artificial Sequence: Synthetic oligonucleotide
  Antisense strand to SEQ ID NO: 1939868
cuggagagcacuauuuauc

SEQ ID NO: 1939870 - RNA, 19 nt, Artificial Sequence
  Description of Artificial Sequence: Synthetic oligonucleotide
  Sense strand starting at position 3026 of SEQ ID NO: 1879902
aguccagaguuccucauua

SEQ ID NO: 1939871 - RNA, 19 nt, Artificial Sequence
  Description of Artificial Sequence: Synthetic oligonucleotide
  Antisense strand to SEQ ID NO: 1939870
uaaugaggaacucuggacu

SEQ ID NO: 1939872 - RNA, 19 nt, Artificial Sequence
  Description of Artificial Sequence: Synthetic oligonucleotide
  Sense strand starting at position 3109 of SEQ ID NO: 1879902
gaacacuuacugugaggca

SEQ ID NO: 1939873 - RNA, 19 nt, Artificial Sequence
  Description of Artificial Sequence: Synthetic oligonucleotide
  Antisense strand to SEQ ID NO: 1939872
ugccucacaguaaguguuc

SEQ ID NO: 1939874 - RNA, 19 nt, Artificial Sequence
  Description of Artificial Sequence: Synthetic oligonucleotide
  Sense strand starting at position 3204 of SEQ ID NO: 1879902
uuugauuaccagugggaua

SEQ ID NO: 1939875 - RNA, 19 nt, Artificial Sequence
  Description of Artificial Sequence: Synthetic oligonucleotide
  Antisense strand to SEQ ID NO: 1939874
uaucccacugguaaucaaa

SEQ ID NO: 1939876 - RNA, 19 nt, Artificial Sequence
  Description of Artificial Sequence: Synthetic oligonucleotide
  Sense strand starting at position 3205 of SEQ ID NO: 1879902
uugauuaccagugggauaa

SEQ ID NO: 1939877 - RNA, 19 nt, Artificial Sequence
  Description of Artificial Sequence: Synthetic oligonucleotide
  Antisense strand to SEQ ID NO: 1939876
uuaucccacugguaaucaa

SEQ ID NO: 1939878 - RNA, 19 nt, Artificial Sequence
  Description of Artificial Sequence: Synthetic oligonucleotide
  Sense strand starting at position 3317 of SEQ ID NO: 1879902
gagaauugcuuccugagaa

SEQ ID NO: 1939879 - RNA, 19 nt, Artificial Sequence
  Description of Artificial Sequence: Synthetic oligonucleotide
  Antisense strand to SEQ ID NO: 1939878
uucucaggaagcaauucuc

SEQ ID NO: 1939880 - RNA, 19 nt, Artificial Sequence
  Description of Artificial Sequence: Synthetic oligonucleotide
  Sense strand starting at position 3346 of SEQ ID NO: 1879902
guaugaaggugaucuggaa

SEQ ID NO: 1939881 - RNA, 19 nt, Artificial Sequence
  Description of Artificial Sequence: Synthetic oligonucleotide
  Antisense strand to SEQ ID NO: 1939880
uuccagaucaccuucauac

SEQ ID NO: 1939882 - RNA, 19 nt, Artificial Sequence
  Description of Artificial Sequence: Synthetic oligonucleotide
  Sense strand starting at position 3456 of SEQ ID NO: 1879902
ccguguguucaggaacuca

SEQ ID NO: 1939883 - RNA, 19 nt, Artificial Sequence
  Description of Artificial Sequence: Synthetic oligonucleotide
  Antisense strand to SEQ ID NO: 1939882
ugaguuccugaacacacgg

SEQ ID NO: 1939884 - RNA, 19 nt, Artificial Sequence
  Description of Artificial Sequence: Synthetic oligonucleotide
  Sense strand starting at position 3559 of SEQ ID NO: 1879902
acugaaggguucuaaauag

SEQ ID NO: 1939885 - RNA, 19 nt, Artificial Sequence
  Description of Artificial Sequence: Synthetic oligonucleotide
  Antisense strand to SEQ ID NO: 1939884
cuauuuagaacccuucagu

SEQ ID NO: 1939886 - RNA, 19 nt, Artificial Sequence
  Description of Artificial Sequence: Synthetic oligonucleotide
  Sense strand starting at position 3567 of SEQ ID NO: 1879902
guucuaaauagguguggaa

SEQ ID NO: 1939887 - RNA, 19 nt, Artificial Sequence
  Description of Artificial Sequence: Synthetic oligonucleotide
  Antisense strand to SEQ ID NO: 1939886
uuccacaccuauuuagaac

SEQ ID NO: 1939888 - RNA, 19 nt, Artificial Sequence
  Description of Artificial Sequence: Synthetic oligonucleotide
  Sense strand starting at position 3704 of SEQ ID NO: 1879902
gccugucugagggagucau

SEQ ID NO: 1939889 - RNA, 19 nt, Artificial Sequence
  Description of Artificial Sequence: Synthetic oligonucleotide
  Antisense strand to SEQ ID NO: 1939888
augacucccucagacaggc

SEQ ID NO: 1939890 - RNA, 19 nt, Artificial Sequence
  Description of Artificial Sequence: Synthetic oligonucleotide
  Sense strand starting at position 3784 of SEQ ID NO: 1879902
cugccacucccaugaguau

SEQ ID NO: 1939891 - RNA, 19 nt, Artificial Sequence
  Description of Artificial Sequence: Synthetic oligonucleotide
  Antisense strand to SEQ ID NO: 1939890
auacucaugggaguggcag

SEQ ID NO: 1939892 - RNA, 19 nt, Artificial Sequence
  Description of Artificial Sequence: Synthetic oligonucleotide
  Sense strand starting at position 3849 of SEQ ID NO: 1879902
uagggcugcuucucaggaa

SEQ ID NO: 1939893 - RNA, 19 nt, Artificial Sequence
  Description of Artificial Sequence: Synthetic oligonucleotide
  Antisense strand to SEQ ID NO: 1939892
uuccugagaagcagcccua

SEQ ID NO: 1939894 - RNA, 19 nt, Artificial Sequence
  Description of Artificial Sequence: Synthetic oligonucleotide
  Sense strand starting at position 2596 of SEQ ID NO: 1879913
guucguucucguuccggaa

SEQ ID NO: 1939895 - RNA, 19 nt, Artificial Sequence
  Description of Artificial Sequence: Synthetic oligonucleotide
  Antisense strand to SEQ ID NO: 1939894
uuccggaacgagaacgaac

SEQ ID NO: 1939896 - RNA, 19 nt, Artificial Sequence
  Description of Artificial Sequence: Synthetic oligonucleotide
  Sense strand starting at position 2897 of SEQ ID NO: 1879913
gcgagaacguuugagccuu

SEQ ID NO: 1939897 - RNA, 19 nt, Artificial Sequence
  Description of Artificial Sequence: Synthetic oligonucleotide
  Antisense strand to SEQ ID NO: 1939896
aaggcucaaacguucucgc

SEQ ID NO: 1939898 - RNA, 19 nt, Artificial Sequence
  Description of Artificial Sequence: Synthetic oligonucleotide
  Sense strand starting at position 2903 of SEQ ID NO: 1879913
acguuugagccuuagagag

SEQ ID NO: 1939899 - RNA, 19 nt, Artificial Sequence
  Description of Artificial Sequence: Synthetic oligonucleotide
  Antisense strand to SEQ ID NO: 1939898
cucucuaaggcucaaacgu

SEQ ID NO: 1939900 - RNA, 19 nt, Artificial Sequence
  Description of Artificial Sequence: Synthetic oligonucleotide
  Sense strand starting at position 2905 of SEQ ID NO: 1879913
guuugagccuuagagagga

SEQ ID NO: 1939901 - RNA, 19 nt, Artificial Sequence
  Description of Artificial Sequence: Synthetic oligonucleotide
  Antisense strand to SEQ ID NO: 1939900
uccucucuaaggcucaaac

SEQ ID NO: 1939902 - RNA, 19 nt, Artificial Sequence
  Description of Artificial Sequence: Synthetic oligonucleotide
  Sense strand starting at position 2978 of SEQ ID NO: 1879913
ggguuugagcugugccuga

SEQ ID NO: 1939903 - RNA, 19 nt, Artificial Sequence
  Description of Artificial Sequence: Synthetic oligonucleotide
  Antisense strand to SEQ ID NO: 1939902
ucaggcacagcucaaaccc

SEQ ID NO: 1939904 - RNA, 19 nt, Artificial Sequence
  Description of Artificial Sequence: Synthetic oligonucleotide
  Sense strand starting at position 3239 of SEQ ID NO: 1879913
gcguguccucgguacugga

SEQ ID NO: 1939905 - RNA, 19 nt, Artificial Sequence
  Description of Artificial Sequence: Synthetic oligonucleotide
  Antisense strand to SEQ ID NO: 1939904
uccaguaccgaggacacgc

SEQ ID NO: 1939906 - RNA, 19 nt, Artificial Sequence
  Description of Artificial Sequence: Synthetic oligonucleotide
  Sense strand starting at position 3329 of SEQ ID NO: 1879913
uguccuuccucccggguaa

SEQ ID NO: 1939907 - RNA, 19 nt, Artificial Sequence
  Description of Artificial Sequence: Synthetic oligonucleotide
  Antisense strand to SEQ ID NO: 1939906
uuacccgggaggaaggaca

SEQ ID NO: 1939908 - RNA, 19 nt, Artificial Sequence
  Description of Artificial Sequence: Synthetic oligonucleotide
  Sense strand starting at position 3330 of SEQ ID NO: 1879913
guccuuccucccggguaaa

SEQ ID NO: 1939909 - RNA, 19 nt, Artificial Sequence
  Description of Artificial Sequence: Synthetic oligonucleotide
  Antisense strand to SEQ ID NO: 1939908
uuuacccgggaggaaggac

SEQ ID NO: 1939910 - RNA, 19 nt, Artificial Sequence
  Description of Artificial Sequence: Synthetic oligonucleotide
  Sense strand starting at position 3424 of SEQ ID NO: 1879913
gguuuauaagguugcgacu

SEQ ID NO: 1939911 - RNA, 19 nt, Artificial Sequence
  Description of Artificial Sequence: Synthetic oligonucleotide
  Antisense strand to SEQ ID NO: 1939910
agucgcaaccuuauaaacc

SEQ ID NO: 1939912 - RNA, 19 nt, Artificial Sequence
  Description of Artificial Sequence: Synthetic oligonucleotide
  Sense strand starting at position 3457 of SEQ ID NO: 1879913
aauugaauugccuggugga

SEQ ID NO: 1939913 - RNA, 19 nt, Artificial Sequence
  Description of Artificial Sequence: Synthetic oligonucleotide
  Antisense strand to SEQ ID NO: 1939912
uccaccaggcaauucaauu

SEQ ID NO: 1939914 - RNA, 19 nt, Artificial Sequence
  Description of Artificial Sequence: Synthetic oligonucleotide
  Sense strand starting at position 3458 of SEQ ID NO: 1879913
auugaauugccugguggau

SEQ ID NO: 1939915 - RNA, 19 nt, Artificial Sequence
  Description of Artificial Sequence: Synthetic oligonucleotide
  Antisense strand to SEQ ID NO: 1939914
auccaccaggcaauucaau

SEQ ID NO: 1939916 - RNA, 19 nt, Artificial Sequence
  Description of Artificial Sequence: Synthetic oligonucleotide
  Sense strand starting at position 3514 of SEQ ID NO: 1879913
uggccugcaccuuagugau

SEQ ID NO: 1939917 - RNA, 19 nt, Artificial Sequence
  Description of Artificial Sequence: Synthetic oligonucleotide
  Antisense strand to SEQ ID NO: 1939916
aucacuaaggugcaggcca

SEQ ID NO: 1939918 - RNA, 19 nt, Artificial Sequence
  Description of Artificial Sequence: Synthetic oligonucleotide
  Sense strand starting at position 3538 of SEQ ID NO: 1879913
gcgugguguuucugcugga

SEQ ID NO: 1939919 - RNA, 19 nt, Artificial Sequence
  Description of Artificial Sequence: Synthetic oligonucleotide
  Antisense strand to SEQ ID NO: 1939918
uccagcagaaacaccacgc

SEQ ID NO: 1939920 - RNA, 19 nt, Artificial Sequence
  Description of Artificial Sequence: Synthetic oligonucleotide
  Sense strand starting at position 3582 of SEQ ID NO: 1879913
cauccugaauaguugugau

SEQ ID NO: 1939921 - RNA, 19 nt, Artificial Sequence
  Description of Artificial Sequence: Synthetic oligonucleotide
  Antisense strand to SEQ ID NO: 1939920
aucacaacuauucaggaug

SEQ ID NO: 1939922 - RNA, 19 nt, Artificial Sequence
  Description of Artificial Sequence: Synthetic oligonucleotide
  Sense strand starting at position 3585 of SEQ ID NO: 1879913
ccugaauaguugugauguu

SEQ ID NO: 1939923 - RNA, 19 nt, Artificial Sequence
  Description of Artificial Sequence: Synthetic oligonucleotide
  Antisense strand to SEQ ID NO: 1939922
aacaucacaacuauucagg

SEQ ID NO: 1939924 - RNA, 19 nt, Artificial Sequence
  Description of Artificial Sequence: Synthetic oligonucleotide
  Sense strand starting at position 3658 of SEQ ID NO: 1879913
ugggcuugggcgugugaaa

SEQ ID NO: 1939925 - RNA, 19 nt, Artificial Sequence
  Description of Artificial Sequence: Synthetic oligonucleotide
  Antisense strand to SEQ ID NO: 1939924
uuucacacgcccaagccca

SEQ ID NO: 1939926 - RNA, 19 nt, Artificial Sequence
  Description of Artificial Sequence: Synthetic oligonucleotide
  Sense strand starting at position 3684 of SEQ ID NO: 1879913
gcagauuuacggugcgguu

SEQ ID NO: 1939927 - RNA, 19 nt, Artificial Sequence
  Description of Artificial Sequence: Synthetic oligonucleotide
  Antisense strand to SEQ ID NO: 1939926
aaccgcaccguaaaucugc

SEQ ID NO: 1939928 - RNA, 19 nt, Artificial Sequence
  Description of Artificial Sequence: Synthetic oligonucleotide
  Sense strand starting at position 3778 of SEQ ID NO: 1879913
aguggcguuucaucuaagu

SEQ ID NO: 1939929 - RNA, 19 nt, Artificial Sequence
  Description of Artificial Sequence: Synthetic oligonucleotide
  Antisense strand to SEQ ID NO: 1939928
acuuagaugaaacgccacu

SEQ ID NO: 1939930 - RNA, 19 nt, Artificial Sequence
  Description of Artificial Sequence: Synthetic oligonucleotide
  Sense strand starting at position 2596 of SEQ ID NO: 1879923
guucguucucguuccggaa

SEQ ID NO: 1939931 - RNA, 19 nt, Artificial Sequence
  Description of Artificial Sequence: Synthetic oligonucleotide
  Antisense strand to SEQ ID NO: 1939930
uuccggaacgagaacgaac

SEQ ID NO: 1939932 - RNA, 19 nt, Artificial Sequence
  Description of Artificial Sequence: Synthetic oligonucleotide
  Sense strand starting at position 2897 of SEQ ID NO: 1879923
gcgagaacguuugagccuu

SEQ ID NO: 1939933 - RNA, 19 nt, Artificial Sequence
  Description of Artificial Sequence: Synthetic oligonucleotide
  Antisense strand to SEQ ID NO: 1939932
aaggcucaaacguucucgc

SEQ ID NO: 1939934 - RNA, 19 nt, Artificial Sequence
  Description of Artificial Sequence: Synthetic oligonucleotide
  Sense strand starting at position 2903 of SEQ ID NO: 1879923
acguuugagccuuagagag

SEQ ID NO: 1939935 - RNA, 19 nt, Artificial Sequence
  Description of Artificial Sequence: Synthetic oligonucleotide
  Antisense strand to SEQ ID NO: 1939934
cucucuaaggcucaaacgu

SEQ ID NO: 1939936 - RNA, 19 nt, Artificial Sequence
  Description of Artificial Sequence: Synthetic oligonucleotide
  Sense strand starting at position 2905 of SEQ ID NO: 1879923
guuugagccuuagagagga

SEQ ID NO: 1939937 - RNA, 19 nt, Artificial Sequence
  Description of Artificial Sequence: Synthetic oligonucleotide
  Antisense strand to SEQ ID NO: 1939936
uccucucuaaggcucaaac

SEQ ID NO: 1939938 - RNA, 19 nt, Artificial Sequence
  Description of Artificial Sequence: Synthetic oligonucleotide
  Sense strand starting at position 2978 of SEQ ID NO: 1879923
ggguuugagcugugccuga

SEQ ID NO: 1939939 - RNA, 19 nt, Artificial Sequence
  Description of Artificial Sequence: Synthetic oligonucleotide
  Antisense strand to SEQ ID NO: 1939938
ucaggcacagcucaaaccc

SEQ ID NO: 1939940 - RNA, 19 nt, Artificial Sequence
  Description of Artificial Sequence: Synthetic oligonucleotide
  Sense strand starting at position 3239 of SEQ ID NO: 1879923
gcguguccucgguacugga

SEQ ID NO: 1939941 - RNA, 19 nt, Artificial Sequence
  Description of Artificial Sequence: Synthetic oligonucleotide
  Antisense strand to SEQ ID NO: 1939940
uccaguaccgaggacacgc

SEQ ID NO: 1939942 - RNA, 19 nt, Artificial Sequence
  Description of Artificial Sequence: Synthetic oligonucleotide
  Sense strand starting at position 3329 of SEQ ID NO: 1879923
uguccuuccucccggguaa

SEQ ID NO: 1939943 - RNA, 19 nt, Artificial Sequence
  Description of Artificial Sequence: Synthetic oligonucleotide
  Antisense strand to SEQ ID NO: 1939942
uuacccgggaggaaggaca

SEQ ID NO: 1939944 - RNA, 19 nt, Artificial Sequence
  Description of Artificial Sequence: Synthetic oligonucleotide
  Sense strand starting at position 3330 of SEQ ID NO: 1879923
guccuuccucccggguaaa

SEQ ID NO: 1939945 - RNA, 19 nt, Artificial Sequence
  Description of Artificial Sequence: Synthetic oligonucleotide
  Antisense strand to SEQ ID NO: 1939944
uuuacccgggaggaaggac

SEQ ID NO: 1939946 - RNA, 19 nt, Artificial Sequence
  Description of Artificial Sequence: Synthetic oligonucleotide
  Sense strand starting at position 3424 of SEQ ID NO: 1879923
gguuuauaagguugcgacu

SEQ ID NO: 1939947 - RNA, 19 nt, Artificial Sequence
  Description of Artificial Sequence: Synthetic oligonucleotide
  Antisense strand to SEQ ID NO: 1939946
agucgcaaccuuauaaacc

SEQ ID NO: 1939948 - RNA, 19 nt, Artificial Sequence
  Description of Artificial Sequence: Synthetic oligonucleotide
  Sense strand starting at position 3457 of SEQ ID NO: 1879923
aauugaauugccuggugga

SEQ ID NO: 1939949 - RNA, 19 nt, Artificial Sequence
  Description of Artificial Sequence: Synthetic oligonucleotide
  Antisense strand to SEQ ID NO: 1939948
uccaccaggcaauucaauu

SEQ ID NO: 1939950 - RNA, 19 nt, Artificial Sequence
  Description of Artificial Sequence: Synthetic oligonucleotide
  Sense strand starting at position 3458 of SEQ ID NO: 1879923
auugaauugccugguggau

SEQ ID NO: 1939951 - RNA, 19 nt, Artificial Sequence
  Description of Artificial Sequence: Synthetic oligonucleotide
  Antisense strand to SEQ ID NO: 1939950
auccaccaggcaauucaau

SEQ ID NO: 1939952 - RNA, 19 nt, Artificial Sequence
  Description of Artificial Sequence: Synthetic oligonucleotide
  Sense strand starting at position 3514 of SEQ ID NO: 1879923
uggccugcaccuuagugau

SEQ ID NO: 1939953 - RNA, 19 nt, Artificial Sequence
  Description of Artificial Sequence: Synthetic oligonucleotide
  Antisense strand to SEQ ID NO: 1939952
aucacuaaggugcaggcca

SEQ ID NO: 1939954 - RNA, 19 nt, Artificial Sequence
  Description of Artificial Sequence: Synthetic oligonucleotide
  Sense strand starting at position 3538 of SEQ ID NO: 1879923
gcgugguguuucugcugga

SEQ ID NO: 1939955 - RNA, 19 nt, Artificial Sequence
  Description of Artificial Sequence: Synthetic oligonucleotide
  Antisense strand to SEQ ID NO: 1939954
uccagcagaaacaccacgc

SEQ ID NO: 1939956 - RNA, 19 nt, Artificial Sequence
  Description of Artificial Sequence: Synthetic oligonucleotide
  Sense strand starting at position 3582 of SEQ ID NO: 1879923
cauccugaauaguugugau

SEQ ID NO: 1939957 - RNA, 19 nt, Artificial Sequence
  Description of Artificial Sequence: Synthetic oligonucleotide
  Antisense strand to SEQ ID NO: 1939956
aucacaacuauucaggaug

SEQ ID NO: 1939958 - RNA, 19 nt, Artificial Sequence
  Description of Artificial Sequence: Synthetic oligonucleotide
  Sense strand starting at position 3585 of SEQ ID NO: 1879923
ccugaauaguugugauguu

SEQ ID NO: 1939959 - RNA, 19 nt, Artificial Sequence
  Description of Artificial Sequence: Synthetic oligonucleotide
  Antisense strand to SEQ ID NO: 1939958
aacaucacaacuauucagg

SEQ ID NO: 1939960 - RNA, 19 nt, Artificial Sequence
  Description of Artificial Sequence: Synthetic oligonucleotide
  Sense strand starting at position 3658 of SEQ ID NO: 1879923
ugggcuugggcgugugaaa

SEQ ID NO: 1939961 - RNA, 19 nt, Artificial Sequence
  Description of Artificial Sequence: Synthetic oligonucleotide
  Antisense strand to SEQ ID NO: 1939960
uuucacacgcccaagccca

SEQ ID NO: 1939962 - RNA, 19 nt, Artificial Sequence
  Description of Artificial Sequence: Synthetic oligonucleotide
  Sense strand starting at position 3684 of SEQ ID NO: 1879923
gcagauuuacggugcgguu

SEQ ID NO: 1939963 - RNA, 19 nt, Artificial Sequence
  Description of Artificial Sequence: Synthetic oligonucleotide
  Antisense strand to SEQ ID NO: 1939962
aaccgcaccguaaaucugc

SEQ ID NO: 1939964 - RNA, 19 nt, Artificial Sequence
  Description of Artificial Sequence: Synthetic oligonucleotide
  Sense strand starting at position 3778 of SEQ ID NO: 1879923
aguggcguuucaucuaagu

SEQ ID NO: 1939965 - RNA, 19 nt, Artificial Sequence
  Description of Artificial Sequence: Synthetic oligonucleotide
  Antisense strand to SEQ ID NO: 1939964
acuuagaugaaacgccacu

SEQ ID NO: 1939966 - RNA, 19 nt, Artificial Sequence
  Description of Artificial Sequence: Synthetic oligonucleotide
  Sense strand starting at position 2596 of SEQ ID NO: 1879933
guucguucucguuccggaa

SEQ ID NO: 1939967 - RNA, 19 nt, Artificial Sequence
  Description of Artificial Sequence: Synthetic oligonucleotide
  Antisense strand to SEQ ID NO: 1939966
uuccggaacgagaacgaac

SEQ ID NO: 1939968 - RNA, 19 nt, Artificial Sequence
  Description of Artificial Sequence: Synthetic oligonucleotide
  Sense strand starting at position 2897 of SEQ ID NO: 1879933
gcgagaacguuugagccuu

SEQ ID NO: 1939969 - RNA, 19 nt, Artificial Sequence
  Description of Artificial Sequence: Synthetic oligonucleotide
  Antisense strand to SEQ ID NO: 1939968
aaggcucaaacguucucgc

SEQ ID NO: 1939970 - RNA, 19 nt, Artificial Sequence
  Description of Artificial Sequence: Synthetic oligonucleotide
  Sense strand starting at position 2903 of SEQ ID NO: 1879933
acguuugagccuuagagag

SEQ ID NO: 1939971 - RNA, 19 nt, Artificial Sequence
  Description of Artificial Sequence: Synthetic oligonucleotide
  Antisense strand to SEQ ID NO: 1939970
cucucuaaggcucaaacgu

SEQ ID NO: 1939972 - RNA, 19 nt, Artificial Sequence
  Description of Artificial Sequence: Synthetic oligonucleotide
  Sense strand starting at position 2905 of SEQ ID NO: 1879933
guuugagccuuagagagga

SEQ ID NO: 1939973 - RNA, 19 nt, Artificial Sequence
  Description of Artificial Sequence: Synthetic oligonucleotide
  Antisense strand to SEQ ID NO: 1939972
uccucucuaaggcucaaac

SEQ ID NO: 1939974 - RNA, 19 nt, Artificial Sequence
  Description of Artificial Sequence: Synthetic oligonucleotide
  Sense strand starting at position 2978 of SEQ ID NO: 1879933
ggguuugagcugugccuga

SEQ ID NO: 1939975 - RNA, 19 nt, Artificial Sequence
  Description of Artificial Sequence: Synthetic oligonucleotide
  Antisense strand to SEQ ID NO: 1939974
ucaggcacagcucaaaccc

SEQ ID NO: 1939976 - RNA, 19 nt, Artificial Sequence
  Description of Artificial Sequence: Synthetic oligonucleotide
  Sense strand starting at position 3239 of SEQ ID NO: 1879933
gcguguccucgguacugga

SEQ ID NO: 1939977 - RNA, 19 nt, Artificial Sequence
  Description of Artificial Sequence: Synthetic oligonucleotide
  Antisense strand to SEQ ID NO: 1939976
uccaguaccgaggacacgc

SEQ ID NO: 1939978 - RNA, 19 nt, Artificial Sequence
  Description of Artificial Sequence: Synthetic oligonucleotide
  Sense strand starting at position 3329 of SEQ ID NO: 1879933
uguccuuccucccggguaa

SEQ ID NO: 1939979 - RNA, 19 nt, Artificial Sequence
  Description of Artificial Sequence: Synthetic oligonucleotide
  Antisense strand to SEQ ID NO: 1939978
uuacccgggaggaaggaca

SEQ ID NO: 1939980 - RNA, 19 nt, Artificial Sequence
  Description of Artificial Sequence: Synthetic oligonucleotide
  Sense strand starting at position 3330 of SEQ ID NO: 1879933
guccuuccucccggguaaa

SEQ ID NO: 1939981 - RNA, 19 nt, Artificial Sequence
  Description of Artificial Sequence: Synthetic oligonucleotide
  Antisense strand to SEQ ID NO: 1939980
uuuacccgggaggaaggac

SEQ ID NO: 1939982 - RNA, 19 nt, Artificial Sequence
  Description of Artificial Sequence: Synthetic oligonucleotide
  Sense strand starting at position 3424 of SEQ ID NO: 1879933
gguuuauaagguugcgacu

SEQ ID NO: 1939983 - RNA, 19 nt, Artificial Sequence
  Description of Artificial Sequence: Synthetic oligonucleotide
  Antisense strand to SEQ ID NO: 1939982
agucgcaaccuuauaaacc

SEQ ID NO: 1939984 - RNA, 19 nt, Artificial Sequence
  Description of Artificial Sequence: Synthetic oligonucleotide
  Sense strand starting at position 3457 of SEQ ID NO: 1879933
aauugaauugccuggugga

SEQ ID NO: 1939985 - RNA, 19 nt, Artificial Sequence
  Description of Artificial Sequence: Synthetic oligonucleotide
  Antisense strand to SEQ ID NO: 1939984
uccaccaggcaauucaauu

SEQ ID NO: 1939986 - RNA, 19 nt, Artificial Sequence
  Description of Artificial Sequence: Synthetic oligonucleotide
  Sense strand starting at position 3458 of SEQ ID NO: 1879933
auugaauugccugguggau

SEQ ID NO: 1939987 - RNA, 19 nt, Artificial Sequence
  Description of Artificial Sequence: Synthetic oligonucleotide
  Antisense strand to SEQ ID NO: 1939986
auccaccaggcaauucaau

SEQ ID NO: 1939988 - RNA, 19 nt, Artificial Sequence
  Description of Artificial Sequence: Synthetic oligonucleotide
  Sense strand starting at position 3514 of SEQ ID NO: 1879933
uggccugcaccuuagugau

SEQ ID NO: 1939989 - RNA, 19 nt, Artificial Sequence
  Description of Artificial Sequence: Synthetic oligonucleotide
  Antisense strand to SEQ ID NO: 1939988
aucacuaaggugcaggcca

SEQ ID NO: 1939990 - RNA, 19 nt, Artificial Sequence
  Description of Artificial Sequence: Synthetic oligonucleotide
  Sense strand starting at position 3538 of SEQ ID NO: 1879933
gcgugguguuucugcugga

SEQ ID NO: 1939991 - RNA, 19 nt, Artificial Sequence
  Description of Artificial Sequence: Synthetic oligonucleotide
  Antisense strand to SEQ ID NO: 1939990
uccagcagaaacaccacgc

SEQ ID NO: 1939992 - RNA, 19 nt, Artificial Sequence
  Description of Artificial Sequence: Synthetic oligonucleotide
  Sense strand starting at position 3582 of SEQ ID NO: 1879933
cauccugaauaguugugau

SEQ ID NO: 1939993 - RNA, 19 nt, Artificial Sequence
  Description of Artificial Sequence: Synthetic oligonucleotide
  Antisense strand to SEQ ID NO: 1939992
aucacaacuauucaggaug

SEQ ID NO: 1939994 - RNA, 19 nt, Artificial Sequence
  Description of Artificial Sequence: Synthetic oligonucleotide
  Sense strand starting at position 3585 of SEQ ID NO: 1879933
ccugaauaguugugauguu

SEQ ID NO: 1939995 - RNA, 19 nt, Artificial Sequence
  Description of Artificial Sequence: Synthetic oligonucleotide
  Antisense strand to SEQ ID NO: 1939994
aacaucacaacuauucagg

SEQ ID NO: 1939996 - RNA, 19 nt, Artificial Sequence
  Description of Artificial Sequence: Synthetic oligonucleotide
  Sense strand starting at position 3658 of SEQ ID NO: 1879933
ugggcuugggcgugugaaa

SEQ ID NO: 1939997 - RNA, 19 nt, Artificial Sequence
  Description of Artificial Sequence: Synthetic oligonucleotide
  Antisense strand to SEQ ID NO: 1939996
uuucacacgcccaagccca

SEQ ID NO: 1939998 - RNA, 19 nt, Artificial Sequence
  Description of Artificial Sequence: Synthetic oligonucleotide
  Sense strand starting at position 3684 of SEQ ID NO: 1879933
gcagauuuacggugcgguu

SEQ ID NO: 1939999 - RNA, 19 nt, Artificial Sequence
  Description of Artificial Sequence: Synthetic oligonucleotide
  Antisense strand to SEQ ID NO: 1939998
aaccgcaccguaaaucugc

SEQ ID NO: 1940000 - RNA, 19 nt, Artificial Sequence
  Description of Artificial Sequence: Synthetic oligonucleotide
  Sense strand starting at position 3778 of SEQ ID NO: 1879933
aguggcguuucaucuaagu

SEQ ID NO: 1940001 - RNA, 19 nt, Artificial Sequence
  Description of Artificial Sequence: Synthetic oligonucleotide
  Antisense strand to SEQ ID NO: 1940000
acuuagaugaaacgccacu

SEQ ID NO: 1940002 - RNA, 19 nt, Artificial Sequence
  Description of Artificial Sequence: Synthetic oligonucleotide
  Sense strand starting at position 2596 of SEQ ID NO: 1879943
guucguucucguuccggaa

SEQ ID NO: 1940003 - RNA, 19 nt, Artificial Sequence
  Description of Artificial Sequence: Synthetic oligonucleotide
  Antisense strand to SEQ ID NO: 1940002
uuccggaacgagaacgaac

SEQ ID NO: 1940004 - RNA, 19 nt, Artificial Sequence
  Description of Artificial Sequence: Synthetic oligonucleotide
  Sense strand starting at position 2897 of SEQ ID NO: 1879943
gcgagaacguuugagccuu

SEQ ID NO: 1940005 - RNA, 19 nt, Artificial Sequence
  Description of Artificial Sequence: Synthetic oligonucleotide
  Antisense strand to SEQ ID NO: 1940004
aaggcucaaacguucucgc

SEQ ID NO: 1940006 - RNA, 19 nt, Artificial Sequence
  Description of Artificial Sequence: Synthetic oligonucleotide
  Sense strand starting at position 2903 of SEQ ID NO: 1879943
acguuugagccuuagagag

SEQ ID NO: 1940007 - RNA, 19 nt, Artificial Sequence
  Description of Artificial Sequence: Synthetic oligonucleotide
  Antisense strand to SEQ ID NO: 1940006
cucucuaaggcucaaacgu

SEQ ID NO: 1940008 - RNA, 19 nt, Artificial Sequence
  Description of Artificial Sequence: Synthetic oligonucleotide
  Sense strand starting at position 2905 of SEQ ID NO: 1879943
guuugagccuuagagagga

SEQ ID NO: 1940009 - RNA, 19 nt, Artificial Sequence
  Description of Artificial Sequence: Synthetic oligonucleotide
  Antisense strand to SEQ ID NO: 1940008
uccucucuaaggcucaaac

SEQ ID NO: 1940010 - RNA, 19 nt, Artificial Sequence
  Description of Artificial Sequence: Synthetic oligonucleotide
  Sense strand starting at position 2978 of SEQ ID NO: 1879943
ggguuugagcugugccuga

SEQ ID NO: 1940011 - RNA, 19 nt, Artificial Sequence
  Description of Artificial Sequence: Synthetic oligonucleotide
  Antisense strand to SEQ ID NO: 1940010
ucaggcacagcucaaaccc

SEQ ID NO: 1940012 - RNA, 19 nt, Artificial Sequence
  Description of Artificial Sequence: Synthetic oligonucleotide
  Sense strand starting at position 3239 of SEQ ID NO: 1879943
gcguguccucgguacugga

SEQ ID NO: 1940013 - RNA, 19 nt, Artificial Sequence
  Description of Artificial Sequence: Synthetic oligonucleotide
  Antisense strand to SEQ ID NO: 1940012
uccaguaccgaggacacgc

SEQ ID NO: 1940014 - RNA, 19 nt, Artificial Sequence
  Description of Artificial Sequence: Synthetic oligonucleotide
  Sense strand starting at position 3329 of SEQ ID NO: 1879943
uguccuuccucccggguaa

SEQ ID NO: 1940015 - RNA, 19 nt, Artificial Sequence
  Description of Artificial Sequence: Synthetic oligonucleotide
  Antisense strand to SEQ ID NO: 1940014
uuacccgggaggaaggaca

SEQ ID NO: 1940016 - RNA, 19 nt, Artificial Sequence
  Description of Artificial Sequence: Synthetic oligonucleotide
  Sense strand starting at position 3330 of SEQ ID NO: 1879943
guccuuccucccggguaaa

SEQ ID NO: 1940017 - RNA, 19 nt, Artificial Sequence
  Description of Artificial Sequence: Synthetic oligonucleotide
  Antisense strand to SEQ ID NO: 1940016
uuuacccgggaggaaggac

SEQ ID NO: 1940018 - RNA, 19 nt, Artificial Sequence
  Description of Artificial Sequence: Synthetic oligonucleotide
  Sense strand starting at position 3424 of SEQ ID NO: 1879943
gguuuauaagguugcgacu

SEQ ID NO: 1940019 - RNA, 19 nt, Artificial Sequence
  Description of Artificial Sequence: Synthetic oligonucleotide
  Antisense strand to SEQ ID NO: 1940018
agucgcaaccuuauaaacc

SEQ ID NO: 1940020 - RNA, 19 nt, Artificial Sequence
  Description of Artificial Sequence: Synthetic oligonucleotide
  Sense strand starting at position 3457 of SEQ ID NO: 1879943
aauugaauugccuggugga

SEQ ID NO: 1940021 - RNA, 19 nt, Artificial Sequence
  Description of Artificial Sequence: Synthetic oligonucleotide
  Antisense strand to SEQ ID NO: 1940020
uccaccaggcaauucaauu

SEQ ID NO: 1940022 - RNA, 19 nt, Artificial Sequence
  Description of Artificial Sequence: Synthetic oligonucleotide
  Sense strand starting at position 3458 of SEQ ID NO: 1879943
auugaauugccugguggau

SEQ ID NO: 1940023 - RNA, 19 nt, Artificial Sequence
  Description of Artificial Sequence: Synthetic oligonucleotide
  Antisense strand to SEQ ID NO: 1940022
auccaccaggcaauucaau

SEQ ID NO: 1940024 - RNA, 19 nt, Artificial Sequence
  Description of Artificial Sequence: Synthetic oligonucleotide
  Sense strand starting at position 3514 of SEQ ID NO: 1879943
uggccugcaccuuagugau

SEQ ID NO: 1940025 - RNA, 19 nt, Artificial Sequence
  Description of Artificial Sequence: Synthetic oligonucleotide
  Antisense strand to SEQ ID NO: 1940024
aucacuaaggugcaggcca

SEQ ID NO: 1940026 - RNA, 19 nt, Artificial Sequence
  Description of Artificial Sequence: Synthetic oligonucleotide
  Sense strand starting at position 3538 of SEQ ID NO: 1879943
gcgugguguuucugcugga

SEQ ID NO: 1940027 - RNA, 19 nt, Artificial Sequence
  Description of Artificial Sequence: Synthetic oligonucleotide
  Antisense strand to SEQ ID NO: 1940026
uccagcagaaacaccacgc

SEQ ID NO: 1940028 - RNA, 19 nt, Artificial Sequence
  Description of Artificial Sequence: Synthetic oligonucleotide
  Sense strand starting at position 3582 of SEQ ID NO: 1879943
cauccugaauaguugugau

SEQ ID NO: 1940029 - RNA, 19 nt, Artificial Sequence
  Description of Artificial Sequence: Synthetic oligonucleotide
  Antisense strand to SEQ ID NO: 1940028
aucacaacuauucaggaug

SEQ ID NO: 1940030 - RNA, 19 nt, Artificial Sequence
  Description of Artificial Sequence: Synthetic oligonucleotide
  Sense strand starting at position 3585 of SEQ ID NO: 1879943
ccugaauaguugugauguu

SEQ ID NO: 1940031 - RNA, 19 nt, Artificial Sequence
  Description of Artificial Sequence: Synthetic oligonucleotide
  Antisense strand to SEQ ID NO: 1940030
aacaucacaacuauucagg

SEQ ID NO: 1940032 - RNA, 19 nt, Artificial Sequence
  Description of Artificial Sequence: Synthetic oligonucleotide
  Sense strand starting at position 3658 of SEQ ID NO: 1879943
ugggcuugggcgugugaaa

SEQ ID NO: 1940033 - RNA, 19 nt, Artificial Sequence
  Description of Artificial Sequence: Synthetic oligonucleotide
  Antisense strand to SEQ ID NO: 1940032
uuucacacgcccaagccca

SEQ ID NO: 1940034 - RNA, 19 nt, Artificial Sequence
  Description of Artificial Sequence: Synthetic oligonucleotide
  Sense strand starting at position 3684 of SEQ ID NO: 1879943
gcagauuuacggugcgguu

SEQ ID NO: 1940035 - RNA, 19 nt, Artificial Sequence
  Description of Artificial Sequence: Synthetic oligonucleotide
  Antisense strand to SEQ ID NO: 1940034
aaccgcaccguaaaucugc

SEQ ID NO: 1940036 - RNA, 19 nt, Artificial Sequence
  Description of Artificial Sequence: Synthetic oligonucleotide
  Sense strand starting at position 3778 of SEQ ID NO: 1879943
aguggcguuucaucuaagu

SEQ ID NO: 1940037 - RNA, 19 nt, Artificial Sequence
  Description of Artificial Sequence: Synthetic oligonucleotide
  Antisense strand to SEQ ID NO: 1940036
acuuagaugaaacgccacu

SEQ ID NO: 1940038 - RNA, 19 nt, Artificial Sequence
  Description of Artificial Sequence: Synthetic oligonucleotide
  Sense strand starting at position 2596 of SEQ ID NO: 1879953
guucguucucguuccggaa

SEQ ID NO: 1940039 - RNA, 19 nt, Artificial Sequence
  Description of Artificial Sequence: Synthetic oligonucleotide
  Antisense strand to SEQ ID NO: 1940038
uuccggaacgagaacgaac

SEQ ID NO: 1940040 - RNA, 19 nt, Artificial Sequence
  Description of Artificial Sequence: Synthetic oligonucleotide
  Sense strand starting at position 2897 of SEQ ID NO: 1879953
gcgagaacguuugagccuu

SEQ ID NO: 1940041 - RNA, 19 nt, Artificial Sequence
  Description of Artificial Sequence: Synthetic oligonucleotide
  Antisense strand to SEQ ID NO: 1940040
aaggcucaaacguucucgc

SEQ ID NO: 1940042 - RNA, 19 nt, Artificial Sequence
  Description of Artificial Sequence: Synthetic oligonucleotide
  Sense strand starting at position 2903 of SEQ ID NO: 1879953
acguuugagccuuagagag

SEQ ID NO: 1940043 - RNA, 19 nt, Artificial Sequence
  Description of Artificial Sequence: Synthetic oligonucleotide
  Antisense strand to SEQ ID NO: 1940042
cucucuaaggcucaaacgu

SEQ ID NO: 1940044 - RNA, 19 nt, Artificial Sequence
  Description of Artificial Sequence: Synthetic oligonucleotide
  Sense strand starting at position 2905 of SEQ ID NO: 1879953
guuugagccuuagagagga

SEQ ID NO: 1940045 - RNA, 19 nt, Artificial Sequence
  Description of Artificial Sequence: Synthetic oligonucleotide
  Antisense strand to SEQ ID NO: 1940044
uccucucuaaggcucaaac

SEQ ID NO: 1940046 - RNA, 19 nt, Artificial Sequence
  Description of Artificial Sequence: Synthetic oligonucleotide
  Sense strand starting at position 2978 of SEQ ID NO: 1879953
ggguuugagcugugccuga

SEQ ID NO: 1940047 - RNA, 19 nt, Artificial Sequence
  Description of Artificial Sequence: Synthetic oligonucleotide
  Antisense strand to SEQ ID NO: 1940046
ucaggcacagcucaaaccc

SEQ ID NO: 1940048 - RNA, 19 nt, Artificial Sequence
  Description of Artificial Sequence: Synthetic oligonucleotide
  Sense strand starting at position 3239 of SEQ ID NO: 1879953
gcguguccucgguacugga

SEQ ID NO: 1940049 - RNA, 19 nt, Artificial Sequence
  Description of Artificial Sequence: Synthetic oligonucleotide
  Antisense strand to SEQ ID NO: 1940048
uccaguaccgaggacacgc

SEQ ID NO: 1940050 - RNA, 19 nt, Artificial Sequence
  Description of Artificial Sequence: Synthetic oligonucleotide
  Sense strand starting at position 3329 of SEQ ID NO: 1879953
uguccuuccucccggguaa

SEQ ID NO: 1940051 - RNA, 19 nt, Artificial Sequence
  Description of Artificial Sequence: Synthetic oligonucleotide
  Antisense strand to SEQ ID NO: 1940050
uuacccgggaggaaggaca

SEQ ID NO: 1940052 - RNA, 19 nt, Artificial Sequence
  Description of Artificial Sequence: Synthetic oligonucleotide
  Sense strand starting at position 3330 of SEQ ID NO: 1879953
guccuuccucccggguaaa

SEQ ID NO: 1940053 - RNA, 19 nt, Artificial Sequence
  Description of Artificial Sequence: Synthetic oligonucleotide
  Antisense strand to SEQ ID NO: 1940052
uuuacccgggaggaaggac

SEQ ID NO: 1940054 - RNA, 19 nt, Artificial Sequence
  Description of Artificial Sequence: Synthetic oligonucleotide
  Sense strand starting at position 3424 of SEQ ID NO: 1879953
gguuuauaagguugcgacu

SEQ ID NO: 1940055 - RNA, 19 nt, Artificial Sequence
  Description of Artificial Sequence: Synthetic oligonucleotide
  Antisense strand to SEQ ID NO: 1940054
agucgcaaccuuauaaacc

SEQ ID NO: 1940056 - RNA, 19 nt, Artificial Sequence
  Description of Artificial Sequence: Synthetic oligonucleotide
  Sense strand starting at position 3457 of SEQ ID NO: 1879953
aauugaauugccuggugga

SEQ ID NO: 1940057 - RNA, 19 nt, Artificial Sequence
  Description of Artificial Sequence: Synthetic oligonucleotide
  Antisense strand to SEQ ID NO: 1940056
uccaccaggcaauucaauu

SEQ ID NO: 1940058 - RNA, 19 nt, Artificial Sequence
  Description of Artificial Sequence: Synthetic oligonucleotide
  Sense strand starting at position 3458 of SEQ ID NO: 1879953
auugaauugccugguggau

SEQ ID NO: 1940059 - RNA, 19 nt, Artificial Sequence
  Description of Artificial Sequence: Synthetic oligonucleotide
  Antisense strand to SEQ ID NO: 1940058
auccaccaggcaauucaau

SEQ ID NO: 1940060 - RNA, 19 nt, Artificial Sequence
  Description of Artificial Sequence: Synthetic oligonucleotide
  Sense strand starting at position 3514 of SEQ ID NO: 1879953
uggccugcaccuuagugau

SEQ ID NO: 1940061 - RNA, 19 nt, Artificial Sequence
  Description of Artificial Sequence: Synthetic oligonucleotide
  Antisense strand to SEQ ID NO: 1940060
aucacuaaggugcaggcca

SEQ ID NO: 1940062 - RNA, 19 nt, Artificial Sequence
  Description of Artificial Sequence: Synthetic oligonucleotide
  Sense strand starting at position 3538 of SEQ ID NO: 1879953
gcgugguguuucugcugga

SEQ ID NO: 1940063 - RNA, 19 nt, Artificial Sequence
  Description of Artificial Sequence: Synthetic oligonucleotide
  Antisense strand to SEQ ID NO: 1940062
uccagcagaaacaccacgc

SEQ ID NO: 1940064 - RNA, 19 nt, Artificial Sequence
  Description of Artificial Sequence: Synthetic oligonucleotide
  Sense strand starting at position 3582 of SEQ ID NO: 1879953
cauccugaauaguugugau

SEQ ID NO: 1940065 - RNA, 19 nt, Artificial Sequence
  Description of Artificial Sequence: Synthetic oligonucleotide
  Antisense strand to SEQ ID NO: 1940064
aucacaacuauucaggaug

SEQ ID NO: 1940066 - RNA, 19 nt, Artificial Sequence
  Description of Artificial Sequence: Synthetic oligonucleotide
  Sense strand starting at position 3585 of SEQ ID NO: 1879953
ccugaauaguugugauguu

SEQ ID NO: 1940067 - RNA, 19 nt, Artificial Sequence
  Description of Artificial Sequence: Synthetic oligonucleotide
  Antisense strand to SEQ ID NO: 1940066
aacaucacaacuauucagg

SEQ ID NO: 1940068 - RNA, 19 nt, Artificial Sequence
  Description of Artificial Sequence: Synthetic oligonucleotide
  Sense strand starting at position 3658 of SEQ ID NO: 1879953
ugggcuugggcgugugaaa

SEQ ID NO: 1940069 - RNA, 19 nt, Artificial Sequence
  Description of Artificial Sequence: Synthetic oligonucleotide
  Antisense strand to SEQ ID NO: 1940068
uuucacacgcccaagccca

SEQ ID NO: 1940070 - RNA, 19 nt, Artificial Sequence
  Description of Artificial Sequence: Synthetic oligonucleotide
  Sense strand starting at position 3684 of SEQ ID NO: 1879953
gcagauuuacggugcgguu

SEQ ID NO: 1940071 - RNA, 19 nt, Artificial Sequence
  Description of Artificial Sequence: Synthetic oligonucleotide
  Antisense strand to SEQ ID NO: 1940070
aaccgcaccguaaaucugc

SEQ ID NO: 1940072 - RNA, 19 nt, Artificial Sequence
  Description of Artificial Sequence: Synthetic oligonucleotide
  Sense strand starting at position 3778 of SEQ ID NO: 1879953
aguggcguuucaucuaagu

SEQ ID NO: 1940073 - RNA, 19 nt, Artificial Sequence
  Description of Artificial Sequence: Synthetic oligonucleotide
  Antisense strand to SEQ ID NO: 1940072
acuuagaugaaacgccacu

SEQ ID NO: 1940074 - RNA, 19 nt, Artificial Sequence
  Description of Artificial Sequence: Synthetic oligonucleotide
  Sense strand starting at position 2596 of SEQ ID NO: 1879963
guucguucucguuccggaa

SEQ ID NO: 1940075 - RNA, 19 nt, Artificial Sequence
  Description of Artificial Sequence: Synthetic oligonucleotide
  Antisense strand to SEQ ID NO: 1940074
uuccggaacgagaacgaac

SEQ ID NO: 1940076 - RNA, 19 nt, Artificial Sequence
  Description of Artificial Sequence: Synthetic oligonucleotide
  Sense strand starting at position 2897 of SEQ ID NO: 1879963
gcgagaacguuugagccuu

SEQ ID NO: 1940077 - RNA, 19 nt, Artificial Sequence
  Description of Artificial Sequence: Synthetic oligonucleotide
  Antisense strand to SEQ ID NO: 1940076
aaggcucaaacguucucgc

SEQ ID NO: 1940078 - RNA, 19 nt, Artificial Sequence
  Description of Artificial Sequence: Synthetic oligonucleotide
  Sense strand starting at position 2903 of SEQ ID NO: 1879963
acguuugagccuuagagag

SEQ ID NO: 1940079 - RNA, 19 nt, Artificial Sequence
  Description of Artificial Sequence: Synthetic oligonucleotide
  Antisense strand to SEQ ID NO: 1940078
cucucuaaggcucaaacgu

SEQ ID NO: 1940080 - RNA, 19 nt, Artificial Sequence
  Description of Artificial Sequence: Synthetic oligonucleotide
  Sense strand starting at position 2905 of SEQ ID NO: 1879963
guuugagccuuagagagga

SEQ ID NO: 1940081 - RNA, 19 nt, Artificial Sequence
  Description of Artificial Sequence: Synthetic oligonucleotide
  Antisense strand to SEQ ID NO: 1940080
uccucucuaaggcucaaac

SEQ ID NO: 1940082 - RNA, 19 nt, Artificial Sequence
  Description of Artificial Sequence: Synthetic oligonucleotide
  Sense strand starting at position 2978 of SEQ ID NO: 1879963
ggguuugagcugugccuga

SEQ ID NO: 1940083 - RNA, 19 nt, Artificial Sequence
  Description of Artificial Sequence: Synthetic oligonucleotide
  Antisense strand to SEQ ID NO: 1940082
ucaggcacagcucaaaccc

SEQ ID NO: 1940084 - RNA, 19 nt, Artificial Sequence
  Description of Artificial Sequence: Synthetic oligonucleotide
  Sense strand starting at position 3239 of SEQ ID NO: 1879963
gcguguccucgguacugga

SEQ ID NO: 1940085 - RNA, 19 nt, Artificial Sequence
  Description of Artificial Sequence: Synthetic oligonucleotide
  Antisense strand to SEQ ID NO: 1940084
uccaguaccgaggacacgc

SEQ ID NO: 1940086 - RNA, 19 nt, Artificial Sequence
  Description of Artificial Sequence: Synthetic oligonucleotide
  Sense strand starting at position 3329 of SEQ ID NO: 1879963
uguccuuccucccggguaa

SEQ ID NO: 1940087 - RNA, 19 nt, Artificial Sequence
  Description of Artificial Sequence: Synthetic oligonucleotide
  Antisense strand to SEQ ID NO: 1940086
uuacccgggaggaaggaca

SEQ ID NO: 1940088 - RNA, 19 nt, Artificial Sequence
  Description of Artificial Sequence: Synthetic oligonucleotide
  Sense strand starting at position 3330 of SEQ ID NO: 1879963
guccuuccucccggguaaa

SEQ ID NO: 1940089 - RNA, 19 nt, Artificial Sequence
  Description of Artificial Sequence: Synthetic oligonucleotide
  Antisense strand to SEQ ID NO: 1940088
uuuacccgggaggaaggac

SEQ ID NO: 1940090 - RNA, 19 nt, Artificial Sequence
  Description of Artificial Sequence: Synthetic oligonucleotide
  Sense strand starting at position 3424 of SEQ ID NO: 1879963
gguuuauaagguugcgacu

SEQ ID NO: 1940091 - RNA, 19 nt, Artificial Sequence
  Description of Artificial Sequence: Synthetic oligonucleotide
  Antisense strand to SEQ ID NO: 1940090
agucgcaaccuuauaaacc

SEQ ID NO: 1940092 - RNA, 19 nt, Artificial Sequence
  Description of Artificial Sequence: Synthetic oligonucleotide
  Sense strand starting at position 3457 of SEQ ID NO: 1879963
aauugaauugccuggugga

SEQ ID NO: 1940093 - RNA, 19 nt, Artificial Sequence
  Description of Artificial Sequence: Synthetic oligonucleotide
  Antisense strand to SEQ ID NO: 1940092
uccaccaggcaauucaauu

SEQ ID NO: 1940094 - RNA, 19 nt, Artificial Sequence
  Description of Artificial Sequence: Synthetic oligonucleotide
  Sense strand starting at position 3458 of SEQ ID NO: 1879963
auugaauugccugguggau

SEQ ID NO: 1940095 - RNA, 19 nt, Artificial Sequence
  Description of Artificial Sequence: Synthetic oligonucleotide
  Antisense strand to SEQ ID NO: 1940094
auccaccaggcaauucaau

SEQ ID NO: 1940096 - RNA, 19 nt, Artificial Sequence
  Description of Artificial Sequence: Synthetic oligonucleotide
  Sense strand starting at position 3514 of SEQ ID NO: 1879963
uggccugcaccuuagugau

SEQ ID NO: 1940097 - RNA, 19 nt, Artificial Sequence
  Description of Artificial Sequence: Synthetic oligonucleotide
  Antisense strand to SEQ ID NO: 1940096
aucacuaaggugcaggcca

SEQ ID NO: 1940098 - RNA, 19 nt, Artificial Sequence
  Description of Artificial Sequence: Synthetic oligonucleotide
  Sense strand starting at position 3538 of SEQ ID NO: 1879963
gcgugguguuucugcugga

SEQ ID NO: 1940099 - RNA, 19 nt, Artificial Sequence
  Description of Artificial Sequence: Synthetic oligonucleotide
  Antisense strand to SEQ ID NO: 1940098
uccagcagaaacaccacgc

SEQ ID NO: 1940100 - RNA, 19 nt, Artificial Sequence
  Description of Artificial Sequence: Synthetic oligonucleotide
  Sense strand starting at position 3582 of SEQ ID NO: 1879963
cauccugaauaguugugau

SEQ ID NO: 1940101 - RNA, 19 nt, Artificial Sequence
  Description of Artificial Sequence: Synthetic oligonucleotide
  Antisense strand to SEQ ID NO: 1940100
aucacaacuauucaggaug

SEQ ID NO: 1940102 - RNA, 19 nt, Artificial Sequence
  Description of Artificial Sequence: Synthetic oligonucleotide
  Sense strand starting at position 3585 of SEQ ID NO: 1879963
ccugaauaguugugauguu

SEQ ID NO: 1940103 - RNA, 19 nt, Artificial Sequence
  Description of Artificial Sequence: Synthetic oligonucleotide
  Antisense strand to SEQ ID NO: 1940102
aacaucacaacuauucagg

SEQ ID NO: 1940104 - RNA, 19 nt, Artificial Sequence
  Description of Artificial Sequence: Synthetic oligonucleotide
  Sense strand starting at position 3658 of SEQ ID NO: 1879963
ugggcuugggcgugugaaa

SEQ ID NO: 1940105 - RNA, 19 nt, Artificial Sequence
  Description of Artificial Sequence: Synthetic oligonucleotide
  Antisense strand to SEQ ID NO: 1940104
uuucacacgcccaagccca

SEQ ID NO: 1940106 - RNA, 19 nt, Artificial Sequence
  Description of Artificial Sequence: Synthetic oligonucleotide
  Sense strand starting at position 3684 of SEQ ID NO: 1879963
gcagauuuacggugcgguu

SEQ ID NO: 1940107 - RNA, 19 nt, Artificial Sequence
  Description of Artificial Sequence: Synthetic oligonucleotide
  Antisense strand to SEQ ID NO: 1940106
aaccgcaccguaaaucugc

SEQ ID NO: 1940108 - RNA, 19 nt, Artificial Sequence
  Description of Artificial Sequence: Synthetic oligonucleotide
  Sense strand starting at position 3778 of SEQ ID NO: 1879963
aguggcguuucaucuaagu

SEQ ID NO: 1940109 - RNA, 19 nt, Artificial Sequence
  Description of Artificial Sequence: Synthetic oligonucleotide
  Antisense strand to SEQ ID NO: 1940108
acuuagaugaaacgccacu

SEQ ID NO: 1940110 - RNA, 19 nt, Artificial Sequence
  Description of Artificial Sequence: Synthetic oligonucleotide
  Sense strand starting at position 2596 of SEQ ID NO: 1879973
guucguucucguuccggaa

SEQ ID NO: 1940111 - RNA, 19 nt, Artificial Sequence
  Description of Artificial Sequence: Synthetic oligonucleotide
  Antisense strand to SEQ ID NO: 1940110
uuccggaacgagaacgaac

SEQ ID NO: 1940112 - RNA, 19 nt, Artificial Sequence
  Description of Artificial Sequence: Synthetic oligonucleotide
  Sense strand starting at position 2897 of SEQ ID NO: 1879973
gcgagaacguuugagccuu

SEQ ID NO: 1940113 - RNA, 19 nt, Artificial Sequence
  Description of Artificial Sequence: Synthetic oligonucleotide
  Antisense strand to SEQ ID NO: 1940112
aaggcucaaacguucucgc

SEQ ID NO: 1940114 - RNA, 19 nt, Artificial Sequence
  Description of Artificial Sequence: Synthetic oligonucleotide
  Sense strand starting at position 2903 of SEQ ID NO: 1879973
acguuugagccuuagagag

SEQ ID NO: 1940115 - RNA, 19 nt, Artificial Sequence
  Description of Artificial Sequence: Synthetic oligonucleotide
  Antisense strand to SEQ ID NO: 1940114
cucucuaaggcucaaacgu

SEQ ID NO: 1940116 - RNA, 19 nt, Artificial Sequence
  Description of Artificial Sequence: Synthetic oligonucleotide
  Sense strand starting at position 2905 of SEQ ID NO: 1879973
guuugagccuuagagagga

SEQ ID NO: 1940117 - RNA, 19 nt, Artificial Sequence
  Description of Artificial Sequence: Synthetic oligonucleotide
  Antisense strand to SEQ ID NO: 1940116
uccucucuaaggcucaaac

SEQ ID NO: 1940118 - RNA, 19 nt, Artificial Sequence
  Description of Artificial Sequence: Synthetic oligonucleotide
  Sense strand starting at position 2978 of SEQ ID NO: 1879973
ggguuugagcugugccuga

SEQ ID NO: 1940119 - RNA, 19 nt, Artificial Sequence
  Description of Artificial Sequence: Synthetic oligonucleotide
  Antisense strand to SEQ ID NO: 1940118
ucaggcacagcucaaaccc

SEQ ID NO: 1940120 - RNA, 19 nt, Artificial Sequence
  Description of Artificial Sequence: Synthetic oligonucleotide
  Sense strand starting at position 3239 of SEQ ID NO: 1879973
gcguguccucgguacugga

SEQ ID NO: 1940121 - RNA, 19 nt, Artificial Sequence
  Description of Artificial Sequence: Synthetic oligonucleotide
  Antisense strand to SEQ ID NO: 1940120
uccaguaccgaggacacgc

SEQ ID NO: 1940122 - RNA, 19 nt, Artificial Sequence
  Description of Artificial Sequence: Synthetic oligonucleotide
  Sense strand starting at position 3329 of SEQ ID NO: 1879973
uguccuuccucccggguaa

SEQ ID NO: 1940123 - RNA, 19 nt, Artificial Sequence
  Description of Artificial Sequence: Synthetic oligonucleotide
  Antisense strand to SEQ ID NO: 1940122
uuacccgggaggaaggaca

SEQ ID NO: 1940124 - RNA, 19 nt, Artificial Sequence
  Description of Artificial Sequence: Synthetic oligonucleotide
  Sense strand starting at position 3330 of SEQ ID NO: 1879973
guccuuccucccggguaaa

SEQ ID NO: 1940125 - RNA, 19 nt, Artificial Sequence
  Description of Artificial Sequence: Synthetic oligonucleotide
  Antisense strand to SEQ ID NO: 1940124
uuuacccgggaggaaggac

SEQ ID NO: 1940126 - RNA, 19 nt, Artificial Sequence
  Description of Artificial Sequence: Synthetic oligonucleotide
  Sense strand starting at position 3424 of SEQ ID NO: 1879973
gguuuauaagguugcgacu

SEQ ID NO: 1940127 - RNA, 19 nt, Artificial Sequence
  Description of Artificial Sequence: Synthetic oligonucleotide
  Antisense strand to SEQ ID NO: 1940126
agucgcaaccuuauaaacc

SEQ ID NO: 1940128 - RNA, 19 nt, Artificial Sequence
  Description of Artificial Sequence: Synthetic oligonucleotide
  Sense strand starting at position 3457 of SEQ ID NO: 1879973
aauugaauugccuggugga

SEQ ID NO: 1940129 - RNA, 19 nt, Artificial Sequence
  Description of Artificial Sequence: Synthetic oligonucleotide
  Antisense strand to SEQ ID NO: 1940128
uccaccaggcaauucaauu

SEQ ID NO: 1940130 - RNA, 19 nt, Artificial Sequence
  Description of Artificial Sequence: Synthetic oligonucleotide
  Sense strand starting at position 3458 of SEQ ID NO: 1879973
auugaauugccugguggau

SEQ ID NO: 1940131 - RNA, 19 nt, Artificial Sequence
  Description of Artificial Sequence: Synthetic oligonucleotide
  Antisense strand to SEQ ID NO: 1940130
auccaccaggcaauucaau

SEQ ID NO: 1940132 - RNA, 19 nt, Artificial Sequence
  Description of Artificial Sequence: Synthetic oligonucleotide
  Sense strand starting at position 3514 of SEQ ID NO: 1879973
uggccugcaccuuagugau

SEQ ID NO: 1940133 - RNA, 19 nt, Artificial Sequence
  Description of Artificial Sequence: Synthetic oligonucleotide
  Antisense strand to SEQ ID NO: 1940132
aucacuaaggugcaggcca

SEQ ID NO: 1940134 - RNA, 19 nt, Artificial Sequence
  Description of Artificial Sequence: Synthetic oligonucleotide
  Sense strand starting at position 3538 of SEQ ID NO: 1879973
gcgugguguuucugcugga

SEQ ID NO: 1940135 - RNA, 19 nt, Artificial Sequence
  Description of Artificial Sequence: Synthetic oligonucleotide
  Antisense strand to SEQ ID NO: 1940134
uccagcagaaacaccacgc

SEQ ID NO: 1940136 - RNA, 19 nt, Artificial Sequence
  Description of Artificial Sequence: Synthetic oligonucleotide
  Sense strand starting at position 3582 of SEQ ID NO: 1879973
cauccugaauaguugugau

SEQ ID NO: 1940137 - RNA, 19 nt, Artificial Sequence
  Description of Artificial Sequence: Synthetic oligonucleotide
  Antisense strand to SEQ ID NO: 1940136
aucacaacuauucaggaug

SEQ ID NO: 1940138 - RNA, 19 nt, Artificial Sequence
  Description of Artificial Sequence: Synthetic oligonucleotide
  Sense strand starting at position 3585 of SEQ ID NO: 1879973
ccugaauaguugugauguu

SEQ ID NO: 1940139 - RNA, 19 nt, Artificial Sequence
  Description of Artificial Sequence: Synthetic oligonucleotide
  Antisense strand to SEQ ID NO: 1940138
aacaucacaacuauucagg

SEQ ID NO: 1940140 - RNA, 19 nt, Artificial Sequence
  Description of Artificial Sequence: Synthetic oligonucleotide
  Sense strand starting at position 3658 of SEQ ID NO: 1879973
ugggcuugggcgugugaaa

SEQ ID NO: 1940141 - RNA, 19 nt, Artificial Sequence
  Description of Artificial Sequence: Synthetic oligonucleotide
  Antisense strand to SEQ ID NO: 1940140
uuucacacgcccaagccca

SEQ ID NO: 1940142 - RNA, 19 nt, Artificial Sequence
  Description of Artificial Sequence: Synthetic oligonucleotide
  Sense strand starting at position 3684 of SEQ ID NO: 1879973
gcagauuuacggugcgguu

SEQ ID NO: 1940143 - RNA, 19 nt, Artificial Sequence
  Description of Artificial Sequence: Synthetic oligonucleotide
  Antisense strand to SEQ ID NO: 1940142
aaccgcaccguaaaucugc

SEQ ID NO: 1940144 - RNA, 19 nt, Artificial Sequence
  Description of Artificial Sequence: Synthetic oligonucleotide
  Sense strand starting at position 3778 of SEQ ID NO: 1879973
aguggcguuucaucuaagu

SEQ ID NO: 1940145 - RNA, 19 nt, Artificial Sequence
  Description of Artificial Sequence: Synthetic oligonucleotide
  Antisense strand to SEQ ID NO: 1940144
acuuagaugaaacgccacu

SEQ ID NO: 1940146 - RNA, 19 nt, Artificial Sequence
  Description of Artificial Sequence: Synthetic oligonucleotide
  Sense strand starting at position 2596 of SEQ ID NO: 1879983
guucguucucguuccggaa

SEQ ID NO: 1940147 - RNA, 19 nt, Artificial Sequence
  Description of Artificial Sequence: Synthetic oligonucleotide
  Antisense strand to SEQ ID NO: 1940146
uuccggaacgagaacgaac

SEQ ID NO: 1940148 - RNA, 19 nt, Artificial Sequence
  Description of Artificial Sequence: Synthetic oligonucleotide
  Sense strand starting at position 2897 of SEQ ID NO: 1879983
gcgagaacguuugagccuu

SEQ ID NO: 1940149 - RNA, 19 nt, Artificial Sequence
  Description of Artificial Sequence: Synthetic oligonucleotide
  Antisense strand to SEQ ID NO: 1940148
aaggcucaaacguucucgc

SEQ ID NO: 1940150 - RNA, 19 nt, Artificial Sequence
  Description of Artificial Sequence: Synthetic oligonucleotide
  Sense strand starting at position 2903 of SEQ ID NO: 1879983
acguuugagccuuagagag

SEQ ID NO: 1940151 - RNA, 19 nt, Artificial Sequence
  Description of Artificial Sequence: Synthetic oligonucleotide
  Antisense strand to SEQ ID NO: 1940150
cucucuaaggcucaaacgu

SEQ ID NO: 1940152 - RNA, 19 nt, Artificial Sequence
  Description of Artificial Sequence: Synthetic oligonucleotide
  Sense strand starting at position 2905 of SEQ ID NO: 1879983
guuugagccuuagagagga

SEQ ID NO: 1940153 - RNA, 19 nt, Artificial Sequence
  Description of Artificial Sequence: Synthetic oligonucleotide
  Antisense strand to SEQ ID NO: 1940152
uccucucuaaggcucaaac

SEQ ID NO: 1940154 - RNA, 19 nt, Artificial Sequence
  Description of Artificial Sequence: Synthetic oligonucleotide
  Sense strand starting at position 2978 of SEQ ID NO: 1879983
ggguuugagcugugccuga

SEQ ID NO: 1940155 - RNA, 19 nt, Artificial Sequence
  Description of Artificial Sequence: Synthetic oligonucleotide
  Antisense strand to SEQ ID NO: 1940154
ucaggcacagcucaaaccc

SEQ ID NO: 1940156 - RNA, 19 nt, Artificial Sequence
  Description of Artificial Sequence: Synthetic oligonucleotide
  Sense strand starting at position 3239 of SEQ ID NO: 1879983
gcguguccucgguacugga

SEQ ID NO: 1940157 - RNA, 19 nt, Artificial Sequence
  Description of Artificial Sequence: Synthetic oligonucleotide
  Antisense strand to SEQ ID NO: 1940156
uccaguaccgaggacacgc

SEQ ID NO: 1940158 - RNA, 19 nt, Artificial Sequence
  Description of Artificial Sequence: Synthetic oligonucleotide
  Sense strand starting at position 3329 of SEQ ID NO: 1879983
uguccuuccucccggguaa

SEQ ID NO: 1940159 - RNA, 19 nt, Artificial Sequence
  Description of Artificial Sequence: Synthetic oligonucleotide
  Antisense strand to SEQ ID NO: 1940158
uuacccgggaggaaggaca

SEQ ID NO: 1940160 - RNA, 19 nt, Artificial Sequence
  Description of Artificial Sequence: Synthetic oligonucleotide
  Sense strand starting at position 3330 of SEQ ID NO: 1879983
guccuuccucccggguaaa

SEQ ID NO: 1940161 - RNA, 19 nt, Artificial Sequence
  Description of Artificial Sequence: Synthetic oligonucleotide
  Antisense strand to SEQ ID NO: 1940160
uuuacccgggaggaaggac

SEQ ID NO: 1940162 - RNA, 19 nt, Artificial Sequence
  Description of Artificial Sequence: Synthetic oligonucleotide
  Sense strand starting at position 3424 of SEQ ID NO: 1879983
gguuuauaagguugcgacu

SEQ ID NO: 1940163 - RNA, 19 nt, Artificial Sequence
  Description of Artificial Sequence: Synthetic oligonucleotide
  Antisense strand to SEQ ID NO: 1940162
agucgcaaccuuauaaacc

SEQ ID NO: 1940164 - RNA, 19 nt, Artificial Sequence
  Description of Artificial Sequence: Synthetic oligonucleotide
  Sense strand starting at position 3457 of SEQ ID NO: 1879983
aauugaauugccuggugga

SEQ ID NO: 1940165 - RNA, 19 nt, Artificial Sequence
  Description of Artificial Sequence: Synthetic oligonucleotide
  Antisense strand to SEQ ID NO: 1940164
uccaccaggcaauucaauu

SEQ ID NO: 1940166 - RNA, 19 nt, Artificial Sequence
  Description of Artificial Sequence: Synthetic oligonucleotide
  Sense strand starting at position 3458 of SEQ ID NO: 1879983
auugaauugccugguggau

SEQ ID NO: 1940167 - RNA, 19 nt, Artificial Sequence
  Description of Artificial Sequence: Synthetic oligonucleotide
  Antisense strand to SEQ ID NO: 1940166
auccaccaggcaauucaau

SEQ ID NO: 1940168 - RNA, 19 nt, Artificial Sequence
  Description of Artificial Sequence: Synthetic oligonucleotide
  Sense strand starting at position 3514 of SEQ ID NO: 1879983
uggccugcaccuuagugau

SEQ ID NO: 1940169 - RNA, 19 nt, Artificial Sequence
  Description of Artificial Sequence: Synthetic oligonucleotide
  Antisense strand to SEQ ID NO: 1940168
aucacuaaggugcaggcca

SEQ ID NO: 1940170 - RNA, 19 nt, Artificial Sequence
  Description of Artificial Sequence: Synthetic oligonucleotide
  Sense strand starting at position 3538 of SEQ ID NO: 1879983
gcgugguguuucugcugga

SEQ ID NO: 1940171 - RNA, 19 nt, Artificial Sequence
  Description of Artificial Sequence: Synthetic oligonucleotide
  Antisense strand to SEQ ID NO: 1940170
uccagcagaaacaccacgc

SEQ ID NO: 1940172 - RNA, 19 nt, Artificial Sequence
  Description of Artificial Sequence: Synthetic oligonucleotide
  Sense strand starting at position 3582 of SEQ ID NO: 1879983
cauccugaauaguugugau

SEQ ID NO: 1940173 - RNA, 19 nt, Artificial Sequence
  Description of Artificial Sequence: Synthetic oligonucleotide
  Antisense strand to SEQ ID NO: 1940172
aucacaacuauucaggaug

SEQ ID NO: 1940174 - RNA, 19 nt, Artificial Sequence
  Description of Artificial Sequence: Synthetic oligonucleotide
  Sense strand starting at position 3585 of SEQ ID NO: 1879983
ccugaauaguugugauguu

SEQ ID NO: 1940175 - RNA, 19 nt, Artificial Sequence
  Description of Artificial Sequence: Synthetic oligonucleotide
  Antisense strand to SEQ ID NO: 1940174
aacaucacaacuauucagg

SEQ ID NO: 1940176 - RNA, 19 nt, Artificial Sequence
  Description of Artificial Sequence: Synthetic oligonucleotide
  Sense strand starting at position 3658 of SEQ ID NO: 1879983
ugggcuugggcgugugaaa

SEQ ID NO: 1940177 - RNA, 19 nt, Artificial Sequence
  Description of Artificial Sequence: Synthetic oligonucleotide
  Antisense strand to SEQ ID NO: 1940176
uuucacacgcccaagccca

SEQ ID NO: 1940178 - RNA, 19 nt, Artificial Sequence
  Description of Artificial Sequence: Synthetic oligonucleotide
  Sense strand starting at position 3684 of SEQ ID NO: 1879983
gcagauuuacggugcgguu

SEQ ID NO: 1940179 - RNA, 19 nt, Artificial Sequence
  Description of Artificial Sequence: Synthetic oligonucleotide
  Antisense strand to SEQ ID NO: 1940178
aaccgcaccguaaaucugc

SEQ ID NO: 1940180 - RNA, 19 nt, Artificial Sequence
  Description of Artificial Sequence: Synthetic oligonucleotide
  Sense strand starting at position 3778 of SEQ ID NO: 1879983
aguggcguuucaucuaagu

SEQ ID NO: 1940181 - RNA, 19 nt, Artificial Sequence
  Description of Artificial Sequence: Synthetic oligonucleotide
  Antisense strand to SEQ ID NO: 1940180
acuuagaugaaacgccacu

SEQ ID NO: 1940182 - RNA, 19 nt, Artificial Sequence
  Description of Artificial Sequence: Synthetic oligonucleotide
  Sense strand starting at position 2596 of SEQ ID NO: 1879993
guucguucucguuccggaa

SEQ ID NO: 1940183 - RNA, 19 nt, Artificial Sequence
  Description of Artificial Sequence: Synthetic oligonucleotide
  Antisense strand to SEQ ID NO: 1940182
uuccggaacgagaacgaac

SEQ ID NO: 1940184 - RNA, 19 nt, Artificial Sequence
  Description of Artificial Sequence: Synthetic oligonucleotide
  Sense strand starting at position 2897 of SEQ ID NO: 1879993
gcgagaacguuugagccuu

SEQ ID NO: 1940185 - RNA, 19 nt, Artificial Sequence
  Description of Artificial Sequence: Synthetic oligonucleotide
  Antisense strand to SEQ ID NO: 1940184
aaggcucaaacguucucgc

SEQ ID NO: 1940186 - RNA, 19 nt, Artificial Sequence
  Description of Artificial Sequence: Synthetic oligonucleotide
  Sense strand starting at position 2903 of SEQ ID NO: 1879993
acguuugagccuuagagag

SEQ ID NO: 1940187 - RNA, 19 nt, Artificial Sequence
  Description of Artificial Sequence: Synthetic oligonucleotide
  Antisense strand to SEQ ID NO: 1940186
cucucuaaggcucaaacgu

SEQ ID NO: 1940188 - RNA, 19 nt, Artificial Sequence
  Description of Artificial Sequence: Synthetic oligonucleotide
  Sense strand starting at position 2905 of SEQ ID NO: 1879993
guuugagccuuagagagga

SEQ ID NO: 1940189 - RNA, 19 nt, Artificial Sequence
  Description of Artificial Sequence: Synthetic oligonucleotide
  Antisense strand to SEQ ID NO: 1940188
uccucucuaaggcucaaac

SEQ ID NO: 1940190 - RNA, 19 nt, Artificial Sequence
  Description of Artificial Sequence: Synthetic oligonucleotide
  Sense strand starting at position 2978 of SEQ ID NO: 1879993
ggguuugagcugugccuga

SEQ ID NO: 1940191 - RNA, 19 nt, Artificial Sequence
  Description of Artificial Sequence: Synthetic oligonucleotide
  Antisense strand to SEQ ID NO: 1940190
ucaggcacagcucaaaccc

SEQ ID NO: 1940192 - RNA, 19 nt, Artificial Sequence
  Description of Artificial Sequence: Synthetic oligonucleotide
  Sense strand starting at position 3239 of SEQ ID NO: 1879993
gcguguccucgguacugga

SEQ ID NO: 1940193 - RNA, 19 nt, Artificial Sequence
  Description of Artificial Sequence: Synthetic oligonucleotide
  Antisense strand to SEQ ID NO: 1940192
uccaguaccgaggacacgc

SEQ ID NO: 1940194 - RNA, 19 nt, Artificial Sequence
  Description of Artificial Sequence: Synthetic oligonucleotide
  Sense strand starting at position 3329 of SEQ ID NO: 1879993
uguccuuccucccggguaa

SEQ ID NO: 1940195 - RNA, 19 nt, Artificial Sequence
  Description of Artificial Sequence: Synthetic oligonucleotide
  Antisense strand to SEQ ID NO: 1940194
uuacccgggaggaaggaca

SEQ ID NO: 1940196 - RNA, 19 nt, Artificial Sequence
  Description of Artificial Sequence: Synthetic oligonucleotide
  Sense strand starting at position 3330 of SEQ ID NO: 1879993
guccuuccucccggguaaa

SEQ ID NO: 1940197 - RNA, 19 nt, Artificial Sequence
  Description of Artificial Sequence: Synthetic oligonucleotide
  Antisense strand to SEQ ID NO: 1940196
uuuacccgggaggaaggac

SEQ ID NO: 1940198 - RNA, 19 nt, Artificial Sequence
  Description of Artificial Sequence: Synthetic oligonucleotide
  Sense strand starting at position 3424 of SEQ ID NO: 1879993
gguuuauaagguugcgacu

SEQ ID NO: 1940199 - RNA, 19 nt, Artificial Sequence
  Description of Artificial Sequence: Synthetic oligonucleotide
  Antisense strand to SEQ ID NO: 1940198
agucgcaaccuuauaaacc

SEQ ID NO: 1940200 - RNA, 19 nt, Artificial Sequence
  Description of Artificial Sequence: Synthetic oligonucleotide
  Sense strand starting at position 3457 of SEQ ID NO: 1879993
aauugaauugccuggugga

SEQ ID NO: 1940201 - RNA, 19 nt, Artificial Sequence
  Description of Artificial Sequence: Synthetic oligonucleotide
  Antisense strand to SEQ ID NO: 1940200
uccaccaggcaauucaauu

SEQ ID NO: 1940202 - RNA, 19 nt, Artificial Sequence
  Description of Artificial Sequence: Synthetic oligonucleotide
  Sense strand starting at position 3458 of SEQ ID NO: 1879993
auugaauugccugguggau

SEQ ID NO: 1940203 - RNA, 19 nt, Artificial Sequence
  Description of Artificial Sequence: Synthetic oligonucleotide
  Antisense strand to SEQ ID NO: 1940202
auccaccaggcaauucaau

SEQ ID NO: 1940204 - RNA, 19 nt, Artificial Sequence
  Description of Artificial Sequence: Synthetic oligonucleotide
  Sense strand starting at position 3514 of SEQ ID NO: 1879993
uggccugcaccuuagugau

SEQ ID NO: 1940205 - RNA, 19 nt, Artificial Sequence
  Description of Artificial Sequence: Synthetic oligonucleotide
  Antisense strand to SEQ ID NO: 1940204
aucacuaaggugcaggcca

SEQ ID NO: 1940206 - RNA, 19 nt, Artificial Sequence
  Description of Artificial Sequence: Synthetic oligonucleotide
  Sense strand starting at position 3538 of SEQ ID NO: 1879993
gcgugguguuucugcugga

SEQ ID NO: 1940207 - RNA, 19 nt, Artificial Sequence
  Description of Artificial Sequence: Synthetic oligonucleotide
  Antisense strand to SEQ ID NO: 1940206
uccagcagaaacaccacgc

SEQ ID NO: 1940208 - RNA, 19 nt, Artificial Sequence
  Description of Artificial Sequence: Synthetic oligonucleotide
  Sense strand starting at position 3582 of SEQ ID NO: 1879993
cauccugaauaguugugau

SEQ ID NO: 1940209 - RNA, 19 nt, Artificial Sequence
  Description of Artificial Sequence: Synthetic oligonucleotide
  Antisense strand to SEQ ID NO: 1940208
aucacaacuauucaggaug

SEQ ID NO: 1940210 - RNA, 19 nt, Artificial Sequence
  Description of Artificial Sequence: Synthetic oligonucleotide
  Sense strand starting at position 3585 of SEQ ID NO: 1879993
ccugaauaguugugauguu

SEQ ID NO: 1940211 - RNA, 19 nt, Artificial Sequence
  Description of Artificial Sequence: Synthetic oligonucleotide
  Antisense strand to SEQ ID NO: 1940210
aacaucacaacuauucagg

SEQ ID NO: 1940212 - RNA, 19 nt, Artificial Sequence
  Description of Artificial Sequence: Synthetic oligonucleotide
  Sense strand starting at position 3658 of SEQ ID NO: 1879993
ugggcuugggcgugugaaa

SEQ ID NO: 1940213 - RNA, 19 nt, Artificial Sequence
  Description of Artificial Sequence: Synthetic oligonucleotide
  Antisense strand to SEQ ID NO: 1940212
uuucacacgcccaagccca

SEQ ID NO: 1940214 - RNA, 19 nt, Artificial Sequence
  Description of Artificial Sequence: Synthetic oligonucleotide
  Sense strand starting at position 3684 of SEQ ID NO: 1879993
gcagauuuacggugcgguu

SEQ ID NO: 1940215 - RNA, 19 nt, Artificial Sequence
  Description of Artificial Sequence: Synthetic oligonucleotide
  Antisense strand to SEQ ID NO: 1940214
aaccgcaccguaaaucugc

SEQ ID NO: 1940216 - RNA, 19 nt, Artificial Sequence
  Description of Artificial Sequence: Synthetic oligonucleotide
  Sense strand starting at position 3778 of SEQ ID NO: 1879993
aguggcguuucaucuaagu

SEQ ID NO: 1940217 - RNA, 19 nt, Artificial Sequence
  Description of Artificial Sequence: Synthetic oligonucleotide
  Antisense strand to SEQ ID NO: 1940216
acuuagaugaaacgccacu

SEQ ID NO: 1940218 - RNA, 19 nt, Artificial Sequence
  Description of Artificial Sequence: Synthetic oligonucleotide
  Sense strand starting at position 2596 of SEQ ID NO: 1880003
guucguucucguuccggaa

SEQ ID NO: 1940219 - RNA, 19 nt, Artificial Sequence
  Description of Artificial Sequence: Synthetic oligonucleotide
  Antisense strand to SEQ ID NO: 1940218
uuccggaacgagaacgaac

SEQ ID NO: 1940220 - RNA, 19 nt, Artificial Sequence
  Description of Artificial Sequence: Synthetic oligonucleotide
  Sense strand starting at position 2897 of SEQ ID NO: 1880003
gcgagaacguuugagccuu

SEQ ID NO: 1940221 - RNA, 19 nt, Artificial Sequence
  Description of Artificial Sequence: Synthetic oligonucleotide
  Antisense strand to SEQ ID NO: 1940220
aaggcucaaacguucucgc

SEQ ID NO: 1940222 - RNA, 19 nt, Artificial Sequence
  Description of Artificial Sequence: Synthetic oligonucleotide
  Sense strand starting at position 2903 of SEQ ID NO: 1880003
acguuugagccuuagagag

SEQ ID NO: 1940223 - RNA, 19 nt, Artificial Sequence
  Description of Artificial Sequence: Synthetic oligonucleotide
  Antisense strand to SEQ ID NO: 1940222
cucucuaaggcucaaacgu

SEQ ID NO: 1940224 - RNA, 19 nt, Artificial Sequence
  Description of Artificial Sequence: Synthetic oligonucleotide
  Sense strand starting at position 2905 of SEQ ID NO: 1880003
guuugagccuuagagagga

SEQ ID NO: 1940225 - RNA, 19 nt, Artificial Sequence
  Description of Artificial Sequence: Synthetic oligonucleotide
  Antisense strand to SEQ ID NO: 1940224
uccucucuaaggcucaaac

SEQ ID NO: 1940226 - RNA, 19 nt, Artificial Sequence
  Description of Artificial Sequence: Synthetic oligonucleotide
  Sense strand starting at position 2978 of SEQ ID NO: 1880003
ggguuugagcugugccuga

SEQ ID NO: 1940227 - RNA, 19 nt, Artificial Sequence
  Description of Artificial Sequence: Synthetic oligonucleotide
  Antisense strand to SEQ ID NO: 1940226
ucaggcacagcucaaaccc

SEQ ID NO: 1940228 - RNA, 19 nt, Artificial Sequence
  Description of Artificial Sequence: Synthetic oligonucleotide
  Sense strand starting at position 3239 of SEQ ID NO: 1880003
gcguguccucgguacugga

SEQ ID NO: 1940229 - RNA, 19 nt, Artificial Sequence
  Description of Artificial Sequence: Synthetic oligonucleotide
  Antisense strand to SEQ ID NO: 1940228
uccaguaccgaggacacgc

SEQ ID NO: 1940230 - RNA, 19 nt, Artificial Sequence
  Description of Artificial Sequence: Synthetic oligonucleotide
  Sense strand starting at position 3329 of SEQ ID NO: 1880003
uguccuuccucccggguaa

SEQ ID NO: 1940231 - RNA, 19 nt, Artificial Sequence
  Description of Artificial Sequence: Synthetic oligonucleotide
  Antisense strand to SEQ ID NO: 1940230
uuacccgggaggaaggaca

SEQ ID NO: 1940232 - RNA, 19 nt, Artificial Sequence
  Description of Artificial Sequence: Synthetic oligonucleotide
  Sense strand starting at position 3330 of SEQ ID NO: 1880003
guccuuccucccggguaaa

SEQ ID NO: 1940233 - RNA, 19 nt, Artificial Sequence
  Description of Artificial Sequence: Synthetic oligonucleotide
  Antisense strand to SEQ ID NO: 1940232
uuuacccgggaggaaggac

SEQ ID NO: 1940234 - RNA, 19 nt, Artificial Sequence
  Description of Artificial Sequence: Synthetic oligonucleotide
  Sense strand starting at position 3424 of SEQ ID NO: 1880003
gguuuauaagguugcgacu

SEQ ID NO: 1940235 - RNA, 19 nt, Artificial Sequence
  Description of Artificial Sequence: Synthetic oligonucleotide
  Antisense strand to SEQ ID NO: 1940234
agucgcaaccuuauaaacc

SEQ ID NO: 1940236 - RNA, 19 nt, Artificial Sequence
  Description of Artificial Sequence: Synthetic oligonucleotide
  Sense strand starting at position 3457 of SEQ ID NO: 1880003
aauugaauugccuggugga

SEQ ID NO: 1940237 - RNA, 19 nt, Artificial Sequence
  Description of Artificial Sequence: Synthetic oligonucleotide
  Antisense strand to SEQ ID NO: 1940236
uccaccaggcaauucaauu

SEQ ID NO: 1940238 - RNA, 19 nt, Artificial Sequence
  Description of Artificial Sequence: Synthetic oligonucleotide
  Sense strand starting at position 3458 of SEQ ID NO: 1880003
auugaauugccugguggau

SEQ ID NO: 1940239 - RNA, 19 nt, Artificial Sequence
  Description of Artificial Sequence: Synthetic oligonucleotide
  Antisense strand to SEQ ID NO: 1940238
auccaccaggcaauucaau

SEQ ID NO: 1940240 - RNA, 19 nt, Artificial Sequence
  Description of Artificial Sequence: Synthetic oligonucleotide
  Sense strand starting at position 3514 of SEQ ID NO: 1880003
uggccugcaccuuagugau

SEQ ID NO: 1940241 - RNA, 19 nt, Artificial Sequence
  Description of Artificial Sequence: Synthetic oligonucleotide
  Antisense strand to SEQ ID NO: 1940240
aucacuaaggugcaggcca

SEQ ID NO: 1940242 - RNA, 19 nt, Artificial Sequence
  Description of Artificial Sequence: Synthetic oligonucleotide
  Sense strand starting at position 3538 of SEQ ID NO: 1880003
gcgugguguuucugcugga

SEQ ID NO: 1940243 - RNA, 19 nt, Artificial Sequence
  Description of Artificial Sequence: Synthetic oligonucleotide
  Antisense strand to SEQ ID NO: 1940242
uccagcagaaacaccacgc

SEQ ID NO: 1940244 - RNA, 19 nt, Artificial Sequence
  Description of Artificial Sequence: Synthetic oligonucleotide
  Sense strand starting at position 3582 of SEQ ID NO: 1880003
cauccugaauaguugugau

SEQ ID NO: 1940245 - RNA, 19 nt, Artificial Sequence
  Description of Artificial Sequence: Synthetic oligonucleotide
  Antisense strand to SEQ ID NO: 1940244
aucacaacuauucaggaug

SEQ ID NO: 1940246 - RNA, 19 nt, Artificial Sequence
  Description of Artificial Sequence: Synthetic oligonucleotide
  Sense strand starting at position 3585 of SEQ ID NO: 1880003
ccugaauaguugugauguu

SEQ ID NO: 1940247 - RNA, 19 nt, Artificial Sequence
  Description of Artificial Sequence: Synthetic oligonucleotide
  Antisense strand to SEQ ID NO: 1940246
aacaucacaacuauucagg

SEQ ID NO: 1940248 - RNA, 19 nt, Artificial Sequence
  Description of Artificial Sequence: Synthetic oligonucleotide
  Sense strand starting at position 3658 of SEQ ID NO: 1880003
ugggcuugggcgugugaaa

SEQ ID NO: 1940249 - RNA, 19 nt, Artificial Sequence
  Description of Artificial Sequence: Synthetic oligonucleotide
  Antisense strand to SEQ ID NO: 1940248
uuucacacgcccaagccca

SEQ ID NO: 1940250 - RNA, 19 nt, Artificial Sequence
  Description of Artificial Sequence: Synthetic oligonucleotide
  Sense strand starting at position 3684 of SEQ ID NO: 1880003
gcagauuuacggugcgguu

SEQ ID NO: 1940251 - RNA, 19 nt, Artificial Sequence
  Description of Artificial Sequence: Synthetic oligonucleotide
  Antisense strand to SEQ ID NO: 1940250
aaccgcaccguaaaucugc

SEQ ID NO: 1940252 - RNA, 19 nt, Artificial Sequence
  Description of Artificial Sequence: Synthetic oligonucleotide
  Sense strand starting at position 3778 of SEQ ID NO: 1880003
aguggcguuucaucuaagu

SEQ ID NO: 1940253 - RNA, 19 nt, Artificial Sequence
  Description of Artificial Sequence: Synthetic oligonucleotide
  Antisense strand to SEQ ID NO: 1940252
acuuagaugaaacgccacu

SEQ ID NO: 1940254 - RNA, 19 nt, Artificial Sequence
  Description of Artificial Sequence: Synthetic oligonucleotide
  Sense strand starting at position 2596 of SEQ ID NO: 1880013
guucguucucguuccggaa

SEQ ID NO: 1940255 - RNA, 19 nt, Artificial Sequence
  Description of Artificial Sequence: Synthetic oligonucleotide
  Antisense strand to SEQ ID NO: 1940254
uuccggaacgagaacgaac

SEQ ID NO: 1940256 - RNA, 19 nt, Artificial Sequence
  Description of Artificial Sequence: Synthetic oligonucleotide
  Sense strand starting at position 2897 of SEQ ID NO: 1880013
gcgagaacguuugagccuu

SEQ ID NO: 1940257 - RNA, 19 nt, Artificial Sequence
  Description of Artificial Sequence: Synthetic oligonucleotide
  Antisense strand to SEQ ID NO: 1940256
aaggcucaaacguucucgc

SEQ ID NO: 1940258 - RNA, 19 nt, Artificial Sequence
  Description of Artificial Sequence: Synthetic oligonucleotide
  Sense strand starting at position 2903 of SEQ ID NO: 1880013
acguuugagccuuagagag

SEQ ID NO: 1940259 - RNA, 19 nt, Artificial Sequence
  Description of Artificial Sequence: Synthetic oligonucleotide
  Antisense strand to SEQ ID NO: 1940258
cucucuaaggcucaaacgu

SEQ ID NO: 1940260 - RNA, 19 nt, Artificial Sequence
  Description of Artificial Sequence: Synthetic oligonucleotide
  Sense strand starting at position 2905 of SEQ ID NO: 1880013
guuugagccuuagagagga

SEQ ID NO: 1940261 - RNA, 19 nt, Artificial Sequence
  Description of Artificial Sequence: Synthetic oligonucleotide
  Antisense strand to SEQ ID NO: 1940260
uccucucuaaggcucaaac

SEQ ID NO: 1940262 - RNA, 19 nt, Artificial Sequence
  Description of Artificial Sequence: Synthetic oligonucleotide
  Sense strand starting at position 2978 of SEQ ID NO: 1880013
ggguuugagcugugccuga

SEQ ID NO: 1940263 - RNA, 19 nt, Artificial Sequence
  Description of Artificial Sequence: Synthetic oligonucleotide
  Antisense strand to SEQ ID NO: 1940262
ucaggcacagcucaaaccc

SEQ ID NO: 1940264 - RNA, 19 nt, Artificial Sequence
  Description of Artificial Sequence: Synthetic oligonucleotide
  Sense strand starting at position 3239 of SEQ ID NO: 1880013
gcguguccucgguacugga

SEQ ID NO: 1940265 - RNA, 19 nt, Artificial Sequence
  Description of Artificial Sequence: Synthetic oligonucleotide
  Antisense strand to SEQ ID NO: 1940264
uccaguaccgaggacacgc

SEQ ID NO: 1940266 - RNA, 19 nt, Artificial Sequence
  Description of Artificial Sequence: Synthetic oligonucleotide
  Sense strand starting at position 3329 of SEQ ID NO: 1880013
uguccuuccucccggguaa

SEQ ID NO: 1940267 - RNA, 19 nt, Artificial Sequence
  Description of Artificial Sequence: Synthetic oligonucleotide
  Antisense strand to SEQ ID NO: 1940266
uuacccgggaggaaggaca

SEQ ID NO: 1940268 - RNA, 19 nt, Artificial Sequence
  Description of Artificial Sequence: Synthetic oligonucleotide
  Sense strand starting at position 3330 of SEQ ID NO: 1880013
guccuuccucccggguaaa

SEQ ID NO: 1940269 - RNA, 19 nt, Artificial Sequence
  Description of Artificial Sequence: Synthetic oligonucleotide
  Antisense strand to SEQ ID NO: 1940268
uuuacccgggaggaaggac

SEQ ID NO: 1940270 - RNA, 19 nt, Artificial Sequence
  Description of Artificial Sequence: Synthetic oligonucleotide
  Sense strand starting at position 3424 of SEQ ID NO: 1880013
gguuuauaagguugcgacu

SEQ ID NO: 1940271 - RNA, 19 nt, Artificial Sequence
  Description of Artificial Sequence: Synthetic oligonucleotide
  Antisense strand to SEQ ID NO: 1940270
agucgcaaccuuauaaacc

SEQ ID NO: 1940272 - RNA, 19 nt, Artificial Sequence
  Description of Artificial Sequence: Synthetic oligonucleotide
  Sense strand starting at position 3457 of SEQ ID NO: 1880013
aauugaauugccuggugga

SEQ ID NO: 1940273 - RNA, 19 nt, Artificial Sequence
  Description of Artificial Sequence: Synthetic oligonucleotide
  Antisense strand to SEQ ID NO: 1940272
uccaccaggcaauucaauu

SEQ ID NO: 1940274 - RNA, 19 nt, Artificial Sequence
  Description of Artificial Sequence: Synthetic oligonucleotide
  Sense strand starting at position 3458 of SEQ ID NO: 1880013
auugaauugccugguggau

SEQ ID NO: 1940275 - RNA, 19 nt, Artificial Sequence
  Description of Artificial Sequence: Synthetic oligonucleotide
  Antisense strand to SEQ ID NO: 1940274
auccaccaggcaauucaau

SEQ ID NO: 1940276 - RNA, 19 nt, Artificial Sequence
  Description of Artificial Sequence: Synthetic oligonucleotide
  Sense strand starting at position 3514 of SEQ ID NO: 1880013
uggccugcaccuuagugau

SEQ ID NO: 1940277 - RNA, 19 nt, Artificial Sequence
  Description of Artificial Sequence: Synthetic oligonucleotide
  Antisense strand to SEQ ID NO: 1940276
aucacuaaggugcaggcca

SEQ ID NO: 1940278 - RNA, 19 nt, Artificial Sequence
  Description of Artificial Sequence: Synthetic oligonucleotide
  Sense strand starting at position 3538 of SEQ ID NO: 1880013
gcgugguguuucugcugga

SEQ ID NO: 1940279 - RNA, 19 nt, Artificial Sequence
  Description of Artificial Sequence: Synthetic oligonucleotide
  Antisense strand to SEQ ID NO: 1940278
uccagcagaaacaccacgc

SEQ ID NO: 1940280 - RNA, 19 nt, Artificial Sequence
  Description of Artificial Sequence: Synthetic oligonucleotide
  Sense strand starting at position 3582 of SEQ ID NO: 1880013
cauccugaauaguugugau

SEQ ID NO: 1940281 - RNA, 19 nt, Artificial Sequence
  Description of Artificial Sequence: Synthetic oligonucleotide
  Antisense strand to SEQ ID NO: 1940280
aucacaacuauucaggaug

SEQ ID NO: 1940282 - RNA, 19 nt, Artificial Sequence
  Description of Artificial Sequence: Synthetic oligonucleotide
  Sense strand starting at position 3585 of SEQ ID NO: 1880013
ccugaauaguugugauguu

SEQ ID NO: 1940283 - RNA, 19 nt, Artificial Sequence
  Description of Artificial Sequence: Synthetic oligonucleotide
  Antisense strand to SEQ ID NO: 1940282
aacaucacaacuauucagg

SEQ ID NO: 1940284 - RNA, 19 nt, Artificial Sequence
  Description of Artificial Sequence: Synthetic oligonucleotide
  Sense strand starting at position 3658 of SEQ ID NO: 1880013
ugggcuugggcgugugaaa

SEQ ID NO: 1940285 - RNA, 19 nt, Artificial Sequence
  Description of Artificial Sequence: Synthetic oligonucleotide
  Antisense strand to SEQ ID NO: 1940284
uuucacacgcccaagccca

SEQ ID NO: 1940286 - RNA, 19 nt, Artificial Sequence
  Description of Artificial Sequence: Synthetic oligonucleotide
  Sense strand starting at position 3684 of SEQ ID NO: 1880013
gcagauuuacggugcgguu

SEQ ID NO: 1940287 - RNA, 19 nt, Artificial Sequence
  Description of Artificial Sequence: Synthetic oligonucleotide
  Antisense strand to SEQ ID NO: 1940286
aaccgcaccguaaaucugc

SEQ ID NO: 1940288 - RNA, 19 nt, Artificial Sequence
  Description of Artificial Sequence: Synthetic oligonucleotide
  Sense strand starting at position 3778 of SEQ ID NO: 1880013
aguggcguuucaucuaagu

SEQ ID NO: 1940289 - RNA, 19 nt, Artificial Sequence
  Description of Artificial Sequence: Synthetic oligonucleotide
  Antisense strand to SEQ ID NO: 1940288
acuuagaugaaacgccacu

SEQ ID NO: 1940290 - RNA, 19 nt, Artificial Sequence
  Description of Artificial Sequence: Synthetic oligonucleotide
  Sense strand starting at position 2596 of SEQ ID NO: 1880023
guucguucucguuccggaa

SEQ ID NO: 1940291 - RNA, 19 nt, Artificial Sequence
  Description of Artificial Sequence: Synthetic oligonucleotide
  Antisense strand to SEQ ID NO: 1940290
uuccggaacgagaacgaac

SEQ ID NO: 1940292 - RNA, 19 nt, Artificial Sequence
  Description of Artificial Sequence: Synthetic oligonucleotide
  Sense strand starting at position 2897 of SEQ ID NO: 1880023
gcgagaacguuugagccuu

SEQ ID NO: 1940293 - RNA, 19 nt, Artificial Sequence
  Description of Artificial Sequence: Synthetic oligonucleotide
  Antisense strand to SEQ ID NO: 1940292
aaggcucaaacguucucgc

SEQ ID NO: 1940294 - RNA, 19 nt, Artificial Sequence
  Description of Artificial Sequence: Synthetic oligonucleotide
  Sense strand starting at position 2903 of SEQ ID NO: 1880023
acguuugagccuuagagag

SEQ ID NO: 1940295 - RNA, 19 nt, Artificial Sequence
  Description of Artificial Sequence: Synthetic oligonucleotide
  Antisense strand to SEQ ID NO: 1940294
cucucuaaggcucaaacgu

SEQ ID NO: 1940296 - RNA, 19 nt, Artificial Sequence
  Description of Artificial Sequence: Synthetic oligonucleotide
  Sense strand starting at position 2905 of SEQ ID NO: 1880023
guuugagccuuagagagga

SEQ ID NO: 1940297 - RNA, 19 nt, Artificial Sequence
  Description of Artificial Sequence: Synthetic oligonucleotide
  Antisense strand to SEQ ID NO: 1940296
uccucucuaaggcucaaac

SEQ ID NO: 1940298 - RNA, 19 nt, Artificial Sequence
  Description of Artificial Sequence: Synthetic oligonucleotide
  Sense strand starting at position 2978 of SEQ ID NO: 1880023
ggguuugagcugugccuga

SEQ ID NO: 1940299 - RNA, 19 nt, Artificial Sequence
  Description of Artificial Sequence: Synthetic oligonucleotide
  Antisense strand to SEQ ID NO: 1940298
ucaggcacagcucaaaccc

SEQ ID NO: 1940300 - RNA, 19 nt, Artificial Sequence
  Description of Artificial Sequence: Synthetic oligonucleotide
  Sense strand starting at position 3239 of SEQ ID NO: 1880023
gcguguccucgguacugga

SEQ ID NO: 1940301 - RNA, 19 nt, Artificial Sequence
  Description of Artificial Sequence: Synthetic oligonucleotide
  Antisense strand to SEQ ID NO: 1940300
uccaguaccgaggacacgc

SEQ ID NO: 1940302 - RNA, 19 nt, Artificial Sequence
  Description of Artificial Sequence: Synthetic oligonucleotide
  Sense strand starting at position 3329 of SEQ ID NO: 1880023
uguccuuccucccggguaa

SEQ ID NO: 1940303 - RNA, 19 nt, Artificial Sequence
  Description of Artificial Sequence: Synthetic oligonucleotide
  Antisense strand to SEQ ID NO: 1940302
uuacccgggaggaaggaca

SEQ ID NO: 1940304 - RNA, 19 nt, Artificial Sequence
  Description of Artificial Sequence: Synthetic oligonucleotide
  Sense strand starting at position 3330 of SEQ ID NO: 1880023
guccuuccucccggguaaa

SEQ ID NO: 1940305 - RNA, 19 nt, Artificial Sequence
  Description of Artificial Sequence: Synthetic oligonucleotide
  Antisense strand to SEQ ID NO: 1940304
uuuacccgggaggaaggac

SEQ ID NO: 1940306 - RNA, 19 nt, Artificial Sequence
  Description of Artificial Sequence: Synthetic oligonucleotide
  Sense strand starting at position 3424 of SEQ ID NO: 1880023
gguuuauaagguugcgacu

SEQ ID NO: 1940307 - RNA, 19 nt, Artificial Sequence
  Description of Artificial Sequence: Synthetic oligonucleotide
  Antisense strand to SEQ ID NO: 1940306
agucgcaaccuuauaaacc

SEQ ID NO: 1940308 - RNA, 19 nt, Artificial Sequence
  Description of Artificial Sequence: Synthetic oligonucleotide
  Sense strand starting at position 3457 of SEQ ID NO: 1880023
aauugaauugccuggugga

SEQ ID NO: 1940309 - RNA, 19 nt, Artificial Sequence
  Description of Artificial Sequence: Synthetic oligonucleotide
  Antisense strand to SEQ ID NO: 1940308
uccaccaggcaauucaauu

SEQ ID NO: 1940310 - RNA, 19 nt, Artificial Sequence
  Description of Artificial Sequence: Synthetic oligonucleotide
  Sense strand starting at position 3458 of SEQ ID NO: 1880023
auugaauugccugguggau

SEQ ID NO: 1940311 - RNA, 19 nt, Artificial Sequence
  Description of Artificial Sequence: Synthetic oligonucleotide
  Antisense strand to SEQ ID NO: 1940310
auccaccaggcaauucaau

SEQ ID NO: 1940312 - RNA, 19 nt, Artificial Sequence
  Description of Artificial Sequence: Synthetic oligonucleotide
  Sense strand starting at position 3514 of SEQ ID NO: 1880023
uggccugcaccuuagugau

SEQ ID NO: 1940313 - RNA, 19 nt, Artificial Sequence
  Description of Artificial Sequence: Synthetic oligonucleotide
  Antisense strand to SEQ ID NO: 1940312
aucacuaaggugcaggcca

SEQ ID NO: 1940314 - RNA, 19 nt, Artificial Sequence
  Description of Artificial Sequence: Synthetic oligonucleotide
  Sense strand starting at position 3538 of SEQ ID NO: 1880023
gcgugguguuucugcugga

SEQ ID NO: 1940315 - RNA, 19 nt, Artificial Sequence
  Description of Artificial Sequence: Synthetic oligonucleotide
  Antisense strand to SEQ ID NO: 1940314
uccagcagaaacaccacgc

SEQ ID NO: 1940316 - RNA, 19 nt, Artificial Sequence
  Description of Artificial Sequence: Synthetic oligonucleotide
  Sense strand starting at position 3582 of SEQ ID NO: 1880023
cauccugaauaguugugau

SEQ ID NO: 1940317 - RNA, 19 nt, Artificial Sequence
  Description of Artificial Sequence: Synthetic oligonucleotide
  Antisense strand to SEQ ID NO: 1940316
aucacaacuauucaggaug

SEQ ID NO: 1940318 - RNA, 19 nt, Artificial Sequence
  Description of Artificial Sequence: Synthetic oligonucleotide
  Sense strand starting at position 3585 of SEQ ID NO: 1880023
ccugaauaguugugauguu

SEQ ID NO: 1940319 - RNA, 19 nt, Artificial Sequence
  Description of Artificial Sequence: Synthetic oligonucleotide
  Antisense strand to SEQ ID NO: 1940318
aacaucacaacuauucagg

SEQ ID NO: 1940320 - RNA, 19 nt, Artificial Sequence
  Description of Artificial Sequence: Synthetic oligonucleotide
  Sense strand starting at position 3658 of SEQ ID NO: 1880023
ugggcuugggcgugugaaa

SEQ ID NO: 1940321 - RNA, 19 nt, Artificial Sequence
  Description of Artificial Sequence: Synthetic oligonucleotide
  Antisense strand to SEQ ID NO: 1940320
uuucacacgcccaagccca

SEQ ID NO: 1940322 - RNA, 19 nt, Artificial Sequence
  Description of Artificial Sequence: Synthetic oligonucleotide
  Sense strand starting at position 3684 of SEQ ID NO: 1880023
gcagauuuacggugcgguu

SEQ ID NO: 1940323 - RNA, 19 nt, Artificial Sequence
  Description of Artificial Sequence: Synthetic oligonucleotide
  Antisense strand to SEQ ID NO: 1940322
aaccgcaccguaaaucugc

SEQ ID NO: 1940324 - RNA, 19 nt, Artificial Sequence
  Description of Artificial Sequence: Synthetic oligonucleotide
  Sense strand starting at position 3778 of SEQ ID NO: 1880023
aguggcguuucaucuaagu

SEQ ID NO: 1940325 - RNA, 19 nt, Artificial Sequence
  Description of Artificial Sequence: Synthetic oligonucleotide
  Antisense strand to SEQ ID NO: 1940324
acuuagaugaaacgccacu

SEQ ID NO: 1940326 - RNA, 19 nt, Artificial Sequence
  Description of Artificial Sequence: Synthetic oligonucleotide
  Sense strand starting at position 2596 of SEQ ID NO: 1880033
guucguucucguuccggaa

SEQ ID NO: 1940327 - RNA, 19 nt, Artificial Sequence
  Description of Artificial Sequence: Synthetic oligonucleotide
  Antisense strand to SEQ ID NO: 1940326
uuccggaacgagaacgaac

SEQ ID NO: 1940328 - RNA, 19 nt, Artificial Sequence
  Description of Artificial Sequence: Synthetic oligonucleotide
  Sense strand starting at position 2897 of SEQ ID NO: 1880033
gcgagaacguuugagccuu

SEQ ID NO: 1940329 - RNA, 19 nt, Artificial Sequence
  Description of Artificial Sequence: Synthetic oligonucleotide
  Antisense strand to SEQ ID NO: 1940328
aaggcucaaacguucucgc

SEQ ID NO: 1940330 - RNA, 19 nt, Artificial Sequence
  Description of Artificial Sequence: Synthetic oligonucleotide
  Sense strand starting at position 2903 of SEQ ID NO: 1880033
acguuugagccuuagagag

SEQ ID NO: 1940331 - RNA, 19 nt, Artificial Sequence
  Description of Artificial Sequence: Synthetic oligonucleotide
  Antisense strand to SEQ ID NO: 1940330
cucucuaaggcucaaacgu

SEQ ID NO: 1940332 - RNA, 19 nt, Artificial Sequence
  Description of Artificial Sequence: Synthetic oligonucleotide
  Sense strand starting at position 2905 of SEQ ID NO: 1880033
guuugagccuuagagagga

SEQ ID NO: 1940333 - RNA, 19 nt, Artificial Sequence
  Description of Artificial Sequence: Synthetic oligonucleotide
  Antisense strand to SEQ ID NO: 1940332
uccucucuaaggcucaaac

SEQ ID NO: 1940334 - RNA, 19 nt, Artificial Sequence
  Description of Artificial Sequence: Synthetic oligonucleotide
  Sense strand starting at position 2978 of SEQ ID NO: 1880033
ggguuugagcugugccuga

SEQ ID NO: 1940335 - RNA, 19 nt, Artificial Sequence
  Description of Artificial Sequence: Synthetic oligonucleotide
  Antisense strand to SEQ ID NO: 1940334
ucaggcacagcucaaaccc

SEQ ID NO: 1940336 - RNA, 19 nt, Artificial Sequence
  Description of Artificial Sequence: Synthetic oligonucleotide
  Sense strand starting at position 3239 of SEQ ID NO: 1880033
gcguguccucgguacugga

SEQ ID NO: 1940337 - RNA, 19 nt, Artificial Sequence
  Description of Artificial Sequence: Synthetic oligonucleotide
  Antisense strand to SEQ ID NO: 1940336
uccaguaccgaggacacgc

SEQ ID NO: 1940338 - RNA, 19 nt, Artificial Sequence
  Description of Artificial Sequence: Synthetic oligonucleotide
  Sense strand starting at position 3329 of SEQ ID NO: 1880033
uguccuuccucccggguaa

SEQ ID NO: 1940339 - RNA, 19 nt, Artificial Sequence
  Description of Artificial Sequence: Synthetic oligonucleotide
  Antisense strand to SEQ ID NO: 1940338
uuacccgggaggaaggaca

SEQ ID NO: 1940340 - RNA, 19 nt, Artificial Sequence
  Description of Artificial Sequence: Synthetic oligonucleotide
  Sense strand starting at position 3330 of SEQ ID NO: 1880033
guccuuccucccggguaaa

SEQ ID NO: 1940341 - RNA, 19 nt, Artificial Sequence
  Description of Artificial Sequence: Synthetic oligonucleotide
  Antisense strand to SEQ ID NO: 1940340
uuuacccgggaggaaggac

SEQ ID NO: 1940342 - RNA, 19 nt, Artificial Sequence
  Description of Artificial Sequence: Synthetic oligonucleotide
  Sense strand starting at position 3424 of SEQ ID NO: 1880033
gguuuauaagguugcgacu

SEQ ID NO: 1940343 - RNA, 19 nt, Artificial Sequence
  Description of Artificial Sequence: Synthetic oligonucleotide
  Antisense strand to SEQ ID NO: 1940342
agucgcaaccuuauaaacc

SEQ ID NO: 1940344 - RNA, 19 nt, Artificial Sequence
  Description of Artificial Sequence: Synthetic oligonucleotide
  Sense strand starting at position 3457 of SEQ ID NO: 1880033
aauugaauugccuggugga

SEQ ID NO: 1940345 - RNA, 19 nt, Artificial Sequence
  Description of Artificial Sequence: Synthetic oligonucleotide
  Antisense strand to SEQ ID NO: 1940344
uccaccaggcaauucaauu

SEQ ID NO: 1940346 - RNA, 19 nt, Artificial Sequence
  Description of Artificial Sequence: Synthetic oligonucleotide
  Sense strand starting at position 3458 of SEQ ID NO: 1880033
auugaauugccugguggau

SEQ ID NO: 1940347 - RNA, 19 nt, Artificial Sequence
  Description of Artificial Sequence: Synthetic oligonucleotide
  Antisense strand to SEQ ID NO: 1940346
auccaccaggcaauucaau

SEQ ID NO: 1940348 - RNA, 19 nt, Artificial Sequence
  Description of Artificial Sequence: Synthetic oligonucleotide
  Sense strand starting at position 3514 of SEQ ID NO: 1880033
uggccugcaccuuagugau

SEQ ID NO: 1940349 - RNA, 19 nt, Artificial Sequence
  Description of Artificial Sequence: Synthetic oligonucleotide
  Antisense strand to SEQ ID NO: 1940348
aucacuaaggugcaggcca

SEQ ID NO: 1940350 - RNA, 19 nt, Artificial Sequence
  Description of Artificial Sequence: Synthetic oligonucleotide
  Sense strand starting at position 3538 of SEQ ID NO: 1880033
gcgugguguuucugcugga

SEQ ID NO: 1940351 - RNA, 19 nt, Artificial Sequence
  Description of Artificial Sequence: Synthetic oligonucleotide
  Antisense strand to SEQ ID NO: 1940350
uccagcagaaacaccacgc

SEQ ID NO: 1940352 - RNA, 19 nt, Artificial Sequence
  Description of Artificial Sequence: Synthetic oligonucleotide
  Sense strand starting at position 3582 of SEQ ID NO: 1880033
cauccugaauaguugugau

SEQ ID NO: 1940353 - RNA, 19 nt, Artificial Sequence
  Description of Artificial Sequence: Synthetic oligonucleotide
  Antisense strand to SEQ ID NO: 1940352
aucacaacuauucaggaug

SEQ ID NO: 1940354 - RNA, 19 nt, Artificial Sequence
  Description of Artificial Sequence: Synthetic oligonucleotide
  Sense strand starting at position 3585 of SEQ ID NO: 1880033
ccugaauaguugugauguu

SEQ ID NO: 1940355 - RNA, 19 nt, Artificial Sequence
  Description of Artificial Sequence: Synthetic oligonucleotide
  Antisense strand to SEQ ID NO: 1940354
aacaucacaacuauucagg

SEQ ID NO: 1940356 - RNA, 19 nt, Artificial Sequence
  Description of Artificial Sequence: Synthetic oligonucleotide
  Sense strand starting at position 3658 of SEQ ID NO: 1880033
ugggcuugggcgugugaaa

SEQ ID NO: 1940357 - RNA, 19 nt, Artificial Sequence
  Description of Artificial Sequence: Synthetic oligonucleotide
  Antisense strand to SEQ ID NO: 1940356
uuucacacgcccaagccca

SEQ ID NO: 1940358 - RNA, 19 nt, Artificial Sequence
  Description of Artificial Sequence: Synthetic oligonucleotide
  Sense strand starting at position 3684 of SEQ ID NO: 1880033
gcagauuuacggugcgguu

SEQ ID NO: 1940359 - RNA, 19 nt, Artificial Sequence
  Description of Artificial Sequence: Synthetic oligonucleotide
  Antisense strand to SEQ ID NO: 1940358
aaccgcaccguaaaucugc

SEQ ID NO: 1940360 - RNA, 19 nt, Artificial Sequence
  Description of Artificial Sequence: Synthetic oligonucleotide
  Sense strand starting at position 3778 of SEQ ID NO: 1880033
aguggcguuucaucuaagu

SEQ ID NO: 1940361 - RNA, 19 nt, Artificial Sequence
  Description of Artificial Sequence: Synthetic oligonucleotide
  Antisense strand to SEQ ID NO: 1940360
acuuagaugaaacgccacu

SEQ ID NO: 1940362 - RNA, 19 nt, Artificial Sequence
  Description of Artificial Sequence: Synthetic oligonucleotide
  Sense strand starting at position 2596 of SEQ ID NO: 1880043
guucguucucguuccggaa

SEQ ID NO: 1940363 - RNA, 19 nt, Artificial Sequence
  Description of Artificial Sequence: Synthetic oligonucleotide
  Antisense strand to SEQ ID NO: 1940362
uuccggaacgagaacgaac

SEQ ID NO: 1940364 - RNA, 19 nt, Artificial Sequence
  Description of Artificial Sequence: Synthetic oligonucleotide
  Sense strand starting at position 2897 of SEQ ID NO: 1880043
gcgagaacguuugagccuu

SEQ ID NO: 1940365 - RNA, 19 nt, Artificial Sequence
  Description of Artificial Sequence: Synthetic oligonucleotide
  Antisense strand to SEQ ID NO: 1940364
aaggcucaaacguucucgc

SEQ ID NO: 1940366 - RNA, 19 nt, Artificial Sequence
  Description of Artificial Sequence: Synthetic oligonucleotide
  Sense strand starting at position 2903 of SEQ ID NO: 1880043
acguuugagccuuagagag

SEQ ID NO: 1940367 - RNA, 19 nt, Artificial Sequence
  Description of Artificial Sequence: Synthetic oligonucleotide
  Antisense strand to SEQ ID NO: 1940366
cucucuaaggcucaaacgu

SEQ ID NO: 1940368 - RNA, 19 nt, Artificial Sequence
  Description of Artificial Sequence: Synthetic oligonucleotide
  Sense strand starting at position 2905 of SEQ ID NO: 1880043
guuugagccuuagagagga

SEQ ID NO: 1940369 - RNA, 19 nt, Artificial Sequence
  Description of Artificial Sequence: Synthetic oligonucleotide
  Antisense strand to SEQ ID NO: 1940368
uccucucuaaggcucaaac

SEQ ID NO: 1940370 - RNA, 19 nt, Artificial Sequence
  Description of Artificial Sequence: Synthetic oligonucleotide
  Sense strand starting at position 2978 of SEQ ID NO: 1880043
ggguuugagcugugccuga

SEQ ID NO: 1940371 - RNA, 19 nt, Artificial Sequence
  Description of Artificial Sequence: Synthetic oligonucleotide
  Antisense strand to SEQ ID NO: 1940370
ucaggcacagcucaaaccc

SEQ ID NO: 1940372 - RNA, 19 nt, Artificial Sequence
  Description of Artificial Sequence: Synthetic oligonucleotide
  Sense strand starting at position 3239 of SEQ ID NO: 1880043
gcguguccucgguacugga

SEQ ID NO: 1940373 - RNA, 19 nt, Artificial Sequence
  Description of Artificial Sequence: Synthetic oligonucleotide
  Antisense strand to SEQ ID NO: 1940372
uccaguaccgaggacacgc

SEQ ID NO: 1940374 - RNA, 19 nt, Artificial Sequence
  Description of Artificial Sequence: Synthetic oligonucleotide
  Sense strand starting at position 3329 of SEQ ID NO: 1880043
uguccuuccucccggguaa

SEQ ID NO: 1940375 - RNA, 19 nt, Artificial Sequence
  Description of Artificial Sequence: Synthetic oligonucleotide
  Antisense strand to SEQ ID NO: 1940374
uuacccgggaggaaggaca

SEQ ID NO: 1940376 - RNA, 19 nt, Artificial Sequence
  Description of Artificial Sequence: Synthetic oligonucleotide
  Sense strand starting at position 3330 of SEQ ID NO: 1880043
guccuuccucccggguaaa

SEQ ID NO: 1940377 - RNA, 19 nt, Artificial Sequence
  Description of Artificial Sequence: Synthetic oligonucleotide
  Antisense strand to SEQ ID NO: 1940376
uuuacccgggaggaaggac

SEQ ID NO: 1940378 - RNA, 19 nt, Artificial Sequence
  Description of Artificial Sequence: Synthetic oligonucleotide
  Sense strand starting at position 3424 of SEQ ID NO: 1880043
gguuuauaagguugcgacu

SEQ ID NO: 1940379 - RNA, 19 nt, Artificial Sequence
  Description of Artificial Sequence: Synthetic oligonucleotide
  Antisense strand to SEQ ID NO: 1940378
agucgcaaccuuauaaacc

SEQ ID NO: 1940380 - RNA, 19 nt, Artificial Sequence
  Description of Artificial Sequence: Synthetic oligonucleotide
  Sense strand starting at position 3457 of SEQ ID NO: 1880043
aauugaauugccuggugga

SEQ ID NO: 1940381 - RNA, 19 nt, Artificial Sequence
  Description of Artificial Sequence: Synthetic oligonucleotide
  Antisense strand to SEQ ID NO: 1940380
uccaccaggcaauucaauu

SEQ ID NO: 1940382 - RNA, 19 nt, Artificial Sequence
  Description of Artificial Sequence: Synthetic oligonucleotide
  Sense strand starting at position 3458 of SEQ ID NO: 1880043
auugaauugccugguggau

SEQ ID NO: 1940383 - RNA, 19 nt, Artificial Sequence
  Description of Artificial Sequence: Synthetic oligonucleotide
  Antisense strand to SEQ ID NO: 1940382
auccaccaggcaauucaau

SEQ ID NO: 1940384 - RNA, 19 nt, Artificial Sequence
  Description of Artificial Sequence: Synthetic oligonucleotide
  Sense strand starting at position 3514 of SEQ ID NO: 1880043
uggccugcaccuuagugau

SEQ ID NO: 1940385 - RNA, 19 nt, Artificial Sequence
  Description of Artificial Sequence: Synthetic oligonucleotide
  Antisense strand to SEQ ID NO: 1940384
aucacuaaggugcaggcca

SEQ ID NO: 1940386 - RNA, 19 nt, Artificial Sequence
  Description of Artificial Sequence: Synthetic oligonucleotide
  Sense strand starting at position 3538 of SEQ ID NO: 1880043
gcgugguguuucugcugga

SEQ ID NO: 1940387 - RNA, 19 nt, Artificial Sequence
  Description of Artificial Sequence: Synthetic oligonucleotide
  Antisense strand to SEQ ID NO: 1940386
uccagcagaaacaccacgc

SEQ ID NO: 1940388 - RNA, 19 nt, Artificial Sequence
  Description of Artificial Sequence: Synthetic oligonucleotide
  Sense strand starting at position 3582 of SEQ ID NO: 1880043
cauccugaauaguugugau

SEQ ID NO: 1940389 - RNA, 19 nt, Artificial Sequence
  Description of Artificial Sequence: Synthetic oligonucleotide
  Antisense strand to SEQ ID NO: 1940388
aucacaacuauucaggaug

SEQ ID NO: 1940390 - RNA, 19 nt, Artificial Sequence
  Description of Artificial Sequence: Synthetic oligonucleotide
  Sense strand starting at position 3585 of SEQ ID NO: 1880043
ccugaauaguugugauguu

SEQ ID NO: 1940391 - RNA, 19 nt, Artificial Sequence
  Description of Artificial Sequence: Synthetic oligonucleotide
  Antisense strand to SEQ ID NO: 1940390
aacaucacaacuauucagg

SEQ ID NO: 1940392 - RNA, 19 nt, Artificial Sequence
  Description of Artificial Sequence: Synthetic oligonucleotide
  Sense strand starting at position 3658 of SEQ ID NO: 1880043
ugggcuugggcgugugaaa

SEQ ID NO: 1940393 - RNA, 19 nt, Artificial Sequence
  Description of Artificial Sequence: Synthetic oligonucleotide
  Antisense strand to SEQ ID NO: 1940392
uuucacacgcccaagccca

SEQ ID NO: 1940394 - RNA, 19 nt, Artificial Sequence
  Description of Artificial Sequence: Synthetic oligonucleotide
  Sense strand starting at position 3684 of SEQ ID NO: 1880043
gcagauuuacggugcgguu

SEQ ID NO: 1940395 - RNA, 19 nt, Artificial Sequence
  Description of Artificial Sequence: Synthetic oligonucleotide
  Antisense strand to SEQ ID NO: 1940394
aaccgcaccguaaaucugc

SEQ ID NO: 1940396 - RNA, 19 nt, Artificial Sequence
  Description of Artificial Sequence: Synthetic oligonucleotide
  Sense strand starting at position 3778 of SEQ ID NO: 1880043
aguggcguuucaucuaagu

SEQ ID NO: 1940397 - RNA, 19 nt, Artificial Sequence
  Description of Artificial Sequence: Synthetic oligonucleotide
  Antisense strand to SEQ ID NO: 1940396
acuuagaugaaacgccacu

SEQ ID NO: 1940398 - RNA, 19 nt, Artificial Sequence
  Description of Artificial Sequence: Synthetic oligonucleotide
  Sense strand starting at position 2596 of SEQ ID NO: 1880053
guucguucucguuccggaa

SEQ ID NO: 1940399 - RNA, 19 nt, Artificial Sequence
  Description of Artificial Sequence: Synthetic oligonucleotide
  Antisense strand to SEQ ID NO: 1940398
uuccggaacgagaacgaac

SEQ ID NO: 1940400 - RNA, 19 nt, Artificial Sequence
  Description of Artificial Sequence: Synthetic oligonucleotide
  Sense strand starting at position 2897 of SEQ ID NO: 1880053
gcgagaacguuugagccuu

SEQ ID NO: 1940401 - RNA, 19 nt, Artificial Sequence
  Description of Artificial Sequence: Synthetic oligonucleotide
  Antisense strand to SEQ ID NO: 1940400
aaggcucaaacguucucgc

SEQ ID NO: 1940402 - RNA, 19 nt, Artificial Sequence
  Description of Artificial Sequence: Synthetic oligonucleotide
  Sense strand starting at position 2903 of SEQ ID NO: 1880053
acguuugagccuuagagag

SEQ ID NO: 1940403 - RNA, 19 nt, Artificial Sequence
  Description of Artificial Sequence: Synthetic oligonucleotide
  Antisense strand to SEQ ID NO: 1940402
cucucuaaggcucaaacgu

SEQ ID NO: 1940404 - RNA, 19 nt, Artificial Sequence
  Description of Artificial Sequence: Synthetic oligonucleotide
  Sense strand starting at position 2905 of SEQ ID NO: 1880053
guuugagccuuagagagga

SEQ ID NO: 1940405 - RNA, 19 nt, Artificial Sequence
  Description of Artificial Sequence: Synthetic oligonucleotide
  Antisense strand to SEQ ID NO: 1940404
uccucucuaaggcucaaac

SEQ ID NO: 1940406 - RNA, 19 nt, Artificial Sequence
  Description of Artificial Sequence: Synthetic oligonucleotide
  Sense strand starting at position 2978 of SEQ ID NO: 1880053
ggguuugagcugugccuga

SEQ ID NO: 1940407 - RNA, 19 nt, Artificial Sequence
  Description of Artificial Sequence: Synthetic oligonucleotide
  Antisense strand to SEQ ID NO: 1940406
ucaggcacagcucaaaccc

SEQ ID NO: 1940408 - RNA, 19 nt, Artificial Sequence
  Description of Artificial Sequence: Synthetic oligonucleotide
  Sense strand starting at position 3239 of SEQ ID NO: 1880053
gcguguccucgguacugga

SEQ ID NO: 1940409 - RNA, 19 nt, Artificial Sequence
  Description of Artificial Sequence: Synthetic oligonucleotide
  Antisense strand to SEQ ID NO: 1940408
uccaguaccgaggacacgc

SEQ ID NO: 1940410 - RNA, 19 nt, Artificial Sequence
  Description of Artificial Sequence: Synthetic oligonucleotide
  Sense strand starting at position 3329 of SEQ ID NO: 1880053
uguccuuccucccggguaa

SEQ ID NO: 1940411 - RNA, 19 nt, Artificial Sequence
  Description of Artificial Sequence: Synthetic oligonucleotide
  Antisense strand to SEQ ID NO: 1940410
uuacccgggaggaaggaca

SEQ ID NO: 1940412 - RNA, 19 nt, Artificial Sequence
  Description of Artificial Sequence: Synthetic oligonucleotide
  Sense strand starting at position 3330 of SEQ ID NO: 1880053
guccuuccucccggguaaa

SEQ ID NO: 1940413 - RNA, 19 nt, Artificial Sequence
  Description of Artificial Sequence: Synthetic oligonucleotide
  Antisense strand to SEQ ID NO: 1940412
uuuacccgggaggaaggac

SEQ ID NO: 1940414 - RNA, 19 nt, Artificial Sequence
  Description of Artificial Sequence: Synthetic oligonucleotide
  Sense strand starting at position 3424 of SEQ ID NO: 1880053
gguuuauaagguugcgacu

SEQ ID NO: 1940415 - RNA, 19 nt, Artificial Sequence
  Description of Artificial Sequence: Synthetic oligonucleotide
  Antisense strand to SEQ ID NO: 1940414
agucgcaaccuuauaaacc

SEQ ID NO: 1940416 - RNA, 19 nt, Artificial Sequence
  Description of Artificial Sequence: Synthetic oligonucleotide
  Sense strand starting at position 3457 of SEQ ID NO: 1880053
aauugaauugccuggugga

SEQ ID NO: 1940417 - RNA, 19 nt, Artificial Sequence
  Description of Artificial Sequence: Synthetic oligonucleotide
  Antisense strand to SEQ ID NO: 1940416
uccaccaggcaauucaauu

SEQ ID NO: 1940418 - RNA, 19 nt, Artificial Sequence
  Description of Artificial Sequence: Synthetic oligonucleotide
  Sense strand starting at position 3458 of SEQ ID NO: 1880053
auugaauugccugguggau

SEQ ID NO: 1940419 - RNA, 19 nt, Artificial Sequence
  Description of Artificial Sequence: Synthetic oligonucleotide
  Antisense strand to SEQ ID NO: 1940418
auccaccaggcaauucaau

SEQ ID NO: 1940420 - RNA, 19 nt, Artificial Sequence
  Description of Artificial Sequence: Synthetic oligonucleotide
  Sense strand starting at position 3514 of SEQ ID NO: 1880053
uggccugcaccuuagugau

SEQ ID NO: 1940421 - RNA, 19 nt, Artificial Sequence
  Description of Artificial Sequence: Synthetic oligonucleotide
  Antisense strand to SEQ ID NO: 1940420
aucacuaaggugcaggcca

SEQ ID NO: 1940422 - RNA, 19 nt, Artificial Sequence
  Description of Artificial Sequence: Synthetic oligonucleotide
  Sense strand starting at position 3538 of SEQ ID NO: 1880053
gcgugguguuucugcugga

SEQ ID NO: 1940423 - RNA, 19 nt, Artificial Sequence
  Description of Artificial Sequence: Synthetic oligonucleotide
  Antisense strand to SEQ ID NO: 1940422
uccagcagaaacaccacgc

SEQ ID NO: 1940424 - RNA, 19 nt, Artificial Sequence
  Description of Artificial Sequence: Synthetic oligonucleotide
  Sense strand starting at position 3582 of SEQ ID NO: 1880053
cauccugaauaguugugau

SEQ ID NO: 1940425 - RNA, 19 nt, Artificial Sequence
  Description of Artificial Sequence: Synthetic oligonucleotide
  Antisense strand to SEQ ID NO: 1940424
aucacaacuauucaggaug

SEQ ID NO: 1940426 - RNA, 19 nt, Artificial Sequence
  Description of Artificial Sequence: Synthetic oligonucleotide
  Sense strand starting at position 3585 of SEQ ID NO: 1880053
ccugaauaguugugauguu

SEQ ID NO: 1940427 - RNA, 19 nt, Artificial Sequence
  Description of Artificial Sequence: Synthetic oligonucleotide
  Antisense strand to SEQ ID NO: 1940426
aacaucacaacuauucagg

SEQ ID NO: 1940428 - RNA, 19 nt, Artificial Sequence
  Description of Artificial Sequence: Synthetic oligonucleotide
  Sense strand starting at position 3658 of SEQ ID NO: 1880053
ugggcuugggcgugugaaa

SEQ ID NO: 1940429 - RNA, 19 nt, Artificial Sequence
  Description of Artificial Sequence: Synthetic oligonucleotide
  Antisense strand to SEQ ID NO: 1940428
uuucacacgcccaagccca

SEQ ID NO: 1940430 - RNA, 19 nt, Artificial Sequence
  Description of Artificial Sequence: Synthetic oligonucleotide
  Sense strand starting at position 3684 of SEQ ID NO: 1880053
gcagauuuacggugcgguu

SEQ ID NO: 1940431 - RNA, 19 nt, Artificial Sequence
  Description of Artificial Sequence: Synthetic oligonucleotide
  Antisense strand to SEQ ID NO: 1940430
aaccgcaccguaaaucugc

SEQ ID NO: 1940432 - RNA, 19 nt, Artificial Sequence
  Description of Artificial Sequence: Synthetic oligonucleotide
  Sense strand starting at position 3778 of SEQ ID NO: 1880053
aguggcguuucaucuaagu

SEQ ID NO: 1940433 - RNA, 19 nt, Artificial Sequence
  Description of Artificial Sequence: Synthetic oligonucleotide
  Antisense strand to SEQ ID NO: 1940432
acuuagaugaaacgccacu

SEQ ID NO: 1940434 - RNA, 19 nt, Artificial Sequence
  Description of Artificial Sequence: Synthetic oligonucleotide
  Sense strand starting at position 2596 of SEQ ID NO: 1880063
guucguucucguuccggaa

SEQ ID NO: 1940435 - RNA, 19 nt, Artificial Sequence
  Description of Artificial Sequence: Synthetic oligonucleotide
  Antisense strand to SEQ ID NO: 1940434
uuccggaacgagaacgaac

SEQ ID NO: 1940436 - RNA, 19 nt, Artificial Sequence
  Description of Artificial Sequence: Synthetic oligonucleotide
  Sense strand starting at position 2897 of SEQ ID NO: 1880063
gcgagaacguuugagccuu

SEQ ID NO: 1940437 - RNA, 19 nt, Artificial Sequence
  Description of Artificial Sequence: Synthetic oligonucleotide
  Antisense strand to SEQ ID NO: 1940436
aaggcucaaacguucucgc

SEQ ID NO: 1940438 - RNA, 19 nt, Artificial Sequence
  Description of Artificial Sequence: Synthetic oligonucleotide
  Sense strand starting at position 2903 of SEQ ID NO: 1880063
acguuugagccuuagagag

SEQ ID NO: 1940439 - RNA, 19 nt, Artificial Sequence
  Description of Artificial Sequence: Synthetic oligonucleotide
  Antisense strand to SEQ ID NO: 1940438
cucucuaaggcucaaacgu

SEQ ID NO: 1940440 - RNA, 19 nt, Artificial Sequence
  Description of Artificial Sequence: Synthetic oligonucleotide
  Sense strand starting at position 2905 of SEQ ID NO: 1880063
guuugagccuuagagagga

SEQ ID NO: 1940441 - RNA, 19 nt, Artificial Sequence
  Description of Artificial Sequence: Synthetic oligonucleotide
  Antisense strand to SEQ ID NO: 1940440
uccucucuaaggcucaaac

SEQ ID NO: 1940442 - RNA, 19 nt, Artificial Sequence
  Description of Artificial Sequence: Synthetic oligonucleotide
  Sense strand starting at position 2978 of SEQ ID NO: 1880063
ggguuugagcugugccuga

SEQ ID NO: 1940443 - RNA, 19 nt, Artificial Sequence
  Description of Artificial Sequence: Synthetic oligonucleotide
  Antisense strand to SEQ ID NO: 1940442
ucaggcacagcucaaaccc

SEQ ID NO: 1940444 - RNA, 19 nt, Artificial Sequence
  Description of Artificial Sequence: Synthetic oligonucleotide
  Sense strand starting at position 3239 of SEQ ID NO: 1880063
gcguguccucgguacugga

SEQ ID NO: 1940445 - RNA, 19 nt, Artificial Sequence
  Description of Artificial Sequence: Synthetic oligonucleotide
  Antisense strand to SEQ ID NO: 1940444
uccaguaccgaggacacgc

SEQ ID NO: 1940446 - RNA, 19 nt, Artificial Sequence
  Description of Artificial Sequence: Synthetic oligonucleotide
  Sense strand starting at position 3329 of SEQ ID NO: 1880063
uguccuuccucccggguaa

SEQ ID NO: 1940447 - RNA, 19 nt, Artificial Sequence
  Description of Artificial Sequence: Synthetic oligonucleotide
  Antisense strand to SEQ ID NO: 1940446
uuacccgggaggaaggaca

SEQ ID NO: 1940448 - RNA, 19 nt, Artificial Sequence
  Description of Artificial Sequence: Synthetic oligonucleotide
  Sense strand starting at position 3330 of SEQ ID NO: 1880063
guccuuccucccggguaaa

SEQ ID NO: 1940449 - RNA, 19 nt, Artificial Sequence
  Description of Artificial Sequence: Synthetic oligonucleotide
  Antisense strand to SEQ ID NO: 1940448
uuuacccgggaggaaggac

SEQ ID NO: 1940450 - RNA, 19 nt, Artificial Sequence
  Description of Artificial Sequence: Synthetic oligonucleotide
  Sense strand starting at position 3424 of SEQ ID NO: 1880063
gguuuauaagguugcgacu

SEQ ID NO: 1940451 - RNA, 19 nt, Artificial Sequence
  Description of Artificial Sequence: Synthetic oligonucleotide
  Antisense strand to SEQ ID NO: 1940450
agucgcaaccuuauaaacc

SEQ ID NO: 1940452 - RNA, 19 nt, Artificial Sequence
  Description of Artificial Sequence: Synthetic oligonucleotide
  Sense strand starting at position 3457 of SEQ ID NO: 1880063
aauugaauugccuggugga

SEQ ID NO: 1940453 - RNA, 19 nt, Artificial Sequence
  Description of Artificial Sequence: Synthetic oligonucleotide
  Antisense strand to SEQ ID NO: 1940452
uccaccaggcaauucaauu

SEQ ID NO: 1940454 - RNA, 19 nt, Artificial Sequence
  Description of Artificial Sequence: Synthetic oligonucleotide
  Sense strand starting at position 3458 of SEQ ID NO: 1880063
auugaauugccugguggau

SEQ ID NO: 1940455 - RNA, 19 nt, Artificial Sequence
  Description of Artificial Sequence: Synthetic oligonucleotide
  Antisense strand to SEQ ID NO: 1940454
auccaccaggcaauucaau

SEQ ID NO: 1940456 - RNA, 19 nt, Artificial Sequence
  Description of Artificial Sequence: Synthetic oligonucleotide
  Sense strand starting at position 3514 of SEQ ID NO: 1880063
uggccugcaccuuagugau

SEQ ID NO: 1940457 - RNA, 19 nt, Artificial Sequence
  Description of Artificial Sequence: Synthetic oligonucleotide
  Antisense strand to SEQ ID NO: 1940456
aucacuaaggugcaggcca

SEQ ID NO: 1940458 - RNA, 19 nt, Artificial Sequence
  Description of Artificial Sequence: Synthetic oligonucleotide
  Sense strand starting at position 3538 of SEQ ID NO: 1880063
gcgugguguuucugcugga

SEQ ID NO: 1940459 - RNA, 19 nt, Artificial Sequence
  Description of Artificial Sequence: Synthetic oligonucleotide
  Antisense strand to SEQ ID NO: 1940458
uccagcagaaacaccacgc

SEQ ID NO: 1940460 - RNA, 19 nt, Artificial Sequence
  Description of Artificial Sequence: Synthetic oligonucleotide
  Sense strand starting at position 3582 of SEQ ID NO: 1880063
cauccugaauaguugugau

SEQ ID NO: 1940461 - RNA, 19 nt, Artificial Sequence
  Description of Artificial Sequence: Synthetic oligonucleotide
  Antisense strand to SEQ ID NO: 1940460
aucacaacuauucaggaug

SEQ ID NO: 1940462 - RNA, 19 nt, Artificial Sequence
  Description of Artificial Sequence: Synthetic oligonucleotide
  Sense strand starting at position 3585 of SEQ ID NO: 1880063
ccugaauaguugugauguu

SEQ ID NO: 1940463 - RNA, 19 nt, Artificial Sequence
  Description of Artificial Sequence: Synthetic oligonucleotide
  Antisense strand to SEQ ID NO: 1940462
aacaucacaacuauucagg

SEQ ID NO: 1940464 - RNA, 19 nt, Artificial Sequence
  Description of Artificial Sequence: Synthetic oligonucleotide
  Sense strand starting at position 3658 of SEQ ID NO: 1880063
ugggcuugggcgugugaaa

SEQ ID NO: 1940465 - RNA, 19 nt, Artificial Sequence
  Description of Artificial Sequence: Synthetic oligonucleotide
  Antisense strand to SEQ ID NO: 1940464
uuucacacgcccaagccca

SEQ ID NO: 1940466 - RNA, 19 nt, Artificial Sequence
  Description of Artificial Sequence: Synthetic oligonucleotide
  Sense strand starting at position 3684 of SEQ ID NO: 1880063
gcagauuuacggugcgguu

SEQ ID NO: 1940467 - RNA, 19 nt, Artificial Sequence
  Description of Artificial Sequence: Synthetic oligonucleotide
  Antisense strand to SEQ ID NO: 1940466
aaccgcaccguaaaucugc

SEQ ID NO: 1940468 - RNA, 19 nt, Artificial Sequence
  Description of Artificial Sequence: Synthetic oligonucleotide
  Sense strand starting at position 3778 of SEQ ID NO: 1880063
aguggcguuucaucuaagu

SEQ ID NO: 1940469 - RNA, 19 nt, Artificial Sequence
  Description of Artificial Sequence: Synthetic oligonucleotide
  Antisense strand to SEQ ID NO: 1940468
acuuagaugaaacgccacu

SEQ ID NO: 1940470 - RNA, 19 nt, Artificial Sequence
  Description of Artificial Sequence: Synthetic oligonucleotide
  Sense strand starting at position 1907 of SEQ ID NO: 1880064
gcggucucccguccaagua

SEQ ID NO: 1940471 - RNA, 19 nt, Artificial Sequence
  Description of Artificial Sequence: Synthetic oligonucleotide
  Antisense strand to SEQ ID NO: 1940470
uacuuggacgggagaccgc

SEQ ID NO: 1940472 - RNA, 19 nt, Artificial Sequence
  Description of Artificial Sequence: Synthetic oligonucleotide
  Sense strand starting at position 6 of SEQ ID NO: 1880065
aguuaugaguuccuuaugu

SEQ ID NO: 1940473 - RNA, 19 nt, Artificial Sequence
  Description of Artificial Sequence: Synthetic oligonucleotide
  Antisense strand to SEQ ID NO: 1940472
acauaaggaacucauaacu

SEQ ID NO: 1940474 - RNA, 19 nt, Artificial Sequence
  Description of Artificial Sequence: Synthetic oligonucleotide
  Sense strand starting at position 8 of SEQ ID NO: 1880065
uuaugaguuccuuauguau

SEQ ID NO: 1940475 - RNA, 19 nt, Artificial Sequence
  Description of Artificial Sequence: Synthetic oligonucleotide
  Antisense strand to SEQ ID NO: 1940474
auacauaaggaacucauaa

SEQ ID NO: 1940476 - RNA, 19 nt, Artificial Sequence
  Description of Artificial Sequence: Synthetic oligonucleotide
  Sense strand starting at position 81 of SEQ ID NO: 1880065
uguggauugucuuuccacu

SEQ ID NO: 1940477 - RNA, 19 nt, Artificial Sequence
  Description of Artificial Sequence: Synthetic oligonucleotide
  Antisense strand to SEQ ID NO: 1940476
aguggaaagacaauccaca

SEQ ID NO: 1940478 - RNA, 19 nt, Artificial Sequence
  Description of Artificial Sequence: Synthetic oligonucleotide
  Sense strand starting at position 90 of SEQ ID NO: 1880065
ucuuuccacucuguugaua

SEQ ID NO: 1940479 - RNA, 19 nt, Artificial Sequence
  Description of Artificial Sequence: Synthetic oligonucleotide
  Antisense strand to SEQ ID NO: 1940478
uaucaacagaguggaaaga

SEQ ID NO: 1940480 - RNA, 19 nt, Artificial Sequence
  Description of Artificial Sequence: Synthetic oligonucleotide
  Sense strand starting at position 833 of SEQ ID NO: 1880065
ugacaaauucgaugucauu

SEQ ID NO: 1940481 - RNA, 19 nt, Artificial Sequence
  Description of Artificial Sequence: Synthetic oligonucleotide
  Antisense strand to SEQ ID NO: 1940480
aaugacaucgaauuuguca

SEQ ID NO: 1940482 - RNA, 19 nt, Artificial Sequence
  Description of Artificial Sequence: Synthetic oligonucleotide
  Sense strand starting at position 1256 of SEQ ID NO: 1880065
uuugcuaaggccuggugaa

SEQ ID NO: 1940483 - RNA, 19 nt, Artificial Sequence
  Description of Artificial Sequence: Synthetic oligonucleotide
  Antisense strand to SEQ ID NO: 1940482
uucaccaggccuuagcaaa

SEQ ID NO: 1940484 - RNA, 19 nt, Artificial Sequence
  Description of Artificial Sequence: Synthetic oligonucleotide
  Sense strand starting at position 1535 of SEQ ID NO: 1880065
gcugcuauacuguaacaca

SEQ ID NO: 1940485 - RNA, 19 nt, Artificial Sequence
  Description of Artificial Sequence: Synthetic oligonucleotide
  Antisense strand to SEQ ID NO: 1940484
uguguuacaguauagcagc

SEQ ID NO: 1940486 - RNA, 19 nt, Artificial Sequence
  Description of Artificial Sequence: Synthetic oligonucleotide
  Sense strand starting at position 1546 of SEQ ID NO: 1880065
guaacacaguugccaaaua

SEQ ID NO: 1940487 - RNA, 19 nt, Artificial Sequence
  Description of Artificial Sequence: Synthetic oligonucleotide
  Antisense strand to SEQ ID NO: 1940486
uauuuggcaacuguguuac

SEQ ID NO: 1940488 - RNA, 19 nt, Artificial Sequence
  Description of Artificial Sequence: Synthetic oligonucleotide
  Sense strand starting at position 1659 of SEQ ID NO: 1880065
cgagaacacgcaggguuau

SEQ ID NO: 1940489 - RNA, 19 nt, Artificial Sequence
  Description of Artificial Sequence: Synthetic oligonucleotide
  Antisense strand to SEQ ID NO: 1940488
auaacccugcguguucucg

SEQ ID NO: 1940490 - RNA, 19 nt, Artificial Sequence
  Description of Artificial Sequence: Synthetic oligonucleotide
  Sense strand starting at position 1690 of SEQ ID NO: 1880065
ucuuaagugcuaggauaca

SEQ ID NO: 1940491 - RNA, 19 nt, Artificial Sequence
  Description of Artificial Sequence: Synthetic oligonucleotide
  Antisense strand to SEQ ID NO: 1940490
uguauccuagcacuuaaga

SEQ ID NO: 1940492 - RNA, 19 nt, Artificial Sequence
  Description of Artificial Sequence: Synthetic oligonucleotide
  Sense strand starting at position 1702 of SEQ ID NO: 1880065
ggauacaggucugaauuac

SEQ ID NO: 1940493 - RNA, 19 nt, Artificial Sequence
  Description of Artificial Sequence: Synthetic oligonucleotide
  Antisense strand to SEQ ID NO: 1940492
guaauucagaccuguaucc

SEQ ID NO: 1940494 - RNA, 19 nt, Artificial Sequence
  Description of Artificial Sequence: Synthetic oligonucleotide
  Sense strand starting at position 1825 of SEQ ID NO: 1880065
acuccaaacgcguaauauu

SEQ ID NO: 1940495 - RNA, 19 nt, Artificial Sequence
  Description of Artificial Sequence: Synthetic oligonucleotide
  Antisense strand to SEQ ID NO: 1940494
aauauuacgcguuuggagu

SEQ ID NO: 1940496 - RNA, 19 nt, Artificial Sequence
  Description of Artificial Sequence: Synthetic oligonucleotide
  Sense strand starting at position 1834 of SEQ ID NO: 1880065
gcguaauauuucgccuaac

SEQ ID NO: 1940497 - RNA, 19 nt, Artificial Sequence
  Description of Artificial Sequence: Synthetic oligonucleotide
  Antisense strand to SEQ ID NO: 1940496
guuaggcgaaauauuacgc

SEQ ID NO: 1940498 - RNA, 19 nt, Artificial Sequence
  Description of Artificial Sequence: Synthetic oligonucleotide
  Sense strand starting at position 1835 of SEQ ID NO: 1880065
cguaauauuucgccuaaca

SEQ ID NO: 1940499 - RNA, 19 nt, Artificial Sequence
  Description of Artificial Sequence: Synthetic oligonucleotide
  Antisense strand to SEQ ID NO: 1940498
uguuaggcgaaauauuacg

SEQ ID NO: 1940500 - RNA, 19 nt, Artificial Sequence
  Description of Artificial Sequence: Synthetic oligonucleotide
  Sense strand starting at position 2025 of SEQ ID NO: 1880065
guggcaguguuaccaaauc

SEQ ID NO: 1940501 - RNA, 19 nt, Artificial Sequence
  Description of Artificial Sequence: Synthetic oligonucleotide
  Antisense strand to SEQ ID NO: 1940500
gauuugguaacacugccac

SEQ ID NO: 1940502 - RNA, 19 nt, Artificial Sequence
  Description of Artificial Sequence: Synthetic oligonucleotide
  Sense strand starting at position 2148 of SEQ ID NO: 1880065
caaggagaaucuggaauuu

SEQ ID NO: 1940503 - RNA, 19 nt, Artificial Sequence
  Description of Artificial Sequence: Synthetic oligonucleotide
  Antisense strand to SEQ ID NO: 1940502
aaauuccagauucuccuug

SEQ ID NO: 1940504 - RNA, 19 nt, Artificial Sequence
  Description of Artificial Sequence: Synthetic oligonucleotide
  Sense strand starting at position 2197 of SEQ ID NO: 1880065
aauguagugaguugauaug

SEQ ID NO: 1940505 - RNA, 19 nt, Artificial Sequence
  Description of Artificial Sequence: Synthetic oligonucleotide
  Antisense strand to SEQ ID NO: 1940504
cauaucaacucacuacauu

SEQ ID NO: 1940506 - RNA, 19 nt, Artificial Sequence
  Description of Artificial Sequence: Synthetic oligonucleotide
  Sense strand starting at position 2203 of SEQ ID NO: 1880065
gugaguugauaugcaaaua

SEQ ID NO: 1940507 - RNA, 19 nt, Artificial Sequence
  Description of Artificial Sequence: Synthetic oligonucleotide
  Antisense strand to SEQ ID NO: 1940506
uauuugcauaucaacucac

SEQ ID NO: 1940508 - RNA, 19 nt, Artificial Sequence
  Description of Artificial Sequence: Synthetic oligonucleotide
  Sense strand starting at position 2328 of SEQ ID NO: 1880065
gggucuuucuugucaacug

SEQ ID NO: 1940509 - RNA, 19 nt, Artificial Sequence
  Description of Artificial Sequence: Synthetic oligonucleotide
  Antisense strand to SEQ ID NO: 1940508
caguugacaagaaagaccc

SEQ ID NO: 1940510 - RNA, 19 nt, Artificial Sequence
  Description of Artificial Sequence: Synthetic oligonucleotide
  Sense strand starting at position 2340 of SEQ ID NO: 1880065
ucaacugcucacgacagaa

SEQ ID NO: 1940511 - RNA, 19 nt, Artificial Sequence
  Description of Artificial Sequence: Synthetic oligonucleotide
  Antisense strand to SEQ ID NO: 1940510
uucugucgugagcaguuga

SEQ ID NO: 1940512 - RNA, 19 nt, Artificial Sequence
  Description of Artificial Sequence: Synthetic oligonucleotide
  Sense strand starting at position 2360 of SEQ ID NO: 1880065
gcgucucauggcguuggaa

SEQ ID NO: 1940513 - RNA, 19 nt, Artificial Sequence
  Description of Artificial Sequence: Synthetic oligonucleotide
  Antisense strand to SEQ ID NO: 1940512
uuccaacgccaugagacgc

SEQ ID NO: 1940514 - RNA, 19 nt, Artificial Sequence
  Description of Artificial Sequence: Synthetic oligonucleotide
  Sense strand starting at position 2362 of SEQ ID NO: 1880065
gucucauggcguuggaaua

SEQ ID NO: 1940515 - RNA, 19 nt, Artificial Sequence
  Description of Artificial Sequence: Synthetic oligonucleotide
  Antisense strand to SEQ ID NO: 1940514
uauuccaacgccaugagac

SEQ ID NO: 1940516 - RNA, 19 nt, Artificial Sequence
  Description of Artificial Sequence: Synthetic oligonucleotide
  Sense strand starting at position 2530 of SEQ ID NO: 1880065
gcauaagcugauugucaug

SEQ ID NO: 1940517 - RNA, 19 nt, Artificial Sequence
  Description of Artificial Sequence: Synthetic oligonucleotide
  Antisense strand to SEQ ID NO: 1940516
caugacaaucagcuuaugc

SEQ ID NO: 1940518 - RNA, 19 nt, Artificial Sequence
  Description of Artificial Sequence: Synthetic oligonucleotide
  Sense strand starting at position 2541 of SEQ ID NO: 1880065
uugucaugguguguucaua

SEQ ID NO: 1940519 - RNA, 19 nt, Artificial Sequence
  Description of Artificial Sequence: Synthetic oligonucleotide
  Antisense strand to SEQ ID NO: 1940518
uaugaacacaccaugacaa

SEQ ID NO: 1940520 - RNA, 19 nt, Artificial Sequence
  Description of Artificial Sequence: Synthetic oligonucleotide
  Sense strand starting at position 2556 of SEQ ID NO: 1880065
cauauuguggcaugcuaua

SEQ ID NO: 1940521 - RNA, 19 nt, Artificial Sequence
  Description of Artificial Sequence: Synthetic oligonucleotide
  Antisense strand to SEQ ID NO: 1940520
uauagcaugccacaauaug

SEQ ID NO: 1940522 - RNA, 19 nt, Artificial Sequence
  Description of Artificial Sequence: Synthetic oligonucleotide
  Sense strand starting at position 2577 of SEQ ID NO: 1880065
cugcacuucgaaggaguau

SEQ ID NO: 1940523 - RNA, 19 nt, Artificial Sequence
  Description of Artificial Sequence: Synthetic oligonucleotide
  Antisense strand to SEQ ID NO: 1940522
auacuccuucgaagugcag

SEQ ID NO: 1940524 - RNA, 19 nt, Artificial Sequence
  Description of Artificial Sequence: Synthetic oligonucleotide
  Sense strand starting at position 2578 of SEQ ID NO: 1880065
ugcacuucgaaggaguauu

SEQ ID NO: 1940525 - RNA, 19 nt, Artificial Sequence
  Description of Artificial Sequence: Synthetic oligonucleotide
  Antisense strand to SEQ ID NO: 1940524
aauacuccuucgaagugca

SEQ ID NO: 1940526 - RNA, 19 nt, Artificial Sequence
  Description of Artificial Sequence: Synthetic oligonucleotide
  Sense strand starting at position 2679 of SEQ ID NO: 1880065
accucagaugacugaagua

SEQ ID NO: 1940527 - RNA, 19 nt, Artificial Sequence
  Description of Artificial Sequence: Synthetic oligonucleotide
  Antisense strand to SEQ ID NO: 1940526
uacuucagucaucugaggu

SEQ ID NO: 1940528 - RNA, 19 nt, Artificial Sequence
  Description of Artificial Sequence: Synthetic oligonucleotide
  Sense strand starting at position 2691 of SEQ ID NO: 1880065
ugaaguagaucuuuaucaa

SEQ ID NO: 1940529 - RNA, 19 nt, Artificial Sequence
  Description of Artificial Sequence: Synthetic oligonucleotide
  Antisense strand to SEQ ID NO: 1940528
uugauaaagaucuacuuca

SEQ ID NO: 1940530 - RNA, 19 nt, Artificial Sequence
  Description of Artificial Sequence: Synthetic oligonucleotide
  Sense strand starting at position 3281 of SEQ ID NO: 1880065
ugaagaucuugucucaaga

SEQ ID NO: 1940531 - RNA, 19 nt, Artificial Sequence
  Description of Artificial Sequence: Synthetic oligonucleotide
  Antisense strand to SEQ ID NO: 1940530
ucuugagacaagaucuuca

SEQ ID NO: 1940532 - RNA, 19 nt, Artificial Sequence
  Description of Artificial Sequence: Synthetic oligonucleotide
  Sense strand starting at position 3318 of SEQ ID NO: 1880065
augugacaauuguaaagaa

SEQ ID NO: 1940533 - RNA, 19 nt, Artificial Sequence
  Description of Artificial Sequence: Synthetic oligonucleotide
  Antisense strand to SEQ ID NO: 1940532
uucuuuacaauugucacau

SEQ ID NO: 1940534 - RNA, 19 nt, Artificial Sequence
  Description of Artificial Sequence: Synthetic oligonucleotide
  Sense strand starting at position 3381 of SEQ ID NO: 1880065
ccaaacugugaacaguuua

SEQ ID NO: 1940535 - RNA, 19 nt, Artificial Sequence
  Description of Artificial Sequence: Synthetic oligonucleotide
  Antisense strand to SEQ ID NO: 1940534
uaaacuguucacaguuugg

SEQ ID NO: 1940536 - RNA, 19 nt, Artificial Sequence
  Description of Artificial Sequence: Synthetic oligonucleotide
  Sense strand starting at position 3386 of SEQ ID NO: 1880065
cugugaacaguuuaguguu

SEQ ID NO: 1940537 - RNA, 19 nt, Artificial Sequence
  Description of Artificial Sequence: Synthetic oligonucleotide
  Antisense strand to SEQ ID NO: 1940536
aacacuaaacuguucacag

SEQ ID NO: 1940538 - RNA, 19 nt, Artificial Sequence
  Description of Artificial Sequence: Synthetic oligonucleotide
  Sense strand starting at position 3388 of SEQ ID NO: 1880065
gugaacaguuuaguguuua

SEQ ID NO: 1940539 - RNA, 19 nt, Artificial Sequence
  Description of Artificial Sequence: Synthetic oligonucleotide
  Antisense strand to SEQ ID NO: 1940538
uaaacacuaaacuguucac

SEQ ID NO: 1940540 - RNA, 19 nt, Artificial Sequence
  Description of Artificial Sequence: Synthetic oligonucleotide
  Sense strand starting at position 3392 of SEQ ID NO: 1880065
acaguuuaguguuuaucuu

SEQ ID NO: 1940541 - RNA, 19 nt, Artificial Sequence
  Description of Artificial Sequence: Synthetic oligonucleotide
  Antisense strand to SEQ ID NO: 1940540
aagauaaacacuaaacugu

SEQ ID NO: 1940542 - RNA, 19 nt, Artificial Sequence
  Description of Artificial Sequence: Synthetic oligonucleotide
  Sense strand starting at position 3396 of SEQ ID NO: 1880065
uuuaguguuuaucuugcca

SEQ ID NO: 1940543 - RNA, 19 nt, Artificial Sequence
  Description of Artificial Sequence: Synthetic oligonucleotide
  Antisense strand to SEQ ID NO: 1940542
uggcaagauaaacacuaaa

SEQ ID NO: 1940544 - RNA, 19 nt, Artificial Sequence
  Description of Artificial Sequence: Synthetic oligonucleotide
  Sense strand starting at position 3412 of SEQ ID NO: 1880065
ccagacugcuuucuaugua

SEQ ID NO: 1940545 - RNA, 19 nt, Artificial Sequence
  Description of Artificial Sequence: Synthetic oligonucleotide
  Antisense strand to SEQ ID NO: 1940544
uacauagaaagcagucugg

SEQ ID NO: 1940546 - RNA, 19 nt, Artificial Sequence
  Description of Artificial Sequence: Synthetic oligonucleotide
  Sense strand starting at position 3415 of SEQ ID NO: 1880065
gacugcuuucuauguaugu

SEQ ID NO: 1940547 - RNA, 19 nt, Artificial Sequence
  Description of Artificial Sequence: Synthetic oligonucleotide
  Antisense strand to SEQ ID NO: 1940546
acauacauagaaagcaguc

SEQ ID NO: 1940548 - RNA, 19 nt, Artificial Sequence
  Description of Artificial Sequence: Synthetic oligonucleotide
  Sense strand starting at position 3416 of SEQ ID NO: 1880065
acugcuuucuauguaugua

SEQ ID NO: 1940549 - RNA, 19 nt, Artificial Sequence
  Description of Artificial Sequence: Synthetic oligonucleotide
  Antisense strand to SEQ ID NO: 1940548
uacauacauagaaagcagu

SEQ ID NO: 1940550 - RNA, 19 nt, Artificial Sequence
  Description of Artificial Sequence: Synthetic oligonucleotide
  Sense strand starting at position 3428 of SEQ ID NO: 1880065
guauguacacaucguauau

SEQ ID NO: 1940551 - RNA, 19 nt, Artificial Sequence
  Description of Artificial Sequence: Synthetic oligonucleotide
  Antisense strand to SEQ ID NO: 1940550
auauacgauguguacauac

SEQ ID NO: 1940552 - RNA, 19 nt, Artificial Sequence
  Description of Artificial Sequence: Synthetic oligonucleotide
  Sense strand starting at position 48 of SEQ ID NO: 1880066
gccuguuggauacaggauu

SEQ ID NO: 1940553 - RNA, 19 nt, Artificial Sequence
  Description of Artificial Sequence: Synthetic oligonucleotide
  Antisense strand to SEQ ID NO: 1940552
aauccuguauccaacaggc

SEQ ID NO: 1940554 - RNA, 19 nt, Artificial Sequence
  Description of Artificial Sequence: Synthetic oligonucleotide
  Sense strand starting at position 3224 of SEQ ID NO: 1880066
uggugcuggauuugaugua

SEQ ID NO: 1940555 - RNA, 19 nt, Artificial Sequence
  Description of Artificial Sequence: Synthetic oligonucleotide
  Antisense strand to SEQ ID NO: 1940554
uacaucaaauccagcacca

SEQ ID NO: 1940556 - RNA, 19 nt, Artificial Sequence
  Description of Artificial Sequence: Synthetic oligonucleotide
  Sense strand starting at position 3248 of SEQ ID NO: 1880066
uaccgaggcccucauuaua

SEQ ID NO: 1940557 - RNA, 19 nt, Artificial Sequence
  Description of Artificial Sequence: Synthetic oligonucleotide
  Antisense strand to SEQ ID NO: 1940556
uauaaugagggccucggua

SEQ ID NO: 1940558 - RNA, 19 nt, Artificial Sequence
  Description of Artificial Sequence: Synthetic oligonucleotide
  Sense strand starting at position 3393 of SEQ ID NO: 1880066
cuauuccacuccuugguua

SEQ ID NO: 1940559 - RNA, 19 nt, Artificial Sequence
  Description of Artificial Sequence: Synthetic oligonucleotide
  Antisense strand to SEQ ID NO: 1940558
uaaccaaggaguggaauag

SEQ ID NO: 1940560 - RNA, 19 nt, Artificial Sequence
  Description of Artificial Sequence: Synthetic oligonucleotide
  Sense strand starting at position 3395 of SEQ ID NO: 1880066
auuccacuccuugguuaga

SEQ ID NO: 1940561 - RNA, 19 nt, Artificial Sequence
  Description of Artificial Sequence: Synthetic oligonucleotide
  Antisense strand to SEQ ID NO: 1940560
ucuaaccaaggaguggaau

SEQ ID NO: 1940562 - RNA, 19 nt, Artificial Sequence
  Description of Artificial Sequence: Synthetic oligonucleotide
  Sense strand starting at position 3397 of SEQ ID NO: 1880066
uccacuccuugguuagaga

SEQ ID NO: 1940563 - RNA, 19 nt, Artificial Sequence
  Description of Artificial Sequence: Synthetic oligonucleotide
  Antisense strand to SEQ ID NO: 1940562
ucucuaaccaaggagugga

SEQ ID NO: 1940564 - RNA, 19 nt, Artificial Sequence
  Description of Artificial Sequence: Synthetic oligonucleotide
  Sense strand starting at position 3444 of SEQ ID NO: 1880066
auuguucucugucggguau

SEQ ID NO: 1940565 - RNA, 19 nt, Artificial Sequence
  Description of Artificial Sequence: Synthetic oligonucleotide
  Antisense strand to SEQ ID NO: 1940564
auacccgacagagaacaau

SEQ ID NO: 1940566 - RNA, 19 nt, Artificial Sequence
  Description of Artificial Sequence: Synthetic oligonucleotide
  Sense strand starting at position 3540 of SEQ ID NO: 1880066
uugacuuuguucuugagau

SEQ ID NO: 1940567 - RNA, 19 nt, Artificial Sequence
  Description of Artificial Sequence: Synthetic oligonucleotide
  Antisense strand to SEQ ID NO: 1940566
aucucaagaacaaagucaa

SEQ ID NO: 1940568 - RNA, 19 nt, Artificial Sequence
  Description of Artificial Sequence: Synthetic oligonucleotide
  Sense strand starting at position 3541 of SEQ ID NO: 1880066
ugacuuuguucuugagaug

SEQ ID NO: 1940569 - RNA, 19 nt, Artificial Sequence
  Description of Artificial Sequence: Synthetic oligonucleotide
  Antisense strand to SEQ ID NO: 1940568
caucucaagaacaaaguca

SEQ ID NO: 1940570 - RNA, 19 nt, Artificial Sequence
  Description of Artificial Sequence: Synthetic oligonucleotide
  Sense strand starting at position 3676 of SEQ ID NO: 1880066
gagaguucuccuuggagac

SEQ ID NO: 1940571 - RNA, 19 nt, Artificial Sequence
  Description of Artificial Sequence: Synthetic oligonucleotide
  Antisense strand to SEQ ID NO: 1940570
gucuccaaggagaacucuc

SEQ ID NO: 1940572 - RNA, 19 nt, Artificial Sequence
  Description of Artificial Sequence: Synthetic oligonucleotide
  Sense strand starting at position 3678 of SEQ ID NO: 1880066
gaguucuccuuggagacca

SEQ ID NO: 1940573 - RNA, 19 nt, Artificial Sequence
  Description of Artificial Sequence: Synthetic oligonucleotide
  Antisense strand to SEQ ID NO: 1940572
uggucuccaaggagaacuc

SEQ ID NO: 1940574 - RNA, 19 nt, Artificial Sequence
  Description of Artificial Sequence: Synthetic oligonucleotide
  Sense strand starting at position 3766 of SEQ ID NO: 1880066
gagauuaggugacagugua

SEQ ID NO: 1940575 - RNA, 19 nt, Artificial Sequence
  Description of Artificial Sequence: Synthetic oligonucleotide
  Antisense strand to SEQ ID NO: 1940574
uacacugucaccuaaucuc

SEQ ID NO: 1940576 - RNA, 19 nt, Artificial Sequence
  Description of Artificial Sequence: Synthetic oligonucleotide
  Sense strand starting at position 3774 of SEQ ID NO: 1880066
gugacaguguaguaauaac

SEQ ID NO: 1940577 - RNA, 19 nt, Artificial Sequence
  Description of Artificial Sequence: Synthetic oligonucleotide
  Antisense strand to SEQ ID NO: 1940576
guuauuacuacacugucac

SEQ ID NO: 1940578 - RNA, 19 nt, Artificial Sequence
  Description of Artificial Sequence: Synthetic oligonucleotide
  Sense strand starting at position 3784 of SEQ ID NO: 1880066
aguaauaacugcugaauac

SEQ ID NO: 1940579 - RNA, 19 nt, Artificial Sequence
  Description of Artificial Sequence: Synthetic oligonucleotide
  Antisense strand to SEQ ID NO: 1940578
guauucagcaguuauuacu

SEQ ID NO: 1940580 - RNA, 19 nt, Artificial Sequence
  Description of Artificial Sequence: Synthetic oligonucleotide
  Sense strand starting at position 3785 of SEQ ID NO: 1880066
guaauaacugcugaauacu

SEQ ID NO: 1940581 - RNA, 19 nt, Artificial Sequence
  Description of Artificial Sequence: Synthetic oligonucleotide
  Antisense strand to SEQ ID NO: 1940580
aguauucagcaguuauuac

SEQ ID NO: 1940582 - RNA, 19 nt, Artificial Sequence
  Description of Artificial Sequence: Synthetic oligonucleotide
  Sense strand starting at position 382 of SEQ ID NO: 1880067
accucaguugaucagaagu

SEQ ID NO: 1940583 - RNA, 19 nt, Artificial Sequence
  Description of Artificial Sequence: Synthetic oligonucleotide
  Antisense strand to SEQ ID NO: 1940582
acuucugaucaacugaggu

SEQ ID NO: 1940584 - RNA, 19 nt, Artificial Sequence
  Description of Artificial Sequence: Synthetic oligonucleotide
  Sense strand starting at position 877 of SEQ ID NO: 1880067
uaaggaauuugccagggua

SEQ ID NO: 1940585 - RNA, 19 nt, Artificial Sequence
  Description of Artificial Sequence: Synthetic oligonucleotide
  Antisense strand to SEQ ID NO: 1940584
uacccuggcaaauuccuua

SEQ ID NO: 1940586 - RNA, 19 nt, Artificial Sequence
  Description of Artificial Sequence: Synthetic oligonucleotide
  Sense strand starting at position 995 of SEQ ID NO: 1880067
ggacacuggcgccagaaau

SEQ ID NO: 1940587 - RNA, 19 nt, Artificial Sequence
  Description of Artificial Sequence: Synthetic oligonucleotide
  Antisense strand to SEQ ID NO: 1940586
auuucuggcgccagugucc

SEQ ID NO: 1940588 - RNA, 19 nt, Artificial Sequence
  Description of Artificial Sequence: Synthetic oligonucleotide
  Sense strand starting at position 1050 of SEQ ID NO: 1880067
gggugcuaucuagaaagcu

SEQ ID NO: 1940589 - RNA, 19 nt, Artificial Sequence
  Description of Artificial Sequence: Synthetic oligonucleotide
  Antisense strand to SEQ ID NO: 1940588
agcuuucuagauagcaccc

SEQ ID NO: 1940590 - RNA, 19 nt, Artificial Sequence
  Description of Artificial Sequence: Synthetic oligonucleotide
  Sense strand starting at position 1060 of SEQ ID NO: 1880067
uagaaagcugccuggcaau

SEQ ID NO: 1940591 - RNA, 19 nt, Artificial Sequence
  Description of Artificial Sequence: Synthetic oligonucleotide
  Antisense strand to SEQ ID NO: 1940590
auugccaggcagcuuucua

SEQ ID NO: 1940592 - RNA, 19 nt, Artificial Sequence
  Description of Artificial Sequence: Synthetic oligonucleotide
  Sense strand starting at position 1090 of SEQ ID NO: 1880067
gcggaagcgagacaucaaa

SEQ ID NO: 1940593 - RNA, 19 nt, Artificial Sequence
  Description of Artificial Sequence: Synthetic oligonucleotide
  Antisense strand to SEQ ID NO: 1940592
uuugaugucucgcuuccgc

SEQ ID NO: 1940594 - RNA, 19 nt, Artificial Sequence
  Description of Artificial Sequence: Synthetic oligonucleotide
  Sense strand starting at position 1181 of SEQ ID NO: 1880067
ggacccgucuccucauaaa

SEQ ID NO: 1940595 - RNA, 19 nt, Artificial Sequence
  Description of Artificial Sequence: Synthetic oligonucleotide
  Antisense strand to SEQ ID NO: 1940594
uuuaugaggagacgggucc

SEQ ID NO: 1940596 - RNA, 19 nt, Artificial Sequence
  Description of Artificial Sequence: Synthetic oligonucleotide
  Sense strand starting at position 1221 of SEQ ID NO: 1880067
ggaggaucgcagcgcauuu

SEQ ID NO: 1940597 - RNA, 19 nt, Artificial Sequence
  Description of Artificial Sequence: Synthetic oligonucleotide
  Antisense strand to SEQ ID NO: 1940596
aaaugcgcugcgauccucc

SEQ ID NO: 1940598 - RNA, 19 nt, Artificial Sequence
  Description of Artificial Sequence: Synthetic oligonucleotide
  Sense strand starting at position 1232 of SEQ ID NO: 1880067
gcgcauuucggccaagaca

SEQ ID NO: 1940599 - RNA, 19 nt, Artificial Sequence
  Description of Artificial Sequence: Synthetic oligonucleotide
  Antisense strand to SEQ ID NO: 1940598
ugucuuggccgaaaugcgc

SEQ ID NO: 1940600 - RNA, 19 nt, Artificial Sequence
  Description of Artificial Sequence: Synthetic oligonucleotide
  Sense strand starting at position 1282 of SEQ ID NO: 1880067
gaugaauugcguuaggaca

SEQ ID NO: 1940601 - RNA, 19 nt, Artificial Sequence
  Description of Artificial Sequence: Synthetic oligonucleotide
  Antisense strand to SEQ ID NO: 1940600
uguccuaacgcaauucauc

SEQ ID NO: 1940602 - RNA, 19 nt, Artificial Sequence
  Description of Artificial Sequence: Synthetic oligonucleotide
  Sense strand starting at position 1520 of SEQ ID NO: 1880067
gugaaaugugacuggaggu

SEQ ID NO: 1940603 - RNA, 19 nt, Artificial Sequence
  Description of Artificial Sequence: Synthetic oligonucleotide
  Antisense strand to SEQ ID NO: 1940602
accuccagucacauuucac

SEQ ID NO: 1940604 - RNA, 19 nt, Artificial Sequence
  Description of Artificial Sequence: Synthetic oligonucleotide
  Sense strand starting at position 1658 of SEQ ID NO: 1880067
gcgcuagcuagcuugugua

SEQ ID NO: 1940605 - RNA, 19 nt, Artificial Sequence
  Description of Artificial Sequence: Synthetic oligonucleotide
  Antisense strand to SEQ ID NO: 1940604
uacacaagcuagcuagcgc

SEQ ID NO: 1940606 - RNA, 19 nt, Artificial Sequence
  Description of Artificial Sequence: Synthetic oligonucleotide
  Sense strand starting at position 1660 of SEQ ID NO: 1880067
gcuagcuagcuuguguaaa

SEQ ID NO: 1940607 - RNA, 19 nt, Artificial Sequence
  Description of Artificial Sequence: Synthetic oligonucleotide
  Antisense strand to SEQ ID NO: 1940606
uuuacacaagcuagcuagc

SEQ ID NO: 1940608 - RNA, 19 nt, Artificial Sequence
  Description of Artificial Sequence: Synthetic oligonucleotide
  Sense strand starting at position 1715 of SEQ ID NO: 1880067
agcgacauauuacuacuau

SEQ ID NO: 1940609 - RNA, 19 nt, Artificial Sequence
  Description of Artificial Sequence: Synthetic oligonucleotide
  Antisense strand to SEQ ID NO: 1940608
auaguaguaauaugucgcu

SEQ ID NO: 1940610 - RNA, 19 nt, Artificial Sequence
  Description of Artificial Sequence: Synthetic oligonucleotide
  Sense strand starting at position 1748 of SEQ ID NO: 1880067
cugugagagaaacgauuaa

SEQ ID NO: 1940611 - RNA, 19 nt, Artificial Sequence
  Description of Artificial Sequence: Synthetic oligonucleotide
  Antisense strand to SEQ ID NO: 1940610
uuaaucguuucucucacag

SEQ ID NO: 1940612 - RNA, 19 nt, Artificial Sequence
  Description of Artificial Sequence: Synthetic oligonucleotide
  Sense strand starting at position 1755 of SEQ ID NO: 1880067
agaaacgauuaagaguaaa

SEQ ID NO: 1940613 - RNA, 19 nt, Artificial Sequence
  Description of Artificial Sequence: Synthetic oligonucleotide
  Antisense strand to SEQ ID NO: 1940612
uuuacucuuaaucguuucu

SEQ ID NO: 1940614 - RNA, 19 nt, Artificial Sequence
  Description of Artificial Sequence: Synthetic oligonucleotide
  Sense strand starting at position 1811 of SEQ ID NO: 1880067
gcagacuguucuuuaaacu

SEQ ID NO: 1940615 - RNA, 19 nt, Artificial Sequence
  Description of Artificial Sequence: Synthetic oligonucleotide
  Antisense strand to SEQ ID NO: 1940614
aguuuaaagaacagucugc

SEQ ID NO: 1940616 - RNA, 19 nt, Artificial Sequence
  Description of Artificial Sequence: Synthetic oligonucleotide
  Sense strand starting at position 2367 of SEQ ID NO: 1880067
gcaucuguucucgcccgaa

SEQ ID NO: 1940617 - RNA, 19 nt, Artificial Sequence
  Description of Artificial Sequence: Synthetic oligonucleotide
  Antisense strand to SEQ ID NO: 1940616
uucgggcgagaacagaugc

SEQ ID NO: 1940618 - RNA, 19 nt, Artificial Sequence
  Description of Artificial Sequence: Synthetic oligonucleotide
  Sense strand starting at position 2522 of SEQ ID NO: 1880067
uccuuauccuugucaugua

SEQ ID NO: 1940619 - RNA, 19 nt, Artificial Sequence
  Description of Artificial Sequence: Synthetic oligonucleotide
  Antisense strand to SEQ ID NO: 1940618
uacaugacaaggauaagga

SEQ ID NO: 1940620 - RNA, 19 nt, Artificial Sequence
  Description of Artificial Sequence: Synthetic oligonucleotide
  Sense strand starting at position 2540 of SEQ ID NO: 1880067
agcauuccgcuugaaauug

SEQ ID NO: 1940621 - RNA, 19 nt, Artificial Sequence
  Description of Artificial Sequence: Synthetic oligonucleotide
  Antisense strand to SEQ ID NO: 1940620
caauuucaagcggaaugcu

SEQ ID NO: 1940622 - RNA, 19 nt, Artificial Sequence
  Description of Artificial Sequence: Synthetic oligonucleotide
  Sense strand starting at position 2599 of SEQ ID NO: 1880067
gaaagaggcuucucagaug

SEQ ID NO: 1940623 - RNA, 19 nt, Artificial Sequence
  Description of Artificial Sequence: Synthetic oligonucleotide
  Antisense strand to SEQ ID NO: 1940622
caucugagaagccucuuuc

SEQ ID NO: 1940624 - RNA, 19 nt, Artificial Sequence
  Description of Artificial Sequence: Synthetic oligonucleotide
  Sense strand starting at position 2607 of SEQ ID NO: 1880067
cuucucagaugacugcaaa

SEQ ID NO: 1940625 - RNA, 19 nt, Artificial Sequence
  Description of Artificial Sequence: Synthetic oligonucleotide
  Antisense strand to SEQ ID NO: 1940624
uuugcagucaucugagaag

SEQ ID NO: 1940626 - RNA, 19 nt, Artificial Sequence
  Description of Artificial Sequence: Synthetic oligonucleotide
  Sense strand starting at position 2857 of SEQ ID NO: 1880067
uagugcuuaccucacguua

SEQ ID NO: 1940627 - RNA, 19 nt, Artificial Sequence
  Description of Artificial Sequence: Synthetic oligonucleotide
  Antisense strand to SEQ ID NO: 1940626
uaacgugagguaagcacua

SEQ ID NO: 1940628 - RNA, 19 nt, Artificial Sequence
  Description of Artificial Sequence: Synthetic oligonucleotide
  Sense strand starting at position 2923 of SEQ ID NO: 1880067
acaaauaccugggauacau

SEQ ID NO: 1940629 - RNA, 19 nt, Artificial Sequence
  Description of Artificial Sequence: Synthetic oligonucleotide
  Antisense strand to SEQ ID NO: 1940628
auguaucccagguauuugu

SEQ ID NO: 1940630 - RNA, 19 nt, Artificial Sequence
  Description of Artificial Sequence: Synthetic oligonucleotide
  Sense strand starting at position 2932 of SEQ ID NO: 1880067
ugggauacaucuuauuuga

SEQ ID NO: 1940631 - RNA, 19 nt, Artificial Sequence
  Description of Artificial Sequence: Synthetic oligonucleotide
  Antisense strand to SEQ ID NO: 1940630
ucaaauaagauguauccca

SEQ ID NO: 1940632 - RNA, 19 nt, Artificial Sequence
  Description of Artificial Sequence: Synthetic oligonucleotide
  Sense strand starting at position 2990 of SEQ ID NO: 1880067
gauuauaacgcaggaaaca

SEQ ID NO: 1940633 - RNA, 19 nt, Artificial Sequence
  Description of Artificial Sequence: Synthetic oligonucleotide
  Antisense strand to SEQ ID NO: 1940632
uguuuccugcguuauaauc

SEQ ID NO: 1940634 - RNA, 19 nt, Artificial Sequence
  Description of Artificial Sequence: Synthetic oligonucleotide
  Sense strand starting at position 3009 of SEQ ID NO: 1880067
cugugaaguaaguaaaguu

SEQ ID NO: 1940635 - RNA, 19 nt, Artificial Sequence
  Description of Artificial Sequence: Synthetic oligonucleotide
  Antisense strand to SEQ ID NO: 1940634
aacuuuacuuacuucacag

SEQ ID NO: 1940636 - RNA, 19 nt, Artificial Sequence
  Description of Artificial Sequence: Synthetic oligonucleotide
  Sense strand starting at position 3512 of SEQ ID NO: 1880067
gcugacucauccuugacuu

SEQ ID NO: 1940637 - RNA, 19 nt, Artificial Sequence
  Description of Artificial Sequence: Synthetic oligonucleotide
  Antisense strand to SEQ ID NO: 1940636
aagucaaggaugagucagc

SEQ ID NO: 1940638 - RNA, 19 nt, Artificial Sequence
  Description of Artificial Sequence: Synthetic oligonucleotide
  Sense strand starting at position 3524 of SEQ ID NO: 1880067
uugacuugguucuccagau

SEQ ID NO: 1940639 - RNA, 19 nt, Artificial Sequence
  Description of Artificial Sequence: Synthetic oligonucleotide
  Antisense strand to SEQ ID NO: 1940638
aucuggagaaccaagucaa

SEQ ID NO: 1940640 - RNA, 19 nt, Artificial Sequence
  Description of Artificial Sequence: Synthetic oligonucleotide
  Sense strand starting at position 3525 of SEQ ID NO: 1880067
ugacuugguucuccagaug

SEQ ID NO: 1940641 - RNA, 19 nt, Artificial Sequence
  Description of Artificial Sequence: Synthetic oligonucleotide
  Antisense strand to SEQ ID NO: 1940640
caucuggagaaccaaguca

SEQ ID NO: 1940642 - RNA, 19 nt, Artificial Sequence
  Description of Artificial Sequence: Synthetic oligonucleotide
  Sense strand starting at position 3665 of SEQ ID NO: 1880067
gucuccucuggagagcaua

SEQ ID NO: 1940643 - RNA, 19 nt, Artificial Sequence
  Description of Artificial Sequence: Synthetic oligonucleotide
  Antisense strand to SEQ ID NO: 1940642
uaugcucuccagaggagac

SEQ ID NO: 1940644 - RNA, 19 nt, Artificial Sequence
  Description of Artificial Sequence: Synthetic oligonucleotide
  Sense strand starting at position 3749 of SEQ ID NO: 1880067
gagggauuaggugacggua

SEQ ID NO: 1940645 - RNA, 19 nt, Artificial Sequence
  Description of Artificial Sequence: Synthetic oligonucleotide
  Antisense strand to SEQ ID NO: 1940644
uaccgucaccuaaucccuc

SEQ ID NO: 1940646 - RNA, 19 nt, Artificial Sequence
  Description of Artificial Sequence: Synthetic oligonucleotide
  Sense strand starting at position 3763 of SEQ ID NO: 1880067
cgguauaguaacugcugaa

SEQ ID NO: 1940647 - RNA, 19 nt, Artificial Sequence
  Description of Artificial Sequence: Synthetic oligonucleotide
  Antisense strand to SEQ ID NO: 1940646
uucagcaguuacuauaccg

SEQ ID NO: 1940648 - RNA, 19 nt, Artificial Sequence
  Description of Artificial Sequence: Synthetic oligonucleotide
  Sense strand starting at position 3767 of SEQ ID NO: 1880067
auaguaacugcugaauacu

SEQ ID NO: 1940649 - RNA, 19 nt, Artificial Sequence
  Description of Artificial Sequence: Synthetic oligonucleotide
  Antisense strand to SEQ ID NO: 1940648
aguauucagcaguuacuau

SEQ ID NO: 1940650 - RNA, 19 nt, Artificial Sequence
  Description of Artificial Sequence: Synthetic oligonucleotide
  Sense strand starting at position 3829 of SEQ ID NO: 1880067
acacaucguccagguagua

SEQ ID NO: 1940651 - RNA, 19 nt, Artificial Sequence
  Description of Artificial Sequence: Synthetic oligonucleotide
  Antisense strand to SEQ ID NO: 1940650
uacuaccuggacgaugugu

SEQ ID NO: 1940652 - RNA, 19 nt, Artificial Sequence
  Description of Artificial Sequence: Synthetic oligonucleotide
  Sense strand starting at position 3851 of SEQ ID NO: 1880067
gagaaauacuuucugggua

SEQ ID NO: 1940653 - RNA, 19 nt, Artificial Sequence
  Description of Artificial Sequence: Synthetic oligonucleotide
  Antisense strand to SEQ ID NO: 1940652
uacccagaaaguauuucuc

SEQ ID NO: 1940654 - RNA, 19 nt, Artificial Sequence
  Description of Artificial Sequence: Synthetic oligonucleotide
  Sense strand starting at position 3856 of SEQ ID NO: 1880067
auacuuucuggguaucuga

SEQ ID NO: 1940655 - RNA, 19 nt, Artificial Sequence
  Description of Artificial Sequence: Synthetic oligonucleotide
  Antisense strand to SEQ ID NO: 1940654
ucagauacccagaaaguau

SEQ ID NO: 1940656 - RNA, 19 nt, Artificial Sequence
  Description of Artificial Sequence: Synthetic oligonucleotide
  Sense strand starting at position 3872 of SEQ ID NO: 1880067
ugaccagccuucguggaaa

SEQ ID NO: 1940657 - RNA, 19 nt, Artificial Sequence
  Description of Artificial Sequence: Synthetic oligonucleotide
  Antisense strand to SEQ ID NO: 1940656
uuuccacgaaggcugguca

SEQ ID NO: 1940658 - RNA, 19 nt, Artificial Sequence
  Description of Artificial Sequence: Synthetic oligonucleotide
  Sense strand starting at position 3874 of SEQ ID NO: 1880067
accagccuucguggaaaga

SEQ ID NO: 1940659 - RNA, 19 nt, Artificial Sequence
  Description of Artificial Sequence: Synthetic oligonucleotide
  Antisense strand to SEQ ID NO: 1940658
ucuuuccacgaaggcuggu

SEQ ID NO: 1940660 - RNA, 19 nt, Artificial Sequence
  Description of Artificial Sequence: Synthetic oligonucleotide
  Sense strand starting at position 3875 of SEQ ID NO: 1880067
ccagccuucguggaaagaa

SEQ ID NO: 1940661 - RNA, 19 nt, Artificial Sequence
  Description of Artificial Sequence: Synthetic oligonucleotide
  Antisense strand to SEQ ID NO: 1940660
uucuuuccacgaaggcugg

SEQ ID NO: 1940662 - RNA, 19 nt, Artificial Sequence
  Description of Artificial Sequence: Synthetic oligonucleotide
  Sense strand starting at position 55 of SEQ ID NO: 1880068
cagauuagcugccauguau

SEQ ID NO: 1940663 - RNA, 19 nt, Artificial Sequence
  Description of Artificial Sequence: Synthetic oligonucleotide
  Antisense strand to SEQ ID NO: 1940662
auacauggcagcuaaucug

SEQ ID NO: 1940664 - RNA, 19 nt, Artificial Sequence
  Description of Artificial Sequence: Synthetic oligonucleotide
  Sense strand starting at position 62 of SEQ ID NO: 1880068
gcugccauguaucaccaaa

SEQ ID NO: 1940665 - RNA, 19 nt, Artificial Sequence
  Description of Artificial Sequence: Synthetic oligonucleotide
  Antisense strand to SEQ ID NO: 1940664
uuuggugauacauggcagc

SEQ ID NO: 1940666 - RNA, 19 nt, Artificial Sequence
  Description of Artificial Sequence: Synthetic oligonucleotide
  Sense strand starting at position 226 of SEQ ID NO: 1880068
gagugagagaccuguccua

SEQ ID NO: 1940667 - RNA, 19 nt, Artificial Sequence
  Description of Artificial Sequence: Synthetic oligonucleotide
  Antisense strand to SEQ ID NO: 1940666
uaggacaggucucucacuc

SEQ ID NO: 1940668 - RNA, 19 nt, Artificial Sequence
  Description of Artificial Sequence: Synthetic oligonucleotide
  Sense strand starting at position 839 of SEQ ID NO: 1880068
ggugauuuacagugcuauu

SEQ ID NO: 1940669 - RNA, 19 nt, Artificial Sequence
  Description of Artificial Sequence: Synthetic oligonucleotide
  Antisense strand to SEQ ID NO: 1940668
aauagcacuguaaaucacc

SEQ ID NO: 1940670 - RNA, 19 nt, Artificial Sequence
  Description of Artificial Sequence: Synthetic oligonucleotide
  Sense strand starting at position 842 of SEQ ID NO: 1880068
gauuuacagugcuauuuga

SEQ ID NO: 1940671 - RNA, 19 nt, Artificial Sequence
  Description of Artificial Sequence: Synthetic oligonucleotide
  Antisense strand to SEQ ID NO: 1940670
ucaaauagcacuguaaauc

SEQ ID NO: 1940672 - RNA, 19 nt, Artificial Sequence
  Description of Artificial Sequence: Synthetic oligonucleotide
  Sense strand starting at position 893 of SEQ ID NO: 1880068
acgcgugucagguguaaac

SEQ ID NO: 1940673 - RNA, 19 nt, Artificial Sequence
  Description of Artificial Sequence: Synthetic oligonucleotide
  Antisense strand to SEQ ID NO: 1940672
guuuacaccugacacgcgu

SEQ ID NO: 1940674 - RNA, 19 nt, Artificial Sequence
  Description of Artificial Sequence: Synthetic oligonucleotide
  Sense strand starting at position 1113 of SEQ ID NO: 1880068
ucgcuuaaagucugaagaa

SEQ ID NO: 1940675 - RNA, 19 nt, Artificial Sequence
  Description of Artificial Sequence: Synthetic oligonucleotide
  Antisense strand to SEQ ID NO: 1940674
uucuucagacuuuaagcga

SEQ ID NO: 1940676 - RNA, 19 nt, Artificial Sequence
  Description of Artificial Sequence: Synthetic oligonucleotide
  Sense strand starting at position 1114 of SEQ ID NO: 1880068
cgcuuaaagucugaagaaa

SEQ ID NO: 1940677 - RNA, 19 nt, Artificial Sequence
  Description of Artificial Sequence: Synthetic oligonucleotide
  Antisense strand to SEQ ID NO: 1940676
uuucuucagacuuuaagcg

SEQ ID NO: 1940678 - RNA, 19 nt, Artificial Sequence
  Description of Artificial Sequence: Synthetic oligonucleotide
  Sense strand starting at position 1318 of SEQ ID NO: 1880068
acgcaaaguaagcguguua

SEQ ID NO: 1940679 - RNA, 19 nt, Artificial Sequence
  Description of Artificial Sequence: Synthetic oligonucleotide
  Antisense strand to SEQ ID NO: 1940678
uaacacgcuuacuuugcgu

SEQ ID NO: 1940680 - RNA, 19 nt, Artificial Sequence
  Description of Artificial Sequence: Synthetic oligonucleotide
  Sense strand starting at position 1379 of SEQ ID NO: 1880068
gcuuucuucccagagaacu

SEQ ID NO: 1940681 - RNA, 19 nt, Artificial Sequence
  Description of Artificial Sequence: Synthetic oligonucleotide
  Antisense strand to SEQ ID NO: 1940680
aguucucugggaagaaagc

SEQ ID NO: 1940682 - RNA, 19 nt, Artificial Sequence
  Description of Artificial Sequence: Synthetic oligonucleotide
  Sense strand starting at position 1703 of SEQ ID NO: 1880068
ggcgacauguuacuuccua

SEQ ID NO: 1940683 - RNA, 19 nt, Artificial Sequence
  Description of Artificial Sequence: Synthetic oligonucleotide
  Antisense strand to SEQ ID NO: 1940682
uaggaaguaacaugucgcc

SEQ ID NO: 1940684 - RNA, 19 nt, Artificial Sequence
  Description of Artificial Sequence: Synthetic oligonucleotide
  Sense strand starting at position 1704 of SEQ ID NO: 1880068
gcgacauguuacuuccuau

SEQ ID NO: 1940685 - RNA, 19 nt, Artificial Sequence
  Description of Artificial Sequence: Synthetic oligonucleotide
  Antisense strand to SEQ ID NO: 1940684
auaggaaguaacaugucgc

SEQ ID NO: 1940686 - RNA, 19 nt, Artificial Sequence
  Description of Artificial Sequence: Synthetic oligonucleotide
  Sense strand starting at position 1791 of SEQ ID NO: 1880068
agauaugacccuuggcgua

SEQ ID NO: 1940687 - RNA, 19 nt, Artificial Sequence
  Description of Artificial Sequence: Synthetic oligonucleotide
  Antisense strand to SEQ ID NO: 1940686
uacgccaagggucauaucu

SEQ ID NO: 1940688 - RNA, 19 nt, Artificial Sequence
  Description of Artificial Sequence: Synthetic oligonucleotide
  Sense strand starting at position 2394 of SEQ ID NO: 1880068
gccuguguuaaggagcaau

SEQ ID NO: 1940689 - RNA, 19 nt, Artificial Sequence
  Description of Artificial Sequence: Synthetic oligonucleotide
  Antisense strand to SEQ ID NO: 1940688
auugcuccuuaacacaggc

SEQ ID NO: 1940690 - RNA, 19 nt, Artificial Sequence
  Description of Artificial Sequence: Synthetic oligonucleotide
  Sense strand starting at position 2397 of SEQ ID NO: 1880068
uguguuaaggagcaaucuu

SEQ ID NO: 1940691 - RNA, 19 nt, Artificial Sequence
  Description of Artificial Sequence: Synthetic oligonucleotide
  Antisense strand to SEQ ID NO: 1940690
aagauugcuccuuaacaca

SEQ ID NO: 1940692 - RNA, 19 nt, Artificial Sequence
  Description of Artificial Sequence: Synthetic oligonucleotide
  Sense strand starting at position 2409 of SEQ ID NO: 1880068
caaucuuucgguggccaga

SEQ ID NO: 1940693 - RNA, 19 nt, Artificial Sequence
  Description of Artificial Sequence: Synthetic oligonucleotide
  Antisense strand to SEQ ID NO: 1940692
ucuggccaccgaaagauug

SEQ ID NO: 1940694 - RNA, 19 nt, Artificial Sequence
  Description of Artificial Sequence: Synthetic oligonucleotide
  Sense strand starting at position 2531 of SEQ ID NO: 1880068
ugcagcauuccgcuugcau

SEQ ID NO: 1940695 - RNA, 19 nt, Artificial Sequence
  Description of Artificial Sequence: Synthetic oligonucleotide
  Antisense strand to SEQ ID NO: 1940694
augcaagcggaaugcugca

SEQ ID NO: 1940696 - RNA, 19 nt, Artificial Sequence
  Description of Artificial Sequence: Synthetic oligonucleotide
  Sense strand starting at position 2532 of SEQ ID NO: 1880068
gcagcauuccgcuugcauu

SEQ ID NO: 1940697 - RNA, 19 nt, Artificial Sequence
  Description of Artificial Sequence: Synthetic oligonucleotide
  Antisense strand to SEQ ID NO: 1940696
aaugcaagcggaaugcugc

SEQ ID NO: 1940698 - RNA, 19 nt, Artificial Sequence
  Description of Artificial Sequence: Synthetic oligonucleotide
  Sense strand starting at position 2533 of SEQ ID NO: 1880068
cagcauuccgcuugcauuu

SEQ ID NO: 1940699 - RNA, 19 nt, Artificial Sequence
  Description of Artificial Sequence: Synthetic oligonucleotide
  Antisense strand to SEQ ID NO: 1940698
aaaugcaagcggaaugcug

SEQ ID NO: 1940700 - RNA, 19 nt, Artificial Sequence
  Description of Artificial Sequence: Synthetic oligonucleotide
  Sense strand starting at position 2546 of SEQ ID NO: 1880068
gcauuuggaagccguuuaa

SEQ ID NO: 1940701 - RNA, 19 nt, Artificial Sequence
  Description of Artificial Sequence: Synthetic oligonucleotide
  Antisense strand to SEQ ID NO: 1940700
uuaaacggcuuccaaaugc

SEQ ID NO: 1940702 - RNA, 19 nt, Artificial Sequence
  Description of Artificial Sequence: Synthetic oligonucleotide
  Sense strand starting at position 2576 of SEQ ID NO: 1880068
agccauauuuaugaaagua

SEQ ID NO: 1940703 - RNA, 19 nt, Artificial Sequence
  Description of Artificial Sequence: Synthetic oligonucleotide
  Antisense strand to SEQ ID NO: 1940702
uacuuucauaaauauggcu

SEQ ID NO: 1940704 - RNA, 19 nt, Artificial Sequence
  Description of Artificial Sequence: Synthetic oligonucleotide
  Sense strand starting at position 3338 of SEQ ID NO: 1880068
acauuccacuccuugguua

SEQ ID NO: 1940705 - RNA, 19 nt, Artificial Sequence
  Description of Artificial Sequence: Synthetic oligonucleotide
  Antisense strand to SEQ ID NO: 1940704
uaaccaaggaguggaaugu

SEQ ID NO: 1940706 - RNA, 19 nt, Artificial Sequence
  Description of Artificial Sequence: Synthetic oligonucleotide
  Sense strand starting at position 3420 of SEQ ID NO: 1880068
cuuucuugagaguguacuu

SEQ ID NO: 1940707 - RNA, 19 nt, Artificial Sequence
  Description of Artificial Sequence: Synthetic oligonucleotide
  Antisense strand to SEQ ID NO: 1940706
aaguacacucucaagaaag

SEQ ID NO: 1940708 - RNA, 19 nt, Artificial Sequence
  Description of Artificial Sequence: Synthetic oligonucleotide
  Sense strand starting at position 3485 of SEQ ID NO: 1880068
uugacuuuguucucgcgau

SEQ ID NO: 1940709 - RNA, 19 nt, Artificial Sequence
  Description of Artificial Sequence: Synthetic oligonucleotide
  Antisense strand to SEQ ID NO: 1940708
aucgcgagaacaaagucaa

SEQ ID NO: 1940710 - RNA, 19 nt, Artificial Sequence
  Description of Artificial Sequence: Synthetic oligonucleotide
  Sense strand starting at position 3486 of SEQ ID NO: 1880068
ugacuuuguucucgcgaug

SEQ ID NO: 1940711 - RNA, 19 nt, Artificial Sequence
  Description of Artificial Sequence: Synthetic oligonucleotide
  Antisense strand to SEQ ID NO: 1940710
caucgcgagaacaaaguca

SEQ ID NO: 1940712 - RNA, 19 nt, Artificial Sequence
  Description of Artificial Sequence: Synthetic oligonucleotide
  Sense strand starting at position 3621 of SEQ ID NO: 1880068
gagaguucucuuuggagac

SEQ ID NO: 1940713 - RNA, 19 nt, Artificial Sequence
  Description of Artificial Sequence: Synthetic oligonucleotide
  Antisense strand to SEQ ID NO: 1940712
gucuccaaagagaacucuc

SEQ ID NO: 1940714 - RNA, 19 nt, Artificial Sequence
  Description of Artificial Sequence: Synthetic oligonucleotide
  Sense strand starting at position 3707 of SEQ ID NO: 1880068
ugagggauugggugacagu

SEQ ID NO: 1940715 - RNA, 19 nt, Artificial Sequence
  Description of Artificial Sequence: Synthetic oligonucleotide
  Antisense strand to SEQ ID NO: 1940714
acugucacccaaucccuca

SEQ ID NO: 1940716 - RNA, 19 nt, Artificial Sequence
  Description of Artificial Sequence: Synthetic oligonucleotide
  Sense strand starting at position 3716 of SEQ ID NO: 1880068
gggugacaguguaguaacu

SEQ ID NO: 1940717 - RNA, 19 nt, Artificial Sequence
  Description of Artificial Sequence: Synthetic oligonucleotide
  Antisense strand to SEQ ID NO: 1940716
aguuacuacacugucaccc

SEQ ID NO: 1940718 - RNA, 19 nt, Artificial Sequence
  Description of Artificial Sequence: Synthetic oligonucleotide
  Sense strand starting at position 3810 of SEQ ID NO: 1880068
gagaaaugcuuucugggua

SEQ ID NO: 1940719 - RNA, 19 nt, Artificial Sequence
  Description of Artificial Sequence: Synthetic oligonucleotide
  Antisense strand to SEQ ID NO: 1940718
uacccagaaagcauuucuc

SEQ ID NO: 1940720 - RNA, 19 nt, Artificial Sequence
  Description of Artificial Sequence: Synthetic oligonucleotide
  Sense strand starting at position 3811 of SEQ ID NO: 1880068
agaaaugcuuucuggguau

SEQ ID NO: 1940721 - RNA, 19 nt, Artificial Sequence
  Description of Artificial Sequence: Synthetic oligonucleotide
  Antisense strand to SEQ ID NO: 1940720
auacccagaaagcauuucu

SEQ ID NO: 1940722 - RNA, 19 nt, Artificial Sequence
  Description of Artificial Sequence: Synthetic oligonucleotide
  Sense strand starting at position 3813 of SEQ ID NO: 1880068
aaaugcuuucuggguaucu

SEQ ID NO: 1940723 - RNA, 19 nt, Artificial Sequence
  Description of Artificial Sequence: Synthetic oligonucleotide
  Antisense strand to SEQ ID NO: 1940722
agauacccagaaagcauuu

SEQ ID NO: 1940724 - RNA, 19 nt, Artificial Sequence
  Description of Artificial Sequence: Synthetic oligonucleotide
  Sense strand starting at position 3815 of SEQ ID NO: 1880068
augcuuucuggguaucuga

SEQ ID NO: 1940725 - RNA, 19 nt, Artificial Sequence
  Description of Artificial Sequence: Synthetic oligonucleotide
  Antisense strand to SEQ ID NO: 1940724
ucagauacccagaaagcau

SEQ ID NO: 1940726 - RNA, 19 nt, Artificial Sequence
  Description of Artificial Sequence: Synthetic oligonucleotide
  Sense strand starting at position 7 of SEQ ID NO: 1880069
aggaaaugccauuauucuc

SEQ ID NO: 1940727 - RNA, 19 nt, Artificial Sequence
  Description of Artificial Sequence: Synthetic oligonucleotide
  Antisense strand to SEQ ID NO: 1940726
gagaauaauggcauuuccu

SEQ ID NO: 1940728 - RNA, 19 nt, Artificial Sequence
  Description of Artificial Sequence: Synthetic oligonucleotide
  Sense strand starting at position 58 of SEQ ID NO: 1880069
agaccagauuagcugucau

SEQ ID NO: 1940729 - RNA, 19 nt, Artificial Sequence
  Description of Artificial Sequence: Synthetic oligonucleotide
  Antisense strand to SEQ ID NO: 1940728
augacagcuaaucuggucu

SEQ ID NO: 1940730 - RNA, 19 nt, Artificial Sequence
  Description of Artificial Sequence: Synthetic oligonucleotide
  Sense strand starting at position 90 of SEQ ID NO: 1880069
gggacuggauccuuguuaa

SEQ ID NO: 1940731 - RNA, 19 nt, Artificial Sequence
  Description of Artificial Sequence: Synthetic oligonucleotide
  Antisense strand to SEQ ID NO: 1940730
uuaacaaggauccaguccc

SEQ ID NO: 1940732 - RNA, 19 nt, Artificial Sequence
  Description of Artificial Sequence: Synthetic oligonucleotide
  Sense strand starting at position 93 of SEQ ID NO: 1880069
acuggauccuuguuaacac

SEQ ID NO: 1940733 - RNA, 19 nt, Artificial Sequence
  Description of Artificial Sequence: Synthetic oligonucleotide
  Antisense strand to SEQ ID NO: 1940732
guguuaacaaggauccagu

SEQ ID NO: 1940734 - RNA, 19 nt, Artificial Sequence
  Description of Artificial Sequence: Synthetic oligonucleotide
  Sense strand starting at position 853 of SEQ ID NO: 1880069
gauuuacagugccauuuga

SEQ ID NO: 1940735 - RNA, 19 nt, Artificial Sequence
  Description of Artificial Sequence: Synthetic oligonucleotide
  Antisense strand to SEQ ID NO: 1940734
ucaaauggcacuguaaauc

SEQ ID NO: 1940736 - RNA, 19 nt, Artificial Sequence
  Description of Artificial Sequence: Synthetic oligonucleotide
  Sense strand starting at position 1124 of SEQ ID NO: 1880069
ucgcuuaaagucuaaagaa

SEQ ID NO: 1940737 - RNA, 19 nt, Artificial Sequence
  Description of Artificial Sequence: Synthetic oligonucleotide
  Antisense strand to SEQ ID NO: 1940736
uucuuuagacuuuaagcga

SEQ ID NO: 1940738 - RNA, 19 nt, Artificial Sequence
  Description of Artificial Sequence: Synthetic oligonucleotide
  Sense strand starting at position 1340 of SEQ ID NO: 1880069
gaguguuaugucuacaacc

SEQ ID NO: 1940739 - RNA, 19 nt, Artificial Sequence
  Description of Artificial Sequence: Synthetic oligonucleotide
  Antisense strand to SEQ ID NO: 1940738
gguuguagacauaacacuc

SEQ ID NO: 1940740 - RNA, 19 nt, Artificial Sequence
  Description of Artificial Sequence: Synthetic oligonucleotide
  Sense strand starting at position 1390 of SEQ ID NO: 1880069
gcuuucuucccagagaaca

SEQ ID NO: 1940741 - RNA, 19 nt, Artificial Sequence
  Description of Artificial Sequence: Synthetic oligonucleotide
  Antisense strand to SEQ ID NO: 1940740
uguucucugggaagaaagc

SEQ ID NO: 1940742 - RNA, 19 nt, Artificial Sequence
  Description of Artificial Sequence: Synthetic oligonucleotide
  Sense strand starting at position 2530 of SEQ ID NO: 1880069
ugcagcauuccgcuugcaa

SEQ ID NO: 1940743 - RNA, 19 nt, Artificial Sequence
  Description of Artificial Sequence: Synthetic oligonucleotide
  Antisense strand to SEQ ID NO: 1940742
uugcaagcggaaugcugca

SEQ ID NO: 1940744 - RNA, 19 nt, Artificial Sequence
  Description of Artificial Sequence: Synthetic oligonucleotide
  Sense strand starting at position 2531 of SEQ ID NO: 1880069
gcagcauuccgcuugcaau

SEQ ID NO: 1940745 - RNA, 19 nt, Artificial Sequence
  Description of Artificial Sequence: Synthetic oligonucleotide
  Antisense strand to SEQ ID NO: 1940744
auugcaagcggaaugcugc

SEQ ID NO: 1940746 - RNA, 19 nt, Artificial Sequence
  Description of Artificial Sequence: Synthetic oligonucleotide
  Sense strand starting at position 2592 of SEQ ID NO: 1880069
uaaagaggcugcuuagaug

SEQ ID NO: 1940747 - RNA, 19 nt, Artificial Sequence
  Description of Artificial Sequence: Synthetic oligonucleotide
  Antisense strand to SEQ ID NO: 1940746
caucuaagcagccucuuua

SEQ ID NO: 1940748 - RNA, 19 nt, Artificial Sequence
  Description of Artificial Sequence: Synthetic oligonucleotide
  Sense strand starting at position 3342 of SEQ ID NO: 1880069
uuccaauucuugguuaaag

SEQ ID NO: 1940749 - RNA, 19 nt, Artificial Sequence
  Description of Artificial Sequence: Synthetic oligonucleotide
  Antisense strand to SEQ ID NO: 1940748
cuuuaaccaagaauuggaa

SEQ ID NO: 1940750 - RNA, 19 nt, Artificial Sequence
  Description of Artificial Sequence: Synthetic oligonucleotide
  Sense strand starting at position 3343 of SEQ ID NO: 1880069
uccaauucuugguuaaaga

SEQ ID NO: 1940751 - RNA, 19 nt, Artificial Sequence
  Description of Artificial Sequence: Synthetic oligonucleotide
  Antisense strand to SEQ ID NO: 1940750
ucuuuaaccaagaauugga

SEQ ID NO: 1940752 - RNA, 19 nt, Artificial Sequence
  Description of Artificial Sequence: Synthetic oligonucleotide
  Sense strand starting at position 3622 of SEQ ID NO: 1880069
gagaguucuccuuggagau

SEQ ID NO: 1940753 - RNA, 19 nt, Artificial Sequence
  Description of Artificial Sequence: Synthetic oligonucleotide
  Antisense strand to SEQ ID NO: 1940752
aucuccaaggagaacucuc

SEQ ID NO: 1940754 - RNA, 19 nt, Artificial Sequence
  Description of Artificial Sequence: Synthetic oligonucleotide
  Sense strand starting at position 3623 of SEQ ID NO: 1880069
agaguucuccuuggagauc

SEQ ID NO: 1940755 - RNA, 19 nt, Artificial Sequence
  Description of Artificial Sequence: Synthetic oligonucleotide
  Antisense strand to SEQ ID NO: 1940754
gaucuccaaggagaacucu

SEQ ID NO: 1940756 - RNA, 19 nt, Artificial Sequence
  Description of Artificial Sequence: Synthetic oligonucleotide
  Sense strand starting at position 3626 of SEQ ID NO: 1880069
guucuccuuggagaucaua

SEQ ID NO: 1940757 - RNA, 19 nt, Artificial Sequence
  Description of Artificial Sequence: Synthetic oligonucleotide
  Antisense strand to SEQ ID NO: 1940756
uaugaucuccaaggagaac

SEQ ID NO: 1940758 - RNA, 19 nt, Artificial Sequence
  Description of Artificial Sequence: Synthetic oligonucleotide
  Sense strand starting at position 3801 of SEQ ID NO: 1880069
gguaguaguggagaaaugu

SEQ ID NO: 1940759 - RNA, 19 nt, Artificial Sequence
  Description of Artificial Sequence: Synthetic oligonucleotide
  Antisense strand to SEQ ID NO: 1940758
acauuucuccacuacuacc

SEQ ID NO: 1940760 - RNA, 19 nt, Artificial Sequence
  Description of Artificial Sequence: Synthetic oligonucleotide
  Sense strand starting at position 8 of SEQ ID NO: 1880070
aggaaaugccauuauucuc

SEQ ID NO: 1940761 - RNA, 19 nt, Artificial Sequence
  Description of Artificial Sequence: Synthetic oligonucleotide
  Antisense strand to SEQ ID NO: 1940760
gagaauaauggcauuuccu

SEQ ID NO: 1940762 - RNA, 19 nt, Artificial Sequence
  Description of Artificial Sequence: Synthetic oligonucleotide
  Sense strand starting at position 91 of SEQ ID NO: 1880070
gggacuggauccuuguuaa

SEQ ID NO: 1940763 - RNA, 19 nt, Artificial Sequence
  Description of Artificial Sequence: Synthetic oligonucleotide
  Antisense strand to SEQ ID NO: 1940762
uuaacaaggauccaguccc

SEQ ID NO: 1940764 - RNA, 19 nt, Artificial Sequence
  Description of Artificial Sequence: Synthetic oligonucleotide
  Sense strand starting at position 94 of SEQ ID NO: 1880070
acuggauccuuguuaacac

SEQ ID NO: 1940765 - RNA, 19 nt, Artificial Sequence
  Description of Artificial Sequence: Synthetic oligonucleotide
  Antisense strand to SEQ ID NO: 1940764
guguuaacaaggauccagu

SEQ ID NO: 1940766 - RNA, 19 nt, Artificial Sequence
  Description of Artificial Sequence: Synthetic oligonucleotide
  Sense strand starting at position 680 of SEQ ID NO: 1880070
cugaccucagcugaucaaa

SEQ ID NO: 1940767 - RNA, 19 nt, Artificial Sequence
  Description of Artificial Sequence: Synthetic oligonucleotide
  Antisense strand to SEQ ID NO: 1940766
uuugaucagcugaggucag

SEQ ID NO: 1940768 - RNA, 19 nt, Artificial Sequence
  Description of Artificial Sequence: Synthetic oligonucleotide
  Sense strand starting at position 826 of SEQ ID NO: 1880070
uagauaguucugggaguua

SEQ ID NO: 1940769 - RNA, 19 nt, Artificial Sequence
  Description of Artificial Sequence: Synthetic oligonucleotide
  Antisense strand to SEQ ID NO: 1940768
uaacucccagaacuaucua

SEQ ID NO: 1940770 - RNA, 19 nt, Artificial Sequence
  Description of Artificial Sequence: Synthetic oligonucleotide
  Sense strand starting at position 854 of SEQ ID NO: 1880070
gauuuacagugccauuuga

SEQ ID NO: 1940771 - RNA, 19 nt, Artificial Sequence
  Description of Artificial Sequence: Synthetic oligonucleotide
  Antisense strand to SEQ ID NO: 1940770
ucaaauggcacuguaaauc

SEQ ID NO: 1940772 - RNA, 19 nt, Artificial Sequence
  Description of Artificial Sequence: Synthetic oligonucleotide
  Sense strand starting at position 1125 of SEQ ID NO: 1880070
ucgcuuaaagucuaaagaa

SEQ ID NO: 1940773 - RNA, 19 nt, Artificial Sequence
  Description of Artificial Sequence: Synthetic oligonucleotide
  Antisense strand to SEQ ID NO: 1940772
uucuuuagacuuuaagcga

SEQ ID NO: 1940774 - RNA, 19 nt, Artificial Sequence
  Description of Artificial Sequence: Synthetic oligonucleotide
  Sense strand starting at position 1341 of SEQ ID NO: 1880070
gaguguuaugucuacaacc

SEQ ID NO: 1940775 - RNA, 19 nt, Artificial Sequence
  Description of Artificial Sequence: Synthetic oligonucleotide
  Antisense strand to SEQ ID NO: 1940774
gguuguagacauaacacuc

SEQ ID NO: 1940776 - RNA, 19 nt, Artificial Sequence
  Description of Artificial Sequence: Synthetic oligonucleotide
  Sense strand starting at position 2107 of SEQ ID NO: 1880070
cugggauucucacuuccga

SEQ ID NO: 1940777 - RNA, 19 nt, Artificial Sequence
  Description of Artificial Sequence: Synthetic oligonucleotide
  Antisense strand to SEQ ID NO: 1940776
ucggaagugagaaucccag

SEQ ID NO: 1940778 - RNA, 19 nt, Artificial Sequence
  Description of Artificial Sequence: Synthetic oligonucleotide
  Sense strand starting at position 2513 of SEQ ID NO: 1880070
acauccuuauccuugugau

SEQ ID NO: 1940779 - RNA, 19 nt, Artificial Sequence
  Description of Artificial Sequence: Synthetic oligonucleotide
  Antisense strand to SEQ ID NO: 1940778
aucacaaggauaaggaugu

SEQ ID NO: 1940780 - RNA, 19 nt, Artificial Sequence
  Description of Artificial Sequence: Synthetic oligonucleotide
  Sense strand starting at position 2531 of SEQ ID NO: 1880070
ugcagcauuccgcuugcaa

SEQ ID NO: 1940781 - RNA, 19 nt, Artificial Sequence
  Description of Artificial Sequence: Synthetic oligonucleotide
  Antisense strand to SEQ ID NO: 1940780
uugcaagcggaaugcugca

SEQ ID NO: 1940782 - RNA, 19 nt, Artificial Sequence
  Description of Artificial Sequence: Synthetic oligonucleotide
  Sense strand starting at position 2532 of SEQ ID NO: 1880070
gcagcauuccgcuugcaau

SEQ ID NO: 1940783 - RNA, 19 nt, Artificial Sequence
  Description of Artificial Sequence: Synthetic oligonucleotide
  Antisense strand to SEQ ID NO: 1940782
auugcaagcggaaugcugc

SEQ ID NO: 1940784 - RNA, 19 nt, Artificial Sequence
  Description of Artificial Sequence: Synthetic oligonucleotide
  Sense strand starting at position 2550 of SEQ ID NO: 1880070
uuggaagccguuuaauauc

SEQ ID NO: 1940785 - RNA, 19 nt, Artificial Sequence
  Description of Artificial Sequence: Synthetic oligonucleotide
  Antisense strand to SEQ ID NO: 1940784
gauauuaaacggcuuccaa

SEQ ID NO: 1940786 - RNA, 19 nt, Artificial Sequence
  Description of Artificial Sequence: Synthetic oligonucleotide
  Sense strand starting at position 2593 of SEQ ID NO: 1880070
uaaagaggcugcuuagaug

SEQ ID NO: 1940787 - RNA, 19 nt, Artificial Sequence
  Description of Artificial Sequence: Synthetic oligonucleotide
  Antisense strand to SEQ ID NO: 1940786
caucuaagcagccucuuua

SEQ ID NO: 1940788 - RNA, 19 nt, Artificial Sequence
  Description of Artificial Sequence: Synthetic oligonucleotide
  Sense strand starting at position 2601 of SEQ ID NO: 1880070
cugcuuagaugacugcaaa

SEQ ID NO: 1940789 - RNA, 19 nt, Artificial Sequence
  Description of Artificial Sequence: Synthetic oligonucleotide
  Antisense strand to SEQ ID NO: 1940788
uuugcagucaucuaagcag

SEQ ID NO: 1940790 - RNA, 19 nt, Artificial Sequence
  Description of Artificial Sequence: Synthetic oligonucleotide
  Sense strand starting at position 2745 of SEQ ID NO: 1880070
uaugcugucccagaagaga

SEQ ID NO: 1940791 - RNA, 19 nt, Artificial Sequence
  Description of Artificial Sequence: Synthetic oligonucleotide
  Antisense strand to SEQ ID NO: 1940790
ucucuucugggacagcaua

SEQ ID NO: 1940792 - RNA, 19 nt, Artificial Sequence
  Description of Artificial Sequence: Synthetic oligonucleotide
  Sense strand starting at position 3263 of SEQ ID NO: 1880070
uucugagaccaguguuuga

SEQ ID NO: 1940793 - RNA, 19 nt, Artificial Sequence
  Description of Artificial Sequence: Synthetic oligonucleotide
  Antisense strand to SEQ ID NO: 1940792
ucaaacacuggucucagaa

SEQ ID NO: 1940794 - RNA, 19 nt, Artificial Sequence
  Description of Artificial Sequence: Synthetic oligonucleotide
  Sense strand starting at position 3343 of SEQ ID NO: 1880070
uuccaauucuugguuaaag

SEQ ID NO: 1940795 - RNA, 19 nt, Artificial Sequence
  Description of Artificial Sequence: Synthetic oligonucleotide
  Antisense strand to SEQ ID NO: 1940794
cuuuaaccaagaauuggaa

SEQ ID NO: 1940796 - RNA, 19 nt, Artificial Sequence
  Description of Artificial Sequence: Synthetic oligonucleotide
  Sense strand starting at position 3344 of SEQ ID NO: 1880070
uccaauucuugguuaaaga

SEQ ID NO: 1940797 - RNA, 19 nt, Artificial Sequence
  Description of Artificial Sequence: Synthetic oligonucleotide
  Antisense strand to SEQ ID NO: 1940796
ucuuuaaccaagaauugga

SEQ ID NO: 1940798 - RNA, 19 nt, Artificial Sequence
  Description of Artificial Sequence: Synthetic oligonucleotide
  Sense strand starting at position 3623 of SEQ ID NO: 1880070
gagaguucuccuuggagau

SEQ ID NO: 1940799 - RNA, 19 nt, Artificial Sequence
  Description of Artificial Sequence: Synthetic oligonucleotide
  Antisense strand to SEQ ID NO: 1940798
aucuccaaggagaacucuc

SEQ ID NO: 1940800 - RNA, 19 nt, Artificial Sequence
  Description of Artificial Sequence: Synthetic oligonucleotide
  Sense strand starting at position 3624 of SEQ ID NO: 1880070
agaguucuccuuggagauc

SEQ ID NO: 1940801 - RNA, 19 nt, Artificial Sequence
  Description of Artificial Sequence: Synthetic oligonucleotide
  Antisense strand to SEQ ID NO: 1940800
gaucuccaaggagaacucu

SEQ ID NO: 1940802 - RNA, 19 nt, Artificial Sequence
  Description of Artificial Sequence: Synthetic oligonucleotide
  Sense strand starting at position 3627 of SEQ ID NO: 1880070
guucuccuuggagaucaua

SEQ ID NO: 1940803 - RNA, 19 nt, Artificial Sequence
  Description of Artificial Sequence: Synthetic oligonucleotide
  Antisense strand to SEQ ID NO: 1940802
uaugaucuccaaggagaac

SEQ ID NO: 1940804 - RNA, 19 nt, Artificial Sequence
  Description of Artificial Sequence: Synthetic oligonucleotide
  Sense strand starting at position 3886 of SEQ ID NO: 1880070
uggguucuuccugaccaau

SEQ ID NO: 1940805 - RNA, 19 nt, Artificial Sequence
  Description of Artificial Sequence: Synthetic oligonucleotide
  Antisense strand to SEQ ID NO: 1940804
auuggucaggaagaaccca

SEQ ID NO: 1940806 - RNA, 19 nt, Artificial Sequence
  Description of Artificial Sequence: Synthetic oligonucleotide
  Sense strand starting at position 200 of SEQ ID NO: 1880071
ugaugcaaauaaugagaaa

SEQ ID NO: 1940807 - RNA, 19 nt, Artificial Sequence
  Description of Artificial Sequence: Synthetic oligonucleotide
  Antisense strand to SEQ ID NO: 1940806
uuucucauuauuugcauca

SEQ ID NO: 1940808 - RNA, 19 nt, Artificial Sequence
  Description of Artificial Sequence: Synthetic oligonucleotide
  Sense strand starting at position 408 of SEQ ID NO: 1880071
aaugucucagauggacuaa

SEQ ID NO: 1940809 - RNA, 19 nt, Artificial Sequence
  Description of Artificial Sequence: Synthetic oligonucleotide
  Antisense strand to SEQ ID NO: 1940808
uuaguccaucugagacauu

SEQ ID NO: 1940810 - RNA, 19 nt, Artificial Sequence
  Description of Artificial Sequence: Synthetic oligonucleotide
  Sense strand starting at position 853 of SEQ ID NO: 1880071
gagaaaggguauuaaggaa

SEQ ID NO: 1940811 - RNA, 19 nt, Artificial Sequence
  Description of Artificial Sequence: Synthetic oligonucleotide
  Antisense strand to SEQ ID NO: 1940810
uuccuuaauacccuuucuc

SEQ ID NO: 1940812 - RNA, 19 nt, Artificial Sequence
  Description of Artificial Sequence: Synthetic oligonucleotide
  Sense strand starting at position 865 of SEQ ID NO: 1880071
uaaggaauuugucagggua

SEQ ID NO: 1940813 - RNA, 19 nt, Artificial Sequence
  Description of Artificial Sequence: Synthetic oligonucleotide
  Antisense strand to SEQ ID NO: 1940812
uacccugacaaauuccuua

SEQ ID NO: 1940814 - RNA, 19 nt, Artificial Sequence
  Description of Artificial Sequence: Synthetic oligonucleotide
  Sense strand starting at position 867 of SEQ ID NO: 1880071
aggaauuugucaggguacu

SEQ ID NO: 1940815 - RNA, 19 nt, Artificial Sequence
  Description of Artificial Sequence: Synthetic oligonucleotide
  Antisense strand to SEQ ID NO: 1940814
aguacccugacaaauuccu

SEQ ID NO: 1940816 - RNA, 19 nt, Artificial Sequence
  Description of Artificial Sequence: Synthetic oligonucleotide
  Sense strand starting at position 887 of SEQ ID NO: 1880071
acgcgugucagguauaaac

SEQ ID NO: 1940817 - RNA, 19 nt, Artificial Sequence
  Description of Artificial Sequence: Synthetic oligonucleotide
  Antisense strand to SEQ ID NO: 1940816
guuuauaccugacacgcgu

SEQ ID NO: 1940818 - RNA, 19 nt, Artificial Sequence
  Description of Artificial Sequence: Synthetic oligonucleotide
  Sense strand starting at position 1036 of SEQ ID NO: 1880071
cugggugcuaucuagaaag

SEQ ID NO: 1940819 - RNA, 19 nt, Artificial Sequence
  Description of Artificial Sequence: Synthetic oligonucleotide
  Antisense strand to SEQ ID NO: 1940818
cuuucuagauagcacccag

SEQ ID NO: 1940820 - RNA, 19 nt, Artificial Sequence
  Description of Artificial Sequence: Synthetic oligonucleotide
  Sense strand starting at position 1038 of SEQ ID NO: 1880071
gggugcuaucuagaaaguu

SEQ ID NO: 1940821 - RNA, 19 nt, Artificial Sequence
  Description of Artificial Sequence: Synthetic oligonucleotide
  Antisense strand to SEQ ID NO: 1940820
aacuuucuagauagcaccc

SEQ ID NO: 1940822 - RNA, 19 nt, Artificial Sequence
  Description of Artificial Sequence: Synthetic oligonucleotide
  Sense strand starting at position 1047 of SEQ ID NO: 1880071
cuagaaaguugccuggcaa

SEQ ID NO: 1940823 - RNA, 19 nt, Artificial Sequence
  Description of Artificial Sequence: Synthetic oligonucleotide
  Antisense strand to SEQ ID NO: 1940822
uugccaggcaacuuucuag

SEQ ID NO: 1940824 - RNA, 19 nt, Artificial Sequence
  Description of Artificial Sequence: Synthetic oligonucleotide
  Sense strand starting at position 1048 of SEQ ID NO: 1880071
uagaaaguugccuggcaau

SEQ ID NO: 1940825 - RNA, 19 nt, Artificial Sequence
  Description of Artificial Sequence: Synthetic oligonucleotide
  Antisense strand to SEQ ID NO: 1940824
auugccaggcaacuuucua

SEQ ID NO: 1940826 - RNA, 19 nt, Artificial Sequence
  Description of Artificial Sequence: Synthetic oligonucleotide
  Sense strand starting at position 1074 of SEQ ID NO: 1880071
ggaugugggagcgagacau

SEQ ID NO: 1940827 - RNA, 19 nt, Artificial Sequence
  Description of Artificial Sequence: Synthetic oligonucleotide
  Antisense strand to SEQ ID NO: 1940826
augucucgcucccacaucc

SEQ ID NO: 1940828 - RNA, 19 nt, Artificial Sequence
  Description of Artificial Sequence: Synthetic oligonucleotide
  Sense strand starting at position 1078 of SEQ ID NO: 1880071
gugggagcgagacaucaaa

SEQ ID NO: 1940829 - RNA, 19 nt, Artificial Sequence
  Description of Artificial Sequence: Synthetic oligonucleotide
  Antisense strand to SEQ ID NO: 1940828
uuugaugucucgcucccac

SEQ ID NO: 1940830 - RNA, 19 nt, Artificial Sequence
  Description of Artificial Sequence: Synthetic oligonucleotide
  Sense strand starting at position 1139 of SEQ ID NO: 1880071
auaugaacugccggagaua

SEQ ID NO: 1940831 - RNA, 19 nt, Artificial Sequence
  Description of Artificial Sequence: Synthetic oligonucleotide
  Antisense strand to SEQ ID NO: 1940830
uaucuccggcaguucauau

SEQ ID NO: 1940832 - RNA, 19 nt, Artificial Sequence
  Description of Artificial Sequence: Synthetic oligonucleotide
  Sense strand starting at position 1142 of SEQ ID NO: 1880071
ugaacugccggagauagua

SEQ ID NO: 1940833 - RNA, 19 nt, Artificial Sequence
  Description of Artificial Sequence: Synthetic oligonucleotide
  Antisense strand to SEQ ID NO: 1940832
uacuaucuccggcaguuca

SEQ ID NO: 1940834 - RNA, 19 nt, Artificial Sequence
  Description of Artificial Sequence: Synthetic oligonucleotide
  Sense strand starting at position 1169 of SEQ ID NO: 1880071
guaccuggcuccucauaaa

SEQ ID NO: 1940835 - RNA, 19 nt, Artificial Sequence
  Description of Artificial Sequence: Synthetic oligonucleotide
  Antisense strand to SEQ ID NO: 1940834
uuuaugaggagccagguac

SEQ ID NO: 1940836 - RNA, 19 nt, Artificial Sequence
  Description of Artificial Sequence: Synthetic oligonucleotide
  Sense strand starting at position 1317 of SEQ ID NO: 1880071
acgcaaaguaagcguguua

SEQ ID NO: 1940837 - RNA, 19 nt, Artificial Sequence
  Description of Artificial Sequence: Synthetic oligonucleotide
  Antisense strand to SEQ ID NO: 1940836
uaacacgcuuacuuugcgu

SEQ ID NO: 1940838 - RNA, 19 nt, Artificial Sequence
  Description of Artificial Sequence: Synthetic oligonucleotide
  Sense strand starting at position 1375 of SEQ ID NO: 1880071
ccugcuuucuuccuggaga

SEQ ID NO: 1940839 - RNA, 19 nt, Artificial Sequence
  Description of Artificial Sequence: Synthetic oligonucleotide
  Antisense strand to SEQ ID NO: 1940838
ucuccaggaagaaagcagg

SEQ ID NO: 1940840 - RNA, 19 nt, Artificial Sequence
  Description of Artificial Sequence: Synthetic oligonucleotide
  Sense strand starting at position 1376 of SEQ ID NO: 1880071
cugcuuucuuccuggagaa

SEQ ID NO: 1940841 - RNA, 19 nt, Artificial Sequence
  Description of Artificial Sequence: Synthetic oligonucleotide
  Antisense strand to SEQ ID NO: 1940840
uucuccaggaagaaagcag

SEQ ID NO: 1940842 - RNA, 19 nt, Artificial Sequence
  Description of Artificial Sequence: Synthetic oligonucleotide
  Sense strand starting at position 1377 of SEQ ID NO: 1880071
ugcuuucuuccuggagaac

SEQ ID NO: 1940843 - RNA, 19 nt, Artificial Sequence
  Description of Artificial Sequence: Synthetic oligonucleotide
  Antisense strand to SEQ ID NO: 1940842
guucuccaggaagaaagca

SEQ ID NO: 1940844 - RNA, 19 nt, Artificial Sequence
  Description of Artificial Sequence: Synthetic oligonucleotide
  Sense strand starting at position 1378 of SEQ ID NO: 1880071
gcuuucuuccuggagaaca

SEQ ID NO: 1940845 - RNA, 19 nt, Artificial Sequence
  Description of Artificial Sequence: Synthetic oligonucleotide
  Antisense strand to SEQ ID NO: 1940844
uguucuccaggaagaaagc

SEQ ID NO: 1940846 - RNA, 19 nt, Artificial Sequence
  Description of Artificial Sequence: Synthetic oligonucleotide
  Sense strand starting at position 1397 of SEQ ID NO: 1880071
gcacccaucugcguaguuu

SEQ ID NO: 1940847 - RNA, 19 nt, Artificial Sequence
  Description of Artificial Sequence: Synthetic oligonucleotide
  Antisense strand to SEQ ID NO: 1940846
aaacuacgcagaugggugc

SEQ ID NO: 1940848 - RNA, 19 nt, Artificial Sequence
  Description of Artificial Sequence: Synthetic oligonucleotide
  Sense strand starting at position 1698 of SEQ ID NO: 1880071
gcgugcaggcgacauguua

SEQ ID NO: 1940849 - RNA, 19 nt, Artificial Sequence
  Description of Artificial Sequence: Synthetic oligonucleotide
  Antisense strand to SEQ ID NO: 1940848
uaacaugucgccugcacgc

SEQ ID NO: 1940850 - RNA, 19 nt, Artificial Sequence
  Description of Artificial Sequence: Synthetic oligonucleotide
  Sense strand starting at position 1705 of SEQ ID NO: 1880071
ggcgacauguuacuuccua

SEQ ID NO: 1940851 - RNA, 19 nt, Artificial Sequence
  Description of Artificial Sequence: Synthetic oligonucleotide
  Antisense strand to SEQ ID NO: 1940850
uaggaaguaacaugucgcc

SEQ ID NO: 1940852 - RNA, 19 nt, Artificial Sequence
  Description of Artificial Sequence: Synthetic oligonucleotide
  Sense strand starting at position 1706 of SEQ ID NO: 1880071
gcgacauguuacuuccuau

SEQ ID NO: 1940853 - RNA, 19 nt, Artificial Sequence
  Description of Artificial Sequence: Synthetic oligonucleotide
  Antisense strand to SEQ ID NO: 1940852
auaggaaguaacaugucgc

SEQ ID NO: 1940854 - RNA, 19 nt, Artificial Sequence
  Description of Artificial Sequence: Synthetic oligonucleotide
  Sense strand starting at position 1791 of SEQ ID NO: 1880071
agauaugacccuuagcgua

SEQ ID NO: 1940855 - RNA, 19 nt, Artificial Sequence
  Description of Artificial Sequence: Synthetic oligonucleotide
  Antisense strand to SEQ ID NO: 1940854
uacgcuaagggucauaucu

SEQ ID NO: 1940856 - RNA, 19 nt, Artificial Sequence
  Description of Artificial Sequence: Synthetic oligonucleotide
  Sense strand starting at position 2107 of SEQ ID NO: 1880071
cugggauucucucuuccga

SEQ ID NO: 1940857 - RNA, 19 nt, Artificial Sequence
  Description of Artificial Sequence: Synthetic oligonucleotide
  Antisense strand to SEQ ID NO: 1940856
ucggaagagagaaucccag

SEQ ID NO: 1940858 - RNA, 19 nt, Artificial Sequence
  Description of Artificial Sequence: Synthetic oligonucleotide
  Sense strand starting at position 2109 of SEQ ID NO: 1880071
gggauucucucuuccgauc

SEQ ID NO: 1940859 - RNA, 19 nt, Artificial Sequence
  Description of Artificial Sequence: Synthetic oligonucleotide
  Antisense strand to SEQ ID NO: 1940858
gaucggaagagagaauccc

SEQ ID NO: 1940860 - RNA, 19 nt, Artificial Sequence
  Description of Artificial Sequence: Synthetic oligonucleotide
  Sense strand starting at position 2292 of SEQ ID NO: 1880071
ugaccaaucugcugccaga

SEQ ID NO: 1940861 - RNA, 19 nt, Artificial Sequence
  Description of Artificial Sequence: Synthetic oligonucleotide
  Antisense strand to SEQ ID NO: 1940860
ucuggcagcagauugguca

SEQ ID NO: 1940862 - RNA, 19 nt, Artificial Sequence
  Description of Artificial Sequence: Synthetic oligonucleotide
  Sense strand starting at position 2513 of SEQ ID NO: 1880071
acaucuuuaucccugugau

SEQ ID NO: 1940863 - RNA, 19 nt, Artificial Sequence
  Description of Artificial Sequence: Synthetic oligonucleotide
  Antisense strand to SEQ ID NO: 1940862
aucacagggauaaagaugu

SEQ ID NO: 1940864 - RNA, 19 nt, Artificial Sequence
  Description of Artificial Sequence: Synthetic oligonucleotide
  Sense strand starting at position 2516 of SEQ ID NO: 1880071
ucuuuaucccugugaugca

SEQ ID NO: 1940865 - RNA, 19 nt, Artificial Sequence
  Description of Artificial Sequence: Synthetic oligonucleotide
  Antisense strand to SEQ ID NO: 1940864
ugcaucacagggauaaaga

SEQ ID NO: 1940866 - RNA, 19 nt, Artificial Sequence
  Description of Artificial Sequence: Synthetic oligonucleotide
  Sense strand starting at position 2907 of SEQ ID NO: 1880071
uuuaacaaugucuggauca

SEQ ID NO: 1940867 - RNA, 19 nt, Artificial Sequence
  Description of Artificial Sequence: Synthetic oligonucleotide
  Antisense strand to SEQ ID NO: 1940866
ugauccagacauuguuaaa

SEQ ID NO: 1940868 - RNA, 19 nt, Artificial Sequence
  Description of Artificial Sequence: Synthetic oligonucleotide
  Sense strand starting at position 2908 of SEQ ID NO: 1880071
uuaacaaugucuggaucau

SEQ ID NO: 1940869 - RNA, 19 nt, Artificial Sequence
  Description of Artificial Sequence: Synthetic oligonucleotide
  Antisense strand to SEQ ID NO: 1940868
augauccagacauuguuaa

SEQ ID NO: 1940870 - RNA, 19 nt, Artificial Sequence
  Description of Artificial Sequence: Synthetic oligonucleotide
  Sense strand starting at position 3248 of SEQ ID NO: 1880071
agaccaauauuugauguaa

SEQ ID NO: 1940871 - RNA, 19 nt, Artificial Sequence
  Description of Artificial Sequence: Synthetic oligonucleotide
  Antisense strand to SEQ ID NO: 1940870
uuacaucaaauauuggucu

SEQ ID NO: 1940872 - RNA, 19 nt, Artificial Sequence
  Description of Artificial Sequence: Synthetic oligonucleotide
  Sense strand starting at position 3471 of SEQ ID NO: 1880071
uugacuuuguucucgcgau

SEQ ID NO: 1940873 - RNA, 19 nt, Artificial Sequence
  Description of Artificial Sequence: Synthetic oligonucleotide
  Antisense strand to SEQ ID NO: 1940872
aucgcgagaacaaagucaa

SEQ ID NO: 1940874 - RNA, 19 nt, Artificial Sequence
  Description of Artificial Sequence: Synthetic oligonucleotide
  Sense strand starting at position 3607 of SEQ ID NO: 1880071
gagaguucuccuuggagac

SEQ ID NO: 1940875 - RNA, 19 nt, Artificial Sequence
  Description of Artificial Sequence: Synthetic oligonucleotide
  Antisense strand to SEQ ID NO: 1940874
gucuccaaggagaacucuc

SEQ ID NO: 1940876 - RNA, 19 nt, Artificial Sequence
  Description of Artificial Sequence: Synthetic oligonucleotide
  Sense strand starting at position 3609 of SEQ ID NO: 1880071
gaguucuccuuggagacca

SEQ ID NO: 1940877 - RNA, 19 nt, Artificial Sequence
  Description of Artificial Sequence: Synthetic oligonucleotide
  Antisense strand to SEQ ID NO: 1940876
uggucuccaaggagaacuc

SEQ ID NO: 1940878 - RNA, 19 nt, Artificial Sequence
  Description of Artificial Sequence: Synthetic oligonucleotide
  Sense strand starting at position 3625 of SEQ ID NO: 1880071
ccauaaagauucuguggca

SEQ ID NO: 1940879 - RNA, 19 nt, Artificial Sequence
  Description of Artificial Sequence: Synthetic oligonucleotide
  Antisense strand to SEQ ID NO: 1940878
ugccacagaaucuuuaugg

SEQ ID NO: 1940880 - RNA, 19 nt, Artificial Sequence
  Description of Artificial Sequence: Synthetic oligonucleotide
  Sense strand starting at position 3626 of SEQ ID NO: 1880071
cauaaagauucuguggcau

SEQ ID NO: 1940881 - RNA, 19 nt, Artificial Sequence
  Description of Artificial Sequence: Synthetic oligonucleotide
  Antisense strand to SEQ ID NO: 1940880
augccacagaaucuuuaug

SEQ ID NO: 1940882 - RNA, 19 nt, Artificial Sequence
  Description of Artificial Sequence: Synthetic oligonucleotide
  Sense strand starting at position 3865 of SEQ ID NO: 1880071
auggguucuuccugcccaa

SEQ ID NO: 1940883 - RNA, 19 nt, Artificial Sequence
  Description of Artificial Sequence: Synthetic oligonucleotide
  Antisense strand to SEQ ID NO: 1940882
uugggcaggaagaacccau

SEQ ID NO: 1940884 - RNA, 19 nt, Artificial Sequence
  Description of Artificial Sequence: Synthetic oligonucleotide
  Sense strand starting at position 3869 of SEQ ID NO: 1880071
guucuuccugcccaaugua

SEQ ID NO: 1940885 - RNA, 19 nt, Artificial Sequence
  Description of Artificial Sequence: Synthetic oligonucleotide
  Antisense strand to SEQ ID NO: 1940884
uacauugggcaggaagaac

SEQ ID NO: 1940886 - RNA, 19 nt, Artificial Sequence
  Description of Artificial Sequence: Synthetic oligonucleotide
  Sense strand starting at position 72 of SEQ ID NO: 1880072
agagcagauuagcugucau

SEQ ID NO: 1940887 - RNA, 19 nt, Artificial Sequence
  Description of Artificial Sequence: Synthetic oligonucleotide
  Antisense strand to SEQ ID NO: 1940886
augacagcuaaucugcucu

SEQ ID NO: 1940888 - RNA, 19 nt, Artificial Sequence
  Description of Artificial Sequence: Synthetic oligonucleotide
  Sense strand starting at position 104 of SEQ ID NO: 1880072
gggauuggauccuugucaa

SEQ ID NO: 1940889 - RNA, 19 nt, Artificial Sequence
  Description of Artificial Sequence: Synthetic oligonucleotide
  Antisense strand to SEQ ID NO: 1940888
uugacaaggauccaauccc

SEQ ID NO: 1940890 - RNA, 19 nt, Artificial Sequence
  Description of Artificial Sequence: Synthetic oligonucleotide
  Sense strand starting at position 107 of SEQ ID NO: 1880072
auuggauccuugucaacac

SEQ ID NO: 1940891 - RNA, 19 nt, Artificial Sequence
  Description of Artificial Sequence: Synthetic oligonucleotide
  Antisense strand to SEQ ID NO: 1940890
guguugacaaggauccaau

SEQ ID NO: 1940892 - RNA, 19 nt, Artificial Sequence
  Description of Artificial Sequence: Synthetic oligonucleotide
  Sense strand starting at position 245 of SEQ ID NO: 1880072
uagccauacuuagugugua

SEQ ID NO: 1940893 - RNA, 19 nt, Artificial Sequence
  Description of Artificial Sequence: Synthetic oligonucleotide
  Antisense strand to SEQ ID NO: 1940892
uacacacuaaguauggcua

SEQ ID NO: 1940894 - RNA, 19 nt, Artificial Sequence
  Description of Artificial Sequence: Synthetic oligonucleotide
  Sense strand starting at position 355 of SEQ ID NO: 1880072
gccuguuggaugcaggauu

SEQ ID NO: 1940895 - RNA, 19 nt, Artificial Sequence
  Description of Artificial Sequence: Synthetic oligonucleotide
  Antisense strand to SEQ ID NO: 1940894
aauccugcauccaacaggc

SEQ ID NO: 1940896 - RNA, 19 nt, Artificial Sequence
  Description of Artificial Sequence: Synthetic oligonucleotide
  Sense strand starting at position 728 of SEQ ID NO: 1880072
cugggaaaugcuggcacaa

SEQ ID NO: 1940897 - RNA, 19 nt, Artificial Sequence
  Description of Artificial Sequence: Synthetic oligonucleotide
  Antisense strand to SEQ ID NO: 1940896
uugugccagcauuucccag

SEQ ID NO: 1940898 - RNA, 19 nt, Artificial Sequence
  Description of Artificial Sequence: Synthetic oligonucleotide
  Sense strand starting at position 730 of SEQ ID NO: 1880072
gggaaaugcuggcacaaug

SEQ ID NO: 1940899 - RNA, 19 nt, Artificial Sequence
  Description of Artificial Sequence: Synthetic oligonucleotide
  Antisense strand to SEQ ID NO: 1940898
cauugugccagcauuuccc

SEQ ID NO: 1940900 - RNA, 19 nt, Artificial Sequence
  Description of Artificial Sequence: Synthetic oligonucleotide
  Sense strand starting at position 1119 of SEQ ID NO: 1880072
acaagaaguugucauuuaa

SEQ ID NO: 1940901 - RNA, 19 nt, Artificial Sequence
  Description of Artificial Sequence: Synthetic oligonucleotide
  Antisense strand to SEQ ID NO: 1940900
uuaaaugacaacuucuugu

SEQ ID NO: 1940902 - RNA, 19 nt, Artificial Sequence
  Description of Artificial Sequence: Synthetic oligonucleotide
  Sense strand starting at position 1173 of SEQ ID NO: 1880072
aggagauaauagggaaacu

SEQ ID NO: 1940903 - RNA, 19 nt, Artificial Sequence
  Description of Artificial Sequence: Synthetic oligonucleotide
  Antisense strand to SEQ ID NO: 1940902
aguuucccuauuaucuccu

SEQ ID NO: 1940904 - RNA, 19 nt, Artificial Sequence
  Description of Artificial Sequence: Synthetic oligonucleotide
  Sense strand starting at position 1339 of SEQ ID NO: 1880072
acacaaaguaagcguguua

SEQ ID NO: 1940905 - RNA, 19 nt, Artificial Sequence
  Description of Artificial Sequence: Synthetic oligonucleotide
  Antisense strand to SEQ ID NO: 1940904
uaacacgcuuacuuugugu

SEQ ID NO: 1940906 - RNA, 19 nt, Artificial Sequence
  Description of Artificial Sequence: Synthetic oligonucleotide
  Sense strand starting at position 1350 of SEQ ID NO: 1880072
gcguguuaugucugcaaau

SEQ ID NO: 1940907 - RNA, 19 nt, Artificial Sequence
  Description of Artificial Sequence: Synthetic oligonucleotide
  Antisense strand to SEQ ID NO: 1940906
auuugcagacauaacacgc

SEQ ID NO: 1940908 - RNA, 19 nt, Artificial Sequence
  Description of Artificial Sequence: Synthetic oligonucleotide
  Sense strand starting at position 1351 of SEQ ID NO: 1880072
cguguuaugucugcaaaug

SEQ ID NO: 1940909 - RNA, 19 nt, Artificial Sequence
  Description of Artificial Sequence: Synthetic oligonucleotide
  Antisense strand to SEQ ID NO: 1940908
cauuugcagacauaacacg

SEQ ID NO: 1940910 - RNA, 19 nt, Artificial Sequence
  Description of Artificial Sequence: Synthetic oligonucleotide
  Sense strand starting at position 1352 of SEQ ID NO: 1880072
guguuaugucugcaaauga

SEQ ID NO: 1940911 - RNA, 19 nt, Artificial Sequence
  Description of Artificial Sequence: Synthetic oligonucleotide
  Antisense strand to SEQ ID NO: 1940910
ucauuugcagacauaacac

SEQ ID NO: 1940912 - RNA, 19 nt, Artificial Sequence
  Description of Artificial Sequence: Synthetic oligonucleotide
  Sense strand starting at position 1719 of SEQ ID NO: 1880072
gcgacaucuuaauuccuau

SEQ ID NO: 1940913 - RNA, 19 nt, Artificial Sequence
  Description of Artificial Sequence: Synthetic oligonucleotide
  Antisense strand to SEQ ID NO: 1940912
auaggaauuaagaugucgc

SEQ ID NO: 1940914 - RNA, 19 nt, Artificial Sequence
  Description of Artificial Sequence: Synthetic oligonucleotide
  Sense strand starting at position 1741 of SEQ ID NO: 1880072
ccagccuuccacuguaaga

SEQ ID NO: 1940915 - RNA, 19 nt, Artificial Sequence
  Description of Artificial Sequence: Synthetic oligonucleotide
  Antisense strand to SEQ ID NO: 1940914
ucuuacaguggaaggcugg

SEQ ID NO: 1940916 - RNA, 19 nt, Artificial Sequence
  Description of Artificial Sequence: Synthetic oligonucleotide
  Sense strand starting at position 1743 of SEQ ID NO: 1880072
agccuuccacuguaagaau

SEQ ID NO: 1940917 - RNA, 19 nt, Artificial Sequence
  Description of Artificial Sequence: Synthetic oligonucleotide
  Antisense strand to SEQ ID NO: 1940916
auucuuacaguggaaggcu

SEQ ID NO: 1940918 - RNA, 19 nt, Artificial Sequence
  Description of Artificial Sequence: Synthetic oligonucleotide
  Sense strand starting at position 1805 of SEQ ID NO: 1880072
uagaguacagcguauucuu

SEQ ID NO: 1940919 - RNA, 19 nt, Artificial Sequence
  Description of Artificial Sequence: Synthetic oligonucleotide
  Antisense strand to SEQ ID NO: 1940918
aagaauacgcuguacucua

SEQ ID NO: 1940920 - RNA, 19 nt, Artificial Sequence
  Description of Artificial Sequence: Synthetic oligonucleotide
  Sense strand starting at position 1808 of SEQ ID NO: 1880072
aguacagcguauucuugaa

SEQ ID NO: 1940921 - RNA, 19 nt, Artificial Sequence
  Description of Artificial Sequence: Synthetic oligonucleotide
  Antisense strand to SEQ ID NO: 1940920
uucaagaauacgcuguacu

SEQ ID NO: 1940922 - RNA, 19 nt, Artificial Sequence
  Description of Artificial Sequence: Synthetic oligonucleotide
  Sense strand starting at position 1812 of SEQ ID NO: 1880072
cagcguauucuugaaacua

SEQ ID NO: 1940923 - RNA, 19 nt, Artificial Sequence
  Description of Artificial Sequence: Synthetic oligonucleotide
  Antisense strand to SEQ ID NO: 1940922
uaguuucaagaauacgcug

SEQ ID NO: 1940924 - RNA, 19 nt, Artificial Sequence
  Description of Artificial Sequence: Synthetic oligonucleotide
  Sense strand starting at position 1879 of SEQ ID NO: 1880072
gcaaucgaguuucccacau

SEQ ID NO: 1940925 - RNA, 19 nt, Artificial Sequence
  Description of Artificial Sequence: Synthetic oligonucleotide
  Antisense strand to SEQ ID NO: 1940924
augugggaaacucgauugc

SEQ ID NO: 1940926 - RNA, 19 nt, Artificial Sequence
  Description of Artificial Sequence: Synthetic oligonucleotide
  Sense strand starting at position 2380 of SEQ ID NO: 1880072
agccuaucuugugaagcaa

SEQ ID NO: 1940927 - RNA, 19 nt, Artificial Sequence
  Description of Artificial Sequence: Synthetic oligonucleotide
  Antisense strand to SEQ ID NO: 1940926
uugcuucacaagauaggcu

SEQ ID NO: 1940928 - RNA, 19 nt, Artificial Sequence
  Description of Artificial Sequence: Synthetic oligonucleotide
  Sense strand starting at position 2396 of SEQ ID NO: 1880072
caaacuuucgguggccaga

SEQ ID NO: 1940929 - RNA, 19 nt, Artificial Sequence
  Description of Artificial Sequence: Synthetic oligonucleotide
  Antisense strand to SEQ ID NO: 1940928
ucuggccaccgaaaguuug

SEQ ID NO: 1940930 - RNA, 19 nt, Artificial Sequence
  Description of Artificial Sequence: Synthetic oligonucleotide
  Sense strand starting at position 2580 of SEQ ID NO: 1880072
uaaagaggcuucucagaug

SEQ ID NO: 1940931 - RNA, 19 nt, Artificial Sequence
  Description of Artificial Sequence: Synthetic oligonucleotide
  Antisense strand to SEQ ID NO: 1940930
caucugagaagccucuuua

SEQ ID NO: 1940932 - RNA, 19 nt, Artificial Sequence
  Description of Artificial Sequence: Synthetic oligonucleotide
  Sense strand starting at position 2651 of SEQ ID NO: 1880072
aguugucaaguuuaaugaa

SEQ ID NO: 1940933 - RNA, 19 nt, Artificial Sequence
  Description of Artificial Sequence: Synthetic oligonucleotide
  Antisense strand to SEQ ID NO: 1940932
uucauuaaacuugacaacu

SEQ ID NO: 1940934 - RNA, 19 nt, Artificial Sequence
  Description of Artificial Sequence: Synthetic oligonucleotide
  Sense strand starting at position 2654 of SEQ ID NO: 1880072
ugucaaguuuaaugaaucu

SEQ ID NO: 1940935 - RNA, 19 nt, Artificial Sequence
  Description of Artificial Sequence: Synthetic oligonucleotide
  Antisense strand to SEQ ID NO: 1940934
agauucauuaaacuugaca

SEQ ID NO: 1940936 - RNA, 19 nt, Artificial Sequence
  Description of Artificial Sequence: Synthetic oligonucleotide
  Sense strand starting at position 2812 of SEQ ID NO: 1880072
uauugcuuaccucguguua

SEQ ID NO: 1940937 - RNA, 19 nt, Artificial Sequence
  Description of Artificial Sequence: Synthetic oligonucleotide
  Antisense strand to SEQ ID NO: 1940936
uaacacgagguaagcaaua

SEQ ID NO: 1940938 - RNA, 19 nt, Artificial Sequence
  Description of Artificial Sequence: Synthetic oligonucleotide
  Sense strand starting at position 2815 of SEQ ID NO: 1880072
ugcuuaccucguguuaguu

SEQ ID NO: 1940939 - RNA, 19 nt, Artificial Sequence
  Description of Artificial Sequence: Synthetic oligonucleotide
  Antisense strand to SEQ ID NO: 1940938
aacuaacacgagguaagca

SEQ ID NO: 1940940 - RNA, 19 nt, Artificial Sequence
  Description of Artificial Sequence: Synthetic oligonucleotide
  Sense strand starting at position 2816 of SEQ ID NO: 1880072
gcuuaccucguguuaguuu

SEQ ID NO: 1940941 - RNA, 19 nt, Artificial Sequence
  Description of Artificial Sequence: Synthetic oligonucleotide
  Antisense strand to SEQ ID NO: 1940940
aaacuaacacgagguaagc

SEQ ID NO: 1940942 - RNA, 19 nt, Artificial Sequence
  Description of Artificial Sequence: Synthetic oligonucleotide
  Sense strand starting at position 2887 of SEQ ID NO: 1880072
ugggauacaucuuauuugu

SEQ ID NO: 1940943 - RNA, 19 nt, Artificial Sequence
  Description of Artificial Sequence: Synthetic oligonucleotide
  Antisense strand to SEQ ID NO: 1940942
acaaauaagauguauccca

SEQ ID NO: 1940944 - RNA, 19 nt, Artificial Sequence
  Description of Artificial Sequence: Synthetic oligonucleotide
  Sense strand starting at position 2893 of SEQ ID NO: 1880072
acaucuuauuugugaugcu

SEQ ID NO: 1940945 - RNA, 19 nt, Artificial Sequence
  Description of Artificial Sequence: Synthetic oligonucleotide
  Antisense strand to SEQ ID NO: 1940944
agcaucacaaauaagaugu

SEQ ID NO: 1940946 - RNA, 19 nt, Artificial Sequence
  Description of Artificial Sequence: Synthetic oligonucleotide
  Sense strand starting at position 2896 of SEQ ID NO: 1880072
ucuuauuugugaugcuuaa

SEQ ID NO: 1940947 - RNA, 19 nt, Artificial Sequence
  Description of Artificial Sequence: Synthetic oligonucleotide
  Antisense strand to SEQ ID NO: 1940946
uuaagcaucacaaauaaga

SEQ ID NO: 1940948 - RNA, 19 nt, Artificial Sequence
  Description of Artificial Sequence: Synthetic oligonucleotide
  Sense strand starting at position 2903 of SEQ ID NO: 1880072
ugugaugcuuaacaaaugu

SEQ ID NO: 1940949 - RNA, 19 nt, Artificial Sequence
  Description of Artificial Sequence: Synthetic oligonucleotide
  Antisense strand to SEQ ID NO: 1940948
acauuuguuaagcaucaca

SEQ ID NO: 1940950 - RNA, 19 nt, Artificial Sequence
  Description of Artificial Sequence: Synthetic oligonucleotide
  Sense strand starting at position 2941 of SEQ ID NO: 1880072
augggauuauaaugcagga

SEQ ID NO: 1940951 - RNA, 19 nt, Artificial Sequence
  Description of Artificial Sequence: Synthetic oligonucleotide
  Antisense strand to SEQ ID NO: 1940950
uccugcauuauaaucccau

SEQ ID NO: 1940952 - RNA, 19 nt, Artificial Sequence
  Description of Artificial Sequence: Synthetic oligonucleotide
  Sense strand starting at position 3258 of SEQ ID NO: 1880072
agaccaauauuugauguaa

SEQ ID NO: 1940953 - RNA, 19 nt, Artificial Sequence
  Description of Artificial Sequence: Synthetic oligonucleotide
  Antisense strand to SEQ ID NO: 1940952
uuacaucaaauauuggucu

SEQ ID NO: 1940954 - RNA, 19 nt, Artificial Sequence
  Description of Artificial Sequence: Synthetic oligonucleotide
  Sense strand starting at position 3481 of SEQ ID NO: 1880072
uugaccucauucuugagau

SEQ ID NO: 1940955 - RNA, 19 nt, Artificial Sequence
  Description of Artificial Sequence: Synthetic oligonucleotide
  Antisense strand to SEQ ID NO: 1940954
aucucaagaaugaggucaa

SEQ ID NO: 1940956 - RNA, 19 nt, Artificial Sequence
  Description of Artificial Sequence: Synthetic oligonucleotide
  Sense strand starting at position 3482 of SEQ ID NO: 1880072
ugaccucauucuugagaug

SEQ ID NO: 1940957 - RNA, 19 nt, Artificial Sequence
  Description of Artificial Sequence: Synthetic oligonucleotide
  Antisense strand to SEQ ID NO: 1940956
caucucaagaaugagguca

SEQ ID NO: 1940958 - RNA, 19 nt, Artificial Sequence
  Description of Artificial Sequence: Synthetic oligonucleotide
  Sense strand starting at position 3488 of SEQ ID NO: 1880072
cauucuugagaugguguca

SEQ ID NO: 1940959 - RNA, 19 nt, Artificial Sequence
  Description of Artificial Sequence: Synthetic oligonucleotide
  Antisense strand to SEQ ID NO: 1940958
ugacaccaucucaagaaug

SEQ ID NO: 1940960 - RNA, 19 nt, Artificial Sequence
  Description of Artificial Sequence: Synthetic oligonucleotide
  Sense strand starting at position 3618 of SEQ ID NO: 1880072
agaauucuucuuuggagac

SEQ ID NO: 1940961 - RNA, 19 nt, Artificial Sequence
  Description of Artificial Sequence: Synthetic oligonucleotide
  Antisense strand to SEQ ID NO: 1940960
gucuccaaagaagaauucu

SEQ ID NO: 1940962 - RNA, 19 nt, Artificial Sequence
  Description of Artificial Sequence: Synthetic oligonucleotide
  Sense strand starting at position 3708 of SEQ ID NO: 1880072
gggauuaggugacagcgua

SEQ ID NO: 1940963 - RNA, 19 nt, Artificial Sequence
  Description of Artificial Sequence: Synthetic oligonucleotide
  Antisense strand to SEQ ID NO: 1940962
uacgcugucaccuaauccc

SEQ ID NO: 1940964 - RNA, 19 nt, Artificial Sequence
  Description of Artificial Sequence: Synthetic oligonucleotide
  Sense strand starting at position 3727 of SEQ ID NO: 1880072
guaacugcugaaugugaaa

SEQ ID NO: 1940965 - RNA, 19 nt, Artificial Sequence
  Description of Artificial Sequence: Synthetic oligonucleotide
  Antisense strand to SEQ ID NO: 1940964
uuucacauucagcaguuac

SEQ ID NO: 1940966 - RNA, 19 nt, Artificial Sequence
  Description of Artificial Sequence: Synthetic oligonucleotide
  Sense strand starting at position 48 of SEQ ID NO: 1880073
gccuguuggauacaggauu

SEQ ID NO: 1940967 - RNA, 19 nt, Artificial Sequence
  Description of Artificial Sequence: Synthetic oligonucleotide
  Antisense strand to SEQ ID NO: 1940966
aauccuguauccaacaggc

SEQ ID NO: 1940968 - RNA, 19 nt, Artificial Sequence
  Description of Artificial Sequence: Synthetic oligonucleotide
  Sense strand starting at position 3224 of SEQ ID NO: 1880073
uggugcuggauuugaugua

SEQ ID NO: 1940969 - RNA, 19 nt, Artificial Sequence
  Description of Artificial Sequence: Synthetic oligonucleotide
  Antisense strand to SEQ ID NO: 1940968
uacaucaaauccagcacca

SEQ ID NO: 1940970 - RNA, 19 nt, Artificial Sequence
  Description of Artificial Sequence: Synthetic oligonucleotide
  Sense strand starting at position 3248 of SEQ ID NO: 1880073
uaccgaggcccucauuaua

SEQ ID NO: 1940971 - RNA, 19 nt, Artificial Sequence
  Description of Artificial Sequence: Synthetic oligonucleotide
  Antisense strand to SEQ ID NO: 1940970
uauaaugagggccucggua

SEQ ID NO: 1940972 - RNA, 19 nt, Artificial Sequence
  Description of Artificial Sequence: Synthetic oligonucleotide
  Sense strand starting at position 3393 of SEQ ID NO: 1880073
cuauuccacuccuugguua

SEQ ID NO: 1940973 - RNA, 19 nt, Artificial Sequence
  Description of Artificial Sequence: Synthetic oligonucleotide
  Antisense strand to SEQ ID NO: 1940972
uaaccaaggaguggaauag

SEQ ID NO: 1940974 - RNA, 19 nt, Artificial Sequence
  Description of Artificial Sequence: Synthetic oligonucleotide
  Sense strand starting at position 3395 of SEQ ID NO: 1880073
auuccacuccuugguuaga

SEQ ID NO: 1940975 - RNA, 19 nt, Artificial Sequence
  Description of Artificial Sequence: Synthetic oligonucleotide
  Antisense strand to SEQ ID NO: 1940974
ucuaaccaaggaguggaau

SEQ ID NO: 1940976 - RNA, 19 nt, Artificial Sequence
  Description of Artificial Sequence: Synthetic oligonucleotide
  Sense strand starting at position 3397 of SEQ ID NO: 1880073
uccacuccuugguuagaga

SEQ ID NO: 1940977 - RNA, 19 nt, Artificial Sequence
  Description of Artificial Sequence: Synthetic oligonucleotide
  Antisense strand to SEQ ID NO: 1940976
ucucuaaccaaggagugga

SEQ ID NO: 1940978 - RNA, 19 nt, Artificial Sequence
  Description of Artificial Sequence: Synthetic oligonucleotide
  Sense strand starting at position 3444 of SEQ ID NO: 1880073
auuguucucugucggguau

SEQ ID NO: 1940979 - RNA, 19 nt, Artificial Sequence
  Description of Artificial Sequence: Synthetic oligonucleotide
  Antisense strand to SEQ ID NO: 1940978
auacccgacagagaacaau

SEQ ID NO: 1940980 - RNA, 19 nt, Artificial Sequence
  Description of Artificial Sequence: Synthetic oligonucleotide
  Sense strand starting at position 3540 of SEQ ID NO: 1880073
uugacuuuguucuugagau

SEQ ID NO: 1940981 - RNA, 19 nt, Artificial Sequence
  Description of Artificial Sequence: Synthetic oligonucleotide
  Antisense strand to SEQ ID NO: 1940980
aucucaagaacaaagucaa

SEQ ID NO: 1940982 - RNA, 19 nt, Artificial Sequence
  Description of Artificial Sequence: Synthetic oligonucleotide
  Sense strand starting at position 3541 of SEQ ID NO: 1880073
ugacuuuguucuugagaug

SEQ ID NO: 1940983 - RNA, 19 nt, Artificial Sequence
  Description of Artificial Sequence: Synthetic oligonucleotide
  Antisense strand to SEQ ID NO: 1940982
caucucaagaacaaaguca

SEQ ID NO: 1940984 - RNA, 19 nt, Artificial Sequence
  Description of Artificial Sequence: Synthetic oligonucleotide
  Sense strand starting at position 3676 of SEQ ID NO: 1880073
gagaguucuccuuggagac

SEQ ID NO: 1940985 - RNA, 19 nt, Artificial Sequence
  Description of Artificial Sequence: Synthetic oligonucleotide
  Antisense strand to SEQ ID NO: 1940984
gucuccaaggagaacucuc

SEQ ID NO: 1940986 - RNA, 19 nt, Artificial Sequence
  Description of Artificial Sequence: Synthetic oligonucleotide
  Sense strand starting at position 3678 of SEQ ID NO: 1880073
gaguucuccuuggagacca

SEQ ID NO: 1940987 - RNA, 19 nt, Artificial Sequence
  Description of Artificial Sequence: Synthetic oligonucleotide
  Antisense strand to SEQ ID NO: 1940986
uggucuccaaggagaacuc

SEQ ID NO: 1940988 - RNA, 19 nt, Artificial Sequence
  Description of Artificial Sequence: Synthetic oligonucleotide
  Sense strand starting at position 3766 of SEQ ID NO: 1880073
gagauuaggugacagugua

SEQ ID NO: 1940989 - RNA, 19 nt, Artificial Sequence
  Description of Artificial Sequence: Synthetic oligonucleotide
  Antisense strand to SEQ ID NO: 1940988
uacacugucaccuaaucuc

SEQ ID NO: 1940990 - RNA, 19 nt, Artificial Sequence
  Description of Artificial Sequence: Synthetic oligonucleotide
  Sense strand starting at position 3774 of SEQ ID NO: 1880073
gugacaguguaguaauaac

SEQ ID NO: 1940991 - RNA, 19 nt, Artificial Sequence
  Description of Artificial Sequence: Synthetic oligonucleotide
  Antisense strand to SEQ ID NO: 1940990
guuauuacuacacugucac

SEQ ID NO: 1940992 - RNA, 19 nt, Artificial Sequence
  Description of Artificial Sequence: Synthetic oligonucleotide
  Sense strand starting at position 3784 of SEQ ID NO: 1880073
aguaauaacugcugaauac

SEQ ID NO: 1940993 - RNA, 19 nt, Artificial Sequence
  Description of Artificial Sequence: Synthetic oligonucleotide
  Antisense strand to SEQ ID NO: 1940992
guauucagcaguuauuacu

SEQ ID NO: 1940994 - RNA, 19 nt, Artificial Sequence
  Description of Artificial Sequence: Synthetic oligonucleotide
  Sense strand starting at position 3785 of SEQ ID NO: 1880073
guaauaacugcugaauacu

SEQ ID NO: 1940995 - RNA, 19 nt, Artificial Sequence
  Description of Artificial Sequence: Synthetic oligonucleotide
  Antisense strand to SEQ ID NO: 1940994
aguauucagcaguuauuac

SEQ ID NO: 1940996 - RNA, 19 nt, Artificial Sequence
  Description of Artificial Sequence: Synthetic oligonucleotide
  Sense strand starting at position 382 of SEQ ID NO: 1880074
accucaguugaucagaagu

SEQ ID NO: 1940997 - RNA, 19 nt, Artificial Sequence
  Description of Artificial Sequence: Synthetic oligonucleotide
  Antisense strand to SEQ ID NO: 1940996
acuucugaucaacugaggu

SEQ ID NO: 1940998 - RNA, 19 nt, Artificial Sequence
  Description of Artificial Sequence: Synthetic oligonucleotide
  Sense strand starting at position 877 of SEQ ID NO: 1880074
uaaggaauuugccagggua

SEQ ID NO: 1940999 - RNA, 19 nt, Artificial Sequence
  Description of Artificial Sequence: Synthetic oligonucleotide
  Antisense strand to SEQ ID NO: 1940998
uacccuggcaaauuccuua

SEQ ID NO: 1941000 - RNA, 19 nt, Artificial Sequence
  Description of Artificial Sequence: Synthetic oligonucleotide
  Sense strand starting at position 995 of SEQ ID NO: 1880074
ggacacuggcgccagaaau

SEQ ID NO: 1941001 - RNA, 19 nt, Artificial Sequence
  Description of Artificial Sequence: Synthetic oligonucleotide
  Antisense strand to SEQ ID NO: 1941000
auuucuggcgccagugucc

SEQ ID NO: 1941002 - RNA, 19 nt, Artificial Sequence
  Description of Artificial Sequence: Synthetic oligonucleotide
  Sense strand starting at position 1050 of SEQ ID NO: 1880074
gggugcuaucuagaaagcu

SEQ ID NO: 1941003 - RNA, 19 nt, Artificial Sequence
  Description of Artificial Sequence: Synthetic oligonucleotide
  Antisense strand to SEQ ID NO: 1941002
agcuuucuagauagcaccc

SEQ ID NO: 1941004 - RNA, 19 nt, Artificial Sequence
  Description of Artificial Sequence: Synthetic oligonucleotide
  Sense strand starting at position 1060 of SEQ ID NO: 1880074
uagaaagcugccuggcaau

SEQ ID NO: 1941005 - RNA, 19 nt, Artificial Sequence
  Description of Artificial Sequence: Synthetic oligonucleotide
  Antisense strand to SEQ ID NO: 1941004
auugccaggcagcuuucua

SEQ ID NO: 1941006 - RNA, 19 nt, Artificial Sequence
  Description of Artificial Sequence: Synthetic oligonucleotide
  Sense strand starting at position 1090 of SEQ ID NO: 1880074
gcggaagcgagacaucaaa

SEQ ID NO: 1941007 - RNA, 19 nt, Artificial Sequence
  Description of Artificial Sequence: Synthetic oligonucleotide
  Antisense strand to SEQ ID NO: 1941006
uuugaugucucgcuuccgc

SEQ ID NO: 1941008 - RNA, 19 nt, Artificial Sequence
  Description of Artificial Sequence: Synthetic oligonucleotide
  Sense strand starting at position 1181 of SEQ ID NO: 1880074
ggacccgucuccucauaaa

SEQ ID NO: 1941009 - RNA, 19 nt, Artificial Sequence
  Description of Artificial Sequence: Synthetic oligonucleotide
  Antisense strand to SEQ ID NO: 1941008
uuuaugaggagacgggucc

SEQ ID NO: 1941010 - RNA, 19 nt, Artificial Sequence
  Description of Artificial Sequence: Synthetic oligonucleotide
  Sense strand starting at position 1221 of SEQ ID NO: 1880074
ggaggaucgcagcgcauuu

SEQ ID NO: 1941011 - RNA, 19 nt, Artificial Sequence
  Description of Artificial Sequence: Synthetic oligonucleotide
  Antisense strand to SEQ ID NO: 1941010
aaaugcgcugcgauccucc

SEQ ID NO: 1941012 - RNA, 19 nt, Artificial Sequence
  Description of Artificial Sequence: Synthetic oligonucleotide
  Sense strand starting at position 1232 of SEQ ID NO: 1880074
gcgcauuucggccaagaca

SEQ ID NO: 1941013 - RNA, 19 nt, Artificial Sequence
  Description of Artificial Sequence: Synthetic oligonucleotide
  Antisense strand to SEQ ID NO: 1941012
ugucuuggccgaaaugcgc

SEQ ID NO: 1941014 - RNA, 19 nt, Artificial Sequence
  Description of Artificial Sequence: Synthetic oligonucleotide
  Sense strand starting at position 1282 of SEQ ID NO: 1880074
gaugaauugcguuaggaca

SEQ ID NO: 1941015 - RNA, 19 nt, Artificial Sequence
  Description of Artificial Sequence: Synthetic oligonucleotide
  Antisense strand to SEQ ID NO: 1941014
uguccuaacgcaauucauc

SEQ ID NO: 1941016 - RNA, 19 nt, Artificial Sequence
  Description of Artificial Sequence: Synthetic oligonucleotide
  Sense strand starting at position 1520 of SEQ ID NO: 1880074
gugaaaugugacuggaggu

SEQ ID NO: 1941017 - RNA, 19 nt, Artificial Sequence
  Description of Artificial Sequence: Synthetic oligonucleotide
  Antisense strand to SEQ ID NO: 1941016
accuccagucacauuucac

SEQ ID NO: 1941018 - RNA, 19 nt, Artificial Sequence
  Description of Artificial Sequence: Synthetic oligonucleotide
  Sense strand starting at position 1658 of SEQ ID NO: 1880074
gcgcuagcuagcuugugua

SEQ ID NO: 1941019 - RNA, 19 nt, Artificial Sequence
  Description of Artificial Sequence: Synthetic oligonucleotide
  Antisense strand to SEQ ID NO: 1941018
uacacaagcuagcuagcgc

SEQ ID NO: 1941020 - RNA, 19 nt, Artificial Sequence
  Description of Artificial Sequence: Synthetic oligonucleotide
  Sense strand starting at position 1660 of SEQ ID NO: 1880074
gcuagcuagcuuguguaaa

SEQ ID NO: 1941021 - RNA, 19 nt, Artificial Sequence
  Description of Artificial Sequence: Synthetic oligonucleotide
  Antisense strand to SEQ ID NO: 1941020
uuuacacaagcuagcuagc

SEQ ID NO: 1941022 - RNA, 19 nt, Artificial Sequence
  Description of Artificial Sequence: Synthetic oligonucleotide
  Sense strand starting at position 1715 of SEQ ID NO: 1880074
agcgacauauuacuacuau

SEQ ID NO: 1941023 - RNA, 19 nt, Artificial Sequence
  Description of Artificial Sequence: Synthetic oligonucleotide
  Antisense strand to SEQ ID NO: 1941022
auaguaguaauaugucgcu

SEQ ID NO: 1941024 - RNA, 19 nt, Artificial Sequence
  Description of Artificial Sequence: Synthetic oligonucleotide
  Sense strand starting at position 1748 of SEQ ID NO: 1880074
cugugagagaaacgauuaa

SEQ ID NO: 1941025 - RNA, 19 nt, Artificial Sequence
  Description of Artificial Sequence: Synthetic oligonucleotide
  Antisense strand to SEQ ID NO: 1941024
uuaaucguuucucucacag

SEQ ID NO: 1941026 - RNA, 19 nt, Artificial Sequence
  Description of Artificial Sequence: Synthetic oligonucleotide
  Sense strand starting at position 1755 of SEQ ID NO: 1880074
agaaacgauuaagaguaaa

SEQ ID NO: 1941027 - RNA, 19 nt, Artificial Sequence
  Description of Artificial Sequence: Synthetic oligonucleotide
  Antisense strand to SEQ ID NO: 1941026
uuuacucuuaaucguuucu

SEQ ID NO: 1941028 - RNA, 19 nt, Artificial Sequence
  Description of Artificial Sequence: Synthetic oligonucleotide
  Sense strand starting at position 1811 of SEQ ID NO: 1880074
gcagacuguucuuuaaacu

SEQ ID NO: 1941029 - RNA, 19 nt, Artificial Sequence
  Description of Artificial Sequence: Synthetic oligonucleotide
  Antisense strand to SEQ ID NO: 1941028
aguuuaaagaacagucugc

SEQ ID NO: 1941030 - RNA, 19 nt, Artificial Sequence
  Description of Artificial Sequence: Synthetic oligonucleotide
  Sense strand starting at position 2367 of SEQ ID NO: 1880074
gcaucuguucucgcccgaa

SEQ ID NO: 1941031 - RNA, 19 nt, Artificial Sequence
  Description of Artificial Sequence: Synthetic oligonucleotide
  Antisense strand to SEQ ID NO: 1941030
uucgggcgagaacagaugc

SEQ ID NO: 1941032 - RNA, 19 nt, Artificial Sequence
  Description of Artificial Sequence: Synthetic oligonucleotide
  Sense strand starting at position 2522 of SEQ ID NO: 1880074
uccuuauccuugucaugua

SEQ ID NO: 1941033 - RNA, 19 nt, Artificial Sequence
  Description of Artificial Sequence: Synthetic oligonucleotide
  Antisense strand to SEQ ID NO: 1941032
uacaugacaaggauaagga

SEQ ID NO: 1941034 - RNA, 19 nt, Artificial Sequence
  Description of Artificial Sequence: Synthetic oligonucleotide
  Sense strand starting at position 2540 of SEQ ID NO: 1880074
agcauuccgcuugaaauug

SEQ ID NO: 1941035 - RNA, 19 nt, Artificial Sequence
  Description of Artificial Sequence: Synthetic oligonucleotide
  Antisense strand to SEQ ID NO: 1941034
caauuucaagcggaaugcu

SEQ ID NO: 1941036 - RNA, 19 nt, Artificial Sequence
  Description of Artificial Sequence: Synthetic oligonucleotide
  Sense strand starting at position 2599 of SEQ ID NO: 1880074
gaaagaggcuucucagaug

SEQ ID NO: 1941037 - RNA, 19 nt, Artificial Sequence
  Description of Artificial Sequence: Synthetic oligonucleotide
  Antisense strand to SEQ ID NO: 1941036
caucugagaagccucuuuc

SEQ ID NO: 1941038 - RNA, 19 nt, Artificial Sequence
  Description of Artificial Sequence: Synthetic oligonucleotide
  Sense strand starting at position 2607 of SEQ ID NO: 1880074
cuucucagaugacugcaaa

SEQ ID NO: 1941039 - RNA, 19 nt, Artificial Sequence
  Description of Artificial Sequence: Synthetic oligonucleotide
  Antisense strand to SEQ ID NO: 1941038
uuugcagucaucugagaag

SEQ ID NO: 1941040 - RNA, 19 nt, Artificial Sequence
  Description of Artificial Sequence: Synthetic oligonucleotide
  Sense strand starting at position 2857 of SEQ ID NO: 1880074
uagugcuuaccucacguua

SEQ ID NO: 1941041 - RNA, 19 nt, Artificial Sequence
  Description of Artificial Sequence: Synthetic oligonucleotide
  Antisense strand to SEQ ID NO: 1941040
uaacgugagguaagcacua

SEQ ID NO: 1941042 - RNA, 19 nt, Artificial Sequence
  Description of Artificial Sequence: Synthetic oligonucleotide
  Sense strand starting at position 2923 of SEQ ID NO: 1880074
acaaauaccugggauacau

SEQ ID NO: 1941043 - RNA, 19 nt, Artificial Sequence
  Description of Artificial Sequence: Synthetic oligonucleotide
  Antisense strand to SEQ ID NO: 1941042
auguaucccagguauuugu

SEQ ID NO: 1941044 - RNA, 19 nt, Artificial Sequence
  Description of Artificial Sequence: Synthetic oligonucleotide
  Sense strand starting at position 2932 of SEQ ID NO: 1880074
ugggauacaucuuauuuga

SEQ ID NO: 1941045 - RNA, 19 nt, Artificial Sequence
  Description of Artificial Sequence: Synthetic oligonucleotide
  Antisense strand to SEQ ID NO: 1941044
ucaaauaagauguauccca

SEQ ID NO: 1941046 - RNA, 19 nt, Artificial Sequence
  Description of Artificial Sequence: Synthetic oligonucleotide
  Sense strand starting at position 2990 of SEQ ID NO: 1880074
gauuauaacgcaggaaaca

SEQ ID NO: 1941047 - RNA, 19 nt, Artificial Sequence
  Description of Artificial Sequence: Synthetic oligonucleotide
  Antisense strand to SEQ ID NO: 1941046
uguuuccugcguuauaauc

SEQ ID NO: 1941048 - RNA, 19 nt, Artificial Sequence
  Description of Artificial Sequence: Synthetic oligonucleotide
  Sense strand starting at position 3009 of SEQ ID NO: 1880074
cugugaaguaaguaaaguu

SEQ ID NO: 1941049 - RNA, 19 nt, Artificial Sequence
  Description of Artificial Sequence: Synthetic oligonucleotide
  Antisense strand to SEQ ID NO: 1941048
aacuuuacuuacuucacag

SEQ ID NO: 1941050 - RNA, 19 nt, Artificial Sequence
  Description of Artificial Sequence: Synthetic oligonucleotide
  Sense strand starting at position 3512 of SEQ ID NO: 1880074
gcugacucauccuugacuu

SEQ ID NO: 1941051 - RNA, 19 nt, Artificial Sequence
  Description of Artificial Sequence: Synthetic oligonucleotide
  Antisense strand to SEQ ID NO: 1941050
aagucaaggaugagucagc

SEQ ID NO: 1941052 - RNA, 19 nt, Artificial Sequence
  Description of Artificial Sequence: Synthetic oligonucleotide
  Sense strand starting at position 3524 of SEQ ID NO: 1880074
uugacuugguucuccagau

SEQ ID NO: 1941053 - RNA, 19 nt, Artificial Sequence
  Description of Artificial Sequence: Synthetic oligonucleotide
  Antisense strand to SEQ ID NO: 1941052
aucuggagaaccaagucaa

SEQ ID NO: 1941054 - RNA, 19 nt, Artificial Sequence
  Description of Artificial Sequence: Synthetic oligonucleotide
  Sense strand starting at position 3525 of SEQ ID NO: 1880074
ugacuugguucuccagaug

SEQ ID NO: 1941055 - RNA, 19 nt, Artificial Sequence
  Description of Artificial Sequence: Synthetic oligonucleotide
  Antisense strand to SEQ ID NO: 1941054
caucuggagaaccaaguca

SEQ ID NO: 1941056 - RNA, 19 nt, Artificial Sequence
  Description of Artificial Sequence: Synthetic oligonucleotide
  Sense strand starting at position 3665 of SEQ ID NO: 1880074
gucuccucuggagagcaua

SEQ ID NO: 1941057 - RNA, 19 nt, Artificial Sequence
  Description of Artificial Sequence: Synthetic oligonucleotide
  Antisense strand to SEQ ID NO: 1941056
uaugcucuccagaggagac

SEQ ID NO: 1941058 - RNA, 19 nt, Artificial Sequence
  Description of Artificial Sequence: Synthetic oligonucleotide
  Sense strand starting at position 3749 of SEQ ID NO: 1880074
gagggauuaggugacggua

SEQ ID NO: 1941059 - RNA, 19 nt, Artificial Sequence
  Description of Artificial Sequence: Synthetic oligonucleotide
  Antisense strand to SEQ ID NO: 1941058
uaccgucaccuaaucccuc

SEQ ID NO: 1941060 - RNA, 19 nt, Artificial Sequence
  Description of Artificial Sequence: Synthetic oligonucleotide
  Sense strand starting at position 3763 of SEQ ID NO: 1880074
cgguauaguaacugcugaa

SEQ ID NO: 1941061 - RNA, 19 nt, Artificial Sequence
  Description of Artificial Sequence: Synthetic oligonucleotide
  Antisense strand to SEQ ID NO: 1941060
uucagcaguuacuauaccg

SEQ ID NO: 1941062 - RNA, 19 nt, Artificial Sequence
  Description of Artificial Sequence: Synthetic oligonucleotide
  Sense strand starting at position 3767 of SEQ ID NO: 1880074
auaguaacugcugaauacu

SEQ ID NO: 1941063 - RNA, 19 nt, Artificial Sequence
  Description of Artificial Sequence: Synthetic oligonucleotide
  Antisense strand to SEQ ID NO: 1941062
aguauucagcaguuacuau

SEQ ID NO: 1941064 - RNA, 19 nt, Artificial Sequence
  Description of Artificial Sequence: Synthetic oligonucleotide
  Sense strand starting at position 3829 of SEQ ID NO: 1880074
acacaucguccagguagua

SEQ ID NO: 1941065 - RNA, 19 nt, Artificial Sequence
  Description of Artificial Sequence: Synthetic oligonucleotide
  Antisense strand to SEQ ID NO: 1941064
uacuaccuggacgaugugu

SEQ ID NO: 1941066 - RNA, 19 nt, Artificial Sequence
  Description of Artificial Sequence: Synthetic oligonucleotide
  Sense strand starting at position 3851 of SEQ ID NO: 1880074
gagaaauacuuucugggua

SEQ ID NO: 1941067 - RNA, 19 nt, Artificial Sequence
  Description of Artificial Sequence: Synthetic oligonucleotide
  Antisense strand to SEQ ID NO: 1941066
uacccagaaaguauuucuc

SEQ ID NO: 1941068 - RNA, 19 nt, Artificial Sequence
  Description of Artificial Sequence: Synthetic oligonucleotide
  Sense strand starting at position 3856 of SEQ ID NO: 1880074
auacuuucuggguaucuga

SEQ ID NO: 1941069 - RNA, 19 nt, Artificial Sequence
  Description of Artificial Sequence: Synthetic oligonucleotide
  Antisense strand to SEQ ID NO: 1941068
ucagauacccagaaaguau

SEQ ID NO: 1941070 - RNA, 19 nt, Artificial Sequence
  Description of Artificial Sequence: Synthetic oligonucleotide
  Sense strand starting at position 3872 of SEQ ID NO: 1880074
ugaccagccuucguggaaa

SEQ ID NO: 1941071 - RNA, 19 nt, Artificial Sequence
  Description of Artificial Sequence: Synthetic oligonucleotide
  Antisense strand to SEQ ID NO: 1941070
uuuccacgaaggcugguca

SEQ ID NO: 1941072 - RNA, 19 nt, Artificial Sequence
  Description of Artificial Sequence: Synthetic oligonucleotide
  Sense strand starting at position 3874 of SEQ ID NO: 1880074
accagccuucguggaaaga

SEQ ID NO: 1941073 - RNA, 19 nt, Artificial Sequence
  Description of Artificial Sequence: Synthetic oligonucleotide
  Antisense strand to SEQ ID NO: 1941072
ucuuuccacgaaggcuggu

SEQ ID NO: 1941074 - RNA, 19 nt, Artificial Sequence
  Description of Artificial Sequence: Synthetic oligonucleotide
  Sense strand starting at position 3875 of SEQ ID NO: 1880074
ccagccuucguggaaagaa

SEQ ID NO: 1941075 - RNA, 19 nt, Artificial Sequence
  Description of Artificial Sequence: Synthetic oligonucleotide
  Antisense strand to SEQ ID NO: 1941074
uucuuuccacgaaggcugg

SEQ ID NO: 1941076 - RNA, 19 nt, Artificial Sequence
  Description of Artificial Sequence: Synthetic oligonucleotide
  Sense strand starting at position 55 of SEQ ID NO: 1880075
cagauuagcugccauguau

SEQ ID NO: 1941077 - RNA, 19 nt, Artificial Sequence
  Description of Artificial Sequence: Synthetic oligonucleotide
  Antisense strand to SEQ ID NO: 1941076
auacauggcagcuaaucug

SEQ ID NO: 1941078 - RNA, 19 nt, Artificial Sequence
  Description of Artificial Sequence: Synthetic oligonucleotide
  Sense strand starting at position 62 of SEQ ID NO: 1880075
gcugccauguaucaccaaa

SEQ ID NO: 1941079 - RNA, 19 nt, Artificial Sequence
  Description of Artificial Sequence: Synthetic oligonucleotide
  Antisense strand to SEQ ID NO: 1941078
uuuggugauacauggcagc

SEQ ID NO: 1941080 - RNA, 19 nt, Artificial Sequence
  Description of Artificial Sequence: Synthetic oligonucleotide
  Sense strand starting at position 226 of SEQ ID NO: 1880075
gagugagagaccuguccua

SEQ ID NO: 1941081 - RNA, 19 nt, Artificial Sequence
  Description of Artificial Sequence: Synthetic oligonucleotide
  Antisense strand to SEQ ID NO: 1941080
uaggacaggucucucacuc

SEQ ID NO: 1941082 - RNA, 19 nt, Artificial Sequence
  Description of Artificial Sequence: Synthetic oligonucleotide
  Sense strand starting at position 839 of SEQ ID NO: 1880075
ggugauuuacagugcuauu

SEQ ID NO: 1941083 - RNA, 19 nt, Artificial Sequence
  Description of Artificial Sequence: Synthetic oligonucleotide
  Antisense strand to SEQ ID NO: 1941082
aauagcacuguaaaucacc

SEQ ID NO: 1941084 - RNA, 19 nt, Artificial Sequence
  Description of Artificial Sequence: Synthetic oligonucleotide
  Sense strand starting at position 842 of SEQ ID NO: 1880075
gauuuacagugcuauuuga

SEQ ID NO: 1941085 - RNA, 19 nt, Artificial Sequence
  Description of Artificial Sequence: Synthetic oligonucleotide
  Antisense strand to SEQ ID NO: 1941084
ucaaauagcacuguaaauc

SEQ ID NO: 1941086 - RNA, 19 nt, Artificial Sequence
  Description of Artificial Sequence: Synthetic oligonucleotide
  Sense strand starting at position 893 of SEQ ID NO: 1880075
acgcgugucagguguaaac

SEQ ID NO: 1941087 - RNA, 19 nt, Artificial Sequence
  Description of Artificial Sequence: Synthetic oligonucleotide
  Antisense strand to SEQ ID NO: 1941086
guuuacaccugacacgcgu

SEQ ID NO: 1941088 - RNA, 19 nt, Artificial Sequence
  Description of Artificial Sequence: Synthetic oligonucleotide
  Sense strand starting at position 1113 of SEQ ID NO: 1880075
ucgcuuaaagucugaagaa

SEQ ID NO: 1941089 - RNA, 19 nt, Artificial Sequence
  Description of Artificial Sequence: Synthetic oligonucleotide
  Antisense strand to SEQ ID NO: 1941088
uucuucagacuuuaagcga

SEQ ID NO: 1941090 - RNA, 19 nt, Artificial Sequence
  Description of Artificial Sequence: Synthetic oligonucleotide
  Sense strand starting at position 1114 of SEQ ID NO: 1880075
cgcuuaaagucugaagaaa

SEQ ID NO: 1941091 - RNA, 19 nt, Artificial Sequence
  Description of Artificial Sequence: Synthetic oligonucleotide
  Antisense strand to SEQ ID NO: 1941090
uuucuucagacuuuaagcg

SEQ ID NO: 1941092 - RNA, 19 nt, Artificial Sequence
  Description of Artificial Sequence: Synthetic oligonucleotide
  Sense strand starting at position 1318 of SEQ ID NO: 1880075
acgcaaaguaagcguguua

SEQ ID NO: 1941093 - RNA, 19 nt, Artificial Sequence
  Description of Artificial Sequence: Synthetic oligonucleotide
  Antisense strand to SEQ ID NO: 1941092
uaacacgcuuacuuugcgu

SEQ ID NO: 1941094 - RNA, 19 nt, Artificial Sequence
  Description of Artificial Sequence: Synthetic oligonucleotide
  Sense strand starting at position 1379 of SEQ ID NO: 1880075
gcuuucuucccagagaacu

SEQ ID NO: 1941095 - RNA, 19 nt, Artificial Sequence
  Description of Artificial Sequence: Synthetic oligonucleotide
  Antisense strand to SEQ ID NO: 1941094
aguucucugggaagaaagc

SEQ ID NO: 1941096 - RNA, 19 nt, Artificial Sequence
  Description of Artificial Sequence: Synthetic oligonucleotide
  Sense strand starting at position 1703 of SEQ ID NO: 1880075
ggcgacauguuacuuccua

SEQ ID NO: 1941097 - RNA, 19 nt, Artificial Sequence
  Description of Artificial Sequence: Synthetic oligonucleotide
  Antisense strand to SEQ ID NO: 1941096
uaggaaguaacaugucgcc

SEQ ID NO: 1941098 - RNA, 19 nt, Artificial Sequence
  Description of Artificial Sequence: Synthetic oligonucleotide
  Sense strand starting at position 1704 of SEQ ID NO: 1880075
gcgacauguuacuuccuau

SEQ ID NO: 1941099 - RNA, 19 nt, Artificial Sequence
  Description of Artificial Sequence: Synthetic oligonucleotide
  Antisense strand to SEQ ID NO: 1941098
auaggaaguaacaugucgc

SEQ ID NO: 1941100 - RNA, 19 nt, Artificial Sequence
  Description of Artificial Sequence: Synthetic oligonucleotide
  Sense strand starting at position 1791 of SEQ ID NO: 1880075
agauaugacccuuggcgua

SEQ ID NO: 1941101 - RNA, 19 nt, Artificial Sequence
  Description of Artificial Sequence: Synthetic oligonucleotide
  Antisense strand to SEQ ID NO: 1941100
uacgccaagggucauaucu

SEQ ID NO: 1941102 - RNA, 19 nt, Artificial Sequence
  Description of Artificial Sequence: Synthetic oligonucleotide
  Sense strand starting at position 2394 of SEQ ID NO: 1880075
gccuguguuaaggagcaau

SEQ ID NO: 1941103 - RNA, 19 nt, Artificial Sequence
  Description of Artificial Sequence: Synthetic oligonucleotide
  Antisense strand to SEQ ID NO: 1941102
auugcuccuuaacacaggc

SEQ ID NO: 1941104 - RNA, 19 nt, Artificial Sequence
  Description of Artificial Sequence: Synthetic oligonucleotide
  Sense strand starting at position 2397 of SEQ ID NO: 1880075
uguguuaaggagcaaucuu

SEQ ID NO: 1941105 - RNA, 19 nt, Artificial Sequence
  Description of Artificial Sequence: Synthetic oligonucleotide
  Antisense strand to SEQ ID NO: 1941104
aagauugcuccuuaacaca

SEQ ID NO: 1941106 - RNA, 19 nt, Artificial Sequence
  Description of Artificial Sequence: Synthetic oligonucleotide
  Sense strand starting at position 2409 of SEQ ID NO: 1880075
caaucuuucgguggccaga

SEQ ID NO: 1941107 - RNA, 19 nt, Artificial Sequence
  Description of Artificial Sequence: Synthetic oligonucleotide
  Antisense strand to SEQ ID NO: 1941106
ucuggccaccgaaagauug

SEQ ID NO: 1941108 - RNA, 19 nt, Artificial Sequence
  Description of Artificial Sequence: Synthetic oligonucleotide
  Sense strand starting at position 2531 of SEQ ID NO: 1880075
ugcagcauuccgcuugcau

SEQ ID NO: 1941109 - RNA, 19 nt, Artificial Sequence
  Description of Artificial Sequence: Synthetic oligonucleotide
  Antisense strand to SEQ ID NO: 1941108
augcaagcggaaugcugca

SEQ ID NO: 1941110 - RNA, 19 nt, Artificial Sequence
  Description of Artificial Sequence: Synthetic oligonucleotide
  Sense strand starting at position 2532 of SEQ ID NO: 1880075
gcagcauuccgcuugcauu

SEQ ID NO: 1941111 - RNA, 19 nt, Artificial Sequence
  Description of Artificial Sequence: Synthetic oligonucleotide
  Antisense strand to SEQ ID NO: 1941110
aaugcaagcggaaugcugc

SEQ ID NO: 1941112 - RNA, 19 nt, Artificial Sequence
  Description of Artificial Sequence: Synthetic oligonucleotide
  Sense strand starting at position 2533 of SEQ ID NO: 1880075
cagcauuccgcuugcauuu

SEQ ID NO: 1941113 - RNA, 19 nt, Artificial Sequence
  Description of Artificial Sequence: Synthetic oligonucleotide
  Antisense strand to SEQ ID NO: 1941112
aaaugcaagcggaaugcug

SEQ ID NO: 1941114 - RNA, 19 nt, Artificial Sequence
  Description of Artificial Sequence: Synthetic oligonucleotide
  Sense strand starting at position 2546 of SEQ ID NO: 1880075
gcauuuggaagccguuuaa

SEQ ID NO: 1941115 - RNA, 19 nt, Artificial Sequence
  Description of Artificial Sequence: Synthetic oligonucleotide
  Antisense strand to SEQ ID NO: 1941114
uuaaacggcuuccaaaugc

SEQ ID NO: 1941116 - RNA, 19 nt, Artificial Sequence
  Description of Artificial Sequence: Synthetic oligonucleotide
  Sense strand starting at position 2576 of SEQ ID NO: 1880075
agccauauuuaugaaagua

SEQ ID NO: 1941117 - RNA, 19 nt, Artificial Sequence
  Description of Artificial Sequence: Synthetic oligonucleotide
  Antisense strand to SEQ ID NO: 1941116
uacuuucauaaauauggcu

SEQ ID NO: 1941118 - RNA, 19 nt, Artificial Sequence
  Description of Artificial Sequence: Synthetic oligonucleotide
  Sense strand starting at position 3338 of SEQ ID NO: 1880075
acauuccacuccuugguua

SEQ ID NO: 1941119 - RNA, 19 nt, Artificial Sequence
  Description of Artificial Sequence: Synthetic oligonucleotide
  Antisense strand to SEQ ID NO: 1941118
uaaccaaggaguggaaugu

SEQ ID NO: 1941120 - RNA, 19 nt, Artificial Sequence
  Description of Artificial Sequence: Synthetic oligonucleotide
  Sense strand starting at position 3420 of SEQ ID NO: 1880075
cuuucuugagaguguacuu

SEQ ID NO: 1941121 - RNA, 19 nt, Artificial Sequence
  Description of Artificial Sequence: Synthetic oligonucleotide
  Antisense strand to SEQ ID NO: 1941120
aaguacacucucaagaaag

SEQ ID NO: 1941122 - RNA, 19 nt, Artificial Sequence
  Description of Artificial Sequence: Synthetic oligonucleotide
  Sense strand starting at position 3485 of SEQ ID NO: 1880075
uugacuuuguucucgcgau

SEQ ID NO: 1941123 - RNA, 19 nt, Artificial Sequence
  Description of Artificial Sequence: Synthetic oligonucleotide
  Antisense strand to SEQ ID NO: 1941122
aucgcgagaacaaagucaa

SEQ ID NO: 1941124 - RNA, 19 nt, Artificial Sequence
  Description of Artificial Sequence: Synthetic oligonucleotide
  Sense strand starting at position 3486 of SEQ ID NO: 1880075
ugacuuuguucucgcgaug

SEQ ID NO: 1941125 - RNA, 19 nt, Artificial Sequence
  Description of Artificial Sequence: Synthetic oligonucleotide
  Antisense strand to SEQ ID NO: 1941124
caucgcgagaacaaaguca

SEQ ID NO: 1941126 - RNA, 19 nt, Artificial Sequence
  Description of Artificial Sequence: Synthetic oligonucleotide
  Sense strand starting at position 3621 of SEQ ID NO: 1880075
gagaguucucuuuggagac

SEQ ID NO: 1941127 - RNA, 19 nt, Artificial Sequence
  Description of Artificial Sequence: Synthetic oligonucleotide
  Antisense strand to SEQ ID NO: 1941126
gucuccaaagagaacucuc

SEQ ID NO: 1941128 - RNA, 19 nt, Artificial Sequence
  Description of Artificial Sequence: Synthetic oligonucleotide
  Sense strand starting at position 3707 of SEQ ID NO: 1880075
ugagggauugggugacagu

SEQ ID NO: 1941129 - RNA, 19 nt, Artificial Sequence
  Description of Artificial Sequence: Synthetic oligonucleotide
  Antisense strand to SEQ ID NO: 1941128
acugucacccaaucccuca

SEQ ID NO: 1941130 - RNA, 19 nt, Artificial Sequence
  Description of Artificial Sequence: Synthetic oligonucleotide
  Sense strand starting at position 3716 of SEQ ID NO: 1880075
gggugacaguguaguaacu

SEQ ID NO: 1941131 - RNA, 19 nt, Artificial Sequence
  Description of Artificial Sequence: Synthetic oligonucleotide
  Antisense strand to SEQ ID NO: 1941130
aguuacuacacugucaccc

SEQ ID NO: 1941132 - RNA, 19 nt, Artificial Sequence
  Description of Artificial Sequence: Synthetic oligonucleotide
  Sense strand starting at position 3810 of SEQ ID NO: 1880075
gagaaaugcuuucugggua

SEQ ID NO: 1941133 - RNA, 19 nt, Artificial Sequence
  Description of Artificial Sequence: Synthetic oligonucleotide
  Antisense strand to SEQ ID NO: 1941132
uacccagaaagcauuucuc

SEQ ID NO: 1941134 - RNA, 19 nt, Artificial Sequence
  Description of Artificial Sequence: Synthetic oligonucleotide
  Sense strand starting at position 3811 of SEQ ID NO: 1880075
agaaaugcuuucuggguau

SEQ ID NO: 1941135 - RNA, 19 nt, Artificial Sequence
  Description of Artificial Sequence: Synthetic oligonucleotide
  Antisense strand to SEQ ID NO: 1941134
auacccagaaagcauuucu

SEQ ID NO: 1941136 - RNA, 19 nt, Artificial Sequence
  Description of Artificial Sequence: Synthetic oligonucleotide
  Sense strand starting at position 3813 of SEQ ID NO: 1880075
aaaugcuuucuggguaucu

SEQ ID NO: 1941137 - RNA, 19 nt, Artificial Sequence
  Description of Artificial Sequence: Synthetic oligonucleotide
  Antisense strand to SEQ ID NO: 1941136
agauacccagaaagcauuu

SEQ ID NO: 1941138 - RNA, 19 nt, Artificial Sequence
  Description of Artificial Sequence: Synthetic oligonucleotide
  Sense strand starting at position 3815 of SEQ ID NO: 1880075
augcuuucuggguaucuga

SEQ ID NO: 1941139 - RNA, 19 nt, Artificial Sequence
  Description of Artificial Sequence: Synthetic oligonucleotide
  Antisense strand to SEQ ID NO: 1941138
ucagauacccagaaagcau

SEQ ID NO: 1941140 - RNA, 19 nt, Artificial Sequence
  Description of Artificial Sequence: Synthetic oligonucleotide
  Sense strand starting at position 7 of SEQ ID NO: 1880076
aggaaaugccauuauucuc

SEQ ID NO: 1941141 - RNA, 19 nt, Artificial Sequence
  Description of Artificial Sequence: Synthetic oligonucleotide
  Antisense strand to SEQ ID NO: 1941140
gagaauaauggcauuuccu

SEQ ID NO: 1941142 - RNA, 19 nt, Artificial Sequence
  Description of Artificial Sequence: Synthetic oligonucleotide
  Sense strand starting at position 58 of SEQ ID NO: 1880076
agaccagauuagcugucau

SEQ ID NO: 1941143 - RNA, 19 nt, Artificial Sequence
  Description of Artificial Sequence: Synthetic oligonucleotide
  Antisense strand to SEQ ID NO: 1941142
augacagcuaaucuggucu

SEQ ID NO: 1941144 - RNA, 19 nt, Artificial Sequence
  Description of Artificial Sequence: Synthetic oligonucleotide
  Sense strand starting at position 90 of SEQ ID NO: 1880076
gggacuggauccuuguuaa

SEQ ID NO: 1941145 - RNA, 19 nt, Artificial Sequence
  Description of Artificial Sequence: Synthetic oligonucleotide
  Antisense strand to SEQ ID NO: 1941144
uuaacaaggauccaguccc

SEQ ID NO: 1941146 - RNA, 19 nt, Artificial Sequence
  Description of Artificial Sequence: Synthetic oligonucleotide
  Sense strand starting at position 93 of SEQ ID NO: 1880076
acuggauccuuguuaacac

SEQ ID NO: 1941147 - RNA, 19 nt, Artificial Sequence
  Description of Artificial Sequence: Synthetic oligonucleotide
  Antisense strand to SEQ ID NO: 1941146
guguuaacaaggauccagu

SEQ ID NO: 1941148 - RNA, 19 nt, Artificial Sequence
  Description of Artificial Sequence: Synthetic oligonucleotide
  Sense strand starting at position 853 of SEQ ID NO: 1880076
gauuuacagugccauuuga

SEQ ID NO: 1941149 - RNA, 19 nt, Artificial Sequence
  Description of Artificial Sequence: Synthetic oligonucleotide
  Antisense strand to SEQ ID NO: 1941148
ucaaauggcacuguaaauc

SEQ ID NO: 1941150 - RNA, 19 nt, Artificial Sequence
  Description of Artificial Sequence: Synthetic oligonucleotide
  Sense strand starting at position 1124 of SEQ ID NO: 1880076
ucgcuuaaagucuaaagaa

SEQ ID NO: 1941151 - RNA, 19 nt, Artificial Sequence
  Description of Artificial Sequence: Synthetic oligonucleotide
  Antisense strand to SEQ ID NO: 1941150
uucuuuagacuuuaagcga

SEQ ID NO: 1941152 - RNA, 19 nt, Artificial Sequence
  Description of Artificial Sequence: Synthetic oligonucleotide
  Sense strand starting at position 1340 of SEQ ID NO: 1880076
gaguguuaugucuacaacc

SEQ ID NO: 1941153 - RNA, 19 nt, Artificial Sequence
  Description of Artificial Sequence: Synthetic oligonucleotide
  Antisense strand to SEQ ID NO: 1941152
gguuguagacauaacacuc

SEQ ID NO: 1941154 - RNA, 19 nt, Artificial Sequence
  Description of Artificial Sequence: Synthetic oligonucleotide
  Sense strand starting at position 1390 of SEQ ID NO: 1880076
gcuuucuucccagagaaca

SEQ ID NO: 1941155 - RNA, 19 nt, Artificial Sequence
  Description of Artificial Sequence: Synthetic oligonucleotide
  Antisense strand to SEQ ID NO: 1941154
uguucucugggaagaaagc

SEQ ID NO: 1941156 - RNA, 19 nt, Artificial Sequence
  Description of Artificial Sequence: Synthetic oligonucleotide
  Sense strand starting at position 2530 of SEQ ID NO: 1880076
ugcagcauuccgcuugcaa

SEQ ID NO: 1941157 - RNA, 19 nt, Artificial Sequence
  Description of Artificial Sequence: Synthetic oligonucleotide
  Antisense strand to SEQ ID NO: 1941156
uugcaagcggaaugcugca

SEQ ID NO: 1941158 - RNA, 19 nt, Artificial Sequence
  Description of Artificial Sequence: Synthetic oligonucleotide
  Sense strand starting at position 2531 of SEQ ID NO: 1880076
gcagcauuccgcuugcaau

SEQ ID NO: 1941159 - RNA, 19 nt, Artificial Sequence
  Description of Artificial Sequence: Synthetic oligonucleotide
  Antisense strand to SEQ ID NO: 1941158
auugcaagcggaaugcugc

SEQ ID NO: 1941160 - RNA, 19 nt, Artificial Sequence
  Description of Artificial Sequence: Synthetic oligonucleotide
  Sense strand starting at position 2592 of SEQ ID NO: 1880076
uaaagaggcugcuuagaug

SEQ ID NO: 1941161 - RNA, 19 nt, Artificial Sequence
  Description of Artificial Sequence: Synthetic oligonucleotide
  Antisense strand to SEQ ID NO: 1941160
caucuaagcagccucuuua

SEQ ID NO: 1941162 - RNA, 19 nt, Artificial Sequence
  Description of Artificial Sequence: Synthetic oligonucleotide
  Sense strand starting at position 3342 of SEQ ID NO: 1880076
uuccaauucuugguuaaag

SEQ ID NO: 1941163 - RNA, 19 nt, Artificial Sequence
  Description of Artificial Sequence: Synthetic oligonucleotide
  Antisense strand to SEQ ID NO: 1941162
cuuuaaccaagaauuggaa

SEQ ID NO: 1941164 - RNA, 19 nt, Artificial Sequence
  Description of Artificial Sequence: Synthetic oligonucleotide
  Sense strand starting at position 3343 of SEQ ID NO: 1880076
uccaauucuugguuaaaga

SEQ ID NO: 1941165 - RNA, 19 nt, Artificial Sequence
  Description of Artificial Sequence: Synthetic oligonucleotide
  Antisense strand to SEQ ID NO: 1941164
ucuuuaaccaagaauugga

SEQ ID NO: 1941166 - RNA, 19 nt, Artificial Sequence
  Description of Artificial Sequence: Synthetic oligonucleotide
  Sense strand starting at position 3622 of SEQ ID NO: 1880076
gagaguucuccuuggagau

SEQ ID NO: 1941167 - RNA, 19 nt, Artificial Sequence
  Description of Artificial Sequence: Synthetic oligonucleotide
  Antisense strand to SEQ ID NO: 1941166
aucuccaaggagaacucuc

SEQ ID NO: 1941168 - RNA, 19 nt, Artificial Sequence
  Description of Artificial Sequence: Synthetic oligonucleotide
  Sense strand starting at position 3623 of SEQ ID NO: 1880076
agaguucuccuuggagauc

SEQ ID NO: 1941169 - RNA, 19 nt, Artificial Sequence
  Description of Artificial Sequence: Synthetic oligonucleotide
  Antisense strand to SEQ ID NO: 1941168
gaucuccaaggagaacucu

SEQ ID NO: 1941170 - RNA, 19 nt, Artificial Sequence
  Description of Artificial Sequence: Synthetic oligonucleotide
  Sense strand starting at position 3626 of SEQ ID NO: 1880076
guucuccuuggagaucaua

SEQ ID NO: 1941171 - RNA, 19 nt, Artificial Sequence
  Description of Artificial Sequence: Synthetic oligonucleotide
  Antisense strand to SEQ ID NO: 1941170
uaugaucuccaaggagaac

SEQ ID NO: 1941172 - RNA, 19 nt, Artificial Sequence
  Description of Artificial Sequence: Synthetic oligonucleotide
  Sense strand starting at position 3801 of SEQ ID NO: 1880076
gguaguaguggagaaaugu

SEQ ID NO: 1941173 - RNA, 19 nt, Artificial Sequence
  Description of Artificial Sequence: Synthetic oligonucleotide
  Antisense strand to SEQ ID NO: 1941172
acauuucuccacuacuacc

SEQ ID NO: 1941174 - RNA, 19 nt, Artificial Sequence
  Description of Artificial Sequence: Synthetic oligonucleotide
  Sense strand starting at position 8 of SEQ ID NO: 1880077
aggaaaugccauuauucuc

SEQ ID NO: 1941175 - RNA, 19 nt, Artificial Sequence
  Description of Artificial Sequence: Synthetic oligonucleotide
  Antisense strand to SEQ ID NO: 1941174
gagaauaauggcauuuccu

SEQ ID NO: 1941176 - RNA, 19 nt, Artificial Sequence
  Description of Artificial Sequence: Synthetic oligonucleotide
  Sense strand starting at position 91 of SEQ ID NO: 1880077
gggacuggauccuuguuaa

SEQ ID NO: 1941177 - RNA, 19 nt, Artificial Sequence
  Description of Artificial Sequence: Synthetic oligonucleotide
  Antisense strand to SEQ ID NO: 1941176
uuaacaaggauccaguccc

SEQ ID NO: 1941178 - RNA, 19 nt, Artificial Sequence
  Description of Artificial Sequence: Synthetic oligonucleotide
  Sense strand starting at position 94 of SEQ ID NO: 1880077
acuggauccuuguuaacac

SEQ ID NO: 1941179 - RNA, 19 nt, Artificial Sequence
  Description of Artificial Sequence: Synthetic oligonucleotide
  Antisense strand to SEQ ID NO: 1941178
guguuaacaaggauccagu

SEQ ID NO: 1941180 - RNA, 19 nt, Artificial Sequence
  Description of Artificial Sequence: Synthetic oligonucleotide
  Sense strand starting at position 680 of SEQ ID NO: 1880077
cugaccucagcugaucaaa

SEQ ID NO: 1941181 - RNA, 19 nt, Artificial Sequence
  Description of Artificial Sequence: Synthetic oligonucleotide
  Antisense strand to SEQ ID NO: 1941180
uuugaucagcugaggucag

SEQ ID NO: 1941182 - RNA, 19 nt, Artificial Sequence
  Description of Artificial Sequence: Synthetic oligonucleotide
  Sense strand starting at position 826 of SEQ ID NO: 1880077
uagauaguucugggaguua

SEQ ID NO: 1941183 - RNA, 19 nt, Artificial Sequence
  Description of Artificial Sequence: Synthetic oligonucleotide
  Antisense strand to SEQ ID NO: 1941182
uaacucccagaacuaucua

SEQ ID NO: 1941184 - RNA, 19 nt, Artificial Sequence
  Description of Artificial Sequence: Synthetic oligonucleotide
  Sense strand starting at position 854 of SEQ ID NO: 1880077
gauuuacagugccauuuga

SEQ ID NO: 1941185 - RNA, 19 nt, Artificial Sequence
  Description of Artificial Sequence: Synthetic oligonucleotide
  Antisense strand to SEQ ID NO: 1941184
ucaaauggcacuguaaauc

SEQ ID NO: 1941186 - RNA, 19 nt, Artificial Sequence
  Description of Artificial Sequence: Synthetic oligonucleotide
  Sense strand starting at position 1125 of SEQ ID NO: 1880077
ucgcuuaaagucuaaagaa

SEQ ID NO: 1941187 - RNA, 19 nt, Artificial Sequence
  Description of Artificial Sequence: Synthetic oligonucleotide
  Antisense strand to SEQ ID NO: 1941186
uucuuuagacuuuaagcga

SEQ ID NO: 1941188 - RNA, 19 nt, Artificial Sequence
  Description of Artificial Sequence: Synthetic oligonucleotide
  Sense strand starting at position 1341 of SEQ ID NO: 1880077
gaguguuaugucuacaacc

SEQ ID NO: 1941189 - RNA, 19 nt, Artificial Sequence
  Description of Artificial Sequence: Synthetic oligonucleotide
  Antisense strand to SEQ ID NO: 1941188
gguuguagacauaacacuc

SEQ ID NO: 1941190 - RNA, 19 nt, Artificial Sequence
  Description of Artificial Sequence: Synthetic oligonucleotide
  Sense strand starting at position 2107 of SEQ ID NO: 1880077
cugggauucucacuuccga

SEQ ID NO: 1941191 - RNA, 19 nt, Artificial Sequence
  Description of Artificial Sequence: Synthetic oligonucleotide
  Antisense strand to SEQ ID NO: 1941190
ucggaagugagaaucccag

SEQ ID NO: 1941192 - RNA, 19 nt, Artificial Sequence
  Description of Artificial Sequence: Synthetic oligonucleotide
  Sense strand starting at position 2513 of SEQ ID NO: 1880077
acauccuuauccuugugau

SEQ ID NO: 1941193 - RNA, 19 nt, Artificial Sequence
  Description of Artificial Sequence: Synthetic oligonucleotide
  Antisense strand to SEQ ID NO: 1941192
aucacaaggauaaggaugu

SEQ ID NO: 1941194 - RNA, 19 nt, Artificial Sequence
  Description of Artificial Sequence: Synthetic oligonucleotide
  Sense strand starting at position 2531 of SEQ ID NO: 1880077
ugcagcauuccgcuugcaa

SEQ ID NO: 1941195 - RNA, 19 nt, Artificial Sequence
  Description of Artificial Sequence: Synthetic oligonucleotide
  Antisense strand to SEQ ID NO: 1941194
uugcaagcggaaugcugca

SEQ ID NO: 1941196 - RNA, 19 nt, Artificial Sequence
  Description of Artificial Sequence: Synthetic oligonucleotide
  Sense strand starting at position 2532 of SEQ ID NO: 1880077
gcagcauuccgcuugcaau

SEQ ID NO: 1941197 - RNA, 19 nt, Artificial Sequence
  Description of Artificial Sequence: Synthetic oligonucleotide
  Antisense strand to SEQ ID NO: 1941196
auugcaagcggaaugcugc

SEQ ID NO: 1941198 - RNA, 19 nt, Artificial Sequence
  Description of Artificial Sequence: Synthetic oligonucleotide
  Sense strand starting at position 2550 of SEQ ID NO: 1880077
uuggaagccguuuaauauc

SEQ ID NO: 1941199 - RNA, 19 nt, Artificial Sequence
  Description of Artificial Sequence: Synthetic oligonucleotide
  Antisense strand to SEQ ID NO: 1941198
gauauuaaacggcuuccaa

SEQ ID NO: 1941200 - RNA, 19 nt, Artificial Sequence
  Description of Artificial Sequence: Synthetic oligonucleotide
  Sense strand starting at position 2593 of SEQ ID NO: 1880077
uaaagaggcugcuuagaug

SEQ ID NO: 1941201 - RNA, 19 nt, Artificial Sequence
  Description of Artificial Sequence: Synthetic oligonucleotide
  Antisense strand to SEQ ID NO: 1941200
caucuaagcagccucuuua

SEQ ID NO: 1941202 - RNA, 19 nt, Artificial Sequence
  Description of Artificial Sequence: Synthetic oligonucleotide
  Sense strand starting at position 2601 of SEQ ID NO: 1880077
cugcuuagaugacugcaaa

SEQ ID NO: 1941203 - RNA, 19 nt, Artificial Sequence
  Description of Artificial Sequence: Synthetic oligonucleotide
  Antisense strand to SEQ ID NO: 1941202
uuugcagucaucuaagcag

SEQ ID NO: 1941204 - RNA, 19 nt, Artificial Sequence
  Description of Artificial Sequence: Synthetic oligonucleotide
  Sense strand starting at position 2745 of SEQ ID NO: 1880077
uaugcugucccagaagaga

SEQ ID NO: 1941205 - RNA, 19 nt, Artificial Sequence
  Description of Artificial Sequence: Synthetic oligonucleotide
  Antisense strand to SEQ ID NO: 1941204
ucucuucugggacagcaua

SEQ ID NO: 1941206 - RNA, 19 nt, Artificial Sequence
  Description of Artificial Sequence: Synthetic oligonucleotide
  Sense strand starting at position 3263 of SEQ ID NO: 1880077
uucugagaccaguguuuga

SEQ ID NO: 1941207 - RNA, 19 nt, Artificial Sequence
  Description of Artificial Sequence: Synthetic oligonucleotide
  Antisense strand to SEQ ID NO: 1941206
ucaaacacuggucucagaa

SEQ ID NO: 1941208 - RNA, 19 nt, Artificial Sequence
  Description of Artificial Sequence: Synthetic oligonucleotide
  Sense strand starting at position 3343 of SEQ ID NO: 1880077
uuccaauucuugguuaaag

SEQ ID NO: 1941209 - RNA, 19 nt, Artificial Sequence
  Description of Artificial Sequence: Synthetic oligonucleotide
  Antisense strand to SEQ ID NO: 1941208
cuuuaaccaagaauuggaa

SEQ ID NO: 1941210 - RNA, 19 nt, Artificial Sequence
  Description of Artificial Sequence: Synthetic oligonucleotide
  Sense strand starting at position 3344 of SEQ ID NO: 1880077
uccaauucuugguuaaaga

SEQ ID NO: 1941211 - RNA, 19 nt, Artificial Sequence
  Description of Artificial Sequence: Synthetic oligonucleotide
  Antisense strand to SEQ ID NO: 1941210
ucuuuaaccaagaauugga

SEQ ID NO: 1941212 - RNA, 19 nt, Artificial Sequence
  Description of Artificial Sequence: Synthetic oligonucleotide
  Sense strand starting at position 3623 of SEQ ID NO: 1880077
gagaguucuccuuggagau

SEQ ID NO: 1941213 - RNA, 19 nt, Artificial Sequence
  Description of Artificial Sequence: Synthetic oligonucleotide
  Antisense strand to SEQ ID NO: 1941212
aucuccaaggagaacucuc

SEQ ID NO: 1941214 - RNA, 19 nt, Artificial Sequence
  Description of Artificial Sequence: Synthetic oligonucleotide
  Sense strand starting at position 3624 of SEQ ID NO: 1880077
agaguucuccuuggagauc

SEQ ID NO: 1941215 - RNA, 19 nt, Artificial Sequence
  Description of Artificial Sequence: Synthetic oligonucleotide
  Antisense strand to SEQ ID NO: 1941214
gaucuccaaggagaacucu

SEQ ID NO: 1941216 - RNA, 19 nt, Artificial Sequence
  Description of Artificial Sequence: Synthetic oligonucleotide
  Sense strand starting at position 3627 of SEQ ID NO: 1880077
guucuccuuggagaucaua

SEQ ID NO: 1941217 - RNA, 19 nt, Artificial Sequence
  Description of Artificial Sequence: Synthetic oligonucleotide
  Antisense strand to SEQ ID NO: 1941216
uaugaucuccaaggagaac

SEQ ID NO: 1941218 - RNA, 19 nt, Artificial Sequence
  Description of Artificial Sequence: Synthetic oligonucleotide
  Sense strand starting at position 3886 of SEQ ID NO: 1880077
uggguucuuccugaccaau

SEQ ID NO: 1941219 - RNA, 19 nt, Artificial Sequence
  Description of Artificial Sequence: Synthetic oligonucleotide
  Antisense strand to SEQ ID NO: 1941218
auuggucaggaagaaccca

SEQ ID NO: 1941220 - RNA, 19 nt, Artificial Sequence
  Description of Artificial Sequence: Synthetic oligonucleotide
  Sense strand starting at position 200 of SEQ ID NO: 1880078
ugaugcaaauaaugagaaa

SEQ ID NO: 1941221 - RNA, 19 nt, Artificial Sequence
  Description of Artificial Sequence: Synthetic oligonucleotide
  Antisense strand to SEQ ID NO: 1941220
uuucucauuauuugcauca

SEQ ID NO: 1941222 - RNA, 19 nt, Artificial Sequence
  Description of Artificial Sequence: Synthetic oligonucleotide
  Sense strand starting at position 408 of SEQ ID NO: 1880078
aaugucucagauggacuaa

SEQ ID NO: 1941223 - RNA, 19 nt, Artificial Sequence
  Description of Artificial Sequence: Synthetic oligonucleotide
  Antisense strand to SEQ ID NO: 1941222
uuaguccaucugagacauu

SEQ ID NO: 1941224 - RNA, 19 nt, Artificial Sequence
  Description of Artificial Sequence: Synthetic oligonucleotide
  Sense strand starting at position 853 of SEQ ID NO: 1880078
gagaaaggguauuaaggaa

SEQ ID NO: 1941225 - RNA, 19 nt, Artificial Sequence
  Description of Artificial Sequence: Synthetic oligonucleotide
  Antisense strand to SEQ ID NO: 1941224
uuccuuaauacccuuucuc

SEQ ID NO: 1941226 - RNA, 19 nt, Artificial Sequence
  Description of Artificial Sequence: Synthetic oligonucleotide
  Sense strand starting at position 865 of SEQ ID NO: 1880078
uaaggaauuugucagggua

SEQ ID NO: 1941227 - RNA, 19 nt, Artificial Sequence
  Description of Artificial Sequence: Synthetic oligonucleotide
  Antisense strand to SEQ ID NO: 1941226
uacccugacaaauuccuua

SEQ ID NO: 1941228 - RNA, 19 nt, Artificial Sequence
  Description of Artificial Sequence: Synthetic oligonucleotide
  Sense strand starting at position 867 of SEQ ID NO: 1880078
aggaauuugucaggguacu

SEQ ID NO: 1941229 - RNA, 19 nt, Artificial Sequence
  Description of Artificial Sequence: Synthetic oligonucleotide
  Antisense strand to SEQ ID NO: 1941228
aguacccugacaaauuccu

SEQ ID NO: 1941230 - RNA, 19 nt, Artificial Sequence
  Description of Artificial Sequence: Synthetic oligonucleotide
  Sense strand starting at position 887 of SEQ ID NO: 1880078
acgcgugucagguauaaac

SEQ ID NO: 1941231 - RNA, 19 nt, Artificial Sequence
  Description of Artificial Sequence: Synthetic oligonucleotide
  Antisense strand to SEQ ID NO: 1941230
guuuauaccugacacgcgu

SEQ ID NO: 1941232 - RNA, 19 nt, Artificial Sequence
  Description of Artificial Sequence: Synthetic oligonucleotide
  Sense strand starting at position 1036 of SEQ ID NO: 1880078
cugggugcuaucuagaaag

SEQ ID NO: 1941233 - RNA, 19 nt, Artificial Sequence
  Description of Artificial Sequence: Synthetic oligonucleotide
  Antisense strand to SEQ ID NO: 1941232
cuuucuagauagcacccag

SEQ ID NO: 1941234 - RNA, 19 nt, Artificial Sequence
  Description of Artificial Sequence: Synthetic oligonucleotide
  Sense strand starting at position 1038 of SEQ ID NO: 1880078
gggugcuaucuagaaaguu

SEQ ID NO: 1941235 - RNA, 19 nt, Artificial Sequence
  Description of Artificial Sequence: Synthetic oligonucleotide
  Antisense strand to SEQ ID NO: 1941234
aacuuucuagauagcaccc

SEQ ID NO: 1941236 - RNA, 19 nt, Artificial Sequence
  Description of Artificial Sequence: Synthetic oligonucleotide
  Sense strand starting at position 1047 of SEQ ID NO: 1880078
cuagaaaguugccuggcaa

SEQ ID NO: 1941237 - RNA, 19 nt, Artificial Sequence
  Description of Artificial Sequence: Synthetic oligonucleotide
  Antisense strand to SEQ ID NO: 1941236
uugccaggcaacuuucuag

SEQ ID NO: 1941238 - RNA, 19 nt, Artificial Sequence
  Description of Artificial Sequence: Synthetic oligonucleotide
  Sense strand starting at position 1048 of SEQ ID NO: 1880078
uagaaaguugccuggcaau

SEQ ID NO: 1941239 - RNA, 19 nt, Artificial Sequence
  Description of Artificial Sequence: Synthetic oligonucleotide
  Antisense strand to SEQ ID NO: 1941238
auugccaggcaacuuucua

SEQ ID NO: 1941240 - RNA, 19 nt, Artificial Sequence
  Description of Artificial Sequence: Synthetic oligonucleotide
  Sense strand starting at position 1074 of SEQ ID NO: 1880078
ggaugugggagcgagacau

SEQ ID NO: 1941241 - RNA, 19 nt, Artificial Sequence
  Description of Artificial Sequence: Synthetic oligonucleotide
  Antisense strand to SEQ ID NO: 1941240
augucucgcucccacaucc

SEQ ID NO: 1941242 - RNA, 19 nt, Artificial Sequence
  Description of Artificial Sequence: Synthetic oligonucleotide
  Sense strand starting at position 1078 of SEQ ID NO: 1880078
gugggagcgagacaucaaa

SEQ ID NO: 1941243 - RNA, 19 nt, Artificial Sequence
  Description of Artificial Sequence: Synthetic oligonucleotide
  Antisense strand to SEQ ID NO: 1941242
uuugaugucucgcucccac

SEQ ID NO: 1941244 - RNA, 19 nt, Artificial Sequence
  Description of Artificial Sequence: Synthetic oligonucleotide
  Sense strand starting at position 1139 of SEQ ID NO: 1880078
auaugaacugccggagaua

SEQ ID NO: 1941245 - RNA, 19 nt, Artificial Sequence
  Description of Artificial Sequence: Synthetic oligonucleotide
  Antisense strand to SEQ ID NO: 1941244
uaucuccggcaguucauau

SEQ ID NO: 1941246 - RNA, 19 nt, Artificial Sequence
  Description of Artificial Sequence: Synthetic oligonucleotide
  Sense strand starting at position 1142 of SEQ ID NO: 1880078
ugaacugccggagauagua

SEQ ID NO: 1941247 - RNA, 19 nt, Artificial Sequence
  Description of Artificial Sequence: Synthetic oligonucleotide
  Antisense strand to SEQ ID NO: 1941246
uacuaucuccggcaguuca

SEQ ID NO: 1941248 - RNA, 19 nt, Artificial Sequence
  Description of Artificial Sequence: Synthetic oligonucleotide
  Sense strand starting at position 1169 of SEQ ID NO: 1880078
guaccuggcuccucauaaa

SEQ ID NO: 1941249 - RNA, 19 nt, Artificial Sequence
  Description of Artificial Sequence: Synthetic oligonucleotide
  Antisense strand to SEQ ID NO: 1941248
uuuaugaggagccagguac

SEQ ID NO: 1941250 - RNA, 19 nt, Artificial Sequence
  Description of Artificial Sequence: Synthetic oligonucleotide
  Sense strand starting at position 1317 of SEQ ID NO: 1880078
acgcaaaguaagcguguua

SEQ ID NO: 1941251 - RNA, 19 nt, Artificial Sequence
  Description of Artificial Sequence: Synthetic oligonucleotide
  Antisense strand to SEQ ID NO: 1941250
uaacacgcuuacuuugcgu

SEQ ID NO: 1941252 - RNA, 19 nt, Artificial Sequence
  Description of Artificial Sequence: Synthetic oligonucleotide
  Sense strand starting at position 1375 of SEQ ID NO: 1880078
ccugcuuucuuccuggaga

SEQ ID NO: 1941253 - RNA, 19 nt, Artificial Sequence
  Description of Artificial Sequence: Synthetic oligonucleotide
  Antisense strand to SEQ ID NO: 1941252
ucuccaggaagaaagcagg

SEQ ID NO: 1941254 - RNA, 19 nt, Artificial Sequence
  Description of Artificial Sequence: Synthetic oligonucleotide
  Sense strand starting at position 1376 of SEQ ID NO: 1880078
cugcuuucuuccuggagaa

SEQ ID NO: 1941255 - RNA, 19 nt, Artificial Sequence
  Description of Artificial Sequence: Synthetic oligonucleotide
  Antisense strand to SEQ ID NO: 1941254
uucuccaggaagaaagcag

SEQ ID NO: 1941256 - RNA, 19 nt, Artificial Sequence
  Description of Artificial Sequence: Synthetic oligonucleotide
  Sense strand starting at position 1377 of SEQ ID NO: 1880078
ugcuuucuuccuggagaac

SEQ ID NO: 1941257 - RNA, 19 nt, Artificial Sequence
  Description of Artificial Sequence: Synthetic oligonucleotide
  Antisense strand to SEQ ID NO: 1941256
guucuccaggaagaaagca

SEQ ID NO: 1941258 - RNA, 19 nt, Artificial Sequence
  Description of Artificial Sequence: Synthetic oligonucleotide
  Sense strand starting at position 1378 of SEQ ID NO: 1880078
gcuuucuuccuggagaaca

SEQ ID NO: 1941259 - RNA, 19 nt, Artificial Sequence
  Description of Artificial Sequence: Synthetic oligonucleotide
  Antisense strand to SEQ ID NO: 1941258
uguucuccaggaagaaagc

SEQ ID NO: 1941260 - RNA, 19 nt, Artificial Sequence
  Description of Artificial Sequence: Synthetic oligonucleotide
  Sense strand starting at position 1397 of SEQ ID NO: 1880078
gcacccaucugcguaguuu

SEQ ID NO: 1941261 - RNA, 19 nt, Artificial Sequence
  Description of Artificial Sequence: Synthetic oligonucleotide
  Antisense strand to SEQ ID NO: 1941260
aaacuacgcagaugggugc

SEQ ID NO: 1941262 - RNA, 19 nt, Artificial Sequence
  Description of Artificial Sequence: Synthetic oligonucleotide
  Sense strand starting at position 1698 of SEQ ID NO: 1880078
gcgugcaggcgacauguua

SEQ ID NO: 1941263 - RNA, 19 nt, Artificial Sequence
  Description of Artificial Sequence: Synthetic oligonucleotide
  Antisense strand to SEQ ID NO: 1941262
uaacaugucgccugcacgc

SEQ ID NO: 1941264 - RNA, 19 nt, Artificial Sequence
  Description of Artificial Sequence: Synthetic oligonucleotide
  Sense strand starting at position 1705 of SEQ ID NO: 1880078
ggcgacauguuacuuccua

SEQ ID NO: 1941265 - RNA, 19 nt, Artificial Sequence
  Description of Artificial Sequence: Synthetic oligonucleotide
  Antisense strand to SEQ ID NO: 1941264
uaggaaguaacaugucgcc

SEQ ID NO: 1941266 - RNA, 19 nt, Artificial Sequence
  Description of Artificial Sequence: Synthetic oligonucleotide
  Sense strand starting at position 1706 of SEQ ID NO: 1880078
gcgacauguuacuuccuau

SEQ ID NO: 1941267 - RNA, 19 nt, Artificial Sequence
  Description of Artificial Sequence: Synthetic oligonucleotide
  Antisense strand to SEQ ID NO: 1941266
auaggaaguaacaugucgc

SEQ ID NO: 1941268 - RNA, 19 nt, Artificial Sequence
  Description of Artificial Sequence: Synthetic oligonucleotide
  Sense strand starting at position 1791 of SEQ ID NO: 1880078
agauaugacccuuagcgua

SEQ ID NO: 1941269 - RNA, 19 nt, Artificial Sequence
  Description of Artificial Sequence: Synthetic oligonucleotide
  Antisense strand to SEQ ID NO: 1941268
uacgcuaagggucauaucu

SEQ ID NO: 1941270 - RNA, 19 nt, Artificial Sequence
  Description of Artificial Sequence: Synthetic oligonucleotide
  Sense strand starting at position 2107 of SEQ ID NO: 1880078
cugggauucucucuuccga

SEQ ID NO: 1941271 - RNA, 19 nt, Artificial Sequence
  Description of Artificial Sequence: Synthetic oligonucleotide
  Antisense strand to SEQ ID NO: 1941270
ucggaagagagaaucccag

SEQ ID NO: 1941272 - RNA, 19 nt, Artificial Sequence
  Description of Artificial Sequence: Synthetic oligonucleotide
  Sense strand starting at position 2109 of SEQ ID NO: 1880078
gggauucucucuuccgauc

SEQ ID NO: 1941273 - RNA, 19 nt, Artificial Sequence
  Description of Artificial Sequence: Synthetic oligonucleotide
  Antisense strand to SEQ ID NO: 1941272
gaucggaagagagaauccc

SEQ ID NO: 1941274 - RNA, 19 nt, Artificial Sequence
  Description of Artificial Sequence: Synthetic oligonucleotide
  Sense strand starting at position 2292 of SEQ ID NO: 1880078
ugaccaaucugcugccaga

SEQ ID NO: 1941275 - RNA, 19 nt, Artificial Sequence
  Description of Artificial Sequence: Synthetic oligonucleotide
  Antisense strand to SEQ ID NO: 1941274
ucuggcagcagauugguca

SEQ ID NO: 1941276 - RNA, 19 nt, Artificial Sequence
  Description of Artificial Sequence: Synthetic oligonucleotide
  Sense strand starting at position 2513 of SEQ ID NO: 1880078
acaucuuuaucccugugau

SEQ ID NO: 1941277 - RNA, 19 nt, Artificial Sequence
  Description of Artificial Sequence: Synthetic oligonucleotide
  Antisense strand to SEQ ID NO: 1941276
aucacagggauaaagaugu

SEQ ID NO: 1941278 - RNA, 19 nt, Artificial Sequence
  Description of Artificial Sequence: Synthetic oligonucleotide
  Sense strand starting at position 2516 of SEQ ID NO: 1880078
ucuuuaucccugugaugca

SEQ ID NO: 1941279 - RNA, 19 nt, Artificial Sequence
  Description of Artificial Sequence: Synthetic oligonucleotide
  Antisense strand to SEQ ID NO: 1941278
ugcaucacagggauaaaga

SEQ ID NO: 1941280 - RNA, 19 nt, Artificial Sequence
  Description of Artificial Sequence: Synthetic oligonucleotide
  Sense strand starting at position 2907 of SEQ ID NO: 1880078
uuuaacaaugucuggauca

SEQ ID NO: 1941281 - RNA, 19 nt, Artificial Sequence
  Description of Artificial Sequence: Synthetic oligonucleotide
  Antisense strand to SEQ ID NO: 1941280
ugauccagacauuguuaaa

SEQ ID NO: 1941282 - RNA, 19 nt, Artificial Sequence
  Description of Artificial Sequence: Synthetic oligonucleotide
  Sense strand starting at position 2908 of SEQ ID NO: 1880078
uuaacaaugucuggaucau

SEQ ID NO: 1941283 - RNA, 19 nt, Artificial Sequence
  Description of Artificial Sequence: Synthetic oligonucleotide
  Antisense strand to SEQ ID NO: 1941282
augauccagacauuguuaa

SEQ ID NO: 1941284 - RNA, 19 nt, Artificial Sequence
  Description of Artificial Sequence: Synthetic oligonucleotide
  Sense strand starting at position 3248 of SEQ ID NO: 1880078
agaccaauauuugauguaa

SEQ ID NO: 1941285 - RNA, 19 nt, Artificial Sequence
  Description of Artificial Sequence: Synthetic oligonucleotide
  Antisense strand to SEQ ID NO: 1941284
uuacaucaaauauuggucu

SEQ ID NO: 1941286 - RNA, 19 nt, Artificial Sequence
  Description of Artificial Sequence: Synthetic oligonucleotide
  Sense strand starting at position 3471 of SEQ ID NO: 1880078
uugacuuuguucucgcgau

SEQ ID NO: 1941287 - RNA, 19 nt, Artificial Sequence
  Description of Artificial Sequence: Synthetic oligonucleotide
  Antisense strand to SEQ ID NO: 1941286
aucgcgagaacaaagucaa

SEQ ID NO: 1941288 - RNA, 19 nt, Artificial Sequence
  Description of Artificial Sequence: Synthetic oligonucleotide
  Sense strand starting at position 3607 of SEQ ID NO: 1880078
gagaguucuccuuggagac

SEQ ID NO: 1941289 - RNA, 19 nt, Artificial Sequence
  Description of Artificial Sequence: Synthetic oligonucleotide
  Antisense strand to SEQ ID NO: 1941288
gucuccaaggagaacucuc

SEQ ID NO: 1941290 - RNA, 19 nt, Artificial Sequence
  Description of Artificial Sequence: Synthetic oligonucleotide
  Sense strand starting at position 3609 of SEQ ID NO: 1880078
gaguucuccuuggagacca

SEQ ID NO: 1941291 - RNA, 19 nt, Artificial Sequence
  Description of Artificial Sequence: Synthetic oligonucleotide
  Antisense strand to SEQ ID NO: 1941290
uggucuccaaggagaacuc

SEQ ID NO: 1941292 - RNA, 19 nt, Artificial Sequence
  Description of Artificial Sequence: Synthetic oligonucleotide
  Sense strand starting at position 3625 of SEQ ID NO: 1880078
ccauaaagauucuguggca

SEQ ID NO: 1941293 - RNA, 19 nt, Artificial Sequence
  Description of Artificial Sequence: Synthetic oligonucleotide
  Antisense strand to SEQ ID NO: 1941292
ugccacagaaucuuuaugg

SEQ ID NO: 1941294 - RNA, 19 nt, Artificial Sequence
  Description of Artificial Sequence: Synthetic oligonucleotide
  Sense strand starting at position 3626 of SEQ ID NO: 1880078
cauaaagauucuguggcau

SEQ ID NO: 1941295 - RNA, 19 nt, Artificial Sequence
  Description of Artificial Sequence: Synthetic oligonucleotide
  Antisense strand to SEQ ID NO: 1941294
augccacagaaucuuuaug

SEQ ID NO: 1941296 - RNA, 19 nt, Artificial Sequence
  Description of Artificial Sequence: Synthetic oligonucleotide
  Sense strand starting at position 3865 of SEQ ID NO: 1880078
auggguucuuccugcccaa

SEQ ID NO: 1941297 - RNA, 19 nt, Artificial Sequence
  Description of Artificial Sequence: Synthetic oligonucleotide
  Antisense strand to SEQ ID NO: 1941296
uugggcaggaagaacccau

SEQ ID NO: 1941298 - RNA, 19 nt, Artificial Sequence
  Description of Artificial Sequence: Synthetic oligonucleotide
  Sense strand starting at position 3869 of SEQ ID NO: 1880078
guucuuccugcccaaugua

SEQ ID NO: 1941299 - RNA, 19 nt, Artificial Sequence
  Description of Artificial Sequence: Synthetic oligonucleotide
  Antisense strand to SEQ ID NO: 1941298
uacauugggcaggaagaac

SEQ ID NO: 1941300 - RNA, 19 nt, Artificial Sequence
  Description of Artificial Sequence: Synthetic oligonucleotide
  Sense strand starting at position 48 of SEQ ID NO: 1880079
gccuguuggauacaggauu

SEQ ID NO: 1941301 - RNA, 19 nt, Artificial Sequence
  Description of Artificial Sequence: Synthetic oligonucleotide
  Antisense strand to SEQ ID NO: 1941300
aauccuguauccaacaggc

SEQ ID NO: 1941302 - RNA, 19 nt, Artificial Sequence
  Description of Artificial Sequence: Synthetic oligonucleotide
  Sense strand starting at position 3224 of SEQ ID NO: 1880079
uggugcuggauuugaugua

SEQ ID NO: 1941303 - RNA, 19 nt, Artificial Sequence
  Description of Artificial Sequence: Synthetic oligonucleotide
  Antisense strand to SEQ ID NO: 1941302
uacaucaaauccagcacca

SEQ ID NO: 1941304 - RNA, 19 nt, Artificial Sequence
  Description of Artificial Sequence: Synthetic oligonucleotide
  Sense strand starting at position 3248 of SEQ ID NO: 1880079
uaccgaggcccucauuaua

SEQ ID NO: 1941305 - RNA, 19 nt, Artificial Sequence
  Description of Artificial Sequence: Synthetic oligonucleotide
  Antisense strand to SEQ ID NO: 1941304
uauaaugagggccucggua

SEQ ID NO: 1941306 - RNA, 19 nt, Artificial Sequence
  Description of Artificial Sequence: Synthetic oligonucleotide
  Sense strand starting at position 3393 of SEQ ID NO: 1880079
cuauuccacuccuugguua

SEQ ID NO: 1941307 - RNA, 19 nt, Artificial Sequence
  Description of Artificial Sequence: Synthetic oligonucleotide
  Antisense strand to SEQ ID NO: 1941306
uaaccaaggaguggaauag

SEQ ID NO: 1941308 - RNA, 19 nt, Artificial Sequence
  Description of Artificial Sequence: Synthetic oligonucleotide
  Sense strand starting at position 3395 of SEQ ID NO: 1880079
auuccacuccuugguuaga

SEQ ID NO: 1941309 - RNA, 19 nt, Artificial Sequence
  Description of Artificial Sequence: Synthetic oligonucleotide
  Antisense strand to SEQ ID NO: 1941308
ucuaaccaaggaguggaau

SEQ ID NO: 1941310 - RNA, 19 nt, Artificial Sequence
  Description of Artificial Sequence: Synthetic oligonucleotide
  Sense strand starting at position 3397 of SEQ ID NO: 1880079
uccacuccuugguuagaga

SEQ ID NO: 1941311 - RNA, 19 nt, Artificial Sequence
  Description of Artificial Sequence: Synthetic oligonucleotide
  Antisense strand to SEQ ID NO: 1941310
ucucuaaccaaggagugga

SEQ ID NO: 1941312 - RNA, 19 nt, Artificial Sequence
  Description of Artificial Sequence: Synthetic oligonucleotide
  Sense strand starting at position 3444 of SEQ ID NO: 1880079
auuguucucugucggguau

SEQ ID NO: 1941313 - RNA, 19 nt, Artificial Sequence
  Description of Artificial Sequence: Synthetic oligonucleotide
  Antisense strand to SEQ ID NO: 1941312
auacccgacagagaacaau

SEQ ID NO: 1941314 - RNA, 19 nt, Artificial Sequence
  Description of Artificial Sequence: Synthetic oligonucleotide
  Sense strand starting at position 3540 of SEQ ID NO: 1880079
uugacuuuguucuugagau

SEQ ID NO: 1941315 - RNA, 19 nt, Artificial Sequence
  Description of Artificial Sequence: Synthetic oligonucleotide
  Antisense strand to SEQ ID NO: 1941314
aucucaagaacaaagucaa

SEQ ID NO: 1941316 - RNA, 19 nt, Artificial Sequence
  Description of Artificial Sequence: Synthetic oligonucleotide
  Sense strand starting at position 3541 of SEQ ID NO: 1880079
ugacuuuguucuugagaug

SEQ ID NO: 1941317 - RNA, 19 nt, Artificial Sequence
  Description of Artificial Sequence: Synthetic oligonucleotide
  Antisense strand to SEQ ID NO: 1941316
caucucaagaacaaaguca

SEQ ID NO: 1941318 - RNA, 19 nt, Artificial Sequence
  Description of Artificial Sequence: Synthetic oligonucleotide
  Sense strand starting at position 3676 of SEQ ID NO: 1880079
gagaguucuccuuggagac

SEQ ID NO: 1941319 - RNA, 19 nt, Artificial Sequence
  Description of Artificial Sequence: Synthetic oligonucleotide
  Antisense strand to SEQ ID NO: 1941318
gucuccaaggagaacucuc

SEQ ID NO: 1941320 - RNA, 19 nt, Artificial Sequence
  Description of Artificial Sequence: Synthetic oligonucleotide
  Sense strand starting at position 3678 of SEQ ID NO: 1880079
gaguucuccuuggagacca

SEQ ID NO: 1941321 - RNA, 19 nt, Artificial Sequence
  Description of Artificial Sequence: Synthetic oligonucleotide
  Antisense strand to SEQ ID NO: 1941320
uggucuccaaggagaacuc

SEQ ID NO: 1941322 - RNA, 19 nt, Artificial Sequence
  Description of Artificial Sequence: Synthetic oligonucleotide
  Sense strand starting at position 3766 of SEQ ID NO: 1880079
gagauuaggugacagugua

SEQ ID NO: 1941323 - RNA, 19 nt, Artificial Sequence
  Description of Artificial Sequence: Synthetic oligonucleotide
  Antisense strand to SEQ ID NO: 1941322
uacacugucaccuaaucuc

SEQ ID NO: 1941324 - RNA, 19 nt, Artificial Sequence
  Description of Artificial Sequence: Synthetic oligonucleotide
  Sense strand starting at position 3774 of SEQ ID NO: 1880079
gugacaguguaguaauaac

SEQ ID NO: 1941325 - RNA, 19 nt, Artificial Sequence
  Description of Artificial Sequence: Synthetic oligonucleotide
  Antisense strand to SEQ ID NO: 1941324
guuauuacuacacugucac

SEQ ID NO: 1941326 - RNA, 19 nt, Artificial Sequence
  Description of Artificial Sequence: Synthetic oligonucleotide
  Sense strand starting at position 3784 of SEQ ID NO: 1880079
aguaauaacugcugaauac

SEQ ID NO: 1941327 - RNA, 19 nt, Artificial Sequence
  Description of Artificial Sequence: Synthetic oligonucleotide
  Antisense strand to SEQ ID NO: 1941326
guauucagcaguuauuacu

SEQ ID NO: 1941328 - RNA, 19 nt, Artificial Sequence
  Description of Artificial Sequence: Synthetic oligonucleotide
  Sense strand starting at position 3785 of SEQ ID NO: 1880079
guaauaacugcugaauacu

SEQ ID NO: 1941329 - RNA, 19 nt, Artificial Sequence
  Description of Artificial Sequence: Synthetic oligonucleotide
  Antisense strand to SEQ ID NO: 1941328
aguauucagcaguuauuac

SEQ ID NO: 1941330 - RNA, 19 nt, Artificial Sequence
  Description of Artificial Sequence: Synthetic oligonucleotide
  Sense strand starting at position 382 of SEQ ID NO: 1880080
accucaguugaucagaagu

SEQ ID NO: 1941331 - RNA, 19 nt, Artificial Sequence
  Description of Artificial Sequence: Synthetic oligonucleotide
  Antisense strand to SEQ ID NO: 1941330
acuucugaucaacugaggu

SEQ ID NO: 1941332 - RNA, 19 nt, Artificial Sequence
  Description of Artificial Sequence: Synthetic oligonucleotide
  Sense strand starting at position 877 of SEQ ID NO: 1880080
uaaggaauuugccagggua

SEQ ID NO: 1941333 - RNA, 19 nt, Artificial Sequence
  Description of Artificial Sequence: Synthetic oligonucleotide
  Antisense strand to SEQ ID NO: 1941332
uacccuggcaaauuccuua

SEQ ID NO: 1941334 - RNA, 19 nt, Artificial Sequence
  Description of Artificial Sequence: Synthetic oligonucleotide
  Sense strand starting at position 995 of SEQ ID NO: 1880080
ggacacuggcgccagaaau

SEQ ID NO: 1941335 - RNA, 19 nt, Artificial Sequence
  Description of Artificial Sequence: Synthetic oligonucleotide
  Antisense strand to SEQ ID NO: 1941334
auuucuggcgccagugucc

SEQ ID NO: 1941336 - RNA, 19 nt, Artificial Sequence
  Description of Artificial Sequence: Synthetic oligonucleotide
  Sense strand starting at position 1050 of SEQ ID NO: 1880080
gggugcuaucuagaaagcu

SEQ ID NO: 1941337 - RNA, 19 nt, Artificial Sequence
  Description of Artificial Sequence: Synthetic oligonucleotide
  Antisense strand to SEQ ID NO: 1941336
agcuuucuagauagcaccc

SEQ ID NO: 1941338 - RNA, 19 nt, Artificial Sequence
  Description of Artificial Sequence: Synthetic oligonucleotide
  Sense strand starting at position 1060 of SEQ ID NO: 1880080
uagaaagcugccuggcaau

SEQ ID NO: 1941339 - RNA, 19 nt, Artificial Sequence
  Description of Artificial Sequence: Synthetic oligonucleotide
  Antisense strand to SEQ ID NO: 1941338
auugccaggcagcuuucua

SEQ ID NO: 1941340 - RNA, 19 nt, Artificial Sequence
  Description of Artificial Sequence: Synthetic oligonucleotide
  Sense strand starting at position 1090 of SEQ ID NO: 1880080
gcggaagcgagacaucaaa

SEQ ID NO: 1941341 - RNA, 19 nt, Artificial Sequence
  Description of Artificial Sequence: Synthetic oligonucleotide
  Antisense strand to SEQ ID NO: 1941340
uuugaugucucgcuuccgc

SEQ ID NO: 1941342 - RNA, 19 nt, Artificial Sequence
  Description of Artificial Sequence: Synthetic oligonucleotide
  Sense strand starting at position 1181 of SEQ ID NO: 1880080
ggacccgucuccucauaaa

SEQ ID NO: 1941343 - RNA, 19 nt, Artificial Sequence
  Description of Artificial Sequence: Synthetic oligonucleotide
  Antisense strand to SEQ ID NO: 1941342
uuuaugaggagacgggucc

SEQ ID NO: 1941344 - RNA, 19 nt, Artificial Sequence
  Description of Artificial Sequence: Synthetic oligonucleotide
  Sense strand starting at position 1221 of SEQ ID NO: 1880080
ggaggaucgcagcgcauuu

SEQ ID NO: 1941345 - RNA, 19 nt, Artificial Sequence
  Description of Artificial Sequence: Synthetic oligonucleotide
  Antisense strand to SEQ ID NO: 1941344
aaaugcgcugcgauccucc

SEQ ID NO: 1941346 - RNA, 19 nt, Artificial Sequence
  Description of Artificial Sequence: Synthetic oligonucleotide
  Sense strand starting at position 1232 of SEQ ID NO: 1880080
gcgcauuucggccaagaca

SEQ ID NO: 1941347 - RNA, 19 nt, Artificial Sequence
  Description of Artificial Sequence: Synthetic oligonucleotide
  Antisense strand to SEQ ID NO: 1941346
ugucuuggccgaaaugcgc

SEQ ID NO: 1941348 - RNA, 19 nt, Artificial Sequence
  Description of Artificial Sequence: Synthetic oligonucleotide
  Sense strand starting at position 1282 of SEQ ID NO: 1880080
gaugaauugcguuaggaca

SEQ ID NO: 1941349 - RNA, 19 nt, Artificial Sequence
  Description of Artificial Sequence: Synthetic oligonucleotide
  Antisense strand to SEQ ID NO: 1941348
uguccuaacgcaauucauc

SEQ ID NO: 1941350 - RNA, 19 nt, Artificial Sequence
  Description of Artificial Sequence: Synthetic oligonucleotide
  Sense strand starting at position 1520 of SEQ ID NO: 1880080
gugaaaugugacuggaggu

SEQ ID NO: 1941351 - RNA, 19 nt, Artificial Sequence
  Description of Artificial Sequence: Synthetic oligonucleotide
  Antisense strand to SEQ ID NO: 1941350
accuccagucacauuucac

SEQ ID NO: 1941352 - RNA, 19 nt, Artificial Sequence
  Description of Artificial Sequence: Synthetic oligonucleotide
  Sense strand starting at position 1658 of SEQ ID NO: 1880080
gcgcuagcuagcuugugua

SEQ ID NO: 1941353 - RNA, 19 nt, Artificial Sequence
  Description of Artificial Sequence: Synthetic oligonucleotide
  Antisense strand to SEQ ID NO: 1941352
uacacaagcuagcuagcgc

SEQ ID NO: 1941354 - RNA, 19 nt, Artificial Sequence
  Description of Artificial Sequence: Synthetic oligonucleotide
  Sense strand starting at position 1660 of SEQ ID NO: 1880080
gcuagcuagcuuguguaaa

SEQ ID NO: 1941355 - RNA, 19 nt, Artificial Sequence
  Description of Artificial Sequence: Synthetic oligonucleotide
  Antisense strand to SEQ ID NO: 1941354
uuuacacaagcuagcuagc

SEQ ID NO: 1941356 - RNA, 19 nt, Artificial Sequence
  Description of Artificial Sequence: Synthetic oligonucleotide
  Sense strand starting at position 1715 of SEQ ID NO: 1880080
agcgacauauuacuacuau

SEQ ID NO: 1941357 - RNA, 19 nt, Artificial Sequence
  Description of Artificial Sequence: Synthetic oligonucleotide
  Antisense strand to SEQ ID NO: 1941356
auaguaguaauaugucgcu

SEQ ID NO: 1941358 - RNA, 19 nt, Artificial Sequence
  Description of Artificial Sequence: Synthetic oligonucleotide
  Sense strand starting at position 1748 of SEQ ID NO: 1880080
cugugagagaaacgauuaa

SEQ ID NO: 1941359 - RNA, 19 nt, Artificial Sequence
  Description of Artificial Sequence: Synthetic oligonucleotide
  Antisense strand to SEQ ID NO: 1941358
uuaaucguuucucucacag

SEQ ID NO: 1941360 - RNA, 19 nt, Artificial Sequence
  Description of Artificial Sequence: Synthetic oligonucleotide
  Sense strand starting at position 1755 of SEQ ID NO: 1880080
agaaacgauuaagaguaaa

SEQ ID NO: 1941361 - RNA, 19 nt, Artificial Sequence
  Description of Artificial Sequence: Synthetic oligonucleotide
  Antisense strand to SEQ ID NO: 1941360
uuuacucuuaaucguuucu

SEQ ID NO: 1941362 - RNA, 19 nt, Artificial Sequence
  Description of Artificial Sequence: Synthetic oligonucleotide
  Sense strand starting at position 1811 of SEQ ID NO: 1880080
gcagacuguucuuuaaacu

SEQ ID NO: 1941363 - RNA, 19 nt, Artificial Sequence
  Description of Artificial Sequence: Synthetic oligonucleotide
  Antisense strand to SEQ ID NO: 1941362
aguuuaaagaacagucugc

SEQ ID NO: 1941364 - RNA, 19 nt, Artificial Sequence
  Description of Artificial Sequence: Synthetic oligonucleotide
  Sense strand starting at position 2367 of SEQ ID NO: 1880080
gcaucuguucucgcccgaa

SEQ ID NO: 1941365 - RNA, 19 nt, Artificial Sequence
  Description of Artificial Sequence: Synthetic oligonucleotide
  Antisense strand to SEQ ID NO: 1941364
uucgggcgagaacagaugc

SEQ ID NO: 1941366 - RNA, 19 nt, Artificial Sequence
  Description of Artificial Sequence: Synthetic oligonucleotide
  Sense strand starting at position 2522 of SEQ ID NO: 1880080
uccuuauccuugucaugua

SEQ ID NO: 1941367 - RNA, 19 nt, Artificial Sequence
  Description of Artificial Sequence: Synthetic oligonucleotide
  Antisense strand to SEQ ID NO: 1941366
uacaugacaaggauaagga

SEQ ID NO: 1941368 - RNA, 19 nt, Artificial Sequence
  Description of Artificial Sequence: Synthetic oligonucleotide
  Sense strand starting at position 2540 of SEQ ID NO: 1880080
agcauuccgcuugaaauug

SEQ ID NO: 1941369 - RNA, 19 nt, Artificial Sequence
  Description of Artificial Sequence: Synthetic oligonucleotide
  Antisense strand to SEQ ID NO: 1941368
caauuucaagcggaaugcu

SEQ ID NO: 1941370 - RNA, 19 nt, Artificial Sequence
  Description of Artificial Sequence: Synthetic oligonucleotide
  Sense strand starting at position 2599 of SEQ ID NO: 1880080
gaaagaggcuucucagaug

SEQ ID NO: 1941371 - RNA, 19 nt, Artificial Sequence
  Description of Artificial Sequence: Synthetic oligonucleotide
  Antisense strand to SEQ ID NO: 1941370
caucugagaagccucuuuc

SEQ ID NO: 1941372 - RNA, 19 nt, Artificial Sequence
  Description of Artificial Sequence: Synthetic oligonucleotide
  Sense strand starting at position 2607 of SEQ ID NO: 1880080
cuucucagaugacugcaaa

SEQ ID NO: 1941373 - RNA, 19 nt, Artificial Sequence
  Description of Artificial Sequence: Synthetic oligonucleotide
  Antisense strand to SEQ ID NO: 1941372
uuugcagucaucugagaag

SEQ ID NO: 1941374 - RNA, 19 nt, Artificial Sequence
  Description of Artificial Sequence: Synthetic oligonucleotide
  Sense strand starting at position 2857 of SEQ ID NO: 1880080
uagugcuuaccucacguua

SEQ ID NO: 1941375 - RNA, 19 nt, Artificial Sequence
  Description of Artificial Sequence: Synthetic oligonucleotide
  Antisense strand to SEQ ID NO: 1941374
uaacgugagguaagcacua

SEQ ID NO: 1941376 - RNA, 19 nt, Artificial Sequence
  Description of Artificial Sequence: Synthetic oligonucleotide
  Sense strand starting at position 2923 of SEQ ID NO: 1880080
acaaauaccugggauacau

SEQ ID NO: 1941377 - RNA, 19 nt, Artificial Sequence
  Description of Artificial Sequence: Synthetic oligonucleotide
  Antisense strand to SEQ ID NO: 1941376
auguaucccagguauuugu

SEQ ID NO: 1941378 - RNA, 19 nt, Artificial Sequence
  Description of Artificial Sequence: Synthetic oligonucleotide
  Sense strand starting at position 2932 of SEQ ID NO: 1880080
ugggauacaucuuauuuga

SEQ ID NO: 1941379 - RNA, 19 nt, Artificial Sequence
  Description of Artificial Sequence: Synthetic oligonucleotide
  Antisense strand to SEQ ID NO: 1941378
ucaaauaagauguauccca

SEQ ID NO: 1941380 - RNA, 19 nt, Artificial Sequence
  Description of Artificial Sequence: Synthetic oligonucleotide
  Sense strand starting at position 2990 of SEQ ID NO: 1880080
gauuauaacgcaggaaaca

SEQ ID NO: 1941381 - RNA, 19 nt, Artificial Sequence
  Description of Artificial Sequence: Synthetic oligonucleotide
  Antisense strand to SEQ ID NO: 1941380
uguuuccugcguuauaauc

SEQ ID NO: 1941382 - RNA, 19 nt, Artificial Sequence
  Description of Artificial Sequence: Synthetic oligonucleotide
  Sense strand starting at position 3009 of SEQ ID NO: 1880080
cugugaaguaaguaaaguu

SEQ ID NO: 1941383 - RNA, 19 nt, Artificial Sequence
  Description of Artificial Sequence: Synthetic oligonucleotide
  Antisense strand to SEQ ID NO: 1941382
aacuuuacuuacuucacag

SEQ ID NO: 1941384 - RNA, 19 nt, Artificial Sequence
  Description of Artificial Sequence: Synthetic oligonucleotide
  Sense strand starting at position 3512 of SEQ ID NO: 1880080
gcugacucauccuugacuu

SEQ ID NO: 1941385 - RNA, 19 nt, Artificial Sequence
  Description of Artificial Sequence: Synthetic oligonucleotide
  Antisense strand to SEQ ID NO: 1941384
aagucaaggaugagucagc

SEQ ID NO: 1941386 - RNA, 19 nt, Artificial Sequence
  Description of Artificial Sequence: Synthetic oligonucleotide
  Sense strand starting at position 3524 of SEQ ID NO: 1880080
uugacuugguucuccagau

SEQ ID NO: 1941387 - RNA, 19 nt, Artificial Sequence
  Description of Artificial Sequence: Synthetic oligonucleotide
  Antisense strand to SEQ ID NO: 1941386
aucuggagaaccaagucaa

SEQ ID NO: 1941388 - RNA, 19 nt, Artificial Sequence
  Description of Artificial Sequence: Synthetic oligonucleotide
  Sense strand starting at position 3525 of SEQ ID NO: 1880080
ugacuugguucuccagaug

SEQ ID NO: 1941389 - RNA, 19 nt, Artificial Sequence
  Description of Artificial Sequence: Synthetic oligonucleotide
  Antisense strand to SEQ ID NO: 1941388
caucuggagaaccaaguca

SEQ ID NO: 1941390 - RNA, 19 nt, Artificial Sequence
  Description of Artificial Sequence: Synthetic oligonucleotide
  Sense strand starting at position 3665 of SEQ ID NO: 1880080
gucuccucuggagagcaua

SEQ ID NO: 1941391 - RNA, 19 nt, Artificial Sequence
  Description of Artificial Sequence: Synthetic oligonucleotide
  Antisense strand to SEQ ID NO: 1941390
uaugcucuccagaggagac

SEQ ID NO: 1941392 - RNA, 19 nt, Artificial Sequence
  Description of Artificial Sequence: Synthetic oligonucleotide
  Sense strand starting at position 3749 of SEQ ID NO: 1880080
gagggauuaggugacggua

SEQ ID NO: 1941393 - RNA, 19 nt, Artificial Sequence
  Description of Artificial Sequence: Synthetic oligonucleotide
  Antisense strand to SEQ ID NO: 1941392
uaccgucaccuaaucccuc

SEQ ID NO: 1941394 - RNA, 19 nt, Artificial Sequence
  Description of Artificial Sequence: Synthetic oligonucleotide
  Sense strand starting at position 3763 of SEQ ID NO: 1880080
cgguauaguaacugcugaa

SEQ ID NO: 1941395 - RNA, 19 nt, Artificial Sequence
  Description of Artificial Sequence: Synthetic oligonucleotide
  Antisense strand to SEQ ID NO: 1941394
uucagcaguuacuauaccg

SEQ ID NO: 1941396 - RNA, 19 nt, Artificial Sequence
  Description of Artificial Sequence: Synthetic oligonucleotide
  Sense strand starting at position 3767 of SEQ ID NO: 1880080
auaguaacugcugaauacu

SEQ ID NO: 1941397 - RNA, 19 nt, Artificial Sequence
  Description of Artificial Sequence: Synthetic oligonucleotide
  Antisense strand to SEQ ID NO: 1941396
aguauucagcaguuacuau

SEQ ID NO: 1941398 - RNA, 19 nt, Artificial Sequence
  Description of Artificial Sequence: Synthetic oligonucleotide
  Sense strand starting at position 3829 of SEQ ID NO: 1880080
acacaucguccagguagua

SEQ ID NO: 1941399 - RNA, 19 nt, Artificial Sequence
  Description of Artificial Sequence: Synthetic oligonucleotide
  Antisense strand to SEQ ID NO: 1941398
uacuaccuggacgaugugu

SEQ ID NO: 1941400 - RNA, 19 nt, Artificial Sequence
  Description of Artificial Sequence: Synthetic oligonucleotide
  Sense strand starting at position 3851 of SEQ ID NO: 1880080
gagaaauacuuucugggua

SEQ ID NO: 1941401 - RNA, 19 nt, Artificial Sequence
  Description of Artificial Sequence: Synthetic oligonucleotide
  Antisense strand to SEQ ID NO: 1941400
uacccagaaaguauuucuc

SEQ ID NO: 1941402 - RNA, 19 nt, Artificial Sequence
  Description of Artificial Sequence: Synthetic oligonucleotide
  Sense strand starting at position 3856 of SEQ ID NO: 1880080
auacuuucuggguaucuga

SEQ ID NO: 1941403 - RNA, 19 nt, Artificial Sequence
  Description of Artificial Sequence: Synthetic oligonucleotide
  Antisense strand to SEQ ID NO: 1941402
ucagauacccagaaaguau

SEQ ID NO: 1941404 - RNA, 19 nt, Artificial Sequence
  Description of Artificial Sequence: Synthetic oligonucleotide
  Sense strand starting at position 3872 of SEQ ID NO: 1880080
ugaccagccuucguggaaa

SEQ ID NO: 1941405 - RNA, 19 nt, Artificial Sequence
  Description of Artificial Sequence: Synthetic oligonucleotide
  Antisense strand to SEQ ID NO: 1941404
uuuccacgaaggcugguca

SEQ ID NO: 1941406 - RNA, 19 nt, Artificial Sequence
  Description of Artificial Sequence: Synthetic oligonucleotide
  Sense strand starting at position 3874 of SEQ ID NO: 1880080
accagccuucguggaaaga

SEQ ID NO: 1941407 - RNA, 19 nt, Artificial Sequence
  Description of Artificial Sequence: Synthetic oligonucleotide
  Antisense strand to SEQ ID NO: 1941406
ucuuuccacgaaggcuggu

SEQ ID NO: 1941408 - RNA, 19 nt, Artificial Sequence
  Description of Artificial Sequence: Synthetic oligonucleotide
  Sense strand starting at position 3875 of SEQ ID NO: 1880080
ccagccuucguggaaagaa

SEQ ID NO: 1941409 - RNA, 19 nt, Artificial Sequence
  Description of Artificial Sequence: Synthetic oligonucleotide
  Antisense strand to SEQ ID NO: 1941408
uucuuuccacgaaggcugg

SEQ ID NO: 1941410 - RNA, 19 nt, Artificial Sequence
  Description of Artificial Sequence: Synthetic oligonucleotide
  Sense strand starting at position 55 of SEQ ID NO: 1880081
cagauuagcugccauguau

SEQ ID NO: 1941411 - RNA, 19 nt, Artificial Sequence
  Description of Artificial Sequence: Synthetic oligonucleotide
  Antisense strand to SEQ ID NO: 1941410
auacauggcagcuaaucug

SEQ ID NO: 1941412 - RNA, 19 nt, Artificial Sequence
  Description of Artificial Sequence: Synthetic oligonucleotide
  Sense strand starting at position 62 of SEQ ID NO: 1880081
gcugccauguaucaccaaa

SEQ ID NO: 1941413 - RNA, 19 nt, Artificial Sequence
  Description of Artificial Sequence: Synthetic oligonucleotide
  Antisense strand to SEQ ID NO: 1941412
uuuggugauacauggcagc

SEQ ID NO: 1941414 - RNA, 19 nt, Artificial Sequence
  Description of Artificial Sequence: Synthetic oligonucleotide
  Sense strand starting at position 226 of SEQ ID NO: 1880081
gagugagagaccuguccua

SEQ ID NO: 1941415 - RNA, 19 nt, Artificial Sequence
  Description of Artificial Sequence: Synthetic oligonucleotide
  Antisense strand to SEQ ID NO: 1941414
uaggacaggucucucacuc

SEQ ID NO: 1941416 - RNA, 19 nt, Artificial Sequence
  Description of Artificial Sequence: Synthetic oligonucleotide
  Sense strand starting at position 839 of SEQ ID NO: 1880081
ggugauuuacagugcuauu

SEQ ID NO: 1941417 - RNA, 19 nt, Artificial Sequence
  Description of Artificial Sequence: Synthetic oligonucleotide
  Antisense strand to SEQ ID NO: 1941416
aauagcacuguaaaucacc

SEQ ID NO: 1941418 - RNA, 19 nt, Artificial Sequence
  Description of Artificial Sequence: Synthetic oligonucleotide
  Sense strand starting at position 842 of SEQ ID NO: 1880081
gauuuacagugcuauuuga

SEQ ID NO: 1941419 - RNA, 19 nt, Artificial Sequence
  Description of Artificial Sequence: Synthetic oligonucleotide
  Antisense strand to SEQ ID NO: 1941418
ucaaauagcacuguaaauc

SEQ ID NO: 1941420 - RNA, 19 nt, Artificial Sequence
  Description of Artificial Sequence: Synthetic oligonucleotide
  Sense strand starting at position 893 of SEQ ID NO: 1880081
acgcgugucagguguaaac

SEQ ID NO: 1941421 - RNA, 19 nt, Artificial Sequence
  Description of Artificial Sequence: Synthetic oligonucleotide
  Antisense strand to SEQ ID NO: 1941420
guuuacaccugacacgcgu

SEQ ID NO: 1941422 - RNA, 19 nt, Artificial Sequence
  Description of Artificial Sequence: Synthetic oligonucleotide
  Sense strand starting at position 1113 of SEQ ID NO: 1880081
ucgcuuaaagucugaagaa

SEQ ID NO: 1941423 - RNA, 19 nt, Artificial Sequence
  Description of Artificial Sequence: Synthetic oligonucleotide
  Antisense strand to SEQ ID NO: 1941422
uucuucagacuuuaagcga

SEQ ID NO: 1941424 - RNA, 19 nt, Artificial Sequence
  Description of Artificial Sequence: Synthetic oligonucleotide
  Sense strand starting at position 1114 of SEQ ID NO: 1880081
cgcuuaaagucugaagaaa

SEQ ID NO: 1941425 - RNA, 19 nt, Artificial Sequence
  Description of Artificial Sequence: Synthetic oligonucleotide
  Antisense strand to SEQ ID NO: 1941424
uuucuucagacuuuaagcg

SEQ ID NO: 1941426 - RNA, 19 nt, Artificial Sequence
  Description of Artificial Sequence: Synthetic oligonucleotide
  Sense strand starting at position 1318 of SEQ ID NO: 1880081
acgcaaaguaagcguguua

SEQ ID NO: 1941427 - RNA, 19 nt, Artificial Sequence
  Description of Artificial Sequence: Synthetic oligonucleotide
  Antisense strand to SEQ ID NO: 1941426
uaacacgcuuacuuugcgu

SEQ ID NO: 1941428 - RNA, 19 nt, Artificial Sequence
  Description of Artificial Sequence: Synthetic oligonucleotide
  Sense strand starting at position 1379 of SEQ ID NO: 1880081
gcuuucuucccagagaacu

SEQ ID NO: 1941429 - RNA, 19 nt, Artificial Sequence
  Description of Artificial Sequence: Synthetic oligonucleotide
  Antisense strand to SEQ ID NO: 1941428
aguucucugggaagaaagc

SEQ ID NO: 1941430 - RNA, 19 nt, Artificial Sequence
  Description of Artificial Sequence: Synthetic oligonucleotide
  Sense strand starting at position 1703 of SEQ ID NO: 1880081
ggcgacauguuacuuccua

SEQ ID NO: 1941431 - RNA, 19 nt, Artificial Sequence
  Description of Artificial Sequence: Synthetic oligonucleotide
  Antisense strand to SEQ ID NO: 1941430
uaggaaguaacaugucgcc

SEQ ID NO: 1941432 - RNA, 19 nt, Artificial Sequence
  Description of Artificial Sequence: Synthetic oligonucleotide
  Sense strand starting at position 1704 of SEQ ID NO: 1880081
gcgacauguuacuuccuau

SEQ ID NO: 1941433 - RNA, 19 nt, Artificial Sequence
  Description of Artificial Sequence: Synthetic oligonucleotide
  Antisense strand to SEQ ID NO: 1941432
auaggaaguaacaugucgc

SEQ ID NO: 1941434 - RNA, 19 nt, Artificial Sequence
  Description of Artificial Sequence: Synthetic oligonucleotide
  Sense strand starting at position 1791 of SEQ ID NO: 1880081
agauaugacccuuggcgua

SEQ ID NO: 1941435 - RNA, 19 nt, Artificial Sequence
  Description of Artificial Sequence: Synthetic oligonucleotide
  Antisense strand to SEQ ID NO: 1941434
uacgccaagggucauaucu

SEQ ID NO: 1941436 - RNA, 19 nt, Artificial Sequence
  Description of Artificial Sequence: Synthetic oligonucleotide
  Sense strand starting at position 2394 of SEQ ID NO: 1880081
gccuguguuaaggagcaau

SEQ ID NO: 1941437 - RNA, 19 nt, Artificial Sequence
  Description of Artificial Sequence: Synthetic oligonucleotide
  Antisense strand to SEQ ID NO: 1941436
auugcuccuuaacacaggc

SEQ ID NO: 1941438 - RNA, 19 nt, Artificial Sequence
  Description of Artificial Sequence: Synthetic oligonucleotide
  Sense strand starting at position 2397 of SEQ ID NO: 1880081
uguguuaaggagcaaucuu

SEQ ID NO: 1941439 - RNA, 19 nt, Artificial Sequence
  Description of Artificial Sequence: Synthetic oligonucleotide
  Antisense strand to SEQ ID NO: 1941438
aagauugcuccuuaacaca

SEQ ID NO: 1941440 - RNA, 19 nt, Artificial Sequence
  Description of Artificial Sequence: Synthetic oligonucleotide
  Sense strand starting at position 2409 of SEQ ID NO: 1880081
caaucuuucgguggccaga

SEQ ID NO: 1941441 - RNA, 19 nt, Artificial Sequence
  Description of Artificial Sequence: Synthetic oligonucleotide
  Antisense strand to SEQ ID NO: 1941440
ucuggccaccgaaagauug

SEQ ID NO: 1941442 - RNA, 19 nt, Artificial Sequence
  Description of Artificial Sequence: Synthetic oligonucleotide
  Sense strand starting at position 2531 of SEQ ID NO: 1880081
ugcagcauuccgcuugcau

SEQ ID NO: 1941443 - RNA, 19 nt, Artificial Sequence
  Description of Artificial Sequence: Synthetic oligonucleotide
  Antisense strand to SEQ ID NO: 1941442
augcaagcggaaugcugca

SEQ ID NO: 1941444 - RNA, 19 nt, Artificial Sequence
  Description of Artificial Sequence: Synthetic oligonucleotide
  Sense strand starting at position 2532 of SEQ ID NO: 1880081
gcagcauuccgcuugcauu

SEQ ID NO: 1941445 - RNA, 19 nt, Artificial Sequence
  Description of Artificial Sequence: Synthetic oligonucleotide
  Antisense strand to SEQ ID NO: 1941444
aaugcaagcggaaugcugc

SEQ ID NO: 1941446 - RNA, 19 nt, Artificial Sequence
  Description of Artificial Sequence: Synthetic oligonucleotide
  Sense strand starting at position 2533 of SEQ ID NO: 1880081
cagcauuccgcuugcauuu

SEQ ID NO: 1941447 - RNA, 19 nt, Artificial Sequence
  Description of Artificial Sequence: Synthetic oligonucleotide
  Antisense strand to SEQ ID NO: 1941446
aaaugcaagcggaaugcug

SEQ ID NO: 1941448 - RNA, 19 nt, Artificial Sequence
  Description of Artificial Sequence: Synthetic oligonucleotide
  Sense strand starting at position 2546 of SEQ ID NO: 1880081
gcauuuggaagccguuuaa

SEQ ID NO: 1941449 - RNA, 19 nt, Artificial Sequence
  Description of Artificial Sequence: Synthetic oligonucleotide
  Antisense strand to SEQ ID NO: 1941448
uuaaacggcuuccaaaugc

SEQ ID NO: 1941450 - RNA, 19 nt, Artificial Sequence
  Description of Artificial Sequence: Synthetic oligonucleotide
  Sense strand starting at position 2576 of SEQ ID NO: 1880081
agccauauuuaugaaagua

SEQ ID NO: 1941451 - RNA, 19 nt, Artificial Sequence
  Description of Artificial Sequence: Synthetic oligonucleotide
  Antisense strand to SEQ ID NO: 1941450
uacuuucauaaauauggcu

SEQ ID NO: 1941452 - RNA, 19 nt, Artificial Sequence
  Description of Artificial Sequence: Synthetic oligonucleotide
  Sense strand starting at position 3338 of SEQ ID NO: 1880081
acauuccacuccuugguua

SEQ ID NO: 1941453 - RNA, 19 nt, Artificial Sequence
  Description of Artificial Sequence: Synthetic oligonucleotide
  Antisense strand to SEQ ID NO: 1941452
uaaccaaggaguggaaugu

SEQ ID NO: 1941454 - RNA, 19 nt, Artificial Sequence
  Description of Artificial Sequence: Synthetic oligonucleotide
  Sense strand starting at position 3420 of SEQ ID NO: 1880081
cuuucuugagaguguacuu

SEQ ID NO: 1941455 - RNA, 19 nt, Artificial Sequence
  Description of Artificial Sequence: Synthetic oligonucleotide
  Antisense strand to SEQ ID NO: 1941454
aaguacacucucaagaaag

SEQ ID NO: 1941456 - RNA, 19 nt, Artificial Sequence
  Description of Artificial Sequence: Synthetic oligonucleotide
  Sense strand starting at position 3485 of SEQ ID NO: 1880081
uugacuuuguucucgcgau

SEQ ID NO: 1941457 - RNA, 19 nt, Artificial Sequence
  Description of Artificial Sequence: Synthetic oligonucleotide
  Antisense strand to SEQ ID NO: 1941456
aucgcgagaacaaagucaa

SEQ ID NO: 1941458 - RNA, 19 nt, Artificial Sequence
  Description of Artificial Sequence: Synthetic oligonucleotide
  Sense strand starting at position 3486 of SEQ ID NO: 1880081
ugacuuuguucucgcgaug

SEQ ID NO: 1941459 - RNA, 19 nt, Artificial Sequence
  Description of Artificial Sequence: Synthetic oligonucleotide
  Antisense strand to SEQ ID NO: 1941458
caucgcgagaacaaaguca

SEQ ID NO: 1941460 - RNA, 19 nt, Artificial Sequence
  Description of Artificial Sequence: Synthetic oligonucleotide
  Sense strand starting at position 3621 of SEQ ID NO: 1880081
gagaguucucuuuggagac

SEQ ID NO: 1941461 - RNA, 19 nt, Artificial Sequence
  Description of Artificial Sequence: Synthetic oligonucleotide
  Antisense strand to SEQ ID NO: 1941460
gucuccaaagagaacucuc

SEQ ID NO: 1941462 - RNA, 19 nt, Artificial Sequence
  Description of Artificial Sequence: Synthetic oligonucleotide
  Sense strand starting at position 3707 of SEQ ID NO: 1880081
ugagggauugggugacagu

SEQ ID NO: 1941463 - RNA, 19 nt, Artificial Sequence
  Description of Artificial Sequence: Synthetic oligonucleotide
  Antisense strand to SEQ ID NO: 1941462
acugucacccaaucccuca

SEQ ID NO: 1941464 - RNA, 19 nt, Artificial Sequence
  Description of Artificial Sequence: Synthetic oligonucleotide
  Sense strand starting at position 3716 of SEQ ID NO: 1880081
gggugacaguguaguaacu

SEQ ID NO: 1941465 - RNA, 19 nt, Artificial Sequence
  Description of Artificial Sequence: Synthetic oligonucleotide
  Antisense strand to SEQ ID NO: 1941464
aguuacuacacugucaccc

SEQ ID NO: 1941466 - RNA, 19 nt, Artificial Sequence
  Description of Artificial Sequence: Synthetic oligonucleotide
  Sense strand starting at position 3810 of SEQ ID NO: 1880081
gagaaaugcuuucugggua

SEQ ID NO: 1941467 - RNA, 19 nt, Artificial Sequence
  Description of Artificial Sequence: Synthetic oligonucleotide
  Antisense strand to SEQ ID NO: 1941466
uacccagaaagcauuucuc

SEQ ID NO: 1941468 - RNA, 19 nt, Artificial Sequence
  Description of Artificial Sequence: Synthetic oligonucleotide
  Sense strand starting at position 3811 of SEQ ID NO: 1880081
agaaaugcuuucuggguau

SEQ ID NO: 1941469 - RNA, 19 nt, Artificial Sequence
  Description of Artificial Sequence: Synthetic oligonucleotide
  Antisense strand to SEQ ID NO: 1941468
auacccagaaagcauuucu

SEQ ID NO: 1941470 - RNA, 19 nt, Artificial Sequence
  Description of Artificial Sequence: Synthetic oligonucleotide
  Sense strand starting at position 3813 of SEQ ID NO: 1880081
aaaugcuuucuggguaucu

SEQ ID NO: 1941471 - RNA, 19 nt, Artificial Sequence
  Description of Artificial Sequence: Synthetic oligonucleotide
  Antisense strand to SEQ ID NO: 1941470
agauacccagaaagcauuu

SEQ ID NO: 1941472 - RNA, 19 nt, Artificial Sequence
  Description of Artificial Sequence: Synthetic oligonucleotide
  Sense strand starting at position 3815 of SEQ ID NO: 1880081
augcuuucuggguaucuga

SEQ ID NO: 1941473 - RNA, 19 nt, Artificial Sequence
  Description of Artificial Sequence: Synthetic oligonucleotide
  Antisense strand to SEQ ID NO: 1941472
ucagauacccagaaagcau

SEQ ID NO: 1941474 - RNA, 19 nt, Artificial Sequence
  Description of Artificial Sequence: Synthetic oligonucleotide
  Sense strand starting at position 7 of SEQ ID NO: 1880082
aggaaaugccauuauucuc

SEQ ID NO: 1941475 - RNA, 19 nt, Artificial Sequence
  Description of Artificial Sequence: Synthetic oligonucleotide
  Antisense strand to SEQ ID NO: 1941474
gagaauaauggcauuuccu

SEQ ID NO: 1941476 - RNA, 19 nt, Artificial Sequence
  Description of Artificial Sequence: Synthetic oligonucleotide
  Sense strand starting at position 58 of SEQ ID NO: 1880082
agaccagauuagcugucau

SEQ ID NO: 1941477 - RNA, 19 nt, Artificial Sequence
  Description of Artificial Sequence: Synthetic oligonucleotide
  Antisense strand to SEQ ID NO: 1941476
augacagcuaaucuggucu

SEQ ID NO: 1941478 - RNA, 19 nt, Artificial Sequence
  Description of Artificial Sequence: Synthetic oligonucleotide
  Sense strand starting at position 90 of SEQ ID NO: 1880082
gggacuggauccuuguuaa

SEQ ID NO: 1941479 - RNA, 19 nt, Artificial Sequence
  Description of Artificial Sequence: Synthetic oligonucleotide
  Antisense strand to SEQ ID NO: 1941478
uuaacaaggauccaguccc

SEQ ID NO: 1941480 - RNA, 19 nt, Artificial Sequence
  Description of Artificial Sequence: Synthetic oligonucleotide
  Sense strand starting at position 93 of SEQ ID NO: 1880082
acuggauccuuguuaacac

SEQ ID NO: 1941481 - RNA, 19 nt, Artificial Sequence
  Description of Artificial Sequence: Synthetic oligonucleotide
  Antisense strand to SEQ ID NO: 1941480
guguuaacaaggauccagu

SEQ ID NO: 1941482 - RNA, 19 nt, Artificial Sequence
  Description of Artificial Sequence: Synthetic oligonucleotide
  Sense strand starting at position 853 of SEQ ID NO: 1880082
gauuuacagugccauuuga

SEQ ID NO: 1941483 - RNA, 19 nt, Artificial Sequence
  Description of Artificial Sequence: Synthetic oligonucleotide
  Antisense strand to SEQ ID NO: 1941482
ucaaauggcacuguaaauc

SEQ ID NO: 1941484 - RNA, 19 nt, Artificial Sequence
  Description of Artificial Sequence: Synthetic oligonucleotide
  Sense strand starting at position 1124 of SEQ ID NO: 1880082
ucgcuuaaagucuaaagaa

SEQ ID NO: 1941485 - RNA, 19 nt, Artificial Sequence
  Description of Artificial Sequence: Synthetic oligonucleotide
  Antisense strand to SEQ ID NO: 1941484
uucuuuagacuuuaagcga

SEQ ID NO: 1941486 - RNA, 19 nt, Artificial Sequence
  Description of Artificial Sequence: Synthetic oligonucleotide
  Sense strand starting at position 1340 of SEQ ID NO: 1880082
gaguguuaugucuacaacc

SEQ ID NO: 1941487 - RNA, 19 nt, Artificial Sequence
  Description of Artificial Sequence: Synthetic oligonucleotide
  Antisense strand to SEQ ID NO: 1941486
gguuguagacauaacacuc

SEQ ID NO: 1941488 - RNA, 19 nt, Artificial Sequence
  Description of Artificial Sequence: Synthetic oligonucleotide
  Sense strand starting at position 1390 of SEQ ID NO: 1880082
gcuuucuucccagagaaca

SEQ ID NO: 1941489 - RNA, 19 nt, Artificial Sequence
  Description of Artificial Sequence: Synthetic oligonucleotide
  Antisense strand to SEQ ID NO: 1941488
uguucucugggaagaaagc

SEQ ID NO: 1941490 - RNA, 19 nt, Artificial Sequence
  Description of Artificial Sequence: Synthetic oligonucleotide
  Sense strand starting at position 2530 of SEQ ID NO: 1880082
ugcagcauuccgcuugcaa

SEQ ID NO: 1941491 - RNA, 19 nt, Artificial Sequence
  Description of Artificial Sequence: Synthetic oligonucleotide
  Antisense strand to SEQ ID NO: 1941490
uugcaagcggaaugcugca

SEQ ID NO: 1941492 - RNA, 19 nt, Artificial Sequence
  Description of Artificial Sequence: Synthetic oligonucleotide
  Sense strand starting at position 2531 of SEQ ID NO: 1880082
gcagcauuccgcuugcaau

SEQ ID NO: 1941493 - RNA, 19 nt, Artificial Sequence
  Description of Artificial Sequence: Synthetic oligonucleotide
  Antisense strand to SEQ ID NO: 1941492
auugcaagcggaaugcugc

SEQ ID NO: 1941494 - RNA, 19 nt, Artificial Sequence
  Description of Artificial Sequence: Synthetic oligonucleotide
  Sense strand starting at position 2592 of SEQ ID NO: 1880082
uaaagaggcugcuuagaug

SEQ ID NO: 1941495 - RNA, 19 nt, Artificial Sequence
  Description of Artificial Sequence: Synthetic oligonucleotide
  Antisense strand to SEQ ID NO: 1941494
caucuaagcagccucuuua

SEQ ID NO: 1941496 - RNA, 19 nt, Artificial Sequence
  Description of Artificial Sequence: Synthetic oligonucleotide
  Sense strand starting at position 3342 of SEQ ID NO: 1880082
uuccaauucuugguuaaag

SEQ ID NO: 1941497 - RNA, 19 nt, Artificial Sequence
  Description of Artificial Sequence: Synthetic oligonucleotide
  Antisense strand to SEQ ID NO: 1941496
cuuuaaccaagaauuggaa

SEQ ID NO: 1941498 - RNA, 19 nt, Artificial Sequence
  Description of Artificial Sequence: Synthetic oligonucleotide
  Sense strand starting at position 3343 of SEQ ID NO: 1880082
uccaauucuugguuaaaga

SEQ ID NO: 1941499 - RNA, 19 nt, Artificial Sequence
  Description of Artificial Sequence: Synthetic oligonucleotide
  Antisense strand to SEQ ID NO: 1941498
ucuuuaaccaagaauugga

SEQ ID NO: 1941500 - RNA, 19 nt, Artificial Sequence
  Description of Artificial Sequence: Synthetic oligonucleotide
  Sense strand starting at position 3622 of SEQ ID NO: 1880082
gagaguucuccuuggagau

SEQ ID NO: 1941501 - RNA, 19 nt, Artificial Sequence
  Description of Artificial Sequence: Synthetic oligonucleotide
  Antisense strand to SEQ ID NO: 1941500
aucuccaaggagaacucuc

SEQ ID NO: 1941502 - RNA, 19 nt, Artificial Sequence
  Description of Artificial Sequence: Synthetic oligonucleotide
  Sense strand starting at position 3623 of SEQ ID NO: 1880082
agaguucuccuuggagauc

SEQ ID NO: 1941503 - RNA, 19 nt, Artificial Sequence
  Description of Artificial Sequence: Synthetic oligonucleotide
  Antisense strand to SEQ ID NO: 1941502
gaucuccaaggagaacucu

SEQ ID NO: 1941504 - RNA, 19 nt, Artificial Sequence
  Description of Artificial Sequence: Synthetic oligonucleotide
  Sense strand starting at position 3626 of SEQ ID NO: 1880082
guucuccuuggagaucaua

SEQ ID NO: 1941505 - RNA, 19 nt, Artificial Sequence
  Description of Artificial Sequence: Synthetic oligonucleotide
  Antisense strand to SEQ ID NO: 1941504
uaugaucuccaaggagaac

SEQ ID NO: 1941506 - RNA, 19 nt, Artificial Sequence
  Description of Artificial Sequence: Synthetic oligonucleotide
  Sense strand starting at position 3801 of SEQ ID NO: 1880082
gguaguaguggagaaaugu

SEQ ID NO: 1941507 - RNA, 19 nt, Artificial Sequence
  Description of Artificial Sequence: Synthetic oligonucleotide
  Antisense strand to SEQ ID NO: 1941506
acauuucuccacuacuacc

SEQ ID NO: 1941508 - RNA, 19 nt, Artificial Sequence
  Description of Artificial Sequence: Synthetic oligonucleotide
  Sense strand starting at position 8 of SEQ ID NO: 1880083
aggaaaugccauuauucuc

SEQ ID NO: 1941509 - RNA, 19 nt, Artificial Sequence
  Description of Artificial Sequence: Synthetic oligonucleotide
  Antisense strand to SEQ ID NO: 1941508
gagaauaauggcauuuccu

SEQ ID NO: 1941510 - RNA, 19 nt, Artificial Sequence
  Description of Artificial Sequence: Synthetic oligonucleotide
  Sense strand starting at position 91 of SEQ ID NO: 1880083
gggacuggauccuuguuaa

SEQ ID NO: 1941511 - RNA, 19 nt, Artificial Sequence
  Description of Artificial Sequence: Synthetic oligonucleotide
  Antisense strand to SEQ ID NO: 1941510
uuaacaaggauccaguccc

SEQ ID NO: 1941512 - RNA, 19 nt, Artificial Sequence
  Description of Artificial Sequence: Synthetic oligonucleotide
  Sense strand starting at position 94 of SEQ ID NO: 1880083
acuggauccuuguuaacac

SEQ ID NO: 1941513 - RNA, 19 nt, Artificial Sequence
  Description of Artificial Sequence: Synthetic oligonucleotide
  Antisense strand to SEQ ID NO: 1941512
guguuaacaaggauccagu

SEQ ID NO: 1941514 - RNA, 19 nt, Artificial Sequence
  Description of Artificial Sequence: Synthetic oligonucleotide
  Sense strand starting at position 680 of SEQ ID NO: 1880083
cugaccucagcugaucaaa

SEQ ID NO: 1941515 - RNA, 19 nt, Artificial Sequence
  Description of Artificial Sequence: Synthetic oligonucleotide
  Antisense strand to SEQ ID NO: 1941514
uuugaucagcugaggucag

SEQ ID NO: 1941516 - RNA, 19 nt, Artificial Sequence
  Description of Artificial Sequence: Synthetic oligonucleotide
  Sense strand starting at position 826 of SEQ ID NO: 1880083
uagauaguucugggaguua

SEQ ID NO: 1941517 - RNA, 19 nt, Artificial Sequence
  Description of Artificial Sequence: Synthetic oligonucleotide
  Antisense strand to SEQ ID NO: 1941516
uaacucccagaacuaucua

SEQ ID NO: 1941518 - RNA, 19 nt, Artificial Sequence
  Description of Artificial Sequence: Synthetic oligonucleotide
  Sense strand starting at position 854 of SEQ ID NO: 1880083
gauuuacagugccauuuga

SEQ ID NO: 1941519 - RNA, 19 nt, Artificial Sequence
  Description of Artificial Sequence: Synthetic oligonucleotide
  Antisense strand to SEQ ID NO: 1941518
ucaaauggcacuguaaauc

SEQ ID NO: 1941520 - RNA, 19 nt, Artificial Sequence
  Description of Artificial Sequence: Synthetic oligonucleotide
  Sense strand starting at position 1125 of SEQ ID NO: 1880083
ucgcuuaaagucuaaagaa

SEQ ID NO: 1941521 - RNA, 19 nt, Artificial Sequence
  Description of Artificial Sequence: Synthetic oligonucleotide
  Antisense strand to SEQ ID NO: 1941520
uucuuuagacuuuaagcga

SEQ ID NO: 1941522 - RNA, 19 nt, Artificial Sequence
  Description of Artificial Sequence: Synthetic oligonucleotide
  Sense strand starting at position 1341 of SEQ ID NO: 1880083
gaguguuaugucuacaacc

SEQ ID NO: 1941523 - RNA, 19 nt, Artificial Sequence
  Description of Artificial Sequence: Synthetic oligonucleotide
  Antisense strand to SEQ ID NO: 1941522
gguuguagacauaacacuc

SEQ ID NO: 1941524 - RNA, 19 nt, Artificial Sequence
  Description of Artificial Sequence: Synthetic oligonucleotide
  Sense strand starting at position 2107 of SEQ ID NO: 1880083
cugggauucucacuuccga

SEQ ID NO: 1941525 - RNA, 19 nt, Artificial Sequence
  Description of Artificial Sequence: Synthetic oligonucleotide
  Antisense strand to SEQ ID NO: 1941524
ucggaagugagaaucccag

SEQ ID NO: 1941526 - RNA, 19 nt, Artificial Sequence
  Description of Artificial Sequence: Synthetic oligonucleotide
  Sense strand starting at position 2513 of SEQ ID NO: 1880083
acauccuuauccuugugau

SEQ ID NO: 1941527 - RNA, 19 nt, Artificial Sequence
  Description of Artificial Sequence: Synthetic oligonucleotide
  Antisense strand to SEQ ID NO: 1941526
aucacaaggauaaggaugu

SEQ ID NO: 1941528 - RNA, 19 nt, Artificial Sequence
  Description of Artificial Sequence: Synthetic oligonucleotide
  Sense strand starting at position 2531 of SEQ ID NO: 1880083
ugcagcauuccgcuugcaa

SEQ ID NO: 1941529 - RNA, 19 nt, Artificial Sequence
  Description of Artificial Sequence: Synthetic oligonucleotide
  Antisense strand to SEQ ID NO: 1941528
uugcaagcggaaugcugca

SEQ ID NO: 1941530 - RNA, 19 nt, Artificial Sequence
  Description of Artificial Sequence: Synthetic oligonucleotide
  Sense strand starting at position 2532 of SEQ ID NO: 1880083
gcagcauuccgcuugcaau

SEQ ID NO: 1941531 - RNA, 19 nt, Artificial Sequence
  Description of Artificial Sequence: Synthetic oligonucleotide
  Antisense strand to SEQ ID NO: 1941530
auugcaagcggaaugcugc

SEQ ID NO: 1941532 - RNA, 19 nt, Artificial Sequence
  Description of Artificial Sequence: Synthetic oligonucleotide
  Sense strand starting at position 2550 of SEQ ID NO: 1880083
uuggaagccguuuaauauc

SEQ ID NO: 1941533 - RNA, 19 nt, Artificial Sequence
  Description of Artificial Sequence: Synthetic oligonucleotide
  Antisense strand to SEQ ID NO: 1941532
gauauuaaacggcuuccaa

SEQ ID NO: 1941534 - RNA, 19 nt, Artificial Sequence
  Description of Artificial Sequence: Synthetic oligonucleotide
  Sense strand starting at position 2593 of SEQ ID NO: 1880083
uaaagaggcugcuuagaug

SEQ ID NO: 1941535 - RNA, 19 nt, Artificial Sequence
  Description of Artificial Sequence: Synthetic oligonucleotide
  Antisense strand to SEQ ID NO: 1941534
caucuaagcagccucuuua

SEQ ID NO: 1941536 - RNA, 19 nt, Artificial Sequence
  Description of Artificial Sequence: Synthetic oligonucleotide
  Sense strand starting at position 2601 of SEQ ID NO: 1880083
cugcuuagaugacugcaaa

SEQ ID NO: 1941537 - RNA, 19 nt, Artificial Sequence
  Description of Artificial Sequence: Synthetic oligonucleotide
  Antisense strand to SEQ ID NO: 1941536
uuugcagucaucuaagcag

SEQ ID NO: 1941538 - RNA, 19 nt, Artificial Sequence
  Description of Artificial Sequence: Synthetic oligonucleotide
  Sense strand starting at position 2745 of SEQ ID NO: 1880083
uaugcugucccagaagaga

SEQ ID NO: 1941539 - RNA, 19 nt, Artificial Sequence
  Description of Artificial Sequence: Synthetic oligonucleotide
  Antisense strand to SEQ ID NO: 1941538
ucucuucugggacagcaua

SEQ ID NO: 1941540 - RNA, 19 nt, Artificial Sequence
  Description of Artificial Sequence: Synthetic oligonucleotide
  Sense strand starting at position 3263 of SEQ ID NO: 1880083
uucugagaccaguguuuga

SEQ ID NO: 1941541 - RNA, 19 nt, Artificial Sequence
  Description of Artificial Sequence: Synthetic oligonucleotide
  Antisense strand to SEQ ID NO: 1941540
ucaaacacuggucucagaa

SEQ ID NO: 1941542 - RNA, 19 nt, Artificial Sequence
  Description of Artificial Sequence: Synthetic oligonucleotide
  Sense strand starting at position 3343 of SEQ ID NO: 1880083
uuccaauucuugguuaaag

SEQ ID NO: 1941543 - RNA, 19 nt, Artificial Sequence
  Description of Artificial Sequence: Synthetic oligonucleotide
  Antisense strand to SEQ ID NO: 1941542
cuuuaaccaagaauuggaa

SEQ ID NO: 1941544 - RNA, 19 nt, Artificial Sequence
  Description of Artificial Sequence: Synthetic oligonucleotide
  Sense strand starting at position 3344 of SEQ ID NO: 1880083
uccaauucuugguuaaaga

SEQ ID NO: 1941545 - RNA, 19 nt, Artificial Sequence
  Description of Artificial Sequence: Synthetic oligonucleotide
  Antisense strand to SEQ ID NO: 1941544
ucuuuaaccaagaauugga

SEQ ID NO: 1941546 - RNA, 19 nt, Artificial Sequence
  Description of Artificial Sequence: Synthetic oligonucleotide
  Sense strand starting at position 3623 of SEQ ID NO: 1880083
gagaguucuccuuggagau

SEQ ID NO: 1941547 - RNA, 19 nt, Artificial Sequence
  Description of Artificial Sequence: Synthetic oligonucleotide
  Antisense strand to SEQ ID NO: 1941546
aucuccaaggagaacucuc

SEQ ID NO: 1941548 - RNA, 19 nt, Artificial Sequence
  Description of Artificial Sequence: Synthetic oligonucleotide
  Sense strand starting at position 3624 of SEQ ID NO: 1880083
agaguucuccuuggagauc

SEQ ID NO: 1941549 - RNA, 19 nt, Artificial Sequence
  Description of Artificial Sequence: Synthetic oligonucleotide
  Antisense strand to SEQ ID NO: 1941548
gaucuccaaggagaacucu

SEQ ID NO: 1941550 - RNA, 19 nt, Artificial Sequence
  Description of Artificial Sequence: Synthetic oligonucleotide
  Sense strand starting at position 3627 of SEQ ID NO: 1880083
guucuccuuggagaucaua

SEQ ID NO: 1941551 - RNA, 19 nt, Artificial Sequence
  Description of Artificial Sequence: Synthetic oligonucleotide
  Antisense strand to SEQ ID NO: 1941550
uaugaucuccaaggagaac

SEQ ID NO: 1941552 - RNA, 19 nt, Artificial Sequence
  Description of Artificial Sequence: Synthetic oligonucleotide
  Sense strand starting at position 3886 of SEQ ID NO: 1880083
uggguucuuccugaccaau

SEQ ID NO: 1941553 - RNA, 19 nt, Artificial Sequence
  Description of Artificial Sequence: Synthetic oligonucleotide
  Antisense strand to SEQ ID NO: 1941552
auuggucaggaagaaccca

SEQ ID NO: 1941554 - RNA, 19 nt, Artificial Sequence
  Description of Artificial Sequence: Synthetic oligonucleotide
  Sense strand starting at position 200 of SEQ ID NO: 1880084
ugaugcaaauaaugagaaa

SEQ ID NO: 1941555 - RNA, 19 nt, Artificial Sequence
  Description of Artificial Sequence: Synthetic oligonucleotide
  Antisense strand to SEQ ID NO: 1941554
uuucucauuauuugcauca

SEQ ID NO: 1941556 - RNA, 19 nt, Artificial Sequence
  Description of Artificial Sequence: Synthetic oligonucleotide
  Sense strand starting at position 408 of SEQ ID NO: 1880084
aaugucucagauggacuaa

SEQ ID NO: 1941557 - RNA, 19 nt, Artificial Sequence
  Description of Artificial Sequence: Synthetic oligonucleotide
  Antisense strand to SEQ ID NO: 1941556
uuaguccaucugagacauu

SEQ ID NO: 1941558 - RNA, 19 nt, Artificial Sequence
  Description of Artificial Sequence: Synthetic oligonucleotide
  Sense strand starting at position 853 of SEQ ID NO: 1880084
gagaaaggguauuaaggaa

SEQ ID NO: 1941559 - RNA, 19 nt, Artificial Sequence
  Description of Artificial Sequence: Synthetic oligonucleotide
  Antisense strand to SEQ ID NO: 1941558
uuccuuaauacccuuucuc

SEQ ID NO: 1941560 - RNA, 19 nt, Artificial Sequence
  Description of Artificial Sequence: Synthetic oligonucleotide
  Sense strand starting at position 865 of SEQ ID NO: 1880084
uaaggaauuugucagggua

SEQ ID NO: 1941561 - RNA, 19 nt, Artificial Sequence
  Description of Artificial Sequence: Synthetic oligonucleotide
  Antisense strand to SEQ ID NO: 1941560
uacccugacaaauuccuua

SEQ ID NO: 1941562 - RNA, 19 nt, Artificial Sequence
  Description of Artificial Sequence: Synthetic oligonucleotide
  Sense strand starting at position 867 of SEQ ID NO: 1880084
aggaauuugucaggguacu

SEQ ID NO: 1941563 - RNA, 19 nt, Artificial Sequence
  Description of Artificial Sequence: Synthetic oligonucleotide
  Antisense strand to SEQ ID NO: 1941562
aguacccugacaaauuccu

SEQ ID NO: 1941564 - RNA, 19 nt, Artificial Sequence
  Description of Artificial Sequence: Synthetic oligonucleotide
  Sense strand starting at position 887 of SEQ ID NO: 1880084
acgcgugucagguauaaac

SEQ ID NO: 1941565 - RNA, 19 nt, Artificial Sequence
  Description of Artificial Sequence: Synthetic oligonucleotide
  Antisense strand to SEQ ID NO: 1941564
guuuauaccugacacgcgu

SEQ ID NO: 1941566 - RNA, 19 nt, Artificial Sequence
  Description of Artificial Sequence: Synthetic oligonucleotide
  Sense strand starting at position 1036 of SEQ ID NO: 1880084
cugggugcuaucuagaaag

SEQ ID NO: 1941567 - RNA, 19 nt, Artificial Sequence
  Description of Artificial Sequence: Synthetic oligonucleotide
  Antisense strand to SEQ ID NO: 1941566
cuuucuagauagcacccag

SEQ ID NO: 1941568 - RNA, 19 nt, Artificial Sequence
  Description of Artificial Sequence: Synthetic oligonucleotide
  Sense strand starting at position 1038 of SEQ ID NO: 1880084
gggugcuaucuagaaaguu

SEQ ID NO: 1941569 - RNA, 19 nt, Artificial Sequence
  Description of Artificial Sequence: Synthetic oligonucleotide
  Antisense strand to SEQ ID NO: 1941568
aacuuucuagauagcaccc

SEQ ID NO: 1941570 - RNA, 19 nt, Artificial Sequence
  Description of Artificial Sequence: Synthetic oligonucleotide
  Sense strand starting at position 1047 of SEQ ID NO: 1880084
cuagaaaguugccuggcaa

SEQ ID NO: 1941571 - RNA, 19 nt, Artificial Sequence
  Description of Artificial Sequence: Synthetic oligonucleotide
  Antisense strand to SEQ ID NO: 1941570
uugccaggcaacuuucuag

SEQ ID NO: 1941572 - RNA, 19 nt, Artificial Sequence
  Description of Artificial Sequence: Synthetic oligonucleotide
  Sense strand starting at position 1048 of SEQ ID NO: 1880084
uagaaaguugccuggcaau

SEQ ID NO: 1941573 - RNA, 19 nt, Artificial Sequence
  Description of Artificial Sequence: Synthetic oligonucleotide
  Antisense strand to SEQ ID NO: 1941572
auugccaggcaacuuucua

SEQ ID NO: 1941574 - RNA, 19 nt, Artificial Sequence
  Description of Artificial Sequence: Synthetic oligonucleotide
  Sense strand starting at position 1074 of SEQ ID NO: 1880084
ggaugugggagcgagacau

SEQ ID NO: 1941575 - RNA, 19 nt, Artificial Sequence
  Description of Artificial Sequence: Synthetic oligonucleotide
  Antisense strand to SEQ ID NO: 1941574
augucucgcucccacaucc

SEQ ID NO: 1941576 - RNA, 19 nt, Artificial Sequence
  Description of Artificial Sequence: Synthetic oligonucleotide
  Sense strand starting at position 1078 of SEQ ID NO: 1880084
gugggagcgagacaucaaa

SEQ ID NO: 1941577 - RNA, 19 nt, Artificial Sequence
  Description of Artificial Sequence: Synthetic oligonucleotide
  Antisense strand to SEQ ID NO: 1941576
uuugaugucucgcucccac

SEQ ID NO: 1941578 - RNA, 19 nt, Artificial Sequence
  Description of Artificial Sequence: Synthetic oligonucleotide
  Sense strand starting at position 1139 of SEQ ID NO: 1880084
auaugaacugccggagaua

SEQ ID NO: 1941579 - RNA, 19 nt, Artificial Sequence
  Description of Artificial Sequence: Synthetic oligonucleotide
  Antisense strand to SEQ ID NO: 1941578
uaucuccggcaguucauau

SEQ ID NO: 1941580 - RNA, 19 nt, Artificial Sequence
  Description of Artificial Sequence: Synthetic oligonucleotide
  Sense strand starting at position 1142 of SEQ ID NO: 1880084
ugaacugccggagauagua

SEQ ID NO: 1941581 - RNA, 19 nt, Artificial Sequence
  Description of Artificial Sequence: Synthetic oligonucleotide
  Antisense strand to SEQ ID NO: 1941580
uacuaucuccggcaguuca

SEQ ID NO: 1941582 - RNA, 19 nt, Artificial Sequence
  Description of Artificial Sequence: Synthetic oligonucleotide
  Sense strand starting at position 1169 of SEQ ID NO: 1880084
guaccuggcuccucauaaa

SEQ ID NO: 1941583 - RNA, 19 nt, Artificial Sequence
  Description of Artificial Sequence: Synthetic oligonucleotide
  Antisense strand to SEQ ID NO: 1941582
uuuaugaggagccagguac

SEQ ID NO: 1941584 - RNA, 19 nt, Artificial Sequence
  Description of Artificial Sequence: Synthetic oligonucleotide
  Sense strand starting at position 1317 of SEQ ID NO: 1880084
acgcaaaguaagcguguua

SEQ ID NO: 1941585 - RNA, 19 nt, Artificial Sequence
  Description of Artificial Sequence: Synthetic oligonucleotide
  Antisense strand to SEQ ID NO: 1941584
uaacacgcuuacuuugcgu

SEQ ID NO: 1941586 - RNA, 19 nt, Artificial Sequence
  Description of Artificial Sequence: Synthetic oligonucleotide
  Sense strand starting at position 1375 of SEQ ID NO: 1880084
ccugcuuucuuccuggaga

SEQ ID NO: 1941587 - RNA, 19 nt, Artificial Sequence
  Description of Artificial Sequence: Synthetic oligonucleotide
  Antisense strand to SEQ ID NO: 1941586
ucuccaggaagaaagcagg

SEQ ID NO: 1941588 - RNA, 19 nt, Artificial Sequence
  Description of Artificial Sequence: Synthetic oligonucleotide
  Sense strand starting at position 1376 of SEQ ID NO: 1880084
cugcuuucuuccuggagaa

SEQ ID NO: 1941589 - RNA, 19 nt, Artificial Sequence
  Description of Artificial Sequence: Synthetic oligonucleotide
  Antisense strand to SEQ ID NO: 1941588
uucuccaggaagaaagcag

SEQ ID NO: 1941590 - RNA, 19 nt, Artificial Sequence
  Description of Artificial Sequence: Synthetic oligonucleotide
  Sense strand starting at position 1377 of SEQ ID NO: 1880084
ugcuuucuuccuggagaac

SEQ ID NO: 1941591 - RNA, 19 nt, Artificial Sequence
  Description of Artificial Sequence: Synthetic oligonucleotide
  Antisense strand to SEQ ID NO: 1941590
guucuccaggaagaaagca

SEQ ID NO: 1941592 - RNA, 19 nt, Artificial Sequence
  Description of Artificial Sequence: Synthetic oligonucleotide
  Sense strand starting at position 1378 of SEQ ID NO: 1880084
gcuuucuuccuggagaaca

SEQ ID NO: 1941593 - RNA, 19 nt, Artificial Sequence
  Description of Artificial Sequence: Synthetic oligonucleotide
  Antisense strand to SEQ ID NO: 1941592
uguucuccaggaagaaagc

SEQ ID NO: 1941594 - RNA, 19 nt, Artificial Sequence
  Description of Artificial Sequence: Synthetic oligonucleotide
  Sense strand starting at position 1397 of SEQ ID NO: 1880084
gcacccaucugcguaguuu

SEQ ID NO: 1941595 - RNA, 19 nt, Artificial Sequence
  Description of Artificial Sequence: Synthetic oligonucleotide
  Antisense strand to SEQ ID NO: 1941594
aaacuacgcagaugggugc

SEQ ID NO: 1941596 - RNA, 19 nt, Artificial Sequence
  Description of Artificial Sequence: Synthetic oligonucleotide
  Sense strand starting at position 1698 of SEQ ID NO: 1880084
gcgugcaggcgacauguua

SEQ ID NO: 1941597 - RNA, 19 nt, Artificial Sequence
  Description of Artificial Sequence: Synthetic oligonucleotide
  Antisense strand to SEQ ID NO: 1941596
uaacaugucgccugcacgc

SEQ ID NO: 1941598 - RNA, 19 nt, Artificial Sequence
  Description of Artificial Sequence: Synthetic oligonucleotide
  Sense strand starting at position 1705 of SEQ ID NO: 1880084
ggcgacauguuacuuccua

SEQ ID NO: 1941599 - RNA, 19 nt, Artificial Sequence
  Description of Artificial Sequence: Synthetic oligonucleotide
  Antisense strand to SEQ ID NO: 1941598
uaggaaguaacaugucgcc

SEQ ID NO: 1941600 - RNA, 19 nt, Artificial Sequence
  Description of Artificial Sequence: Synthetic oligonucleotide
  Sense strand starting at position 1706 of SEQ ID NO: 1880084
gcgacauguuacuuccuau

SEQ ID NO: 1941601 - RNA, 19 nt, Artificial Sequence
  Description of Artificial Sequence: Synthetic oligonucleotide
  Antisense strand to SEQ ID NO: 1941600
auaggaaguaacaugucgc

SEQ ID NO: 1941602 - RNA, 19 nt, Artificial Sequence
  Description of Artificial Sequence: Synthetic oligonucleotide
  Sense strand starting at position 1791 of SEQ ID NO: 1880084
agauaugacccuuagcgua

SEQ ID NO: 1941603 - RNA, 19 nt, Artificial Sequence
  Description of Artificial Sequence: Synthetic oligonucleotide
  Antisense strand to SEQ ID NO: 1941602
uacgcuaagggucauaucu

SEQ ID NO: 1941604 - RNA, 19 nt, Artificial Sequence
  Description of Artificial Sequence: Synthetic oligonucleotide
  Sense strand starting at position 2107 of SEQ ID NO: 1880084
cugggauucucucuuccga

SEQ ID NO: 1941605 - RNA, 19 nt, Artificial Sequence
  Description of Artificial Sequence: Synthetic oligonucleotide
  Antisense strand to SEQ ID NO: 1941604
ucggaagagagaaucccag

SEQ ID NO: 1941606 - RNA, 19 nt, Artificial Sequence
  Description of Artificial Sequence: Synthetic oligonucleotide
  Sense strand starting at position 2109 of SEQ ID NO: 1880084
gggauucucucuuccgauc

SEQ ID NO: 1941607 - RNA, 19 nt, Artificial Sequence
  Description of Artificial Sequence: Synthetic oligonucleotide
  Antisense strand to SEQ ID NO: 1941606
gaucggaagagagaauccc

SEQ ID NO: 1941608 - RNA, 19 nt, Artificial Sequence
  Description of Artificial Sequence: Synthetic oligonucleotide
  Sense strand starting at position 2292 of SEQ ID NO: 1880084
ugaccaaucugcugccaga

SEQ ID NO: 1941609 - RNA, 19 nt, Artificial Sequence
  Description of Artificial Sequence: Synthetic oligonucleotide
  Antisense strand to SEQ ID NO: 1941608
ucuggcagcagauugguca

SEQ ID NO: 1941610 - RNA, 19 nt, Artificial Sequence
  Description of Artificial Sequence: Synthetic oligonucleotide
  Sense strand starting at position 2513 of SEQ ID NO: 1880084
acaucuuuaucccugugau

SEQ ID NO: 1941611 - RNA, 19 nt, Artificial Sequence
  Description of Artificial Sequence: Synthetic oligonucleotide
  Antisense strand to SEQ ID NO: 1941610
aucacagggauaaagaugu

SEQ ID NO: 1941612 - RNA, 19 nt, Artificial Sequence
  Description of Artificial Sequence: Synthetic oligonucleotide
  Sense strand starting at position 2516 of SEQ ID NO: 1880084
ucuuuaucccugugaugca

SEQ ID NO: 1941613 - RNA, 19 nt, Artificial Sequence
  Description of Artificial Sequence: Synthetic oligonucleotide
  Antisense strand to SEQ ID NO: 1941612
ugcaucacagggauaaaga

SEQ ID NO: 1941614 - RNA, 19 nt, Artificial Sequence
  Description of Artificial Sequence: Synthetic oligonucleotide
  Sense strand starting at position 2907 of SEQ ID NO: 1880084
uuuaacaaugucuggauca

SEQ ID NO: 1941615 - RNA, 19 nt, Artificial Sequence
  Description of Artificial Sequence: Synthetic oligonucleotide
  Antisense strand to SEQ ID NO: 1941614
ugauccagacauuguuaaa

SEQ ID NO: 1941616 - RNA, 19 nt, Artificial Sequence
  Description of Artificial Sequence: Synthetic oligonucleotide
  Sense strand starting at position 2908 of SEQ ID NO: 1880084
uuaacaaugucuggaucau

SEQ ID NO: 1941617 - RNA, 19 nt, Artificial Sequence
  Description of Artificial Sequence: Synthetic oligonucleotide
  Antisense strand to SEQ ID NO: 1941616
augauccagacauuguuaa

SEQ ID NO: 1941618 - RNA, 19 nt, Artificial Sequence
  Description of Artificial Sequence: Synthetic oligonucleotide
  Sense strand starting at position 3248 of SEQ ID NO: 1880084
agaccaauauuugauguaa

SEQ ID NO: 1941619 - RNA, 19 nt, Artificial Sequence
  Description of Artificial Sequence: Synthetic oligonucleotide
  Antisense strand to SEQ ID NO: 1941618
uuacaucaaauauuggucu

SEQ ID NO: 1941620 - RNA, 19 nt, Artificial Sequence
  Description of Artificial Sequence: Synthetic oligonucleotide
  Sense strand starting at position 3471 of SEQ ID NO: 1880084
uugacuuuguucucgcgau

SEQ ID NO: 1941621 - RNA, 19 nt, Artificial Sequence
  Description of Artificial Sequence: Synthetic oligonucleotide
  Antisense strand to SEQ ID NO: 1941620
aucgcgagaacaaagucaa

SEQ ID NO: 1941622 - RNA, 19 nt, Artificial Sequence
  Description of Artificial Sequence: Synthetic oligonucleotide
  Sense strand starting at position 3607 of SEQ ID NO: 1880084
gagaguucuccuuggagac

SEQ ID NO: 1941623 - RNA, 19 nt, Artificial Sequence
  Description of Artificial Sequence: Synthetic oligonucleotide
  Antisense strand to SEQ ID NO: 1941622
gucuccaaggagaacucuc

SEQ ID NO: 1941624 - RNA, 19 nt, Artificial Sequence
  Description of Artificial Sequence: Synthetic oligonucleotide
  Sense strand starting at position 3609 of SEQ ID NO: 1880084
gaguucuccuuggagacca

SEQ ID NO: 1941625 - RNA, 19 nt, Artificial Sequence
  Description of Artificial Sequence: Synthetic oligonucleotide
  Antisense strand to SEQ ID NO: 1941624
uggucuccaaggagaacuc

SEQ ID NO: 1941626 - RNA, 19 nt, Artificial Sequence
  Description of Artificial Sequence: Synthetic oligonucleotide
  Sense strand starting at position 3625 of SEQ ID NO: 1880084
ccauaaagauucuguggca

SEQ ID NO: 1941627 - RNA, 19 nt, Artificial Sequence
  Description of Artificial Sequence: Synthetic oligonucleotide
  Antisense strand to SEQ ID NO: 1941626
ugccacagaaucuuuaugg

SEQ ID NO: 1941628 - RNA, 19 nt, Artificial Sequence
  Description of Artificial Sequence: Synthetic oligonucleotide
  Sense strand starting at position 3626 of SEQ ID NO: 1880084
cauaaagauucuguggcau

SEQ ID NO: 1941629 - RNA, 19 nt, Artificial Sequence
  Description of Artificial Sequence: Synthetic oligonucleotide
  Antisense strand to SEQ ID NO: 1941628
augccacagaaucuuuaug

SEQ ID NO: 1941630 - RNA, 19 nt, Artificial Sequence
  Description of Artificial Sequence: Synthetic oligonucleotide
  Sense strand starting at position 3865 of SEQ ID NO: 1880084
auggguucuuccugcccaa

SEQ ID NO: 1941631 - RNA, 19 nt, Artificial Sequence
  Description of Artificial Sequence: Synthetic oligonucleotide
  Antisense strand to SEQ ID NO: 1941630
uugggcaggaagaacccau

SEQ ID NO: 1941632 - RNA, 19 nt, Artificial Sequence
  Description of Artificial Sequence: Synthetic oligonucleotide
  Sense strand starting at position 3869 of SEQ ID NO: 1880084
guucuuccugcccaaugua

SEQ ID NO: 1941633 - RNA, 19 nt, Artificial Sequence
  Description of Artificial Sequence: Synthetic oligonucleotide
  Antisense strand to SEQ ID NO: 1941632
uacauugggcaggaagaac

SEQ ID NO: 1941634 - RNA, 19 nt, Artificial Sequence
  Description of Artificial Sequence: Synthetic oligonucleotide
  Sense strand starting at position 48 of SEQ ID NO: 1880085
gccuguuggauacaggauu

SEQ ID NO: 1941635 - RNA, 19 nt, Artificial Sequence
  Description of Artificial Sequence: Synthetic oligonucleotide
  Antisense strand to SEQ ID NO: 1941634
aauccuguauccaacaggc

SEQ ID NO: 1941636 - RNA, 19 nt, Artificial Sequence
  Description of Artificial Sequence: Synthetic oligonucleotide
  Sense strand starting at position 3224 of SEQ ID NO: 1880085
uggugcuggauuugaugua

SEQ ID NO: 1941637 - RNA, 19 nt, Artificial Sequence
  Description of Artificial Sequence: Synthetic oligonucleotide
  Antisense strand to SEQ ID NO: 1941636
uacaucaaauccagcacca

SEQ ID NO: 1941638 - RNA, 19 nt, Artificial Sequence
  Description of Artificial Sequence: Synthetic oligonucleotide
  Sense strand starting at position 3248 of SEQ ID NO: 1880085
uaccgaggcccucauuaua

SEQ ID NO: 1941639 - RNA, 19 nt, Artificial Sequence
  Description of Artificial Sequence: Synthetic oligonucleotide
  Antisense strand to SEQ ID NO: 1941638
uauaaugagggccucggua

SEQ ID NO: 1941640 - RNA, 19 nt, Artificial Sequence
  Description of Artificial Sequence: Synthetic oligonucleotide
  Sense strand starting at position 3393 of SEQ ID NO: 1880085
cuauuccacuccuugguua

SEQ ID NO: 1941641 - RNA, 19 nt, Artificial Sequence
  Description of Artificial Sequence: Synthetic oligonucleotide
  Antisense strand to SEQ ID NO: 1941640
uaaccaaggaguggaauag

SEQ ID NO: 1941642 - RNA, 19 nt, Artificial Sequence
  Description of Artificial Sequence: Synthetic oligonucleotide
  Sense strand starting at position 3395 of SEQ ID NO: 1880085
auuccacuccuugguuaga

SEQ ID NO: 1941643 - RNA, 19 nt, Artificial Sequence
  Description of Artificial Sequence: Synthetic oligonucleotide
  Antisense strand to SEQ ID NO: 1941642
ucuaaccaaggaguggaau

SEQ ID NO: 1941644 - RNA, 19 nt, Artificial Sequence
  Description of Artificial Sequence: Synthetic oligonucleotide
  Sense strand starting at position 3397 of SEQ ID NO: 1880085
uccacuccuugguuagaga

SEQ ID NO: 1941645 - RNA, 19 nt, Artificial Sequence
  Description of Artificial Sequence: Synthetic oligonucleotide
  Antisense strand to SEQ ID NO: 1941644
ucucuaaccaaggagugga

SEQ ID NO: 1941646 - RNA, 19 nt, Artificial Sequence
  Description of Artificial Sequence: Synthetic oligonucleotide
  Sense strand starting at position 3444 of SEQ ID NO: 1880085
auuguucucugucggguau

SEQ ID NO: 1941647 - RNA, 19 nt, Artificial Sequence
  Description of Artificial Sequence: Synthetic oligonucleotide
  Antisense strand to SEQ ID NO: 1941646
auacccgacagagaacaau

SEQ ID NO: 1941648 - RNA, 19 nt, Artificial Sequence
  Description of Artificial Sequence: Synthetic oligonucleotide
  Sense strand starting at position 3540 of SEQ ID NO: 1880085
uugacuuuguucuugagau

SEQ ID NO: 1941649 - RNA, 19 nt, Artificial Sequence
  Description of Artificial Sequence: Synthetic oligonucleotide
  Antisense strand to SEQ ID NO: 1941648
aucucaagaacaaagucaa

SEQ ID NO: 1941650 - RNA, 19 nt, Artificial Sequence
  Description of Artificial Sequence: Synthetic oligonucleotide
  Sense strand starting at position 3541 of SEQ ID NO: 1880085
ugacuuuguucuugagaug

SEQ ID NO: 1941651 - RNA, 19 nt, Artificial Sequence
  Description of Artificial Sequence: Synthetic oligonucleotide
  Antisense strand to SEQ ID NO: 1941650
caucucaagaacaaaguca

SEQ ID NO: 1941652 - RNA, 19 nt, Artificial Sequence
  Description of Artificial Sequence: Synthetic oligonucleotide
  Sense strand starting at position 3676 of SEQ ID NO: 1880085
gagaguucuccuuggagac

SEQ ID NO: 1941653 - RNA, 19 nt, Artificial Sequence
  Description of Artificial Sequence: Synthetic oligonucleotide
  Antisense strand to SEQ ID NO: 1941652
gucuccaaggagaacucuc

SEQ ID NO: 1941654 - RNA, 19 nt, Artificial Sequence
  Description of Artificial Sequence: Synthetic oligonucleotide
  Sense strand starting at position 3678 of SEQ ID NO: 1880085
gaguucuccuuggagacca

SEQ ID NO: 1941655 - RNA, 19 nt, Artificial Sequence
  Description of Artificial Sequence: Synthetic oligonucleotide
  Antisense strand to SEQ ID NO: 1941654
uggucuccaaggagaacuc

SEQ ID NO: 1941656 - RNA, 19 nt, Artificial Sequence
  Description of Artificial Sequence: Synthetic oligonucleotide
  Sense strand starting at position 3766 of SEQ ID NO: 1880085
gagauuaggugacagugua

SEQ ID NO: 1941657 - RNA, 19 nt, Artificial Sequence
  Description of Artificial Sequence: Synthetic oligonucleotide
  Antisense strand to SEQ ID NO: 1941656
uacacugucaccuaaucuc

SEQ ID NO: 1941658 - RNA, 19 nt, Artificial Sequence
  Description of Artificial Sequence: Synthetic oligonucleotide
  Sense strand starting at position 3774 of SEQ ID NO: 1880085
gugacaguguaguaauaac

SEQ ID NO: 1941659 - RNA, 19 nt, Artificial Sequence
  Description of Artificial Sequence: Synthetic oligonucleotide
  Antisense strand to SEQ ID NO: 1941658
guuauuacuacacugucac

SEQ ID NO: 1941660 - RNA, 19 nt, Artificial Sequence
  Description of Artificial Sequence: Synthetic oligonucleotide
  Sense strand starting at position 3784 of SEQ ID NO: 1880085
aguaauaacugcugaauac

SEQ ID NO: 1941661 - RNA, 19 nt, Artificial Sequence
  Description of Artificial Sequence: Synthetic oligonucleotide
  Antisense strand to SEQ ID NO: 1941660
guauucagcaguuauuacu

SEQ ID NO: 1941662 - RNA, 19 nt, Artificial Sequence
  Description of Artificial Sequence: Synthetic oligonucleotide
  Sense strand starting at position 3785 of SEQ ID NO: 1880085
guaauaacugcugaauacu

SEQ ID NO: 1941663 - RNA, 19 nt, Artificial Sequence
  Description of Artificial Sequence: Synthetic oligonucleotide
  Antisense strand to SEQ ID NO: 1941662
aguauucagcaguuauuac

SEQ ID NO: 1941664 - RNA, 19 nt, Artificial Sequence
  Description of Artificial Sequence: Synthetic oligonucleotide
  Sense strand starting at position 382 of SEQ ID NO: 1880086
accucaguugaucagaagu

SEQ ID NO: 1941665 - RNA, 19 nt, Artificial Sequence
  Description of Artificial Sequence: Synthetic oligonucleotide
  Antisense strand to SEQ ID NO: 1941664
acuucugaucaacugaggu

SEQ ID NO: 1941666 - RNA, 19 nt, Artificial Sequence
  Description of Artificial Sequence: Synthetic oligonucleotide
  Sense strand starting at position 877 of SEQ ID NO: 1880086
uaaggaauuugccagggua

SEQ ID NO: 1941667 - RNA, 19 nt, Artificial Sequence
  Description of Artificial Sequence: Synthetic oligonucleotide
  Antisense strand to SEQ ID NO: 1941666
uacccuggcaaauuccuua

SEQ ID NO: 1941668 - RNA, 19 nt, Artificial Sequence
  Description of Artificial Sequence: Synthetic oligonucleotide
  Sense strand starting at position 995 of SEQ ID NO: 1880086
ggacacuggcgccagaaau

SEQ ID NO: 1941669 - RNA, 19 nt, Artificial Sequence
  Description of Artificial Sequence: Synthetic oligonucleotide
  Antisense strand to SEQ ID NO: 1941668
auuucuggcgccagugucc

SEQ ID NO: 1941670 - RNA, 19 nt, Artificial Sequence
  Description of Artificial Sequence: Synthetic oligonucleotide
  Sense strand starting at position 1050 of SEQ ID NO: 1880086
gggugcuaucuagaaagcu

SEQ ID NO: 1941671 - RNA, 19 nt, Artificial Sequence
  Description of Artificial Sequence: Synthetic oligonucleotide
  Antisense strand to SEQ ID NO: 1941670
agcuuucuagauagcaccc

SEQ ID NO: 1941672 - RNA, 19 nt, Artificial Sequence
  Description of Artificial Sequence: Synthetic oligonucleotide
  Sense strand starting at position 1060 of SEQ ID NO: 1880086
uagaaagcugccuggcaau

SEQ ID NO: 1941673 - RNA, 19 nt, Artificial Sequence
  Description of Artificial Sequence: Synthetic oligonucleotide
  Antisense strand to SEQ ID NO: 1941672
auugccaggcagcuuucua

SEQ ID NO: 1941674 - RNA, 19 nt, Artificial Sequence
  Description of Artificial Sequence: Synthetic oligonucleotide
  Sense strand starting at position 1090 of SEQ ID NO: 1880086
gcggaagcgagacaucaaa

SEQ ID NO: 1941675 - RNA, 19 nt, Artificial Sequence
  Description of Artificial Sequence: Synthetic oligonucleotide
  Antisense strand to SEQ ID NO: 1941674
uuugaugucucgcuuccgc

SEQ ID NO: 1941676 - RNA, 19 nt, Artificial Sequence
  Description of Artificial Sequence: Synthetic oligonucleotide
  Sense strand starting at position 1181 of SEQ ID NO: 1880086
ggacccgucuccucauaaa

SEQ ID NO: 1941677 - RNA, 19 nt, Artificial Sequence
  Description of Artificial Sequence: Synthetic oligonucleotide
  Antisense strand to SEQ ID NO: 1941676
uuuaugaggagacgggucc

SEQ ID NO: 1941678 - RNA, 19 nt, Artificial Sequence
  Description of Artificial Sequence: Synthetic oligonucleotide
  Sense strand starting at position 1221 of SEQ ID NO: 1880086
ggaggaucgcagcgcauuu

SEQ ID NO: 1941679 - RNA, 19 nt, Artificial Sequence
  Description of Artificial Sequence: Synthetic oligonucleotide
  Antisense strand to SEQ ID NO: 1941678
aaaugcgcugcgauccucc

SEQ ID NO: 1941680 - RNA, 19 nt, Artificial Sequence
  Description of Artificial Sequence: Synthetic oligonucleotide
  Sense strand starting at position 1232 of SEQ ID NO: 1880086
gcgcauuucggccaagaca

SEQ ID NO: 1941681 - RNA, 19 nt, Artificial Sequence
  Description of Artificial Sequence: Synthetic oligonucleotide
  Antisense strand to SEQ ID NO: 1941680
ugucuuggccgaaaugcgc

SEQ ID NO: 1941682 - RNA, 19 nt, Artificial Sequence
  Description of Artificial Sequence: Synthetic oligonucleotide
  Sense strand starting at position 1282 of SEQ ID NO: 1880086
gaugaauugcguuaggaca

SEQ ID NO: 1941683 - RNA, 19 nt, Artificial Sequence
  Description of Artificial Sequence: Synthetic oligonucleotide
  Antisense strand to SEQ ID NO: 1941682
uguccuaacgcaauucauc

SEQ ID NO: 1941684 - RNA, 19 nt, Artificial Sequence
  Description of Artificial Sequence: Synthetic oligonucleotide
  Sense strand starting at position 1520 of SEQ ID NO: 1880086
gugaaaugugacuggaggu

SEQ ID NO: 1941685 - RNA, 19 nt, Artificial Sequence
  Description of Artificial Sequence: Synthetic oligonucleotide
  Antisense strand to SEQ ID NO: 1941684
accuccagucacauuucac

SEQ ID NO: 1941686 - RNA, 19 nt, Artificial Sequence
  Description of Artificial Sequence: Synthetic oligonucleotide
  Sense strand starting at position 1658 of SEQ ID NO: 1880086
gcgcuagcuagcuugugua

SEQ ID NO: 1941687 - RNA, 19 nt, Artificial Sequence
  Description of Artificial Sequence: Synthetic oligonucleotide
  Antisense strand to SEQ ID NO: 1941686
uacacaagcuagcuagcgc

SEQ ID NO: 1941688 - RNA, 19 nt, Artificial Sequence
  Description of Artificial Sequence: Synthetic oligonucleotide
  Sense strand starting at position 1660 of SEQ ID NO: 1880086
gcuagcuagcuuguguaaa

SEQ ID NO: 1941689 - RNA, 19 nt, Artificial Sequence
  Description of Artificial Sequence: Synthetic oligonucleotide
  Antisense strand to SEQ ID NO: 1941688
uuuacacaagcuagcuagc

SEQ ID NO: 1941690 - RNA, 19 nt, Artificial Sequence
  Description of Artificial Sequence: Synthetic oligonucleotide
  Sense strand starting at position 1715 of SEQ ID NO: 1880086
agcgacauauuacuacuau

SEQ ID NO: 1941691 - RNA, 19 nt, Artificial Sequence
  Description of Artificial Sequence: Synthetic oligonucleotide
  Antisense strand to SEQ ID NO: 1941690
auaguaguaauaugucgcu

SEQ ID NO: 1941692 - RNA, 19 nt, Artificial Sequence
  Description of Artificial Sequence: Synthetic oligonucleotide
  Sense strand starting at position 1748 of SEQ ID NO: 1880086
cugugagagaaacgauuaa

SEQ ID NO: 1941693 - RNA, 19 nt, Artificial Sequence
  Description of Artificial Sequence: Synthetic oligonucleotide
  Antisense strand to SEQ ID NO: 1941692
uuaaucguuucucucacag

SEQ ID NO: 1941694 - RNA, 19 nt, Artificial Sequence
  Description of Artificial Sequence: Synthetic oligonucleotide
  Sense strand starting at position 1755 of SEQ ID NO: 1880086
agaaacgauuaagaguaaa

SEQ ID NO: 1941695 - RNA, 19 nt, Artificial Sequence
  Description of Artificial Sequence: Synthetic oligonucleotide
  Antisense strand to SEQ ID NO: 1941694
uuuacucuuaaucguuucu

SEQ ID NO: 1941696 - RNA, 19 nt, Artificial Sequence
  Description of Artificial Sequence: Synthetic oligonucleotide
  Sense strand starting at position 1811 of SEQ ID NO: 1880086
gcagacuguucuuuaaacu

SEQ ID NO: 1941697 - RNA, 19 nt, Artificial Sequence
  Description of Artificial Sequence: Synthetic oligonucleotide
  Antisense strand to SEQ ID NO: 1941696
aguuuaaagaacagucugc

SEQ ID NO: 1941698 - RNA, 19 nt, Artificial Sequence
  Description of Artificial Sequence: Synthetic oligonucleotide
  Sense strand starting at position 2367 of SEQ ID NO: 1880086
gcaucuguucucgcccgaa

SEQ ID NO: 1941699 - RNA, 19 nt, Artificial Sequence
  Description of Artificial Sequence: Synthetic oligonucleotide
  Antisense strand to SEQ ID NO: 1941698
uucgggcgagaacagaugc

SEQ ID NO: 1941700 - RNA, 19 nt, Artificial Sequence
  Description of Artificial Sequence: Synthetic oligonucleotide
  Sense strand starting at position 2522 of SEQ ID NO: 1880086
uccuuauccuugucaugua

SEQ ID NO: 1941701 - RNA, 19 nt, Artificial Sequence
  Description of Artificial Sequence: Synthetic oligonucleotide
  Antisense strand to SEQ ID NO: 1941700
uacaugacaaggauaagga

SEQ ID NO: 1941702 - RNA, 19 nt, Artificial Sequence
  Description of Artificial Sequence: Synthetic oligonucleotide
  Sense strand starting at position 2540 of SEQ ID NO: 1880086
agcauuccgcuugaaauug

SEQ ID NO: 1941703 - RNA, 19 nt, Artificial Sequence
  Description of Artificial Sequence: Synthetic oligonucleotide
  Antisense strand to SEQ ID NO: 1941702
caauuucaagcggaaugcu

SEQ ID NO: 1941704 - RNA, 19 nt, Artificial Sequence
  Description of Artificial Sequence: Synthetic oligonucleotide
  Sense strand starting at position 2599 of SEQ ID NO: 1880086
gaaagaggcuucucagaug

SEQ ID NO: 1941705 - RNA, 19 nt, Artificial Sequence
  Description of Artificial Sequence: Synthetic oligonucleotide
  Antisense strand to SEQ ID NO: 1941704
caucugagaagccucuuuc

SEQ ID NO: 1941706 - RNA, 19 nt, Artificial Sequence
  Description of Artificial Sequence: Synthetic oligonucleotide
  Sense strand starting at position 2607 of SEQ ID NO: 1880086
cuucucagaugacugcaaa

SEQ ID NO: 1941707 - RNA, 19 nt, Artificial Sequence
  Description of Artificial Sequence: Synthetic oligonucleotide
  Antisense strand to SEQ ID NO: 1941706
uuugcagucaucugagaag

SEQ ID NO: 1941708 - RNA, 19 nt, Artificial Sequence
  Description of Artificial Sequence: Synthetic oligonucleotide
  Sense strand starting at position 2857 of SEQ ID NO: 1880086
uagugcuuaccucacguua

SEQ ID NO: 1941709 - RNA, 19 nt, Artificial Sequence
  Description of Artificial Sequence: Synthetic oligonucleotide
  Antisense strand to SEQ ID NO: 1941708
uaacgugagguaagcacua

SEQ ID NO: 1941710 - RNA, 19 nt, Artificial Sequence
  Description of Artificial Sequence: Synthetic oligonucleotide
  Sense strand starting at position 2923 of SEQ ID NO: 1880086
acaaauaccugggauacau

SEQ ID NO: 1941711 - RNA, 19 nt, Artificial Sequence
  Description of Artificial Sequence: Synthetic oligonucleotide
  Antisense strand to SEQ ID NO: 1941710
auguaucccagguauuugu

SEQ ID NO: 1941712 - RNA, 19 nt, Artificial Sequence
  Description of Artificial Sequence: Synthetic oligonucleotide
  Sense strand starting at position 2932 of SEQ ID NO: 1880086
ugggauacaucuuauuuga

SEQ ID NO: 1941713 - RNA, 19 nt, Artificial Sequence
  Description of Artificial Sequence: Synthetic oligonucleotide
  Antisense strand to SEQ ID NO: 1941712
ucaaauaagauguauccca

SEQ ID NO: 1941714 - RNA, 19 nt, Artificial Sequence
  Description of Artificial Sequence: Synthetic oligonucleotide
  Sense strand starting at position 2990 of SEQ ID NO: 1880086
gauuauaacgcaggaaaca

SEQ ID NO: 1941715 - RNA, 19 nt, Artificial Sequence
  Description of Artificial Sequence: Synthetic oligonucleotide
  Antisense strand to SEQ ID NO: 1941714
uguuuccugcguuauaauc

SEQ ID NO: 1941716 - RNA, 19 nt, Artificial Sequence
  Description of Artificial Sequence: Synthetic oligonucleotide
  Sense strand starting at position 3009 of SEQ ID NO: 1880086
cugugaaguaaguaaaguu

SEQ ID NO: 1941717 - RNA, 19 nt, Artificial Sequence
  Description of Artificial Sequence: Synthetic oligonucleotide
  Antisense strand to SEQ ID NO: 1941716
aacuuuacuuacuucacag

SEQ ID NO: 1941718 - RNA, 19 nt, Artificial Sequence
  Description of Artificial Sequence: Synthetic oligonucleotide
  Sense strand starting at position 3512 of SEQ ID NO: 1880086
gcugacucauccuugacuu

SEQ ID NO: 1941719 - RNA, 19 nt, Artificial Sequence
  Description of Artificial Sequence: Synthetic oligonucleotide
  Antisense strand to SEQ ID NO: 1941718
aagucaaggaugagucagc

SEQ ID NO: 1941720 - RNA, 19 nt, Artificial Sequence
  Description of Artificial Sequence: Synthetic oligonucleotide
  Sense strand starting at position 3524 of SEQ ID NO: 1880086
uugacuugguucuccagau

SEQ ID NO: 1941721 - RNA, 19 nt, Artificial Sequence
  Description of Artificial Sequence: Synthetic oligonucleotide
  Antisense strand to SEQ ID NO: 1941720
aucuggagaaccaagucaa

SEQ ID NO: 1941722 - RNA, 19 nt, Artificial Sequence
  Description of Artificial Sequence: Synthetic oligonucleotide
  Sense strand starting at position 3525 of SEQ ID NO: 1880086
ugacuugguucuccagaug

SEQ ID NO: 1941723 - RNA, 19 nt, Artificial Sequence
  Description of Artificial Sequence: Synthetic oligonucleotide
  Antisense strand to SEQ ID NO: 1941722
caucuggagaaccaaguca

SEQ ID NO: 1941724 - RNA, 19 nt, Artificial Sequence
  Description of Artificial Sequence: Synthetic oligonucleotide
  Sense strand starting at position 3665 of SEQ ID NO: 1880086
gucuccucuggagagcaua

SEQ ID NO: 1941725 - RNA, 19 nt, Artificial Sequence
  Description of Artificial Sequence: Synthetic oligonucleotide
  Antisense strand to SEQ ID NO: 1941724
uaugcucuccagaggagac

SEQ ID NO: 1941726 - RNA, 19 nt, Artificial Sequence
  Description of Artificial Sequence: Synthetic oligonucleotide
  Sense strand starting at position 3749 of SEQ ID NO: 1880086
gagggauuaggugacggua

SEQ ID NO: 1941727 - RNA, 19 nt, Artificial Sequence
  Description of Artificial Sequence: Synthetic oligonucleotide
  Antisense strand to SEQ ID NO: 1941726
uaccgucaccuaaucccuc

SEQ ID NO: 1941728 - RNA, 19 nt, Artificial Sequence
  Description of Artificial Sequence: Synthetic oligonucleotide
  Sense strand starting at position 3763 of SEQ ID NO: 1880086
cgguauaguaacugcugaa

SEQ ID NO: 1941729 - RNA, 19 nt, Artificial Sequence
  Description of Artificial Sequence: Synthetic oligonucleotide
  Antisense strand to SEQ ID NO: 1941728
uucagcaguuacuauaccg

SEQ ID NO: 1941730 - RNA, 19 nt, Artificial Sequence
  Description of Artificial Sequence: Synthetic oligonucleotide
  Sense strand starting at position 3767 of SEQ ID NO: 1880086
auaguaacugcugaauacu

SEQ ID NO: 1941731 - RNA, 19 nt, Artificial Sequence
  Description of Artificial Sequence: Synthetic oligonucleotide
  Antisense strand to SEQ ID NO: 1941730
aguauucagcaguuacuau

SEQ ID NO: 1941732 - RNA, 19 nt, Artificial Sequence
  Description of Artificial Sequence: Synthetic oligonucleotide
  Sense strand starting at position 3829 of SEQ ID NO: 1880086
acacaucguccagguagua

SEQ ID NO: 1941733 - RNA, 19 nt, Artificial Sequence
  Description of Artificial Sequence: Synthetic oligonucleotide
  Antisense strand to SEQ ID NO: 1941732
uacuaccuggacgaugugu

SEQ ID NO: 1941734 - RNA, 19 nt, Artificial Sequence
  Description of Artificial Sequence: Synthetic oligonucleotide
  Sense strand starting at position 3851 of SEQ ID NO: 1880086
gagaaauacuuucugggua

SEQ ID NO: 1941735 - RNA, 19 nt, Artificial Sequence
  Description of Artificial Sequence: Synthetic oligonucleotide
  Antisense strand to SEQ ID NO: 1941734
uacccagaaaguauuucuc

SEQ ID NO: 1941736 - RNA, 19 nt, Artificial Sequence
  Description of Artificial Sequence: Synthetic oligonucleotide
  Sense strand starting at position 3856 of SEQ ID NO: 1880086
auacuuucuggguaucuga

SEQ ID NO: 1941737 - RNA, 19 nt, Artificial Sequence
  Description of Artificial Sequence: Synthetic oligonucleotide
  Antisense strand to SEQ ID NO: 1941736
ucagauacccagaaaguau

SEQ ID NO: 1941738 - RNA, 19 nt, Artificial Sequence
  Description of Artificial Sequence: Synthetic oligonucleotide
  Sense strand starting at position 3872 of SEQ ID NO: 1880086
ugaccagccuucguggaaa

SEQ ID NO: 1941739 - RNA, 19 nt, Artificial Sequence
  Description of Artificial Sequence: Synthetic oligonucleotide
  Antisense strand to SEQ ID NO: 1941738
uuuccacgaaggcugguca

SEQ ID NO: 1941740 - RNA, 19 nt, Artificial Sequence
  Description of Artificial Sequence: Synthetic oligonucleotide
  Sense strand starting at position 3874 of SEQ ID NO: 1880086
accagccuucguggaaaga

SEQ ID NO: 1941741 - RNA, 19 nt, Artificial Sequence
  Description of Artificial Sequence: Synthetic oligonucleotide
  Antisense strand to SEQ ID NO: 1941740
ucuuuccacgaaggcuggu

SEQ ID NO: 1941742 - RNA, 19 nt, Artificial Sequence
  Description of Artificial Sequence: Synthetic oligonucleotide
  Sense strand starting at position 3875 of SEQ ID NO: 1880086
ccagccuucguggaaagaa

SEQ ID NO: 1941743 - RNA, 19 nt, Artificial Sequence
  Description of Artificial Sequence: Synthetic oligonucleotide
  Antisense strand to SEQ ID NO: 1941742
uucuuuccacgaaggcugg

SEQ ID NO: 1941744 - RNA, 19 nt, Artificial Sequence
  Description of Artificial Sequence: Synthetic oligonucleotide
  Sense strand starting at position 55 of SEQ ID NO: 1880087
cagauuagcugccauguau

SEQ ID NO: 1941745 - RNA, 19 nt, Artificial Sequence
  Description of Artificial Sequence: Synthetic oligonucleotide
  Antisense strand to SEQ ID NO: 1941744
auacauggcagcuaaucug

SEQ ID NO: 1941746 - RNA, 19 nt, Artificial Sequence
  Description of Artificial Sequence: Synthetic oligonucleotide
  Sense strand starting at position 62 of SEQ ID NO: 1880087
gcugccauguaucaccaaa

SEQ ID NO: 1941747 - RNA, 19 nt, Artificial Sequence
  Description of Artificial Sequence: Synthetic oligonucleotide
  Antisense strand to SEQ ID NO: 1941746
uuuggugauacauggcagc

SEQ ID NO: 1941748 - RNA, 19 nt, Artificial Sequence
  Description of Artificial Sequence: Synthetic oligonucleotide
  Sense strand starting at position 226 of SEQ ID NO: 1880087
gagugagagaccuguccua

SEQ ID NO: 1941749 - RNA, 19 nt, Artificial Sequence
  Description of Artificial Sequence: Synthetic oligonucleotide
  Antisense strand to SEQ ID NO: 1941748
uaggacaggucucucacuc

SEQ ID NO: 1941750 - RNA, 19 nt, Artificial Sequence
  Description of Artificial Sequence: Synthetic oligonucleotide
  Sense strand starting at position 839 of SEQ ID NO: 1880087
ggugauuuacagugcuauu

SEQ ID NO: 1941751 - RNA, 19 nt, Artificial Sequence
  Description of Artificial Sequence: Synthetic oligonucleotide
  Antisense strand to SEQ ID NO: 1941750
aauagcacuguaaaucacc

SEQ ID NO: 1941752 - RNA, 19 nt, Artificial Sequence
  Description of Artificial Sequence: Synthetic oligonucleotide
  Sense strand starting at position 842 of SEQ ID NO: 1880087
gauuuacagugcuauuuga

SEQ ID NO: 1941753 - RNA, 19 nt, Artificial Sequence
  Description of Artificial Sequence: Synthetic oligonucleotide
  Antisense strand to SEQ ID NO: 1941752
ucaaauagcacuguaaauc

SEQ ID NO: 1941754 - RNA, 19 nt, Artificial Sequence
  Description of Artificial Sequence: Synthetic oligonucleotide
  Sense strand starting at position 893 of SEQ ID NO: 1880087
acgcgugucagguguaaac

SEQ ID NO: 1941755 - RNA, 19 nt, Artificial Sequence
  Description of Artificial Sequence: Synthetic oligonucleotide
  Antisense strand to SEQ ID NO: 1941754
guuuacaccugacacgcgu

SEQ ID NO: 1941756 - RNA, 19 nt, Artificial Sequence
  Description of Artificial Sequence: Synthetic oligonucleotide
  Sense strand starting at position 1113 of SEQ ID NO: 1880087
ucgcuuaaagucugaagaa

SEQ ID NO: 1941757 - RNA, 19 nt, Artificial Sequence
  Description of Artificial Sequence: Synthetic oligonucleotide
  Antisense strand to SEQ ID NO: 1941756
uucuucagacuuuaagcga

SEQ ID NO: 1941758 - RNA, 19 nt, Artificial Sequence
  Description of Artificial Sequence: Synthetic oligonucleotide
  Sense strand starting at position 1114 of SEQ ID NO: 1880087
cgcuuaaagucugaagaaa

SEQ ID NO: 1941759 - RNA, 19 nt, Artificial Sequence
  Description of Artificial Sequence: Synthetic oligonucleotide
  Antisense strand to SEQ ID NO: 1941758
uuucuucagacuuuaagcg

SEQ ID NO: 1941760 - RNA, 19 nt, Artificial Sequence
  Description of Artificial Sequence: Synthetic oligonucleotide
  Sense strand starting at position 1318 of SEQ ID NO: 1880087
acgcaaaguaagcguguua

SEQ ID NO: 1941761 - RNA, 19 nt, Artificial Sequence
  Description of Artificial Sequence: Synthetic oligonucleotide
  Antisense strand to SEQ ID NO: 1941760
uaacacgcuuacuuugcgu

SEQ ID NO: 1941762 - RNA, 19 nt, Artificial Sequence
  Description of Artificial Sequence: Synthetic oligonucleotide
  Sense strand starting at position 1379 of SEQ ID NO: 1880087
gcuuucuucccagagaacu

SEQ ID NO: 1941763 - RNA, 19 nt, Artificial Sequence
  Description of Artificial Sequence: Synthetic oligonucleotide
  Antisense strand to SEQ ID NO: 1941762
aguucucugggaagaaagc

SEQ ID NO: 1941764 - RNA, 19 nt, Artificial Sequence
  Description of Artificial Sequence: Synthetic oligonucleotide
  Sense strand starting at position 1703 of SEQ ID NO: 1880087
ggcgacauguuacuuccua

SEQ ID NO: 1941765 - RNA, 19 nt, Artificial Sequence
  Description of Artificial Sequence: Synthetic oligonucleotide
  Antisense strand to SEQ ID NO: 1941764
uaggaaguaacaugucgcc

SEQ ID NO: 1941766 - RNA, 19 nt, Artificial Sequence
  Description of Artificial Sequence: Synthetic oligonucleotide
  Sense strand starting at position 1704 of SEQ ID NO: 1880087
gcgacauguuacuuccuau

SEQ ID NO: 1941767 - RNA, 19 nt, Artificial Sequence
  Description of Artificial Sequence: Synthetic oligonucleotide
  Antisense strand to SEQ ID NO: 1941766
auaggaaguaacaugucgc

SEQ ID NO: 1941768 - RNA, 19 nt, Artificial Sequence
  Description of Artificial Sequence: Synthetic oligonucleotide
  Sense strand starting at position 1791 of SEQ ID NO: 1880087
agauaugacccuuggcgua

SEQ ID NO: 1941769 - RNA, 19 nt, Artificial Sequence
  Description of Artificial Sequence: Synthetic oligonucleotide
  Antisense strand to SEQ ID NO: 1941768
uacgccaagggucauaucu

SEQ ID NO: 1941770 - RNA, 19 nt, Artificial Sequence
  Description of Artificial Sequence: Synthetic oligonucleotide
  Sense strand starting at position 2394 of SEQ ID NO: 1880087
gccuguguuaaggagcaau

SEQ ID NO: 1941771 - RNA, 19 nt, Artificial Sequence
  Description of Artificial Sequence: Synthetic oligonucleotide
  Antisense strand to SEQ ID NO: 1941770
auugcuccuuaacacaggc

SEQ ID NO: 1941772 - RNA, 19 nt, Artificial Sequence
  Description of Artificial Sequence: Synthetic oligonucleotide
  Sense strand starting at position 2397 of SEQ ID NO: 1880087
uguguuaaggagcaaucuu

SEQ ID NO: 1941773 - RNA, 19 nt, Artificial Sequence
  Description of Artificial Sequence: Synthetic oligonucleotide
  Antisense strand to SEQ ID NO: 1941772
aagauugcuccuuaacaca

SEQ ID NO: 1941774 - RNA, 19 nt, Artificial Sequence
  Description of Artificial Sequence: Synthetic oligonucleotide
  Sense strand starting at position 2409 of SEQ ID NO: 1880087
caaucuuucgguggccaga

SEQ ID NO: 1941775 - RNA, 19 nt, Artificial Sequence
  Description of Artificial Sequence: Synthetic oligonucleotide
  Antisense strand to SEQ ID NO: 1941774
ucuggccaccgaaagauug

SEQ ID NO: 1941776 - RNA, 19 nt, Artificial Sequence
  Description of Artificial Sequence: Synthetic oligonucleotide
  Sense strand starting at position 2531 of SEQ ID NO: 1880087
ugcagcauuccgcuugcau

SEQ ID NO: 1941777 - RNA, 19 nt, Artificial Sequence
  Description of Artificial Sequence: Synthetic oligonucleotide
  Antisense strand to SEQ ID NO: 1941776
augcaagcggaaugcugca

SEQ ID NO: 1941778 - RNA, 19 nt, Artificial Sequence
  Description of Artificial Sequence: Synthetic oligonucleotide
  Sense strand starting at position 2532 of SEQ ID NO: 1880087
gcagcauuccgcuugcauu

SEQ ID NO: 1941779 - RNA, 19 nt, Artificial Sequence
  Description of Artificial Sequence: Synthetic oligonucleotide
  Antisense strand to SEQ ID NO: 1941778
aaugcaagcggaaugcugc

SEQ ID NO: 1941780 - RNA, 19 nt, Artificial Sequence
  Description of Artificial Sequence: Synthetic oligonucleotide
  Sense strand starting at position 2533 of SEQ ID NO: 1880087
cagcauuccgcuugcauuu

SEQ ID NO: 1941781 - RNA, 19 nt, Artificial Sequence
  Description of Artificial Sequence: Synthetic oligonucleotide
  Antisense strand to SEQ ID NO: 1941780
aaaugcaagcggaaugcug

SEQ ID NO: 1941782 - RNA, 19 nt, Artificial Sequence
  Description of Artificial Sequence: Synthetic oligonucleotide
  Sense strand starting at position 2546 of SEQ ID NO: 1880087
gcauuuggaagccguuuaa

SEQ ID NO: 1941783 - RNA, 19 nt, Artificial Sequence
  Description of Artificial Sequence: Synthetic oligonucleotide
  Antisense strand to SEQ ID NO: 1941782
uuaaacggcuuccaaaugc

SEQ ID NO: 1941784 - RNA, 19 nt, Artificial Sequence
  Description of Artificial Sequence: Synthetic oligonucleotide
  Sense strand starting at position 2576 of SEQ ID NO: 1880087
agccauauuuaugaaagua

SEQ ID NO: 1941785 - RNA, 19 nt, Artificial Sequence
  Description of Artificial Sequence: Synthetic oligonucleotide
  Antisense strand to SEQ ID NO: 1941784
uacuuucauaaauauggcu

SEQ ID NO: 1941786 - RNA, 19 nt, Artificial Sequence
  Description of Artificial Sequence: Synthetic oligonucleotide
  Sense strand starting at position 3338 of SEQ ID NO: 1880087
acauuccacuccuugguua

SEQ ID NO: 1941787 - RNA, 19 nt, Artificial Sequence
  Description of Artificial Sequence: Synthetic oligonucleotide
  Antisense strand to SEQ ID NO: 1941786
uaaccaaggaguggaaugu

SEQ ID NO: 1941788 - RNA, 19 nt, Artificial Sequence
  Description of Artificial Sequence: Synthetic oligonucleotide
  Sense strand starting at position 3420 of SEQ ID NO: 1880087
cuuucuugagaguguacuu

SEQ ID NO: 1941789 - RNA, 19 nt, Artificial Sequence
  Description of Artificial Sequence: Synthetic oligonucleotide
  Antisense strand to SEQ ID NO: 1941788
aaguacacucucaagaaag

SEQ ID NO: 1941790 - RNA, 19 nt, Artificial Sequence
  Description of Artificial Sequence: Synthetic oligonucleotide
  Sense strand starting at position 3485 of SEQ ID NO: 1880087
uugacuuuguucucgcgau

SEQ ID NO: 1941791 - RNA, 19 nt, Artificial Sequence
  Description of Artificial Sequence: Synthetic oligonucleotide
  Antisense strand to SEQ ID NO: 1941790
aucgcgagaacaaagucaa

SEQ ID NO: 1941792 - RNA, 19 nt, Artificial Sequence
  Description of Artificial Sequence: Synthetic oligonucleotide
  Sense strand starting at position 3486 of SEQ ID NO: 1880087
ugacuuuguucucgcgaug

SEQ ID NO: 1941793 - RNA, 19 nt, Artificial Sequence
  Description of Artificial Sequence: Synthetic oligonucleotide
  Antisense strand to SEQ ID NO: 1941792
caucgcgagaacaaaguca

SEQ ID NO: 1941794 - RNA, 19 nt, Artificial Sequence
  Description of Artificial Sequence: Synthetic oligonucleotide
  Sense strand starting at position 3621 of SEQ ID NO: 1880087
gagaguucucuuuggagac

SEQ ID NO: 1941795 - RNA, 19 nt, Artificial Sequence
  Description of Artificial Sequence: Synthetic oligonucleotide
  Antisense strand to SEQ ID NO: 1941794
gucuccaaagagaacucuc

SEQ ID NO: 1941796 - RNA, 19 nt, Artificial Sequence
  Description of Artificial Sequence: Synthetic oligonucleotide
  Sense strand starting at position 3707 of SEQ ID NO: 1880087
ugagggauugggugacagu

SEQ ID NO: 1941797 - RNA, 19 nt, Artificial Sequence
  Description of Artificial Sequence: Synthetic oligonucleotide
  Antisense strand to SEQ ID NO: 1941796
acugucacccaaucccuca

SEQ ID NO: 1941798 - RNA, 19 nt, Artificial Sequence
  Description of Artificial Sequence: Synthetic oligonucleotide
  Sense strand starting at position 3716 of SEQ ID NO: 1880087
gggugacaguguaguaacu

SEQ ID NO: 1941799 - RNA, 19 nt, Artificial Sequence
  Description of Artificial Sequence: Synthetic oligonucleotide
  Antisense strand to SEQ ID NO: 1941798
aguuacuacacugucaccc

SEQ ID NO: 1941800 - RNA, 19 nt, Artificial Sequence
  Description of Artificial Sequence: Synthetic oligonucleotide
  Sense strand starting at position 3810 of SEQ ID NO: 1880087
gagaaaugcuuucugggua

SEQ ID NO: 1941801 - RNA, 19 nt, Artificial Sequence
  Description of Artificial Sequence: Synthetic oligonucleotide
  Antisense strand to SEQ ID NO: 1941800
uacccagaaagcauuucuc

SEQ ID NO: 1941802 - RNA, 19 nt, Artificial Sequence
  Description of Artificial Sequence: Synthetic oligonucleotide
  Sense strand starting at position 3811 of SEQ ID NO: 1880087
agaaaugcuuucuggguau

SEQ ID NO: 1941803 - RNA, 19 nt, Artificial Sequence
  Description of Artificial Sequence: Synthetic oligonucleotide
  Antisense strand to SEQ ID NO: 1941802
auacccagaaagcauuucu

SEQ ID NO: 1941804 - RNA, 19 nt, Artificial Sequence
  Description of Artificial Sequence: Synthetic oligonucleotide
  Sense strand starting at position 3813 of SEQ ID NO: 1880087
aaaugcuuucuggguaucu

SEQ ID NO: 1941805 - RNA, 19 nt, Artificial Sequence
  Description of Artificial Sequence: Synthetic oligonucleotide
  Antisense strand to SEQ ID NO: 1941804
agauacccagaaagcauuu

SEQ ID NO: 1941806 - RNA, 19 nt, Artificial Sequence
  Description of Artificial Sequence: Synthetic oligonucleotide
  Sense strand starting at position 3815 of SEQ ID NO: 1880087
augcuuucuggguaucuga

SEQ ID NO: 1941807 - RNA, 19 nt, Artificial Sequence
  Description of Artificial Sequence: Synthetic oligonucleotide
  Antisense strand to SEQ ID NO: 1941806
ucagauacccagaaagcau

SEQ ID NO: 1941808 - RNA, 19 nt, Artificial Sequence
  Description of Artificial Sequence: Synthetic oligonucleotide
  Sense strand starting at position 7 of SEQ ID NO: 1880088
aggaaaugccauuauucuc

SEQ ID NO: 1941809 - RNA, 19 nt, Artificial Sequence
  Description of Artificial Sequence: Synthetic oligonucleotide
  Antisense strand to SEQ ID NO: 1941808
gagaauaauggcauuuccu

SEQ ID NO: 1941810 - RNA, 19 nt, Artificial Sequence
  Description of Artificial Sequence: Synthetic oligonucleotide
  Sense strand starting at position 58 of SEQ ID NO: 1880088
agaccagauuagcugucau

SEQ ID NO: 1941811 - RNA, 19 nt, Artificial Sequence
  Description of Artificial Sequence: Synthetic oligonucleotide
  Antisense strand to SEQ ID NO: 1941810
augacagcuaaucuggucu

SEQ ID NO: 1941812 - RNA, 19 nt, Artificial Sequence
  Description of Artificial Sequence: Synthetic oligonucleotide
  Sense strand starting at position 90 of SEQ ID NO: 1880088
gggacuggauccuuguuaa

SEQ ID NO: 1941813 - RNA, 19 nt, Artificial Sequence
  Description of Artificial Sequence: Synthetic oligonucleotide
  Antisense strand to SEQ ID NO: 1941812
uuaacaaggauccaguccc

SEQ ID NO: 1941814 - RNA, 19 nt, Artificial Sequence
  Description of Artificial Sequence: Synthetic oligonucleotide
  Sense strand starting at position 93 of SEQ ID NO: 1880088
acuggauccuuguuaacac

SEQ ID NO: 1941815 - RNA, 19 nt, Artificial Sequence
  Description of Artificial Sequence: Synthetic oligonucleotide
  Antisense strand to SEQ ID NO: 1941814
guguuaacaaggauccagu

SEQ ID NO: 1941816 - RNA, 19 nt, Artificial Sequence
  Description of Artificial Sequence: Synthetic oligonucleotide
  Sense strand starting at position 853 of SEQ ID NO: 1880088
gauuuacagugccauuuga

SEQ ID NO: 1941817 - RNA, 19 nt, Artificial Sequence
  Description of Artificial Sequence: Synthetic oligonucleotide
  Antisense strand to SEQ ID NO: 1941816
ucaaauggcacuguaaauc

SEQ ID NO: 1941818 - RNA, 19 nt, Artificial Sequence
  Description of Artificial Sequence: Synthetic oligonucleotide
  Sense strand starting at position 1124 of SEQ ID NO: 1880088
ucgcuuaaagucuaaagaa

SEQ ID NO: 1941819 - RNA, 19 nt, Artificial Sequence
  Description of Artificial Sequence: Synthetic oligonucleotide
  Antisense strand to SEQ ID NO: 1941818
uucuuuagacuuuaagcga

SEQ ID NO: 1941820 - RNA, 19 nt, Artificial Sequence
  Description of Artificial Sequence: Synthetic oligonucleotide
  Sense strand starting at position 1340 of SEQ ID NO: 1880088
gaguguuaugucuacaacc

SEQ ID NO: 1941821 - RNA, 19 nt, Artificial Sequence
  Description of Artificial Sequence: Synthetic oligonucleotide
  Antisense strand to SEQ ID NO: 1941820
gguuguagacauaacacuc

SEQ ID NO: 1941822 - RNA, 19 nt, Artificial Sequence
  Description of Artificial Sequence: Synthetic oligonucleotide
  Sense strand starting at position 1390 of SEQ ID NO: 1880088
gcuuucuucccagagaaca

SEQ ID NO: 1941823 - RNA, 19 nt, Artificial Sequence
  Description of Artificial Sequence: Synthetic oligonucleotide
  Antisense strand to SEQ ID NO: 1941822
uguucucugggaagaaagc

SEQ ID NO: 1941824 - RNA, 19 nt, Artificial Sequence
  Description of Artificial Sequence: Synthetic oligonucleotide
  Sense strand starting at position 2530 of SEQ ID NO: 1880088
ugcagcauuccgcuugcaa

SEQ ID NO: 1941825 - RNA, 19 nt, Artificial Sequence
  Description of Artificial Sequence: Synthetic oligonucleotide
  Antisense strand to SEQ ID NO: 1941824
uugcaagcggaaugcugca

SEQ ID NO: 1941826 - RNA, 19 nt, Artificial Sequence
  Description of Artificial Sequence: Synthetic oligonucleotide
  Sense strand starting at position 2531 of SEQ ID NO: 1880088
gcagcauuccgcuugcaau

SEQ ID NO: 1941827 - RNA, 19 nt, Artificial Sequence
  Description of Artificial Sequence: Synthetic oligonucleotide
  Antisense strand to SEQ ID NO: 1941826
auugcaagcggaaugcugc

SEQ ID NO: 1941828 - RNA, 19 nt, Artificial Sequence
  Description of Artificial Sequence: Synthetic oligonucleotide
  Sense strand starting at position 2592 of SEQ ID NO: 1880088
uaaagaggcugcuuagaug

SEQ ID NO: 1941829 - RNA, 19 nt, Artificial Sequence
  Description of Artificial Sequence: Synthetic oligonucleotide
  Antisense strand to SEQ ID NO: 1941828
caucuaagcagccucuuua

SEQ ID NO: 1941830 - RNA, 19 nt, Artificial Sequence
  Description of Artificial Sequence: Synthetic oligonucleotide
  Sense strand starting at position 3342 of SEQ ID NO: 1880088
uuccaauucuugguuaaag

SEQ ID NO: 1941831 - RNA, 19 nt, Artificial Sequence
  Description of Artificial Sequence: Synthetic oligonucleotide
  Antisense strand to SEQ ID NO: 1941830
cuuuaaccaagaauuggaa

SEQ ID NO: 1941832 - RNA, 19 nt, Artificial Sequence
  Description of Artificial Sequence: Synthetic oligonucleotide
  Sense strand starting at position 3343 of SEQ ID NO: 1880088
uccaauucuugguuaaaga

SEQ ID NO: 1941833 - RNA, 19 nt, Artificial Sequence
  Description of Artificial Sequence: Synthetic oligonucleotide
  Antisense strand to SEQ ID NO: 1941832
ucuuuaaccaagaauugga

SEQ ID NO: 1941834 - RNA, 19 nt, Artificial Sequence
  Description of Artificial Sequence: Synthetic oligonucleotide
  Sense strand starting at position 3622 of SEQ ID NO: 1880088
gagaguucuccuuggagau

SEQ ID NO: 1941835 - RNA, 19 nt, Artificial Sequence
  Description of Artificial Sequence: Synthetic oligonucleotide
  Antisense strand to SEQ ID NO: 1941834
aucuccaaggagaacucuc

SEQ ID NO: 1941836 - RNA, 19 nt, Artificial Sequence
  Description of Artificial Sequence: Synthetic oligonucleotide
  Sense strand starting at position 3623 of SEQ ID NO: 1880088
agaguucuccuuggagauc

SEQ ID NO: 1941837 - RNA, 19 nt, Artificial Sequence
  Description of Artificial Sequence: Synthetic oligonucleotide
  Antisense strand to SEQ ID NO: 1941836
gaucuccaaggagaacucu

SEQ ID NO: 1941838 - RNA, 19 nt, Artificial Sequence
  Description of Artificial Sequence: Synthetic oligonucleotide
  Sense strand starting at position 3626 of SEQ ID NO: 1880088
guucuccuuggagaucaua

SEQ ID NO: 1941839 - RNA, 19 nt, Artificial Sequence
  Description of Artificial Sequence: Synthetic oligonucleotide
  Antisense strand to SEQ ID NO: 1941838
uaugaucuccaaggagaac

SEQ ID NO: 1941840 - RNA, 19 nt, Artificial Sequence
  Description of Artificial Sequence: Synthetic oligonucleotide
  Sense strand starting at position 3801 of SEQ ID NO: 1880088
gguaguaguggagaaaugu

SEQ ID NO: 1941841 - RNA, 19 nt, Artificial Sequence
  Description of Artificial Sequence: Synthetic oligonucleotide
  Antisense strand to SEQ ID NO: 1941840
acauuucuccacuacuacc

SEQ ID NO: 1941842 - RNA, 19 nt, Artificial Sequence
  Description of Artificial Sequence: Synthetic oligonucleotide
  Sense strand starting at position 8 of SEQ ID NO: 1880089
aggaaaugccauuauucuc

SEQ ID NO: 1941843 - RNA, 19 nt, Artificial Sequence
  Description of Artificial Sequence: Synthetic oligonucleotide
  Antisense strand to SEQ ID NO: 1941842
gagaauaauggcauuuccu

SEQ ID NO: 1941844 - RNA, 19 nt, Artificial Sequence
  Description of Artificial Sequence: Synthetic oligonucleotide
  Sense strand starting at position 91 of SEQ ID NO: 1880089
gggacuggauccuuguuaa

SEQ ID NO: 1941845 - RNA, 19 nt, Artificial Sequence
  Description of Artificial Sequence: Synthetic oligonucleotide
  Antisense strand to SEQ ID NO: 1941844
uuaacaaggauccaguccc

SEQ ID NO: 1941846 - RNA, 19 nt, Artificial Sequence
  Description of Artificial Sequence: Synthetic oligonucleotide
  Sense strand starting at position 94 of SEQ ID NO: 1880089
acuggauccuuguuaacac

SEQ ID NO: 1941847 - RNA, 19 nt, Artificial Sequence
  Description of Artificial Sequence: Synthetic oligonucleotide
  Antisense strand to SEQ ID NO: 1941846
guguuaacaaggauccagu

SEQ ID NO: 1941848 - RNA, 19 nt, Artificial Sequence
  Description of Artificial Sequence: Synthetic oligonucleotide
  Sense strand starting at position 680 of SEQ ID NO: 1880089
cugaccucagcugaucaaa

SEQ ID NO: 1941849 - RNA, 19 nt, Artificial Sequence
  Description of Artificial Sequence: Synthetic oligonucleotide
  Antisense strand to SEQ ID NO: 1941848
uuugaucagcugaggucag

SEQ ID NO: 1941850 - RNA, 19 nt, Artificial Sequence
  Description of Artificial Sequence: Synthetic oligonucleotide
  Sense strand starting at position 826 of SEQ ID NO: 1880089
uagauaguucugggaguua

SEQ ID NO: 1941851 - RNA, 19 nt, Artificial Sequence
  Description of Artificial Sequence: Synthetic oligonucleotide
  Antisense strand to SEQ ID NO: 1941850
uaacucccagaacuaucua

SEQ ID NO: 1941852 - RNA, 19 nt, Artificial Sequence
  Description of Artificial Sequence: Synthetic oligonucleotide
  Sense strand starting at position 854 of SEQ ID NO: 1880089
gauuuacagugccauuuga

SEQ ID NO: 1941853 - RNA, 19 nt, Artificial Sequence
  Description of Artificial Sequence: Synthetic oligonucleotide
  Antisense strand to SEQ ID NO: 1941852
ucaaauggcacuguaaauc

SEQ ID NO: 1941854 - RNA, 19 nt, Artificial Sequence
  Description of Artificial Sequence: Synthetic oligonucleotide
  Sense strand starting at position 1125 of SEQ ID NO: 1880089
ucgcuuaaagucuaaagaa

SEQ ID NO: 1941855 - RNA, 19 nt, Artificial Sequence
  Description of Artificial Sequence: Synthetic oligonucleotide
  Antisense strand to SEQ ID NO: 1941854
uucuuuagacuuuaagcga

SEQ ID NO: 1941856 - RNA, 19 nt, Artificial Sequence
  Description of Artificial Sequence: Synthetic oligonucleotide
  Sense strand starting at position 1341 of SEQ ID NO: 1880089
gaguguuaugucuacaacc

SEQ ID NO: 1941857 - RNA, 19 nt, Artificial Sequence
  Description of Artificial Sequence: Synthetic oligonucleotide
  Antisense strand to SEQ ID NO: 1941856
gguuguagacauaacacuc

SEQ ID NO: 1941858 - RNA, 19 nt, Artificial Sequence
  Description of Artificial Sequence: Synthetic oligonucleotide
  Sense strand starting at position 2107 of SEQ ID NO: 1880089
cugggauucucacuuccga

SEQ ID NO: 1941859 - RNA, 19 nt, Artificial Sequence
  Description of Artificial Sequence: Synthetic oligonucleotide
  Antisense strand to SEQ ID NO: 1941858
ucggaagugagaaucccag

SEQ ID NO: 1941860 - RNA, 19 nt, Artificial Sequence
  Description of Artificial Sequence: Synthetic oligonucleotide
  Sense strand starting at position 2513 of SEQ ID NO: 1880089
acauccuuauccuugugau

SEQ ID NO: 1941861 - RNA, 19 nt, Artificial Sequence
  Description of Artificial Sequence: Synthetic oligonucleotide
  Antisense strand to SEQ ID NO: 1941860
aucacaaggauaaggaugu

SEQ ID NO: 1941862 - RNA, 19 nt, Artificial Sequence
  Description of Artificial Sequence: Synthetic oligonucleotide
  Sense strand starting at position 2531 of SEQ ID NO: 1880089
ugcagcauuccgcuugcaa

SEQ ID NO: 1941863 - RNA, 19 nt, Artificial Sequence
  Description of Artificial Sequence: Synthetic oligonucleotide
  Antisense strand to SEQ ID NO: 1941862
uugcaagcggaaugcugca

SEQ ID NO: 1941864 - RNA, 19 nt, Artificial Sequence
  Description of Artificial Sequence: Synthetic oligonucleotide
  Sense strand starting at position 2532 of SEQ ID NO: 1880089
gcagcauuccgcuugcaau

SEQ ID NO: 1941865 - RNA, 19 nt, Artificial Sequence
  Description of Artificial Sequence: Synthetic oligonucleotide
  Antisense strand to SEQ ID NO: 1941864
auugcaagcggaaugcugc

SEQ ID NO: 1941866 - RNA, 19 nt, Artificial Sequence
  Description of Artificial Sequence: Synthetic oligonucleotide
  Sense strand starting at position 2550 of SEQ ID NO: 1880089
uuggaagccguuuaauauc

SEQ ID NO: 1941867 - RNA, 19 nt, Artificial Sequence
  Description of Artificial Sequence: Synthetic oligonucleotide
  Antisense strand to SEQ ID NO: 1941866
gauauuaaacggcuuccaa

SEQ ID NO: 1941868 - RNA, 19 nt, Artificial Sequence
  Description of Artificial Sequence: Synthetic oligonucleotide
  Sense strand starting at position 2593 of SEQ ID NO: 1880089
uaaagaggcugcuuagaug

SEQ ID NO: 1941869 - RNA, 19 nt, Artificial Sequence
  Description of Artificial Sequence: Synthetic oligonucleotide
  Antisense strand to SEQ ID NO: 1941868
caucuaagcagccucuuua

SEQ ID NO: 1941870 - RNA, 19 nt, Artificial Sequence
  Description of Artificial Sequence: Synthetic oligonucleotide
  Sense strand starting at position 2601 of SEQ ID NO: 1880089
cugcuuagaugacugcaaa

SEQ ID NO: 1941871 - RNA, 19 nt, Artificial Sequence
  Description of Artificial Sequence: Synthetic oligonucleotide
  Antisense strand to SEQ ID NO: 1941870
uuugcagucaucuaagcag

SEQ ID NO: 1941872 - RNA, 19 nt, Artificial Sequence
  Description of Artificial Sequence: Synthetic oligonucleotide
  Sense strand starting at position 2745 of SEQ ID NO: 1880089
uaugcugucccagaagaga

SEQ ID NO: 1941873 - RNA, 19 nt, Artificial Sequence
  Description of Artificial Sequence: Synthetic oligonucleotide
  Antisense strand to SEQ ID NO: 1941872
ucucuucugggacagcaua

SEQ ID NO: 1941874 - RNA, 19 nt, Artificial Sequence
  Description of Artificial Sequence: Synthetic oligonucleotide
  Sense strand starting at position 3263 of SEQ ID NO: 1880089
uucugagaccaguguuuga

SEQ ID NO: 1941875 - RNA, 19 nt, Artificial Sequence
  Description of Artificial Sequence: Synthetic oligonucleotide
  Antisense strand to SEQ ID NO: 1941874
ucaaacacuggucucagaa

SEQ ID NO: 1941876 - RNA, 19 nt, Artificial Sequence
  Description of Artificial Sequence: Synthetic oligonucleotide
  Sense strand starting at position 3343 of SEQ ID NO: 1880089
uuccaauucuugguuaaag

SEQ ID NO: 1941877 - RNA, 19 nt, Artificial Sequence
  Description of Artificial Sequence: Synthetic oligonucleotide
  Antisense strand to SEQ ID NO: 1941876
cuuuaaccaagaauuggaa

SEQ ID NO: 1941878 - RNA, 19 nt, Artificial Sequence
  Description of Artificial Sequence: Synthetic oligonucleotide
  Sense strand starting at position 3344 of SEQ ID NO: 1880089
uccaauucuugguuaaaga

SEQ ID NO: 1941879 - RNA, 19 nt, Artificial Sequence
  Description of Artificial Sequence: Synthetic oligonucleotide
  Antisense strand to SEQ ID NO: 1941878
ucuuuaaccaagaauugga

SEQ ID NO: 1941880 - RNA, 19 nt, Artificial Sequence
  Description of Artificial Sequence: Synthetic oligonucleotide
  Sense strand starting at position 3623 of SEQ ID NO: 1880089
gagaguucuccuuggagau

SEQ ID NO: 1941881 - RNA, 19 nt, Artificial Sequence
  Description of Artificial Sequence: Synthetic oligonucleotide
  Antisense strand to SEQ ID NO: 1941880
aucuccaaggagaacucuc

SEQ ID NO: 1941882 - RNA, 19 nt, Artificial Sequence
  Description of Artificial Sequence: Synthetic oligonucleotide
  Sense strand starting at position 3624 of SEQ ID NO: 1880089
agaguucuccuuggagauc

SEQ ID NO: 1941883 - RNA, 19 nt, Artificial Sequence
  Description of Artificial Sequence: Synthetic oligonucleotide
  Antisense strand to SEQ ID NO: 1941882
gaucuccaaggagaacucu

SEQ ID NO: 1941884 - RNA, 19 nt, Artificial Sequence
  Description of Artificial Sequence: Synthetic oligonucleotide
  Sense strand starting at position 3627 of SEQ ID NO: 1880089
guucuccuuggagaucaua

SEQ ID NO: 1941885 - RNA, 19 nt, Artificial Sequence
  Description of Artificial Sequence: Synthetic oligonucleotide
  Antisense strand to SEQ ID NO: 1941884
uaugaucuccaaggagaac

SEQ ID NO: 1941886 - RNA, 19 nt, Artificial Sequence
  Description of Artificial Sequence: Synthetic oligonucleotide
  Sense strand starting at position 3886 of SEQ ID NO: 1880089
uggguucuuccugaccaau

SEQ ID NO: 1941887 - RNA, 19 nt, Artificial Sequence
  Description of Artificial Sequence: Synthetic oligonucleotide
  Antisense strand to SEQ ID NO: 1941886
auuggucaggaagaaccca

SEQ ID NO: 1941888 - RNA, 19 nt, Artificial Sequence
  Description of Artificial Sequence: Synthetic oligonucleotide
  Sense strand starting at position 200 of SEQ ID NO: 1880090
ugaugcaaauaaugagaaa

SEQ ID NO: 1941889 - RNA, 19 nt, Artificial Sequence
  Description of Artificial Sequence: Synthetic oligonucleotide
  Antisense strand to SEQ ID NO: 1941888
uuucucauuauuugcauca

SEQ ID NO: 1941890 - RNA, 19 nt, Artificial Sequence
  Description of Artificial Sequence: Synthetic oligonucleotide
  Sense strand starting at position 408 of SEQ ID NO: 1880090
aaugucucagauggacuaa

SEQ ID NO: 1941891 - RNA, 19 nt, Artificial Sequence
  Description of Artificial Sequence: Synthetic oligonucleotide
  Antisense strand to SEQ ID NO: 1941890
uuaguccaucugagacauu

SEQ ID NO: 1941892 - RNA, 19 nt, Artificial Sequence
  Description of Artificial Sequence: Synthetic oligonucleotide
  Sense strand starting at position 853 of SEQ ID NO: 1880090
gagaaaggguauuaaggaa

SEQ ID NO: 1941893 - RNA, 19 nt, Artificial Sequence
  Description of Artificial Sequence: Synthetic oligonucleotide
  Antisense strand to SEQ ID NO: 1941892
uuccuuaauacccuuucuc

SEQ ID NO: 1941894 - RNA, 19 nt, Artificial Sequence
  Description of Artificial Sequence: Synthetic oligonucleotide
  Sense strand starting at position 865 of SEQ ID NO: 1880090
uaaggaauuugucagggua

SEQ ID NO: 1941895 - RNA, 19 nt, Artificial Sequence
  Description of Artificial Sequence: Synthetic oligonucleotide
  Antisense strand to SEQ ID NO: 1941894
uacccugacaaauuccuua

SEQ ID NO: 1941896 - RNA, 19 nt, Artificial Sequence
  Description of Artificial Sequence: Synthetic oligonucleotide
  Sense strand starting at position 867 of SEQ ID NO: 1880090
aggaauuugucaggguacu

SEQ ID NO: 1941897 - RNA, 19 nt, Artificial Sequence
  Description of Artificial Sequence: Synthetic oligonucleotide
  Antisense strand to SEQ ID NO: 1941896
aguacccugacaaauuccu

SEQ ID NO: 1941898 - RNA, 19 nt, Artificial Sequence
  Description of Artificial Sequence: Synthetic oligonucleotide
  Sense strand starting at position 887 of SEQ ID NO: 1880090
acgcgugucagguauaaac

SEQ ID NO: 1941899 - RNA, 19 nt, Artificial Sequence
  Description of Artificial Sequence: Synthetic oligonucleotide
  Antisense strand to SEQ ID NO: 1941898
guuuauaccugacacgcgu

SEQ ID NO: 1941900 - RNA, 19 nt, Artificial Sequence
  Description of Artificial Sequence: Synthetic oligonucleotide
  Sense strand starting at position 1036 of SEQ ID NO: 1880090
cugggugcuaucuagaaag

SEQ ID NO: 1941901 - RNA, 19 nt, Artificial Sequence
  Description of Artificial Sequence: Synthetic oligonucleotide
  Antisense strand to SEQ ID NO: 1941900
cuuucuagauagcacccag

SEQ ID NO: 1941902 - RNA, 19 nt, Artificial Sequence
  Description of Artificial Sequence: Synthetic oligonucleotide
  Sense strand starting at position 1038 of SEQ ID NO: 1880090
gggugcuaucuagaaaguu

SEQ ID NO: 1941903 - RNA, 19 nt, Artificial Sequence
  Description of Artificial Sequence: Synthetic oligonucleotide
  Antisense strand to SEQ ID NO: 1941902
aacuuucuagauagcaccc

SEQ ID NO: 1941904 - RNA, 19 nt, Artificial Sequence
  Description of Artificial Sequence: Synthetic oligonucleotide
  Sense strand starting at position 1047 of SEQ ID NO: 1880090
cuagaaaguugccuggcaa

SEQ ID NO: 1941905 - RNA, 19 nt, Artificial Sequence
  Description of Artificial Sequence: Synthetic oligonucleotide
  Antisense strand to SEQ ID NO: 1941904
uugccaggcaacuuucuag

SEQ ID NO: 1941906 - RNA, 19 nt, Artificial Sequence
  Description of Artificial Sequence: Synthetic oligonucleotide
  Sense strand starting at position 1048 of SEQ ID NO: 1880090
uagaaaguugccuggcaau

SEQ ID NO: 1941907 - RNA, 19 nt, Artificial Sequence
  Description of Artificial Sequence: Synthetic oligonucleotide
  Antisense strand to SEQ ID NO: 1941906
auugccaggcaacuuucua

SEQ ID NO: 1941908 - RNA, 19 nt, Artificial Sequence
  Description of Artificial Sequence: Synthetic oligonucleotide
  Sense strand starting at position 1074 of SEQ ID NO: 1880090
ggaugugggagcgagacau

SEQ ID NO: 1941909 - RNA, 19 nt, Artificial Sequence
  Description of Artificial Sequence: Synthetic oligonucleotide
  Antisense strand to SEQ ID NO: 1941908
augucucgcucccacaucc

SEQ ID NO: 1941910 - RNA, 19 nt, Artificial Sequence
  Description of Artificial Sequence: Synthetic oligonucleotide
  Sense strand starting at position 1078 of SEQ ID NO: 1880090
gugggagcgagacaucaaa

SEQ ID NO: 1941911 - RNA, 19 nt, Artificial Sequence
  Description of Artificial Sequence: Synthetic oligonucleotide
  Antisense strand to SEQ ID NO: 1941910
uuugaugucucgcucccac

SEQ ID NO: 1941912 - RNA, 19 nt, Artificial Sequence
  Description of Artificial Sequence: Synthetic oligonucleotide
  Sense strand starting at position 1139 of SEQ ID NO: 1880090
auaugaacugccggagaua

SEQ ID NO: 1941913 - RNA, 19 nt, Artificial Sequence
  Description of Artificial Sequence: Synthetic oligonucleotide
  Antisense strand to SEQ ID NO: 1941912
uaucuccggcaguucauau

SEQ ID NO: 1941914 - RNA, 19 nt, Artificial Sequence
  Description of Artificial Sequence: Synthetic oligonucleotide
  Sense strand starting at position 1142 of SEQ ID NO: 1880090
ugaacugccggagauagua

SEQ ID NO: 1941915 - RNA, 19 nt, Artificial Sequence
  Description of Artificial Sequence: Synthetic oligonucleotide
  Antisense strand to SEQ ID NO: 1941914
uacuaucuccggcaguuca

SEQ ID NO: 1941916 - RNA, 19 nt, Artificial Sequence
  Description of Artificial Sequence: Synthetic oligonucleotide
  Sense strand starting at position 1169 of SEQ ID NO: 1880090
guaccuggcuccucauaaa

SEQ ID NO: 1941917 - RNA, 19 nt, Artificial Sequence
  Description of Artificial Sequence: Synthetic oligonucleotide
  Antisense strand to SEQ ID NO: 1941916
uuuaugaggagccagguac

SEQ ID NO: 1941918 - RNA, 19 nt, Artificial Sequence
  Description of Artificial Sequence: Synthetic oligonucleotide
  Sense strand starting at position 1317 of SEQ ID NO: 1880090
acgcaaaguaagcguguua

SEQ ID NO: 1941919 - RNA, 19 nt, Artificial Sequence
  Description of Artificial Sequence: Synthetic oligonucleotide
  Antisense strand to SEQ ID NO: 1941918
uaacacgcuuacuuugcgu

SEQ ID NO: 1941920 - RNA, 19 nt, Artificial Sequence
  Description of Artificial Sequence: Synthetic oligonucleotide
  Sense strand starting at position 1375 of SEQ ID NO: 1880090
ccugcuuucuuccuggaga

SEQ ID NO: 1941921 - RNA, 19 nt, Artificial Sequence
  Description of Artificial Sequence: Synthetic oligonucleotide
  Antisense strand to SEQ ID NO: 1941920
ucuccaggaagaaagcagg

SEQ ID NO: 1941922 - RNA, 19 nt, Artificial Sequence
  Description of Artificial Sequence: Synthetic oligonucleotide
  Sense strand starting at position 1376 of SEQ ID NO: 1880090
cugcuuucuuccuggagaa

SEQ ID NO: 1941923 - RNA, 19 nt, Artificial Sequence
  Description of Artificial Sequence: Synthetic oligonucleotide
  Antisense strand to SEQ ID NO: 1941922
uucuccaggaagaaagcag

SEQ ID NO: 1941924 - RNA, 19 nt, Artificial Sequence
  Description of Artificial Sequence: Synthetic oligonucleotide
  Sense strand starting at position 1377 of SEQ ID NO: 1880090
ugcuuucuuccuggagaac

SEQ ID NO: 1941925 - RNA, 19 nt, Artificial Sequence
  Description of Artificial Sequence: Synthetic oligonucleotide
  Antisense strand to SEQ ID NO: 1941924
guucuccaggaagaaagca

SEQ ID NO: 1941926 - RNA, 19 nt, Artificial Sequence
  Description of Artificial Sequence: Synthetic oligonucleotide
  Sense strand starting at position 1378 of SEQ ID NO: 1880090
gcuuucuuccuggagaaca

SEQ ID NO: 1941927 - RNA, 19 nt, Artificial Sequence
  Description of Artificial Sequence: Synthetic oligonucleotide
  Antisense strand to SEQ ID NO: 1941926
uguucuccaggaagaaagc

SEQ ID NO: 1941928 - RNA, 19 nt, Artificial Sequence
  Description of Artificial Sequence: Synthetic oligonucleotide
  Sense strand starting at position 1397 of SEQ ID NO: 1880090
gcacccaucugcguaguuu

SEQ ID NO: 1941929 - RNA, 19 nt, Artificial Sequence
  Description of Artificial Sequence: Synthetic oligonucleotide
  Antisense strand to SEQ ID NO: 1941928
aaacuacgcagaugggugc

SEQ ID NO: 1941930 - RNA, 19 nt, Artificial Sequence
  Description of Artificial Sequence: Synthetic oligonucleotide
  Sense strand starting at position 1698 of SEQ ID NO: 1880090
gcgugcaggcgacauguua

SEQ ID NO: 1941931 - RNA, 19 nt, Artificial Sequence
  Description of Artificial Sequence: Synthetic oligonucleotide
  Antisense strand to SEQ ID NO: 1941930
uaacaugucgccugcacgc

SEQ ID NO: 1941932 - RNA, 19 nt, Artificial Sequence
  Description of Artificial Sequence: Synthetic oligonucleotide
  Sense strand starting at position 1705 of SEQ ID NO: 1880090
ggcgacauguuacuuccua

SEQ ID NO: 1941933 - RNA, 19 nt, Artificial Sequence
  Description of Artificial Sequence: Synthetic oligonucleotide
  Antisense strand to SEQ ID NO: 1941932
uaggaaguaacaugucgcc

SEQ ID NO: 1941934 - RNA, 19 nt, Artificial Sequence
  Description of Artificial Sequence: Synthetic oligonucleotide
  Sense strand starting at position 1706 of SEQ ID NO: 1880090
gcgacauguuacuuccuau

SEQ ID NO: 1941935 - RNA, 19 nt, Artificial Sequence
  Description of Artificial Sequence: Synthetic oligonucleotide
  Antisense strand to SEQ ID NO: 1941934
auaggaaguaacaugucgc

SEQ ID NO: 1941936 - RNA, 19 nt, Artificial Sequence
  Description of Artificial Sequence: Synthetic oligonucleotide
  Sense strand starting at position 1791 of SEQ ID NO: 1880090
agauaugacccuuagcgua

SEQ ID NO: 1941937 - RNA, 19 nt, Artificial Sequence
  Description of Artificial Sequence: Synthetic oligonucleotide
  Antisense strand to SEQ ID NO: 1941936
uacgcuaagggucauaucu

SEQ ID NO: 1941938 - RNA, 19 nt, Artificial Sequence
  Description of Artificial Sequence: Synthetic oligonucleotide
  Sense strand starting at position 2107 of SEQ ID NO: 1880090
cugggauucucucuuccga

SEQ ID NO: 1941939 - RNA, 19 nt, Artificial Sequence
  Description of Artificial Sequence: Synthetic oligonucleotide
  Antisense strand to SEQ ID NO: 1941938
ucggaagagagaaucccag

SEQ ID NO: 1941940 - RNA, 19 nt, Artificial Sequence
  Description of Artificial Sequence: Synthetic oligonucleotide
  Sense strand starting at position 2109 of SEQ ID NO: 1880090
gggauucucucuuccgauc

SEQ ID NO: 1941941 - RNA, 19 nt, Artificial Sequence
  Description of Artificial Sequence: Synthetic oligonucleotide
  Antisense strand to SEQ ID NO: 1941940
gaucggaagagagaauccc

SEQ ID NO: 1941942 - RNA, 19 nt, Artificial Sequence
  Description of Artificial Sequence: Synthetic oligonucleotide
  Sense strand starting at position 2292 of SEQ ID NO: 1880090
ugaccaaucugcugccaga

SEQ ID NO: 1941943 - RNA, 19 nt, Artificial Sequence
  Description of Artificial Sequence: Synthetic oligonucleotide
  Antisense strand to SEQ ID NO: 1941942
ucuggcagcagauugguca

SEQ ID NO: 1941944 - RNA, 19 nt, Artificial Sequence
  Description of Artificial Sequence: Synthetic oligonucleotide
  Sense strand starting at position 2513 of SEQ ID NO: 1880090
acaucuuuaucccugugau

SEQ ID NO: 1941945 - RNA, 19 nt, Artificial Sequence
  Description of Artificial Sequence: Synthetic oligonucleotide
  Antisense strand to SEQ ID NO: 1941944
aucacagggauaaagaugu

SEQ ID NO: 1941946 - RNA, 19 nt, Artificial Sequence
  Description of Artificial Sequence: Synthetic oligonucleotide
  Sense strand starting at position 2516 of SEQ ID NO: 1880090
ucuuuaucccugugaugca

SEQ ID NO: 1941947 - RNA, 19 nt, Artificial Sequence
  Description of Artificial Sequence: Synthetic oligonucleotide
  Antisense strand to SEQ ID NO: 1941946
ugcaucacagggauaaaga

SEQ ID NO: 1941948 - RNA, 19 nt, Artificial Sequence
  Description of Artificial Sequence: Synthetic oligonucleotide
  Sense strand starting at position 2907 of SEQ ID NO: 1880090
uuuaacaaugucuggauca

SEQ ID NO: 1941949 - RNA, 19 nt, Artificial Sequence
  Description of Artificial Sequence: Synthetic oligonucleotide
  Antisense strand to SEQ ID NO: 1941948
ugauccagacauuguuaaa

SEQ ID NO: 1941950 - RNA, 19 nt, Artificial Sequence
  Description of Artificial Sequence: Synthetic oligonucleotide
  Sense strand starting at position 2908 of SEQ ID NO: 1880090
uuaacaaugucuggaucau

SEQ ID NO: 1941951 - RNA, 19 nt, Artificial Sequence
  Description of Artificial Sequence: Synthetic oligonucleotide
  Antisense strand to SEQ ID NO: 1941950
augauccagacauuguuaa

SEQ ID NO: 1941952 - RNA, 19 nt, Artificial Sequence
  Description of Artificial Sequence: Synthetic oligonucleotide
  Sense strand starting at position 3248 of SEQ ID NO: 1880090
agaccaauauuugauguaa

SEQ ID NO: 1941953 - RNA, 19 nt, Artificial Sequence
  Description of Artificial Sequence: Synthetic oligonucleotide
  Antisense strand to SEQ ID NO: 1941952
uuacaucaaauauuggucu

SEQ ID NO: 1941954 - RNA, 19 nt, Artificial Sequence
  Description of Artificial Sequence: Synthetic oligonucleotide
  Sense strand starting at position 3471 of SEQ ID NO: 1880090
uugacuuuguucucgcgau

SEQ ID NO: 1941955 - RNA, 19 nt, Artificial Sequence
  Description of Artificial Sequence: Synthetic oligonucleotide
  Antisense strand to SEQ ID NO: 1941954
aucgcgagaacaaagucaa

SEQ ID NO: 1941956 - RNA, 19 nt, Artificial Sequence
  Description of Artificial Sequence: Synthetic oligonucleotide
  Sense strand starting at position 3607 of SEQ ID NO: 1880090
gagaguucuccuuggagac

SEQ ID NO: 1941957 - RNA, 19 nt, Artificial Sequence
  Description of Artificial Sequence: Synthetic oligonucleotide
  Antisense strand to SEQ ID NO: 1941956
gucuccaaggagaacucuc

SEQ ID NO: 1941958 - RNA, 19 nt, Artificial Sequence
  Description of Artificial Sequence: Synthetic oligonucleotide
  Sense strand starting at position 3609 of SEQ ID NO: 1880090
gaguucuccuuggagacca

SEQ ID NO: 1941959 - RNA, 19 nt, Artificial Sequence
  Description of Artificial Sequence: Synthetic oligonucleotide
  Antisense strand to SEQ ID NO: 1941958
uggucuccaaggagaacuc

SEQ ID NO: 1941960 - RNA, 19 nt, Artificial Sequence
  Description of Artificial Sequence: Synthetic oligonucleotide
  Sense strand starting at position 3625 of SEQ ID NO: 1880090
ccauaaagauucuguggca

SEQ ID NO: 1941961 - RNA, 19 nt, Artificial Sequence
  Description of Artificial Sequence: Synthetic oligonucleotide
  Antisense strand to SEQ ID NO: 1941960
ugccacagaaucuuuaugg

SEQ ID NO: 1941962 - RNA, 19 nt, Artificial Sequence
  Description of Artificial Sequence: Synthetic oligonucleotide
  Sense strand starting at position 3626 of SEQ ID NO: 1880090
cauaaagauucuguggcau

SEQ ID NO: 1941963 - RNA, 19 nt, Artificial Sequence
  Description of Artificial Sequence: Synthetic oligonucleotide
  Antisense strand to SEQ ID NO: 1941962
augccacagaaucuuuaug

SEQ ID NO: 1941964 - RNA, 19 nt, Artificial Sequence
  Description of Artificial Sequence: Synthetic oligonucleotide
  Sense strand starting at position 3865 of SEQ ID NO: 1880090
auggguucuuccugcccaa

SEQ ID NO: 1941965 - RNA, 19 nt, Artificial Sequence
  Description of Artificial Sequence: Synthetic oligonucleotide
  Antisense strand to SEQ ID NO: 1941964
uugggcaggaagaacccau

SEQ ID NO: 1941966 - RNA, 19 nt, Artificial Sequence
  Description of Artificial Sequence: Synthetic oligonucleotide
  Sense strand starting at position 3869 of SEQ ID NO: 1880090
guucuuccugcccaaugua

SEQ ID NO: 1941967 - RNA, 19 nt, Artificial Sequence
  Description of Artificial Sequence: Synthetic oligonucleotide
  Antisense strand to SEQ ID NO: 1941966
uacauugggcaggaagaac

SEQ ID NO: 1941968 - RNA, 19 nt, Artificial Sequence
  Description of Artificial Sequence: Synthetic oligonucleotide
  Sense strand starting at position 48 of SEQ ID NO: 1880091
gccuguuggauacaggauu

SEQ ID NO: 1941969 - RNA, 19 nt, Artificial Sequence
  Description of Artificial Sequence: Synthetic oligonucleotide
  Antisense strand to SEQ ID NO: 1941968
aauccuguauccaacaggc

SEQ ID NO: 1941970 - RNA, 19 nt, Artificial Sequence
  Description of Artificial Sequence: Synthetic oligonucleotide
  Sense strand starting at position 3224 of SEQ ID NO: 1880091
uggugcuggauuugaugua

SEQ ID NO: 1941971 - RNA, 19 nt, Artificial Sequence
  Description of Artificial Sequence: Synthetic oligonucleotide
  Antisense strand to SEQ ID NO: 1941970
uacaucaaauccagcacca

SEQ ID NO: 1941972 - RNA, 19 nt, Artificial Sequence
  Description of Artificial Sequence: Synthetic oligonucleotide
  Sense strand starting at position 3248 of SEQ ID NO: 1880091
uaccgaggcccucauuaua

SEQ ID NO: 1941973 - RNA, 19 nt, Artificial Sequence
  Description of Artificial Sequence: Synthetic oligonucleotide
  Antisense strand to SEQ ID NO: 1941972
uauaaugagggccucggua

SEQ ID NO: 1941974 - RNA, 19 nt, Artificial Sequence
  Description of Artificial Sequence: Synthetic oligonucleotide
  Sense strand starting at position 3393 of SEQ ID NO: 1880091
cuauuccacuccuugguua

SEQ ID NO: 1941975 - RNA, 19 nt, Artificial Sequence
  Description of Artificial Sequence: Synthetic oligonucleotide
  Antisense strand to SEQ ID NO: 1941974
uaaccaaggaguggaauag

SEQ ID NO: 1941976 - RNA, 19 nt, Artificial Sequence
  Description of Artificial Sequence: Synthetic oligonucleotide
  Sense strand starting at position 3395 of SEQ ID NO: 1880091
auuccacuccuugguuaga

SEQ ID NO: 1941977 - RNA, 19 nt, Artificial Sequence
  Description of Artificial Sequence: Synthetic oligonucleotide
  Antisense strand to SEQ ID NO: 1941976
ucuaaccaaggaguggaau

SEQ ID NO: 1941978 - RNA, 19 nt, Artificial Sequence
  Description of Artificial Sequence: Synthetic oligonucleotide
  Sense strand starting at position 3397 of SEQ ID NO: 1880091
uccacuccuugguuagaga

SEQ ID NO: 1941979 - RNA, 19 nt, Artificial Sequence
  Description of Artificial Sequence: Synthetic oligonucleotide
  Antisense strand to SEQ ID NO: 1941978
ucucuaaccaaggagugga

SEQ ID NO: 1941980 - RNA, 19 nt, Artificial Sequence
  Description of Artificial Sequence: Synthetic oligonucleotide
  Sense strand starting at position 3444 of SEQ ID NO: 1880091
auuguucucugucggguau

SEQ ID NO: 1941981 - RNA, 19 nt, Artificial Sequence
  Description of Artificial Sequence: Synthetic oligonucleotide
  Antisense strand to SEQ ID NO: 1941980
auacccgacagagaacaau

SEQ ID NO: 1941982 - RNA, 19 nt, Artificial Sequence
  Description of Artificial Sequence: Synthetic oligonucleotide
  Sense strand starting at position 3540 of SEQ ID NO: 1880091
uugacuuuguucuugagau

SEQ ID NO: 1941983 - RNA, 19 nt, Artificial Sequence
  Description of Artificial Sequence: Synthetic oligonucleotide
  Antisense strand to SEQ ID NO: 1941982
aucucaagaacaaagucaa

SEQ ID NO: 1941984 - RNA, 19 nt, Artificial Sequence
  Description of Artificial Sequence: Synthetic oligonucleotide
  Sense strand starting at position 3541 of SEQ ID NO: 1880091
ugacuuuguucuugagaug

SEQ ID NO: 1941985 - RNA, 19 nt, Artificial Sequence
  Description of Artificial Sequence: Synthetic oligonucleotide
  Antisense strand to SEQ ID NO: 1941984
caucucaagaacaaaguca

SEQ ID NO: 1941986 - RNA, 19 nt, Artificial Sequence
  Description of Artificial Sequence: Synthetic oligonucleotide
  Sense strand starting at position 3676 of SEQ ID NO: 1880091
gagaguucuccuuggagac

SEQ ID NO: 1941987 - RNA, 19 nt, Artificial Sequence
  Description of Artificial Sequence: Synthetic oligonucleotide
  Antisense strand to SEQ ID NO: 1941986
gucuccaaggagaacucuc

SEQ ID NO: 1941988 - RNA, 19 nt, Artificial Sequence
  Description of Artificial Sequence: Synthetic oligonucleotide
  Sense strand starting at position 3678 of SEQ ID NO: 1880091
gaguucuccuuggagacca

SEQ ID NO: 1941989 - RNA, 19 nt, Artificial Sequence
  Description of Artificial Sequence: Synthetic oligonucleotide
  Antisense strand to SEQ ID NO: 1941988
uggucuccaaggagaacuc

SEQ ID NO: 1941990 - RNA, 19 nt, Artificial Sequence
  Description of Artificial Sequence: Synthetic oligonucleotide
  Sense strand starting at position 3766 of SEQ ID NO: 1880091
gagauuaggugacagugua

SEQ ID NO: 1941991 - RNA, 19 nt, Artificial Sequence
  Description of Artificial Sequence: Synthetic oligonucleotide
  Antisense strand to SEQ ID NO: 1941990
uacacugucaccuaaucuc

SEQ ID NO: 1941992 - RNA, 19 nt, Artificial Sequence
  Description of Artificial Sequence: Synthetic oligonucleotide
  Sense strand starting at position 3774 of SEQ ID NO: 1880091
gugacaguguaguaauaac

SEQ ID NO: 1941993 - RNA, 19 nt, Artificial Sequence
  Description of Artificial Sequence: Synthetic oligonucleotide
  Antisense strand to SEQ ID NO: 1941992
guuauuacuacacugucac

SEQ ID NO: 1941994 - RNA, 19 nt, Artificial Sequence
  Description of Artificial Sequence: Synthetic oligonucleotide
  Sense strand starting at position 3784 of SEQ ID NO: 1880091
aguaauaacugcugaauac

SEQ ID NO: 1941995 - RNA, 19 nt, Artificial Sequence
  Description of Artificial Sequence: Synthetic oligonucleotide
  Antisense strand to SEQ ID NO: 1941994
guauucagcaguuauuacu

SEQ ID NO: 1941996 - RNA, 19 nt, Artificial Sequence
  Description of Artificial Sequence: Synthetic oligonucleotide
  Sense strand starting at position 3785 of SEQ ID NO: 1880091
guaauaacugcugaauacu

SEQ ID NO: 1941997 - RNA, 19 nt, Artificial Sequence
  Description of Artificial Sequence: Synthetic oligonucleotide
  Antisense strand to SEQ ID NO: 1941996
aguauucagcaguuauuac

SEQ ID NO: 1941998 - RNA, 19 nt, Artificial Sequence
  Description of Artificial Sequence: Synthetic oligonucleotide
  Sense strand starting at position 382 of SEQ ID NO: 1880092
accucaguugaucagaagu

SEQ ID NO: 1941999 - RNA, 19 nt, Artificial Sequence
  Description of Artificial Sequence: Synthetic oligonucleotide
  Antisense strand to SEQ ID NO: 1941998
acuucugaucaacugaggu

SEQ ID NO: 1942000 - RNA, 19 nt, Artificial Sequence
  Description of Artificial Sequence: Synthetic oligonucleotide
  Sense strand starting at position 877 of SEQ ID NO: 1880092
uaaggaauuugccagggua

SEQ ID NO: 1942001 - RNA, 19 nt, Artificial Sequence
  Description of Artificial Sequence: Synthetic oligonucleotide
  Antisense strand to SEQ ID NO: 1942000
uacccuggcaaauuccuua

SEQ ID NO: 1942002 - RNA, 19 nt, Artificial Sequence
  Description of Artificial Sequence: Synthetic oligonucleotide
  Sense strand starting at position 995 of SEQ ID NO: 1880092
ggacacuggcgccagaaau

SEQ ID NO: 1942003 - RNA, 19 nt, Artificial Sequence
  Description of Artificial Sequence: Synthetic oligonucleotide
  Antisense strand to SEQ ID NO: 1942002
auuucuggcgccagugucc

SEQ ID NO: 1942004 - RNA, 19 nt, Artificial Sequence
  Description of Artificial Sequence: Synthetic oligonucleotide
  Sense strand starting at position 1050 of SEQ ID NO: 1880092
gggugcuaucuagaaagcu

SEQ ID NO: 1942005 - RNA, 19 nt, Artificial Sequence
  Description of Artificial Sequence: Synthetic oligonucleotide
  Antisense strand to SEQ ID NO: 1942004
agcuuucuagauagcaccc

SEQ ID NO: 1942006 - RNA, 19 nt, Artificial Sequence
  Description of Artificial Sequence: Synthetic oligonucleotide
  Sense strand starting at position 1060 of SEQ ID NO: 1880092
uagaaagcugccuggcaau

SEQ ID NO: 1942007 - RNA, 19 nt, Artificial Sequence
  Description of Artificial Sequence: Synthetic oligonucleotide
  Antisense strand to SEQ ID NO: 1942006
auugccaggcagcuuucua

SEQ ID NO: 1942008 - RNA, 19 nt, Artificial Sequence
  Description of Artificial Sequence: Synthetic oligonucleotide
  Sense strand starting at position 1090 of SEQ ID NO: 1880092
gcggaagcgagacaucaaa

SEQ ID NO: 1942009 - RNA, 19 nt, Artificial Sequence
  Description of Artificial Sequence: Synthetic oligonucleotide
  Antisense strand to SEQ ID NO: 1942008
uuugaugucucgcuuccgc

SEQ ID NO: 1942010 - RNA, 19 nt, Artificial Sequence
  Description of Artificial Sequence: Synthetic oligonucleotide
  Sense strand starting at position 1181 of SEQ ID NO: 1880092
ggacccgucuccucauaaa

SEQ ID NO: 1942011 - RNA, 19 nt, Artificial Sequence
  Description of Artificial Sequence: Synthetic oligonucleotide
  Antisense strand to SEQ ID NO: 1942010
uuuaugaggagacgggucc

SEQ ID NO: 1942012 - RNA, 19 nt, Artificial Sequence
  Description of Artificial Sequence: Synthetic oligonucleotide
  Sense strand starting at position 1221 of SEQ ID NO: 1880092
ggaggaucgcagcgcauuu

SEQ ID NO: 1942013 - RNA, 19 nt, Artificial Sequence
  Description of Artificial Sequence: Synthetic oligonucleotide
  Antisense strand to SEQ ID NO: 1942012
aaaugcgcugcgauccucc

SEQ ID NO: 1942014 - RNA, 19 nt, Artificial Sequence
  Description of Artificial Sequence: Synthetic oligonucleotide
  Sense strand starting at position 1232 of SEQ ID NO: 1880092
gcgcauuucggccaagaca

SEQ ID NO: 1942015 - RNA, 19 nt, Artificial Sequence
  Description of Artificial Sequence: Synthetic oligonucleotide
  Antisense strand to SEQ ID NO: 1942014
ugucuuggccgaaaugcgc

SEQ ID NO: 1942016 - RNA, 19 nt, Artificial Sequence
  Description of Artificial Sequence: Synthetic oligonucleotide
  Sense strand starting at position 1282 of SEQ ID NO: 1880092
gaugaauugcguuaggaca

SEQ ID NO: 1942017 - RNA, 19 nt, Artificial Sequence
  Description of Artificial Sequence: Synthetic oligonucleotide
  Antisense strand to SEQ ID NO: 1942016
uguccuaacgcaauucauc

SEQ ID NO: 1942018 - RNA, 19 nt, Artificial Sequence
  Description of Artificial Sequence: Synthetic oligonucleotide
  Sense strand starting at position 1520 of SEQ ID NO: 1880092
gugaaaugugacuggaggu

SEQ ID NO: 1942019 - RNA, 19 nt, Artificial Sequence
  Description of Artificial Sequence: Synthetic oligonucleotide
  Antisense strand to SEQ ID NO: 1942018
accuccagucacauuucac

SEQ ID NO: 1942020 - RNA, 19 nt, Artificial Sequence
  Description of Artificial Sequence: Synthetic oligonucleotide
  Sense strand starting at position 1658 of SEQ ID NO: 1880092
gcgcuagcuagcuugugua

SEQ ID NO: 1942021 - RNA, 19 nt, Artificial Sequence
  Description of Artificial Sequence: Synthetic oligonucleotide
  Antisense strand to SEQ ID NO: 1942020
uacacaagcuagcuagcgc

SEQ ID NO: 1942022 - RNA, 19 nt, Artificial Sequence
  Description of Artificial Sequence: Synthetic oligonucleotide
  Sense strand starting at position 1660 of SEQ ID NO: 1880092
gcuagcuagcuuguguaaa

SEQ ID NO: 1942023 - RNA, 19 nt, Artificial Sequence
  Description of Artificial Sequence: Synthetic oligonucleotide
  Antisense strand to SEQ ID NO: 1942022
uuuacacaagcuagcuagc

SEQ ID NO: 1942024 - RNA, 19 nt, Artificial Sequence
  Description of Artificial Sequence: Synthetic oligonucleotide
  Sense strand starting at position 1715 of SEQ ID NO: 1880092
agcgacauauuacuacuau

SEQ ID NO: 1942025 - RNA, 19 nt, Artificial Sequence
  Description of Artificial Sequence: Synthetic oligonucleotide
  Antisense strand to SEQ ID NO: 1942024
auaguaguaauaugucgcu

SEQ ID NO: 1942026 - RNA, 19 nt, Artificial Sequence
  Description of Artificial Sequence: Synthetic oligonucleotide
  Sense strand starting at position 1748 of SEQ ID NO: 1880092
cugugagagaaacgauuaa

SEQ ID NO: 1942027 - RNA, 19 nt, Artificial Sequence
  Description of Artificial Sequence: Synthetic oligonucleotide
  Antisense strand to SEQ ID NO: 1942026
uuaaucguuucucucacag

SEQ ID NO: 1942028 - RNA, 19 nt, Artificial Sequence
  Description of Artificial Sequence: Synthetic oligonucleotide
  Sense strand starting at position 1755 of SEQ ID NO: 1880092
agaaacgauuaagaguaaa

SEQ ID NO: 1942029 - RNA, 19 nt, Artificial Sequence
  Description of Artificial Sequence: Synthetic oligonucleotide
  Antisense strand to SEQ ID NO: 1942028
uuuacucuuaaucguuucu

SEQ ID NO: 1942030 - RNA, 19 nt, Artificial Sequence
  Description of Artificial Sequence: Synthetic oligonucleotide
  Sense strand starting at position 1811 of SEQ ID NO: 1880092
gcagacuguucuuuaaacu

SEQ ID NO: 1942031 - RNA, 19 nt, Artificial Sequence
  Description of Artificial Sequence: Synthetic oligonucleotide
  Antisense strand to SEQ ID NO: 1942030
aguuuaaagaacagucugc

SEQ ID NO: 1942032 - RNA, 19 nt, Artificial Sequence
  Description of Artificial Sequence: Synthetic oligonucleotide
  Sense strand starting at position 2367 of SEQ ID NO: 1880092
gcaucuguucucgcccgaa

SEQ ID NO: 1942033 - RNA, 19 nt, Artificial Sequence
  Description of Artificial Sequence: Synthetic oligonucleotide
  Antisense strand to SEQ ID NO: 1942032
uucgggcgagaacagaugc

SEQ ID NO: 1942034 - RNA, 19 nt, Artificial Sequence
  Description of Artificial Sequence: Synthetic oligonucleotide
  Sense strand starting at position 2522 of SEQ ID NO: 1880092
uccuuauccuugucaugua

SEQ ID NO: 1942035 - RNA, 19 nt, Artificial Sequence
  Description of Artificial Sequence: Synthetic oligonucleotide
  Antisense strand to SEQ ID NO: 1942034
uacaugacaaggauaagga

SEQ ID NO: 1942036 - RNA, 19 nt, Artificial Sequence
  Description of Artificial Sequence: Synthetic oligonucleotide
  Sense strand starting at position 2540 of SEQ ID NO: 1880092
agcauuccgcuugaaauug

SEQ ID NO: 1942037 - RNA, 19 nt, Artificial Sequence
  Description of Artificial Sequence: Synthetic oligonucleotide
  Antisense strand to SEQ ID NO: 1942036
caauuucaagcggaaugcu

SEQ ID NO: 1942038 - RNA, 19 nt, Artificial Sequence
  Description of Artificial Sequence: Synthetic oligonucleotide
  Sense strand starting at position 2599 of SEQ ID NO: 1880092
gaaagaggcuucucagaug

SEQ ID NO: 1942039 - RNA, 19 nt, Artificial Sequence
  Description of Artificial Sequence: Synthetic oligonucleotide
  Antisense strand to SEQ ID NO: 1942038
caucugagaagccucuuuc

SEQ ID NO: 1942040 - RNA, 19 nt, Artificial Sequence
  Description of Artificial Sequence: Synthetic oligonucleotide
  Sense strand starting at position 2607 of SEQ ID NO: 1880092
cuucucagaugacugcaaa

SEQ ID NO: 1942041 - RNA, 19 nt, Artificial Sequence
  Description of Artificial Sequence: Synthetic oligonucleotide
  Antisense strand to SEQ ID NO: 1942040
uuugcagucaucugagaag

SEQ ID NO: 1942042 - RNA, 19 nt, Artificial Sequence
  Description of Artificial Sequence: Synthetic oligonucleotide
  Sense strand starting at position 2857 of SEQ ID NO: 1880092
uagugcuuaccucacguua

SEQ ID NO: 1942043 - RNA, 19 nt, Artificial Sequence
  Description of Artificial Sequence: Synthetic oligonucleotide
  Antisense strand to SEQ ID NO: 1942042
uaacgugagguaagcacua

SEQ ID NO: 1942044 - RNA, 19 nt, Artificial Sequence
  Description of Artificial Sequence: Synthetic oligonucleotide
  Sense strand starting at position 2923 of SEQ ID NO: 1880092
acaaauaccugggauacau

SEQ ID NO: 1942045 - RNA, 19 nt, Artificial Sequence
  Description of Artificial Sequence: Synthetic oligonucleotide
  Antisense strand to SEQ ID NO: 1942044
auguaucccagguauuugu

SEQ ID NO: 1942046 - RNA, 19 nt, Artificial Sequence
  Description of Artificial Sequence: Synthetic oligonucleotide
  Sense strand starting at position 2932 of SEQ ID NO: 1880092
ugggauacaucuuauuuga

SEQ ID NO: 1942047 - RNA, 19 nt, Artificial Sequence
  Description of Artificial Sequence: Synthetic oligonucleotide
  Antisense strand to SEQ ID NO: 1942046
ucaaauaagauguauccca

SEQ ID NO: 1942048 - RNA, 19 nt, Artificial Sequence
  Description of Artificial Sequence: Synthetic oligonucleotide
  Sense strand starting at position 2990 of SEQ ID NO: 1880092
gauuauaacgcaggaaaca

SEQ ID NO: 1942049 - RNA, 19 nt, Artificial Sequence
  Description of Artificial Sequence: Synthetic oligonucleotide
  Antisense strand to SEQ ID NO: 1942048
uguuuccugcguuauaauc

SEQ ID NO: 1942050 - RNA, 19 nt, Artificial Sequence
  Description of Artificial Sequence: Synthetic oligonucleotide
  Sense strand starting at position 3009 of SEQ ID NO: 1880092
cugugaaguaaguaaaguu

SEQ ID NO: 1942051 - RNA, 19 nt, Artificial Sequence
  Description of Artificial Sequence: Synthetic oligonucleotide
  Antisense strand to SEQ ID NO: 1942050
aacuuuacuuacuucacag

SEQ ID NO: 1942052 - RNA, 19 nt, Artificial Sequence
  Description of Artificial Sequence: Synthetic oligonucleotide
  Sense strand starting at position 3512 of SEQ ID NO: 1880092
gcugacucauccuugacuu

SEQ ID NO: 1942053 - RNA, 19 nt, Artificial Sequence
  Description of Artificial Sequence: Synthetic oligonucleotide
  Antisense strand to SEQ ID NO: 1942052
aagucaaggaugagucagc

SEQ ID NO: 1942054 - RNA, 19 nt, Artificial Sequence
  Description of Artificial Sequence: Synthetic oligonucleotide
  Sense strand starting at position 3524 of SEQ ID NO: 1880092
uugacuugguucuccagau

SEQ ID NO: 1942055 - RNA, 19 nt, Artificial Sequence
  Description of Artificial Sequence: Synthetic oligonucleotide
  Antisense strand to SEQ ID NO: 1942054
aucuggagaaccaagucaa

SEQ ID NO: 1942056 - RNA, 19 nt, Artificial Sequence
  Description of Artificial Sequence: Synthetic oligonucleotide
  Sense strand starting at position 3525 of SEQ ID NO: 1880092
ugacuugguucuccagaug

SEQ ID NO: 1942057 - RNA, 19 nt, Artificial Sequence
  Description of Artificial Sequence: Synthetic oligonucleotide
  Antisense strand to SEQ ID NO: 1942056
caucuggagaaccaaguca

SEQ ID NO: 1942058 - RNA, 19 nt, Artificial Sequence
  Description of Artificial Sequence: Synthetic oligonucleotide
  Sense strand starting at position 3665 of SEQ ID NO: 1880092
gucuccucuggagagcaua

SEQ ID NO: 1942059 - RNA, 19 nt, Artificial Sequence
  Description of Artificial Sequence: Synthetic oligonucleotide
  Antisense strand to SEQ ID NO: 1942058
uaugcucuccagaggagac

SEQ ID NO: 1942060 - RNA, 19 nt, Artificial Sequence
  Description of Artificial Sequence: Synthetic oligonucleotide
  Sense strand starting at position 3749 of SEQ ID NO: 1880092
gagggauuaggugacggua

SEQ ID NO: 1942061 - RNA, 19 nt, Artificial Sequence
  Description of Artificial Sequence: Synthetic oligonucleotide
  Antisense strand to SEQ ID NO: 1942060
uaccgucaccuaaucccuc

SEQ ID NO: 1942062 - RNA, 19 nt, Artificial Sequence
  Description of Artificial Sequence: Synthetic oligonucleotide
  Sense strand starting at position 3763 of SEQ ID NO: 1880092
cgguauaguaacugcugaa

SEQ ID NO: 1942063 - RNA, 19 nt, Artificial Sequence
  Description of Artificial Sequence: Synthetic oligonucleotide
  Antisense strand to SEQ ID NO: 1942062
uucagcaguuacuauaccg

SEQ ID NO: 1942064 - RNA, 19 nt, Artificial Sequence
  Description of Artificial Sequence: Synthetic oligonucleotide
  Sense strand starting at position 3767 of SEQ ID NO: 1880092
auaguaacugcugaauacu

SEQ ID NO: 1942065 - RNA, 19 nt, Artificial Sequence
  Description of Artificial Sequence: Synthetic oligonucleotide
  Antisense strand to SEQ ID NO: 1942064
aguauucagcaguuacuau

SEQ ID NO: 1942066 - RNA, 19 nt, Artificial Sequence
  Description of Artificial Sequence: Synthetic oligonucleotide
  Sense strand starting at position 3829 of SEQ ID NO: 1880092
acacaucguccagguagua

SEQ ID NO: 1942067 - RNA, 19 nt, Artificial Sequence
  Description of Artificial Sequence: Synthetic oligonucleotide
  Antisense strand to SEQ ID NO: 1942066
uacuaccuggacgaugugu

SEQ ID NO: 1942068 - RNA, 19 nt, Artificial Sequence
  Description of Artificial Sequence: Synthetic oligonucleotide
  Sense strand starting at position 3851 of SEQ ID NO: 1880092
gagaaauacuuucugggua

SEQ ID NO: 1942069 - RNA, 19 nt, Artificial Sequence
  Description of Artificial Sequence: Synthetic oligonucleotide
  Antisense strand to SEQ ID NO: 1942068
uacccagaaaguauuucuc

SEQ ID NO: 1942070 - RNA, 19 nt, Artificial Sequence
  Description of Artificial Sequence: Synthetic oligonucleotide
  Sense strand starting at position 3856 of SEQ ID NO: 1880092
auacuuucuggguaucuga

SEQ ID NO: 1942071 - RNA, 19 nt, Artificial Sequence
  Description of Artificial Sequence: Synthetic oligonucleotide
  Antisense strand to SEQ ID NO: 1942070
ucagauacccagaaaguau

SEQ ID NO: 1942072 - RNA, 19 nt, Artificial Sequence
  Description of Artificial Sequence: Synthetic oligonucleotide
  Sense strand starting at position 3872 of SEQ ID NO: 1880092
ugaccagccuucguggaaa

SEQ ID NO: 1942073 - RNA, 19 nt, Artificial Sequence
  Description of Artificial Sequence: Synthetic oligonucleotide
  Antisense strand to SEQ ID NO: 1942072
uuuccacgaaggcugguca

SEQ ID NO: 1942074 - RNA, 19 nt, Artificial Sequence
  Description of Artificial Sequence: Synthetic oligonucleotide
  Sense strand starting at position 3874 of SEQ ID NO: 1880092
accagccuucguggaaaga

SEQ ID NO: 1942075 - RNA, 19 nt, Artificial Sequence
  Description of Artificial Sequence: Synthetic oligonucleotide
  Antisense strand to SEQ ID NO: 1942074
ucuuuccacgaaggcuggu

SEQ ID NO: 1942076 - RNA, 19 nt, Artificial Sequence
  Description of Artificial Sequence: Synthetic oligonucleotide
  Sense strand starting at position 3875 of SEQ ID NO: 1880092
ccagccuucguggaaagaa

SEQ ID NO: 1942077 - RNA, 19 nt, Artificial Sequence
  Description of Artificial Sequence: Synthetic oligonucleotide
  Antisense strand to SEQ ID NO: 1942076
uucuuuccacgaaggcugg

SEQ ID NO: 1942078 - RNA, 19 nt, Artificial Sequence
  Description of Artificial Sequence: Synthetic oligonucleotide
  Sense strand starting at position 55 of SEQ ID NO: 1880093
cagauuagcugccauguau

SEQ ID NO: 1942079 - RNA, 19 nt, Artificial Sequence
  Description of Artificial Sequence: Synthetic oligonucleotide
  Antisense strand to SEQ ID NO: 1942078
auacauggcagcuaaucug

SEQ ID NO: 1942080 - RNA, 19 nt, Artificial Sequence
  Description of Artificial Sequence: Synthetic oligonucleotide
  Sense strand starting at position 62 of SEQ ID NO: 1880093
gcugccauguaucaccaaa

SEQ ID NO: 1942081 - RNA, 19 nt, Artificial Sequence
  Description of Artificial Sequence: Synthetic oligonucleotide
  Antisense strand to SEQ ID NO: 1942080
uuuggugauacauggcagc

SEQ ID NO: 1942082 - RNA, 19 nt, Artificial Sequence
  Description of Artificial Sequence: Synthetic oligonucleotide
  Sense strand starting at position 226 of SEQ ID NO: 1880093
gagugagagaccuguccua

SEQ ID NO: 1942083 - RNA, 19 nt, Artificial Sequence
  Description of Artificial Sequence: Synthetic oligonucleotide
  Antisense strand to SEQ ID NO: 1942082
uaggacaggucucucacuc

SEQ ID NO: 1942084 - RNA, 19 nt, Artificial Sequence
  Description of Artificial Sequence: Synthetic oligonucleotide
  Sense strand starting at position 839 of SEQ ID NO: 1880093
ggugauuuacagugcuauu

SEQ ID NO: 1942085 - RNA, 19 nt, Artificial Sequence
  Description of Artificial Sequence: Synthetic oligonucleotide
  Antisense strand to SEQ ID NO: 1942084
aauagcacuguaaaucacc

SEQ ID NO: 1942086 - RNA, 19 nt, Artificial Sequence
  Description of Artificial Sequence: Synthetic oligonucleotide
  Sense strand starting at position 842 of SEQ ID NO: 1880093
gauuuacagugcuauuuga

SEQ ID NO: 1942087 - RNA, 19 nt, Artificial Sequence
  Description of Artificial Sequence: Synthetic oligonucleotide
  Antisense strand to SEQ ID NO: 1942086
ucaaauagcacuguaaauc

SEQ ID NO: 1942088 - RNA, 19 nt, Artificial Sequence
  Description of Artificial Sequence: Synthetic oligonucleotide
  Sense strand starting at position 893 of SEQ ID NO: 1880093
acgcgugucagguguaaac

SEQ ID NO: 1942089 - RNA, 19 nt, Artificial Sequence
  Description of Artificial Sequence: Synthetic oligonucleotide
  Antisense strand to SEQ ID NO: 1942088
guuuacaccugacacgcgu

SEQ ID NO: 1942090 - RNA, 19 nt, Artificial Sequence
  Description of Artificial Sequence: Synthetic oligonucleotide
  Sense strand starting at position 1113 of SEQ ID NO: 1880093
ucgcuuaaagucugaagaa

SEQ ID NO: 1942091 - RNA, 19 nt, Artificial Sequence
  Description of Artificial Sequence: Synthetic oligonucleotide
  Antisense strand to SEQ ID NO: 1942090
uucuucagacuuuaagcga

SEQ ID NO: 1942092 - RNA, 19 nt, Artificial Sequence
  Description of Artificial Sequence: Synthetic oligonucleotide
  Sense strand starting at position 1114 of SEQ ID NO: 1880093
cgcuuaaagucugaagaaa

SEQ ID NO: 1942093 - RNA, 19 nt, Artificial Sequence
  Description of Artificial Sequence: Synthetic oligonucleotide
  Antisense strand to SEQ ID NO: 1942092
uuucuucagacuuuaagcg

SEQ ID NO: 1942094 - RNA, 19 nt, Artificial Sequence
  Description of Artificial Sequence: Synthetic oligonucleotide
  Sense strand starting at position 1318 of SEQ ID NO: 1880093
acgcaaaguaagcguguua

SEQ ID NO: 1942095 - RNA, 19 nt, Artificial Sequence
  Description of Artificial Sequence: Synthetic oligonucleotide
  Antisense strand to SEQ ID NO: 1942094
uaacacgcuuacuuugcgu

SEQ ID NO: 1942096 - RNA, 19 nt, Artificial Sequence
  Description of Artificial Sequence: Synthetic oligonucleotide
  Sense strand starting at position 1379 of SEQ ID NO: 1880093
gcuuucuucccagagaacu

SEQ ID NO: 1942097 - RNA, 19 nt, Artificial Sequence
  Description of Artificial Sequence: Synthetic oligonucleotide
  Antisense strand to SEQ ID NO: 1942096
aguucucugggaagaaagc

SEQ ID NO: 1942098 - RNA, 19 nt, Artificial Sequence
  Description of Artificial Sequence: Synthetic oligonucleotide
  Sense strand starting at position 1703 of SEQ ID NO: 1880093
ggcgacauguuacuuccua

SEQ ID NO: 1942099 - RNA, 19 nt, Artificial Sequence
  Description of Artificial Sequence: Synthetic oligonucleotide
  Antisense strand to SEQ ID NO: 1942098
uaggaaguaacaugucgcc

SEQ ID NO: 1942100 - RNA, 19 nt, Artificial Sequence
  Description of Artificial Sequence: Synthetic oligonucleotide
  Sense strand starting at position 1704 of SEQ ID NO: 1880093
gcgacauguuacuuccuau

SEQ ID NO: 1942101 - RNA, 19 nt, Artificial Sequence
  Description of Artificial Sequence: Synthetic oligonucleotide
  Antisense strand to SEQ ID NO: 1942100
auaggaaguaacaugucgc

SEQ ID NO: 1942102 - RNA, 19 nt, Artificial Sequence
  Description of Artificial Sequence: Synthetic oligonucleotide
  Sense strand starting at position 1791 of SEQ ID NO: 1880093
agauaugacccuuggcgua

SEQ ID NO: 1942103 - RNA, 19 nt, Artificial Sequence
  Description of Artificial Sequence: Synthetic oligonucleotide
  Antisense strand to SEQ ID NO: 1942102
uacgccaagggucauaucu

SEQ ID NO: 1942104 - RNA, 19 nt, Artificial Sequence
  Description of Artificial Sequence: Synthetic oligonucleotide
  Sense strand starting at position 2394 of SEQ ID NO: 1880093
gccuguguuaaggagcaau

SEQ ID NO: 1942105 - RNA, 19 nt, Artificial Sequence
  Description of Artificial Sequence: Synthetic oligonucleotide
  Antisense strand to SEQ ID NO: 1942104
auugcuccuuaacacaggc

SEQ ID NO: 1942106 - RNA, 19 nt, Artificial Sequence
  Description of Artificial Sequence: Synthetic oligonucleotide
  Sense strand starting at position 2397 of SEQ ID NO: 1880093
uguguuaaggagcaaucuu

SEQ ID NO: 1942107 - RNA, 19 nt, Artificial Sequence
  Description of Artificial Sequence: Synthetic oligonucleotide
  Antisense strand to SEQ ID NO: 1942106
aagauugcuccuuaacaca

SEQ ID NO: 1942108 - RNA, 19 nt, Artificial Sequence
  Description of Artificial Sequence: Synthetic oligonucleotide
  Sense strand starting at position 2409 of SEQ ID NO: 1880093
caaucuuucgguggccaga

SEQ ID NO: 1942109 - RNA, 19 nt, Artificial Sequence
  Description of Artificial Sequence: Synthetic oligonucleotide
  Antisense strand to SEQ ID NO: 1942108
ucuggccaccgaaagauug

SEQ ID NO: 1942110 - RNA, 19 nt, Artificial Sequence
  Description of Artificial Sequence: Synthetic oligonucleotide
  Sense strand starting at position 2531 of SEQ ID NO: 1880093
ugcagcauuccgcuugcau

SEQ ID NO: 1942111 - RNA, 19 nt, Artificial Sequence
  Description of Artificial Sequence: Synthetic oligonucleotide
  Antisense strand to SEQ ID NO: 1942110
augcaagcggaaugcugca

SEQ ID NO: 1942112 - RNA, 19 nt, Artificial Sequence
  Description of Artificial Sequence: Synthetic oligonucleotide
  Sense strand starting at position 2532 of SEQ ID NO: 1880093
gcagcauuccgcuugcauu

SEQ ID NO: 1942113 - RNA, 19 nt, Artificial Sequence
  Description of Artificial Sequence: Synthetic oligonucleotide
  Antisense strand to SEQ ID NO: 1942112
aaugcaagcggaaugcugc

SEQ ID NO: 1942114 - RNA, 19 nt, Artificial Sequence
  Description of Artificial Sequence: Synthetic oligonucleotide
  Sense strand starting at position 2533 of SEQ ID NO: 1880093
cagcauuccgcuugcauuu

SEQ ID NO: 1942115 - RNA, 19 nt, Artificial Sequence
  Description of Artificial Sequence: Synthetic oligonucleotide
  Antisense strand to SEQ ID NO: 1942114
aaaugcaagcggaaugcug

SEQ ID NO: 1942116 - RNA, 19 nt, Artificial Sequence
  Description of Artificial Sequence: Synthetic oligonucleotide
  Sense strand starting at position 2546 of SEQ ID NO: 1880093
gcauuuggaagccguuuaa

SEQ ID NO: 1942117 - RNA, 19 nt, Artificial Sequence
  Description of Artificial Sequence: Synthetic oligonucleotide
  Antisense strand to SEQ ID NO: 1942116
uuaaacggcuuccaaaugc

SEQ ID NO: 1942118 - RNA, 19 nt, Artificial Sequence
  Description of Artificial Sequence: Synthetic oligonucleotide
  Sense strand starting at position 2576 of SEQ ID NO: 1880093
agccauauuuaugaaagua

SEQ ID NO: 1942119 - RNA, 19 nt, Artificial Sequence
  Description of Artificial Sequence: Synthetic oligonucleotide
  Antisense strand to SEQ ID NO: 1942118
uacuuucauaaauauggcu

SEQ ID NO: 1942120 - RNA, 19 nt, Artificial Sequence
  Description of Artificial Sequence: Synthetic oligonucleotide
  Sense strand starting at position 3338 of SEQ ID NO: 1880093
acauuccacuccuugguua

SEQ ID NO: 1942121 - RNA, 19 nt, Artificial Sequence
  Description of Artificial Sequence: Synthetic oligonucleotide
  Antisense strand to SEQ ID NO: 1942120
uaaccaaggaguggaaugu

SEQ ID NO: 1942122 - RNA, 19 nt, Artificial Sequence
  Description of Artificial Sequence: Synthetic oligonucleotide
  Sense strand starting at position 3420 of SEQ ID NO: 1880093
cuuucuugagaguguacuu

SEQ ID NO: 1942123 - RNA, 19 nt, Artificial Sequence
  Description of Artificial Sequence: Synthetic oligonucleotide
  Antisense strand to SEQ ID NO: 1942122
aaguacacucucaagaaag

SEQ ID NO: 1942124 - RNA, 19 nt, Artificial Sequence
  Description of Artificial Sequence: Synthetic oligonucleotide
  Sense strand starting at position 3485 of SEQ ID NO: 1880093
uugacuuuguucucgcgau

SEQ ID NO: 1942125 - RNA, 19 nt, Artificial Sequence
  Description of Artificial Sequence: Synthetic oligonucleotide
  Antisense strand to SEQ ID NO: 1942124
aucgcgagaacaaagucaa

SEQ ID NO: 1942126 - RNA, 19 nt, Artificial Sequence
  Description of Artificial Sequence: Synthetic oligonucleotide
  Sense strand starting at position 3486 of SEQ ID NO: 1880093
ugacuuuguucucgcgaug

SEQ ID NO: 1942127 - RNA, 19 nt, Artificial Sequence
  Description of Artificial Sequence: Synthetic oligonucleotide
  Antisense strand to SEQ ID NO: 1942126
caucgcgagaacaaaguca

SEQ ID NO: 1942128 - RNA, 19 nt, Artificial Sequence
  Description of Artificial Sequence: Synthetic oligonucleotide
  Sense strand starting at position 3621 of SEQ ID NO: 1880093
gagaguucucuuuggagac

SEQ ID NO: 1942129 - RNA, 19 nt, Artificial Sequence
  Description of Artificial Sequence: Synthetic oligonucleotide
  Antisense strand to SEQ ID NO: 1942128
gucuccaaagagaacucuc

SEQ ID NO: 1942130 - RNA, 19 nt, Artificial Sequence
  Description of Artificial Sequence: Synthetic oligonucleotide
  Sense strand starting at position 3707 of SEQ ID NO: 1880093
ugagggauugggugacagu

SEQ ID NO: 1942131 - RNA, 19 nt, Artificial Sequence
  Description of Artificial Sequence: Synthetic oligonucleotide
  Antisense strand to SEQ ID NO: 1942130
acugucacccaaucccuca

SEQ ID NO: 1942132 - RNA, 19 nt, Artificial Sequence
  Description of Artificial Sequence: Synthetic oligonucleotide
  Sense strand starting at position 3716 of SEQ ID NO: 1880093
gggugacaguguaguaacu

SEQ ID NO: 1942133 - RNA, 19 nt, Artificial Sequence
  Description of Artificial Sequence: Synthetic oligonucleotide
  Antisense strand to SEQ ID NO: 1942132
aguuacuacacugucaccc

SEQ ID NO: 1942134 - RNA, 19 nt, Artificial Sequence
  Description of Artificial Sequence: Synthetic oligonucleotide
  Sense strand starting at position 3810 of SEQ ID NO: 1880093
gagaaaugcuuucugggua

SEQ ID NO: 1942135 - RNA, 19 nt, Artificial Sequence
  Description of Artificial Sequence: Synthetic oligonucleotide
  Antisense strand to SEQ ID NO: 1942134
uacccagaaagcauuucuc

SEQ ID NO: 1942136 - RNA, 19 nt, Artificial Sequence
  Description of Artificial Sequence: Synthetic oligonucleotide
  Sense strand starting at position 3811 of SEQ ID NO: 1880093
agaaaugcuuucuggguau

SEQ ID NO: 1942137 - RNA, 19 nt, Artificial Sequence
  Description of Artificial Sequence: Synthetic oligonucleotide
  Antisense strand to SEQ ID NO: 1942136
auacccagaaagcauuucu

SEQ ID NO: 1942138 - RNA, 19 nt, Artificial Sequence
  Description of Artificial Sequence: Synthetic oligonucleotide
  Sense strand starting at position 3813 of SEQ ID NO: 1880093
aaaugcuuucuggguaucu

SEQ ID NO: 1942139 - RNA, 19 nt, Artificial Sequence
  Description of Artificial Sequence: Synthetic oligonucleotide
  Antisense strand to SEQ ID NO: 1942138
agauacccagaaagcauuu

SEQ ID NO: 1942140 - RNA, 19 nt, Artificial Sequence
  Description of Artificial Sequence: Synthetic oligonucleotide
  Sense strand starting at position 3815 of SEQ ID NO: 1880093
augcuuucuggguaucuga

SEQ ID NO: 1942141 - RNA, 19 nt, Artificial Sequence
  Description of Artificial Sequence: Synthetic oligonucleotide
  Antisense strand to SEQ ID NO: 1942140
ucagauacccagaaagcau

SEQ ID NO: 1942142 - RNA, 19 nt, Artificial Sequence
  Description of Artificial Sequence: Synthetic oligonucleotide
  Sense strand starting at position 7 of SEQ ID NO: 1880094
aggaaaugccauuauucuc

SEQ ID NO: 1942143 - RNA, 19 nt, Artificial Sequence
  Description of Artificial Sequence: Synthetic oligonucleotide
  Antisense strand to SEQ ID NO: 1942142
gagaauaauggcauuuccu

SEQ ID NO: 1942144 - RNA, 19 nt, Artificial Sequence
  Description of Artificial Sequence: Synthetic oligonucleotide
  Sense strand starting at position 58 of SEQ ID NO: 1880094
agaccagauuagcugucau

SEQ ID NO: 1942145 - RNA, 19 nt, Artificial Sequence
  Description of Artificial Sequence: Synthetic oligonucleotide
  Antisense strand to SEQ ID NO: 1942144
augacagcuaaucuggucu

SEQ ID NO: 1942146 - RNA, 19 nt, Artificial Sequence
  Description of Artificial Sequence: Synthetic oligonucleotide
  Sense strand starting at position 90 of SEQ ID NO: 1880094
gggacuggauccuuguuaa

SEQ ID NO: 1942147 - RNA, 19 nt, Artificial Sequence
  Description of Artificial Sequence: Synthetic oligonucleotide
  Antisense strand to SEQ ID NO: 1942146
uuaacaaggauccaguccc

SEQ ID NO: 1942148 - RNA, 19 nt, Artificial Sequence
  Description of Artificial Sequence: Synthetic oligonucleotide
  Sense strand starting at position 93 of SEQ ID NO: 1880094
acuggauccuuguuaacac

SEQ ID NO: 1942149 - RNA, 19 nt, Artificial Sequence
  Description of Artificial Sequence: Synthetic oligonucleotide
  Antisense strand to SEQ ID NO: 1942148
guguuaacaaggauccagu

SEQ ID NO: 1942150 - RNA, 19 nt, Artificial Sequence
  Description of Artificial Sequence: Synthetic oligonucleotide
  Sense strand starting at position 853 of SEQ ID NO: 1880094
gauuuacagugccauuuga

SEQ ID NO: 1942151 - RNA, 19 nt, Artificial Sequence
  Description of Artificial Sequence: Synthetic oligonucleotide
  Antisense strand to SEQ ID NO: 1942150
ucaaauggcacuguaaauc

SEQ ID NO: 1942152 - RNA, 19 nt, Artificial Sequence
  Description of Artificial Sequence: Synthetic oligonucleotide
  Sense strand starting at position 1124 of SEQ ID NO: 1880094
ucgcuuaaagucuaaagaa

SEQ ID NO: 1942153 - RNA, 19 nt, Artificial Sequence
  Description of Artificial Sequence: Synthetic oligonucleotide
  Antisense strand to SEQ ID NO: 1942152
uucuuuagacuuuaagcga

SEQ ID NO: 1942154 - RNA, 19 nt, Artificial Sequence
  Description of Artificial Sequence: Synthetic oligonucleotide
  Sense strand starting at position 1340 of SEQ ID NO: 1880094
gaguguuaugucuacaacc

SEQ ID NO: 1942155 - RNA, 19 nt, Artificial Sequence
  Description of Artificial Sequence: Synthetic oligonucleotide
  Antisense strand to SEQ ID NO: 1942154
gguuguagacauaacacuc

SEQ ID NO: 1942156 - RNA, 19 nt, Artificial Sequence
  Description of Artificial Sequence: Synthetic oligonucleotide
  Sense strand starting at position 1390 of SEQ ID NO: 1880094
gcuuucuucccagagaaca

SEQ ID NO: 1942157 - RNA, 19 nt, Artificial Sequence
  Description of Artificial Sequence: Synthetic oligonucleotide
  Antisense strand to SEQ ID NO: 1942156
uguucucugggaagaaagc

SEQ ID NO: 1942158 - RNA, 19 nt, Artificial Sequence
  Description of Artificial Sequence: Synthetic oligonucleotide
  Sense strand starting at position 2530 of SEQ ID NO: 1880094
ugcagcauuccgcuugcaa

SEQ ID NO: 1942159 - RNA, 19 nt, Artificial Sequence
  Description of Artificial Sequence: Synthetic oligonucleotide
  Antisense strand to SEQ ID NO: 1942158
uugcaagcggaaugcugca

SEQ ID NO: 1942160 - RNA, 19 nt, Artificial Sequence
  Description of Artificial Sequence: Synthetic oligonucleotide
  Sense strand starting at position 2531 of SEQ ID NO: 1880094
gcagcauuccgcuugcaau

SEQ ID NO: 1942161 - RNA, 19 nt, Artificial Sequence
  Description of Artificial Sequence: Synthetic oligonucleotide
  Antisense strand to SEQ ID NO: 1942160
auugcaagcggaaugcugc

SEQ ID NO: 1942162 - RNA, 19 nt, Artificial Sequence
  Description of Artificial Sequence: Synthetic oligonucleotide
  Sense strand starting at position 2592 of SEQ ID NO: 1880094
uaaagaggcugcuuagaug

SEQ ID NO: 1942163 - RNA, 19 nt, Artificial Sequence
  Description of Artificial Sequence: Synthetic oligonucleotide
  Antisense strand to SEQ ID NO: 1942162
caucuaagcagccucuuua

SEQ ID NO: 1942164 - RNA, 19 nt, Artificial Sequence
  Description of Artificial Sequence: Synthetic oligonucleotide
  Sense strand starting at position 3342 of SEQ ID NO: 1880094
uuccaauucuugguuaaag

SEQ ID NO: 1942165 - RNA, 19 nt, Artificial Sequence
  Description of Artificial Sequence: Synthetic oligonucleotide
  Antisense strand to SEQ ID NO: 1942164
cuuuaaccaagaauuggaa

SEQ ID NO: 1942166 - RNA, 19 nt, Artificial Sequence
  Description of Artificial Sequence: Synthetic oligonucleotide
  Sense strand starting at position 3343 of SEQ ID NO: 1880094
uccaauucuugguuaaaga

SEQ ID NO: 1942167 - RNA, 19 nt, Artificial Sequence
  Description of Artificial Sequence: Synthetic oligonucleotide
  Antisense strand to SEQ ID NO: 1942166
ucuuuaaccaagaauugga

SEQ ID NO: 1942168 - RNA, 19 nt, Artificial Sequence
  Description of Artificial Sequence: Synthetic oligonucleotide
  Sense strand starting at position 3622 of SEQ ID NO: 1880094
gagaguucuccuuggagau

SEQ ID NO: 1942169 - RNA, 19 nt, Artificial Sequence
  Description of Artificial Sequence: Synthetic oligonucleotide
  Antisense strand to SEQ ID NO: 1942168
aucuccaaggagaacucuc

SEQ ID NO: 1942170 - RNA, 19 nt, Artificial Sequence
  Description of Artificial Sequence: Synthetic oligonucleotide
  Sense strand starting at position 3623 of SEQ ID NO: 1880094
agaguucuccuuggagauc

SEQ ID NO: 1942171 - RNA, 19 nt, Artificial Sequence
  Description of Artificial Sequence: Synthetic oligonucleotide
  Antisense strand to SEQ ID NO: 1942170
gaucuccaaggagaacucu

SEQ ID NO: 1942172 - RNA, 19 nt, Artificial Sequence
  Description of Artificial Sequence: Synthetic oligonucleotide
  Sense strand starting at position 3626 of SEQ ID NO: 1880094
guucuccuuggagaucaua

SEQ ID NO: 1942173 - RNA, 19 nt, Artificial Sequence
  Description of Artificial Sequence: Synthetic oligonucleotide
  Antisense strand to SEQ ID NO: 1942172
uaugaucuccaaggagaac

SEQ ID NO: 1942174 - RNA, 19 nt, Artificial Sequence
  Description of Artificial Sequence: Synthetic oligonucleotide
  Sense strand starting at position 3801 of SEQ ID NO: 1880094
gguaguaguggagaaaugu

SEQ ID NO: 1942175 - RNA, 19 nt, Artificial Sequence
  Description of Artificial Sequence: Synthetic oligonucleotide
  Antisense strand to SEQ ID NO: 1942174
acauuucuccacuacuacc

SEQ ID NO: 1942176 - RNA, 19 nt, Artificial Sequence
  Description of Artificial Sequence: Synthetic oligonucleotide
  Sense strand starting at position 8 of SEQ ID NO: 1880095
aggaaaugccauuauucuc

SEQ ID NO: 1942177 - RNA, 19 nt, Artificial Sequence
  Description of Artificial Sequence: Synthetic oligonucleotide
  Antisense strand to SEQ ID NO: 1942176
gagaauaauggcauuuccu

SEQ ID NO: 1942178 - RNA, 19 nt, Artificial Sequence
  Description of Artificial Sequence: Synthetic oligonucleotide
  Sense strand starting at position 91 of SEQ ID NO: 1880095
gggacuggauccuuguuaa

SEQ ID NO: 1942179 - RNA, 19 nt, Artificial Sequence
  Description of Artificial Sequence: Synthetic oligonucleotide
  Antisense strand to SEQ ID NO: 1942178
uuaacaaggauccaguccc

SEQ ID NO: 1942180 - RNA, 19 nt, Artificial Sequence
  Description of Artificial Sequence: Synthetic oligonucleotide
  Sense strand starting at position 94 of SEQ ID NO: 1880095
acuggauccuuguuaacac

SEQ ID NO: 1942181 - RNA, 19 nt, Artificial Sequence
  Description of Artificial Sequence: Synthetic oligonucleotide
  Antisense strand to SEQ ID NO: 1942180
guguuaacaaggauccagu

SEQ ID NO: 1942182 - RNA, 19 nt, Artificial Sequence
  Description of Artificial Sequence: Synthetic oligonucleotide
  Sense strand starting at position 680 of SEQ ID NO: 1880095
cugaccucagcugaucaaa

SEQ ID NO: 1942183 - RNA, 19 nt, Artificial Sequence
  Description of Artificial Sequence: Synthetic oligonucleotide
  Antisense strand to SEQ ID NO: 1942182
uuugaucagcugaggucag

SEQ ID NO: 1942184 - RNA, 19 nt, Artificial Sequence
  Description of Artificial Sequence: Synthetic oligonucleotide
  Sense strand starting at position 826 of SEQ ID NO: 1880095
uagauaguucugggaguua

SEQ ID NO: 1942185 - RNA, 19 nt, Artificial Sequence
  Description of Artificial Sequence: Synthetic oligonucleotide
  Antisense strand to SEQ ID NO: 1942184
uaacucccagaacuaucua

SEQ ID NO: 1942186 - RNA, 19 nt, Artificial Sequence
  Description of Artificial Sequence: Synthetic oligonucleotide
  Sense strand starting at position 854 of SEQ ID NO: 1880095
gauuuacagugccauuuga

SEQ ID NO: 1942187 - RNA, 19 nt, Artificial Sequence
  Description of Artificial Sequence: Synthetic oligonucleotide
  Antisense strand to SEQ ID NO: 1942186
ucaaauggcacuguaaauc

SEQ ID NO: 1942188 - RNA, 19 nt, Artificial Sequence
  Description of Artificial Sequence: Synthetic oligonucleotide
  Sense strand starting at position 1125 of SEQ ID NO: 1880095
ucgcuuaaagucuaaagaa

SEQ ID NO: 1942189 - RNA, 19 nt, Artificial Sequence
  Description of Artificial Sequence: Synthetic oligonucleotide
  Antisense strand to SEQ ID NO: 1942188
uucuuuagacuuuaagcga

SEQ ID NO: 1942190 - RNA, 19 nt, Artificial Sequence
  Description of Artificial Sequence: Synthetic oligonucleotide
  Sense strand starting at position 1341 of SEQ ID NO: 1880095
gaguguuaugucuacaacc

SEQ ID NO: 1942191 - RNA, 19 nt, Artificial Sequence
  Description of Artificial Sequence: Synthetic oligonucleotide
  Antisense strand to SEQ ID NO: 1942190
gguuguagacauaacacuc

SEQ ID NO: 1942192 - RNA, 19 nt, Artificial Sequence
  Description of Artificial Sequence: Synthetic oligonucleotide
  Sense strand starting at position 2107 of SEQ ID NO: 1880095
cugggauucucacuuccga

SEQ ID NO: 1942193 - RNA, 19 nt, Artificial Sequence
  Description of Artificial Sequence: Synthetic oligonucleotide
  Antisense strand to SEQ ID NO: 1942192
ucggaagugagaaucccag

SEQ ID NO: 1942194 - RNA, 19 nt, Artificial Sequence
  Description of Artificial Sequence: Synthetic oligonucleotide
  Sense strand starting at position 2513 of SEQ ID NO: 1880095
acauccuuauccuugugau

SEQ ID NO: 1942195 - RNA, 19 nt, Artificial Sequence
  Description of Artificial Sequence: Synthetic oligonucleotide
  Antisense strand to SEQ ID NO: 1942194
aucacaaggauaaggaugu

SEQ ID NO: 1942196 - RNA, 19 nt, Artificial Sequence
  Description of Artificial Sequence: Synthetic oligonucleotide
  Sense strand starting at position 2531 of SEQ ID NO: 1880095
ugcagcauuccgcuugcaa

SEQ ID NO: 1942197 - RNA, 19 nt, Artificial Sequence
  Description of Artificial Sequence: Synthetic oligonucleotide
  Antisense strand to SEQ ID NO: 1942196
uugcaagcggaaugcugca

SEQ ID NO: 1942198 - RNA, 19 nt, Artificial Sequence
  Description of Artificial Sequence: Synthetic oligonucleotide
  Sense strand starting at position 2532 of SEQ ID NO: 1880095
gcagcauuccgcuugcaau

SEQ ID NO: 1942199 - RNA, 19 nt, Artificial Sequence
  Description of Artificial Sequence: Synthetic oligonucleotide
  Antisense strand to SEQ ID NO: 1942198
auugcaagcggaaugcugc

SEQ ID NO: 1942200 - RNA, 19 nt, Artificial Sequence
  Description of Artificial Sequence: Synthetic oligonucleotide
  Sense strand starting at position 2550 of SEQ ID NO: 1880095
uuggaagccguuuaauauc

SEQ ID NO: 1942201 - RNA, 19 nt, Artificial Sequence
  Description of Artificial Sequence: Synthetic oligonucleotide
  Antisense strand to SEQ ID NO: 1942200
gauauuaaacggcuuccaa

SEQ ID NO: 1942202 - RNA, 19 nt, Artificial Sequence
  Description of Artificial Sequence: Synthetic oligonucleotide
  Sense strand starting at position 2593 of SEQ ID NO: 1880095
uaaagaggcugcuuagaug

SEQ ID NO: 1942203 - RNA, 19 nt, Artificial Sequence
  Description of Artificial Sequence: Synthetic oligonucleotide
  Antisense strand to SEQ ID NO: 1942202
caucuaagcagccucuuua

SEQ ID NO: 1942204 - RNA, 19 nt, Artificial Sequence
  Description of Artificial Sequence: Synthetic oligonucleotide
  Sense strand starting at position 2601 of SEQ ID NO: 1880095
cugcuuagaugacugcaaa

SEQ ID NO: 1942205 - RNA, 19 nt, Artificial Sequence
  Description of Artificial Sequence: Synthetic oligonucleotide
  Antisense strand to SEQ ID NO: 1942204
uuugcagucaucuaagcag

SEQ ID NO: 1942206 - RNA, 19 nt, Artificial Sequence
  Description of Artificial Sequence: Synthetic oligonucleotide
  Sense strand starting at position 2745 of SEQ ID NO: 1880095
uaugcugucccagaagaga

SEQ ID NO: 1942207 - RNA, 19 nt, Artificial Sequence
  Description of Artificial Sequence: Synthetic oligonucleotide
  Antisense strand to SEQ ID NO: 1942206
ucucuucugggacagcaua

SEQ ID NO: 1942208 - RNA, 19 nt, Artificial Sequence
  Description of Artificial Sequence: Synthetic oligonucleotide
  Sense strand starting at position 3263 of SEQ ID NO: 1880095
uucugagaccaguguuuga

SEQ ID NO: 1942209 - RNA, 19 nt, Artificial Sequence
  Description of Artificial Sequence: Synthetic oligonucleotide
  Antisense strand to SEQ ID NO: 1942208
ucaaacacuggucucagaa

SEQ ID NO: 1942210 - RNA, 19 nt, Artificial Sequence
  Description of Artificial Sequence: Synthetic oligonucleotide
  Sense strand starting at position 3343 of SEQ ID NO: 1880095
uuccaauucuugguuaaag

SEQ ID NO: 1942211 - RNA, 19 nt, Artificial Sequence
  Description of Artificial Sequence: Synthetic oligonucleotide
  Antisense strand to SEQ ID NO: 1942210
cuuuaaccaagaauuggaa

SEQ ID NO: 1942212 - RNA, 19 nt, Artificial Sequence
  Description of Artificial Sequence: Synthetic oligonucleotide
  Sense strand starting at position 3344 of SEQ ID NO: 1880095
uccaauucuugguuaaaga

SEQ ID NO: 1942213 - RNA, 19 nt, Artificial Sequence
  Description of Artificial Sequence: Synthetic oligonucleotide
  Antisense strand to SEQ ID NO: 1942212
ucuuuaaccaagaauugga

SEQ ID NO: 1942214 - RNA, 19 nt, Artificial Sequence
  Description of Artificial Sequence: Synthetic oligonucleotide
  Sense strand starting at position 3623 of SEQ ID NO: 1880095
gagaguucuccuuggagau

SEQ ID NO: 1942215 - RNA, 19 nt, Artificial Sequence
  Description of Artificial Sequence: Synthetic oligonucleotide
  Antisense strand to SEQ ID NO: 1942214
aucuccaaggagaacucuc

SEQ ID NO: 1942216 - RNA, 19 nt, Artificial Sequence
  Description of Artificial Sequence: Synthetic oligonucleotide
  Sense strand starting at position 3624 of SEQ ID NO: 1880095
agaguucuccuuggagauc

SEQ ID NO: 1942217 - RNA, 19 nt, Artificial Sequence
  Description of Artificial Sequence: Synthetic oligonucleotide
  Antisense strand to SEQ ID NO: 1942216
gaucuccaaggagaacucu

SEQ ID NO: 1942218 - RNA, 19 nt, Artificial Sequence
  Description of Artificial Sequence: Synthetic oligonucleotide
  Sense strand starting at position 3627 of SEQ ID NO: 1880095
guucuccuuggagaucaua

SEQ ID NO: 1942219 - RNA, 19 nt, Artificial Sequence
  Description of Artificial Sequence: Synthetic oligonucleotide
  Antisense strand to SEQ ID NO: 1942218
uaugaucuccaaggagaac

SEQ ID NO: 1942220 - RNA, 19 nt, Artificial Sequence
  Description of Artificial Sequence: Synthetic oligonucleotide
  Sense strand starting at position 3886 of SEQ ID NO: 1880095
uggguucuuccugaccaau

SEQ ID NO: 1942221 - RNA, 19 nt, Artificial Sequence
  Description of Artificial Sequence: Synthetic oligonucleotide
  Antisense strand to SEQ ID NO: 1942220
auuggucaggaagaaccca

SEQ ID NO: 1942222 - RNA, 19 nt, Artificial Sequence
  Description of Artificial Sequence: Synthetic oligonucleotide
  Sense strand starting at position 200 of SEQ ID NO: 1880096
ugaugcaaauaaugagaaa

SEQ ID NO: 1942223 - RNA, 19 nt, Artificial Sequence
  Description of Artificial Sequence: Synthetic oligonucleotide
  Antisense strand to SEQ ID NO: 1942222
uuucucauuauuugcauca

SEQ ID NO: 1942224 - RNA, 19 nt, Artificial Sequence
  Description of Artificial Sequence: Synthetic oligonucleotide
  Sense strand starting at position 408 of SEQ ID NO: 1880096
aaugucucagauggacuaa

SEQ ID NO: 1942225 - RNA, 19 nt, Artificial Sequence
  Description of Artificial Sequence: Synthetic oligonucleotide
  Antisense strand to SEQ ID NO: 1942224
uuaguccaucugagacauu

SEQ ID NO: 1942226 - RNA, 19 nt, Artificial Sequence
  Description of Artificial Sequence: Synthetic oligonucleotide
  Sense strand starting at position 853 of SEQ ID NO: 1880096
gagaaaggguauuaaggaa

SEQ ID NO: 1942227 - RNA, 19 nt, Artificial Sequence
  Description of Artificial Sequence: Synthetic oligonucleotide
  Antisense strand to SEQ ID NO: 1942226
uuccuuaauacccuuucuc

SEQ ID NO: 1942228 - RNA, 19 nt, Artificial Sequence
  Description of Artificial Sequence: Synthetic oligonucleotide
  Sense strand starting at position 865 of SEQ ID NO: 1880096
uaaggaauuugucagggua

SEQ ID NO: 1942229 - RNA, 19 nt, Artificial Sequence
  Description of Artificial Sequence: Synthetic oligonucleotide
  Antisense strand to SEQ ID NO: 1942228
uacccugacaaauuccuua

SEQ ID NO: 1942230 - RNA, 19 nt, Artificial Sequence
  Description of Artificial Sequence: Synthetic oligonucleotide
  Sense strand starting at position 867 of SEQ ID NO: 1880096
aggaauuugucaggguacu

SEQ ID NO: 1942231 - RNA, 19 nt, Artificial Sequence
  Description of Artificial Sequence: Synthetic oligonucleotide
  Antisense strand to SEQ ID NO: 1942230
aguacccugacaaauuccu

SEQ ID NO: 1942232 - RNA, 19 nt, Artificial Sequence
  Description of Artificial Sequence: Synthetic oligonucleotide
  Sense strand starting at position 887 of SEQ ID NO: 1880096
acgcgugucagguauaaac

SEQ ID NO: 1942233 - RNA, 19 nt, Artificial Sequence
  Description of Artificial Sequence: Synthetic oligonucleotide
  Antisense strand to SEQ ID NO: 1942232
guuuauaccugacacgcgu

SEQ ID NO: 1942234 - RNA, 19 nt, Artificial Sequence
  Description of Artificial Sequence: Synthetic oligonucleotide
  Sense strand starting at position 1036 of SEQ ID NO: 1880096
cugggugcuaucuagaaag

SEQ ID NO: 1942235 - RNA, 19 nt, Artificial Sequence
  Description of Artificial Sequence: Synthetic oligonucleotide
  Antisense strand to SEQ ID NO: 1942234
cuuucuagauagcacccag

SEQ ID NO: 1942236 - RNA, 19 nt, Artificial Sequence
  Description of Artificial Sequence: Synthetic oligonucleotide
  Sense strand starting at position 1038 of SEQ ID NO: 1880096
gggugcuaucuagaaaguu

SEQ ID NO: 1942237 - RNA, 19 nt, Artificial Sequence
  Description of Artificial Sequence: Synthetic oligonucleotide
  Antisense strand to SEQ ID NO: 1942236
aacuuucuagauagcaccc

SEQ ID NO: 1942238 - RNA, 19 nt, Artificial Sequence
  Description of Artificial Sequence: Synthetic oligonucleotide
  Sense strand starting at position 1047 of SEQ ID NO: 1880096
cuagaaaguugccuggcaa

SEQ ID NO: 1942239 - RNA, 19 nt, Artificial Sequence
  Description of Artificial Sequence: Synthetic oligonucleotide
  Antisense strand to SEQ ID NO: 1942238
uugccaggcaacuuucuag

SEQ ID NO: 1942240 - RNA, 19 nt, Artificial Sequence
  Description of Artificial Sequence: Synthetic oligonucleotide
  Sense strand starting at position 1048 of SEQ ID NO: 1880096
uagaaaguugccuggcaau

SEQ ID NO: 1942241 - RNA, 19 nt, Artificial Sequence
  Description of Artificial Sequence: Synthetic oligonucleotide
  Antisense strand to SEQ ID NO: 1942240
auugccaggcaacuuucua

SEQ ID NO: 1942242 - RNA, 19 nt, Artificial Sequence
  Description of Artificial Sequence: Synthetic oligonucleotide
  Sense strand starting at position 1074 of SEQ ID NO: 1880096
ggaugugggagcgagacau

SEQ ID NO: 1942243 - RNA, 19 nt, Artificial Sequence
  Description of Artificial Sequence: Synthetic oligonucleotide
  Antisense strand to SEQ ID NO: 1942242
augucucgcucccacaucc

SEQ ID NO: 1942244 - RNA, 19 nt, Artificial Sequence
  Description of Artificial Sequence: Synthetic oligonucleotide
  Sense strand starting at position 1078 of SEQ ID NO: 1880096
gugggagcgagacaucaaa

SEQ ID NO: 1942245 - RNA, 19 nt, Artificial Sequence
  Description of Artificial Sequence: Synthetic oligonucleotide
  Antisense strand to SEQ ID NO: 1942244
uuugaugucucgcucccac

SEQ ID NO: 1942246 - RNA, 19 nt, Artificial Sequence
  Description of Artificial Sequence: Synthetic oligonucleotide
  Sense strand starting at position 1139 of SEQ ID NO: 1880096
auaugaacugccggagaua

SEQ ID NO: 1942247 - RNA, 19 nt, Artificial Sequence
  Description of Artificial Sequence: Synthetic oligonucleotide
  Antisense strand to SEQ ID NO: 1942246
uaucuccggcaguucauau

SEQ ID NO: 1942248 - RNA, 19 nt, Artificial Sequence
  Description of Artificial Sequence: Synthetic oligonucleotide
  Sense strand starting at position 1142 of SEQ ID NO: 1880096
ugaacugccggagauagua

SEQ ID NO: 1942249 - RNA, 19 nt, Artificial Sequence
  Description of Artificial Sequence: Synthetic oligonucleotide
  Antisense strand to SEQ ID NO: 1942248
uacuaucuccggcaguuca

SEQ ID NO: 1942250 - RNA, 19 nt, Artificial Sequence
  Description of Artificial Sequence: Synthetic oligonucleotide
  Sense strand starting at position 1169 of SEQ ID NO: 1880096
guaccuggcuccucauaaa

SEQ ID NO: 1942251 - RNA, 19 nt, Artificial Sequence
  Description of Artificial Sequence: Synthetic oligonucleotide
  Antisense strand to SEQ ID NO: 1942250
uuuaugaggagccagguac

SEQ ID NO: 1942252 - RNA, 19 nt, Artificial Sequence
  Description of Artificial Sequence: Synthetic oligonucleotide
  Sense strand starting at position 1317 of SEQ ID NO: 1880096
acgcaaaguaagcguguua

SEQ ID NO: 1942253 - RNA, 19 nt, Artificial Sequence
  Description of Artificial Sequence: Synthetic oligonucleotide
  Antisense strand to SEQ ID NO: 1942252
uaacacgcuuacuuugcgu

SEQ ID NO: 1942254 - RNA, 19 nt, Artificial Sequence
  Description of Artificial Sequence: Synthetic oligonucleotide
  Sense strand starting at position 1375 of SEQ ID NO: 1880096
ccugcuuucuuccuggaga

SEQ ID NO: 1942255 - RNA, 19 nt, Artificial Sequence
  Description of Artificial Sequence: Synthetic oligonucleotide
  Antisense strand to SEQ ID NO: 1942254
ucuccaggaagaaagcagg

SEQ ID NO: 1942256 - RNA, 19 nt, Artificial Sequence
  Description of Artificial Sequence: Synthetic oligonucleotide
  Sense strand starting at position 1376 of SEQ ID NO: 1880096
cugcuuucuuccuggagaa

SEQ ID NO: 1942257 - RNA, 19 nt, Artificial Sequence
  Description of Artificial Sequence: Synthetic oligonucleotide
  Antisense strand to SEQ ID NO: 1942256
uucuccaggaagaaagcag

SEQ ID NO: 1942258 - RNA, 19 nt, Artificial Sequence
  Description of Artificial Sequence: Synthetic oligonucleotide
  Sense strand starting at position 1377 of SEQ ID NO: 1880096
ugcuuucuuccuggagaac

SEQ ID NO: 1942259 - RNA, 19 nt, Artificial Sequence
  Description of Artificial Sequence: Synthetic oligonucleotide
  Antisense strand to SEQ ID NO: 1942258
guucuccaggaagaaagca

SEQ ID NO: 1942260 - RNA, 19 nt, Artificial Sequence
  Description of Artificial Sequence: Synthetic oligonucleotide
  Sense strand starting at position 1378 of SEQ ID NO: 1880096
gcuuucuuccuggagaaca

SEQ ID NO: 1942261 - RNA, 19 nt, Artificial Sequence
  Description of Artificial Sequence: Synthetic oligonucleotide
  Antisense strand to SEQ ID NO: 1942260
uguucuccaggaagaaagc

SEQ ID NO: 1942262 - RNA, 19 nt, Artificial Sequence
  Description of Artificial Sequence: Synthetic oligonucleotide
  Sense strand starting at position 1397 of SEQ ID NO: 1880096
gcacccaucugcguaguuu

SEQ ID NO: 1942263 - RNA, 19 nt, Artificial Sequence
  Description of Artificial Sequence: Synthetic oligonucleotide
  Antisense strand to SEQ ID NO: 1942262
aaacuacgcagaugggugc

SEQ ID NO: 1942264 - RNA, 19 nt, Artificial Sequence
  Description of Artificial Sequence: Synthetic oligonucleotide
  Sense strand starting at position 1698 of SEQ ID NO: 1880096
gcgugcaggcgacauguua

SEQ ID NO: 1942265 - RNA, 19 nt, Artificial Sequence
  Description of Artificial Sequence: Synthetic oligonucleotide
  Antisense strand to SEQ ID NO: 1942264
uaacaugucgccugcacgc

SEQ ID NO: 1942266 - RNA, 19 nt, Artificial Sequence
  Description of Artificial Sequence: Synthetic oligonucleotide
  Sense strand starting at position 1705 of SEQ ID NO: 1880096
ggcgacauguuacuuccua

SEQ ID NO: 1942267 - RNA, 19 nt, Artificial Sequence
  Description of Artificial Sequence: Synthetic oligonucleotide
  Antisense strand to SEQ ID NO: 1942266
uaggaaguaacaugucgcc

SEQ ID NO: 1942268 - RNA, 19 nt, Artificial Sequence
  Description of Artificial Sequence: Synthetic oligonucleotide
  Sense strand starting at position 1706 of SEQ ID NO: 1880096
gcgacauguuacuuccuau

SEQ ID NO: 1942269 - RNA, 19 nt, Artificial Sequence
  Description of Artificial Sequence: Synthetic oligonucleotide
  Antisense strand to SEQ ID NO: 1942268
auaggaaguaacaugucgc

SEQ ID NO: 1942270 - RNA, 19 nt, Artificial Sequence
  Description of Artificial Sequence: Synthetic oligonucleotide
  Sense strand starting at position 1791 of SEQ ID NO: 1880096
agauaugacccuuagcgua

SEQ ID NO: 1942271 - RNA, 19 nt, Artificial Sequence
  Description of Artificial Sequence: Synthetic oligonucleotide
  Antisense strand to SEQ ID NO: 1942270
uacgcuaagggucauaucu

SEQ ID NO: 1942272 - RNA, 19 nt, Artificial Sequence
  Description of Artificial Sequence: Synthetic oligonucleotide
  Sense strand starting at position 2107 of SEQ ID NO: 1880096
cugggauucucucuuccga

SEQ ID NO: 1942273 - RNA, 19 nt, Artificial Sequence
  Description of Artificial Sequence: Synthetic oligonucleotide
  Antisense strand to SEQ ID NO: 1942272
ucggaagagagaaucccag

SEQ ID NO: 1942274 - RNA, 19 nt, Artificial Sequence
  Description of Artificial Sequence: Synthetic oligonucleotide
  Sense strand starting at position 2109 of SEQ ID NO: 1880096
gggauucucucuuccgauc

SEQ ID NO: 1942275 - RNA, 19 nt, Artificial Sequence
  Description of Artificial Sequence: Synthetic oligonucleotide
  Antisense strand to SEQ ID NO: 1942274
gaucggaagagagaauccc

SEQ ID NO: 1942276 - RNA, 19 nt, Artificial Sequence
  Description of Artificial Sequence: Synthetic oligonucleotide
  Sense strand starting at position 2292 of SEQ ID NO: 1880096
ugaccaaucugcugccaga

SEQ ID NO: 1942277 - RNA, 19 nt, Artificial Sequence
  Description of Artificial Sequence: Synthetic oligonucleotide
  Antisense strand to SEQ ID NO: 1942276
ucuggcagcagauugguca

SEQ ID NO: 1942278 - RNA, 19 nt, Artificial Sequence
  Description of Artificial Sequence: Synthetic oligonucleotide
  Sense strand starting at position 2513 of SEQ ID NO: 1880096
acaucuuuaucccugugau

SEQ ID NO: 1942279 - RNA, 19 nt, Artificial Sequence
  Description of Artificial Sequence: Synthetic oligonucleotide
  Antisense strand to SEQ ID NO: 1942278
aucacagggauaaagaugu

SEQ ID NO: 1942280 - RNA, 19 nt, Artificial Sequence
  Description of Artificial Sequence: Synthetic oligonucleotide
  Sense strand starting at position 2516 of SEQ ID NO: 1880096
ucuuuaucccugugaugca

SEQ ID NO: 1942281 - RNA, 19 nt, Artificial Sequence
  Description of Artificial Sequence: Synthetic oligonucleotide
  Antisense strand to SEQ ID NO: 1942280
ugcaucacagggauaaaga

SEQ ID NO: 1942282 - RNA, 19 nt, Artificial Sequence
  Description of Artificial Sequence: Synthetic oligonucleotide
  Sense strand starting at position 2907 of SEQ ID NO: 1880096
uuuaacaaugucuggauca

SEQ ID NO: 1942283 - RNA, 19 nt, Artificial Sequence
  Description of Artificial Sequence: Synthetic oligonucleotide
  Antisense strand to SEQ ID NO: 1942282
ugauccagacauuguuaaa

SEQ ID NO: 1942284 - RNA, 19 nt, Artificial Sequence
  Description of Artificial Sequence: Synthetic oligonucleotide
  Sense strand starting at position 2908 of SEQ ID NO: 1880096
uuaacaaugucuggaucau

SEQ ID NO: 1942285 - RNA, 19 nt, Artificial Sequence
  Description of Artificial Sequence: Synthetic oligonucleotide
  Antisense strand to SEQ ID NO: 1942284
augauccagacauuguuaa

SEQ ID NO: 1942286 - RNA, 19 nt, Artificial Sequence
  Description of Artificial Sequence: Synthetic oligonucleotide
  Sense strand starting at position 3248 of SEQ ID NO: 1880096
agaccaauauuugauguaa

SEQ ID NO: 1942287 - RNA, 19 nt, Artificial Sequence
  Description of Artificial Sequence: Synthetic oligonucleotide
  Antisense strand to SEQ ID NO: 1942286
uuacaucaaauauuggucu

SEQ ID NO: 1942288 - RNA, 19 nt, Artificial Sequence
  Description of Artificial Sequence: Synthetic oligonucleotide
  Sense strand starting at position 3471 of SEQ ID NO: 1880096
uugacuuuguucucgcgau

SEQ ID NO: 1942289 - RNA, 19 nt, Artificial Sequence
  Description of Artificial Sequence: Synthetic oligonucleotide
  Antisense strand to SEQ ID NO: 1942288
aucgcgagaacaaagucaa

SEQ ID NO: 1942290 - RNA, 19 nt, Artificial Sequence
  Description of Artificial Sequence: Synthetic oligonucleotide
  Sense strand starting at position 3607 of SEQ ID NO: 1880096
gagaguucuccuuggagac

SEQ ID NO: 1942291 - RNA, 19 nt, Artificial Sequence
  Description of Artificial Sequence: Synthetic oligonucleotide
  Antisense strand to SEQ ID NO: 1942290
gucuccaaggagaacucuc

SEQ ID NO: 1942292 - RNA, 19 nt, Artificial Sequence
  Description of Artificial Sequence: Synthetic oligonucleotide
  Sense strand starting at position 3609 of SEQ ID NO: 1880096
gaguucuccuuggagacca

SEQ ID NO: 1942293 - RNA, 19 nt, Artificial Sequence
  Description of Artificial Sequence: Synthetic oligonucleotide
  Antisense strand to SEQ ID NO: 1942292
uggucuccaaggagaacuc

SEQ ID NO: 1942294 - RNA, 19 nt, Artificial Sequence
  Description of Artificial Sequence: Synthetic oligonucleotide
  Sense strand starting at position 3625 of SEQ ID NO: 1880096
ccauaaagauucuguggca

SEQ ID NO: 1942295 - RNA, 19 nt, Artificial Sequence
  Description of Artificial Sequence: Synthetic oligonucleotide
  Antisense strand to SEQ ID NO: 1942294
ugccacagaaucuuuaugg

SEQ ID NO: 1942296 - RNA, 19 nt, Artificial Sequence
  Description of Artificial Sequence: Synthetic oligonucleotide
  Sense strand starting at position 3626 of SEQ ID NO: 1880096
cauaaagauucuguggcau

SEQ ID NO: 1942297 - RNA, 19 nt, Artificial Sequence
  Description of Artificial Sequence: Synthetic oligonucleotide
  Antisense strand to SEQ ID NO: 1942296
augccacagaaucuuuaug

SEQ ID NO: 1942298 - RNA, 19 nt, Artificial Sequence
  Description of Artificial Sequence: Synthetic oligonucleotide
  Sense strand starting at position 3865 of SEQ ID NO: 1880096
auggguucuuccugcccaa

SEQ ID NO: 1942299 - RNA, 19 nt, Artificial Sequence
  Description of Artificial Sequence: Synthetic oligonucleotide
  Antisense strand to SEQ ID NO: 1942298
uugggcaggaagaacccau

SEQ ID NO: 1942300 - RNA, 19 nt, Artificial Sequence
  Description of Artificial Sequence: Synthetic oligonucleotide
  Sense strand starting at position 3869 of SEQ ID NO: 1880096
guucuuccugcccaaugua

SEQ ID NO: 1942301 - RNA, 19 nt, Artificial Sequence
  Description of Artificial Sequence: Synthetic oligonucleotide
  Antisense strand to SEQ ID NO: 1942300
uacauugggcaggaagaac

SEQ ID NO: 1942302 - RNA, 19 nt, Artificial Sequence
  Description of Artificial Sequence: Synthetic oligonucleotide
  Sense strand starting at position 48 of SEQ ID NO: 1880097
gccuguuggauacaggauu

SEQ ID NO: 1942303 - RNA, 19 nt, Artificial Sequence
  Description of Artificial Sequence: Synthetic oligonucleotide
  Antisense strand to SEQ ID NO: 1942302
aauccuguauccaacaggc

SEQ ID NO: 1942304 - RNA, 19 nt, Artificial Sequence
  Description of Artificial Sequence: Synthetic oligonucleotide
  Sense strand starting at position 3224 of SEQ ID NO: 1880097
uggugcuggauuugaugua

SEQ ID NO: 1942305 - RNA, 19 nt, Artificial Sequence
  Description of Artificial Sequence: Synthetic oligonucleotide
  Antisense strand to SEQ ID NO: 1942304
uacaucaaauccagcacca

SEQ ID NO: 1942306 - RNA, 19 nt, Artificial Sequence
  Description of Artificial Sequence: Synthetic oligonucleotide
  Sense strand starting at position 3248 of SEQ ID NO: 1880097
uaccgaggcccucauuaua

SEQ ID NO: 1942307 - RNA, 19 nt, Artificial Sequence
  Description of Artificial Sequence: Synthetic oligonucleotide
  Antisense strand to SEQ ID NO: 1942306
uauaaugagggccucggua

SEQ ID NO: 1942308 - RNA, 19 nt, Artificial Sequence
  Description of Artificial Sequence: Synthetic oligonucleotide
  Sense strand starting at position 3393 of SEQ ID NO: 1880097
cuauuccacuccuugguua

SEQ ID NO: 1942309 - RNA, 19 nt, Artificial Sequence
  Description of Artificial Sequence: Synthetic oligonucleotide
  Antisense strand to SEQ ID NO: 1942308
uaaccaaggaguggaauag

SEQ ID NO: 1942310 - RNA, 19 nt, Artificial Sequence
  Description of Artificial Sequence: Synthetic oligonucleotide
  Sense strand starting at position 3395 of SEQ ID NO: 1880097
auuccacuccuugguuaga

SEQ ID NO: 1942311 - RNA, 19 nt, Artificial Sequence
  Description of Artificial Sequence: Synthetic oligonucleotide
  Antisense strand to SEQ ID NO: 1942310
ucuaaccaaggaguggaau

SEQ ID NO: 1942312 - RNA, 19 nt, Artificial Sequence
  Description of Artificial Sequence: Synthetic oligonucleotide
  Sense strand starting at position 3397 of SEQ ID NO: 1880097
uccacuccuugguuagaga

SEQ ID NO: 1942313 - RNA, 19 nt, Artificial Sequence
  Description of Artificial Sequence: Synthetic oligonucleotide
  Antisense strand to SEQ ID NO: 1942312
ucucuaaccaaggagugga

SEQ ID NO: 1942314 - RNA, 19 nt, Artificial Sequence
  Description of Artificial Sequence: Synthetic oligonucleotide
  Sense strand starting at position 3444 of SEQ ID NO: 1880097
auuguucucugucggguau

SEQ ID NO: 1942315 - RNA, 19 nt, Artificial Sequence
  Description of Artificial Sequence: Synthetic oligonucleotide
  Antisense strand to SEQ ID NO: 1942314
auacccgacagagaacaau

SEQ ID NO: 1942316 - RNA, 19 nt, Artificial Sequence
  Description of Artificial Sequence: Synthetic oligonucleotide
  Sense strand starting at position 3540 of SEQ ID NO: 1880097
uugacuuuguucuugagau

SEQ ID NO: 1942317 - RNA, 19 nt, Artificial Sequence
  Description of Artificial Sequence: Synthetic oligonucleotide
  Antisense strand to SEQ ID NO: 1942316
aucucaagaacaaagucaa

SEQ ID NO: 1942318 - RNA, 19 nt, Artificial Sequence
  Description of Artificial Sequence: Synthetic oligonucleotide
  Sense strand starting at position 3541 of SEQ ID NO: 1880097
ugacuuuguucuugagaug

SEQ ID NO: 1942319 - RNA, 19 nt, Artificial Sequence
  Description of Artificial Sequence: Synthetic oligonucleotide
  Antisense strand to SEQ ID NO: 1942318
caucucaagaacaaaguca

SEQ ID NO: 1942320 - RNA, 19 nt, Artificial Sequence
  Description of Artificial Sequence: Synthetic oligonucleotide
  Sense strand starting at position 3676 of SEQ ID NO: 1880097
gagaguucuccuuggagac

SEQ ID NO: 1942321 - RNA, 19 nt, Artificial Sequence
  Description of Artificial Sequence: Synthetic oligonucleotide
  Antisense strand to SEQ ID NO: 1942320
gucuccaaggagaacucuc

SEQ ID NO: 1942322 - RNA, 19 nt, Artificial Sequence
  Description of Artificial Sequence: Synthetic oligonucleotide
  Sense strand starting at position 3678 of SEQ ID NO: 1880097
gaguucuccuuggagacca

SEQ ID NO: 1942323 - RNA, 19 nt, Artificial Sequence
  Description of Artificial Sequence: Synthetic oligonucleotide
  Antisense strand to SEQ ID NO: 1942322
uggucuccaaggagaacuc

SEQ ID NO: 1942324 - RNA, 19 nt, Artificial Sequence
  Description of Artificial Sequence: Synthetic oligonucleotide
  Sense strand starting at position 3766 of SEQ ID NO: 1880097
gagauuaggugacagugua

SEQ ID NO: 1942325 - RNA, 19 nt, Artificial Sequence
  Description of Artificial Sequence: Synthetic oligonucleotide
  Antisense strand to SEQ ID NO: 1942324
uacacugucaccuaaucuc

SEQ ID NO: 1942326 - RNA, 19 nt, Artificial Sequence
  Description of Artificial Sequence: Synthetic oligonucleotide
  Sense strand starting at position 3774 of SEQ ID NO: 1880097
gugacaguguaguaauaac

SEQ ID NO: 1942327 - RNA, 19 nt, Artificial Sequence
  Description of Artificial Sequence: Synthetic oligonucleotide
  Antisense strand to SEQ ID NO: 1942326
guuauuacuacacugucac

SEQ ID NO: 1942328 - RNA, 19 nt, Artificial Sequence
  Description of Artificial Sequence: Synthetic oligonucleotide
  Sense strand starting at position 3784 of SEQ ID NO: 1880097
aguaauaacugcugaauac

SEQ ID NO: 1942329 - RNA, 19 nt, Artificial Sequence
  Description of Artificial Sequence: Synthetic oligonucleotide
  Antisense strand to SEQ ID NO: 1942328
guauucagcaguuauuacu

SEQ ID NO: 1942330 - RNA, 19 nt, Artificial Sequence
  Description of Artificial Sequence: Synthetic oligonucleotide
  Sense strand starting at position 3785 of SEQ ID NO: 1880097
guaauaacugcugaauacu

SEQ ID NO: 1942331 - RNA, 19 nt, Artificial Sequence
  Description of Artificial Sequence: Synthetic oligonucleotide
  Antisense strand to SEQ ID NO: 1942330
aguauucagcaguuauuac

SEQ ID NO: 1942332 - RNA, 19 nt, Artificial Sequence
  Description of Artificial Sequence: Synthetic oligonucleotide
  Sense strand starting at position 382 of SEQ ID NO: 1880098
accucaguugaucagaagu

SEQ ID NO: 1942333 - RNA, 19 nt, Artificial Sequence
  Description of Artificial Sequence: Synthetic oligonucleotide
  Antisense strand to SEQ ID NO: 1942332
acuucugaucaacugaggu

SEQ ID NO: 1942334 - RNA, 19 nt, Artificial Sequence
  Description of Artificial Sequence: Synthetic oligonucleotide
  Sense strand starting at position 877 of SEQ ID NO: 1880098
uaaggaauuugccagggua

SEQ ID NO: 1942335 - RNA, 19 nt, Artificial Sequence
  Description of Artificial Sequence: Synthetic oligonucleotide
  Antisense strand to SEQ ID NO: 1942334
uacccuggcaaauuccuua

SEQ ID NO: 1942336 - RNA, 19 nt, Artificial Sequence
  Description of Artificial Sequence: Synthetic oligonucleotide
  Sense strand starting at position 995 of SEQ ID NO: 1880098
ggacacuggcgccagaaau

SEQ ID NO: 1942337 - RNA, 19 nt, Artificial Sequence
  Description of Artificial Sequence: Synthetic oligonucleotide
  Antisense strand to SEQ ID NO: 1942336
auuucuggcgccagugucc

SEQ ID NO: 1942338 - RNA, 19 nt, Artificial Sequence
  Description of Artificial Sequence: Synthetic oligonucleotide
  Sense strand starting at position 1050 of SEQ ID NO: 1880098
gggugcuaucuagaaagcu

SEQ ID NO: 1942339 - RNA, 19 nt, Artificial Sequence
  Description of Artificial Sequence: Synthetic oligonucleotide
  Antisense strand to SEQ ID NO: 1942338
agcuuucuagauagcaccc

SEQ ID NO: 1942340 - RNA, 19 nt, Artificial Sequence
  Description of Artificial Sequence: Synthetic oligonucleotide
  Sense strand starting at position 1060 of SEQ ID NO: 1880098
uagaaagcugccuggcaau

SEQ ID NO: 1942341 - RNA, 19 nt, Artificial Sequence
  Description of Artificial Sequence: Synthetic oligonucleotide
  Antisense strand to SEQ ID NO: 1942340
auugccaggcagcuuucua

SEQ ID NO: 1942342 - RNA, 19 nt, Artificial Sequence
  Description of Artificial Sequence: Synthetic oligonucleotide
  Sense strand starting at position 1090 of SEQ ID NO: 1880098
gcggaagcgagacaucaaa

SEQ ID NO: 1942343 - RNA, 19 nt, Artificial Sequence
  Description of Artificial Sequence: Synthetic oligonucleotide
  Antisense strand to SEQ ID NO: 1942342
uuugaugucucgcuuccgc

SEQ ID NO: 1942344 - RNA, 19 nt, Artificial Sequence
  Description of Artificial Sequence: Synthetic oligonucleotide
  Sense strand starting at position 1181 of SEQ ID NO: 1880098
ggacccgucuccucauaaa

SEQ ID NO: 1942345 - RNA, 19 nt, Artificial Sequence
  Description of Artificial Sequence: Synthetic oligonucleotide
  Antisense strand to SEQ ID NO: 1942344
uuuaugaggagacgggucc

SEQ ID NO: 1942346 - RNA, 19 nt, Artificial Sequence
  Description of Artificial Sequence: Synthetic oligonucleotide
  Sense strand starting at position 1221 of SEQ ID NO: 1880098
ggaggaucgcagcgcauuu

SEQ ID NO: 1942347 - RNA, 19 nt, Artificial Sequence
  Description of Artificial Sequence: Synthetic oligonucleotide
  Antisense strand to SEQ ID NO: 1942346
aaaugcgcugcgauccucc

SEQ ID NO: 1942348 - RNA, 19 nt, Artificial Sequence
  Description of Artificial Sequence: Synthetic oligonucleotide
  Sense strand starting at position 1232 of SEQ ID NO: 1880098
gcgcauuucggccaagaca

SEQ ID NO: 1942349 - RNA, 19 nt, Artificial Sequence
  Description of Artificial Sequence: Synthetic oligonucleotide
  Antisense strand to SEQ ID NO: 1942348
ugucuuggccgaaaugcgc

SEQ ID NO: 1942350 - RNA, 19 nt, Artificial Sequence
  Description of Artificial Sequence: Synthetic oligonucleotide
  Sense strand starting at position 1282 of SEQ ID NO: 1880098
gaugaauugcguuaggaca

SEQ ID NO: 1942351 - RNA, 19 nt, Artificial Sequence
  Description of Artificial Sequence: Synthetic oligonucleotide
  Antisense strand to SEQ ID NO: 1942350
uguccuaacgcaauucauc

SEQ ID NO: 1942352 - RNA, 19 nt, Artificial Sequence
  Description of Artificial Sequence: Synthetic oligonucleotide
  Sense strand starting at position 1520 of SEQ ID NO: 1880098
gugaaaugugacuggaggu

SEQ ID NO: 1942353 - RNA, 19 nt, Artificial Sequence
  Description of Artificial Sequence: Synthetic oligonucleotide
  Antisense strand to SEQ ID NO: 1942352
accuccagucacauuucac

SEQ ID NO: 1942354 - RNA, 19 nt, Artificial Sequence
  Description of Artificial Sequence: Synthetic oligonucleotide
  Sense strand starting at position 1658 of SEQ ID NO: 1880098
gcgcuagcuagcuugugua

SEQ ID NO: 1942355 - RNA, 19 nt, Artificial Sequence
  Description of Artificial Sequence: Synthetic oligonucleotide
  Antisense strand to SEQ ID NO: 1942354
uacacaagcuagcuagcgc

SEQ ID NO: 1942356 - RNA, 19 nt, Artificial Sequence
  Description of Artificial Sequence: Synthetic oligonucleotide
  Sense strand starting at position 1660 of SEQ ID NO: 1880098
gcuagcuagcuuguguaaa

SEQ ID NO: 1942357 - RNA, 19 nt, Artificial Sequence
  Description of Artificial Sequence: Synthetic oligonucleotide
  Antisense strand to SEQ ID NO: 1942356
uuuacacaagcuagcuagc

SEQ ID NO: 1942358 - RNA, 19 nt, Artificial Sequence
  Description of Artificial Sequence: Synthetic oligonucleotide
  Sense strand starting at position 1715 of SEQ ID NO: 1880098
agcgacauauuacuacuau

SEQ ID NO: 1942359 - RNA, 19 nt, Artificial Sequence
  Description of Artificial Sequence: Synthetic oligonucleotide
  Antisense strand to SEQ ID NO: 1942358
auaguaguaauaugucgcu

SEQ ID NO: 1942360 - RNA, 19 nt, Artificial Sequence
  Description of Artificial Sequence: Synthetic oligonucleotide
  Sense strand starting at position 1748 of SEQ ID NO: 1880098
cugugagagaaacgauuaa

SEQ ID NO: 1942361 - RNA, 19 nt, Artificial Sequence
  Description of Artificial Sequence: Synthetic oligonucleotide
  Antisense strand to SEQ ID NO: 1942360
uuaaucguuucucucacag

SEQ ID NO: 1942362 - RNA, 19 nt, Artificial Sequence
  Description of Artificial Sequence: Synthetic oligonucleotide
  Sense strand starting at position 1755 of SEQ ID NO: 1880098
agaaacgauuaagaguaaa

SEQ ID NO: 1942363 - RNA, 19 nt, Artificial Sequence
  Description of Artificial Sequence: Synthetic oligonucleotide
  Antisense strand to SEQ ID NO: 1942362
uuuacucuuaaucguuucu

SEQ ID NO: 1942364 - RNA, 19 nt, Artificial Sequence
  Description of Artificial Sequence: Synthetic oligonucleotide
  Sense strand starting at position 1811 of SEQ ID NO: 1880098
gcagacuguucuuuaaacu

SEQ ID NO: 1942365 - RNA, 19 nt, Artificial Sequence
  Description of Artificial Sequence: Synthetic oligonucleotide
  Antisense strand to SEQ ID NO: 1942364
aguuuaaagaacagucugc

SEQ ID NO: 1942366 - RNA, 19 nt, Artificial Sequence
  Description of Artificial Sequence: Synthetic oligonucleotide
  Sense strand starting at position 2367 of SEQ ID NO: 1880098
gcaucuguucucgcccgaa

SEQ ID NO: 1942367 - RNA, 19 nt, Artificial Sequence
  Description of Artificial Sequence: Synthetic oligonucleotide
  Antisense strand to SEQ ID NO: 1942366
uucgggcgagaacagaugc

SEQ ID NO: 1942368 - RNA, 19 nt, Artificial Sequence
  Description of Artificial Sequence: Synthetic oligonucleotide
  Sense strand starting at position 2522 of SEQ ID NO: 1880098
uccuuauccuugucaugua

SEQ ID NO: 1942369 - RNA, 19 nt, Artificial Sequence
  Description of Artificial Sequence: Synthetic oligonucleotide
  Antisense strand to SEQ ID NO: 1942368
uacaugacaaggauaagga

SEQ ID NO: 1942370 - RNA, 19 nt, Artificial Sequence
  Description of Artificial Sequence: Synthetic oligonucleotide
  Sense strand starting at position 2540 of SEQ ID NO: 1880098
agcauuccgcuugaaauug

SEQ ID NO: 1942371 - RNA, 19 nt, Artificial Sequence
  Description of Artificial Sequence: Synthetic oligonucleotide
  Antisense strand to SEQ ID NO: 1942370
caauuucaagcggaaugcu

SEQ ID NO: 1942372 - RNA, 19 nt, Artificial Sequence
  Description of Artificial Sequence: Synthetic oligonucleotide
  Sense strand starting at position 2599 of SEQ ID NO: 1880098
gaaagaggcuucucagaug

SEQ ID NO: 1942373 - RNA, 19 nt, Artificial Sequence
  Description of Artificial Sequence: Synthetic oligonucleotide
  Antisense strand to SEQ ID NO: 1942372
caucugagaagccucuuuc

SEQ ID NO: 1942374 - RNA, 19 nt, Artificial Sequence
  Description of Artificial Sequence: Synthetic oligonucleotide
  Sense strand starting at position 2607 of SEQ ID NO: 1880098
cuucucagaugacugcaaa

SEQ ID NO: 1942375 - RNA, 19 nt, Artificial Sequence
  Description of Artificial Sequence: Synthetic oligonucleotide
  Antisense strand to SEQ ID NO: 1942374
uuugcagucaucugagaag

SEQ ID NO: 1942376 - RNA, 19 nt, Artificial Sequence
  Description of Artificial Sequence: Synthetic oligonucleotide
  Sense strand starting at position 2857 of SEQ ID NO: 1880098
uagugcuuaccucacguua

SEQ ID NO: 1942377 - RNA, 19 nt, Artificial Sequence
  Description of Artificial Sequence: Synthetic oligonucleotide
  Antisense strand to SEQ ID NO: 1942376
uaacgugagguaagcacua

SEQ ID NO: 1942378 - RNA, 19 nt, Artificial Sequence
  Description of Artificial Sequence: Synthetic oligonucleotide
  Sense strand starting at position 2923 of SEQ ID NO: 1880098
acaaauaccugggauacau

SEQ ID NO: 1942379 - RNA, 19 nt, Artificial Sequence
  Description of Artificial Sequence: Synthetic oligonucleotide
  Antisense strand to SEQ ID NO: 1942378
auguaucccagguauuugu

SEQ ID NO: 1942380 - RNA, 19 nt, Artificial Sequence
  Description of Artificial Sequence: Synthetic oligonucleotide
  Sense strand starting at position 2932 of SEQ ID NO: 1880098
ugggauacaucuuauuuga

SEQ ID NO: 1942381 - RNA, 19 nt, Artificial Sequence
  Description of Artificial Sequence: Synthetic oligonucleotide
  Antisense strand to SEQ ID NO: 1942380
ucaaauaagauguauccca

SEQ ID NO: 1942382 - RNA, 19 nt, Artificial Sequence
  Description of Artificial Sequence: Synthetic oligonucleotide
  Sense strand starting at position 2990 of SEQ ID NO: 1880098
gauuauaacgcaggaaaca

SEQ ID NO: 1942383 - RNA, 19 nt, Artificial Sequence
  Description of Artificial Sequence: Synthetic oligonucleotide
  Antisense strand to SEQ ID NO: 1942382
uguuuccugcguuauaauc

SEQ ID NO: 1942384 - RNA, 19 nt, Artificial Sequence
  Description of Artificial Sequence: Synthetic oligonucleotide
  Sense strand starting at position 3009 of SEQ ID NO: 1880098
cugugaaguaaguaaaguu

SEQ ID NO: 1942385 - RNA, 19 nt, Artificial Sequence
  Description of Artificial Sequence: Synthetic oligonucleotide
  Antisense strand to SEQ ID NO: 1942384
aacuuuacuuacuucacag

SEQ ID NO: 1942386 - RNA, 19 nt, Artificial Sequence
  Description of Artificial Sequence: Synthetic oligonucleotide
  Sense strand starting at position 3512 of SEQ ID NO: 1880098
gcugacucauccuugacuu

SEQ ID NO: 1942387 - RNA, 19 nt, Artificial Sequence
  Description of Artificial Sequence: Synthetic oligonucleotide
  Antisense strand to SEQ ID NO: 1942386
aagucaaggaugagucagc

SEQ ID NO: 1942388 - RNA, 19 nt, Artificial Sequence
  Description of Artificial Sequence: Synthetic oligonucleotide
  Sense strand starting at position 3524 of SEQ ID NO: 1880098
uugacuugguucuccagau

SEQ ID NO: 1942389 - RNA, 19 nt, Artificial Sequence
  Description of Artificial Sequence: Synthetic oligonucleotide
  Antisense strand to SEQ ID NO: 1942388
aucuggagaaccaagucaa

SEQ ID NO: 1942390 - RNA, 19 nt, Artificial Sequence
  Description of Artificial Sequence: Synthetic oligonucleotide
  Sense strand starting at position 3525 of SEQ ID NO: 1880098
ugacuugguucuccagaug

SEQ ID NO: 1942391 - RNA, 19 nt, Artificial Sequence
  Description of Artificial Sequence: Synthetic oligonucleotide
  Antisense strand to SEQ ID NO: 1942390
caucuggagaaccaaguca

SEQ ID NO: 1942392 - RNA, 19 nt, Artificial Sequence
  Description of Artificial Sequence: Synthetic oligonucleotide
  Sense strand starting at position 3665 of SEQ ID NO: 1880098
gucuccucuggagagcaua

SEQ ID NO: 1942393 - RNA, 19 nt, Artificial Sequence
  Description of Artificial Sequence: Synthetic oligonucleotide
  Antisense strand to SEQ ID NO: 1942392
uaugcucuccagaggagac

SEQ ID NO: 1942394 - RNA, 19 nt, Artificial Sequence
  Description of Artificial Sequence: Synthetic oligonucleotide
  Sense strand starting at position 3749 of SEQ ID NO: 1880098
gagggauuaggugacggua

SEQ ID NO: 1942395 - RNA, 19 nt, Artificial Sequence
  Description of Artificial Sequence: Synthetic oligonucleotide
  Antisense strand to SEQ ID NO: 1942394
uaccgucaccuaaucccuc

SEQ ID NO: 1942396 - RNA, 19 nt, Artificial Sequence
  Description of Artificial Sequence: Synthetic oligonucleotide
  Sense strand starting at position 3763 of SEQ ID NO: 1880098
cgguauaguaacugcugaa

SEQ ID NO: 1942397 - RNA, 19 nt, Artificial Sequence
  Description of Artificial Sequence: Synthetic oligonucleotide
  Antisense strand to SEQ ID NO: 1942396
uucagcaguuacuauaccg

SEQ ID NO: 1942398 - RNA, 19 nt, Artificial Sequence
  Description of Artificial Sequence: Synthetic oligonucleotide
  Sense strand starting at position 3767 of SEQ ID NO: 1880098
auaguaacugcugaauacu

SEQ ID NO: 1942399 - RNA, 19 nt, Artificial Sequence
  Description of Artificial Sequence: Synthetic oligonucleotide
  Antisense strand to SEQ ID NO: 1942398
aguauucagcaguuacuau

SEQ ID NO: 1942400 - RNA, 19 nt, Artificial Sequence
  Description of Artificial Sequence: Synthetic oligonucleotide
  Sense strand starting at position 3829 of SEQ ID NO: 1880098
acacaucguccagguagua

SEQ ID NO: 1942401 - RNA, 19 nt, Artificial Sequence
  Description of Artificial Sequence: Synthetic oligonucleotide
  Antisense strand to SEQ ID NO: 1942400
uacuaccuggacgaugugu

SEQ ID NO: 1942402 - RNA, 19 nt, Artificial Sequence
  Description of Artificial Sequence: Synthetic oligonucleotide
  Sense strand starting at position 3851 of SEQ ID NO: 1880098
gagaaauacuuucugggua

SEQ ID NO: 1942403 - RNA, 19 nt, Artificial Sequence
  Description of Artificial Sequence: Synthetic oligonucleotide
  Antisense strand to SEQ ID NO: 1942402
uacccagaaaguauuucuc

SEQ ID NO: 1942404 - RNA, 19 nt, Artificial Sequence
  Description of Artificial Sequence: Synthetic oligonucleotide
  Sense strand starting at position 3856 of SEQ ID NO: 1880098
auacuuucuggguaucuga

SEQ ID NO: 1942405 - RNA, 19 nt, Artificial Sequence
  Description of Artificial Sequence: Synthetic oligonucleotide
  Antisense strand to SEQ ID NO: 1942404
ucagauacccagaaaguau

SEQ ID NO: 1942406 - RNA, 19 nt, Artificial Sequence
  Description of Artificial Sequence: Synthetic oligonucleotide
  Sense strand starting at position 3872 of SEQ ID NO: 1880098
ugaccagccuucguggaaa

SEQ ID NO: 1942407 - RNA, 19 nt, Artificial Sequence
  Description of Artificial Sequence: Synthetic oligonucleotide
  Antisense strand to SEQ ID NO: 1942406
uuuccacgaaggcugguca

SEQ ID NO: 1942408 - RNA, 19 nt, Artificial Sequence
  Description of Artificial Sequence: Synthetic oligonucleotide
  Sense strand starting at position 3874 of SEQ ID NO: 1880098
accagccuucguggaaaga

SEQ ID NO: 1942409 - RNA, 19 nt, Artificial Sequence
  Description of Artificial Sequence: Synthetic oligonucleotide
  Antisense strand to SEQ ID NO: 1942408
ucuuuccacgaaggcuggu

SEQ ID NO: 1942410 - RNA, 19 nt, Artificial Sequence
  Description of Artificial Sequence: Synthetic oligonucleotide
  Sense strand starting at position 3875 of SEQ ID NO: 1880098
ccagccuucguggaaagaa

SEQ ID NO: 1942411 - RNA, 19 nt, Artificial Sequence
  Description of Artificial Sequence: Synthetic oligonucleotide
  Antisense strand to SEQ ID NO: 1942410
uucuuuccacgaaggcugg

SEQ ID NO: 1942412 - RNA, 19 nt, Artificial Sequence
  Description of Artificial Sequence: Synthetic oligonucleotide
  Sense strand starting at position 55 of SEQ ID NO: 1880099
cagauuagcugccauguau

SEQ ID NO: 1942413 - RNA, 19 nt, Artificial Sequence
  Description of Artificial Sequence: Synthetic oligonucleotide
  Antisense strand to SEQ ID NO: 1942412
auacauggcagcuaaucug

SEQ ID NO: 1942414 - RNA, 19 nt, Artificial Sequence
  Description of Artificial Sequence: Synthetic oligonucleotide
  Sense strand starting at position 62 of SEQ ID NO: 1880099
gcugccauguaucaccaaa

SEQ ID NO: 1942415 - RNA, 19 nt, Artificial Sequence
  Description of Artificial Sequence: Synthetic oligonucleotide
  Antisense strand to SEQ ID NO: 1942414
uuuggugauacauggcagc

SEQ ID NO: 1942416 - RNA, 19 nt, Artificial Sequence
  Description of Artificial Sequence: Synthetic oligonucleotide
  Sense strand starting at position 226 of SEQ ID NO: 1880099
gagugagagaccuguccua

SEQ ID NO: 1942417 - RNA, 19 nt, Artificial Sequence
  Description of Artificial Sequence: Synthetic oligonucleotide
  Antisense strand to SEQ ID NO: 1942416
uaggacaggucucucacuc

SEQ ID NO: 1942418 - RNA, 19 nt, Artificial Sequence
  Description of Artificial Sequence: Synthetic oligonucleotide
  Sense strand starting at position 839 of SEQ ID NO: 1880099
ggugauuuacagugcuauu

SEQ ID NO: 1942419 - RNA, 19 nt, Artificial Sequence
  Description of Artificial Sequence: Synthetic oligonucleotide
  Antisense strand to SEQ ID NO: 1942418
aauagcacuguaaaucacc

SEQ ID NO: 1942420 - RNA, 19 nt, Artificial Sequence
  Description of Artificial Sequence: Synthetic oligonucleotide
  Sense strand starting at position 842 of SEQ ID NO: 1880099
gauuuacagugcuauuuga

SEQ ID NO: 1942421 - RNA, 19 nt, Artificial Sequence
  Description of Artificial Sequence: Synthetic oligonucleotide
  Antisense strand to SEQ ID NO: 1942420
ucaaauagcacuguaaauc

SEQ ID NO: 1942422 - RNA, 19 nt, Artificial Sequence
  Description of Artificial Sequence: Synthetic oligonucleotide
  Sense strand starting at position 893 of SEQ ID NO: 1880099
acgcgugucagguguaaac

SEQ ID NO: 1942423 - RNA, 19 nt, Artificial Sequence
  Description of Artificial Sequence: Synthetic oligonucleotide
  Antisense strand to SEQ ID NO: 1942422
guuuacaccugacacgcgu

SEQ ID NO: 1942424 - RNA, 19 nt, Artificial Sequence
  Description of Artificial Sequence: Synthetic oligonucleotide
  Sense strand starting at position 1113 of SEQ ID NO: 1880099
ucgcuuaaagucugaagaa

SEQ ID NO: 1942425 - RNA, 19 nt, Artificial Sequence
  Description of Artificial Sequence: Synthetic oligonucleotide
  Antisense strand to SEQ ID NO: 1942424
uucuucagacuuuaagcga

SEQ ID NO: 1942426 - RNA, 19 nt, Artificial Sequence
  Description of Artificial Sequence: Synthetic oligonucleotide
  Sense strand starting at position 1114 of SEQ ID NO: 1880099
cgcuuaaagucugaagaaa

SEQ ID NO: 1942427 - RNA, 19 nt, Artificial Sequence
  Description of Artificial Sequence: Synthetic oligonucleotide
  Antisense strand to SEQ ID NO: 1942426
uuucuucagacuuuaagcg

SEQ ID NO: 1942428 - RNA, 19 nt, Artificial Sequence
  Description of Artificial Sequence: Synthetic oligonucleotide
  Sense strand starting at position 1318 of SEQ ID NO: 1880099
acgcaaaguaagcguguua

SEQ ID NO: 1942429 - RNA, 19 nt, Artificial Sequence
  Description of Artificial Sequence: Synthetic oligonucleotide
  Antisense strand to SEQ ID NO: 1942428
uaacacgcuuacuuugcgu

SEQ ID NO: 1942430 - RNA, 19 nt, Artificial Sequence
  Description of Artificial Sequence: Synthetic oligonucleotide
  Sense strand starting at position 1379 of SEQ ID NO: 1880099
gcuuucuucccagagaacu

SEQ ID NO: 1942431 - RNA, 19 nt, Artificial Sequence
  Description of Artificial Sequence: Synthetic oligonucleotide
  Antisense strand to SEQ ID NO: 1942430
aguucucugggaagaaagc

SEQ ID NO: 1942432 - RNA, 19 nt, Artificial Sequence
  Description of Artificial Sequence: Synthetic oligonucleotide
  Sense strand starting at position 1703 of SEQ ID NO: 1880099
ggcgacauguuacuuccua

SEQ ID NO: 1942433 - RNA, 19 nt, Artificial Sequence
  Description of Artificial Sequence: Synthetic oligonucleotide
  Antisense strand to SEQ ID NO: 1942432
uaggaaguaacaugucgcc

SEQ ID NO: 1942434 - RNA, 19 nt, Artificial Sequence
  Description of Artificial Sequence: Synthetic oligonucleotide
  Sense strand starting at position 1704 of SEQ ID NO: 1880099
gcgacauguuacuuccuau

SEQ ID NO: 1942435 - RNA, 19 nt, Artificial Sequence
  Description of Artificial Sequence: Synthetic oligonucleotide
  Antisense strand to SEQ ID NO: 1942434
auaggaaguaacaugucgc

SEQ ID NO: 1942436 - RNA, 19 nt, Artificial Sequence
  Description of Artificial Sequence: Synthetic oligonucleotide
  Sense strand starting at position 1791 of SEQ ID NO: 1880099
agauaugacccuuggcgua

SEQ ID NO: 1942437 - RNA, 19 nt, Artificial Sequence
  Description of Artificial Sequence: Synthetic oligonucleotide
  Antisense strand to SEQ ID NO: 1942436
uacgccaagggucauaucu

SEQ ID NO: 1942438 - RNA, 19 nt, Artificial Sequence
  Description of Artificial Sequence: Synthetic oligonucleotide
  Sense strand starting at position 2394 of SEQ ID NO: 1880099
gccuguguuaaggagcaau

SEQ ID NO: 1942439 - RNA, 19 nt, Artificial Sequence
  Description of Artificial Sequence: Synthetic oligonucleotide
  Antisense strand to SEQ ID NO: 1942438
auugcuccuuaacacaggc

SEQ ID NO: 1942440 - RNA, 19 nt, Artificial Sequence
  Description of Artificial Sequence: Synthetic oligonucleotide
  Sense strand starting at position 2397 of SEQ ID NO: 1880099
uguguuaaggagcaaucuu

SEQ ID NO: 1942441 - RNA, 19 nt, Artificial Sequence
  Description of Artificial Sequence: Synthetic oligonucleotide
  Antisense strand to SEQ ID NO: 1942440
aagauugcuccuuaacaca

SEQ ID NO: 1942442 - RNA, 19 nt, Artificial Sequence
  Description of Artificial Sequence: Synthetic oligonucleotide
  Sense strand starting at position 2409 of SEQ ID NO: 1880099
caaucuuucgguggccaga

SEQ ID NO: 1942443 - RNA, 19 nt, Artificial Sequence
  Description of Artificial Sequence: Synthetic oligonucleotide
  Antisense strand to SEQ ID NO: 1942442
ucuggccaccgaaagauug

SEQ ID NO: 1942444 - RNA, 19 nt, Artificial Sequence
  Description of Artificial Sequence: Synthetic oligonucleotide
  Sense strand starting at position 2531 of SEQ ID NO: 1880099
ugcagcauuccgcuugcau

SEQ ID NO: 1942445 - RNA, 19 nt, Artificial Sequence
  Description of Artificial Sequence: Synthetic oligonucleotide
  Antisense strand to SEQ ID NO: 1942444
augcaagcggaaugcugca

SEQ ID NO: 1942446 - RNA, 19 nt, Artificial Sequence
  Description of Artificial Sequence: Synthetic oligonucleotide
  Sense strand starting at position 2532 of SEQ ID NO: 1880099
gcagcauuccgcuugcauu

SEQ ID NO: 1942447 - RNA, 19 nt, Artificial Sequence
  Description of Artificial Sequence: Synthetic oligonucleotide
  Antisense strand to SEQ ID NO: 1942446
aaugcaagcggaaugcugc

SEQ ID NO: 1942448 - RNA, 19 nt, Artificial Sequence
  Description of Artificial Sequence: Synthetic oligonucleotide
  Sense strand starting at position 2533 of SEQ ID NO: 1880099
cagcauuccgcuugcauuu

SEQ ID NO: 1942449 - RNA, 19 nt, Artificial Sequence
  Description of Artificial Sequence: Synthetic oligonucleotide
  Antisense strand to SEQ ID NO: 1942448
aaaugcaagcggaaugcug

SEQ ID NO: 1942450 - RNA, 19 nt, Artificial Sequence
  Description of Artificial Sequence: Synthetic oligonucleotide
  Sense strand starting at position 2546 of SEQ ID NO: 1880099
gcauuuggaagccguuuaa

SEQ ID NO: 1942451 - RNA, 19 nt, Artificial Sequence
  Description of Artificial Sequence: Synthetic oligonucleotide
  Antisense strand to SEQ ID NO: 1942450
uuaaacggcuuccaaaugc

SEQ ID NO: 1942452 - RNA, 19 nt, Artificial Sequence
  Description of Artificial Sequence: Synthetic oligonucleotide
  Sense strand starting at position 2576 of SEQ ID NO: 1880099
agccauauuuaugaaagua

SEQ ID NO: 1942453 - RNA, 19 nt, Artificial Sequence
  Description of Artificial Sequence: Synthetic oligonucleotide
  Antisense strand to SEQ ID NO: 1942452
uacuuucauaaauauggcu

SEQ ID NO: 1942454 - RNA, 19 nt, Artificial Sequence
  Description of Artificial Sequence: Synthetic oligonucleotide
  Sense strand starting at position 3338 of SEQ ID NO: 1880099
acauuccacuccuugguua

SEQ ID NO: 1942455 - RNA, 19 nt, Artificial Sequence
  Description of Artificial Sequence: Synthetic oligonucleotide
  Antisense strand to SEQ ID NO: 1942454
uaaccaaggaguggaaugu

SEQ ID NO: 1942456 - RNA, 19 nt, Artificial Sequence
  Description of Artificial Sequence: Synthetic oligonucleotide
  Sense strand starting at position 3420 of SEQ ID NO: 1880099
cuuucuugagaguguacuu

SEQ ID NO: 1942457 - RNA, 19 nt, Artificial Sequence
  Description of Artificial Sequence: Synthetic oligonucleotide
  Antisense strand to SEQ ID NO: 1942456
aaguacacucucaagaaag

SEQ ID NO: 1942458 - RNA, 19 nt, Artificial Sequence
  Description of Artificial Sequence: Synthetic oligonucleotide
  Sense strand starting at position 3485 of SEQ ID NO: 1880099
uugacuuuguucucgcgau

SEQ ID NO: 1942459 - RNA, 19 nt, Artificial Sequence
  Description of Artificial Sequence: Synthetic oligonucleotide
  Antisense strand to SEQ ID NO: 1942458
aucgcgagaacaaagucaa

SEQ ID NO: 1942460 - RNA, 19 nt, Artificial Sequence
  Description of Artificial Sequence: Synthetic oligonucleotide
  Sense strand starting at position 3486 of SEQ ID NO: 1880099
ugacuuuguucucgcgaug

SEQ ID NO: 1942461 - RNA, 19 nt, Artificial Sequence
  Description of Artificial Sequence: Synthetic oligonucleotide
  Antisense strand to SEQ ID NO: 1942460
caucgcgagaacaaaguca

SEQ ID NO: 1942462 - RNA, 19 nt, Artificial Sequence
  Description of Artificial Sequence: Synthetic oligonucleotide
  Sense strand starting at position 3621 of SEQ ID NO: 1880099
gagaguucucuuuggagac

SEQ ID NO: 1942463 - RNA, 19 nt, Artificial Sequence
  Description of Artificial Sequence: Synthetic oligonucleotide
  Antisense strand to SEQ ID NO: 1942462
gucuccaaagagaacucuc

SEQ ID NO: 1942464 - RNA, 19 nt, Artificial Sequence
  Description of Artificial Sequence: Synthetic oligonucleotide
  Sense strand starting at position 3707 of SEQ ID NO: 1880099
ugagggauugggugacagu

SEQ ID NO: 1942465 - RNA, 19 nt, Artificial Sequence
  Description of Artificial Sequence: Synthetic oligonucleotide
  Antisense strand to SEQ ID NO: 1942464
acugucacccaaucccuca

SEQ ID NO: 1942466 - RNA, 19 nt, Artificial Sequence
  Description of Artificial Sequence: Synthetic oligonucleotide
  Sense strand starting at position 3716 of SEQ ID NO: 1880099
gggugacaguguaguaacu

SEQ ID NO: 1942467 - RNA, 19 nt, Artificial Sequence
  Description of Artificial Sequence: Synthetic oligonucleotide
  Antisense strand to SEQ ID NO: 1942466
aguuacuacacugucaccc

SEQ ID NO: 1942468 - RNA, 19 nt, Artificial Sequence
  Description of Artificial Sequence: Synthetic oligonucleotide
  Sense strand starting at position 3810 of SEQ ID NO: 1880099
gagaaaugcuuucugggua

SEQ ID NO: 1942469 - RNA, 19 nt, Artificial Sequence
  Description of Artificial Sequence: Synthetic oligonucleotide
  Antisense strand to SEQ ID NO: 1942468
uacccagaaagcauuucuc

SEQ ID NO: 1942470 - RNA, 19 nt, Artificial Sequence
  Description of Artificial Sequence: Synthetic oligonucleotide
  Sense strand starting at position 3811 of SEQ ID NO: 1880099
agaaaugcuuucuggguau

SEQ ID NO: 1942471 - RNA, 19 nt, Artificial Sequence
  Description of Artificial Sequence: Synthetic oligonucleotide
  Antisense strand to SEQ ID NO: 1942470
auacccagaaagcauuucu

SEQ ID NO: 1942472 - RNA, 19 nt, Artificial Sequence
  Description of Artificial Sequence: Synthetic oligonucleotide
  Sense strand starting at position 3813 of SEQ ID NO: 1880099
aaaugcuuucuggguaucu

SEQ ID NO: 1942473 - RNA, 19 nt, Artificial Sequence
  Description of Artificial Sequence: Synthetic oligonucleotide
  Antisense strand to SEQ ID NO: 1942472
agauacccagaaagcauuu

SEQ ID NO: 1942474 - RNA, 19 nt, Artificial Sequence
  Description of Artificial Sequence: Synthetic oligonucleotide
  Sense strand starting at position 3815 of SEQ ID NO: 1880099
augcuuucuggguaucuga

SEQ ID NO: 1942475 - RNA, 19 nt, Artificial Sequence
  Description of Artificial Sequence: Synthetic oligonucleotide
  Antisense strand to SEQ ID NO: 1942474
ucagauacccagaaagcau

SEQ ID NO: 1942476 - RNA, 19 nt, Artificial Sequence
  Description of Artificial Sequence: Synthetic oligonucleotide
  Sense strand starting at position 7 of SEQ ID NO: 1880100
aggaaaugccauuauucuc

SEQ ID NO: 1942477 - RNA, 19 nt, Artificial Sequence
  Description of Artificial Sequence: Synthetic oligonucleotide
  Antisense strand to SEQ ID NO: 1942476
gagaauaauggcauuuccu

SEQ ID NO: 1942478 - RNA, 19 nt, Artificial Sequence
  Description of Artificial Sequence: Synthetic oligonucleotide
  Sense strand starting at position 58 of SEQ ID NO: 1880100
agaccagauuagcugucau

SEQ ID NO: 1942479 - RNA, 19 nt, Artificial Sequence
  Description of Artificial Sequence: Synthetic oligonucleotide
  Antisense strand to SEQ ID NO: 1942478
augacagcuaaucuggucu

SEQ ID NO: 1942480 - RNA, 19 nt, Artificial Sequence
  Description of Artificial Sequence: Synthetic oligonucleotide
  Sense strand starting at position 90 of SEQ ID NO: 1880100
gggacuggauccuuguuaa

SEQ ID NO: 1942481 - RNA, 19 nt, Artificial Sequence
  Description of Artificial Sequence: Synthetic oligonucleotide
  Antisense strand to SEQ ID NO: 1942480
uuaacaaggauccaguccc

SEQ ID NO: 1942482 - RNA, 19 nt, Artificial Sequence
  Description of Artificial Sequence: Synthetic oligonucleotide
  Sense strand starting at position 93 of SEQ ID NO: 1880100
acuggauccuuguuaacac

SEQ ID NO: 1942483 - RNA, 19 nt, Artificial Sequence
  Description of Artificial Sequence: Synthetic oligonucleotide
  Antisense strand to SEQ ID NO: 1942482
guguuaacaaggauccagu

SEQ ID NO: 1942484 - RNA, 19 nt, Artificial Sequence
  Description of Artificial Sequence: Synthetic oligonucleotide
  Sense strand starting at position 853 of SEQ ID NO: 1880100
gauuuacagugccauuuga

SEQ ID NO: 1942485 - RNA, 19 nt, Artificial Sequence
  Description of Artificial Sequence: Synthetic oligonucleotide
  Antisense strand to SEQ ID NO: 1942484
ucaaauggcacuguaaauc

SEQ ID NO: 1942486 - RNA, 19 nt, Artificial Sequence
  Description of Artificial Sequence: Synthetic oligonucleotide
  Sense strand starting at position 1124 of SEQ ID NO: 1880100
ucgcuuaaagucuaaagaa

SEQ ID NO: 1942487 - RNA, 19 nt, Artificial Sequence
  Description of Artificial Sequence: Synthetic oligonucleotide
  Antisense strand to SEQ ID NO: 1942486
uucuuuagacuuuaagcga

SEQ ID NO: 1942488 - RNA, 19 nt, Artificial Sequence
  Description of Artificial Sequence: Synthetic oligonucleotide
  Sense strand starting at position 1340 of SEQ ID NO: 1880100
gaguguuaugucuacaacc

SEQ ID NO: 1942489 - RNA, 19 nt, Artificial Sequence
  Description of Artificial Sequence: Synthetic oligonucleotide
  Antisense strand to SEQ ID NO: 1942488
gguuguagacauaacacuc

SEQ ID NO: 1942490 - RNA, 19 nt, Artificial Sequence
  Description of Artificial Sequence: Synthetic oligonucleotide
  Sense strand starting at position 1390 of SEQ ID NO: 1880100
gcuuucuucccagagaaca

SEQ ID NO: 1942491 - RNA, 19 nt, Artificial Sequence
  Description of Artificial Sequence: Synthetic oligonucleotide
  Antisense strand to SEQ ID NO: 1942490
uguucucugggaagaaagc

SEQ ID NO: 1942492 - RNA, 19 nt, Artificial Sequence
  Description of Artificial Sequence: Synthetic oligonucleotide
  Sense strand starting at position 2530 of SEQ ID NO: 1880100
ugcagcauuccgcuugcaa

SEQ ID NO: 1942493 - RNA, 19 nt, Artificial Sequence
  Description of Artificial Sequence: Synthetic oligonucleotide
  Antisense strand to SEQ ID NO: 1942492
uugcaagcggaaugcugca

SEQ ID NO: 1942494 - RNA, 19 nt, Artificial Sequence
  Description of Artificial Sequence: Synthetic oligonucleotide
  Sense strand starting at position 2531 of SEQ ID NO: 1880100
gcagcauuccgcuugcaau

SEQ ID NO: 1942495 - RNA, 19 nt, Artificial Sequence
  Description of Artificial Sequence: Synthetic oligonucleotide
  Antisense strand to SEQ ID NO: 1942494
auugcaagcggaaugcugc

SEQ ID NO: 1942496 - RNA, 19 nt, Artificial Sequence
  Description of Artificial Sequence: Synthetic oligonucleotide
  Sense strand starting at position 2592 of SEQ ID NO: 1880100
uaaagaggcugcuuagaug

SEQ ID NO: 1942497 - RNA, 19 nt, Artificial Sequence
  Description of Artificial Sequence: Synthetic oligonucleotide
  Antisense strand to SEQ ID NO: 1942496
caucuaagcagccucuuua

SEQ ID NO: 1942498 - RNA, 19 nt, Artificial Sequence
  Description of Artificial Sequence: Synthetic oligonucleotide
  Sense strand starting at position 3342 of SEQ ID NO: 1880100
uuccaauucuugguuaaag

SEQ ID NO: 1942499 - RNA, 19 nt, Artificial Sequence
  Description of Artificial Sequence: Synthetic oligonucleotide
  Antisense strand to SEQ ID NO: 1942498
cuuuaaccaagaauuggaa

SEQ ID NO: 1942500 - RNA, 19 nt, Artificial Sequence
  Description of Artificial Sequence: Synthetic oligonucleotide
  Sense strand starting at position 3343 of SEQ ID NO: 1880100
uccaauucuugguuaaaga

SEQ ID NO: 1942501 - RNA, 19 nt, Artificial Sequence
  Description of Artificial Sequence: Synthetic oligonucleotide
  Antisense strand to SEQ ID NO: 1942500
ucuuuaaccaagaauugga

SEQ ID NO: 1942502 - RNA, 19 nt, Artificial Sequence
  Description of Artificial Sequence: Synthetic oligonucleotide
  Sense strand starting at position 3622 of SEQ ID NO: 1880100
gagaguucuccuuggagau

SEQ ID NO: 1942503 - RNA, 19 nt, Artificial Sequence
  Description of Artificial Sequence: Synthetic oligonucleotide
  Antisense strand to SEQ ID NO: 1942502
aucuccaaggagaacucuc

SEQ ID NO: 1942504 - RNA, 19 nt, Artificial Sequence
  Description of Artificial Sequence: Synthetic oligonucleotide
  Sense strand starting at position 3623 of SEQ ID NO: 1880100
agaguucuccuuggagauc

SEQ ID NO: 1942505 - RNA, 19 nt, Artificial Sequence
  Description of Artificial Sequence: Synthetic oligonucleotide
  Antisense strand to SEQ ID NO: 1942504
gaucuccaaggagaacucu

SEQ ID NO: 1942506 - RNA, 19 nt, Artificial Sequence
  Description of Artificial Sequence: Synthetic oligonucleotide
  Sense strand starting at position 3626 of SEQ ID NO: 1880100
guucuccuuggagaucaua

SEQ ID NO: 1942507 - RNA, 19 nt, Artificial Sequence
  Description of Artificial Sequence: Synthetic oligonucleotide
  Antisense strand to SEQ ID NO: 1942506
uaugaucuccaaggagaac

SEQ ID NO: 1942508 - RNA, 19 nt, Artificial Sequence
  Description of Artificial Sequence: Synthetic oligonucleotide
  Sense strand starting at position 3801 of SEQ ID NO: 1880100
gguaguaguggagaaaugu

SEQ ID NO: 1942509 - RNA, 19 nt, Artificial Sequence
  Description of Artificial Sequence: Synthetic oligonucleotide
  Antisense strand to SEQ ID NO: 1942508
acauuucuccacuacuacc

SEQ ID NO: 1942510 - RNA, 19 nt, Artificial Sequence
  Description of Artificial Sequence: Synthetic oligonucleotide
  Sense strand starting at position 8 of SEQ ID NO: 1880101
aggaaaugccauuauucuc

SEQ ID NO: 1942511 - RNA, 19 nt, Artificial Sequence
  Description of Artificial Sequence: Synthetic oligonucleotide
  Antisense strand to SEQ ID NO: 1942510
gagaauaauggcauuuccu

SEQ ID NO: 1942512 - RNA, 19 nt, Artificial Sequence
  Description of Artificial Sequence: Synthetic oligonucleotide
  Sense strand starting at position 91 of SEQ ID NO: 1880101
gggacuggauccuuguuaa

SEQ ID NO: 1942513 - RNA, 19 nt, Artificial Sequence
  Description of Artificial Sequence: Synthetic oligonucleotide
  Antisense strand to SEQ ID NO: 1942512
uuaacaaggauccaguccc

SEQ ID NO: 1942514 - RNA, 19 nt, Artificial Sequence
  Description of Artificial Sequence: Synthetic oligonucleotide
  Sense strand starting at position 94 of SEQ ID NO: 1880101
acuggauccuuguuaacac

SEQ ID NO: 1942515 - RNA, 19 nt, Artificial Sequence
  Description of Artificial Sequence: Synthetic oligonucleotide
  Antisense strand to SEQ ID NO: 1942514
guguuaacaaggauccagu

SEQ ID NO: 1942516 - RNA, 19 nt, Artificial Sequence
  Description of Artificial Sequence: Synthetic oligonucleotide
  Sense strand starting at position 680 of SEQ ID NO: 1880101
cugaccucagcugaucaaa

SEQ ID NO: 1942517 - RNA, 19 nt, Artificial Sequence
  Description of Artificial Sequence: Synthetic oligonucleotide
  Antisense strand to SEQ ID NO: 1942516
uuugaucagcugaggucag

SEQ ID NO: 1942518 - RNA, 19 nt, Artificial Sequence
  Description of Artificial Sequence: Synthetic oligonucleotide
  Sense strand starting at position 826 of SEQ ID NO: 1880101
uagauaguucugggaguua

SEQ ID NO: 1942519 - RNA, 19 nt, Artificial Sequence
  Description of Artificial Sequence: Synthetic oligonucleotide
  Antisense strand to SEQ ID NO: 1942518
uaacucccagaacuaucua

SEQ ID NO: 1942520 - RNA, 19 nt, Artificial Sequence
  Description of Artificial Sequence: Synthetic oligonucleotide
  Sense strand starting at position 854 of SEQ ID NO: 1880101
gauuuacagugccauuuga

SEQ ID NO: 1942521 - RNA, 19 nt, Artificial Sequence
  Description of Artificial Sequence: Synthetic oligonucleotide
  Antisense strand to SEQ ID NO: 1942520
ucaaauggcacuguaaauc

SEQ ID NO: 1942522 - RNA, 19 nt, Artificial Sequence
  Description of Artificial Sequence: Synthetic oligonucleotide
  Sense strand starting at position 1125 of SEQ ID NO: 1880101
ucgcuuaaagucuaaagaa

SEQ ID NO: 1942523 - RNA, 19 nt, Artificial Sequence
  Description of Artificial Sequence: Synthetic oligonucleotide
  Antisense strand to SEQ ID NO: 1942522
uucuuuagacuuuaagcga

SEQ ID NO: 1942524 - RNA, 19 nt, Artificial Sequence
  Description of Artificial Sequence: Synthetic oligonucleotide
  Sense strand starting at position 1341 of SEQ ID NO: 1880101
gaguguuaugucuacaacc

SEQ ID NO: 1942525 - RNA, 19 nt, Artificial Sequence
  Description of Artificial Sequence: Synthetic oligonucleotide
  Antisense strand to SEQ ID NO: 1942524
gguuguagacauaacacuc

SEQ ID NO: 1942526 - RNA, 19 nt, Artificial Sequence
  Description of Artificial Sequence: Synthetic oligonucleotide
  Sense strand starting at position 2107 of SEQ ID NO: 1880101
cugggauucucacuuccga

SEQ ID NO: 1942527 - RNA, 19 nt, Artificial Sequence
  Description of Artificial Sequence: Synthetic oligonucleotide
  Antisense strand to SEQ ID NO: 1942526
ucggaagugagaaucccag

SEQ ID NO: 1942528 - RNA, 19 nt, Artificial Sequence
  Description of Artificial Sequence: Synthetic oligonucleotide
  Sense strand starting at position 2513 of SEQ ID NO: 1880101
acauccuuauccuugugau

SEQ ID NO: 1942529 - RNA, 19 nt, Artificial Sequence
  Description of Artificial Sequence: Synthetic oligonucleotide
  Antisense strand to SEQ ID NO: 1942528
aucacaaggauaaggaugu

SEQ ID NO: 1942530 - RNA, 19 nt, Artificial Sequence
  Description of Artificial Sequence: Synthetic oligonucleotide
  Sense strand starting at position 2531 of SEQ ID NO: 1880101
ugcagcauuccgcuugcaa

SEQ ID NO: 1942531 - RNA, 19 nt, Artificial Sequence
  Description of Artificial Sequence: Synthetic oligonucleotide
  Antisense strand to SEQ ID NO: 1942530
uugcaagcggaaugcugca

SEQ ID NO: 1942532 - RNA, 19 nt, Artificial Sequence
  Description of Artificial Sequence: Synthetic oligonucleotide
  Sense strand starting at position 2532 of SEQ ID NO: 1880101
gcagcauuccgcuugcaau

SEQ ID NO: 1942533 - RNA, 19 nt, Artificial Sequence
  Description of Artificial Sequence: Synthetic oligonucleotide
  Antisense strand to SEQ ID NO: 1942532
auugcaagcggaaugcugc

SEQ ID NO: 1942534 - RNA, 19 nt, Artificial Sequence
  Description of Artificial Sequence: Synthetic oligonucleotide
  Sense strand starting at position 2550 of SEQ ID NO: 1880101
uuggaagccguuuaauauc

SEQ ID NO: 1942535 - RNA, 19 nt, Artificial Sequence
  Description of Artificial Sequence: Synthetic oligonucleotide
  Antisense strand to SEQ ID NO: 1942534
gauauuaaacggcuuccaa

SEQ ID NO: 1942536 - RNA, 19 nt, Artificial Sequence
  Description of Artificial Sequence: Synthetic oligonucleotide
  Sense strand starting at position 2593 of SEQ ID NO: 1880101
uaaagaggcugcuuagaug

SEQ ID NO: 1942537 - RNA, 19 nt, Artificial Sequence
  Description of Artificial Sequence: Synthetic oligonucleotide
  Antisense strand to SEQ ID NO: 1942536
caucuaagcagccucuuua

SEQ ID NO: 1942538 - RNA, 19 nt, Artificial Sequence
  Description of Artificial Sequence: Synthetic oligonucleotide
  Sense strand starting at position 2601 of SEQ ID NO: 1880101
cugcuuagaugacugcaaa

SEQ ID NO: 1942539 - RNA, 19 nt, Artificial Sequence
  Description of Artificial Sequence: Synthetic oligonucleotide
  Antisense strand to SEQ ID NO: 1942538
uuugcagucaucuaagcag

SEQ ID NO: 1942540 - RNA, 19 nt, Artificial Sequence
  Description of Artificial Sequence: Synthetic oligonucleotide
  Sense strand starting at position 2745 of SEQ ID NO: 1880101
uaugcugucccagaagaga

SEQ ID NO: 1942541 - RNA, 19 nt, Artificial Sequence
  Description of Artificial Sequence: Synthetic oligonucleotide
  Antisense strand to SEQ ID NO: 1942540
ucucuucugggacagcaua

SEQ ID NO: 1942542 - RNA, 19 nt, Artificial Sequence
  Description of Artificial Sequence: Synthetic oligonucleotide
  Sense strand starting at position 3263 of SEQ ID NO: 1880101
uucugagaccaguguuuga

SEQ ID NO: 1942543 - RNA, 19 nt, Artificial Sequence
  Description of Artificial Sequence: Synthetic oligonucleotide
  Antisense strand to SEQ ID NO: 1942542
ucaaacacuggucucagaa

SEQ ID NO: 1942544 - RNA, 19 nt, Artificial Sequence
  Description of Artificial Sequence: Synthetic oligonucleotide
  Sense strand starting at position 3343 of SEQ ID NO: 1880101
uuccaauucuugguuaaag

SEQ ID NO: 1942545 - RNA, 19 nt, Artificial Sequence
  Description of Artificial Sequence: Synthetic oligonucleotide
  Antisense strand to SEQ ID NO: 1942544
cuuuaaccaagaauuggaa

SEQ ID NO: 1942546 - RNA, 19 nt, Artificial Sequence
  Description of Artificial Sequence: Synthetic oligonucleotide
  Sense strand starting at position 3344 of SEQ ID NO: 1880101
uccaauucuugguuaaaga

SEQ ID NO: 1942547 - RNA, 19 nt, Artificial Sequence
  Description of Artificial Sequence: Synthetic oligonucleotide
  Antisense strand to SEQ ID NO: 1942546
ucuuuaaccaagaauugga

SEQ ID NO: 1942548 - RNA, 19 nt, Artificial Sequence
  Description of Artificial Sequence: Synthetic oligonucleotide
  Sense strand starting at position 3623 of SEQ ID NO: 1880101
gagaguucuccuuggagau

SEQ ID NO: 1942549 - RNA, 19 nt, Artificial Sequence
  Description of Artificial Sequence: Synthetic oligonucleotide
  Antisense strand to SEQ ID NO: 1942548
aucuccaaggagaacucuc

SEQ ID NO: 1942550 - RNA, 19 nt, Artificial Sequence
  Description of Artificial Sequence: Synthetic oligonucleotide
  Sense strand starting at position 3624 of SEQ ID NO: 1880101
agaguucuccuuggagauc

SEQ ID NO: 1942551 - RNA, 19 nt, Artificial Sequence
  Description of Artificial Sequence: Synthetic oligonucleotide
  Antisense strand to SEQ ID NO: 1942550
gaucuccaaggagaacucu

SEQ ID NO: 1942552 - RNA, 19 nt, Artificial Sequence
  Description of Artificial Sequence: Synthetic oligonucleotide
  Sense strand starting at position 3627 of SEQ ID NO: 1880101
guucuccuuggagaucaua

SEQ ID NO: 1942553 - RNA, 19 nt, Artificial Sequence
  Description of Artificial Sequence: Synthetic oligonucleotide
  Antisense strand to SEQ ID NO: 1942552
uaugaucuccaaggagaac

SEQ ID NO: 1942554 - RNA, 19 nt, Artificial Sequence
  Description of Artificial Sequence: Synthetic oligonucleotide
  Sense strand starting at position 3886 of SEQ ID NO: 1880101
uggguucuuccugaccaau

SEQ ID NO: 1942555 - RNA, 19 nt, Artificial Sequence
  Description of Artificial Sequence: Synthetic oligonucleotide
  Antisense strand to SEQ ID NO: 1942554
auuggucaggaagaaccca

SEQ ID NO: 1942556 - RNA, 19 nt, Artificial Sequence
  Description of Artificial Sequence: Synthetic oligonucleotide
  Sense strand starting at position 200 of SEQ ID NO: 1880102
ugaugcaaauaaugagaaa

SEQ ID NO: 1942557 - RNA, 19 nt, Artificial Sequence
  Description of Artificial Sequence: Synthetic oligonucleotide
  Antisense strand to SEQ ID NO: 1942556
uuucucauuauuugcauca

SEQ ID NO: 1942558 - RNA, 19 nt, Artificial Sequence
  Description of Artificial Sequence: Synthetic oligonucleotide
  Sense strand starting at position 408 of SEQ ID NO: 1880102
aaugucucagauggacuaa

SEQ ID NO: 1942559 - RNA, 19 nt, Artificial Sequence
  Description of Artificial Sequence: Synthetic oligonucleotide
  Antisense strand to SEQ ID NO: 1942558
uuaguccaucugagacauu

SEQ ID NO: 1942560 - RNA, 19 nt, Artificial Sequence
  Description of Artificial Sequence: Synthetic oligonucleotide
  Sense strand starting at position 853 of SEQ ID NO: 1880102
gagaaaggguauuaaggaa

SEQ ID NO: 1942561 - RNA, 19 nt, Artificial Sequence
  Description of Artificial Sequence: Synthetic oligonucleotide
  Antisense strand to SEQ ID NO: 1942560
uuccuuaauacccuuucuc

SEQ ID NO: 1942562 - RNA, 19 nt, Artificial Sequence
  Description of Artificial Sequence: Synthetic oligonucleotide
  Sense strand starting at position 865 of SEQ ID NO: 1880102
uaaggaauuugucagggua

SEQ ID NO: 1942563 - RNA, 19 nt, Artificial Sequence
  Description of Artificial Sequence: Synthetic oligonucleotide
  Antisense strand to SEQ ID NO: 1942562
uacccugacaaauuccuua

SEQ ID NO: 1942564 - RNA, 19 nt, Artificial Sequence
  Description of Artificial Sequence: Synthetic oligonucleotide
  Sense strand starting at position 867 of SEQ ID NO: 1880102
aggaauuugucaggguacu

SEQ ID NO: 1942565 - RNA, 19 nt, Artificial Sequence
  Description of Artificial Sequence: Synthetic oligonucleotide
  Antisense strand to SEQ ID NO: 1942564
aguacccugacaaauuccu

SEQ ID NO: 1942566 - RNA, 19 nt, Artificial Sequence
  Description of Artificial Sequence: Synthetic oligonucleotide
  Sense strand starting at position 887 of SEQ ID NO: 1880102
acgcgugucagguauaaac

SEQ ID NO: 1942567 - RNA, 19 nt, Artificial Sequence
  Description of Artificial Sequence: Synthetic oligonucleotide
  Antisense strand to SEQ ID NO: 1942566
guuuauaccugacacgcgu

SEQ ID NO: 1942568 - RNA, 19 nt, Artificial Sequence
  Description of Artificial Sequence: Synthetic oligonucleotide
  Sense strand starting at position 1036 of SEQ ID NO: 1880102
cugggugcuaucuagaaag

SEQ ID NO: 1942569 - RNA, 19 nt, Artificial Sequence
  Description of Artificial Sequence: Synthetic oligonucleotide
  Antisense strand to SEQ ID NO: 1942568
cuuucuagauagcacccag

SEQ ID NO: 1942570 - RNA, 19 nt, Artificial Sequence
  Description of Artificial Sequence: Synthetic oligonucleotide
  Sense strand starting at position 1038 of SEQ ID NO: 1880102
gggugcuaucuagaaaguu

SEQ ID NO: 1942571 - RNA, 19 nt, Artificial Sequence
  Description of Artificial Sequence: Synthetic oligonucleotide
  Antisense strand to SEQ ID NO: 1942570
aacuuucuagauagcaccc

SEQ ID NO: 1942572 - RNA, 19 nt, Artificial Sequence
  Description of Artificial Sequence: Synthetic oligonucleotide
  Sense strand starting at position 1047 of SEQ ID NO: 1880102
cuagaaaguugccuggcaa

SEQ ID NO: 1942573 - RNA, 19 nt, Artificial Sequence
  Description of Artificial Sequence: Synthetic oligonucleotide
  Antisense strand to SEQ ID NO: 1942572
uugccaggcaacuuucuag

SEQ ID NO: 1942574 - RNA, 19 nt, Artificial Sequence
  Description of Artificial Sequence: Synthetic oligonucleotide
  Sense strand starting at position 1048 of SEQ ID NO: 1880102
uagaaaguugccuggcaau

SEQ ID NO: 1942575 - RNA, 19 nt, Artificial Sequence
  Description of Artificial Sequence: Synthetic oligonucleotide
  Antisense strand to SEQ ID NO: 1942574
auugccaggcaacuuucua

SEQ ID NO: 1942576 - RNA, 19 nt, Artificial Sequence
  Description of Artificial Sequence: Synthetic oligonucleotide
  Sense strand starting at position 1074 of SEQ ID NO: 1880102
ggaugugggagcgagacau

SEQ ID NO: 1942577 - RNA, 19 nt, Artificial Sequence
  Description of Artificial Sequence: Synthetic oligonucleotide
  Antisense strand to SEQ ID NO: 1942576
augucucgcucccacaucc

SEQ ID NO: 1942578 - RNA, 19 nt, Artificial Sequence
  Description of Artificial Sequence: Synthetic oligonucleotide
  Sense strand starting at position 1078 of SEQ ID NO: 1880102
gugggagcgagacaucaaa

SEQ ID NO: 1942579 - RNA, 19 nt, Artificial Sequence
  Description of Artificial Sequence: Synthetic oligonucleotide
  Antisense strand to SEQ ID NO: 1942578
uuugaugucucgcucccac

SEQ ID NO: 1942580 - RNA, 19 nt, Artificial Sequence
  Description of Artificial Sequence: Synthetic oligonucleotide
  Sense strand starting at position 1139 of SEQ ID NO: 1880102
auaugaacugccggagaua

SEQ ID NO: 1942581 - RNA, 19 nt, Artificial Sequence
  Description of Artificial Sequence: Synthetic oligonucleotide
  Antisense strand to SEQ ID NO: 1942580
uaucuccggcaguucauau

SEQ ID NO: 1942582 - RNA, 19 nt, Artificial Sequence
  Description of Artificial Sequence: Synthetic oligonucleotide
  Sense strand starting at position 1142 of SEQ ID NO: 1880102
ugaacugccggagauagua

SEQ ID NO: 1942583 - RNA, 19 nt, Artificial Sequence
  Description of Artificial Sequence: Synthetic oligonucleotide
  Antisense strand to SEQ ID NO: 1942582
uacuaucuccggcaguuca

SEQ ID NO: 1942584 - RNA, 19 nt, Artificial Sequence
  Description of Artificial Sequence: Synthetic oligonucleotide
  Sense strand starting at position 1169 of SEQ ID NO: 1880102
guaccuggcuccucauaaa

SEQ ID NO: 1942585 - RNA, 19 nt, Artificial Sequence
  Description of Artificial Sequence: Synthetic oligonucleotide
  Antisense strand to SEQ ID NO: 1942584
uuuaugaggagccagguac

SEQ ID NO: 1942586 - RNA, 19 nt, Artificial Sequence
  Description of Artificial Sequence: Synthetic oligonucleotide
  Sense strand starting at position 1317 of SEQ ID NO: 1880102
acgcaaaguaagcguguua

SEQ ID NO: 1942587 - RNA, 19 nt, Artificial Sequence
  Description of Artificial Sequence: Synthetic oligonucleotide
  Antisense strand to SEQ ID NO: 1942586
uaacacgcuuacuuugcgu

SEQ ID NO: 1942588 - RNA, 19 nt, Artificial Sequence
  Description of Artificial Sequence: Synthetic oligonucleotide
  Sense strand starting at position 1375 of SEQ ID NO: 1880102
ccugcuuucuuccuggaga

SEQ ID NO: 1942589 - RNA, 19 nt, Artificial Sequence
  Description of Artificial Sequence: Synthetic oligonucleotide
  Antisense strand to SEQ ID NO: 1942588
ucuccaggaagaaagcagg

SEQ ID NO: 1942590 - RNA, 19 nt, Artificial Sequence
  Description of Artificial Sequence: Synthetic oligonucleotide
  Sense strand starting at position 1376 of SEQ ID NO: 1880102
cugcuuucuuccuggagaa

SEQ ID NO: 1942591 - RNA, 19 nt, Artificial Sequence
  Description of Artificial Sequence: Synthetic oligonucleotide
  Antisense strand to SEQ ID NO: 1942590
uucuccaggaagaaagcag

SEQ ID NO: 1942592 - RNA, 19 nt, Artificial Sequence
  Description of Artificial Sequence: Synthetic oligonucleotide
  Sense strand starting at position 1377 of SEQ ID NO: 1880102
ugcuuucuuccuggagaac

SEQ ID NO: 1942593 - RNA, 19 nt, Artificial Sequence
  Description of Artificial Sequence: Synthetic oligonucleotide
  Antisense strand to SEQ ID NO: 1942592
guucuccaggaagaaagca

SEQ ID NO: 1942594 - RNA, 19 nt, Artificial Sequence
  Description of Artificial Sequence: Synthetic oligonucleotide
  Sense strand starting at position 1378 of SEQ ID NO: 1880102
gcuuucuuccuggagaaca

SEQ ID NO: 1942595 - RNA, 19 nt, Artificial Sequence
  Description of Artificial Sequence: Synthetic oligonucleotide
  Antisense strand to SEQ ID NO: 1942594
uguucuccaggaagaaagc

SEQ ID NO: 1942596 - RNA, 19 nt, Artificial Sequence
  Description of Artificial Sequence: Synthetic oligonucleotide
  Sense strand starting at position 1397 of SEQ ID NO: 1880102
gcacccaucugcguaguuu

SEQ ID NO: 1942597 - RNA, 19 nt, Artificial Sequence
  Description of Artificial Sequence: Synthetic oligonucleotide
  Antisense strand to SEQ ID NO: 1942596
aaacuacgcagaugggugc

SEQ ID NO: 1942598 - RNA, 19 nt, Artificial Sequence
  Description of Artificial Sequence: Synthetic oligonucleotide
  Sense strand starting at position 1698 of SEQ ID NO: 1880102
gcgugcaggcgacauguua

SEQ ID NO: 1942599 - RNA, 19 nt, Artificial Sequence
  Description of Artificial Sequence: Synthetic oligonucleotide
  Antisense strand to SEQ ID NO: 1942598
uaacaugucgccugcacgc

SEQ ID NO: 1942600 - RNA, 19 nt, Artificial Sequence
  Description of Artificial Sequence: Synthetic oligonucleotide
  Sense strand starting at position 1705 of SEQ ID NO: 1880102
ggcgacauguuacuuccua

SEQ ID NO: 1942601 - RNA, 19 nt, Artificial Sequence
  Description of Artificial Sequence: Synthetic oligonucleotide
  Antisense strand to SEQ ID NO: 1942600
uaggaaguaacaugucgcc

SEQ ID NO: 1942602 - RNA, 19 nt, Artificial Sequence
  Description of Artificial Sequence: Synthetic oligonucleotide
  Sense strand starting at position 1706 of SEQ ID NO: 1880102
gcgacauguuacuuccuau

SEQ ID NO: 1942603 - RNA, 19 nt, Artificial Sequence
  Description of Artificial Sequence: Synthetic oligonucleotide
  Antisense strand to SEQ ID NO: 1942602
auaggaaguaacaugucgc

SEQ ID NO: 1942604 - RNA, 19 nt, Artificial Sequence
  Description of Artificial Sequence: Synthetic oligonucleotide
  Sense strand starting at position 1791 of SEQ ID NO: 1880102
agauaugacccuuagcgua

SEQ ID NO: 1942605 - RNA, 19 nt, Artificial Sequence
  Description of Artificial Sequence: Synthetic oligonucleotide
  Antisense strand to SEQ ID NO: 1942604
uacgcuaagggucauaucu

SEQ ID NO: 1942606 - RNA, 19 nt, Artificial Sequence
  Description of Artificial Sequence: Synthetic oligonucleotide
  Sense strand starting at position 2107 of SEQ ID NO: 1880102
cugggauucucucuuccga

SEQ ID NO: 1942607 - RNA, 19 nt, Artificial Sequence
  Description of Artificial Sequence: Synthetic oligonucleotide
  Antisense strand to SEQ ID NO: 1942606
ucggaagagagaaucccag

SEQ ID NO: 1942608 - RNA, 19 nt, Artificial Sequence
  Description of Artificial Sequence: Synthetic oligonucleotide
  Sense strand starting at position 2109 of SEQ ID NO: 1880102
gggauucucucuuccgauc

SEQ ID NO: 1942609 - RNA, 19 nt, Artificial Sequence
  Description of Artificial Sequence: Synthetic oligonucleotide
  Antisense strand to SEQ ID NO: 1942608
gaucggaagagagaauccc

SEQ ID NO: 1942610 - RNA, 19 nt, Artificial Sequence
  Description of Artificial Sequence: Synthetic oligonucleotide
  Sense strand starting at position 2292 of SEQ ID NO: 1880102
ugaccaaucugcugccaga

SEQ ID NO: 1942611 - RNA, 19 nt, Artificial Sequence
  Description of Artificial Sequence: Synthetic oligonucleotide
  Antisense strand to SEQ ID NO: 1942610
ucuggcagcagauugguca

SEQ ID NO: 1942612 - RNA, 19 nt, Artificial Sequence
  Description of Artificial Sequence: Synthetic oligonucleotide
  Sense strand starting at position 2513 of SEQ ID NO: 1880102
acaucuuuaucccugugau

SEQ ID NO: 1942613 - RNA, 19 nt, Artificial Sequence
  Description of Artificial Sequence: Synthetic oligonucleotide
  Antisense strand to SEQ ID NO: 1942612
aucacagggauaaagaugu

SEQ ID NO: 1942614 - RNA, 19 nt, Artificial Sequence
  Description of Artificial Sequence: Synthetic oligonucleotide
  Sense strand starting at position 2516 of SEQ ID NO: 1880102
ucuuuaucccugugaugca

SEQ ID NO: 1942615 - RNA, 19 nt, Artificial Sequence
  Description of Artificial Sequence: Synthetic oligonucleotide
  Antisense strand to SEQ ID NO: 1942614
ugcaucacagggauaaaga

SEQ ID NO: 1942616 - RNA, 19 nt, Artificial Sequence
  Description of Artificial Sequence: Synthetic oligonucleotide
  Sense strand starting at position 2907 of SEQ ID NO: 1880102
uuuaacaaugucuggauca

SEQ ID NO: 1942617 - RNA, 19 nt, Artificial Sequence
  Description of Artificial Sequence: Synthetic oligonucleotide
  Antisense strand to SEQ ID NO: 1942616
ugauccagacauuguuaaa

SEQ ID NO: 1942618 - RNA, 19 nt, Artificial Sequence
  Description of Artificial Sequence: Synthetic oligonucleotide
  Sense strand starting at position 2908 of SEQ ID NO: 1880102
uuaacaaugucuggaucau

SEQ ID NO: 1942619 - RNA, 19 nt, Artificial Sequence
  Description of Artificial Sequence: Synthetic oligonucleotide
  Antisense strand to SEQ ID NO: 1942618
augauccagacauuguuaa

SEQ ID NO: 1942620 - RNA, 19 nt, Artificial Sequence
  Description of Artificial Sequence: Synthetic oligonucleotide
  Sense strand starting at position 3248 of SEQ ID NO: 1880102
agaccaauauuugauguaa

SEQ ID NO: 1942621 - RNA, 19 nt, Artificial Sequence
  Description of Artificial Sequence: Synthetic oligonucleotide
  Antisense strand to SEQ ID NO: 1942620
uuacaucaaauauuggucu

SEQ ID NO: 1942622 - RNA, 19 nt, Artificial Sequence
  Description of Artificial Sequence: Synthetic oligonucleotide
  Sense strand starting at position 3471 of SEQ ID NO: 1880102
uugacuuuguucucgcgau

SEQ ID NO: 1942623 - RNA, 19 nt, Artificial Sequence
  Description of Artificial Sequence: Synthetic oligonucleotide
  Antisense strand to SEQ ID NO: 1942622
aucgcgagaacaaagucaa

SEQ ID NO: 1942624 - RNA, 19 nt, Artificial Sequence
  Description of Artificial Sequence: Synthetic oligonucleotide
  Sense strand starting at position 3607 of SEQ ID NO: 1880102
gagaguucuccuuggagac

SEQ ID NO: 1942625 - RNA, 19 nt, Artificial Sequence
  Description of Artificial Sequence: Synthetic oligonucleotide
  Antisense strand to SEQ ID NO: 1942624
gucuccaaggagaacucuc

SEQ ID NO: 1942626 - RNA, 19 nt, Artificial Sequence
  Description of Artificial Sequence: Synthetic oligonucleotide
  Sense strand starting at position 3609 of SEQ ID NO: 1880102
gaguucuccuuggagacca

SEQ ID NO: 1942627 - RNA, 19 nt, Artificial Sequence
  Description of Artificial Sequence: Synthetic oligonucleotide
  Antisense strand to SEQ ID NO: 1942626
uggucuccaaggagaacuc

SEQ ID NO: 1942628 - RNA, 19 nt, Artificial Sequence
  Description of Artificial Sequence: Synthetic oligonucleotide
  Sense strand starting at position 3625 of SEQ ID NO: 1880102
ccauaaagauucuguggca

SEQ ID NO: 1942629 - RNA, 19 nt, Artificial Sequence
  Description of Artificial Sequence: Synthetic oligonucleotide
  Antisense strand to SEQ ID NO: 1942628
ugccacagaaucuuuaugg

SEQ ID NO: 1942630 - RNA, 19 nt, Artificial Sequence
  Description of Artificial Sequence: Synthetic oligonucleotide
  Sense strand starting at position 3626 of SEQ ID NO: 1880102
cauaaagauucuguggcau

SEQ ID NO: 1942631 - RNA, 19 nt, Artificial Sequence
  Description of Artificial Sequence: Synthetic oligonucleotide
  Antisense strand to SEQ ID NO: 1942630
augccacagaaucuuuaug

SEQ ID NO: 1942632 - RNA, 19 nt, Artificial Sequence
  Description of Artificial Sequence: Synthetic oligonucleotide
  Sense strand starting at position 3865 of SEQ ID NO: 1880102
auggguucuuccugcccaa

SEQ ID NO: 1942633 - RNA, 19 nt, Artificial Sequence
  Description of Artificial Sequence: Synthetic oligonucleotide
  Antisense strand to SEQ ID NO: 1942632
uugggcaggaagaacccau

SEQ ID NO: 1942634 - RNA, 19 nt, Artificial Sequence
  Description of Artificial Sequence: Synthetic oligonucleotide
  Sense strand starting at position 3869 of SEQ ID NO: 1880102
guucuuccugcccaaugua

SEQ ID NO: 1942635 - RNA, 19 nt, Artificial Sequence
  Description of Artificial Sequence: Synthetic oligonucleotide
  Antisense strand to SEQ ID NO: 1942634
uacauugggcaggaagaac

SEQ ID NO: 1942636 - RNA, 19 nt, Artificial Sequence
  Description of Artificial Sequence: Synthetic oligonucleotide
  Sense strand starting at position 95 of SEQ ID NO: 1880103
agcauuaccuuauuauguu

SEQ ID NO: 1942637 - RNA, 19 nt, Artificial Sequence
  Description of Artificial Sequence: Synthetic oligonucleotide
  Antisense strand to SEQ ID NO: 1942636
aacauaauaagguaaugcu

SEQ ID NO: 1942638 - RNA, 19 nt, Artificial Sequence
  Description of Artificial Sequence: Synthetic oligonucleotide
  Sense strand starting at position 116 of SEQ ID NO: 1880103
uuaauaguauguccuccau

SEQ ID NO: 1942639 - RNA, 19 nt, Artificial Sequence
  Description of Artificial Sequence: Synthetic oligonucleotide
  Antisense strand to SEQ ID NO: 1942638
auggaggacauacuauuaa

SEQ ID NO: 1942640 - RNA, 19 nt, Artificial Sequence
  Description of Artificial Sequence: Synthetic oligonucleotide
  Sense strand starting at position 190 of SEQ ID NO: 1880103
ugaaucagugacugaggua

SEQ ID NO: 1942641 - RNA, 19 nt, Artificial Sequence
  Description of Artificial Sequence: Synthetic oligonucleotide
  Antisense strand to SEQ ID NO: 1942640
uaccucagucacugauuca

SEQ ID NO: 1942642 - RNA, 19 nt, Artificial Sequence
  Description of Artificial Sequence: Synthetic oligonucleotide
  Sense strand starting at position 204 of SEQ ID NO: 1880103
agguauugugagggaauag

SEQ ID NO: 1942643 - RNA, 19 nt, Artificial Sequence
  Description of Artificial Sequence: Synthetic oligonucleotide
  Antisense strand to SEQ ID NO: 1942642
cuauucccucacaauaccu

SEQ ID NO: 1942644 - RNA, 19 nt, Artificial Sequence
  Description of Artificial Sequence: Synthetic oligonucleotide
  Sense strand starting at position 205 of SEQ ID NO: 1880103
gguauugugagggaauagu

SEQ ID NO: 1942645 - RNA, 19 nt, Artificial Sequence
  Description of Artificial Sequence: Synthetic oligonucleotide
  Antisense strand to SEQ ID NO: 1942644
acuauucccucacaauacc

SEQ ID NO: 1942646 - RNA, 19 nt, Artificial Sequence
  Description of Artificial Sequence: Synthetic oligonucleotide
  Sense strand starting at position 214 of SEQ ID NO: 1880103
agggaauagucccuccaag

SEQ ID NO: 1942647 - RNA, 19 nt, Artificial Sequence
  Description of Artificial Sequence: Synthetic oligonucleotide
  Antisense strand to SEQ ID NO: 1942646
cuuggagggacuauucccu

SEQ ID NO: 1942648 - RNA, 19 nt, Artificial Sequence
  Description of Artificial Sequence: Synthetic oligonucleotide
  Sense strand starting at position 247 of SEQ ID NO: 1880103
gucagauggcaguaauucu

SEQ ID NO: 1942649 - RNA, 19 nt, Artificial Sequence
  Description of Artificial Sequence: Synthetic oligonucleotide
  Antisense strand to SEQ ID NO: 1942648
agaauuacugccaucugac

SEQ ID NO: 1942650 - RNA, 19 nt, Artificial Sequence
  Description of Artificial Sequence: Synthetic oligonucleotide
  Sense strand starting at position 254 of SEQ ID NO: 1880103
ggcaguaauucuccaggau

SEQ ID NO: 1942651 - RNA, 19 nt, Artificial Sequence
  Description of Artificial Sequence: Synthetic oligonucleotide
  Antisense strand to SEQ ID NO: 1942650
auccuggagaauuacugcc

SEQ ID NO: 1942652 - RNA, 19 nt, Artificial Sequence
  Description of Artificial Sequence: Synthetic oligonucleotide
  Sense strand starting at position 255 of SEQ ID NO: 1880103
gcaguaauucuccaggaug

SEQ ID NO: 1942653 - RNA, 19 nt, Artificial Sequence
  Description of Artificial Sequence: Synthetic oligonucleotide
  Antisense strand to SEQ ID NO: 1942652
cauccuggagaauuacugc

SEQ ID NO: 1942654 - RNA, 19 nt, Artificial Sequence
  Description of Artificial Sequence: Synthetic oligonucleotide
  Sense strand starting at position 258 of SEQ ID NO: 1880103
guaauucuccaggaugcca

SEQ ID NO: 1942655 - RNA, 19 nt, Artificial Sequence
  Description of Artificial Sequence: Synthetic oligonucleotide
  Antisense strand to SEQ ID NO: 1942654
uggcauccuggagaauuac

SEQ ID NO: 1942656 - RNA, 19 nt, Artificial Sequence
  Description of Artificial Sequence: Synthetic oligonucleotide
  Sense strand starting at position 295 of SEQ ID NO: 1880103
ccugacauuguuggucuaa

SEQ ID NO: 1942657 - RNA, 19 nt, Artificial Sequence
  Description of Artificial Sequence: Synthetic oligonucleotide
  Antisense strand to SEQ ID NO: 1942656
uuagaccaacaaugucagg

SEQ ID NO: 1942658 - RNA, 19 nt, Artificial Sequence
  Description of Artificial Sequence: Synthetic oligonucleotide
  Sense strand starting at position 296 of SEQ ID NO: 1880103
cugacauuguuggucuaag

SEQ ID NO: 1942659 - RNA, 19 nt, Artificial Sequence
  Description of Artificial Sequence: Synthetic oligonucleotide
  Antisense strand to SEQ ID NO: 1942658
cuuagaccaacaaugucag

SEQ ID NO: 1942660 - RNA, 19 nt, Artificial Sequence
  Description of Artificial Sequence: Synthetic oligonucleotide
  Sense strand starting at position 1298 of SEQ ID NO: 1880103
cugggcuaaagugaucaua

SEQ ID NO: 1942661 - RNA, 19 nt, Artificial Sequence
  Description of Artificial Sequence: Synthetic oligonucleotide
  Antisense strand to SEQ ID NO: 1942660
uaugaucacuuuagcccag

SEQ ID NO: 1942662 - RNA, 19 nt, Artificial Sequence
  Description of Artificial Sequence: Synthetic oligonucleotide
  Sense strand starting at position 1300 of SEQ ID NO: 1880103
gggcuaaagugaucauaau

SEQ ID NO: 1942663 - RNA, 19 nt, Artificial Sequence
  Description of Artificial Sequence: Synthetic oligonucleotide
  Antisense strand to SEQ ID NO: 1942662
auuaugaucacuuuagccc

SEQ ID NO: 1942664 - RNA, 19 nt, Artificial Sequence
  Description of Artificial Sequence: Synthetic oligonucleotide
  Sense strand starting at position 1301 of SEQ ID NO: 1880103
ggcuaaagugaucauaauu

SEQ ID NO: 1942665 - RNA, 19 nt, Artificial Sequence
  Description of Artificial Sequence: Synthetic oligonucleotide
  Antisense strand to SEQ ID NO: 1942664
aauuaugaucacuuuagcc

SEQ ID NO: 1942666 - RNA, 19 nt, Artificial Sequence
  Description of Artificial Sequence: Synthetic oligonucleotide
  Sense strand starting at position 1470 of SEQ ID NO: 1880103
gugagaccguuucuagaau

SEQ ID NO: 1942667 - RNA, 19 nt, Artificial Sequence
  Description of Artificial Sequence: Synthetic oligonucleotide
  Antisense strand to SEQ ID NO: 1942666
auucuagaaacggucucac

SEQ ID NO: 1942668 - RNA, 19 nt, Artificial Sequence
  Description of Artificial Sequence: Synthetic oligonucleotide
  Sense strand starting at position 1476 of SEQ ID NO: 1880103
ccguuucuagaauaaauua

SEQ ID NO: 1942669 - RNA, 19 nt, Artificial Sequence
  Description of Artificial Sequence: Synthetic oligonucleotide
  Antisense strand to SEQ ID NO: 1942668
uaauuuauucuagaaacgg

SEQ ID NO: 1942670 - RNA, 19 nt, Artificial Sequence
  Description of Artificial Sequence: Synthetic oligonucleotide
  Sense strand starting at position 1719 of SEQ ID NO: 1880103
aggcaaagauugcucacua

SEQ ID NO: 1942671 - RNA, 19 nt, Artificial Sequence
  Description of Artificial Sequence: Synthetic oligonucleotide
  Antisense strand to SEQ ID NO: 1942670
uagugagcaaucuuugccu

SEQ ID NO: 1942672 - RNA, 19 nt, Artificial Sequence
  Description of Artificial Sequence: Synthetic oligonucleotide
  Sense strand starting at position 1720 of SEQ ID NO: 1880103
ggcaaagauugcucacuac

SEQ ID NO: 1942673 - RNA, 19 nt, Artificial Sequence
  Description of Artificial Sequence: Synthetic oligonucleotide
  Antisense strand to SEQ ID NO: 1942672
guagugagcaaucuuugcc

SEQ ID NO: 1942674 - RNA, 19 nt, Artificial Sequence
  Description of Artificial Sequence: Synthetic oligonucleotide
  Sense strand starting at position 1870 of SEQ ID NO: 1880103
uuuaaacaccguugaugaa

SEQ ID NO: 1942675 - RNA, 19 nt, Artificial Sequence
  Description of Artificial Sequence: Synthetic oligonucleotide
  Antisense strand to SEQ ID NO: 1942674
uucaucaacgguguuuaaa

SEQ ID NO: 1942676 - RNA, 19 nt, Artificial Sequence
  Description of Artificial Sequence: Synthetic oligonucleotide
  Sense strand starting at position 1932 of SEQ ID NO: 1880103
acgguuucucuccacggaa

SEQ ID NO: 1942677 - RNA, 19 nt, Artificial Sequence
  Description of Artificial Sequence: Synthetic oligonucleotide
  Antisense strand to SEQ ID NO: 1942676
uuccguggagagaaaccgu

SEQ ID NO: 1942678 - RNA, 19 nt, Artificial Sequence
  Description of Artificial Sequence: Synthetic oligonucleotide
  Sense strand starting at position 1934 of SEQ ID NO: 1880103
gguuucucuccacggaaau

SEQ ID NO: 1942679 - RNA, 19 nt, Artificial Sequence
  Description of Artificial Sequence: Synthetic oligonucleotide
  Antisense strand to SEQ ID NO: 1942678
auuuccguggagagaaacc

SEQ ID NO: 1942680 - RNA, 19 nt, Artificial Sequence
  Description of Artificial Sequence: Synthetic oligonucleotide
  Sense strand starting at position 1973 of SEQ ID NO: 1880103
uuuauacgauuugaagaga

SEQ ID NO: 1942681 - RNA, 19 nt, Artificial Sequence
  Description of Artificial Sequence: Synthetic oligonucleotide
  Antisense strand to SEQ ID NO: 1942680
ucucuucaaaucguauaaa

SEQ ID NO: 1942682 - RNA, 19 nt, Artificial Sequence
  Description of Artificial Sequence: Synthetic oligonucleotide
  Sense strand starting at position 2045 of SEQ ID NO: 1880103
cuagauuagcaaugguuac

SEQ ID NO: 1942683 - RNA, 19 nt, Artificial Sequence
  Description of Artificial Sequence: Synthetic oligonucleotide
  Antisense strand to SEQ ID NO: 1942682
guaaccauugcuaaucuag

SEQ ID NO: 1942684 - RNA, 19 nt, Artificial Sequence
  Description of Artificial Sequence: Synthetic oligonucleotide
  Sense strand starting at position 2103 of SEQ ID NO: 1880103
gauugugugaaaggagcuu

SEQ ID NO: 1942685 - RNA, 19 nt, Artificial Sequence
  Description of Artificial Sequence: Synthetic oligonucleotide
  Antisense strand to SEQ ID NO: 1942684
aagcuccuuucacacaauc

SEQ ID NO: 1942686 - RNA, 19 nt, Artificial Sequence
  Description of Artificial Sequence: Synthetic oligonucleotide
  Sense strand starting at position 2112 of SEQ ID NO: 1880103
aaaggagcuucguuauuau

SEQ ID NO: 1942687 - RNA, 19 nt, Artificial Sequence
  Description of Artificial Sequence: Synthetic oligonucleotide
  Antisense strand to SEQ ID NO: 1942686
auaauaacgaagcuccuuu

SEQ ID NO: 1942688 - RNA, 19 nt, Artificial Sequence
  Description of Artificial Sequence: Synthetic oligonucleotide
  Sense strand starting at position 2196 of SEQ ID NO: 1880103
gugcauuguggguauguaa

SEQ ID NO: 1942689 - RNA, 19 nt, Artificial Sequence
  Description of Artificial Sequence: Synthetic oligonucleotide
  Antisense strand to SEQ ID NO: 1942688
uuacauacccacaaugcac

SEQ ID NO: 1942690 - RNA, 19 nt, Artificial Sequence
  Description of Artificial Sequence: Synthetic oligonucleotide
  Sense strand starting at position 2329 of SEQ ID NO: 1880103
guagaugccugguccaacu

SEQ ID NO: 1942691 - RNA, 19 nt, Artificial Sequence
  Description of Artificial Sequence: Synthetic oligonucleotide
  Antisense strand to SEQ ID NO: 1942690
aguuggaccaggcaucuac

SEQ ID NO: 1942692 - RNA, 19 nt, Artificial Sequence
  Description of Artificial Sequence: Synthetic oligonucleotide
  Sense strand starting at position 2342 of SEQ ID NO: 1880103
ccaacuagacagugacuuu

SEQ ID NO: 1942693 - RNA, 19 nt, Artificial Sequence
  Description of Artificial Sequence: Synthetic oligonucleotide
  Antisense strand to SEQ ID NO: 1942692
aaagucacugucuaguugg

SEQ ID NO: 1942694 - RNA, 19 nt, Artificial Sequence
  Description of Artificial Sequence: Synthetic oligonucleotide
  Sense strand starting at position 2345 of SEQ ID NO: 1880103
acuagacagugacuuuauu

SEQ ID NO: 1942695 - RNA, 19 nt, Artificial Sequence
  Description of Artificial Sequence: Synthetic oligonucleotide
  Antisense strand to SEQ ID NO: 1942694
aauaaagucacugucuagu

SEQ ID NO: 1942696 - RNA, 19 nt, Artificial Sequence
  Description of Artificial Sequence: Synthetic oligonucleotide
  Sense strand starting at position 2572 of SEQ ID NO: 1880103
uggcguucgcauguaguca

SEQ ID NO: 1942697 - RNA, 19 nt, Artificial Sequence
  Description of Artificial Sequence: Synthetic oligonucleotide
  Antisense strand to SEQ ID NO: 1942696
ugacuacaugcgaacgcca

SEQ ID NO: 1942698 - RNA, 19 nt, Artificial Sequence
  Description of Artificial Sequence: Synthetic oligonucleotide
  Sense strand starting at position 2761 of SEQ ID NO: 1880103
ugccuuccacaguauguaa

SEQ ID NO: 1942699 - RNA, 19 nt, Artificial Sequence
  Description of Artificial Sequence: Synthetic oligonucleotide
  Antisense strand to SEQ ID NO: 1942698
uuacauacuguggaaggca

SEQ ID NO: 1942700 - RNA, 19 nt, Artificial Sequence
  Description of Artificial Sequence: Synthetic oligonucleotide
  Sense strand starting at position 2851 of SEQ ID NO: 1880103
aagaaauucugaguuguua

SEQ ID NO: 1942701 - RNA, 19 nt, Artificial Sequence
  Description of Artificial Sequence: Synthetic oligonucleotide
  Antisense strand to SEQ ID NO: 1942700
uaacaacucagaauuucuu

SEQ ID NO: 1942702 - RNA, 19 nt, Artificial Sequence
  Description of Artificial Sequence: Synthetic oligonucleotide
  Sense strand starting at position 2855 of SEQ ID NO: 1880103
aauucugaguuguuacaga

SEQ ID NO: 1942703 - RNA, 19 nt, Artificial Sequence
  Description of Artificial Sequence: Synthetic oligonucleotide
  Antisense strand to SEQ ID NO: 1942702
ucuguaacaacucagaauu

SEQ ID NO: 1942704 - RNA, 19 nt, Artificial Sequence
  Description of Artificial Sequence: Synthetic oligonucleotide
  Sense strand starting at position 2860 of SEQ ID NO: 1880103
ugaguuguuacagaggugu

SEQ ID NO: 1942705 - RNA, 19 nt, Artificial Sequence
  Description of Artificial Sequence: Synthetic oligonucleotide
  Antisense strand to SEQ ID NO: 1942704
acaccucuguaacaacuca

SEQ ID NO: 1942706 - RNA, 19 nt, Artificial Sequence
  Description of Artificial Sequence: Synthetic oligonucleotide
  Sense strand starting at position 2862 of SEQ ID NO: 1880103
aguuguuacagagguguca

SEQ ID NO: 1942707 - RNA, 19 nt, Artificial Sequence
  Description of Artificial Sequence: Synthetic oligonucleotide
  Antisense strand to SEQ ID NO: 1942706
ugacaccucuguaacaacu

SEQ ID NO: 1942708 - RNA, 19 nt, Artificial Sequence
  Description of Artificial Sequence: Synthetic oligonucleotide
  Sense strand starting at position 2874 of SEQ ID NO: 1880103
ggugucagggcuuagaaca

SEQ ID NO: 1942709 - RNA, 19 nt, Artificial Sequence
  Description of Artificial Sequence: Synthetic oligonucleotide
  Antisense strand to SEQ ID NO: 1942708
uguucuaagcccugacacc

SEQ ID NO: 1942710 - RNA, 19 nt, Artificial Sequence
  Description of Artificial Sequence: Synthetic oligonucleotide
  Sense strand starting at position 2957 of SEQ ID NO: 1880103
acuauauaagcaggaaguu

SEQ ID NO: 1942711 - RNA, 19 nt, Artificial Sequence
  Description of Artificial Sequence: Synthetic oligonucleotide
  Antisense strand to SEQ ID NO: 1942710
aacuuccugcuuauauagu

SEQ ID NO: 1942712 - RNA, 19 nt, Artificial Sequence
  Description of Artificial Sequence: Synthetic oligonucleotide
  Sense strand starting at position 3003 of SEQ ID NO: 1880103
caugaagaccuucguguga

SEQ ID NO: 1942713 - RNA, 19 nt, Artificial Sequence
  Description of Artificial Sequence: Synthetic oligonucleotide
  Antisense strand to SEQ ID NO: 1942712
ucacacgaaggucuucaug

SEQ ID NO: 1942714 - RNA, 19 nt, Artificial Sequence
  Description of Artificial Sequence: Synthetic oligonucleotide
  Sense strand starting at position 3032 of SEQ ID NO: 1880103
gccuuaugcccacagggaa

SEQ ID NO: 1942715 - RNA, 19 nt, Artificial Sequence
  Description of Artificial Sequence: Synthetic oligonucleotide
  Antisense strand to SEQ ID NO: 1942714
uucccugugggcauaaggc

SEQ ID NO: 1942716 - RNA, 19 nt, Artificial Sequence
  Description of Artificial Sequence: Synthetic oligonucleotide
  Sense strand starting at position 22 of SEQ ID NO: 1880104
ugcauugugcaccaaauaa

SEQ ID NO: 1942717 - RNA, 19 nt, Artificial Sequence
  Description of Artificial Sequence: Synthetic oligonucleotide
  Antisense strand to SEQ ID NO: 1942716
uuauuuggugcacaaugca

SEQ ID NO: 1942718 - RNA, 19 nt, Artificial Sequence
  Description of Artificial Sequence: Synthetic oligonucleotide
  Sense strand starting at position 97 of SEQ ID NO: 1880104
ugagauugcuguuccagaa

SEQ ID NO: 1942719 - RNA, 19 nt, Artificial Sequence
  Description of Artificial Sequence: Synthetic oligonucleotide
  Antisense strand to SEQ ID NO: 1942718
uucuggaacagcaaucuca

SEQ ID NO: 1942720 - RNA, 19 nt, Artificial Sequence
  Description of Artificial Sequence: Synthetic oligonucleotide
  Sense strand starting at position 101 of SEQ ID NO: 1880104
auugcuguuccagaauugu

SEQ ID NO: 1942721 - RNA, 19 nt, Artificial Sequence
  Description of Artificial Sequence: Synthetic oligonucleotide
  Antisense strand to SEQ ID NO: 1942720
acaauucuggaacagcaau

SEQ ID NO: 1942722 - RNA, 19 nt, Artificial Sequence
  Description of Artificial Sequence: Synthetic oligonucleotide
  Sense strand starting at position 107 of SEQ ID NO: 1880104
guuccagaauugucugaag

SEQ ID NO: 1942723 - RNA, 19 nt, Artificial Sequence
  Description of Artificial Sequence: Synthetic oligonucleotide
  Antisense strand to SEQ ID NO: 1942722
cuucagacaauucuggaac

SEQ ID NO: 1942724 - RNA, 19 nt, Artificial Sequence
  Description of Artificial Sequence: Synthetic oligonucleotide
  Sense strand starting at position 109 of SEQ ID NO: 1880104
uccagaauugucugaagaa

SEQ ID NO: 1942725 - RNA, 19 nt, Artificial Sequence
  Description of Artificial Sequence: Synthetic oligonucleotide
  Antisense strand to SEQ ID NO: 1942724
uucuucagacaauucugga

SEQ ID NO: 1942726 - RNA, 19 nt, Artificial Sequence
  Description of Artificial Sequence: Synthetic oligonucleotide
  Sense strand starting at position 131 of SEQ ID NO: 1880104
ggcagaagucaauagcucu

SEQ ID NO: 1942727 - RNA, 19 nt, Artificial Sequence
  Description of Artificial Sequence: Synthetic oligonucleotide
  Antisense strand to SEQ ID NO: 1942726
agagcuauugacuucugcc

SEQ ID NO: 1942728 - RNA, 19 nt, Artificial Sequence
  Description of Artificial Sequence: Synthetic oligonucleotide
  Sense strand starting at position 183 of SEQ ID NO: 1880104
gggaguagccauuaccuga

SEQ ID NO: 1942729 - RNA, 19 nt, Artificial Sequence
  Description of Artificial Sequence: Synthetic oligonucleotide
  Antisense strand to SEQ ID NO: 1942728
ucagguaauggcuacuccc

SEQ ID NO: 1942730 - RNA, 19 nt, Artificial Sequence
  Description of Artificial Sequence: Synthetic oligonucleotide
  Sense strand starting at position 205 of SEQ ID NO: 1880104
cugagugccacucaucgaa

SEQ ID NO: 1942731 - RNA, 19 nt, Artificial Sequence
  Description of Artificial Sequence: Synthetic oligonucleotide
  Antisense strand to SEQ ID NO: 1942730
uucgaugaguggcacucag

SEQ ID NO: 1942732 - RNA, 19 nt, Artificial Sequence
  Description of Artificial Sequence: Synthetic oligonucleotide
  Sense strand starting at position 366 of SEQ ID NO: 1880104
aguagaugcccuuagccau

SEQ ID NO: 1942733 - RNA, 19 nt, Artificial Sequence
  Description of Artificial Sequence: Synthetic oligonucleotide
  Antisense strand to SEQ ID NO: 1942732
auggcuaagggcaucuacu

SEQ ID NO: 1942734 - RNA, 19 nt, Artificial Sequence
  Description of Artificial Sequence: Synthetic oligonucleotide
  Sense strand starting at position 380 of SEQ ID NO: 1880104
gccauuacgacgguucgua

SEQ ID NO: 1942735 - RNA, 19 nt, Artificial Sequence
  Description of Artificial Sequence: Synthetic oligonucleotide
  Antisense strand to SEQ ID NO: 1942734
uacgaaccgucguaauggc

SEQ ID NO: 1942736 - RNA, 19 nt, Artificial Sequence
  Description of Artificial Sequence: Synthetic oligonucleotide
  Sense strand starting at position 384 of SEQ ID NO: 1880104
uuacgacgguucguauuua

SEQ ID NO: 1942737 - RNA, 19 nt, Artificial Sequence
  Description of Artificial Sequence: Synthetic oligonucleotide
  Antisense strand to SEQ ID NO: 1942736
uaaauacgaaccgucguaa

SEQ ID NO: 1942738 - RNA, 19 nt, Artificial Sequence
  Description of Artificial Sequence: Synthetic oligonucleotide
  Sense strand starting at position 392 of SEQ ID NO: 1880104
guucguauuuacucugaaa

SEQ ID NO: 1942739 - RNA, 19 nt, Artificial Sequence
  Description of Artificial Sequence: Synthetic oligonucleotide
  Antisense strand to SEQ ID NO: 1942738
uuucagaguaaauacgaac

SEQ ID NO: 1942740 - RNA, 19 nt, Artificial Sequence
  Description of Artificial Sequence: Synthetic oligonucleotide
  Sense strand starting at position 395 of SEQ ID NO: 1880104
cguauuuacucugaaacaa

SEQ ID NO: 1942741 - RNA, 19 nt, Artificial Sequence
  Description of Artificial Sequence: Synthetic oligonucleotide
  Antisense strand to SEQ ID NO: 1942740
uuguuucagaguaaauacg

SEQ ID NO: 1942742 - RNA, 19 nt, Artificial Sequence
  Description of Artificial Sequence: Synthetic oligonucleotide
  Sense strand starting at position 452 of SEQ ID NO: 1880104
guauuugagucugaaggac

SEQ ID NO: 1942743 - RNA, 19 nt, Artificial Sequence
  Description of Artificial Sequence: Synthetic oligonucleotide
  Antisense strand to SEQ ID NO: 1942742
guccuucagacucaaauac

SEQ ID NO: 1942744 - RNA, 19 nt, Artificial Sequence
  Description of Artificial Sequence: Synthetic oligonucleotide
  Sense strand starting at position 1002 of SEQ ID NO: 1880104
ccuccuuuacugggacaga

SEQ ID NO: 1942745 - RNA, 19 nt, Artificial Sequence
  Description of Artificial Sequence: Synthetic oligonucleotide
  Antisense strand to SEQ ID NO: 1942744
ucugucccaguaaaggagg

SEQ ID NO: 1942746 - RNA, 19 nt, Artificial Sequence
  Description of Artificial Sequence: Synthetic oligonucleotide
  Sense strand starting at position 1281 of SEQ ID NO: 1880104
uucgauucuacacggagaa

SEQ ID NO: 1942747 - RNA, 19 nt, Artificial Sequence
  Description of Artificial Sequence: Synthetic oligonucleotide
  Antisense strand to SEQ ID NO: 1942746
uucuccguguagaaucgaa

SEQ ID NO: 1942748 - RNA, 19 nt, Artificial Sequence
  Description of Artificial Sequence: Synthetic oligonucleotide
  Sense strand starting at position 1444 of SEQ ID NO: 1880104
uggacaguuccagguugaa

SEQ ID NO: 1942749 - RNA, 19 nt, Artificial Sequence
  Description of Artificial Sequence: Synthetic oligonucleotide
  Antisense strand to SEQ ID NO: 1942748
uucaaccuggaacugucca

SEQ ID NO: 1942750 - RNA, 19 nt, Artificial Sequence
  Description of Artificial Sequence: Synthetic oligonucleotide
  Sense strand starting at position 1447 of SEQ ID NO: 1880104
acaguuccagguugaaacu

SEQ ID NO: 1942751 - RNA, 19 nt, Artificial Sequence
  Description of Artificial Sequence: Synthetic oligonucleotide
  Antisense strand to SEQ ID NO: 1942750
aguuucaaccuggaacugu

SEQ ID NO: 1942752 - RNA, 19 nt, Artificial Sequence
  Description of Artificial Sequence: Synthetic oligonucleotide
  Sense strand starting at position 1475 of SEQ ID NO: 1880104
gucaucagccauuagauuc

SEQ ID NO: 1942753 - RNA, 19 nt, Artificial Sequence
  Description of Artificial Sequence: Synthetic oligonucleotide
  Antisense strand to SEQ ID NO: 1942752
gaaucuaauggcugaugac

SEQ ID NO: 1942754 - RNA, 19 nt, Artificial Sequence
  Description of Artificial Sequence: Synthetic oligonucleotide
  Sense strand starting at position 1600 of SEQ ID NO: 1880104
gcguuaaugcucgcuugug

SEQ ID NO: 1942755 - RNA, 19 nt, Artificial Sequence
  Description of Artificial Sequence: Synthetic oligonucleotide
  Antisense strand to SEQ ID NO: 1942754
cacaagcgagcauuaacgc

SEQ ID NO: 1942756 - RNA, 19 nt, Artificial Sequence
  Description of Artificial Sequence: Synthetic oligonucleotide
  Sense strand starting at position 1602 of SEQ ID NO: 1880104
guuaaugcucgcuugugag

SEQ ID NO: 1942757 - RNA, 19 nt, Artificial Sequence
  Description of Artificial Sequence: Synthetic oligonucleotide
  Antisense strand to SEQ ID NO: 1942756
cucacaagcgagcauuaac

SEQ ID NO: 1942758 - RNA, 19 nt, Artificial Sequence
  Description of Artificial Sequence: Synthetic oligonucleotide
  Sense strand starting at position 1609 of SEQ ID NO: 1880104
cucgcuugugagucgguaa

SEQ ID NO: 1942759 - RNA, 19 nt, Artificial Sequence
  Description of Artificial Sequence: Synthetic oligonucleotide
  Antisense strand to SEQ ID NO: 1942758
uuaccgacucacaagcgag

SEQ ID NO: 1942760 - RNA, 19 nt, Artificial Sequence
  Description of Artificial Sequence: Synthetic oligonucleotide
  Sense strand starting at position 1800 of SEQ ID NO: 1880104
acucgcauuuguucuauaa

SEQ ID NO: 1942761 - RNA, 19 nt, Artificial Sequence
  Description of Artificial Sequence: Synthetic oligonucleotide
  Antisense strand to SEQ ID NO: 1942760
uuauagaacaaaugcgagu

SEQ ID NO: 1942762 - RNA, 19 nt, Artificial Sequence
  Description of Artificial Sequence: Synthetic oligonucleotide
  Sense strand starting at position 2005 of SEQ ID NO: 1880104
acaucagucgucgacacua

SEQ ID NO: 1942763 - RNA, 19 nt, Artificial Sequence
  Description of Artificial Sequence: Synthetic oligonucleotide
  Antisense strand to SEQ ID NO: 1942762
uagugucgacgacugaugu

SEQ ID NO: 1942764 - RNA, 19 nt, Artificial Sequence
  Description of Artificial Sequence: Synthetic oligonucleotide
  Sense strand starting at position 2018 of SEQ ID NO: 1880104
acacuacaguucucaggua

SEQ ID NO: 1942765 - RNA, 19 nt, Artificial Sequence
  Description of Artificial Sequence: Synthetic oligonucleotide
  Antisense strand to SEQ ID NO: 1942764
uaccugagaacuguagugu

SEQ ID NO: 1942766 - RNA, 19 nt, Artificial Sequence
  Description of Artificial Sequence: Synthetic oligonucleotide
  Sense strand starting at position 2138 of SEQ ID NO: 1880104
ccgagaaagauauguugaa

SEQ ID NO: 1942767 - RNA, 19 nt, Artificial Sequence
  Description of Artificial Sequence: Synthetic oligonucleotide
  Antisense strand to SEQ ID NO: 1942766
uucaacauaucuuucucgg

SEQ ID NO: 1942768 - RNA, 19 nt, Artificial Sequence
  Description of Artificial Sequence: Synthetic oligonucleotide
  Sense strand starting at position 2189 of SEQ ID NO: 1880104
uuauuuagugcgcaaugca

SEQ ID NO: 1942769 - RNA, 19 nt, Artificial Sequence
  Description of Artificial Sequence: Synthetic oligonucleotide
  Antisense strand to SEQ ID NO: 1942768
ugcauugcgcacuaaauaa

SEQ ID NO: 1942770 - RNA, 19 nt, Artificial Sequence
  Description of Artificial Sequence: Synthetic oligonucleotide
  Sense strand starting at position 2198 of SEQ ID NO: 1880104
gcgcaaugcauugugggua

SEQ ID NO: 1942771 - RNA, 19 nt, Artificial Sequence
  Description of Artificial Sequence: Synthetic oligonucleotide
  Antisense strand to SEQ ID NO: 1942770
uacccacaaugcauugcgc

SEQ ID NO: 1942772 - RNA, 19 nt, Artificial Sequence
  Description of Artificial Sequence: Synthetic oligonucleotide
  Sense strand starting at position 2203 of SEQ ID NO: 1880104
augcauuguggguaugcaa

SEQ ID NO: 1942773 - RNA, 19 nt, Artificial Sequence
  Description of Artificial Sequence: Synthetic oligonucleotide
  Antisense strand to SEQ ID NO: 1942772
uugcauacccacaaugcau

SEQ ID NO: 1942774 - RNA, 19 nt, Artificial Sequence
  Description of Artificial Sequence: Synthetic oligonucleotide
  Sense strand starting at position 2206 of SEQ ID NO: 1880104
cauuguggguaugcaaaua

SEQ ID NO: 1942775 - RNA, 19 nt, Artificial Sequence
  Description of Artificial Sequence: Synthetic oligonucleotide
  Antisense strand to SEQ ID NO: 1942774
uauuugcauacccacaaug

SEQ ID NO: 1942776 - RNA, 19 nt, Artificial Sequence
  Description of Artificial Sequence: Synthetic oligonucleotide
  Sense strand starting at position 2433 of SEQ ID NO: 1880104
gcacaauuagccuaauaag

SEQ ID NO: 1942777 - RNA, 19 nt, Artificial Sequence
  Description of Artificial Sequence: Synthetic oligonucleotide
  Antisense strand to SEQ ID NO: 1942776
cuuauuaggcuaauugugc

SEQ ID NO: 1942778 - RNA, 19 nt, Artificial Sequence
  Description of Artificial Sequence: Synthetic oligonucleotide
  Sense strand starting at position 2555 of SEQ ID NO: 1880104
ggcugaucgccugaacuag

SEQ ID NO: 1942779 - RNA, 19 nt, Artificial Sequence
  Description of Artificial Sequence: Synthetic oligonucleotide
  Antisense strand to SEQ ID NO: 1942778
cuaguucaggcgaucagcc

SEQ ID NO: 1942780 - RNA, 19 nt, Artificial Sequence
  Description of Artificial Sequence: Synthetic oligonucleotide
  Sense strand starting at position 2728 of SEQ ID NO: 1880104
uugagaaccucuguuggca

SEQ ID NO: 1942781 - RNA, 19 nt, Artificial Sequence
  Description of Artificial Sequence: Synthetic oligonucleotide
  Antisense strand to SEQ ID NO: 1942780
ugccaacagagguucucaa

SEQ ID NO: 1942782 - RNA, 19 nt, Artificial Sequence
  Description of Artificial Sequence: Synthetic oligonucleotide
  Sense strand starting at position 2746 of SEQ ID NO: 1880104
aacuguugugccugaaaua

SEQ ID NO: 1942783 - RNA, 19 nt, Artificial Sequence
  Description of Artificial Sequence: Synthetic oligonucleotide
  Antisense strand to SEQ ID NO: 1942782
uauuucaggcacaacaguu

SEQ ID NO: 1942784 - RNA, 19 nt, Artificial Sequence
  Description of Artificial Sequence: Synthetic oligonucleotide
  Sense strand starting at position 2747 of SEQ ID NO: 1880104
acuguugugccugaaauau

SEQ ID NO: 1942785 - RNA, 19 nt, Artificial Sequence
  Description of Artificial Sequence: Synthetic oligonucleotide
  Antisense strand to SEQ ID NO: 1942784
auauuucaggcacaacagu

SEQ ID NO: 1942786 - RNA, 19 nt, Artificial Sequence
  Description of Artificial Sequence: Synthetic oligonucleotide
  Sense strand starting at position 2787 of SEQ ID NO: 1880104
acagauuacuggcugagca

SEQ ID NO: 1942787 - RNA, 19 nt, Artificial Sequence
  Description of Artificial Sequence: Synthetic oligonucleotide
  Antisense strand to SEQ ID NO: 1942786
ugcucagccaguaaucugu

SEQ ID NO: 1942788 - RNA, 19 nt, Artificial Sequence
  Description of Artificial Sequence: Synthetic oligonucleotide
  Sense strand starting at position 2816 of SEQ ID NO: 1880104
ugggaaaggcugugaaaug

SEQ ID NO: 1942789 - RNA, 19 nt, Artificial Sequence
  Description of Artificial Sequence: Synthetic oligonucleotide
  Antisense strand to SEQ ID NO: 1942788
cauuucacagccuuuccca

SEQ ID NO: 1942790 - RNA, 19 nt, Artificial Sequence
  Description of Artificial Sequence: Synthetic oligonucleotide
  Sense strand starting at position 2891 of SEQ ID NO: 1880104
agugcaggagccuaugaaa

SEQ ID NO: 1942791 - RNA, 19 nt, Artificial Sequence
  Description of Artificial Sequence: Synthetic oligonucleotide
  Antisense strand to SEQ ID NO: 1942790
uuucauaggcuccugcacu

SEQ ID NO: 1942792 - RNA, 19 nt, Artificial Sequence
  Description of Artificial Sequence: Synthetic oligonucleotide
  Sense strand starting at position 3232 of SEQ ID NO: 1880104
cgucuucucaccugggaag

SEQ ID NO: 1942793 - RNA, 19 nt, Artificial Sequence
  Description of Artificial Sequence: Synthetic oligonucleotide
  Antisense strand to SEQ ID NO: 1942792
cuucccaggugagaagacg

SEQ ID NO: 1942794 - RNA, 19 nt, Artificial Sequence
  Description of Artificial Sequence: Synthetic oligonucleotide
  Sense strand starting at position 3233 of SEQ ID NO: 1880104
gucuucucaccugggaaga

SEQ ID NO: 1942795 - RNA, 19 nt, Artificial Sequence
  Description of Artificial Sequence: Synthetic oligonucleotide
  Antisense strand to SEQ ID NO: 1942794
ucuucccaggugagaagac

SEQ ID NO: 1942796 - RNA, 19 nt, Artificial Sequence
  Description of Artificial Sequence: Synthetic oligonucleotide
  Sense strand starting at position 390 of SEQ ID NO: 1880105
aggaaaguucuguagcugu

SEQ ID NO: 1942797 - RNA, 19 nt, Artificial Sequence
  Description of Artificial Sequence: Synthetic oligonucleotide
  Antisense strand to SEQ ID NO: 1942796
acagcuacagaacuuuccu

SEQ ID NO: 1942798 - RNA, 19 nt, Artificial Sequence
  Description of Artificial Sequence: Synthetic oligonucleotide
  Sense strand starting at position 524 of SEQ ID NO: 1880105
ugcagaauccaaugagguc

SEQ ID NO: 1942799 - RNA, 19 nt, Artificial Sequence
  Description of Artificial Sequence: Synthetic oligonucleotide
  Antisense strand to SEQ ID NO: 1942798
gaccucauuggauucugca

SEQ ID NO: 1942800 - RNA, 19 nt, Artificial Sequence
  Description of Artificial Sequence: Synthetic oligonucleotide
  Sense strand starting at position 525 of SEQ ID NO: 1880105
gcagaauccaaugaggucu

SEQ ID NO: 1942801 - RNA, 19 nt, Artificial Sequence
  Description of Artificial Sequence: Synthetic oligonucleotide
  Antisense strand to SEQ ID NO: 1942800
agaccucauuggauucugc

SEQ ID NO: 1942802 - RNA, 19 nt, Artificial Sequence
  Description of Artificial Sequence: Synthetic oligonucleotide
  Sense strand starting at position 552 of SEQ ID NO: 1880105
agauguauggagcaugcau

SEQ ID NO: 1942803 - RNA, 19 nt, Artificial Sequence
  Description of Artificial Sequence: Synthetic oligonucleotide
  Antisense strand to SEQ ID NO: 1942802
augcaugcuccauacaucu

SEQ ID NO: 1942804 - RNA, 19 nt, Artificial Sequence
  Description of Artificial Sequence: Synthetic oligonucleotide
  Sense strand starting at position 565 of SEQ ID NO: 1880105
augcauuguguacauggaa

SEQ ID NO: 1942805 - RNA, 19 nt, Artificial Sequence
  Description of Artificial Sequence: Synthetic oligonucleotide
  Antisense strand to SEQ ID NO: 1942804
uuccauguacacaaugcau

SEQ ID NO: 1942806 - RNA, 19 nt, Artificial Sequence
  Description of Artificial Sequence: Synthetic oligonucleotide
  Sense strand starting at position 585 of SEQ ID NO: 1880105
gguuucaggcucuagguaa

SEQ ID NO: 1942807 - RNA, 19 nt, Artificial Sequence
  Description of Artificial Sequence: Synthetic oligonucleotide
  Antisense strand to SEQ ID NO: 1942806
uuaccuagagccugaaacc

SEQ ID NO: 1942808 - RNA, 19 nt, Artificial Sequence
  Description of Artificial Sequence: Synthetic oligonucleotide
  Sense strand starting at position 604 of SEQ ID NO: 1880105
acagaagugagauguguca

SEQ ID NO: 1942809 - RNA, 19 nt, Artificial Sequence
  Description of Artificial Sequence: Synthetic oligonucleotide
  Antisense strand to SEQ ID NO: 1942808
ugacacaucucacuucugu

SEQ ID NO: 1942810 - RNA, 19 nt, Artificial Sequence
  Description of Artificial Sequence: Synthetic oligonucleotide
  Sense strand starting at position 606 of SEQ ID NO: 1880105
agaagugagaugugucaga

SEQ ID NO: 1942811 - RNA, 19 nt, Artificial Sequence
  Description of Artificial Sequence: Synthetic oligonucleotide
  Antisense strand to SEQ ID NO: 1942810
ucugacacaucucacuucu

SEQ ID NO: 1942812 - RNA, 19 nt, Artificial Sequence
  Description of Artificial Sequence: Synthetic oligonucleotide
  Sense strand starting at position 689 of SEQ ID NO: 1880105
gcaagaauucuauacggug

SEQ ID NO: 1942813 - RNA, 19 nt, Artificial Sequence
  Description of Artificial Sequence: Synthetic oligonucleotide
  Antisense strand to SEQ ID NO: 1942812
caccguauagaauucuugc

SEQ ID NO: 1942814 - RNA, 19 nt, Artificial Sequence
  Description of Artificial Sequence: Synthetic oligonucleotide
  Sense strand starting at position 731 of SEQ ID NO: 1880105
aucuacuccugagugaaga

SEQ ID NO: 1942815 - RNA, 19 nt, Artificial Sequence
  Description of Artificial Sequence: Synthetic oligonucleotide
  Antisense strand to SEQ ID NO: 1942814
ucuucacucaggaguagau

SEQ ID NO: 1942816 - RNA, 19 nt, Artificial Sequence
  Description of Artificial Sequence: Synthetic oligonucleotide
  Sense strand starting at position 791 of SEQ ID NO: 1880105
guugauuucucagcugagc

SEQ ID NO: 1942817 - RNA, 19 nt, Artificial Sequence
  Description of Artificial Sequence: Synthetic oligonucleotide
  Antisense strand to SEQ ID NO: 1942816
gcucagcugagaaaucaac

SEQ ID NO: 1942818 - RNA, 19 nt, Artificial Sequence
  Description of Artificial Sequence: Synthetic oligonucleotide
  Sense strand starting at position 1203 of SEQ ID NO: 1880105
gucugauaccucuagcaua

SEQ ID NO: 1942819 - RNA, 19 nt, Artificial Sequence
  Description of Artificial Sequence: Synthetic oligonucleotide
  Antisense strand to SEQ ID NO: 1942818
uaugcuagagguaucagac

SEQ ID NO: 1942820 - RNA, 19 nt, Artificial Sequence
  Description of Artificial Sequence: Synthetic oligonucleotide
  Sense strand starting at position 1293 of SEQ ID NO: 1880105
gguggucuuguauggauua

SEQ ID NO: 1942821 - RNA, 19 nt, Artificial Sequence
  Description of Artificial Sequence: Synthetic oligonucleotide
  Antisense strand to SEQ ID NO: 1942820
uaauccauacaagaccacc

SEQ ID NO: 1942822 - RNA, 19 nt, Artificial Sequence
  Description of Artificial Sequence: Synthetic oligonucleotide
  Sense strand starting at position 1341 of SEQ ID NO: 1880105
aaguguugaauguggacaa

SEQ ID NO: 1942823 - RNA, 19 nt, Artificial Sequence
  Description of Artificial Sequence: Synthetic oligonucleotide
  Antisense strand to SEQ ID NO: 1942822
uuguccacauucaacacuu

SEQ ID NO: 1942824 - RNA, 19 nt, Artificial Sequence
  Description of Artificial Sequence: Synthetic oligonucleotide
  Sense strand starting at position 1345 of SEQ ID NO: 1880105
guugaauguggacaaaggu

SEQ ID NO: 1942825 - RNA, 19 nt, Artificial Sequence
  Description of Artificial Sequence: Synthetic oligonucleotide
  Antisense strand to SEQ ID NO: 1942824
accuuuguccacauucaac

SEQ ID NO: 1942826 - RNA, 19 nt, Artificial Sequence
  Description of Artificial Sequence: Synthetic oligonucleotide
  Sense strand starting at position 1358 of SEQ ID NO: 1880105
aaagguaguccagaauugu

SEQ ID NO: 1942827 - RNA, 19 nt, Artificial Sequence
  Description of Artificial Sequence: Synthetic oligonucleotide
  Antisense strand to SEQ ID NO: 1942826
acaauucuggacuaccuuu

SEQ ID NO: 1942828 - RNA, 19 nt, Artificial Sequence
  Description of Artificial Sequence: Synthetic oligonucleotide
  Sense strand starting at position 1493 of SEQ ID NO: 1880105
aguauaagauaaucaugca

SEQ ID NO: 1942829 - RNA, 19 nt, Artificial Sequence
  Description of Artificial Sequence: Synthetic oligonucleotide
  Antisense strand to SEQ ID NO: 1942828
ugcaugauuaucuuauacu

SEQ ID NO: 1942830 - RNA, 19 nt, Artificial Sequence
  Description of Artificial Sequence: Synthetic oligonucleotide
  Sense strand starting at position 1793 of SEQ ID NO: 1880105
gcuacaaccugggugacau

SEQ ID NO: 1942831 - RNA, 19 nt, Artificial Sequence
  Description of Artificial Sequence: Synthetic oligonucleotide
  Antisense strand to SEQ ID NO: 1942830
augucacccagguuguagc

SEQ ID NO: 1942832 - RNA, 19 nt, Artificial Sequence
  Description of Artificial Sequence: Synthetic oligonucleotide
  Sense strand starting at position 1794 of SEQ ID NO: 1880105
cuacaaccugggugacauu

SEQ ID NO: 1942833 - RNA, 19 nt, Artificial Sequence
  Description of Artificial Sequence: Synthetic oligonucleotide
  Antisense strand to SEQ ID NO: 1942832
aaugucacccagguuguag

SEQ ID NO: 1942834 - RNA, 19 nt, Artificial Sequence
  Description of Artificial Sequence: Synthetic oligonucleotide
  Sense strand starting at position 1964 of SEQ ID NO: 1880105
gcgaaagauuuauucguua

SEQ ID NO: 1942835 - RNA, 19 nt, Artificial Sequence
  Description of Artificial Sequence: Synthetic oligonucleotide
  Antisense strand to SEQ ID NO: 1942834
uaacgaauaaaucuuucgc

SEQ ID NO: 1942836 - RNA, 19 nt, Artificial Sequence
  Description of Artificial Sequence: Synthetic oligonucleotide
  Sense strand starting at position 2114 of SEQ ID NO: 1880105
acauguucucacuggguaa

SEQ ID NO: 1942837 - RNA, 19 nt, Artificial Sequence
  Description of Artificial Sequence: Synthetic oligonucleotide
  Antisense strand to SEQ ID NO: 1942836
uuacccagugagaacaugu

SEQ ID NO: 1942838 - RNA, 19 nt, Artificial Sequence
  Description of Artificial Sequence: Synthetic oligonucleotide
  Sense strand starting at position 2186 of SEQ ID NO: 1880105
ugguaauaauucucguauc

SEQ ID NO: 1942839 - RNA, 19 nt, Artificial Sequence
  Description of Artificial Sequence: Synthetic oligonucleotide
  Antisense strand to SEQ ID NO: 1942838
gauacgagaauuauuacca

SEQ ID NO: 1942840 - RNA, 19 nt, Artificial Sequence
  Description of Artificial Sequence: Synthetic oligonucleotide
  Sense strand starting at position 2207 of SEQ ID NO: 1880105
caaugcauucugggaugca

SEQ ID NO: 1942841 - RNA, 19 nt, Artificial Sequence
  Description of Artificial Sequence: Synthetic oligonucleotide
  Antisense strand to SEQ ID NO: 1942840
ugcaucccagaaugcauug

SEQ ID NO: 1942842 - RNA, 19 nt, Artificial Sequence
  Description of Artificial Sequence: Synthetic oligonucleotide
  Sense strand starting at position 2573 of SEQ ID NO: 1880105
ggaguucucggucacuuug

SEQ ID NO: 1942843 - RNA, 19 nt, Artificial Sequence
  Description of Artificial Sequence: Synthetic oligonucleotide
  Antisense strand to SEQ ID NO: 1942842
caaagugaccgagaacucc

SEQ ID NO: 1942844 - RNA, 19 nt, Artificial Sequence
  Description of Artificial Sequence: Synthetic oligonucleotide
  Sense strand starting at position 2807 of SEQ ID NO: 1880105
gagugaugacagugaaacu

SEQ ID NO: 1942845 - RNA, 19 nt, Artificial Sequence
  Description of Artificial Sequence: Synthetic oligonucleotide
  Antisense strand to SEQ ID NO: 1942844
aguuucacugucaucacuc

SEQ ID NO: 1942846 - RNA, 19 nt, Artificial Sequence
  Description of Artificial Sequence: Synthetic oligonucleotide
  Sense strand starting at position 3200 of SEQ ID NO: 1880105
gcuggugugccaucaucuu

SEQ ID NO: 1942847 - RNA, 19 nt, Artificial Sequence
  Description of Artificial Sequence: Synthetic oligonucleotide
  Antisense strand to SEQ ID NO: 1942846
aagaugauggcacaccagc

SEQ ID NO: 1942848 - RNA, 19 nt, Artificial Sequence
  Description of Artificial Sequence: Synthetic oligonucleotide
  Sense strand starting at position 3381 of SEQ ID NO: 1880105
uaaggaggguuggucgaau

SEQ ID NO: 1942849 - RNA, 19 nt, Artificial Sequence
  Description of Artificial Sequence: Synthetic oligonucleotide
  Antisense strand to SEQ ID NO: 1942848
auucgaccaacccuccuua

SEQ ID NO: 1942850 - RNA, 19 nt, Artificial Sequence
  Description of Artificial Sequence: Synthetic oligonucleotide
  Sense strand starting at position 3383 of SEQ ID NO: 1880105
aggaggguuggucgaauga

SEQ ID NO: 1942851 - RNA, 19 nt, Artificial Sequence
  Description of Artificial Sequence: Synthetic oligonucleotide
  Antisense strand to SEQ ID NO: 1942850
ucauucgaccaacccuccu

SEQ ID NO: 1942852 - RNA, 19 nt, Artificial Sequence
  Description of Artificial Sequence: Synthetic oligonucleotide
  Sense strand starting at position 3384 of SEQ ID NO: 1880105
ggaggguuggucgaaugaa

SEQ ID NO: 1942853 - RNA, 19 nt, Artificial Sequence
  Description of Artificial Sequence: Synthetic oligonucleotide
  Antisense strand to SEQ ID NO: 1942852
uucauucgaccaacccucc

SEQ ID NO: 1942854 - RNA, 19 nt, Artificial Sequence
  Description of Artificial Sequence: Synthetic oligonucleotide
  Sense strand starting at position 3469 of SEQ ID NO: 1880105
ugccgaaagacugagugaa

SEQ ID NO: 1942855 - RNA, 19 nt, Artificial Sequence
  Description of Artificial Sequence: Synthetic oligonucleotide
  Antisense strand to SEQ ID NO: 1942854
uucacucagucuuucggca

SEQ ID NO: 1942856 - RNA, 19 nt, Artificial Sequence
  Description of Artificial Sequence: Synthetic oligonucleotide
  Sense strand starting at position 3471 of SEQ ID NO: 1880105
ccgaaagacugagugaaug

SEQ ID NO: 1942857 - RNA, 19 nt, Artificial Sequence
  Description of Artificial Sequence: Synthetic oligonucleotide
  Antisense strand to SEQ ID NO: 1942856
cauucacucagucuuucgg

SEQ ID NO: 1942858 - RNA, 19 nt, Artificial Sequence
  Description of Artificial Sequence: Synthetic oligonucleotide
  Sense strand starting at position 3499 of SEQ ID NO: 1880105
augaaugacugccuguaaa

SEQ ID NO: 1942859 - RNA, 19 nt, Artificial Sequence
  Description of Artificial Sequence: Synthetic oligonucleotide
  Antisense strand to SEQ ID NO: 1942858
uuuacaggcagucauucau

SEQ ID NO: 1942860 - RNA, 19 nt, Artificial Sequence
  Description of Artificial Sequence: Synthetic oligonucleotide
  Sense strand starting at position 3613 of SEQ ID NO: 1880105
uuccuagcuguguaacuua

SEQ ID NO: 1942861 - RNA, 19 nt, Artificial Sequence
  Description of Artificial Sequence: Synthetic oligonucleotide
  Antisense strand to SEQ ID NO: 1942860
uaaguuacacagcuaggaa

SEQ ID NO: 1942862 - RNA, 19 nt, Artificial Sequence
  Description of Artificial Sequence: Synthetic oligonucleotide
  Sense strand starting at position 3645 of SEQ ID NO: 1880105
accucucugugucuaauuu

SEQ ID NO: 1942863 - RNA, 19 nt, Artificial Sequence
  Description of Artificial Sequence: Synthetic oligonucleotide
  Antisense strand to SEQ ID NO: 1942862
aaauuagacacagagaggu

SEQ ID NO: 1942864 - RNA, 19 nt, Artificial Sequence
  Description of Artificial Sequence: Synthetic oligonucleotide
  Sense strand starting at position 3683 of SEQ ID NO: 1880105
aagugaaccucaucugguu

SEQ ID NO: 1942865 - RNA, 19 nt, Artificial Sequence
  Description of Artificial Sequence: Synthetic oligonucleotide
  Antisense strand to SEQ ID NO: 1942864
aaccagaugagguucacuu

SEQ ID NO: 1942866 - RNA, 19 nt, Artificial Sequence
  Description of Artificial Sequence: Synthetic oligonucleotide
  Sense strand starting at position 3750 of SEQ ID NO: 1880105
guggagagggcucgaugau

SEQ ID NO: 1942867 - RNA, 19 nt, Artificial Sequence
  Description of Artificial Sequence: Synthetic oligonucleotide
  Antisense strand to SEQ ID NO: 1942866
aucaucgagcccucuccac

SEQ ID NO: 1942868 - RNA, 19 nt, Artificial Sequence
  Description of Artificial Sequence: Synthetic oligonucleotide
  Sense strand starting at position 3757 of SEQ ID NO: 1880105
gggcucgaugaugguuaga

SEQ ID NO: 1942869 - RNA, 19 nt, Artificial Sequence
  Description of Artificial Sequence: Synthetic oligonucleotide
  Antisense strand to SEQ ID NO: 1942868
ucuaaccaucaucgagccc

SEQ ID NO: 1942870 - RNA, 19 nt, Artificial Sequence
  Description of Artificial Sequence: Synthetic oligonucleotide
  Sense strand starting at position 3759 of SEQ ID NO: 1880105
gcucgaugaugguuagaag

SEQ ID NO: 1942871 - RNA, 19 nt, Artificial Sequence
  Description of Artificial Sequence: Synthetic oligonucleotide
  Antisense strand to SEQ ID NO: 1942870
cuucuaaccaucaucgagc

SEQ ID NO: 1942872 - RNA, 19 nt, Artificial Sequence
  Description of Artificial Sequence: Synthetic oligonucleotide
  Sense strand starting at position 3776 of SEQ ID NO: 1880105
aggagaguuucucuaaacu

SEQ ID NO: 1942873 - RNA, 19 nt, Artificial Sequence
  Description of Artificial Sequence: Synthetic oligonucleotide
  Antisense strand to SEQ ID NO: 1942872
aguuuagagaaacucuccu

SEQ ID NO: 1942874 - RNA, 19 nt, Artificial Sequence
  Description of Artificial Sequence: Synthetic oligonucleotide
  Sense strand starting at position 3885 of SEQ ID NO: 1880105
cuugucuucccguaaagac

SEQ ID NO: 1942875 - RNA, 19 nt, Artificial Sequence
  Description of Artificial Sequence: Synthetic oligonucleotide
  Antisense strand to SEQ ID NO: 1942874
gucuuuacgggaagacaag

SEQ ID NO: 1942876 - RNA, 19 nt, Artificial Sequence
  Description of Artificial Sequence: Synthetic oligonucleotide
  Sense strand starting at position 355 of SEQ ID NO: 1880106
auugcuuaaggaugaaaug

SEQ ID NO: 1942877 - RNA, 19 nt, Artificial Sequence
  Description of Artificial Sequence: Synthetic oligonucleotide
  Antisense strand to SEQ ID NO: 1942876
cauuucauccuuaagcaau

SEQ ID NO: 1942878 - RNA, 19 nt, Artificial Sequence
  Description of Artificial Sequence: Synthetic oligonucleotide
  Sense strand starting at position 418 of SEQ ID NO: 1880106
uuaauaucaugcuuaagag

SEQ ID NO: 1942879 - RNA, 19 nt, Artificial Sequence
  Description of Artificial Sequence: Synthetic oligonucleotide
  Antisense strand to SEQ ID NO: 1942878
cucuuaagcaugauauuaa

SEQ ID NO: 1942880 - RNA, 19 nt, Artificial Sequence
  Description of Artificial Sequence: Synthetic oligonucleotide
  Sense strand starting at position 569 of SEQ ID NO: 1880106
guauguccucuuuaaaguu

SEQ ID NO: 1942881 - RNA, 19 nt, Artificial Sequence
  Description of Artificial Sequence: Synthetic oligonucleotide
  Antisense strand to SEQ ID NO: 1942880
aacuuuaaagaggacauac

SEQ ID NO: 1942882 - RNA, 19 nt, Artificial Sequence
  Description of Artificial Sequence: Synthetic oligonucleotide
  Sense strand starting at position 604 of SEQ ID NO: 1880106
ucacauauugauggugaua

SEQ ID NO: 1942883 - RNA, 19 nt, Artificial Sequence
  Description of Artificial Sequence: Synthetic oligonucleotide
  Antisense strand to SEQ ID NO: 1942882
uaucaccaucaauauguga

SEQ ID NO: 1942884 - RNA, 19 nt, Artificial Sequence
  Description of Artificial Sequence: Synthetic oligonucleotide
  Sense strand starting at position 1220 of SEQ ID NO: 1880106
caggguauccuagagcacu

SEQ ID NO: 1942885 - RNA, 19 nt, Artificial Sequence
  Description of Artificial Sequence: Synthetic oligonucleotide
  Antisense strand to SEQ ID NO: 1942884
agugcucuaggauacccug

SEQ ID NO: 1942886 - RNA, 19 nt, Artificial Sequence
  Description of Artificial Sequence: Synthetic oligonucleotide
  Sense strand starting at position 1271 of SEQ ID NO: 1880106
ugaugcauuugggaacuau

SEQ ID NO: 1942887 - RNA, 19 nt, Artificial Sequence
  Description of Artificial Sequence: Synthetic oligonucleotide
  Antisense strand to SEQ ID NO: 1942886
auaguucccaaaugcauca

SEQ ID NO: 1942888 - RNA, 19 nt, Artificial Sequence
  Description of Artificial Sequence: Synthetic oligonucleotide
  Sense strand starting at position 1280 of SEQ ID NO: 1880106
ugggaacuaucagaauaga

SEQ ID NO: 1942889 - RNA, 19 nt, Artificial Sequence
  Description of Artificial Sequence: Synthetic oligonucleotide
  Antisense strand to SEQ ID NO: 1942888
ucuauucugauaguuccca

SEQ ID NO: 1942890 - RNA, 19 nt, Artificial Sequence
  Description of Artificial Sequence: Synthetic oligonucleotide
  Sense strand starting at position 1312 of SEQ ID NO: 1880106
ugaauuccauuguuuaaug

SEQ ID NO: 1942891 - RNA, 19 nt, Artificial Sequence
  Description of Artificial Sequence: Synthetic oligonucleotide
  Antisense strand to SEQ ID NO: 1942890
cauuaaacaauggaauuca

SEQ ID NO: 1942892 - RNA, 19 nt, Artificial Sequence
  Description of Artificial Sequence: Synthetic oligonucleotide
  Sense strand starting at position 1574 of SEQ ID NO: 1880106
acagaccuuugagaggaaa

SEQ ID NO: 1942893 - RNA, 19 nt, Artificial Sequence
  Description of Artificial Sequence: Synthetic oligonucleotide
  Antisense strand to SEQ ID NO: 1942892
uuuccucucaaaggucugu

SEQ ID NO: 1942894 - RNA, 19 nt, Artificial Sequence
  Description of Artificial Sequence: Synthetic oligonucleotide
  Sense strand starting at position 1596 of SEQ ID NO: 1880106
acuuccuugcuuuaagaag

SEQ ID NO: 1942895 - RNA, 19 nt, Artificial Sequence
  Description of Artificial Sequence: Synthetic oligonucleotide
  Antisense strand to SEQ ID NO: 1942894
cuucuuaaagcaaggaagu

SEQ ID NO: 1942896 - RNA, 19 nt, Artificial Sequence
  Description of Artificial Sequence: Synthetic oligonucleotide
  Sense strand starting at position 1607 of SEQ ID NO: 1880106
uuaagaagcugcucuugaa

SEQ ID NO: 1942897 - RNA, 19 nt, Artificial Sequence
  Description of Artificial Sequence: Synthetic oligonucleotide
  Antisense strand to SEQ ID NO: 1942896
uucaagagcagcuucuuaa

SEQ ID NO: 1942898 - RNA, 19 nt, Artificial Sequence
  Description of Artificial Sequence: Synthetic oligonucleotide
  Sense strand starting at position 1670 of SEQ ID NO: 1880106
ucugauuaucugcagggua

SEQ ID NO: 1942899 - RNA, 19 nt, Artificial Sequence
  Description of Artificial Sequence: Synthetic oligonucleotide
  Antisense strand to SEQ ID NO: 1942898
uacccugcagauaaucaga

SEQ ID NO: 1942900 - RNA, 19 nt, Artificial Sequence
  Description of Artificial Sequence: Synthetic oligonucleotide
  Sense strand starting at position 1672 of SEQ ID NO: 1880106
ugauuaucugcaggguaug

SEQ ID NO: 1942901 - RNA, 19 nt, Artificial Sequence
  Description of Artificial Sequence: Synthetic oligonucleotide
  Antisense strand to SEQ ID NO: 1942900
cauacccugcagauaauca

SEQ ID NO: 1942902 - RNA, 19 nt, Artificial Sequence
  Description of Artificial Sequence: Synthetic oligonucleotide
  Sense strand starting at position 1686 of SEQ ID NO: 1880106
guauguacauucccuagaa

SEQ ID NO: 1942903 - RNA, 19 nt, Artificial Sequence
  Description of Artificial Sequence: Synthetic oligonucleotide
  Antisense strand to SEQ ID NO: 1942902
uucuagggaauguacauac

SEQ ID NO: 1942904 - RNA, 19 nt, Artificial Sequence
  Description of Artificial Sequence: Synthetic oligonucleotide
  Sense strand starting at position 1777 of SEQ ID NO: 1880106
ccaacucuugguuauggau

SEQ ID NO: 1942905 - RNA, 19 nt, Artificial Sequence
  Description of Artificial Sequence: Synthetic oligonucleotide
  Antisense strand to SEQ ID NO: 1942904
auccauaaccaagaguugg

SEQ ID NO: 1942906 - RNA, 19 nt, Artificial Sequence
  Description of Artificial Sequence: Synthetic oligonucleotide
  Sense strand starting at position 1808 of SEQ ID NO: 1880106
ccuuauucugccgugcuua

SEQ ID NO: 1942907 - RNA, 19 nt, Artificial Sequence
  Description of Artificial Sequence: Synthetic oligonucleotide
  Antisense strand to SEQ ID NO: 1942906
uaagcacggcagaauaagg

SEQ ID NO: 1942908 - RNA, 19 nt, Artificial Sequence
  Description of Artificial Sequence: Synthetic oligonucleotide
  Sense strand starting at position 2008 of SEQ ID NO: 1880106
uaguuauucuaagugaggu

SEQ ID NO: 1942909 - RNA, 19 nt, Artificial Sequence
  Description of Artificial Sequence: Synthetic oligonucleotide
  Antisense strand to SEQ ID NO: 1942908
accucacuuagaauaacua

SEQ ID NO: 1942910 - RNA, 19 nt, Artificial Sequence
  Description of Artificial Sequence: Synthetic oligonucleotide
  Sense strand starting at position 2009 of SEQ ID NO: 1880106
aguuauucuaagugagguc

SEQ ID NO: 1942911 - RNA, 19 nt, Artificial Sequence
  Description of Artificial Sequence: Synthetic oligonucleotide
  Antisense strand to SEQ ID NO: 1942910
gaccucacuuagaauaacu

SEQ ID NO: 1942912 - RNA, 19 nt, Artificial Sequence
  Description of Artificial Sequence: Synthetic oligonucleotide
  Sense strand starting at position 2105 of SEQ ID NO: 1880106
uccucaacuggagguaaua

SEQ ID NO: 1942913 - RNA, 19 nt, Artificial Sequence
  Description of Artificial Sequence: Synthetic oligonucleotide
  Antisense strand to SEQ ID NO: 1942912
uauuaccuccaguugagga

SEQ ID NO: 1942914 - RNA, 19 nt, Artificial Sequence
  Description of Artificial Sequence: Synthetic oligonucleotide
  Sense strand starting at position 2184 of SEQ ID NO: 1880106
uaaauugauggauguuaac

SEQ ID NO: 1942915 - RNA, 19 nt, Artificial Sequence
  Description of Artificial Sequence: Synthetic oligonucleotide
  Antisense strand to SEQ ID NO: 1942914
guuaacauccaucaauuua

SEQ ID NO: 1942916 - RNA, 19 nt, Artificial Sequence
  Description of Artificial Sequence: Synthetic oligonucleotide
  Sense strand starting at position 2297 of SEQ ID NO: 1880106
ccaucagaggcauguuauu

SEQ ID NO: 1942917 - RNA, 19 nt, Artificial Sequence
  Description of Artificial Sequence: Synthetic oligonucleotide
  Antisense strand to SEQ ID NO: 1942916
aauaacaugccucugaugg

SEQ ID NO: 1942918 - RNA, 19 nt, Artificial Sequence
  Description of Artificial Sequence: Synthetic oligonucleotide
  Sense strand starting at position 2302 of SEQ ID NO: 1880106
agaggcauguuauuagaau

SEQ ID NO: 1942919 - RNA, 19 nt, Artificial Sequence
  Description of Artificial Sequence: Synthetic oligonucleotide
  Antisense strand to SEQ ID NO: 1942918
auucuaauaacaugccucu

SEQ ID NO: 1942920 - RNA, 19 nt, Artificial Sequence
  Description of Artificial Sequence: Synthetic oligonucleotide
  Sense strand starting at position 2344 of SEQ ID NO: 1880106
acaucuucuugugucacaa

SEQ ID NO: 1942921 - RNA, 19 nt, Artificial Sequence
  Description of Artificial Sequence: Synthetic oligonucleotide
  Antisense strand to SEQ ID NO: 1942920
uugugacacaagaagaugu

SEQ ID NO: 1942922 - RNA, 19 nt, Artificial Sequence
  Description of Artificial Sequence: Synthetic oligonucleotide
  Sense strand starting at position 2388 of SEQ ID NO: 1880106
uagcuaguucuuuccguuu

SEQ ID NO: 1942923 - RNA, 19 nt, Artificial Sequence
  Description of Artificial Sequence: Synthetic oligonucleotide
  Antisense strand to SEQ ID NO: 1942922
aaacggaaagaacuagcua

SEQ ID NO: 1942924 - RNA, 19 nt, Artificial Sequence
  Description of Artificial Sequence: Synthetic oligonucleotide
  Sense strand starting at position 2566 of SEQ ID NO: 1880106
augccugagaacugaggua

SEQ ID NO: 1942925 - RNA, 19 nt, Artificial Sequence
  Description of Artificial Sequence: Synthetic oligonucleotide
  Antisense strand to SEQ ID NO: 1942924
uaccucaguucucaggcau

SEQ ID NO: 1942926 - RNA, 19 nt, Artificial Sequence
  Description of Artificial Sequence: Synthetic oligonucleotide
  Sense strand starting at position 2672 of SEQ ID NO: 1880106
acuagaaggcuguaguuua

SEQ ID NO: 1942927 - RNA, 19 nt, Artificial Sequence
  Description of Artificial Sequence: Synthetic oligonucleotide
  Antisense strand to SEQ ID NO: 1942926
uaaacuacagccuucuagu

SEQ ID NO: 1942928 - RNA, 19 nt, Artificial Sequence
  Description of Artificial Sequence: Synthetic oligonucleotide
  Sense strand starting at position 2712 of SEQ ID NO: 1880106
gaaagaagccagugcuuga

SEQ ID NO: 1942929 - RNA, 19 nt, Artificial Sequence
  Description of Artificial Sequence: Synthetic oligonucleotide
  Antisense strand to SEQ ID NO: 1942928
ucaagcacuggcuucuuuc

SEQ ID NO: 1942930 - RNA, 19 nt, Artificial Sequence
  Description of Artificial Sequence: Synthetic oligonucleotide
  Sense strand starting at position 2717 of SEQ ID NO: 1880106
aagccagugcuugaacuuu

SEQ ID NO: 1942931 - RNA, 19 nt, Artificial Sequence
  Description of Artificial Sequence: Synthetic oligonucleotide
  Antisense strand to SEQ ID NO: 1942930
aaaguucaagcacuggcuu

SEQ ID NO: 1942932 - RNA, 19 nt, Artificial Sequence
  Description of Artificial Sequence: Synthetic oligonucleotide
  Sense strand starting at position 2811 of SEQ ID NO: 1880106
acaguauccaaagguuagu

SEQ ID NO: 1942933 - RNA, 19 nt, Artificial Sequence
  Description of Artificial Sequence: Synthetic oligonucleotide
  Antisense strand to SEQ ID NO: 1942932
acuaaccuuuggauacugu

SEQ ID NO: 1942934 - RNA, 19 nt, Artificial Sequence
  Description of Artificial Sequence: Synthetic oligonucleotide
  Sense strand starting at position 2814 of SEQ ID NO: 1880106
guauccaaagguuaguuau

SEQ ID NO: 1942935 - RNA, 19 nt, Artificial Sequence
  Description of Artificial Sequence: Synthetic oligonucleotide
  Antisense strand to SEQ ID NO: 1942934
auaacuaaccuuuggauac

SEQ ID NO: 1942936 - RNA, 19 nt, Artificial Sequence
  Description of Artificial Sequence: Synthetic oligonucleotide
  Sense strand starting at position 2817 of SEQ ID NO: 1880106
uccaaagguuaguuauacu

SEQ ID NO: 1942937 - RNA, 19 nt, Artificial Sequence
  Description of Artificial Sequence: Synthetic oligonucleotide
  Antisense strand to SEQ ID NO: 1942936
aguauaacuaaccuuugga

SEQ ID NO: 1942938 - RNA, 19 nt, Artificial Sequence
  Description of Artificial Sequence: Synthetic oligonucleotide
  Sense strand starting at position 2860 of SEQ ID NO: 1880106
cugagaagguucuuauaac

SEQ ID NO: 1942939 - RNA, 19 nt, Artificial Sequence
  Description of Artificial Sequence: Synthetic oligonucleotide
  Antisense strand to SEQ ID NO: 1942938
guuauaagaaccuucucag

SEQ ID NO: 1942940 - RNA, 19 nt, Artificial Sequence
  Description of Artificial Sequence: Synthetic oligonucleotide
  Sense strand starting at position 3474 of SEQ ID NO: 1880106
uugguuguaacagaaguua

SEQ ID NO: 1942941 - RNA, 19 nt, Artificial Sequence
  Description of Artificial Sequence: Synthetic oligonucleotide
  Antisense strand to SEQ ID NO: 1942940
uaacuucuguuacaaccaa

SEQ ID NO: 1942942 - RNA, 19 nt, Artificial Sequence
  Description of Artificial Sequence: Synthetic oligonucleotide
  Sense strand starting at position 3523 of SEQ ID NO: 1880106
aagaguaccucuguggacu

SEQ ID NO: 1942943 - RNA, 19 nt, Artificial Sequence
  Description of Artificial Sequence: Synthetic oligonucleotide
  Antisense strand to SEQ ID NO: 1942942
aguccacagagguacucuu

SEQ ID NO: 1942944 - RNA, 19 nt, Artificial Sequence
  Description of Artificial Sequence: Synthetic oligonucleotide
  Sense strand starting at position 3524 of SEQ ID NO: 1880106
agaguaccucuguggacua

SEQ ID NO: 1942945 - RNA, 19 nt, Artificial Sequence
  Description of Artificial Sequence: Synthetic oligonucleotide
  Antisense strand to SEQ ID NO: 1942944
uaguccacagagguacucu

SEQ ID NO: 1942946 - RNA, 19 nt, Artificial Sequence
  Description of Artificial Sequence: Synthetic oligonucleotide
  Sense strand starting at position 3598 of SEQ ID NO: 1880106
aaagaauagugcuugguau

SEQ ID NO: 1942947 - RNA, 19 nt, Artificial Sequence
  Description of Artificial Sequence: Synthetic oligonucleotide
  Antisense strand to SEQ ID NO: 1942946
auaccaagcacuauucuuu

SEQ ID NO: 1942948 - RNA, 19 nt, Artificial Sequence
  Description of Artificial Sequence: Synthetic oligonucleotide
  Sense strand starting at position 3599 of SEQ ID NO: 1880106
aagaauagugcuugguauc

SEQ ID NO: 1942949 - RNA, 19 nt, Artificial Sequence
  Description of Artificial Sequence: Synthetic oligonucleotide
  Antisense strand to SEQ ID NO: 1942948
gauaccaagcacuauucuu

SEQ ID NO: 1942950 - RNA, 19 nt, Artificial Sequence
  Description of Artificial Sequence: Synthetic oligonucleotide
  Sense strand starting at position 3600 of SEQ ID NO: 1880106
agaauagugcuugguauca

SEQ ID NO: 1942951 - RNA, 19 nt, Artificial Sequence
  Description of Artificial Sequence: Synthetic oligonucleotide
  Antisense strand to SEQ ID NO: 1942950
ugauaccaagcacuauucu

SEQ ID NO: 1942952 - RNA, 19 nt, Artificial Sequence
  Description of Artificial Sequence: Synthetic oligonucleotide
  Sense strand starting at position 3783 of SEQ ID NO: 1880106
uuuccuguagccuagaagu

SEQ ID NO: 1942953 - RNA, 19 nt, Artificial Sequence
  Description of Artificial Sequence: Synthetic oligonucleotide
  Antisense strand to SEQ ID NO: 1942952
acuucuaggcuacaggaaa

SEQ ID NO: 1942954 - RNA, 19 nt, Artificial Sequence
  Description of Artificial Sequence: Synthetic oligonucleotide
  Sense strand starting at position 3785 of SEQ ID NO: 1880106
uccuguagccuagaaguaa

SEQ ID NO: 1942955 - RNA, 19 nt, Artificial Sequence
  Description of Artificial Sequence: Synthetic oligonucleotide
  Antisense strand to SEQ ID NO: 1942954
uuacuucuaggcuacagga

SEQ ID NO: 1942956 - RNA, 19 nt, Artificial Sequence
  Description of Artificial Sequence: Synthetic oligonucleotide
  Sense strand starting at position 355 of SEQ ID NO: 1880107
auugcuuaaggaugaaaug

SEQ ID NO: 1942957 - RNA, 19 nt, Artificial Sequence
  Description of Artificial Sequence: Synthetic oligonucleotide
  Antisense strand to SEQ ID NO: 1942956
cauuucauccuuaagcaau

SEQ ID NO: 1942958 - RNA, 19 nt, Artificial Sequence
  Description of Artificial Sequence: Synthetic oligonucleotide
  Sense strand starting at position 418 of SEQ ID NO: 1880107
uuaauaucaugcuuaagag

SEQ ID NO: 1942959 - RNA, 19 nt, Artificial Sequence
  Description of Artificial Sequence: Synthetic oligonucleotide
  Antisense strand to SEQ ID NO: 1942958
cucuuaagcaugauauuaa

SEQ ID NO: 1942960 - RNA, 19 nt, Artificial Sequence
  Description of Artificial Sequence: Synthetic oligonucleotide
  Sense strand starting at position 569 of SEQ ID NO: 1880107
guauguccucuuuaaaguu

SEQ ID NO: 1942961 - RNA, 19 nt, Artificial Sequence
  Description of Artificial Sequence: Synthetic oligonucleotide
  Antisense strand to SEQ ID NO: 1942960
aacuuuaaagaggacauac

SEQ ID NO: 1942962 - RNA, 19 nt, Artificial Sequence
  Description of Artificial Sequence: Synthetic oligonucleotide
  Sense strand starting at position 604 of SEQ ID NO: 1880107
ucacauauugauggugaua

SEQ ID NO: 1942963 - RNA, 19 nt, Artificial Sequence
  Description of Artificial Sequence: Synthetic oligonucleotide
  Antisense strand to SEQ ID NO: 1942962
uaucaccaucaauauguga

SEQ ID NO: 1942964 - RNA, 19 nt, Artificial Sequence
  Description of Artificial Sequence: Synthetic oligonucleotide
  Sense strand starting at position 1220 of SEQ ID NO: 1880107
caggguauccuagagcacu

SEQ ID NO: 1942965 - RNA, 19 nt, Artificial Sequence
  Description of Artificial Sequence: Synthetic oligonucleotide
  Antisense strand to SEQ ID NO: 1942964
agugcucuaggauacccug

SEQ ID NO: 1942966 - RNA, 19 nt, Artificial Sequence
  Description of Artificial Sequence: Synthetic oligonucleotide
  Sense strand starting at position 1271 of SEQ ID NO: 1880107
ugaugcauuugggaacuau

SEQ ID NO: 1942967 - RNA, 19 nt, Artificial Sequence
  Description of Artificial Sequence: Synthetic oligonucleotide
  Antisense strand to SEQ ID NO: 1942966
auaguucccaaaugcauca

SEQ ID NO: 1942968 - RNA, 19 nt, Artificial Sequence
  Description of Artificial Sequence: Synthetic oligonucleotide
  Sense strand starting at position 1280 of SEQ ID NO: 1880107
ugggaacuaucagaauaga

SEQ ID NO: 1942969 - RNA, 19 nt, Artificial Sequence
  Description of Artificial Sequence: Synthetic oligonucleotide
  Antisense strand to SEQ ID NO: 1942968
ucuauucugauaguuccca

SEQ ID NO: 1942970 - RNA, 19 nt, Artificial Sequence
  Description of Artificial Sequence: Synthetic oligonucleotide
  Sense strand starting at position 1312 of SEQ ID NO: 1880107
ugaauuccauuguuuaaug

SEQ ID NO: 1942971 - RNA, 19 nt, Artificial Sequence
  Description of Artificial Sequence: Synthetic oligonucleotide
  Antisense strand to SEQ ID NO: 1942970
cauuaaacaauggaauuca

SEQ ID NO: 1942972 - RNA, 19 nt, Artificial Sequence
  Description of Artificial Sequence: Synthetic oligonucleotide
  Sense strand starting at position 1574 of SEQ ID NO: 1880107
acagaccuuugagaggaaa

SEQ ID NO: 1942973 - RNA, 19 nt, Artificial Sequence
  Description of Artificial Sequence: Synthetic oligonucleotide
  Antisense strand to SEQ ID NO: 1942972
uuuccucucaaaggucugu

SEQ ID NO: 1942974 - RNA, 19 nt, Artificial Sequence
  Description of Artificial Sequence: Synthetic oligonucleotide
  Sense strand starting at position 1596 of SEQ ID NO: 1880107
acuuccuugcuuuaagaag

SEQ ID NO: 1942975 - RNA, 19 nt, Artificial Sequence
  Description of Artificial Sequence: Synthetic oligonucleotide
  Antisense strand to SEQ ID NO: 1942974
cuucuuaaagcaaggaagu

SEQ ID NO: 1942976 - RNA, 19 nt, Artificial Sequence
  Description of Artificial Sequence: Synthetic oligonucleotide
  Sense strand starting at position 1607 of SEQ ID NO: 1880107
uuaagaagcugcucuugaa

SEQ ID NO: 1942977 - RNA, 19 nt, Artificial Sequence
  Description of Artificial Sequence: Synthetic oligonucleotide
  Antisense strand to SEQ ID NO: 1942976
uucaagagcagcuucuuaa

SEQ ID NO: 1942978 - RNA, 19 nt, Artificial Sequence
  Description of Artificial Sequence: Synthetic oligonucleotide
  Sense strand starting at position 1670 of SEQ ID NO: 1880107
ucugauuaucugcagggua

SEQ ID NO: 1942979 - RNA, 19 nt, Artificial Sequence
  Description of Artificial Sequence: Synthetic oligonucleotide
  Antisense strand to SEQ ID NO: 1942978
uacccugcagauaaucaga

SEQ ID NO: 1942980 - RNA, 19 nt, Artificial Sequence
  Description of Artificial Sequence: Synthetic oligonucleotide
  Sense strand starting at position 1672 of SEQ ID NO: 1880107
ugauuaucugcaggguaug

SEQ ID NO: 1942981 - RNA, 19 nt, Artificial Sequence
  Description of Artificial Sequence: Synthetic oligonucleotide
  Antisense strand to SEQ ID NO: 1942980
cauacccugcagauaauca

SEQ ID NO: 1942982 - RNA, 19 nt, Artificial Sequence
  Description of Artificial Sequence: Synthetic oligonucleotide
  Sense strand starting at position 1686 of SEQ ID NO: 1880107
guauguacauucccuagaa

SEQ ID NO: 1942983 - RNA, 19 nt, Artificial Sequence
  Description of Artificial Sequence: Synthetic oligonucleotide
  Antisense strand to SEQ ID NO: 1942982
uucuagggaauguacauac

SEQ ID NO: 1942984 - RNA, 19 nt, Artificial Sequence
  Description of Artificial Sequence: Synthetic oligonucleotide
  Sense strand starting at position 1777 of SEQ ID NO: 1880107
ccaacucuugguuauggau

SEQ ID NO: 1942985 - RNA, 19 nt, Artificial Sequence
  Description of Artificial Sequence: Synthetic oligonucleotide
  Antisense strand to SEQ ID NO: 1942984
auccauaaccaagaguugg

SEQ ID NO: 1942986 - RNA, 19 nt, Artificial Sequence
  Description of Artificial Sequence: Synthetic oligonucleotide
  Sense strand starting at position 1808 of SEQ ID NO: 1880107
ccuuauucugccgugcuua

SEQ ID NO: 1942987 - RNA, 19 nt, Artificial Sequence
  Description of Artificial Sequence: Synthetic oligonucleotide
  Antisense strand to SEQ ID NO: 1942986
uaagcacggcagaauaagg

SEQ ID NO: 1942988 - RNA, 19 nt, Artificial Sequence
  Description of Artificial Sequence: Synthetic oligonucleotide
  Sense strand starting at position 2008 of SEQ ID NO: 1880107
uaguuauucuaagugaggu

SEQ ID NO: 1942989 - RNA, 19 nt, Artificial Sequence
  Description of Artificial Sequence: Synthetic oligonucleotide
  Antisense strand to SEQ ID NO: 1942988
accucacuuagaauaacua

SEQ ID NO: 1942990 - RNA, 19 nt, Artificial Sequence
  Description of Artificial Sequence: Synthetic oligonucleotide
  Sense strand starting at position 2009 of SEQ ID NO: 1880107
aguuauucuaagugagguc

SEQ ID NO: 1942991 - RNA, 19 nt, Artificial Sequence
  Description of Artificial Sequence: Synthetic oligonucleotide
  Antisense strand to SEQ ID NO: 1942990
gaccucacuuagaauaacu

SEQ ID NO: 1942992 - RNA, 19 nt, Artificial Sequence
  Description of Artificial Sequence: Synthetic oligonucleotide
  Sense strand starting at position 2105 of SEQ ID NO: 1880107
uccucaacuggagguaaua

SEQ ID NO: 1942993 - RNA, 19 nt, Artificial Sequence
  Description of Artificial Sequence: Synthetic oligonucleotide
  Antisense strand to SEQ ID NO: 1942992
uauuaccuccaguugagga

SEQ ID NO: 1942994 - RNA, 19 nt, Artificial Sequence
  Description of Artificial Sequence: Synthetic oligonucleotide
  Sense strand starting at position 2184 of SEQ ID NO: 1880107
uaaauugauggauguuaac

SEQ ID NO: 1942995 - RNA, 19 nt, Artificial Sequence
  Description of Artificial Sequence: Synthetic oligonucleotide
  Antisense strand to SEQ ID NO: 1942994
guuaacauccaucaauuua

SEQ ID NO: 1942996 - RNA, 19 nt, Artificial Sequence
  Description of Artificial Sequence: Synthetic oligonucleotide
  Sense strand starting at position 2297 of SEQ ID NO: 1880107
ccaucagaggcauguuauu

SEQ ID NO: 1942997 - RNA, 19 nt, Artificial Sequence
  Description of Artificial Sequence: Synthetic oligonucleotide
  Antisense strand to SEQ ID NO: 1942996
aauaacaugccucugaugg

SEQ ID NO: 1942998 - RNA, 19 nt, Artificial Sequence
  Description of Artificial Sequence: Synthetic oligonucleotide
  Sense strand starting at position 2302 of SEQ ID NO: 1880107
agaggcauguuauuagaau

SEQ ID NO: 1942999 - RNA, 19 nt, Artificial Sequence
  Description of Artificial Sequence: Synthetic oligonucleotide
  Antisense strand to SEQ ID NO: 1942998
auucuaauaacaugccucu

SEQ ID NO: 1943000 - RNA, 19 nt, Artificial Sequence
  Description of Artificial Sequence: Synthetic oligonucleotide
  Sense strand starting at position 2344 of SEQ ID NO: 1880107
acaucuucuugugucacaa

SEQ ID NO: 1943001 - RNA, 19 nt, Artificial Sequence
  Description of Artificial Sequence: Synthetic oligonucleotide
  Antisense strand to SEQ ID NO: 1943000
uugugacacaagaagaugu

SEQ ID NO: 1943002 - RNA, 19 nt, Artificial Sequence
  Description of Artificial Sequence: Synthetic oligonucleotide
  Sense strand starting at position 2388 of SEQ ID NO: 1880107
uagcuaguucuuuccguuu

SEQ ID NO: 1943003 - RNA, 19 nt, Artificial Sequence
  Description of Artificial Sequence: Synthetic oligonucleotide
  Antisense strand to SEQ ID NO: 1943002
aaacggaaagaacuagcua

SEQ ID NO: 1943004 - RNA, 19 nt, Artificial Sequence
  Description of Artificial Sequence: Synthetic oligonucleotide
  Sense strand starting at position 2566 of SEQ ID NO: 1880107
augccugagaacugaggua

SEQ ID NO: 1943005 - RNA, 19 nt, Artificial Sequence
  Description of Artificial Sequence: Synthetic oligonucleotide
  Antisense strand to SEQ ID NO: 1943004
uaccucaguucucaggcau

SEQ ID NO: 1943006 - RNA, 19 nt, Artificial Sequence
  Description of Artificial Sequence: Synthetic oligonucleotide
  Sense strand starting at position 2672 of SEQ ID NO: 1880107
acuagaaggcuguaguuua

SEQ ID NO: 1943007 - RNA, 19 nt, Artificial Sequence
  Description of Artificial Sequence: Synthetic oligonucleotide
  Antisense strand to SEQ ID NO: 1943006
uaaacuacagccuucuagu

SEQ ID NO: 1943008 - RNA, 19 nt, Artificial Sequence
  Description of Artificial Sequence: Synthetic oligonucleotide
  Sense strand starting at position 2712 of SEQ ID NO: 1880107
gaaagaagccagugcuuga

SEQ ID NO: 1943009 - RNA, 19 nt, Artificial Sequence
  Description of Artificial Sequence: Synthetic oligonucleotide
  Antisense strand to SEQ ID NO: 1943008
ucaagcacuggcuucuuuc

SEQ ID NO: 1943010 - RNA, 19 nt, Artificial Sequence
  Description of Artificial Sequence: Synthetic oligonucleotide
  Sense strand starting at position 2717 of SEQ ID NO: 1880107
aagccagugcuugaacuuu

SEQ ID NO: 1943011 - RNA, 19 nt, Artificial Sequence
  Description of Artificial Sequence: Synthetic oligonucleotide
  Antisense strand to SEQ ID NO: 1943010
aaaguucaagcacuggcuu

SEQ ID NO: 1943012 - RNA, 19 nt, Artificial Sequence
  Description of Artificial Sequence: Synthetic oligonucleotide
  Sense strand starting at position 2811 of SEQ ID NO: 1880107
acaguauccaaagguuagu

SEQ ID NO: 1943013 - RNA, 19 nt, Artificial Sequence
  Description of Artificial Sequence: Synthetic oligonucleotide
  Antisense strand to SEQ ID NO: 1943012
acuaaccuuuggauacugu

SEQ ID NO: 1943014 - RNA, 19 nt, Artificial Sequence
  Description of Artificial Sequence: Synthetic oligonucleotide
  Sense strand starting at position 2814 of SEQ ID NO: 1880107
guauccaaagguuaguuau

SEQ ID NO: 1943015 - RNA, 19 nt, Artificial Sequence
  Description of Artificial Sequence: Synthetic oligonucleotide
  Antisense strand to SEQ ID NO: 1943014
auaacuaaccuuuggauac

SEQ ID NO: 1943016 - RNA, 19 nt, Artificial Sequence
  Description of Artificial Sequence: Synthetic oligonucleotide
  Sense strand starting at position 2817 of SEQ ID NO: 1880107
uccaaagguuaguuauacu

SEQ ID NO: 1943017 - RNA, 19 nt, Artificial Sequence
  Description of Artificial Sequence: Synthetic oligonucleotide
  Antisense strand to SEQ ID NO: 1943016
aguauaacuaaccuuugga

SEQ ID NO: 1943018 - RNA, 19 nt, Artificial Sequence
  Description of Artificial Sequence: Synthetic oligonucleotide
  Sense strand starting at position 2860 of SEQ ID NO: 1880107
cugagaagguucuuauaac

SEQ ID NO: 1943019 - RNA, 19 nt, Artificial Sequence
  Description of Artificial Sequence: Synthetic oligonucleotide
  Antisense strand to SEQ ID NO: 1943018
guuauaagaaccuucucag

SEQ ID NO: 1943020 - RNA, 19 nt, Artificial Sequence
  Description of Artificial Sequence: Synthetic oligonucleotide
  Sense strand starting at position 3474 of SEQ ID NO: 1880107
uugguuguaacagaaguua

SEQ ID NO: 1943021 - RNA, 19 nt, Artificial Sequence
  Description of Artificial Sequence: Synthetic oligonucleotide
  Antisense strand to SEQ ID NO: 1943020
uaacuucuguuacaaccaa

SEQ ID NO: 1943022 - RNA, 19 nt, Artificial Sequence
  Description of Artificial Sequence: Synthetic oligonucleotide
  Sense strand starting at position 3523 of SEQ ID NO: 1880107
aagaguaccucuguggacu

SEQ ID NO: 1943023 - RNA, 19 nt, Artificial Sequence
  Description of Artificial Sequence: Synthetic oligonucleotide
  Antisense strand to SEQ ID NO: 1943022
aguccacagagguacucuu

SEQ ID NO: 1943024 - RNA, 19 nt, Artificial Sequence
  Description of Artificial Sequence: Synthetic oligonucleotide
  Sense strand starting at position 3524 of SEQ ID NO: 1880107
agaguaccucuguggacua

SEQ ID NO: 1943025 - RNA, 19 nt, Artificial Sequence
  Description of Artificial Sequence: Synthetic oligonucleotide
  Antisense strand to SEQ ID NO: 1943024
uaguccacagagguacucu

SEQ ID NO: 1943026 - RNA, 19 nt, Artificial Sequence
  Description of Artificial Sequence: Synthetic oligonucleotide
  Sense strand starting at position 3598 of SEQ ID NO: 1880107
aaagaauagugcuugguau

SEQ ID NO: 1943027 - RNA, 19 nt, Artificial Sequence
  Description of Artificial Sequence: Synthetic oligonucleotide
  Antisense strand to SEQ ID NO: 1943026
auaccaagcacuauucuuu

SEQ ID NO: 1943028 - RNA, 19 nt, Artificial Sequence
  Description of Artificial Sequence: Synthetic oligonucleotide
  Sense strand starting at position 3599 of SEQ ID NO: 1880107
aagaauagugcuugguauc

SEQ ID NO: 1943029 - RNA, 19 nt, Artificial Sequence
  Description of Artificial Sequence: Synthetic oligonucleotide
  Antisense strand to SEQ ID NO: 1943028
gauaccaagcacuauucuu

SEQ ID NO: 1943030 - RNA, 19 nt, Artificial Sequence
  Description of Artificial Sequence: Synthetic oligonucleotide
  Sense strand starting at position 3600 of SEQ ID NO: 1880107
agaauagugcuugguauca

SEQ ID NO: 1943031 - RNA, 19 nt, Artificial Sequence
  Description of Artificial Sequence: Synthetic oligonucleotide
  Antisense strand to SEQ ID NO: 1943030
ugauaccaagcacuauucu

SEQ ID NO: 1943032 - RNA, 19 nt, Artificial Sequence
  Description of Artificial Sequence: Synthetic oligonucleotide
  Sense strand starting at position 3783 of SEQ ID NO: 1880107
uuuccuguagccuagaagu

SEQ ID NO: 1943033 - RNA, 19 nt, Artificial Sequence
  Description of Artificial Sequence: Synthetic oligonucleotide
  Antisense strand to SEQ ID NO: 1943032
acuucuaggcuacaggaaa

SEQ ID NO: 1943034 - RNA, 19 nt, Artificial Sequence
  Description of Artificial Sequence: Synthetic oligonucleotide
  Sense strand starting at position 3785 of SEQ ID NO: 1880107
uccuguagccuagaaguaa

SEQ ID NO: 1943035 - RNA, 19 nt, Artificial Sequence
  Description of Artificial Sequence: Synthetic oligonucleotide
  Antisense strand to SEQ ID NO: 1943034
uuacuucuaggcuacagga

SEQ ID NO: 1943036 - RNA, 19 nt, Artificial Sequence
  Description of Artificial Sequence: Synthetic oligonucleotide
  Sense strand starting at position 46 of SEQ ID NO: 1880108
uguugucaucucgaggugu

SEQ ID NO: 1943037 - RNA, 19 nt, Artificial Sequence
  Description of Artificial Sequence: Synthetic oligonucleotide
  Antisense strand to SEQ ID NO: 1943036
acaccucgagaugacaaca

SEQ ID NO: 1943038 - RNA, 19 nt, Artificial Sequence
  Description of Artificial Sequence: Synthetic oligonucleotide
  Sense strand starting at position 47 of SEQ ID NO: 1880108
guugucaucucgagguguu

SEQ ID NO: 1943039 - RNA, 19 nt, Artificial Sequence
  Description of Artificial Sequence: Synthetic oligonucleotide
  Antisense strand to SEQ ID NO: 1943038
aacaccucgagaugacaac

SEQ ID NO: 1943040 - RNA, 19 nt, Artificial Sequence
  Description of Artificial Sequence: Synthetic oligonucleotide
  Sense strand starting at position 48 of SEQ ID NO: 1880108
uugucaucucgagguguuc

SEQ ID NO: 1943041 - RNA, 19 nt, Artificial Sequence
  Description of Artificial Sequence: Synthetic oligonucleotide
  Antisense strand to SEQ ID NO: 1943040
gaacaccucgagaugacaa

SEQ ID NO: 1943042 - RNA, 19 nt, Artificial Sequence
  Description of Artificial Sequence: Synthetic oligonucleotide
  Sense strand starting at position 102 of SEQ ID NO: 1880108
uagaauaaguugcagaaga

SEQ ID NO: 1943043 - RNA, 19 nt, Artificial Sequence
  Description of Artificial Sequence: Synthetic oligonucleotide
  Antisense strand to SEQ ID NO: 1943042
ucuucugcaacuuauucua

SEQ ID NO: 1943044 - RNA, 19 nt, Artificial Sequence
  Description of Artificial Sequence: Synthetic oligonucleotide
  Sense strand starting at position 144 of SEQ ID NO: 1880108
ucaggauuaugggaaagua

SEQ ID NO: 1943045 - RNA, 19 nt, Artificial Sequence
  Description of Artificial Sequence: Synthetic oligonucleotide
  Antisense strand to SEQ ID NO: 1943044
uacuuucccauaauccuga

SEQ ID NO: 1943046 - RNA, 19 nt, Artificial Sequence
  Description of Artificial Sequence: Synthetic oligonucleotide
  Sense strand starting at position 156 of SEQ ID NO: 1880108
gaaaguagcucauccugau

SEQ ID NO: 1943047 - RNA, 19 nt, Artificial Sequence
  Description of Artificial Sequence: Synthetic oligonucleotide
  Antisense strand to SEQ ID NO: 1943046
aucaggaugagcuacuuuc

SEQ ID NO: 1943048 - RNA, 19 nt, Artificial Sequence
  Description of Artificial Sequence: Synthetic oligonucleotide
  Sense strand starting at position 160 of SEQ ID NO: 1880108
guagcucauccugaucuca

SEQ ID NO: 1943049 - RNA, 19 nt, Artificial Sequence
  Description of Artificial Sequence: Synthetic oligonucleotide
  Antisense strand to SEQ ID NO: 1943048
ugagaucaggaugagcuac

SEQ ID NO: 1943050 - RNA, 19 nt, Artificial Sequence
  Description of Artificial Sequence: Synthetic oligonucleotide
  Sense strand starting at position 228 of SEQ ID NO: 1880108
ggaggaagucuggguccaa

SEQ ID NO: 1943051 - RNA, 19 nt, Artificial Sequence
  Description of Artificial Sequence: Synthetic oligonucleotide
  Antisense strand to SEQ ID NO: 1943050
uuggacccagacuuccucc

SEQ ID NO: 1943052 - RNA, 19 nt, Artificial Sequence
  Description of Artificial Sequence: Synthetic oligonucleotide
  Sense strand starting at position 229 of SEQ ID NO: 1880108
gaggaagucuggguccaac

SEQ ID NO: 1943053 - RNA, 19 nt, Artificial Sequence
  Description of Artificial Sequence: Synthetic oligonucleotide
  Antisense strand to SEQ ID NO: 1943052
guuggacccagacuuccuc

SEQ ID NO: 1943054 - RNA, 19 nt, Artificial Sequence
  Description of Artificial Sequence: Synthetic oligonucleotide
  Sense strand starting at position 326 of SEQ ID NO: 1880108
cccucaaagugguuuguca

SEQ ID NO: 1943055 - RNA, 19 nt, Artificial Sequence
  Description of Artificial Sequence: Synthetic oligonucleotide
  Antisense strand to SEQ ID NO: 1943054
ugacaaaccacuuugaggg

SEQ ID NO: 1943056 - RNA, 19 nt, Artificial Sequence
  Description of Artificial Sequence: Synthetic oligonucleotide
  Sense strand starting at position 333 of SEQ ID NO: 1880108
agugguuugucagccugga

SEQ ID NO: 1943057 - RNA, 19 nt, Artificial Sequence
  Description of Artificial Sequence: Synthetic oligonucleotide
  Antisense strand to SEQ ID NO: 1943056
uccaggcugacaaaccacu

SEQ ID NO: 1943058 - RNA, 19 nt, Artificial Sequence
  Description of Artificial Sequence: Synthetic oligonucleotide
  Sense strand starting at position 416 of SEQ ID NO: 1880108
auaggugcuuuauaaagau

SEQ ID NO: 1943059 - RNA, 19 nt, Artificial Sequence
  Description of Artificial Sequence: Synthetic oligonucleotide
  Antisense strand to SEQ ID NO: 1943058
aucuuuauaaagcaccuau

SEQ ID NO: 1943060 - RNA, 19 nt, Artificial Sequence
  Description of Artificial Sequence: Synthetic oligonucleotide
  Sense strand starting at position 468 of SEQ ID NO: 1880108
agcucaaucugggaaggua

SEQ ID NO: 1943061 - RNA, 19 nt, Artificial Sequence
  Description of Artificial Sequence: Synthetic oligonucleotide
  Antisense strand to SEQ ID NO: 1943060
uaccuucccagauugagcu

SEQ ID NO: 1943062 - RNA, 19 nt, Artificial Sequence
  Description of Artificial Sequence: Synthetic oligonucleotide
  Sense strand starting at position 601 of SEQ ID NO: 1880108
auacaauguuuaggacaga

SEQ ID NO: 1943063 - RNA, 19 nt, Artificial Sequence
  Description of Artificial Sequence: Synthetic oligonucleotide
  Antisense strand to SEQ ID NO: 1943062
ucuguccuaaacauuguau

SEQ ID NO: 1943064 - RNA, 19 nt, Artificial Sequence
  Description of Artificial Sequence: Synthetic oligonucleotide
  Sense strand starting at position 652 of SEQ ID NO: 1880108
agcagcagcuauuaaacua

SEQ ID NO: 1943065 - RNA, 19 nt, Artificial Sequence
  Description of Artificial Sequence: Synthetic oligonucleotide
  Antisense strand to SEQ ID NO: 1943064
uaguuuaauagcugcugcu

SEQ ID NO: 1943066 - RNA, 19 nt, Artificial Sequence
  Description of Artificial Sequence: Synthetic oligonucleotide
  Sense strand starting at position 3334 of SEQ ID NO: 1880108
ucgcaucaccuagaacuau

SEQ ID NO: 1943067 - RNA, 19 nt, Artificial Sequence
  Description of Artificial Sequence: Synthetic oligonucleotide
  Antisense strand to SEQ ID NO: 1943066
auaguucuaggugaugcga

SEQ ID NO: 1943068 - RNA, 19 nt, Artificial Sequence
  Description of Artificial Sequence: Synthetic oligonucleotide
  Sense strand starting at position 3343 of SEQ ID NO: 1880108
cuagaacuaucugggaaca

SEQ ID NO: 1943069 - RNA, 19 nt, Artificial Sequence
  Description of Artificial Sequence: Synthetic oligonucleotide
  Antisense strand to SEQ ID NO: 1943068
uguucccagauaguucuag

SEQ ID NO: 1943070 - RNA, 19 nt, Artificial Sequence
  Description of Artificial Sequence: Synthetic oligonucleotide
  Sense strand starting at position 3345 of SEQ ID NO: 1880108
agaacuaucugggaacaca

SEQ ID NO: 1943071 - RNA, 19 nt, Artificial Sequence
  Description of Artificial Sequence: Synthetic oligonucleotide
  Antisense strand to SEQ ID NO: 1943070
uguguucccagauaguucu

SEQ ID NO: 1943072 - RNA, 19 nt, Artificial Sequence
  Description of Artificial Sequence: Synthetic oligonucleotide
  Sense strand starting at position 3371 of SEQ ID NO: 1880108
cuuagcacauguguuagaa

SEQ ID NO: 1943073 - RNA, 19 nt, Artificial Sequence
  Description of Artificial Sequence: Synthetic oligonucleotide
  Antisense strand to SEQ ID NO: 1943072
uucuaacacaugugcuaag

SEQ ID NO: 1943074 - RNA, 19 nt, Artificial Sequence
  Description of Artificial Sequence: Synthetic oligonucleotide
  Sense strand starting at position 3373 of SEQ ID NO: 1880108
uagcacauguguuagaaga

SEQ ID NO: 1943075 - RNA, 19 nt, Artificial Sequence
  Description of Artificial Sequence: Synthetic oligonucleotide
  Antisense strand to SEQ ID NO: 1943074
ucuucuaacacaugugcua

SEQ ID NO: 1943076 - RNA, 19 nt, Artificial Sequence
  Description of Artificial Sequence: Synthetic oligonucleotide
  Sense strand starting at position 3375 of SEQ ID NO: 1880108
gcacauguguuagaagaac

SEQ ID NO: 1943077 - RNA, 19 nt, Artificial Sequence
  Description of Artificial Sequence: Synthetic oligonucleotide
  Antisense strand to SEQ ID NO: 1943076
guucuucuaacacaugugc

SEQ ID NO: 1943078 - RNA, 19 nt, Artificial Sequence
  Description of Artificial Sequence: Synthetic oligonucleotide
  Sense strand starting at position 3399 of SEQ ID NO: 1880108
augaauuaaugugcacauu

SEQ ID NO: 1943079 - RNA, 19 nt, Artificial Sequence
  Description of Artificial Sequence: Synthetic oligonucleotide
  Antisense strand to SEQ ID NO: 1943078
aaugugcacauuaauucau

SEQ ID NO: 1943080 - RNA, 19 nt, Artificial Sequence
  Description of Artificial Sequence: Synthetic oligonucleotide
  Sense strand starting at position 3711 of SEQ ID NO: 1880108
ccgcgccugucccaauauu

SEQ ID NO: 1943081 - RNA, 19 nt, Artificial Sequence
  Description of Artificial Sequence: Synthetic oligonucleotide
  Antisense strand to SEQ ID NO: 1943080
aauauugggacaggcgcgg

SEQ ID NO: 1943082 - RNA, 19 nt, Artificial Sequence
  Description of Artificial Sequence: Synthetic oligonucleotide
  Sense strand starting at position 3883 of SEQ ID NO: 1880108
ggcuguuauugauagcgga

SEQ ID NO: 1943083 - RNA, 19 nt, Artificial Sequence
  Description of Artificial Sequence: Synthetic oligonucleotide
  Antisense strand to SEQ ID NO: 1943082
uccgcuaucaauaacagcc

SEQ ID NO: 1943084 - RNA, 19 nt, Artificial Sequence
  Description of Artificial Sequence: Synthetic oligonucleotide
  Sense strand starting at position 3886 of SEQ ID NO: 1880108
uguuauugauagcggaaca

SEQ ID NO: 1943085 - RNA, 19 nt, Artificial Sequence
  Description of Artificial Sequence: Synthetic oligonucleotide
  Antisense strand to SEQ ID NO: 1943084
uguuccgcuaucaauaaca

SEQ ID NO: 1943086 - RNA, 19 nt, Artificial Sequence
  Description of Artificial Sequence: Synthetic oligonucleotide
  Sense strand starting at position 3887 of SEQ ID NO: 1880108
guuauugauagcggaacaa

SEQ ID NO: 1943087 - RNA, 19 nt, Artificial Sequence
  Description of Artificial Sequence: Synthetic oligonucleotide
  Antisense strand to SEQ ID NO: 1943086
uuguuccgcuaucaauaac

SEQ ID NO: 1943088 - RNA, 19 nt, Artificial Sequence
  Description of Artificial Sequence: Synthetic oligonucleotide
  Sense strand starting at position 3904 of SEQ ID NO: 1880108
aagcuaucccaucagguga

SEQ ID NO: 1943089 - RNA, 19 nt, Artificial Sequence
  Description of Artificial Sequence: Synthetic oligonucleotide
  Antisense strand to SEQ ID NO: 1943088
ucaccugaugggauagcuu

SEQ ID NO: 1943090 - RNA, 19 nt, Artificial Sequence
  Description of Artificial Sequence: Synthetic oligonucleotide
  Sense strand starting at position 3944 of SEQ ID NO: 1880108
aagagcaaguuagaucaga

SEQ ID NO: 1943091 - RNA, 19 nt, Artificial Sequence
  Description of Artificial Sequence: Synthetic oligonucleotide
  Antisense strand to SEQ ID NO: 1943090
ucugaucuaacuugcucuu

SEQ ID NO: 1943092 - RNA, 19 nt, Artificial Sequence
  Description of Artificial Sequence: Synthetic oligonucleotide
  Sense strand starting at position 3949 of SEQ ID NO: 1880108
caaguuagaucagaagacu

SEQ ID NO: 1943093 - RNA, 19 nt, Artificial Sequence
  Description of Artificial Sequence: Synthetic oligonucleotide
  Antisense strand to SEQ ID NO: 1943092
agucuucugaucuaacuug

SEQ ID NO: 1943094 - RNA, 19 nt, Artificial Sequence
  Description of Artificial Sequence: Synthetic oligonucleotide
  Sense strand starting at position 355 of SEQ ID NO: 1880109
auugcuuaaggaugaaaug

SEQ ID NO: 1943095 - RNA, 19 nt, Artificial Sequence
  Description of Artificial Sequence: Synthetic oligonucleotide
  Antisense strand to SEQ ID NO: 1943094
cauuucauccuuaagcaau

SEQ ID NO: 1943096 - RNA, 19 nt, Artificial Sequence
  Description of Artificial Sequence: Synthetic oligonucleotide
  Sense strand starting at position 418 of SEQ ID NO: 1880109
uuaauaucaugcuuaagag

SEQ ID NO: 1943097 - RNA, 19 nt, Artificial Sequence
  Description of Artificial Sequence: Synthetic oligonucleotide
  Antisense strand to SEQ ID NO: 1943096
cucuuaagcaugauauuaa

SEQ ID NO: 1943098 - RNA, 19 nt, Artificial Sequence
  Description of Artificial Sequence: Synthetic oligonucleotide
  Sense strand starting at position 569 of SEQ ID NO: 1880109
guauguccucuuuaaaguu

SEQ ID NO: 1943099 - RNA, 19 nt, Artificial Sequence
  Description of Artificial Sequence: Synthetic oligonucleotide
  Antisense strand to SEQ ID NO: 1943098
aacuuuaaagaggacauac

SEQ ID NO: 1943100 - RNA, 19 nt, Artificial Sequence
  Description of Artificial Sequence: Synthetic oligonucleotide
  Sense strand starting at position 604 of SEQ ID NO: 1880109
ucacauauugauggugaua

SEQ ID NO: 1943101 - RNA, 19 nt, Artificial Sequence
  Description of Artificial Sequence: Synthetic oligonucleotide
  Antisense strand to SEQ ID NO: 1943100
uaucaccaucaauauguga

SEQ ID NO: 1943102 - RNA, 19 nt, Artificial Sequence
  Description of Artificial Sequence: Synthetic oligonucleotide
  Sense strand starting at position 1220 of SEQ ID NO: 1880109
caggguauccuagagcacu

SEQ ID NO: 1943103 - RNA, 19 nt, Artificial Sequence
  Description of Artificial Sequence: Synthetic oligonucleotide
  Antisense strand to SEQ ID NO: 1943102
agugcucuaggauacccug

SEQ ID NO: 1943104 - RNA, 19 nt, Artificial Sequence
  Description of Artificial Sequence: Synthetic oligonucleotide
  Sense strand starting at position 1271 of SEQ ID NO: 1880109
ugaugcauuugggaacuau

SEQ ID NO: 1943105 - RNA, 19 nt, Artificial Sequence
  Description of Artificial Sequence: Synthetic oligonucleotide
  Antisense strand to SEQ ID NO: 1943104
auaguucccaaaugcauca

SEQ ID NO: 1943106 - RNA, 19 nt, Artificial Sequence
  Description of Artificial Sequence: Synthetic oligonucleotide
  Sense strand starting at position 1280 of SEQ ID NO: 1880109
ugggaacuaucagaauaga

SEQ ID NO: 1943107 - RNA, 19 nt, Artificial Sequence
  Description of Artificial Sequence: Synthetic oligonucleotide
  Antisense strand to SEQ ID NO: 1943106
ucuauucugauaguuccca

SEQ ID NO: 1943108 - RNA, 19 nt, Artificial Sequence
  Description of Artificial Sequence: Synthetic oligonucleotide
  Sense strand starting at position 1312 of SEQ ID NO: 1880109
ugaauuccauuguuuaaug

SEQ ID NO: 1943109 - RNA, 19 nt, Artificial Sequence
  Description of Artificial Sequence: Synthetic oligonucleotide
  Antisense strand to SEQ ID NO: 1943108
cauuaaacaauggaauuca

SEQ ID NO: 1943110 - RNA, 19 nt, Artificial Sequence
  Description of Artificial Sequence: Synthetic oligonucleotide
  Sense strand starting at position 1574 of SEQ ID NO: 1880109
acagaccuuugagaggaaa

SEQ ID NO: 1943111 - RNA, 19 nt, Artificial Sequence
  Description of Artificial Sequence: Synthetic oligonucleotide
  Antisense strand to SEQ ID NO: 1943110
uuuccucucaaaggucugu

SEQ ID NO: 1943112 - RNA, 19 nt, Artificial Sequence
  Description of Artificial Sequence: Synthetic oligonucleotide
  Sense strand starting at position 1596 of SEQ ID NO: 1880109
acuuccuugcuuuaagaag

SEQ ID NO: 1943113 - RNA, 19 nt, Artificial Sequence
  Description of Artificial Sequence: Synthetic oligonucleotide
  Antisense strand to SEQ ID NO: 1943112
cuucuuaaagcaaggaagu

SEQ ID NO: 1943114 - RNA, 19 nt, Artificial Sequence
  Description of Artificial Sequence: Synthetic oligonucleotide
  Sense strand starting at position 1607 of SEQ ID NO: 1880109
uuaagaagcugcucuugaa

SEQ ID NO: 1943115 - RNA, 19 nt, Artificial Sequence
  Description of Artificial Sequence: Synthetic oligonucleotide
  Antisense strand to SEQ ID NO: 1943114
uucaagagcagcuucuuaa

SEQ ID NO: 1943116 - RNA, 19 nt, Artificial Sequence
  Description of Artificial Sequence: Synthetic oligonucleotide
  Sense strand starting at position 1670 of SEQ ID NO: 1880109
ucugauuaucugcagggua

SEQ ID NO: 1943117 - RNA, 19 nt, Artificial Sequence
  Description of Artificial Sequence: Synthetic oligonucleotide
  Antisense strand to SEQ ID NO: 1943116
uacccugcagauaaucaga

SEQ ID NO: 1943118 - RNA, 19 nt, Artificial Sequence
  Description of Artificial Sequence: Synthetic oligonucleotide
  Sense strand starting at position 1672 of SEQ ID NO: 1880109
ugauuaucugcaggguaug

SEQ ID NO: 1943119 - RNA, 19 nt, Artificial Sequence
  Description of Artificial Sequence: Synthetic oligonucleotide
  Antisense strand to SEQ ID NO: 1943118
cauacccugcagauaauca

SEQ ID NO: 1943120 - RNA, 19 nt, Artificial Sequence
  Description of Artificial Sequence: Synthetic oligonucleotide
  Sense strand starting at position 1686 of SEQ ID NO: 1880109
guauguacauucccuagaa

SEQ ID NO: 1943121 - RNA, 19 nt, Artificial Sequence
  Description of Artificial Sequence: Synthetic oligonucleotide
  Antisense strand to SEQ ID NO: 1943120
uucuagggaauguacauac

SEQ ID NO: 1943122 - RNA, 19 nt, Artificial Sequence
  Description of Artificial Sequence: Synthetic oligonucleotide
  Sense strand starting at position 1777 of SEQ ID NO: 1880109
ccaacucuugguuauggau

SEQ ID NO: 1943123 - RNA, 19 nt, Artificial Sequence
  Description of Artificial Sequence: Synthetic oligonucleotide
  Antisense strand to SEQ ID NO: 1943122
auccauaaccaagaguugg

SEQ ID NO: 1943124 - RNA, 19 nt, Artificial Sequence
  Description of Artificial Sequence: Synthetic oligonucleotide
  Sense strand starting at position 1808 of SEQ ID NO: 1880109
ccuuauucugccgugcuua

SEQ ID NO: 1943125 - RNA, 19 nt, Artificial Sequence
  Description of Artificial Sequence: Synthetic oligonucleotide
  Antisense strand to SEQ ID NO: 1943124
uaagcacggcagaauaagg

SEQ ID NO: 1943126 - RNA, 19 nt, Artificial Sequence
  Description of Artificial Sequence: Synthetic oligonucleotide
  Sense strand starting at position 2008 of SEQ ID NO: 1880109
uaguuauucuaagugaggu

SEQ ID NO: 1943127 - RNA, 19 nt, Artificial Sequence
  Description of Artificial Sequence: Synthetic oligonucleotide
  Antisense strand to SEQ ID NO: 1943126
accucacuuagaauaacua

SEQ ID NO: 1943128 - RNA, 19 nt, Artificial Sequence
  Description of Artificial Sequence: Synthetic oligonucleotide
  Sense strand starting at position 2009 of SEQ ID NO: 1880109
aguuauucuaagugagguc

SEQ ID NO: 1943129 - RNA, 19 nt, Artificial Sequence
  Description of Artificial Sequence: Synthetic oligonucleotide
  Antisense strand to SEQ ID NO: 1943128
gaccucacuuagaauaacu

SEQ ID NO: 1943130 - RNA, 19 nt, Artificial Sequence
  Description of Artificial Sequence: Synthetic oligonucleotide
  Sense strand starting at position 2105 of SEQ ID NO: 1880109
uccucaacuggagguaaua

SEQ ID NO: 1943131 - RNA, 19 nt, Artificial Sequence
  Description of Artificial Sequence: Synthetic oligonucleotide
  Antisense strand to SEQ ID NO: 1943130
uauuaccuccaguugagga

SEQ ID NO: 1943132 - RNA, 19 nt, Artificial Sequence
  Description of Artificial Sequence: Synthetic oligonucleotide
  Sense strand starting at position 2184 of SEQ ID NO: 1880109
uaaauugauggauguuaac

SEQ ID NO: 1943133 - RNA, 19 nt, Artificial Sequence
  Description of Artificial Sequence: Synthetic oligonucleotide
  Antisense strand to SEQ ID NO: 1943132
guuaacauccaucaauuua

SEQ ID NO: 1943134 - RNA, 19 nt, Artificial Sequence
  Description of Artificial Sequence: Synthetic oligonucleotide
  Sense strand starting at position 2297 of SEQ ID NO: 1880109
ccaucagaggcauguuauu

SEQ ID NO: 1943135 - RNA, 19 nt, Artificial Sequence
  Description of Artificial Sequence: Synthetic oligonucleotide
  Antisense strand to SEQ ID NO: 1943134
aauaacaugccucugaugg

SEQ ID NO: 1943136 - RNA, 19 nt, Artificial Sequence
  Description of Artificial Sequence: Synthetic oligonucleotide
  Sense strand starting at position 2302 of SEQ ID NO: 1880109
agaggcauguuauuagaau

SEQ ID NO: 1943137 - RNA, 19 nt, Artificial Sequence
  Description of Artificial Sequence: Synthetic oligonucleotide
  Antisense strand to SEQ ID NO: 1943136
auucuaauaacaugccucu

SEQ ID NO: 1943138 - RNA, 19 nt, Artificial Sequence
  Description of Artificial Sequence: Synthetic oligonucleotide
  Sense strand starting at position 2344 of SEQ ID NO: 1880109
acaucuucuugugucacaa

SEQ ID NO: 1943139 - RNA, 19 nt, Artificial Sequence
  Description of Artificial Sequence: Synthetic oligonucleotide
  Antisense strand to SEQ ID NO: 1943138
uugugacacaagaagaugu

SEQ ID NO: 1943140 - RNA, 19 nt, Artificial Sequence
  Description of Artificial Sequence: Synthetic oligonucleotide
  Sense strand starting at position 2388 of SEQ ID NO: 1880109
uagcuaguucuuuccguuu

SEQ ID NO: 1943141 - RNA, 19 nt, Artificial Sequence
  Description of Artificial Sequence: Synthetic oligonucleotide
  Antisense strand to SEQ ID NO: 1943140
aaacggaaagaacuagcua

SEQ ID NO: 1943142 - RNA, 19 nt, Artificial Sequence
  Description of Artificial Sequence: Synthetic oligonucleotide
  Sense strand starting at position 2566 of SEQ ID NO: 1880109
augccugagaacugaggua

SEQ ID NO: 1943143 - RNA, 19 nt, Artificial Sequence
  Description of Artificial Sequence: Synthetic oligonucleotide
  Antisense strand to SEQ ID NO: 1943142
uaccucaguucucaggcau

SEQ ID NO: 1943144 - RNA, 19 nt, Artificial Sequence
  Description of Artificial Sequence: Synthetic oligonucleotide
  Sense strand starting at position 2672 of SEQ ID NO: 1880109
acuagaaggcuguaguuua

SEQ ID NO: 1943145 - RNA, 19 nt, Artificial Sequence
  Description of Artificial Sequence: Synthetic oligonucleotide
  Antisense strand to SEQ ID NO: 1943144
uaaacuacagccuucuagu

SEQ ID NO: 1943146 - RNA, 19 nt, Artificial Sequence
  Description of Artificial Sequence: Synthetic oligonucleotide
  Sense strand starting at position 2712 of SEQ ID NO: 1880109
gaaagaagccagugcuuga

SEQ ID NO: 1943147 - RNA, 19 nt, Artificial Sequence
  Description of Artificial Sequence: Synthetic oligonucleotide
  Antisense strand to SEQ ID NO: 1943146
ucaagcacuggcuucuuuc

SEQ ID NO: 1943148 - RNA, 19 nt, Artificial Sequence
  Description of Artificial Sequence: Synthetic oligonucleotide
  Sense strand starting at position 2717 of SEQ ID NO: 1880109
aagccagugcuugaacuuu

SEQ ID NO: 1943149 - RNA, 19 nt, Artificial Sequence
  Description of Artificial Sequence: Synthetic oligonucleotide
  Antisense strand to SEQ ID NO: 1943148
aaaguucaagcacuggcuu

SEQ ID NO: 1943150 - RNA, 19 nt, Artificial Sequence
  Description of Artificial Sequence: Synthetic oligonucleotide
  Sense strand starting at position 2811 of SEQ ID NO: 1880109
acaguauccaaagguuagu

SEQ ID NO: 1943151 - RNA, 19 nt, Artificial Sequence
  Description of Artificial Sequence: Synthetic oligonucleotide
  Antisense strand to SEQ ID NO: 1943150
acuaaccuuuggauacugu

SEQ ID NO: 1943152 - RNA, 19 nt, Artificial Sequence
  Description of Artificial Sequence: Synthetic oligonucleotide
  Sense strand starting at position 2814 of SEQ ID NO: 1880109
guauccaaagguuaguuau

SEQ ID NO: 1943153 - RNA, 19 nt, Artificial Sequence
  Description of Artificial Sequence: Synthetic oligonucleotide
  Antisense strand to SEQ ID NO: 1943152
auaacuaaccuuuggauac

SEQ ID NO: 1943154 - RNA, 19 nt, Artificial Sequence
  Description of Artificial Sequence: Synthetic oligonucleotide
  Sense strand starting at position 2817 of SEQ ID NO: 1880109
uccaaagguuaguuauacu

SEQ ID NO: 1943155 - RNA, 19 nt, Artificial Sequence
  Description of Artificial Sequence: Synthetic oligonucleotide
  Antisense strand to SEQ ID NO: 1943154
aguauaacuaaccuuugga

SEQ ID NO: 1943156 - RNA, 19 nt, Artificial Sequence
  Description of Artificial Sequence: Synthetic oligonucleotide
  Sense strand starting at position 2860 of SEQ ID NO: 1880109
cugagaagguucuuauaac

SEQ ID NO: 1943157 - RNA, 19 nt, Artificial Sequence
  Description of Artificial Sequence: Synthetic oligonucleotide
  Antisense strand to SEQ ID NO: 1943156
guuauaagaaccuucucag

SEQ ID NO: 1943158 - RNA, 19 nt, Artificial Sequence
  Description of Artificial Sequence: Synthetic oligonucleotide
  Sense strand starting at position 3474 of SEQ ID NO: 1880109
uugguuguaacagaaguua

SEQ ID NO: 1943159 - RNA, 19 nt, Artificial Sequence
  Description of Artificial Sequence: Synthetic oligonucleotide
  Antisense strand to SEQ ID NO: 1943158
uaacuucuguuacaaccaa

SEQ ID NO: 1943160 - RNA, 19 nt, Artificial Sequence
  Description of Artificial Sequence: Synthetic oligonucleotide
  Sense strand starting at position 3523 of SEQ ID NO: 1880109
aagaguaccucuguggacu

SEQ ID NO: 1943161 - RNA, 19 nt, Artificial Sequence
  Description of Artificial Sequence: Synthetic oligonucleotide
  Antisense strand to SEQ ID NO: 1943160
aguccacagagguacucuu

SEQ ID NO: 1943162 - RNA, 19 nt, Artificial Sequence
  Description of Artificial Sequence: Synthetic oligonucleotide
  Sense strand starting at position 3524 of SEQ ID NO: 1880109
agaguaccucuguggacua

SEQ ID NO: 1943163 - RNA, 19 nt, Artificial Sequence
  Description of Artificial Sequence: Synthetic oligonucleotide
  Antisense strand to SEQ ID NO: 1943162
uaguccacagagguacucu

SEQ ID NO: 1943164 - RNA, 19 nt, Artificial Sequence
  Description of Artificial Sequence: Synthetic oligonucleotide
  Sense strand starting at position 3598 of SEQ ID NO: 1880109
aaagaauagugcuugguau

SEQ ID NO: 1943165 - RNA, 19 nt, Artificial Sequence
  Description of Artificial Sequence: Synthetic oligonucleotide
  Antisense strand to SEQ ID NO: 1943164
auaccaagcacuauucuuu

SEQ ID NO: 1943166 - RNA, 19 nt, Artificial Sequence
  Description of Artificial Sequence: Synthetic oligonucleotide
  Sense strand starting at position 3599 of SEQ ID NO: 1880109
aagaauagugcuugguauc

SEQ ID NO: 1943167 - RNA, 19 nt, Artificial Sequence
  Description of Artificial Sequence: Synthetic oligonucleotide
  Antisense strand to SEQ ID NO: 1943166
gauaccaagcacuauucuu

SEQ ID NO: 1943168 - RNA, 19 nt, Artificial Sequence
  Description of Artificial Sequence: Synthetic oligonucleotide
  Sense strand starting at position 3600 of SEQ ID NO: 1880109
agaauagugcuugguauca

SEQ ID NO: 1943169 - RNA, 19 nt, Artificial Sequence
  Description of Artificial Sequence: Synthetic oligonucleotide
  Antisense strand to SEQ ID NO: 1943168
ugauaccaagcacuauucu

SEQ ID NO: 1943170 - RNA, 19 nt, Artificial Sequence
  Description of Artificial Sequence: Synthetic oligonucleotide
  Sense strand starting at position 3783 of SEQ ID NO: 1880109
uuuccuguagccuagaagu

SEQ ID NO: 1943171 - RNA, 19 nt, Artificial Sequence
  Description of Artificial Sequence: Synthetic oligonucleotide
  Antisense strand to SEQ ID NO: 1943170
acuucuaggcuacaggaaa

SEQ ID NO: 1943172 - RNA, 19 nt, Artificial Sequence
  Description of Artificial Sequence: Synthetic oligonucleotide
  Sense strand starting at position 3785 of SEQ ID NO: 1880109
uccuguagccuagaaguaa

SEQ ID NO: 1943173 - RNA, 19 nt, Artificial Sequence
  Description of Artificial Sequence: Synthetic oligonucleotide
  Antisense strand to SEQ ID NO: 1943172
uuacuucuaggcuacagga

SEQ ID NO: 1943174 - RNA, 19 nt, Artificial Sequence
  Description of Artificial Sequence: Synthetic oligonucleotide
  Sense strand starting at position 355 of SEQ ID NO: 1880110
auugcuuaaggaugaaaug

SEQ ID NO: 1943175 - RNA, 19 nt, Artificial Sequence
  Description of Artificial Sequence: Synthetic oligonucleotide
  Antisense strand to SEQ ID NO: 1943174
cauuucauccuuaagcaau

SEQ ID NO: 1943176 - RNA, 19 nt, Artificial Sequence
  Description of Artificial Sequence: Synthetic oligonucleotide
  Sense strand starting at position 418 of SEQ ID NO: 1880110
uuaauaucaugcuuaagag

SEQ ID NO: 1943177 - RNA, 19 nt, Artificial Sequence
  Description of Artificial Sequence: Synthetic oligonucleotide
  Antisense strand to SEQ ID NO: 1943176
cucuuaagcaugauauuaa

SEQ ID NO: 1943178 - RNA, 19 nt, Artificial Sequence
  Description of Artificial Sequence: Synthetic oligonucleotide
  Sense strand starting at position 569 of SEQ ID NO: 1880110
guauguccucuuuaaaguu

SEQ ID NO: 1943179 - RNA, 19 nt, Artificial Sequence
  Description of Artificial Sequence: Synthetic oligonucleotide
  Antisense strand to SEQ ID NO: 1943178
aacuuuaaagaggacauac

SEQ ID NO: 1943180 - RNA, 19 nt, Artificial Sequence
  Description of Artificial Sequence: Synthetic oligonucleotide
  Sense strand starting at position 604 of SEQ ID NO: 1880110
ucacauauugauggugaua

SEQ ID NO: 1943181 - RNA, 19 nt, Artificial Sequence
  Description of Artificial Sequence: Synthetic oligonucleotide
  Antisense strand to SEQ ID NO: 1943180
uaucaccaucaauauguga

SEQ ID NO: 1943182 - RNA, 19 nt, Artificial Sequence
  Description of Artificial Sequence: Synthetic oligonucleotide
  Sense strand starting at position 1220 of SEQ ID NO: 1880110
caggguauccuagagcacu

SEQ ID NO: 1943183 - RNA, 19 nt, Artificial Sequence
  Description of Artificial Sequence: Synthetic oligonucleotide
  Antisense strand to SEQ ID NO: 1943182
agugcucuaggauacccug

SEQ ID NO: 1943184 - RNA, 19 nt, Artificial Sequence
  Description of Artificial Sequence: Synthetic oligonucleotide
  Sense strand starting at position 1271 of SEQ ID NO: 1880110
ugaugcauuugggaacuau

SEQ ID NO: 1943185 - RNA, 19 nt, Artificial Sequence
  Description of Artificial Sequence: Synthetic oligonucleotide
  Antisense strand to SEQ ID NO: 1943184
auaguucccaaaugcauca

SEQ ID NO: 1943186 - RNA, 19 nt, Artificial Sequence
  Description of Artificial Sequence: Synthetic oligonucleotide
  Sense strand starting at position 1280 of SEQ ID NO: 1880110
ugggaacuaucagaauaga

SEQ ID NO: 1943187 - RNA, 19 nt, Artificial Sequence
  Description of Artificial Sequence: Synthetic oligonucleotide
  Antisense strand to SEQ ID NO: 1943186
ucuauucugauaguuccca

SEQ ID NO: 1943188 - RNA, 19 nt, Artificial Sequence
  Description of Artificial Sequence: Synthetic oligonucleotide
  Sense strand starting at position 1312 of SEQ ID NO: 1880110
ugaauuccauuguuuaaug

SEQ ID NO: 1943189 - RNA, 19 nt, Artificial Sequence
  Description of Artificial Sequence: Synthetic oligonucleotide
  Antisense strand to SEQ ID NO: 1943188
cauuaaacaauggaauuca

SEQ ID NO: 1943190 - RNA, 19 nt, Artificial Sequence
  Description of Artificial Sequence: Synthetic oligonucleotide
  Sense strand starting at position 1574 of SEQ ID NO: 1880110
acagaccuuugagaggaaa

SEQ ID NO: 1943191 - RNA, 19 nt, Artificial Sequence
  Description of Artificial Sequence: Synthetic oligonucleotide
  Antisense strand to SEQ ID NO: 1943190
uuuccucucaaaggucugu

SEQ ID NO: 1943192 - RNA, 19 nt, Artificial Sequence
  Description of Artificial Sequence: Synthetic oligonucleotide
  Sense strand starting at position 1596 of SEQ ID NO: 1880110
acuuccuugcuuuaagaag

SEQ ID NO: 1943193 - RNA, 19 nt, Artificial Sequence
  Description of Artificial Sequence: Synthetic oligonucleotide
  Antisense strand to SEQ ID NO: 1943192
cuucuuaaagcaaggaagu

SEQ ID NO: 1943194 - RNA, 19 nt, Artificial Sequence
  Description of Artificial Sequence: Synthetic oligonucleotide
  Sense strand starting at position 1607 of SEQ ID NO: 1880110
uuaagaagcugcucuugaa

SEQ ID NO: 1943195 - RNA, 19 nt, Artificial Sequence
  Description of Artificial Sequence: Synthetic oligonucleotide
  Antisense strand to SEQ ID NO: 1943194
uucaagagcagcuucuuaa

SEQ ID NO: 1943196 - RNA, 19 nt, Artificial Sequence
  Description of Artificial Sequence: Synthetic oligonucleotide
  Sense strand starting at position 1670 of SEQ ID NO: 1880110
ucugauuaucugcagggua

SEQ ID NO: 1943197 - RNA, 19 nt, Artificial Sequence
  Description of Artificial Sequence: Synthetic oligonucleotide
  Antisense strand to SEQ ID NO: 1943196
uacccugcagauaaucaga

SEQ ID NO: 1943198 - RNA, 19 nt, Artificial Sequence
  Description of Artificial Sequence: Synthetic oligonucleotide
  Sense strand starting at position 1672 of SEQ ID NO: 1880110
ugauuaucugcaggguaug

SEQ ID NO: 1943199 - RNA, 19 nt, Artificial Sequence
  Description of Artificial Sequence: Synthetic oligonucleotide
  Antisense strand to SEQ ID NO: 1943198
cauacccugcagauaauca

SEQ ID NO: 1943200 - RNA, 19 nt, Artificial Sequence
  Description of Artificial Sequence: Synthetic oligonucleotide
  Sense strand starting at position 1686 of SEQ ID NO: 1880110
guauguacauucccuagaa

SEQ ID NO: 1943201 - RNA, 19 nt, Artificial Sequence
  Description of Artificial Sequence: Synthetic oligonucleotide
  Antisense strand to SEQ ID NO: 1943200
uucuagggaauguacauac

SEQ ID NO: 1943202 - RNA, 19 nt, Artificial Sequence
  Description of Artificial Sequence: Synthetic oligonucleotide
  Sense strand starting at position 1777 of SEQ ID NO: 1880110
ccaacucuugguuauggau

SEQ ID NO: 1943203 - RNA, 19 nt, Artificial Sequence
  Description of Artificial Sequence: Synthetic oligonucleotide
  Antisense strand to SEQ ID NO: 1943202
auccauaaccaagaguugg

SEQ ID NO: 1943204 - RNA, 19 nt, Artificial Sequence
  Description of Artificial Sequence: Synthetic oligonucleotide
  Sense strand starting at position 1808 of SEQ ID NO: 1880110
ccuuauucugccgugcuua

SEQ ID NO: 1943205 - RNA, 19 nt, Artificial Sequence
  Description of Artificial Sequence: Synthetic oligonucleotide
  Antisense strand to SEQ ID NO: 1943204
uaagcacggcagaauaagg

SEQ ID NO: 1943206 - RNA, 19 nt, Artificial Sequence
  Description of Artificial Sequence: Synthetic oligonucleotide
  Sense strand starting at position 2008 of SEQ ID NO: 1880110
uaguuauucuaagugaggu

SEQ ID NO: 1943207 - RNA, 19 nt, Artificial Sequence
  Description of Artificial Sequence: Synthetic oligonucleotide
  Antisense strand to SEQ ID NO: 1943206
accucacuuagaauaacua

SEQ ID NO: 1943208 - RNA, 19 nt, Artificial Sequence
  Description of Artificial Sequence: Synthetic oligonucleotide
  Sense strand starting at position 2009 of SEQ ID NO: 1880110
aguuauucuaagugagguc

SEQ ID NO: 1943209 - RNA, 19 nt, Artificial Sequence
  Description of Artificial Sequence: Synthetic oligonucleotide
  Antisense strand to SEQ ID NO: 1943208
gaccucacuuagaauaacu

SEQ ID NO: 1943210 - RNA, 19 nt, Artificial Sequence
  Description of Artificial Sequence: Synthetic oligonucleotide
  Sense strand starting at position 2105 of SEQ ID NO: 1880110
uccucaacuggagguaaua

SEQ ID NO: 1943211 - RNA, 19 nt, Artificial Sequence
  Description of Artificial Sequence: Synthetic oligonucleotide
  Antisense strand to SEQ ID NO: 1943210
uauuaccuccaguugagga

SEQ ID NO: 1943212 - RNA, 19 nt, Artificial Sequence
  Description of Artificial Sequence: Synthetic oligonucleotide
  Sense strand starting at position 2184 of SEQ ID NO: 1880110
uaaauugauggauguuaac

SEQ ID NO: 1943213 - RNA, 19 nt, Artificial Sequence
  Description of Artificial Sequence: Synthetic oligonucleotide
  Antisense strand to SEQ ID NO: 1943212
guuaacauccaucaauuua

SEQ ID NO: 1943214 - RNA, 19 nt, Artificial Sequence
  Description of Artificial Sequence: Synthetic oligonucleotide
  Sense strand starting at position 2297 of SEQ ID NO: 1880110
ccaucagaggcauguuauu

SEQ ID NO: 1943215 - RNA, 19 nt, Artificial Sequence
  Description of Artificial Sequence: Synthetic oligonucleotide
  Antisense strand to SEQ ID NO: 1943214
aauaacaugccucugaugg

SEQ ID NO: 1943216 - RNA, 19 nt, Artificial Sequence
  Description of Artificial Sequence: Synthetic oligonucleotide
  Sense strand starting at position 2302 of SEQ ID NO: 1880110
agaggcauguuauuagaau

SEQ ID NO: 1943217 - RNA, 19 nt, Artificial Sequence
  Description of Artificial Sequence: Synthetic oligonucleotide
  Antisense strand to SEQ ID NO: 1943216
auucuaauaacaugccucu

SEQ ID NO: 1943218 - RNA, 19 nt, Artificial Sequence
  Description of Artificial Sequence: Synthetic oligonucleotide
  Sense strand starting at position 2344 of SEQ ID NO: 1880110
acaucuucuugugucacaa

SEQ ID NO: 1943219 - RNA, 19 nt, Artificial Sequence
  Description of Artificial Sequence: Synthetic oligonucleotide
  Antisense strand to SEQ ID NO: 1943218
uugugacacaagaagaugu

SEQ ID NO: 1943220 - RNA, 19 nt, Artificial Sequence
  Description of Artificial Sequence: Synthetic oligonucleotide
  Sense strand starting at position 2388 of SEQ ID NO: 1880110
uagcuaguucuuuccguuu

SEQ ID NO: 1943221 - RNA, 19 nt, Artificial Sequence
  Description of Artificial Sequence: Synthetic oligonucleotide
  Antisense strand to SEQ ID NO: 1943220
aaacggaaagaacuagcua

SEQ ID NO: 1943222 - RNA, 19 nt, Artificial Sequence
  Description of Artificial Sequence: Synthetic oligonucleotide
  Sense strand starting at position 2566 of SEQ ID NO: 1880110
augccugagaacugaggua

SEQ ID NO: 1943223 - RNA, 19 nt, Artificial Sequence
  Description of Artificial Sequence: Synthetic oligonucleotide
  Antisense strand to SEQ ID NO: 1943222
uaccucaguucucaggcau

SEQ ID NO: 1943224 - RNA, 19 nt, Artificial Sequence
  Description of Artificial Sequence: Synthetic oligonucleotide
  Sense strand starting at position 2672 of SEQ ID NO: 1880110
acuagaaggcuguaguuua

SEQ ID NO: 1943225 - RNA, 19 nt, Artificial Sequence
  Description of Artificial Sequence: Synthetic oligonucleotide
  Antisense strand to SEQ ID NO: 1943224
uaaacuacagccuucuagu

SEQ ID NO: 1943226 - RNA, 19 nt, Artificial Sequence
  Description of Artificial Sequence: Synthetic oligonucleotide
  Sense strand starting at position 2712 of SEQ ID NO: 1880110
gaaagaagccagugcuuga

SEQ ID NO: 1943227 - RNA, 19 nt, Artificial Sequence
  Description of Artificial Sequence: Synthetic oligonucleotide
  Antisense strand to SEQ ID NO: 1943226
ucaagcacuggcuucuuuc

SEQ ID NO: 1943228 - RNA, 19 nt, Artificial Sequence
  Description of Artificial Sequence: Synthetic oligonucleotide
  Sense strand starting at position 2717 of SEQ ID NO: 1880110
aagccagugcuugaacuuu

SEQ ID NO: 1943229 - RNA, 19 nt, Artificial Sequence
  Description of Artificial Sequence: Synthetic oligonucleotide
  Antisense strand to SEQ ID NO: 1943228
aaaguucaagcacuggcuu

SEQ ID NO: 1943230 - RNA, 19 nt, Artificial Sequence
  Description of Artificial Sequence: Synthetic oligonucleotide
  Sense strand starting at position 2811 of SEQ ID NO: 1880110
acaguauccaaagguuagu

SEQ ID NO: 1943231 - RNA, 19 nt, Artificial Sequence
  Description of Artificial Sequence: Synthetic oligonucleotide
  Antisense strand to SEQ ID NO: 1943230
acuaaccuuuggauacugu

SEQ ID NO: 1943232 - RNA, 19 nt, Artificial Sequence
  Description of Artificial Sequence: Synthetic oligonucleotide
  Sense strand starting at position 2814 of SEQ ID NO: 1880110
guauccaaagguuaguuau

SEQ ID NO: 1943233 - RNA, 19 nt, Artificial Sequence
  Description of Artificial Sequence: Synthetic oligonucleotide
  Antisense strand to SEQ ID NO: 1943232
auaacuaaccuuuggauac

SEQ ID NO: 1943234 - RNA, 19 nt, Artificial Sequence
  Description of Artificial Sequence: Synthetic oligonucleotide
  Sense strand starting at position 2817 of SEQ ID NO: 1880110
uccaaagguuaguuauacu

SEQ ID NO: 1943235 - RNA, 19 nt, Artificial Sequence
  Description of Artificial Sequence: Synthetic oligonucleotide
  Antisense strand to SEQ ID NO: 1943234
aguauaacuaaccuuugga

SEQ ID NO: 1943236 - RNA, 19 nt, Artificial Sequence
  Description of Artificial Sequence: Synthetic oligonucleotide
  Sense strand starting at position 2860 of SEQ ID NO: 1880110
cugagaagguucuuauaac

SEQ ID NO: 1943237 - RNA, 19 nt, Artificial Sequence
  Description of Artificial Sequence: Synthetic oligonucleotide
  Antisense strand to SEQ ID NO: 1943236
guuauaagaaccuucucag

SEQ ID NO: 1943238 - RNA, 19 nt, Artificial Sequence
  Description of Artificial Sequence: Synthetic oligonucleotide
  Sense strand starting at position 3474 of SEQ ID NO: 1880110
uugguuguaacagaaguua

SEQ ID NO: 1943239 - RNA, 19 nt, Artificial Sequence
  Description of Artificial Sequence: Synthetic oligonucleotide
  Antisense strand to SEQ ID NO: 1943238
uaacuucuguuacaaccaa

SEQ ID NO: 1943240 - RNA, 19 nt, Artificial Sequence
  Description of Artificial Sequence: Synthetic oligonucleotide
  Sense strand starting at position 3523 of SEQ ID NO: 1880110
aagaguaccucuguggacu

SEQ ID NO: 1943241 - RNA, 19 nt, Artificial Sequence
  Description of Artificial Sequence: Synthetic oligonucleotide
  Antisense strand to SEQ ID NO: 1943240
aguccacagagguacucuu

SEQ ID NO: 1943242 - RNA, 19 nt, Artificial Sequence
  Description of Artificial Sequence: Synthetic oligonucleotide
  Sense strand starting at position 3524 of SEQ ID NO: 1880110
agaguaccucuguggacua

SEQ ID NO: 1943243 - RNA, 19 nt, Artificial Sequence
  Description of Artificial Sequence: Synthetic oligonucleotide
  Antisense strand to SEQ ID NO: 1943242
uaguccacagagguacucu

SEQ ID NO: 1943244 - RNA, 19 nt, Artificial Sequence
  Description of Artificial Sequence: Synthetic oligonucleotide
  Sense strand starting at position 3598 of SEQ ID NO: 1880110
aaagaauagugcuugguau

SEQ ID NO: 1943245 - RNA, 19 nt, Artificial Sequence
  Description of Artificial Sequence: Synthetic oligonucleotide
  Antisense strand to SEQ ID NO: 1943244
auaccaagcacuauucuuu

SEQ ID NO: 1943246 - RNA, 19 nt, Artificial Sequence
  Description of Artificial Sequence: Synthetic oligonucleotide
  Sense strand starting at position 3599 of SEQ ID NO: 1880110
aagaauagugcuugguauc

SEQ ID NO: 1943247 - RNA, 19 nt, Artificial Sequence
  Description of Artificial Sequence: Synthetic oligonucleotide
  Antisense strand to SEQ ID NO: 1943246
gauaccaagcacuauucuu

SEQ ID NO: 1943248 - RNA, 19 nt, Artificial Sequence
  Description of Artificial Sequence: Synthetic oligonucleotide
  Sense strand starting at position 3600 of SEQ ID NO: 1880110
agaauagugcuugguauca

SEQ ID NO: 1943249 - RNA, 19 nt, Artificial Sequence
  Description of Artificial Sequence: Synthetic oligonucleotide
  Antisense strand to SEQ ID NO: 1943248
ugauaccaagcacuauucu

SEQ ID NO: 1943250 - RNA, 19 nt, Artificial Sequence
  Description of Artificial Sequence: Synthetic oligonucleotide
  Sense strand starting at position 3783 of SEQ ID NO: 1880110
uuuccuguagccuagaagu

SEQ ID NO: 1943251 - RNA, 19 nt, Artificial Sequence
  Description of Artificial Sequence: Synthetic oligonucleotide
  Antisense strand to SEQ ID NO: 1943250
acuucuaggcuacaggaaa

SEQ ID NO: 1943252 - RNA, 19 nt, Artificial Sequence
  Description of Artificial Sequence: Synthetic oligonucleotide
  Sense strand starting at position 3785 of SEQ ID NO: 1880110
uccuguagccuagaaguaa

SEQ ID NO: 1943253 - RNA, 19 nt, Artificial Sequence
  Description of Artificial Sequence: Synthetic oligonucleotide
  Antisense strand to SEQ ID NO: 1943252
uuacuucuaggcuacagga

SEQ ID NO: 1943254 - RNA, 19 nt, Artificial Sequence
  Description of Artificial Sequence: Synthetic oligonucleotide
  Sense strand starting at position 355 of SEQ ID NO: 1880111
auugcuuaaggaugaaaug

SEQ ID NO: 1943255 - RNA, 19 nt, Artificial Sequence
  Description of Artificial Sequence: Synthetic oligonucleotide
  Antisense strand to SEQ ID NO: 1943254
cauuucauccuuaagcaau

SEQ ID NO: 1943256 - RNA, 19 nt, Artificial Sequence
  Description of Artificial Sequence: Synthetic oligonucleotide
  Sense strand starting at position 418 of SEQ ID NO: 1880111
uuaauaucaugcuuaagag

SEQ ID NO: 1943257 - RNA, 19 nt, Artificial Sequence
  Description of Artificial Sequence: Synthetic oligonucleotide
  Antisense strand to SEQ ID NO: 1943256
cucuuaagcaugauauuaa

SEQ ID NO: 1943258 - RNA, 19 nt, Artificial Sequence
  Description of Artificial Sequence: Synthetic oligonucleotide
  Sense strand starting at position 569 of SEQ ID NO: 1880111
guauguccucuuuaaaguu

SEQ ID NO: 1943259 - RNA, 19 nt, Artificial Sequence
  Description of Artificial Sequence: Synthetic oligonucleotide
  Antisense strand to SEQ ID NO: 1943258
aacuuuaaagaggacauac

SEQ ID NO: 1943260 - RNA, 19 nt, Artificial Sequence
  Description of Artificial Sequence: Synthetic oligonucleotide
  Sense strand starting at position 604 of SEQ ID NO: 1880111
ucacauauugauggugaua

SEQ ID NO: 1943261 - RNA, 19 nt, Artificial Sequence
  Description of Artificial Sequence: Synthetic oligonucleotide
  Antisense strand to SEQ ID NO: 1943260
uaucaccaucaauauguga

SEQ ID NO: 1943262 - RNA, 19 nt, Artificial Sequence
  Description of Artificial Sequence: Synthetic oligonucleotide
  Sense strand starting at position 1220 of SEQ ID NO: 1880111
caggguauccuagagcacu

SEQ ID NO: 1943263 - RNA, 19 nt, Artificial Sequence
  Description of Artificial Sequence: Synthetic oligonucleotide
  Antisense strand to SEQ ID NO: 1943262
agugcucuaggauacccug

SEQ ID NO: 1943264 - RNA, 19 nt, Artificial Sequence
  Description of Artificial Sequence: Synthetic oligonucleotide
  Sense strand starting at position 1271 of SEQ ID NO: 1880111
ugaugcauuugggaacuau

SEQ ID NO: 1943265 - RNA, 19 nt, Artificial Sequence
  Description of Artificial Sequence: Synthetic oligonucleotide
  Antisense strand to SEQ ID NO: 1943264
auaguucccaaaugcauca

SEQ ID NO: 1943266 - RNA, 19 nt, Artificial Sequence
  Description of Artificial Sequence: Synthetic oligonucleotide
  Sense strand starting at position 1280 of SEQ ID NO: 1880111
ugggaacuaucagaauaga

SEQ ID NO: 1943267 - RNA, 19 nt, Artificial Sequence
  Description of Artificial Sequence: Synthetic oligonucleotide
  Antisense strand to SEQ ID NO: 1943266
ucuauucugauaguuccca

SEQ ID NO: 1943268 - RNA, 19 nt, Artificial Sequence
  Description of Artificial Sequence: Synthetic oligonucleotide
  Sense strand starting at position 1312 of SEQ ID NO: 1880111
ugaauuccauuguuuaaug

SEQ ID NO: 1943269 - RNA, 19 nt, Artificial Sequence
  Description of Artificial Sequence: Synthetic oligonucleotide
  Antisense strand to SEQ ID NO: 1943268
cauuaaacaauggaauuca

SEQ ID NO: 1943270 - RNA, 19 nt, Artificial Sequence
  Description of Artificial Sequence: Synthetic oligonucleotide
  Sense strand starting at position 1574 of SEQ ID NO: 1880111
acagaccuuugagaggaaa

SEQ ID NO: 1943271 - RNA, 19 nt, Artificial Sequence
  Description of Artificial Sequence: Synthetic oligonucleotide
  Antisense strand to SEQ ID NO: 1943270
uuuccucucaaaggucugu

SEQ ID NO: 1943272 - RNA, 19 nt, Artificial Sequence
  Description of Artificial Sequence: Synthetic oligonucleotide
  Sense strand starting at position 1596 of SEQ ID NO: 1880111
acuuccuugcuuuaagaag

SEQ ID NO: 1943273 - RNA, 19 nt, Artificial Sequence
  Description of Artificial Sequence: Synthetic oligonucleotide
  Antisense strand to SEQ ID NO: 1943272
cuucuuaaagcaaggaagu

SEQ ID NO: 1943274 - RNA, 19 nt, Artificial Sequence
  Description of Artificial Sequence: Synthetic oligonucleotide
  Sense strand starting at position 1607 of SEQ ID NO: 1880111
uuaagaagcugcucuugaa

SEQ ID NO: 1943275 - RNA, 19 nt, Artificial Sequence
  Description of Artificial Sequence: Synthetic oligonucleotide
  Antisense strand to SEQ ID NO: 1943274
uucaagagcagcuucuuaa

SEQ ID NO: 1943276 - RNA, 19 nt, Artificial Sequence
  Description of Artificial Sequence: Synthetic oligonucleotide
  Sense strand starting at position 1670 of SEQ ID NO: 1880111
ucugauuaucugcagggua

SEQ ID NO: 1943277 - RNA, 19 nt, Artificial Sequence
  Description of Artificial Sequence: Synthetic oligonucleotide
  Antisense strand to SEQ ID NO: 1943276
uacccugcagauaaucaga

SEQ ID NO: 1943278 - RNA, 19 nt, Artificial Sequence
  Description of Artificial Sequence: Synthetic oligonucleotide
  Sense strand starting at position 1672 of SEQ ID NO: 1880111
ugauuaucugcaggguaug

SEQ ID NO: 1943279 - RNA, 19 nt, Artificial Sequence
  Description of Artificial Sequence: Synthetic oligonucleotide
  Antisense strand to SEQ ID NO: 1943278
cauacccugcagauaauca

SEQ ID NO: 1943280 - RNA, 19 nt, Artificial Sequence
  Description of Artificial Sequence: Synthetic oligonucleotide
  Sense strand starting at position 1686 of SEQ ID NO: 1880111
guauguacauucccuagaa

SEQ ID NO: 1943281 - RNA, 19 nt, Artificial Sequence
  Description of Artificial Sequence: Synthetic oligonucleotide
  Antisense strand to SEQ ID NO: 1943280
uucuagggaauguacauac

SEQ ID NO: 1943282 - RNA, 19 nt, Artificial Sequence
  Description of Artificial Sequence: Synthetic oligonucleotide
  Sense strand starting at position 1777 of SEQ ID NO: 1880111
ccaacucuugguuauggau

SEQ ID NO: 1943283 - RNA, 19 nt, Artificial Sequence
  Description of Artificial Sequence: Synthetic oligonucleotide
  Antisense strand to SEQ ID NO: 1943282
auccauaaccaagaguugg

SEQ ID NO: 1943284 - RNA, 19 nt, Artificial Sequence
  Description of Artificial Sequence: Synthetic oligonucleotide
  Sense strand starting at position 1808 of SEQ ID NO: 1880111
ccuuauucugccgugcuua

SEQ ID NO: 1943285 - RNA, 19 nt, Artificial Sequence
  Description of Artificial Sequence: Synthetic oligonucleotide
  Antisense strand to SEQ ID NO: 1943284
uaagcacggcagaauaagg

SEQ ID NO: 1943286 - RNA, 19 nt, Artificial Sequence
  Description of Artificial Sequence: Synthetic oligonucleotide
  Sense strand starting at position 2008 of SEQ ID NO: 1880111
uaguuauucuaagugaggu

SEQ ID NO: 1943287 - RNA, 19 nt, Artificial Sequence
  Description of Artificial Sequence: Synthetic oligonucleotide
  Antisense strand to SEQ ID NO: 1943286
accucacuuagaauaacua

SEQ ID NO: 1943288 - RNA, 19 nt, Artificial Sequence
  Description of Artificial Sequence: Synthetic oligonucleotide
  Sense strand starting at position 2009 of SEQ ID NO: 1880111
aguuauucuaagugagguc

SEQ ID NO: 1943289 - RNA, 19 nt, Artificial Sequence
  Description of Artificial Sequence: Synthetic oligonucleotide
  Antisense strand to SEQ ID NO: 1943288
gaccucacuuagaauaacu

SEQ ID NO: 1943290 - RNA, 19 nt, Artificial Sequence
  Description of Artificial Sequence: Synthetic oligonucleotide
  Sense strand starting at position 2105 of SEQ ID NO: 1880111
uccucaacuggagguaaua

SEQ ID NO: 1943291 - RNA, 19 nt, Artificial Sequence
  Description of Artificial Sequence: Synthetic oligonucleotide
  Antisense strand to SEQ ID NO: 1943290
uauuaccuccaguugagga

SEQ ID NO: 1943292 - RNA, 19 nt, Artificial Sequence
  Description of Artificial Sequence: Synthetic oligonucleotide
  Sense strand starting at position 2184 of SEQ ID NO: 1880111
uaaauugauggauguuaac

SEQ ID NO: 1943293 - RNA, 19 nt, Artificial Sequence
  Description of Artificial Sequence: Synthetic oligonucleotide
  Antisense strand to SEQ ID NO: 1943292
guuaacauccaucaauuua

SEQ ID NO: 1943294 - RNA, 19 nt, Artificial Sequence
  Description of Artificial Sequence: Synthetic oligonucleotide
  Sense strand starting at position 2297 of SEQ ID NO: 1880111
ccaucagaggcauguuauu

SEQ ID NO: 1943295 - RNA, 19 nt, Artificial Sequence
  Description of Artificial Sequence: Synthetic oligonucleotide
  Antisense strand to SEQ ID NO: 1943294
aauaacaugccucugaugg

SEQ ID NO: 1943296 - RNA, 19 nt, Artificial Sequence
  Description of Artificial Sequence: Synthetic oligonucleotide
  Sense strand starting at position 2302 of SEQ ID NO: 1880111
agaggcauguuauuagaau

SEQ ID NO: 1943297 - RNA, 19 nt, Artificial Sequence
  Description of Artificial Sequence: Synthetic oligonucleotide
  Antisense strand to SEQ ID NO: 1943296
auucuaauaacaugccucu

SEQ ID NO: 1943298 - RNA, 19 nt, Artificial Sequence
  Description of Artificial Sequence: Synthetic oligonucleotide
  Sense strand starting at position 2344 of SEQ ID NO: 1880111
acaucuucuugugucacaa

SEQ ID NO: 1943299 - RNA, 19 nt, Artificial Sequence
  Description of Artificial Sequence: Synthetic oligonucleotide
  Antisense strand to SEQ ID NO: 1943298
uugugacacaagaagaugu

SEQ ID NO: 1943300 - RNA, 19 nt, Artificial Sequence
  Description of Artificial Sequence: Synthetic oligonucleotide
  Sense strand starting at position 2388 of SEQ ID NO: 1880111
uagcuaguucuuuccguuu

SEQ ID NO: 1943301 - RNA, 19 nt, Artificial Sequence
  Description of Artificial Sequence: Synthetic oligonucleotide
  Antisense strand to SEQ ID NO: 1943300
aaacggaaagaacuagcua

SEQ ID NO: 1943302 - RNA, 19 nt, Artificial Sequence
  Description of Artificial Sequence: Synthetic oligonucleotide
  Sense strand starting at position 2566 of SEQ ID NO: 1880111
augccugagaacugaggua

SEQ ID NO: 1943303 - RNA, 19 nt, Artificial Sequence
  Description of Artificial Sequence: Synthetic oligonucleotide
  Antisense strand to SEQ ID NO: 1943302
uaccucaguucucaggcau

SEQ ID NO: 1943304 - RNA, 19 nt, Artificial Sequence
  Description of Artificial Sequence: Synthetic oligonucleotide
  Sense strand starting at position 2672 of SEQ ID NO: 1880111
acuagaaggcuguaguuua

SEQ ID NO: 1943305 - RNA, 19 nt, Artificial Sequence
  Description of Artificial Sequence: Synthetic oligonucleotide
  Antisense strand to SEQ ID NO: 1943304
uaaacuacagccuucuagu

SEQ ID NO: 1943306 - RNA, 19 nt, Artificial Sequence
  Description of Artificial Sequence: Synthetic oligonucleotide
  Sense strand starting at position 2712 of SEQ ID NO: 1880111
gaaagaagccagugcuuga

SEQ ID NO: 1943307 - RNA, 19 nt, Artificial Sequence
  Description of Artificial Sequence: Synthetic oligonucleotide
  Antisense strand to SEQ ID NO: 1943306
ucaagcacuggcuucuuuc

SEQ ID NO: 1943308 - RNA, 19 nt, Artificial Sequence
  Description of Artificial Sequence: Synthetic oligonucleotide
  Sense strand starting at position 2717 of SEQ ID NO: 1880111
aagccagugcuugaacuuu

SEQ ID NO: 1943309 - RNA, 19 nt, Artificial Sequence
  Description of Artificial Sequence: Synthetic oligonucleotide
  Antisense strand to SEQ ID NO: 1943308
aaaguucaagcacuggcuu

SEQ ID NO: 1943310 - RNA, 19 nt, Artificial Sequence
  Description of Artificial Sequence: Synthetic oligonucleotide
  Sense strand starting at position 2811 of SEQ ID NO: 1880111
acaguauccaaagguuagu

SEQ ID NO: 1943311 - RNA, 19 nt, Artificial Sequence
  Description of Artificial Sequence: Synthetic oligonucleotide
  Antisense strand to SEQ ID NO: 1943310
acuaaccuuuggauacugu

SEQ ID NO: 1943312 - RNA, 19 nt, Artificial Sequence
  Description of Artificial Sequence: Synthetic oligonucleotide
  Sense strand starting at position 2814 of SEQ ID NO: 1880111
guauccaaagguuaguuau

SEQ ID NO: 1943313 - RNA, 19 nt, Artificial Sequence
  Description of Artificial Sequence: Synthetic oligonucleotide
  Antisense strand to SEQ ID NO: 1943312
auaacuaaccuuuggauac

SEQ ID NO: 1943314 - RNA, 19 nt, Artificial Sequence
  Description of Artificial Sequence: Synthetic oligonucleotide
  Sense strand starting at position 2817 of SEQ ID NO: 1880111
uccaaagguuaguuauacu

SEQ ID NO: 1943315 - RNA, 19 nt, Artificial Sequence
  Description of Artificial Sequence: Synthetic oligonucleotide
  Antisense strand to SEQ ID NO: 1943314
aguauaacuaaccuuugga

SEQ ID NO: 1943316 - RNA, 19 nt, Artificial Sequence
  Description of Artificial Sequence: Synthetic oligonucleotide
  Sense strand starting at position 2860 of SEQ ID NO: 1880111
cugagaagguucuuauaac

SEQ ID NO: 1943317 - RNA, 19 nt, Artificial Sequence
  Description of Artificial Sequence: Synthetic oligonucleotide
  Antisense strand to SEQ ID NO: 1943316
guuauaagaaccuucucag

SEQ ID NO: 1943318 - RNA, 19 nt, Artificial Sequence
  Description of Artificial Sequence: Synthetic oligonucleotide
  Sense strand starting at position 3474 of SEQ ID NO: 1880111
uugguuguaacagaaguua

SEQ ID NO: 1943319 - RNA, 19 nt, Artificial Sequence
  Description of Artificial Sequence: Synthetic oligonucleotide
  Antisense strand to SEQ ID NO: 1943318
uaacuucuguuacaaccaa

SEQ ID NO: 1943320 - RNA, 19 nt, Artificial Sequence
  Description of Artificial Sequence: Synthetic oligonucleotide
  Sense strand starting at position 3523 of SEQ ID NO: 1880111
aagaguaccucuguggacu

SEQ ID NO: 1943321 - RNA, 19 nt, Artificial Sequence
  Description of Artificial Sequence: Synthetic oligonucleotide
  Antisense strand to SEQ ID NO: 1943320
aguccacagagguacucuu

SEQ ID NO: 1943322 - RNA, 19 nt, Artificial Sequence
  Description of Artificial Sequence: Synthetic oligonucleotide
  Sense strand starting at position 3524 of SEQ ID NO: 1880111
agaguaccucuguggacua

SEQ ID NO: 1943323 - RNA, 19 nt, Artificial Sequence
  Description of Artificial Sequence: Synthetic oligonucleotide
  Antisense strand to SEQ ID NO: 1943322
uaguccacagagguacucu

SEQ ID NO: 1943324 - RNA, 19 nt, Artificial Sequence
  Description of Artificial Sequence: Synthetic oligonucleotide
  Sense strand starting at position 3598 of SEQ ID NO: 1880111
aaagaauagugcuugguau

SEQ ID NO: 1943325 - RNA, 19 nt, Artificial Sequence
  Description of Artificial Sequence: Synthetic oligonucleotide
  Antisense strand to SEQ ID NO: 1943324
auaccaagcacuauucuuu

SEQ ID NO: 1943326 - RNA, 19 nt, Artificial Sequence
  Description of Artificial Sequence: Synthetic oligonucleotide
  Sense strand starting at position 3599 of SEQ ID NO: 1880111
aagaauagugcuugguauc

SEQ ID NO: 1943327 - RNA, 19 nt, Artificial Sequence
  Description of Artificial Sequence: Synthetic oligonucleotide
  Antisense strand to SEQ ID NO: 1943326
gauaccaagcacuauucuu

SEQ ID NO: 1943328 - RNA, 19 nt, Artificial Sequence
  Description of Artificial Sequence: Synthetic oligonucleotide
  Sense strand starting at position 3600 of SEQ ID NO: 1880111
agaauagugcuugguauca

SEQ ID NO: 1943329 - RNA, 19 nt, Artificial Sequence
  Description of Artificial Sequence: Synthetic oligonucleotide
  Antisense strand to SEQ ID NO: 1943328
ugauaccaagcacuauucu

SEQ ID NO: 1943330 - RNA, 19 nt, Artificial Sequence
  Description of Artificial Sequence: Synthetic oligonucleotide
  Sense strand starting at position 3783 of SEQ ID NO: 1880111
uuuccuguagccuagaagu

SEQ ID NO: 1943331 - RNA, 19 nt, Artificial Sequence
  Description of Artificial Sequence: Synthetic oligonucleotide
  Antisense strand to SEQ ID NO: 1943330
acuucuaggcuacaggaaa

SEQ ID NO: 1943332 - RNA, 19 nt, Artificial Sequence
  Description of Artificial Sequence: Synthetic oligonucleotide
  Sense strand starting at position 3785 of SEQ ID NO: 1880111
uccuguagccuagaaguaa

SEQ ID NO: 1943333 - RNA, 19 nt, Artificial Sequence
  Description of Artificial Sequence: Synthetic oligonucleotide
  Antisense strand to SEQ ID NO: 1943332
uuacuucuaggcuacagga

SEQ ID NO: 1943334 - RNA, 19 nt, Artificial Sequence
  Description of Artificial Sequence: Synthetic oligonucleotide
  Sense strand starting at position 5 of SEQ ID NO: 1880112
guuaucucauguuuccaua

SEQ ID NO: 1943335 - RNA, 19 nt, Artificial Sequence
  Description of Artificial Sequence: Synthetic oligonucleotide
  Antisense strand to SEQ ID NO: 1943334
uauggaaacaugagauaac

SEQ ID NO: 1943336 - RNA, 19 nt, Artificial Sequence
  Description of Artificial Sequence: Synthetic oligonucleotide
  Sense strand starting at position 32 of SEQ ID NO: 1880112
caucuuacugaggguggua

SEQ ID NO: 1943337 - RNA, 19 nt, Artificial Sequence
  Description of Artificial Sequence: Synthetic oligonucleotide
  Antisense strand to SEQ ID NO: 1943336
uaccacccucaguaagaug

SEQ ID NO: 1943338 - RNA, 19 nt, Artificial Sequence
  Description of Artificial Sequence: Synthetic oligonucleotide
  Sense strand starting at position 182 of SEQ ID NO: 1880112
ccguuugucauucuuuagu

SEQ ID NO: 1943339 - RNA, 19 nt, Artificial Sequence
  Description of Artificial Sequence: Synthetic oligonucleotide
  Antisense strand to SEQ ID NO: 1943338
acuaaagaaugacaaacgg

SEQ ID NO: 1943340 - RNA, 19 nt, Artificial Sequence
  Description of Artificial Sequence: Synthetic oligonucleotide
  Sense strand starting at position 184 of SEQ ID NO: 1880112
guuugucauucuuuaguau

SEQ ID NO: 1943341 - RNA, 19 nt, Artificial Sequence
  Description of Artificial Sequence: Synthetic oligonucleotide
  Antisense strand to SEQ ID NO: 1943340
auacuaaagaaugacaaac

SEQ ID NO: 1943342 - RNA, 19 nt, Artificial Sequence
  Description of Artificial Sequence: Synthetic oligonucleotide
  Sense strand starting at position 271 of SEQ ID NO: 1880112
agcagaagccuacacaauu

SEQ ID NO: 1943343 - RNA, 19 nt, Artificial Sequence
  Description of Artificial Sequence: Synthetic oligonucleotide
  Antisense strand to SEQ ID NO: 1943342
aauuguguaggcuucugcu

SEQ ID NO: 1943344 - RNA, 19 nt, Artificial Sequence
  Description of Artificial Sequence: Synthetic oligonucleotide
  Sense strand starting at position 427 of SEQ ID NO: 1880112
uaagaaguacuucgucuua

SEQ ID NO: 1943345 - RNA, 19 nt, Artificial Sequence
  Description of Artificial Sequence: Synthetic oligonucleotide
  Antisense strand to SEQ ID NO: 1943344
uaagacgaaguacuucuua

SEQ ID NO: 1943346 - RNA, 19 nt, Artificial Sequence
  Description of Artificial Sequence: Synthetic oligonucleotide
  Sense strand starting at position 429 of SEQ ID NO: 1880112
agaaguacuucgucuuauu

SEQ ID NO: 1943347 - RNA, 19 nt, Artificial Sequence
  Description of Artificial Sequence: Synthetic oligonucleotide
  Antisense strand to SEQ ID NO: 1943346
aauaagacgaaguacuucu

SEQ ID NO: 1943348 - RNA, 19 nt, Artificial Sequence
  Description of Artificial Sequence: Synthetic oligonucleotide
  Sense strand starting at position 747 of SEQ ID NO: 1880112
ccguuugcucauuaguaac

SEQ ID NO: 1943349 - RNA, 19 nt, Artificial Sequence
  Description of Artificial Sequence: Synthetic oligonucleotide
  Antisense strand to SEQ ID NO: 1943348
guuacuaaugagcaaacgg

SEQ ID NO: 1943350 - RNA, 19 nt, Artificial Sequence
  Description of Artificial Sequence: Synthetic oligonucleotide
  Sense strand starting at position 758 of SEQ ID NO: 1880112
uuaguaacgcaaugaaagu

SEQ ID NO: 1943351 - RNA, 19 nt, Artificial Sequence
  Description of Artificial Sequence: Synthetic oligonucleotide
  Antisense strand to SEQ ID NO: 1943350
acuuucauugcguuacuaa

SEQ ID NO: 1943352 - RNA, 19 nt, Artificial Sequence
  Description of Artificial Sequence: Synthetic oligonucleotide
  Sense strand starting at position 767 of SEQ ID NO: 1880112
caaugaaaguugcuuucgu

SEQ ID NO: 1943353 - RNA, 19 nt, Artificial Sequence
  Description of Artificial Sequence: Synthetic oligonucleotide
  Antisense strand to SEQ ID NO: 1943352
acgaaagcaacuuucauug

SEQ ID NO: 1943354 - RNA, 19 nt, Artificial Sequence
  Description of Artificial Sequence: Synthetic oligonucleotide
  Sense strand starting at position 863 of SEQ ID NO: 1880112
acuagaucaguccguagga

SEQ ID NO: 1943355 - RNA, 19 nt, Artificial Sequence
  Description of Artificial Sequence: Synthetic oligonucleotide
  Antisense strand to SEQ ID NO: 1943354
uccuacggacugaucuagu

SEQ ID NO: 1943356 - RNA, 19 nt, Artificial Sequence
  Description of Artificial Sequence: Synthetic oligonucleotide
  Sense strand starting at position 1462 of SEQ ID NO: 1880112
gcucuaugaggugagaacu

SEQ ID NO: 1943357 - RNA, 19 nt, Artificial Sequence
  Description of Artificial Sequence: Synthetic oligonucleotide
  Antisense strand to SEQ ID NO: 1943356
aguucucaccucauagagc

SEQ ID NO: 1943358 - RNA, 19 nt, Artificial Sequence
  Description of Artificial Sequence: Synthetic oligonucleotide
  Sense strand starting at position 1474 of SEQ ID NO: 1880112
gagaacugauuccucgcua

SEQ ID NO: 1943359 - RNA, 19 nt, Artificial Sequence
  Description of Artificial Sequence: Synthetic oligonucleotide
  Antisense strand to SEQ ID NO: 1943358
uagcgaggaaucaguucuc

SEQ ID NO: 1943360 - RNA, 19 nt, Artificial Sequence
  Description of Artificial Sequence: Synthetic oligonucleotide
  Sense strand starting at position 1479 of SEQ ID NO: 1880112
cugauuccucgcuagcaca

SEQ ID NO: 1943361 - RNA, 19 nt, Artificial Sequence
  Description of Artificial Sequence: Synthetic oligonucleotide
  Antisense strand to SEQ ID NO: 1943360
ugugcuagcgaggaaucag

SEQ ID NO: 1943362 - RNA, 19 nt, Artificial Sequence
  Description of Artificial Sequence: Synthetic oligonucleotide
  Sense strand starting at position 1644 of SEQ ID NO: 1880112
gcagccuucgcgcuaguua

SEQ ID NO: 1943363 - RNA, 19 nt, Artificial Sequence
  Description of Artificial Sequence: Synthetic oligonucleotide
  Antisense strand to SEQ ID NO: 1943362
uaacuagcgcgaaggcugc

SEQ ID NO: 1943364 - RNA, 19 nt, Artificial Sequence
  Description of Artificial Sequence: Synthetic oligonucleotide
  Sense strand starting at position 1653 of SEQ ID NO: 1880112
gcgcuaguuaacuugugau

SEQ ID NO: 1943365 - RNA, 19 nt, Artificial Sequence
  Description of Artificial Sequence: Synthetic oligonucleotide
  Antisense strand to SEQ ID NO: 1943364
aucacaaguuaacuagcgc

SEQ ID NO: 1943366 - RNA, 19 nt, Artificial Sequence
  Description of Artificial Sequence: Synthetic oligonucleotide
  Sense strand starting at position 2177 of SEQ ID NO: 1880112
gagaaauccuccguggcga

SEQ ID NO: 1943367 - RNA, 19 nt, Artificial Sequence
  Description of Artificial Sequence: Synthetic oligonucleotide
  Antisense strand to SEQ ID NO: 1943366
ucgccacggaggauuucuc

SEQ ID NO: 1943368 - RNA, 19 nt, Artificial Sequence
  Description of Artificial Sequence: Synthetic oligonucleotide
  Sense strand starting at position 2178 of SEQ ID NO: 1880112
agaaauccuccguggcgaa

SEQ ID NO: 1943369 - RNA, 19 nt, Artificial Sequence
  Description of Artificial Sequence: Synthetic oligonucleotide
  Antisense strand to SEQ ID NO: 1943368
uucgccacggaggauuucu

SEQ ID NO: 1943370 - RNA, 19 nt, Artificial Sequence
  Description of Artificial Sequence: Synthetic oligonucleotide
  Sense strand starting at position 2208 of SEQ ID NO: 1880112
ugagaugccucaucuacac

SEQ ID NO: 1943371 - RNA, 19 nt, Artificial Sequence
  Description of Artificial Sequence: Synthetic oligonucleotide
  Antisense strand to SEQ ID NO: 1943370
guguagaugaggcaucuca

SEQ ID NO: 1943372 - RNA, 19 nt, Artificial Sequence
  Description of Artificial Sequence: Synthetic oligonucleotide
  Sense strand starting at position 2242 of SEQ ID NO: 1880112
cgugaugucaccgacagca

SEQ ID NO: 1943373 - RNA, 19 nt, Artificial Sequence
  Description of Artificial Sequence: Synthetic oligonucleotide
  Antisense strand to SEQ ID NO: 1943372
ugcugucggugacaucacg

SEQ ID NO: 1943374 - RNA, 19 nt, Artificial Sequence
  Description of Artificial Sequence: Synthetic oligonucleotide
  Sense strand starting at position 2385 of SEQ ID NO: 1880112
uggucucucccagagaagu

SEQ ID NO: 1943375 - RNA, 19 nt, Artificial Sequence
  Description of Artificial Sequence: Synthetic oligonucleotide
  Antisense strand to SEQ ID NO: 1943374
acuucucugggagagacca

SEQ ID NO: 1943376 - RNA, 19 nt, Artificial Sequence
  Description of Artificial Sequence: Synthetic oligonucleotide
  Sense strand starting at position 2398 of SEQ ID NO: 1880112
agaaguagguucuuagucu

SEQ ID NO: 1943377 - RNA, 19 nt, Artificial Sequence
  Description of Artificial Sequence: Synthetic oligonucleotide
  Antisense strand to SEQ ID NO: 1943376
agacuaagaaccuacuucu

SEQ ID NO: 1943378 - RNA, 19 nt, Artificial Sequence
  Description of Artificial Sequence: Synthetic oligonucleotide
  Sense strand starting at position 2404 of SEQ ID NO: 1880112
agguucuuagucugugaug

SEQ ID NO: 1943379 - RNA, 19 nt, Artificial Sequence
  Description of Artificial Sequence: Synthetic oligonucleotide
  Antisense strand to SEQ ID NO: 1943378
caucacagacuaagaaccu

SEQ ID NO: 1943380 - RNA, 19 nt, Artificial Sequence
  Description of Artificial Sequence: Synthetic oligonucleotide
  Sense strand starting at position 2571 of SEQ ID NO: 1880112
uuggaagucguucgauauc

SEQ ID NO: 1943381 - RNA, 19 nt, Artificial Sequence
  Description of Artificial Sequence: Synthetic oligonucleotide
  Antisense strand to SEQ ID NO: 1943380
gauaucgaacgacuuccaa

SEQ ID NO: 1943382 - RNA, 19 nt, Artificial Sequence
  Description of Artificial Sequence: Synthetic oligonucleotide
  Sense strand starting at position 2574 of SEQ ID NO: 1880112
gaagucguucgauaucaga

SEQ ID NO: 1943383 - RNA, 19 nt, Artificial Sequence
  Description of Artificial Sequence: Synthetic oligonucleotide
  Antisense strand to SEQ ID NO: 1943382
ucugauaucgaacgacuuc

SEQ ID NO: 1943384 - RNA, 19 nt, Artificial Sequence
  Description of Artificial Sequence: Synthetic oligonucleotide
  Sense strand starting at position 2661 of SEQ ID NO: 1880112
uaucacugggaguguuaua

SEQ ID NO: 1943385 - RNA, 19 nt, Artificial Sequence
  Description of Artificial Sequence: Synthetic oligonucleotide
  Antisense strand to SEQ ID NO: 1943384
uauaacacucccagugaua

SEQ ID NO: 1943386 - RNA, 19 nt, Artificial Sequence
  Description of Artificial Sequence: Synthetic oligonucleotide
  Sense strand starting at position 2670 of SEQ ID NO: 1880112
gaguguuauaaagaugguc

SEQ ID NO: 1943387 - RNA, 19 nt, Artificial Sequence
  Description of Artificial Sequence: Synthetic oligonucleotide
  Antisense strand to SEQ ID NO: 1943386
gaccaucuuuauaacacuc

SEQ ID NO: 1943388 - RNA, 19 nt, Artificial Sequence
  Description of Artificial Sequence: Synthetic oligonucleotide
  Sense strand starting at position 2678 of SEQ ID NO: 1880112
uaaagauggucguccaguu

SEQ ID NO: 1943389 - RNA, 19 nt, Artificial Sequence
  Description of Artificial Sequence: Synthetic oligonucleotide
  Antisense strand to SEQ ID NO: 1943388
aacuggacgaccaucuuua

SEQ ID NO: 1943390 - RNA, 19 nt, Artificial Sequence
  Description of Artificial Sequence: Synthetic oligonucleotide
  Sense strand starting at position 2845 of SEQ ID NO: 1880112
guuuauaugcugcaaagac

SEQ ID NO: 1943391 - RNA, 19 nt, Artificial Sequence
  Description of Artificial Sequence: Synthetic oligonucleotide
  Antisense strand to SEQ ID NO: 1943390
gucuuugcagcauauaaac

SEQ ID NO: 1943392 - RNA, 19 nt, Artificial Sequence
  Description of Artificial Sequence: Synthetic oligonucleotide
  Sense strand starting at position 3088 of SEQ ID NO: 1880112
gaguguuacugcccaacau

SEQ ID NO: 1943393 - RNA, 19 nt, Artificial Sequence
  Description of Artificial Sequence: Synthetic oligonucleotide
  Antisense strand to SEQ ID NO: 1943392
auguugggcaguaacacuc

SEQ ID NO: 1943394 - RNA, 19 nt, Artificial Sequence
  Description of Artificial Sequence: Synthetic oligonucleotide
  Sense strand starting at position 3201 of SEQ ID NO: 1880112
ugaguugagaguugugauu

SEQ ID NO: 1943395 - RNA, 19 nt, Artificial Sequence
  Description of Artificial Sequence: Synthetic oligonucleotide
  Antisense strand to SEQ ID NO: 1943394
aaucacaacucucaacuca

SEQ ID NO: 1943396 - RNA, 19 nt, Artificial Sequence
  Description of Artificial Sequence: Synthetic oligonucleotide
  Sense strand starting at position 3207 of SEQ ID NO: 1880112
gagaguugugauuggucag

SEQ ID NO: 1943397 - RNA, 19 nt, Artificial Sequence
  Description of Artificial Sequence: Synthetic oligonucleotide
  Antisense strand to SEQ ID NO: 1943396
cugaccaaucacaacucuc

SEQ ID NO: 1943398 - RNA, 19 nt, Artificial Sequence
  Description of Artificial Sequence: Synthetic oligonucleotide
  Sense strand starting at position 3473 of SEQ ID NO: 1880112
uucuaaucucagggcuacu

SEQ ID NO: 1943399 - RNA, 19 nt, Artificial Sequence
  Description of Artificial Sequence: Synthetic oligonucleotide
  Antisense strand to SEQ ID NO: 1943398
aguagcccugagauuagaa

SEQ ID NO: 1943400 - RNA, 19 nt, Artificial Sequence
  Description of Artificial Sequence: Synthetic oligonucleotide
  Sense strand starting at position 3803 of SEQ ID NO: 1880112
gguuauuuguuucuaugug

SEQ ID NO: 1943401 - RNA, 19 nt, Artificial Sequence
  Description of Artificial Sequence: Synthetic oligonucleotide
  Antisense strand to SEQ ID NO: 1943400
cacauagaaacaaauaacc

SEQ ID NO: 1943402 - RNA, 19 nt, Artificial Sequence
  Description of Artificial Sequence: Synthetic oligonucleotide
  Sense strand starting at position 3815 of SEQ ID NO: 1880112
cuauguguauuccuuugua

SEQ ID NO: 1943403 - RNA, 19 nt, Artificial Sequence
  Description of Artificial Sequence: Synthetic oligonucleotide
  Antisense strand to SEQ ID NO: 1943402
uacaaaggaauacacauag

SEQ ID NO: 1943404 - RNA, 19 nt, Artificial Sequence
  Description of Artificial Sequence: Synthetic oligonucleotide
  Sense strand starting at position 3818 of SEQ ID NO: 1880112
uguguauuccuuuguagga

SEQ ID NO: 1943405 - RNA, 19 nt, Artificial Sequence
  Description of Artificial Sequence: Synthetic oligonucleotide
  Antisense strand to SEQ ID NO: 1943404
uccuacaaaggaauacaca

SEQ ID NO: 1943406 - RNA, 19 nt, Artificial Sequence
  Description of Artificial Sequence: Synthetic oligonucleotide
  Sense strand starting at position 3921 of SEQ ID NO: 1880112
gaguuuaccugagccaaca

SEQ ID NO: 1943407 - RNA, 19 nt, Artificial Sequence
  Description of Artificial Sequence: Synthetic oligonucleotide
  Antisense strand to SEQ ID NO: 1943406
uguuggcucagguaaacuc

SEQ ID NO: 1943408 - RNA, 19 nt, Artificial Sequence
  Description of Artificial Sequence: Synthetic oligonucleotide
  Sense strand starting at position 3942 of SEQ ID NO: 1880112
aagagagcugccuggaaga

SEQ ID NO: 1943409 - RNA, 19 nt, Artificial Sequence
  Description of Artificial Sequence: Synthetic oligonucleotide
  Antisense strand to SEQ ID NO: 1943408
ucuuccaggcagcucucuu

SEQ ID NO: 1943410 - RNA, 19 nt, Artificial Sequence
  Description of Artificial Sequence: Synthetic oligonucleotide
  Sense strand starting at position 3944 of SEQ ID NO: 1880112
gagagcugccuggaagacu

SEQ ID NO: 1943411 - RNA, 19 nt, Artificial Sequence
  Description of Artificial Sequence: Synthetic oligonucleotide
  Antisense strand to SEQ ID NO: 1943410
agucuuccaggcagcucuc

SEQ ID NO: 1943412 - RNA, 19 nt, Artificial Sequence
  Description of Artificial Sequence: Synthetic oligonucleotide
  Sense strand starting at position 3953 of SEQ ID NO: 1880112
cuggaagacucacacucaa

SEQ ID NO: 1943413 - RNA, 19 nt, Artificial Sequence
  Description of Artificial Sequence: Synthetic oligonucleotide
  Antisense strand to SEQ ID NO: 1943412
uugagugugagucuuccag

SEQ ID NO: 1943414 - RNA, 19 nt, Artificial Sequence
  Description of Artificial Sequence: Synthetic oligonucleotide
  Sense strand starting at position 1266 of SEQ ID NO: 1880114
ugagcagaauggugaaacu

SEQ ID NO: 1943415 - RNA, 19 nt, Artificial Sequence
  Description of Artificial Sequence: Synthetic oligonucleotide
  Antisense strand to SEQ ID NO: 1943414
aguuucaccauucugcuca

SEQ ID NO: 1943416 - RNA, 19 nt, Artificial Sequence
  Description of Artificial Sequence: Synthetic oligonucleotide
  Sense strand starting at position 1275 of SEQ ID NO: 1880114
uggugaaacugcuacgaaa

SEQ ID NO: 1943417 - RNA, 19 nt, Artificial Sequence
  Description of Artificial Sequence: Synthetic oligonucleotide
  Antisense strand to SEQ ID NO: 1943416
uuucguagcaguuucacca

SEQ ID NO: 1943418 - RNA, 19 nt, Artificial Sequence
  Description of Artificial Sequence: Synthetic oligonucleotide
  Sense strand starting at position 1398 of SEQ ID NO: 1880114
ggaagaucgcgccaguucu

SEQ ID NO: 1943419 - RNA, 19 nt, Artificial Sequence
  Description of Artificial Sequence: Synthetic oligonucleotide
  Antisense strand to SEQ ID NO: 1943418
agaacuggcgcgaucuucc

SEQ ID NO: 1943420 - RNA, 19 nt, Artificial Sequence
  Description of Artificial Sequence: Synthetic oligonucleotide
  Sense strand starting at position 1671 of SEQ ID NO: 1880114
guaaguggauaguucuaag

SEQ ID NO: 1943421 - RNA, 19 nt, Artificial Sequence
  Description of Artificial Sequence: Synthetic oligonucleotide
  Antisense strand to SEQ ID NO: 1943420
cuuagaacuauccacuuac

SEQ ID NO: 1943422 - RNA, 19 nt, Artificial Sequence
  Description of Artificial Sequence: Synthetic oligonucleotide
  Sense strand starting at position 1990 of SEQ ID NO: 1880114
ccaaguaaguaugagcuuu

SEQ ID NO: 1943423 - RNA, 19 nt, Artificial Sequence
  Description of Artificial Sequence: Synthetic oligonucleotide
  Antisense strand to SEQ ID NO: 1943422
aaagcucauacuuacuugg

SEQ ID NO: 1943424 - RNA, 19 nt, Artificial Sequence
  Description of Artificial Sequence: Synthetic oligonucleotide
  Sense strand starting at position 3696 of SEQ ID NO: 1880114
gucuacaugcuauagggaa

SEQ ID NO: 1943425 - RNA, 19 nt, Artificial Sequence
  Description of Artificial Sequence: Synthetic oligonucleotide
  Antisense strand to SEQ ID NO: 1943424
uucccuauagcauguagac

SEQ ID NO: 1943426 - RNA, 19 nt, Artificial Sequence
  Description of Artificial Sequence: Synthetic oligonucleotide
  Sense strand starting at position 118 of SEQ ID NO: 1880115
agcucaugucuuugucaga

SEQ ID NO: 1943427 - RNA, 19 nt, Artificial Sequence
  Description of Artificial Sequence: Synthetic oligonucleotide
  Antisense strand to SEQ ID NO: 1943426
ucugacaaagacaugagcu

SEQ ID NO: 1943428 - RNA, 19 nt, Artificial Sequence
  Description of Artificial Sequence: Synthetic oligonucleotide
  Sense strand starting at position 119 of SEQ ID NO: 1880115
gcucaugucuuugucagaa

SEQ ID NO: 1943429 - RNA, 19 nt, Artificial Sequence
  Description of Artificial Sequence: Synthetic oligonucleotide
  Antisense strand to SEQ ID NO: 1943428
uucugacaaagacaugagc

SEQ ID NO: 1943430 - RNA, 19 nt, Artificial Sequence
  Description of Artificial Sequence: Synthetic oligonucleotide
  Sense strand starting at position 212 of SEQ ID NO: 1880115
ucagaaacuccucgaugag

SEQ ID NO: 1943431 - RNA, 19 nt, Artificial Sequence
  Description of Artificial Sequence: Synthetic oligonucleotide
  Antisense strand to SEQ ID NO: 1943430
cucaucgaggaguuucuga

SEQ ID NO: 1943432 - RNA, 19 nt, Artificial Sequence
  Description of Artificial Sequence: Synthetic oligonucleotide
  Sense strand starting at position 270 of SEQ ID NO: 1880115
agggacauuucuuaaacau

SEQ ID NO: 1943433 - RNA, 19 nt, Artificial Sequence
  Description of Artificial Sequence: Synthetic oligonucleotide
  Antisense strand to SEQ ID NO: 1943432
auguuuaagaaaugucccu

SEQ ID NO: 1943434 - RNA, 19 nt, Artificial Sequence
  Description of Artificial Sequence: Synthetic oligonucleotide
  Sense strand starting at position 310 of SEQ ID NO: 1880115
cgguaacgcaaugaaaguu

SEQ ID NO: 1943435 - RNA, 19 nt, Artificial Sequence
  Description of Artificial Sequence: Synthetic oligonucleotide
  Antisense strand to SEQ ID NO: 1943434
aacuuucauugcguuaccg

SEQ ID NO: 1943436 - RNA, 19 nt, Artificial Sequence
  Description of Artificial Sequence: Synthetic oligonucleotide
  Sense strand starting at position 415 of SEQ ID NO: 1880115
acuagaucaguccguaaga

SEQ ID NO: 1943437 - RNA, 19 nt, Artificial Sequence
  Description of Artificial Sequence: Synthetic oligonucleotide
  Antisense strand to SEQ ID NO: 1943436
ucuuacggacugaucuagu

SEQ ID NO: 1943438 - RNA, 19 nt, Artificial Sequence
  Description of Artificial Sequence: Synthetic oligonucleotide
  Sense strand starting at position 416 of SEQ ID NO: 1880115
cuagaucaguccguaagaa

SEQ ID NO: 1943439 - RNA, 19 nt, Artificial Sequence
  Description of Artificial Sequence: Synthetic oligonucleotide
  Antisense strand to SEQ ID NO: 1943438
uucuuacggacugaucuag

SEQ ID NO: 1943440 - RNA, 19 nt, Artificial Sequence
  Description of Artificial Sequence: Synthetic oligonucleotide
  Sense strand starting at position 417 of SEQ ID NO: 1880115
uagaucaguccguaagaag

SEQ ID NO: 1943441 - RNA, 19 nt, Artificial Sequence
  Description of Artificial Sequence: Synthetic oligonucleotide
  Antisense strand to SEQ ID NO: 1943440
cuucuuacggacugaucua

SEQ ID NO: 1943442 - RNA, 19 nt, Artificial Sequence
  Description of Artificial Sequence: Synthetic oligonucleotide
  Sense strand starting at position 776 of SEQ ID NO: 1880115
gaauucuugugcucaugua

SEQ ID NO: 1943443 - RNA, 19 nt, Artificial Sequence
  Description of Artificial Sequence: Synthetic oligonucleotide
  Antisense strand to SEQ ID NO: 1943442
uacaugagcacaagaauuc

SEQ ID NO: 1943444 - RNA, 19 nt, Artificial Sequence
  Description of Artificial Sequence: Synthetic oligonucleotide
  Sense strand starting at position 868 of SEQ ID NO: 1880115
guauuaaggaaacguccga

SEQ ID NO: 1943445 - RNA, 19 nt, Artificial Sequence
  Description of Artificial Sequence: Synthetic oligonucleotide
  Antisense strand to SEQ ID NO: 1943444
ucggacguuuccuuaauac

SEQ ID NO: 1943446 - RNA, 19 nt, Artificial Sequence
  Description of Artificial Sequence: Synthetic oligonucleotide
  Sense strand starting at position 873 of SEQ ID NO: 1880115
aaggaaacguccgaauuug

SEQ ID NO: 1943447 - RNA, 19 nt, Artificial Sequence
  Description of Artificial Sequence: Synthetic oligonucleotide
  Antisense strand to SEQ ID NO: 1943446
caaauucggacguuuccuu

SEQ ID NO: 1943448 - RNA, 19 nt, Artificial Sequence
  Description of Artificial Sequence: Synthetic oligonucleotide
  Sense strand starting at position 883 of SEQ ID NO: 1880115
ccgaauuugccaggguacu

SEQ ID NO: 1943449 - RNA, 19 nt, Artificial Sequence
  Description of Artificial Sequence: Synthetic oligonucleotide
  Antisense strand to SEQ ID NO: 1943448
aguacccuggcaaauucgg

SEQ ID NO: 1943450 - RNA, 19 nt, Artificial Sequence
  Description of Artificial Sequence: Synthetic oligonucleotide
  Sense strand starting at position 942 of SEQ ID NO: 1880115
aguacuuccuguccaugaa

SEQ ID NO: 1943451 - RNA, 19 nt, Artificial Sequence
  Description of Artificial Sequence: Synthetic oligonucleotide
  Antisense strand to SEQ ID NO: 1943450
uucauggacaggaaguacu

SEQ ID NO: 1943452 - RNA, 19 nt, Artificial Sequence
  Description of Artificial Sequence: Synthetic oligonucleotide
  Sense strand starting at position 1050 of SEQ ID NO: 1880115
gggugcuauuuagaaaguu

SEQ ID NO: 1943453 - RNA, 19 nt, Artificial Sequence
  Description of Artificial Sequence: Synthetic oligonucleotide
  Antisense strand to SEQ ID NO: 1943452
aacuuucuaaauagcaccc

SEQ ID NO: 1943454 - RNA, 19 nt, Artificial Sequence
  Description of Artificial Sequence: Synthetic oligonucleotide
  Sense strand starting at position 1059 of SEQ ID NO: 1880115
uuagaaaguugccuggcaa

SEQ ID NO: 1943455 - RNA, 19 nt, Artificial Sequence
  Description of Artificial Sequence: Synthetic oligonucleotide
  Antisense strand to SEQ ID NO: 1943454
uugccaggcaacuuucuaa

SEQ ID NO: 1943456 - RNA, 19 nt, Artificial Sequence
  Description of Artificial Sequence: Synthetic oligonucleotide
  Sense strand starting at position 1060 of SEQ ID NO: 1880115
uagaaaguugccuggcaau

SEQ ID NO: 1943457 - RNA, 19 nt, Artificial Sequence
  Description of Artificial Sequence: Synthetic oligonucleotide
  Antisense strand to SEQ ID NO: 1943456
auugccaggcaacuuucua

SEQ ID NO: 1943458 - RNA, 19 nt, Artificial Sequence
  Description of Artificial Sequence: Synthetic oligonucleotide
  Sense strand starting at position 1086 of SEQ ID NO: 1880115
ggauguggaagcgagacau

SEQ ID NO: 1943459 - RNA, 19 nt, Artificial Sequence
  Description of Artificial Sequence: Synthetic oligonucleotide
  Antisense strand to SEQ ID NO: 1943458
augucucgcuuccacaucc

SEQ ID NO: 1943460 - RNA, 19 nt, Artificial Sequence
  Description of Artificial Sequence: Synthetic oligonucleotide
  Sense strand starting at position 1172 of SEQ ID NO: 1880115
ggauccggcuccucauaaa

SEQ ID NO: 1943461 - RNA, 19 nt, Artificial Sequence
  Description of Artificial Sequence: Synthetic oligonucleotide
  Antisense strand to SEQ ID NO: 1943460
uuuaugaggagccggaucc

SEQ ID NO: 1943462 - RNA, 19 nt, Artificial Sequence
  Description of Artificial Sequence: Synthetic oligonucleotide
  Sense strand starting at position 1263 of SEQ ID NO: 1880115
ugcgugucucgggaugaau

SEQ ID NO: 1943463 - RNA, 19 nt, Artificial Sequence
  Description of Artificial Sequence: Synthetic oligonucleotide
  Antisense strand to SEQ ID NO: 1943462
auucaucccgagacacgca

SEQ ID NO: 1943464 - RNA, 19 nt, Artificial Sequence
  Description of Artificial Sequence: Synthetic oligonucleotide
  Sense strand starting at position 1265 of SEQ ID NO: 1880115
cgugucucgggaugaauug

SEQ ID NO: 1943465 - RNA, 19 nt, Artificial Sequence
  Description of Artificial Sequence: Synthetic oligonucleotide
  Antisense strand to SEQ ID NO: 1943464
caauucaucccgagacacg

SEQ ID NO: 1943466 - RNA, 19 nt, Artificial Sequence
  Description of Artificial Sequence: Synthetic oligonucleotide
  Sense strand starting at position 1426 of SEQ ID NO: 1880115
ggcucuaccaagugagaac

SEQ ID NO: 1943467 - RNA, 19 nt, Artificial Sequence
  Description of Artificial Sequence: Synthetic oligonucleotide
  Antisense strand to SEQ ID NO: 1943466
guucucacuugguagagcc

SEQ ID NO: 1943468 - RNA, 19 nt, Artificial Sequence
  Description of Artificial Sequence: Synthetic oligonucleotide
  Sense strand starting at position 1635 of SEQ ID NO: 1880115
gcggccuucgcgcuacuua

SEQ ID NO: 1943469 - RNA, 19 nt, Artificial Sequence
  Description of Artificial Sequence: Synthetic oligonucleotide
  Antisense strand to SEQ ID NO: 1943468
uaaguagcgcgaaggccgc

SEQ ID NO: 1943470 - RNA, 19 nt, Artificial Sequence
  Description of Artificial Sequence: Synthetic oligonucleotide
  Sense strand starting at position 1702 of SEQ ID NO: 1880115
gaacgacggcgacauguua

SEQ ID NO: 1943471 - RNA, 19 nt, Artificial Sequence
  Description of Artificial Sequence: Synthetic oligonucleotide
  Antisense strand to SEQ ID NO: 1943470
uaacaugucgccgucguuc

SEQ ID NO: 1943472 - RNA, 19 nt, Artificial Sequence
  Description of Artificial Sequence: Synthetic oligonucleotide
  Sense strand starting at position 1733 of SEQ ID NO: 1880115
cugccauccggcuauaaga

SEQ ID NO: 1943473 - RNA, 19 nt, Artificial Sequence
  Description of Artificial Sequence: Synthetic oligonucleotide
  Antisense strand to SEQ ID NO: 1943472
ucuuauagccggauggcag

SEQ ID NO: 1943474 - RNA, 19 nt, Artificial Sequence
  Description of Artificial Sequence: Synthetic oligonucleotide
  Sense strand starting at position 1735 of SEQ ID NO: 1880115
gccauccggcuauaagaau

SEQ ID NO: 1943475 - RNA, 19 nt, Artificial Sequence
  Description of Artificial Sequence: Synthetic oligonucleotide
  Antisense strand to SEQ ID NO: 1943474
auucuuauagccggauggc

SEQ ID NO: 1943476 - RNA, 19 nt, Artificial Sequence
  Description of Artificial Sequence: Synthetic oligonucleotide
  Sense strand starting at position 1793 of SEQ ID NO: 1880115
gaaguagaccuuugcauac

SEQ ID NO: 1943477 - RNA, 19 nt, Artificial Sequence
  Description of Artificial Sequence: Synthetic oligonucleotide
  Antisense strand to SEQ ID NO: 1943476
guaugcaaaggucuacuuc

SEQ ID NO: 1943478 - RNA, 19 nt, Artificial Sequence
  Description of Artificial Sequence: Synthetic oligonucleotide
  Sense strand starting at position 1991 of SEQ ID NO: 1880115
agguaagugugaguucaca

SEQ ID NO: 1943479 - RNA, 19 nt, Artificial Sequence
  Description of Artificial Sequence: Synthetic oligonucleotide
  Antisense strand to SEQ ID NO: 1943478
ugugaacucacacuuaccu

SEQ ID NO: 1943480 - RNA, 19 nt, Artificial Sequence
  Description of Artificial Sequence: Synthetic oligonucleotide
  Sense strand starting at position 2185 of SEQ ID NO: 1880115
ggagaaauccuucguggga

SEQ ID NO: 1943481 - RNA, 19 nt, Artificial Sequence
  Description of Artificial Sequence: Synthetic oligonucleotide
  Antisense strand to SEQ ID NO: 1943480
ucccacgaaggauuucucc

SEQ ID NO: 1943482 - RNA, 19 nt, Artificial Sequence
  Description of Artificial Sequence: Synthetic oligonucleotide
  Sense strand starting at position 2186 of SEQ ID NO: 1880115
gagaaauccuucgugggaa

SEQ ID NO: 1943483 - RNA, 19 nt, Artificial Sequence
  Description of Artificial Sequence: Synthetic oligonucleotide
  Antisense strand to SEQ ID NO: 1943482
uucccacgaaggauuucuc

SEQ ID NO: 1943484 - RNA, 19 nt, Artificial Sequence
  Description of Artificial Sequence: Synthetic oligonucleotide
  Sense strand starting at position 2189 of SEQ ID NO: 1880115
aaauccuucgugggaagca

SEQ ID NO: 1943485 - RNA, 19 nt, Artificial Sequence
  Description of Artificial Sequence: Synthetic oligonucleotide
  Antisense strand to SEQ ID NO: 1943484
ugcuucccacgaaggauuu

SEQ ID NO: 1943486 - RNA, 19 nt, Artificial Sequence
  Description of Artificial Sequence: Synthetic oligonucleotide
  Sense strand starting at position 2221 of SEQ ID NO: 1880115
ugccucaucuacguaggaa

SEQ ID NO: 1943487 - RNA, 19 nt, Artificial Sequence
  Description of Artificial Sequence: Synthetic oligonucleotide
  Antisense strand to SEQ ID NO: 1943486
uuccuacguagaugaggca

SEQ ID NO: 1943488 - RNA, 19 nt, Artificial Sequence
  Description of Artificial Sequence: Synthetic oligonucleotide
  Sense strand starting at position 2222 of SEQ ID NO: 1880115
gccucaucuacguaggaau

SEQ ID NO: 1943489 - RNA, 19 nt, Artificial Sequence
  Description of Artificial Sequence: Synthetic oligonucleotide
  Antisense strand to SEQ ID NO: 1943488
auuccuacguagaugaggc

SEQ ID NO: 1943490 - RNA, 19 nt, Artificial Sequence
  Description of Artificial Sequence: Synthetic oligonucleotide
  Sense strand starting at position 2349 of SEQ ID NO: 1880115
agugaagucuaccucuauc

SEQ ID NO: 1943491 - RNA, 19 nt, Artificial Sequence
  Description of Artificial Sequence: Synthetic oligonucleotide
  Antisense strand to SEQ ID NO: 1943490
gauagagguagacuucacu

SEQ ID NO: 1943492 - RNA, 19 nt, Artificial Sequence
  Description of Artificial Sequence: Synthetic oligonucleotide
  Sense strand starting at position 2578 of SEQ ID NO: 1880115
guggaagucguucaauauc

SEQ ID NO: 1943493 - RNA, 19 nt, Artificial Sequence
  Description of Artificial Sequence: Synthetic oligonucleotide
  Antisense strand to SEQ ID NO: 1943492
gauauugaacgacuuccac

SEQ ID NO: 1943494 - RNA, 19 nt, Artificial Sequence
  Description of Artificial Sequence: Synthetic oligonucleotide
  Sense strand starting at position 2673 of SEQ ID NO: 1880115
cuaggaauauuauaaagac

SEQ ID NO: 1943495 - RNA, 19 nt, Artificial Sequence
  Description of Artificial Sequence: Synthetic oligonucleotide
  Antisense strand to SEQ ID NO: 1943494
gucuuuauaauauuccuag

SEQ ID NO: 1943496 - RNA, 19 nt, Artificial Sequence
  Description of Artificial Sequence: Synthetic oligonucleotide
  Sense strand starting at position 2946 of SEQ ID NO: 1880115
uuuaauauguaggcaacaa

SEQ ID NO: 1943497 - RNA, 19 nt, Artificial Sequence
  Description of Artificial Sequence: Synthetic oligonucleotide
  Antisense strand to SEQ ID NO: 1943496
uuguugccuacauauuaaa

SEQ ID NO: 1943498 - RNA, 19 nt, Artificial Sequence
  Description of Artificial Sequence: Synthetic oligonucleotide
  Sense strand starting at position 2975 of SEQ ID NO: 1880115
ugacaauacuccgcagacu

SEQ ID NO: 1943499 - RNA, 19 nt, Artificial Sequence
  Description of Artificial Sequence: Synthetic oligonucleotide
  Antisense strand to SEQ ID NO: 1943498
agucugcggaguauuguca

SEQ ID NO: 1943500 - RNA, 19 nt, Artificial Sequence
  Description of Artificial Sequence: Synthetic oligonucleotide
  Sense strand starting at position 3244 of SEQ ID NO: 1880115
caagcauuccgggaccagu

SEQ ID NO: 1943501 - RNA, 19 nt, Artificial Sequence
  Description of Artificial Sequence: Synthetic oligonucleotide
  Antisense strand to SEQ ID NO: 1943500
acuggucccggaaugcuug

SEQ ID NO: 1943502 - RNA, 19 nt, Artificial Sequence
  Description of Artificial Sequence: Synthetic oligonucleotide
  Sense strand starting at position 3687 of SEQ ID NO: 1880115
uuggucugagcccaggaau

SEQ ID NO: 1943503 - RNA, 19 nt, Artificial Sequence
  Description of Artificial Sequence: Synthetic oligonucleotide
  Antisense strand to SEQ ID NO: 1943502
auuccugggcucagaccaa

SEQ ID NO: 1943504 - RNA, 19 nt, Artificial Sequence
  Description of Artificial Sequence: Synthetic oligonucleotide
  Sense strand starting at position 3890 of SEQ ID NO: 1880115
gugucuuacuuuguaugaa

SEQ ID NO: 1943505 - RNA, 19 nt, Artificial Sequence
  Description of Artificial Sequence: Synthetic oligonucleotide
  Antisense strand to SEQ ID NO: 1943504
uucauacaaaguaagacac

SEQ ID NO: 1943506 - RNA, 19 nt, Artificial Sequence
  Description of Artificial Sequence: Synthetic oligonucleotide
  Sense strand starting at position 48 of SEQ ID NO: 1880116
gccuguuggauacaggauu

SEQ ID NO: 1943507 - RNA, 19 nt, Artificial Sequence
  Description of Artificial Sequence: Synthetic oligonucleotide
  Antisense strand to SEQ ID NO: 1943506
aauccuguauccaacaggc

SEQ ID NO: 1943508 - RNA, 19 nt, Artificial Sequence
  Description of Artificial Sequence: Synthetic oligonucleotide
  Sense strand starting at position 3224 of SEQ ID NO: 1880116
uggugcuggauuugaugua

SEQ ID NO: 1943509 - RNA, 19 nt, Artificial Sequence
  Description of Artificial Sequence: Synthetic oligonucleotide
  Antisense strand to SEQ ID NO: 1943508
uacaucaaauccagcacca

SEQ ID NO: 1943510 - RNA, 19 nt, Artificial Sequence
  Description of Artificial Sequence: Synthetic oligonucleotide
  Sense strand starting at position 3248 of SEQ ID NO: 1880116
uaccgaggcccucauuaua

SEQ ID NO: 1943511 - RNA, 19 nt, Artificial Sequence
  Description of Artificial Sequence: Synthetic oligonucleotide
  Antisense strand to SEQ ID NO: 1943510
uauaaugagggccucggua

SEQ ID NO: 1943512 - RNA, 19 nt, Artificial Sequence
  Description of Artificial Sequence: Synthetic oligonucleotide
  Sense strand starting at position 3393 of SEQ ID NO: 1880116
cuauuccacuccuugguua

SEQ ID NO: 1943513 - RNA, 19 nt, Artificial Sequence
  Description of Artificial Sequence: Synthetic oligonucleotide
  Antisense strand to SEQ ID NO: 1943512
uaaccaaggaguggaauag

SEQ ID NO: 1943514 - RNA, 19 nt, Artificial Sequence
  Description of Artificial Sequence: Synthetic oligonucleotide
  Sense strand starting at position 3395 of SEQ ID NO: 1880116
auuccacuccuugguuaga

SEQ ID NO: 1943515 - RNA, 19 nt, Artificial Sequence
  Description of Artificial Sequence: Synthetic oligonucleotide
  Antisense strand to SEQ ID NO: 1943514
ucuaaccaaggaguggaau

SEQ ID NO: 1943516 - RNA, 19 nt, Artificial Sequence
  Description of Artificial Sequence: Synthetic oligonucleotide
  Sense strand starting at position 3397 of SEQ ID NO: 1880116
uccacuccuugguuagaga

SEQ ID NO: 1943517 - RNA, 19 nt, Artificial Sequence
  Description of Artificial Sequence: Synthetic oligonucleotide
  Antisense strand to SEQ ID NO: 1943516
ucucuaaccaaggagugga

SEQ ID NO: 1943518 - RNA, 19 nt, Artificial Sequence
  Description of Artificial Sequence: Synthetic oligonucleotide
  Sense strand starting at position 3444 of SEQ ID NO: 1880116
auuguucucugucggguau

SEQ ID NO: 1943519 - RNA, 19 nt, Artificial Sequence
  Description of Artificial Sequence: Synthetic oligonucleotide
  Antisense strand to SEQ ID NO: 1943518
auacccgacagagaacaau

SEQ ID NO: 1943520 - RNA, 19 nt, Artificial Sequence
  Description of Artificial Sequence: Synthetic oligonucleotide
  Sense strand starting at position 3540 of SEQ ID NO: 1880116
uugacuuuguucuugagau

SEQ ID NO: 1943521 - RNA, 19 nt, Artificial Sequence
  Description of Artificial Sequence: Synthetic oligonucleotide
  Antisense strand to SEQ ID NO: 1943520
aucucaagaacaaagucaa

SEQ ID NO: 1943522 - RNA, 19 nt, Artificial Sequence
  Description of Artificial Sequence: Synthetic oligonucleotide
  Sense strand starting at position 3541 of SEQ ID NO: 1880116
ugacuuuguucuugagaug

SEQ ID NO: 1943523 - RNA, 19 nt, Artificial Sequence
  Description of Artificial Sequence: Synthetic oligonucleotide
  Antisense strand to SEQ ID NO: 1943522
caucucaagaacaaaguca

SEQ ID NO: 1943524 - RNA, 19 nt, Artificial Sequence
  Description of Artificial Sequence: Synthetic oligonucleotide
  Sense strand starting at position 3676 of SEQ ID NO: 1880116
gagaguucuccuuggagac

SEQ ID NO: 1943525 - RNA, 19 nt, Artificial Sequence
  Description of Artificial Sequence: Synthetic oligonucleotide
  Antisense strand to SEQ ID NO: 1943524
gucuccaaggagaacucuc

SEQ ID NO: 1943526 - RNA, 19 nt, Artificial Sequence
  Description of Artificial Sequence: Synthetic oligonucleotide
  Sense strand starting at position 3678 of SEQ ID NO: 1880116
gaguucuccuuggagacca

SEQ ID NO: 1943527 - RNA, 19 nt, Artificial Sequence
  Description of Artificial Sequence: Synthetic oligonucleotide
  Antisense strand to SEQ ID NO: 1943526
uggucuccaaggagaacuc

SEQ ID NO: 1943528 - RNA, 19 nt, Artificial Sequence
  Description of Artificial Sequence: Synthetic oligonucleotide
  Sense strand starting at position 3766 of SEQ ID NO: 1880116
gagauuaggugacagugua

SEQ ID NO: 1943529 - RNA, 19 nt, Artificial Sequence
  Description of Artificial Sequence: Synthetic oligonucleotide
  Antisense strand to SEQ ID NO: 1943528
uacacugucaccuaaucuc

SEQ ID NO: 1943530 - RNA, 19 nt, Artificial Sequence
  Description of Artificial Sequence: Synthetic oligonucleotide
  Sense strand starting at position 3774 of SEQ ID NO: 1880116
gugacaguguaguaauaac

SEQ ID NO: 1943531 - RNA, 19 nt, Artificial Sequence
  Description of Artificial Sequence: Synthetic oligonucleotide
  Antisense strand to SEQ ID NO: 1943530
guuauuacuacacugucac

SEQ ID NO: 1943532 - RNA, 19 nt, Artificial Sequence
  Description of Artificial Sequence: Synthetic oligonucleotide
  Sense strand starting at position 3784 of SEQ ID NO: 1880116
aguaauaacugcugaauac

SEQ ID NO: 1943533 - RNA, 19 nt, Artificial Sequence
  Description of Artificial Sequence: Synthetic oligonucleotide
  Antisense strand to SEQ ID NO: 1943532
guauucagcaguuauuacu

SEQ ID NO: 1943534 - RNA, 19 nt, Artificial Sequence
  Description of Artificial Sequence: Synthetic oligonucleotide
  Sense strand starting at position 3785 of SEQ ID NO: 1880116
guaauaacugcugaauacu

SEQ ID NO: 1943535 - RNA, 19 nt, Artificial Sequence
  Description of Artificial Sequence: Synthetic oligonucleotide
  Antisense strand to SEQ ID NO: 1943534
aguauucagcaguuauuac

SEQ ID NO: 1943536 - RNA, 19 nt, Artificial Sequence
  Description of Artificial Sequence: Synthetic oligonucleotide
  Sense strand starting at position 382 of SEQ ID NO: 1880117
accucaguugaucagaagu

SEQ ID NO: 1943537 - RNA, 19 nt, Artificial Sequence
  Description of Artificial Sequence: Synthetic oligonucleotide
  Antisense strand to SEQ ID NO: 1943536
acuucugaucaacugaggu

SEQ ID NO: 1943538 - RNA, 19 nt, Artificial Sequence
  Description of Artificial Sequence: Synthetic oligonucleotide
  Sense strand starting at position 877 of SEQ ID NO: 1880117
uaaggaauuugccagggua

SEQ ID NO: 1943539 - RNA, 19 nt, Artificial Sequence
  Description of Artificial Sequence: Synthetic oligonucleotide
  Antisense strand to SEQ ID NO: 1943538
uacccuggcaaauuccuua

SEQ ID NO: 1943540 - RNA, 19 nt, Artificial Sequence
  Description of Artificial Sequence: Synthetic oligonucleotide
  Sense strand starting at position 995 of SEQ ID NO: 1880117
ggacacuggcgccagaaau

SEQ ID NO: 1943541 - RNA, 19 nt, Artificial Sequence
  Description of Artificial Sequence: Synthetic oligonucleotide
  Antisense strand to SEQ ID NO: 1943540
auuucuggcgccagugucc

SEQ ID NO: 1943542 - RNA, 19 nt, Artificial Sequence
  Description of Artificial Sequence: Synthetic oligonucleotide
  Sense strand starting at position 1050 of SEQ ID NO: 1880117
gggugcuaucuagaaagcu

SEQ ID NO: 1943543 - RNA, 19 nt, Artificial Sequence
  Description of Artificial Sequence: Synthetic oligonucleotide
  Antisense strand to SEQ ID NO: 1943542
agcuuucuagauagcaccc

SEQ ID NO: 1943544 - RNA, 19 nt, Artificial Sequence
  Description of Artificial Sequence: Synthetic oligonucleotide
  Sense strand starting at position 1060 of SEQ ID NO: 1880117
uagaaagcugccuggcaau

SEQ ID NO: 1943545 - RNA, 19 nt, Artificial Sequence
  Description of Artificial Sequence: Synthetic oligonucleotide
  Antisense strand to SEQ ID NO: 1943544
auugccaggcagcuuucua

SEQ ID NO: 1943546 - RNA, 19 nt, Artificial Sequence
  Description of Artificial Sequence: Synthetic oligonucleotide
  Sense strand starting at position 1090 of SEQ ID NO: 1880117
gcggaagcgagacaucaaa

SEQ ID NO: 1943547 - RNA, 19 nt, Artificial Sequence
  Description of Artificial Sequence: Synthetic oligonucleotide
  Antisense strand to SEQ ID NO: 1943546
uuugaugucucgcuuccgc

SEQ ID NO: 1943548 - RNA, 19 nt, Artificial Sequence
  Description of Artificial Sequence: Synthetic oligonucleotide
  Sense strand starting at position 1181 of SEQ ID NO: 1880117
ggacccgucuccucauaaa

SEQ ID NO: 1943549 - RNA, 19 nt, Artificial Sequence
  Description of Artificial Sequence: Synthetic oligonucleotide
  Antisense strand to SEQ ID NO: 1943548
uuuaugaggagacgggucc

SEQ ID NO: 1943550 - RNA, 19 nt, Artificial Sequence
  Description of Artificial Sequence: Synthetic oligonucleotide
  Sense strand starting at position 1221 of SEQ ID NO: 1880117
ggaggaucgcagcgcauuu

SEQ ID NO: 1943551 - RNA, 19 nt, Artificial Sequence
  Description of Artificial Sequence: Synthetic oligonucleotide
  Antisense strand to SEQ ID NO: 1943550
aaaugcgcugcgauccucc

SEQ ID NO: 1943552 - RNA, 19 nt, Artificial Sequence
  Description of Artificial Sequence: Synthetic oligonucleotide
  Sense strand starting at position 1232 of SEQ ID NO: 1880117
gcgcauuucggccaagaca

SEQ ID NO: 1943553 - RNA, 19 nt, Artificial Sequence
  Description of Artificial Sequence: Synthetic oligonucleotide
  Antisense strand to SEQ ID NO: 1943552
ugucuuggccgaaaugcgc

SEQ ID NO: 1943554 - RNA, 19 nt, Artificial Sequence
  Description of Artificial Sequence: Synthetic oligonucleotide
  Sense strand starting at position 1282 of SEQ ID NO: 1880117
gaugaauugcguuaggaca

SEQ ID NO: 1943555 - RNA, 19 nt, Artificial Sequence
  Description of Artificial Sequence: Synthetic oligonucleotide
  Antisense strand to SEQ ID NO: 1943554
uguccuaacgcaauucauc

SEQ ID NO: 1943556 - RNA, 19 nt, Artificial Sequence
  Description of Artificial Sequence: Synthetic oligonucleotide
  Sense strand starting at position 1520 of SEQ ID NO: 1880117
gugaaaugugacuggaggu

SEQ ID NO: 1943557 - RNA, 19 nt, Artificial Sequence
  Description of Artificial Sequence: Synthetic oligonucleotide
  Antisense strand to SEQ ID NO: 1943556
accuccagucacauuucac

SEQ ID NO: 1943558 - RNA, 19 nt, Artificial Sequence
  Description of Artificial Sequence: Synthetic oligonucleotide
  Sense strand starting at position 1658 of SEQ ID NO: 1880117
gcgcuagcuagcuugugua

SEQ ID NO: 1943559 - RNA, 19 nt, Artificial Sequence
  Description of Artificial Sequence: Synthetic oligonucleotide
  Antisense strand to SEQ ID NO: 1943558
uacacaagcuagcuagcgc

SEQ ID NO: 1943560 - RNA, 19 nt, Artificial Sequence
  Description of Artificial Sequence: Synthetic oligonucleotide
  Sense strand starting at position 1660 of SEQ ID NO: 1880117
gcuagcuagcuuguguaaa

SEQ ID NO: 1943561 - RNA, 19 nt, Artificial Sequence
  Description of Artificial Sequence: Synthetic oligonucleotide
  Antisense strand to SEQ ID NO: 1943560
uuuacacaagcuagcuagc

SEQ ID NO: 1943562 - RNA, 19 nt, Artificial Sequence
  Description of Artificial Sequence: Synthetic oligonucleotide
  Sense strand starting at position 1715 of SEQ ID NO: 1880117
agcgacauauuacuacuau

SEQ ID NO: 1943563 - RNA, 19 nt, Artificial Sequence
  Description of Artificial Sequence: Synthetic oligonucleotide
  Antisense strand to SEQ ID NO: 1943562
auaguaguaauaugucgcu

SEQ ID NO: 1943564 - RNA, 19 nt, Artificial Sequence
  Description of Artificial Sequence: Synthetic oligonucleotide
  Sense strand starting at position 1748 of SEQ ID NO: 1880117
cugugagagaaacgauuaa

SEQ ID NO: 1943565 - RNA, 19 nt, Artificial Sequence
  Description of Artificial Sequence: Synthetic oligonucleotide
  Antisense strand to SEQ ID NO: 1943564
uuaaucguuucucucacag

SEQ ID NO: 1943566 - RNA, 19 nt, Artificial Sequence
  Description of Artificial Sequence: Synthetic oligonucleotide
  Sense strand starting at position 1755 of SEQ ID NO: 1880117
agaaacgauuaagaguaaa

SEQ ID NO: 1943567 - RNA, 19 nt, Artificial Sequence
  Description of Artificial Sequence: Synthetic oligonucleotide
  Antisense strand to SEQ ID NO: 1943566
uuuacucuuaaucguuucu

SEQ ID NO: 1943568 - RNA, 19 nt, Artificial Sequence
  Description of Artificial Sequence: Synthetic oligonucleotide
  Sense strand starting at position 1811 of SEQ ID NO: 1880117
gcagacuguucuuuaaacu

SEQ ID NO: 1943569 - RNA, 19 nt, Artificial Sequence
  Description of Artificial Sequence: Synthetic oligonucleotide
  Antisense strand to SEQ ID NO: 1943568
aguuuaaagaacagucugc

SEQ ID NO: 1943570 - RNA, 19 nt, Artificial Sequence
  Description of Artificial Sequence: Synthetic oligonucleotide
  Sense strand starting at position 2367 of SEQ ID NO: 1880117
gcaucuguucucgcccgaa

SEQ ID NO: 1943571 - RNA, 19 nt, Artificial Sequence
  Description of Artificial Sequence: Synthetic oligonucleotide
  Antisense strand to SEQ ID NO: 1943570
uucgggcgagaacagaugc

SEQ ID NO: 1943572 - RNA, 19 nt, Artificial Sequence
  Description of Artificial Sequence: Synthetic oligonucleotide
  Sense strand starting at position 2522 of SEQ ID NO: 1880117
uccuuauccuugucaugua

SEQ ID NO: 1943573 - RNA, 19 nt, Artificial Sequence
  Description of Artificial Sequence: Synthetic oligonucleotide
  Antisense strand to SEQ ID NO: 1943572
uacaugacaaggauaagga

SEQ ID NO: 1943574 - RNA, 19 nt, Artificial Sequence
  Description of Artificial Sequence: Synthetic oligonucleotide
  Sense strand starting at position 2540 of SEQ ID NO: 1880117
agcauuccgcuugaaauug

SEQ ID NO: 1943575 - RNA, 19 nt, Artificial Sequence
  Description of Artificial Sequence: Synthetic oligonucleotide
  Antisense strand to SEQ ID NO: 1943574
caauuucaagcggaaugcu

SEQ ID NO: 1943576 - RNA, 19 nt, Artificial Sequence
  Description of Artificial Sequence: Synthetic oligonucleotide
  Sense strand starting at position 2599 of SEQ ID NO: 1880117
gaaagaggcuucucagaug

SEQ ID NO: 1943577 - RNA, 19 nt, Artificial Sequence
  Description of Artificial Sequence: Synthetic oligonucleotide
  Antisense strand to SEQ ID NO: 1943576
caucugagaagccucuuuc

SEQ ID NO: 1943578 - RNA, 19 nt, Artificial Sequence
  Description of Artificial Sequence: Synthetic oligonucleotide
  Sense strand starting at position 2607 of SEQ ID NO: 1880117
cuucucagaugacugcaaa

SEQ ID NO: 1943579 - RNA, 19 nt, Artificial Sequence
  Description of Artificial Sequence: Synthetic oligonucleotide
  Antisense strand to SEQ ID NO: 1943578
uuugcagucaucugagaag

SEQ ID NO: 1943580 - RNA, 19 nt, Artificial Sequence
  Description of Artificial Sequence: Synthetic oligonucleotide
  Sense strand starting at position 2857 of SEQ ID NO: 1880117
uagugcuuaccucacguua

SEQ ID NO: 1943581 - RNA, 19 nt, Artificial Sequence
  Description of Artificial Sequence: Synthetic oligonucleotide
  Antisense strand to SEQ ID NO: 1943580
uaacgugagguaagcacua

SEQ ID NO: 1943582 - RNA, 19 nt, Artificial Sequence
  Description of Artificial Sequence: Synthetic oligonucleotide
  Sense strand starting at position 2923 of SEQ ID NO: 1880117
acaaauaccugggauacau

SEQ ID NO: 1943583 - RNA, 19 nt, Artificial Sequence
  Description of Artificial Sequence: Synthetic oligonucleotide
  Antisense strand to SEQ ID NO: 1943582
auguaucccagguauuugu

SEQ ID NO: 1943584 - RNA, 19 nt, Artificial Sequence
  Description of Artificial Sequence: Synthetic oligonucleotide
  Sense strand starting at position 2932 of SEQ ID NO: 1880117
ugggauacaucuuauuuga

SEQ ID NO: 1943585 - RNA, 19 nt, Artificial Sequence
  Description of Artificial Sequence: Synthetic oligonucleotide
  Antisense strand to SEQ ID NO: 1943584
ucaaauaagauguauccca

SEQ ID NO: 1943586 - RNA, 19 nt, Artificial Sequence
  Description of Artificial Sequence: Synthetic oligonucleotide
  Sense strand starting at position 2990 of SEQ ID NO: 1880117
gauuauaacgcaggaaaca

SEQ ID NO: 1943587 - RNA, 19 nt, Artificial Sequence
  Description of Artificial Sequence: Synthetic oligonucleotide
  Antisense strand to SEQ ID NO: 1943586
uguuuccugcguuauaauc

SEQ ID NO: 1943588 - RNA, 19 nt, Artificial Sequence
  Description of Artificial Sequence: Synthetic oligonucleotide
  Sense strand starting at position 3009 of SEQ ID NO: 1880117
cugugaaguaaguaaaguu

SEQ ID NO: 1943589 - RNA, 19 nt, Artificial Sequence
  Description of Artificial Sequence: Synthetic oligonucleotide
  Antisense strand to SEQ ID NO: 1943588
aacuuuacuuacuucacag

SEQ ID NO: 1943590 - RNA, 19 nt, Artificial Sequence
  Description of Artificial Sequence: Synthetic oligonucleotide
  Sense strand starting at position 3512 of SEQ ID NO: 1880117
gcugacucauccuugacuu

SEQ ID NO: 1943591 - RNA, 19 nt, Artificial Sequence
  Description of Artificial Sequence: Synthetic oligonucleotide
  Antisense strand to SEQ ID NO: 1943590
aagucaaggaugagucagc

SEQ ID NO: 1943592 - RNA, 19 nt, Artificial Sequence
  Description of Artificial Sequence: Synthetic oligonucleotide
  Sense strand starting at position 3524 of SEQ ID NO: 1880117
uugacuugguucuccagau

SEQ ID NO: 1943593 - RNA, 19 nt, Artificial Sequence
  Description of Artificial Sequence: Synthetic oligonucleotide
  Antisense strand to SEQ ID NO: 1943592
aucuggagaaccaagucaa

SEQ ID NO: 1943594 - RNA, 19 nt, Artificial Sequence
  Description of Artificial Sequence: Synthetic oligonucleotide
  Sense strand starting at position 3525 of SEQ ID NO: 1880117
ugacuugguucuccagaug

SEQ ID NO: 1943595 - RNA, 19 nt, Artificial Sequence
  Description of Artificial Sequence: Synthetic oligonucleotide
  Antisense strand to SEQ ID NO: 1943594
caucuggagaaccaaguca

SEQ ID NO: 1943596 - RNA, 19 nt, Artificial Sequence
  Description of Artificial Sequence: Synthetic oligonucleotide
  Sense strand starting at position 3665 of SEQ ID NO: 1880117
gucuccucuggagagcaua

SEQ ID NO: 1943597 - RNA, 19 nt, Artificial Sequence
  Description of Artificial Sequence: Synthetic oligonucleotide
  Antisense strand to SEQ ID NO: 1943596
uaugcucuccagaggagac

SEQ ID NO: 1943598 - RNA, 19 nt, Artificial Sequence
  Description of Artificial Sequence: Synthetic oligonucleotide
  Sense strand starting at position 3749 of SEQ ID NO: 1880117
gagggauuaggugacggua

SEQ ID NO: 1943599 - RNA, 19 nt, Artificial Sequence
  Description of Artificial Sequence: Synthetic oligonucleotide
  Antisense strand to SEQ ID NO: 1943598
uaccgucaccuaaucccuc

SEQ ID NO: 1943600 - RNA, 19 nt, Artificial Sequence
  Description of Artificial Sequence: Synthetic oligonucleotide
  Sense strand starting at position 3763 of SEQ ID NO: 1880117
cgguauaguaacugcugaa

SEQ ID NO: 1943601 - RNA, 19 nt, Artificial Sequence
  Description of Artificial Sequence: Synthetic oligonucleotide
  Antisense strand to SEQ ID NO: 1943600
uucagcaguuacuauaccg

SEQ ID NO: 1943602 - RNA, 19 nt, Artificial Sequence
  Description of Artificial Sequence: Synthetic oligonucleotide
  Sense strand starting at position 3767 of SEQ ID NO: 1880117
auaguaacugcugaauacu

SEQ ID NO: 1943603 - RNA, 19 nt, Artificial Sequence
  Description of Artificial Sequence: Synthetic oligonucleotide
  Antisense strand to SEQ ID NO: 1943602
aguauucagcaguuacuau

SEQ ID NO: 1943604 - RNA, 19 nt, Artificial Sequence
  Description of Artificial Sequence: Synthetic oligonucleotide
  Sense strand starting at position 3829 of SEQ ID NO: 1880117
acacaucguccagguagua

SEQ ID NO: 1943605 - RNA, 19 nt, Artificial Sequence
  Description of Artificial Sequence: Synthetic oligonucleotide
  Antisense strand to SEQ ID NO: 1943604
uacuaccuggacgaugugu

SEQ ID NO: 1943606 - RNA, 19 nt, Artificial Sequence
  Description of Artificial Sequence: Synthetic oligonucleotide
  Sense strand starting at position 3851 of SEQ ID NO: 1880117
gagaaauacuuucugggua

SEQ ID NO: 1943607 - RNA, 19 nt, Artificial Sequence
  Description of Artificial Sequence: Synthetic oligonucleotide
  Antisense strand to SEQ ID NO: 1943606
uacccagaaaguauuucuc

SEQ ID NO: 1943608 - RNA, 19 nt, Artificial Sequence
  Description of Artificial Sequence: Synthetic oligonucleotide
  Sense strand starting at position 3856 of SEQ ID NO: 1880117
auacuuucuggguaucuga

SEQ ID NO: 1943609 - RNA, 19 nt, Artificial Sequence
  Description of Artificial Sequence: Synthetic oligonucleotide
  Antisense strand to SEQ ID NO: 1943608
ucagauacccagaaaguau

SEQ ID NO: 1943610 - RNA, 19 nt, Artificial Sequence
  Description of Artificial Sequence: Synthetic oligonucleotide
  Sense strand starting at position 3872 of SEQ ID NO: 1880117
ugaccagccuucguggaaa

SEQ ID NO: 1943611 - RNA, 19 nt, Artificial Sequence
  Description of Artificial Sequence: Synthetic oligonucleotide
  Antisense strand to SEQ ID NO: 1943610
uuuccacgaaggcugguca

SEQ ID NO: 1943612 - RNA, 19 nt, Artificial Sequence
  Description of Artificial Sequence: Synthetic oligonucleotide
  Sense strand starting at position 3874 of SEQ ID NO: 1880117
accagccuucguggaaaga

SEQ ID NO: 1943613 - RNA, 19 nt, Artificial Sequence
  Description of Artificial Sequence: Synthetic oligonucleotide
  Antisense strand to SEQ ID NO: 1943612
ucuuuccacgaaggcuggu

SEQ ID NO: 1943614 - RNA, 19 nt, Artificial Sequence
  Description of Artificial Sequence: Synthetic oligonucleotide
  Sense strand starting at position 3875 of SEQ ID NO: 1880117
ccagccuucguggaaagaa

SEQ ID NO: 1943615 - RNA, 19 nt, Artificial Sequence
  Description of Artificial Sequence: Synthetic oligonucleotide
  Antisense strand to SEQ ID NO: 1943614
uucuuuccacgaaggcugg

SEQ ID NO: 1943616 - RNA, 19 nt, Artificial Sequence
  Description of Artificial Sequence: Synthetic oligonucleotide
  Sense strand starting at position 55 of SEQ ID NO: 1880118
cagauuagcugccauguau

SEQ ID NO: 1943617 - RNA, 19 nt, Artificial Sequence
  Description of Artificial Sequence: Synthetic oligonucleotide
  Antisense strand to SEQ ID NO: 1943616
auacauggcagcuaaucug

SEQ ID NO: 1943618 - RNA, 19 nt, Artificial Sequence
  Description of Artificial Sequence: Synthetic oligonucleotide
  Sense strand starting at position 62 of SEQ ID NO: 1880118
gcugccauguaucaccaaa

SEQ ID NO: 1943619 - RNA, 19 nt, Artificial Sequence
  Description of Artificial Sequence: Synthetic oligonucleotide
  Antisense strand to SEQ ID NO: 1943618
uuuggugauacauggcagc

SEQ ID NO: 1943620 - RNA, 19 nt, Artificial Sequence
  Description of Artificial Sequence: Synthetic oligonucleotide
  Sense strand starting at position 226 of SEQ ID NO: 1880118
gagugagagaccuguccua

SEQ ID NO: 1943621 - RNA, 19 nt, Artificial Sequence
  Description of Artificial Sequence: Synthetic oligonucleotide
  Antisense strand to SEQ ID NO: 1943620
uaggacaggucucucacuc

SEQ ID NO: 1943622 - RNA, 19 nt, Artificial Sequence
  Description of Artificial Sequence: Synthetic oligonucleotide
  Sense strand starting at position 839 of SEQ ID NO: 1880118
ggugauuuacagugcuauu

SEQ ID NO: 1943623 - RNA, 19 nt, Artificial Sequence
  Description of Artificial Sequence: Synthetic oligonucleotide
  Antisense strand to SEQ ID NO: 1943622
aauagcacuguaaaucacc

SEQ ID NO: 1943624 - RNA, 19 nt, Artificial Sequence
  Description of Artificial Sequence: Synthetic oligonucleotide
  Sense strand starting at position 842 of SEQ ID NO: 1880118
gauuuacagugcuauuuga

SEQ ID NO: 1943625 - RNA, 19 nt, Artificial Sequence
  Description of Artificial Sequence: Synthetic oligonucleotide
  Antisense strand to SEQ ID NO: 1943624
ucaaauagcacuguaaauc

SEQ ID NO: 1943626 - RNA, 19 nt, Artificial Sequence
  Description of Artificial Sequence: Synthetic oligonucleotide
  Sense strand starting at position 893 of SEQ ID NO: 1880118
acgcgugucagguguaaac

SEQ ID NO: 1943627 - RNA, 19 nt, Artificial Sequence
  Description of Artificial Sequence: Synthetic oligonucleotide
  Antisense strand to SEQ ID NO: 1943626
guuuacaccugacacgcgu

SEQ ID NO: 1943628 - RNA, 19 nt, Artificial Sequence
  Description of Artificial Sequence: Synthetic oligonucleotide
  Sense strand starting at position 1113 of SEQ ID NO: 1880118
ucgcuuaaagucugaagaa

SEQ ID NO: 1943629 - RNA, 19 nt, Artificial Sequence
  Description of Artificial Sequence: Synthetic oligonucleotide
  Antisense strand to SEQ ID NO: 1943628
uucuucagacuuuaagcga

SEQ ID NO: 1943630 - RNA, 19 nt, Artificial Sequence
  Description of Artificial Sequence: Synthetic oligonucleotide
  Sense strand starting at position 1114 of SEQ ID NO: 1880118
cgcuuaaagucugaagaaa

SEQ ID NO: 1943631 - RNA, 19 nt, Artificial Sequence
  Description of Artificial Sequence: Synthetic oligonucleotide
  Antisense strand to SEQ ID NO: 1943630
uuucuucagacuuuaagcg

SEQ ID NO: 1943632 - RNA, 19 nt, Artificial Sequence
  Description of Artificial Sequence: Synthetic oligonucleotide
  Sense strand starting at position 1318 of SEQ ID NO: 1880118
acgcaaaguaagcguguua

SEQ ID NO: 1943633 - RNA, 19 nt, Artificial Sequence
  Description of Artificial Sequence: Synthetic oligonucleotide
  Antisense strand to SEQ ID NO: 1943632
uaacacgcuuacuuugcgu

SEQ ID NO: 1943634 - RNA, 19 nt, Artificial Sequence
  Description of Artificial Sequence: Synthetic oligonucleotide
  Sense strand starting at position 1379 of SEQ ID NO: 1880118
gcuuucuucccagagaacu

SEQ ID NO: 1943635 - RNA, 19 nt, Artificial Sequence
  Description of Artificial Sequence: Synthetic oligonucleotide
  Antisense strand to SEQ ID NO: 1943634
aguucucugggaagaaagc

SEQ ID NO: 1943636 - RNA, 19 nt, Artificial Sequence
  Description of Artificial Sequence: Synthetic oligonucleotide
  Sense strand starting at position 1703 of SEQ ID NO: 1880118
ggcgacauguuacuuccua

SEQ ID NO: 1943637 - RNA, 19 nt, Artificial Sequence
  Description of Artificial Sequence: Synthetic oligonucleotide
  Antisense strand to SEQ ID NO: 1943636
uaggaaguaacaugucgcc

SEQ ID NO: 1943638 - RNA, 19 nt, Artificial Sequence
  Description of Artificial Sequence: Synthetic oligonucleotide
  Sense strand starting at position 1704 of SEQ ID NO: 1880118
gcgacauguuacuuccuau

SEQ ID NO: 1943639 - RNA, 19 nt, Artificial Sequence
  Description of Artificial Sequence: Synthetic oligonucleotide
  Antisense strand to SEQ ID NO: 1943638
auaggaaguaacaugucgc

SEQ ID NO: 1943640 - RNA, 19 nt, Artificial Sequence
  Description of Artificial Sequence: Synthetic oligonucleotide
  Sense strand starting at position 1791 of SEQ ID NO: 1880118
agauaugacccuuggcgua

SEQ ID NO: 1943641 - RNA, 19 nt, Artificial Sequence
  Description of Artificial Sequence: Synthetic oligonucleotide
  Antisense strand to SEQ ID NO: 1943640
uacgccaagggucauaucu

SEQ ID NO: 1943642 - RNA, 19 nt, Artificial Sequence
  Description of Artificial Sequence: Synthetic oligonucleotide
  Sense strand starting at position 2394 of SEQ ID NO: 1880118
gccuguguuaaggagcaau

SEQ ID NO: 1943643 - RNA, 19 nt, Artificial Sequence
  Description of Artificial Sequence: Synthetic oligonucleotide
  Antisense strand to SEQ ID NO: 1943642
auugcuccuuaacacaggc

SEQ ID NO: 1943644 - RNA, 19 nt, Artificial Sequence
  Description of Artificial Sequence: Synthetic oligonucleotide
  Sense strand starting at position 2397 of SEQ ID NO: 1880118
uguguuaaggagcaaucuu

SEQ ID NO: 1943645 - RNA, 19 nt, Artificial Sequence
  Description of Artificial Sequence: Synthetic oligonucleotide
  Antisense strand to SEQ ID NO: 1943644
aagauugcuccuuaacaca

SEQ ID NO: 1943646 - RNA, 19 nt, Artificial Sequence
  Description of Artificial Sequence: Synthetic oligonucleotide
  Sense strand starting at position 2409 of SEQ ID NO: 1880118
caaucuuucgguggccaga

SEQ ID NO: 1943647 - RNA, 19 nt, Artificial Sequence
  Description of Artificial Sequence: Synthetic oligonucleotide
  Antisense strand to SEQ ID NO: 1943646
ucuggccaccgaaagauug

SEQ ID NO: 1943648 - RNA, 19 nt, Artificial Sequence
  Description of Artificial Sequence: Synthetic oligonucleotide
  Sense strand starting at position 2531 of SEQ ID NO: 1880118
ugcagcauuccgcuugcau

SEQ ID NO: 1943649 - RNA, 19 nt, Artificial Sequence
  Description of Artificial Sequence: Synthetic oligonucleotide
  Antisense strand to SEQ ID NO: 1943648
augcaagcggaaugcugca

SEQ ID NO: 1943650 - RNA, 19 nt, Artificial Sequence
  Description of Artificial Sequence: Synthetic oligonucleotide
  Sense strand starting at position 2532 of SEQ ID NO: 1880118
gcagcauuccgcuugcauu

SEQ ID NO: 1943651 - RNA, 19 nt, Artificial Sequence
  Description of Artificial Sequence: Synthetic oligonucleotide
  Antisense strand to SEQ ID NO: 1943650
aaugcaagcggaaugcugc

SEQ ID NO: 1943652 - RNA, 19 nt, Artificial Sequence
  Description of Artificial Sequence: Synthetic oligonucleotide
  Sense strand starting at position 2533 of SEQ ID NO: 1880118
cagcauuccgcuugcauuu

SEQ ID NO: 1943653 - RNA, 19 nt, Artificial Sequence
  Description of Artificial Sequence: Synthetic oligonucleotide
  Antisense strand to SEQ ID NO: 1943652
aaaugcaagcggaaugcug

SEQ ID NO: 1943654 - RNA, 19 nt, Artificial Sequence
  Description of Artificial Sequence: Synthetic oligonucleotide
  Sense strand starting at position 2546 of SEQ ID NO: 1880118
gcauuuggaagccguuuaa

SEQ ID NO: 1943655 - RNA, 19 nt, Artificial Sequence
  Description of Artificial Sequence: Synthetic oligonucleotide
  Antisense strand to SEQ ID NO: 1943654
uuaaacggcuuccaaaugc

SEQ ID NO: 1943656 - RNA, 19 nt, Artificial Sequence
  Description of Artificial Sequence: Synthetic oligonucleotide
  Sense strand starting at position 2576 of SEQ ID NO: 1880118
agccauauuuaugaaagua

SEQ ID NO: 1943657 - RNA, 19 nt, Artificial Sequence
  Description of Artificial Sequence: Synthetic oligonucleotide
  Antisense strand to SEQ ID NO: 1943656
uacuuucauaaauauggcu

SEQ ID NO: 1943658 - RNA, 19 nt, Artificial Sequence
  Description of Artificial Sequence: Synthetic oligonucleotide
  Sense strand starting at position 3338 of SEQ ID NO: 1880118
acauuccacuccuugguua

SEQ ID NO: 1943659 - RNA, 19 nt, Artificial Sequence
  Description of Artificial Sequence: Synthetic oligonucleotide
  Antisense strand to SEQ ID NO: 1943658
uaaccaaggaguggaaugu

SEQ ID NO: 1943660 - RNA, 19 nt, Artificial Sequence
  Description of Artificial Sequence: Synthetic oligonucleotide
  Sense strand starting at position 3420 of SEQ ID NO: 1880118
cuuucuugagaguguacuu

SEQ ID NO: 1943661 - RNA, 19 nt, Artificial Sequence
  Description of Artificial Sequence: Synthetic oligonucleotide
  Antisense strand to SEQ ID NO: 1943660
aaguacacucucaagaaag

SEQ ID NO: 1943662 - RNA, 19 nt, Artificial Sequence
  Description of Artificial Sequence: Synthetic oligonucleotide
  Sense strand starting at position 3485 of SEQ ID NO: 1880118
uugacuuuguucucgcgau

SEQ ID NO: 1943663 - RNA, 19 nt, Artificial Sequence
  Description of Artificial Sequence: Synthetic oligonucleotide
  Antisense strand to SEQ ID NO: 1943662
aucgcgagaacaaagucaa

SEQ ID NO: 1943664 - RNA, 19 nt, Artificial Sequence
  Description of Artificial Sequence: Synthetic oligonucleotide
  Sense strand starting at position 3486 of SEQ ID NO: 1880118
ugacuuuguucucgcgaug

SEQ ID NO: 1943665 - RNA, 19 nt, Artificial Sequence
  Description of Artificial Sequence: Synthetic oligonucleotide
  Antisense strand to SEQ ID NO: 1943664
caucgcgagaacaaaguca

SEQ ID NO: 1943666 - RNA, 19 nt, Artificial Sequence
  Description of Artificial Sequence: Synthetic oligonucleotide
  Sense strand starting at position 3621 of SEQ ID NO: 1880118
gagaguucucuuuggagac

SEQ ID NO: 1943667 - RNA, 19 nt, Artificial Sequence
  Description of Artificial Sequence: Synthetic oligonucleotide
  Antisense strand to SEQ ID NO: 1943666
gucuccaaagagaacucuc

SEQ ID NO: 1943668 - RNA, 19 nt, Artificial Sequence
  Description of Artificial Sequence: Synthetic oligonucleotide
  Sense strand starting at position 3707 of SEQ ID NO: 1880118
ugagggauugggugacagu

SEQ ID NO: 1943669 - RNA, 19 nt, Artificial Sequence
  Description of Artificial Sequence: Synthetic oligonucleotide
  Antisense strand to SEQ ID NO: 1943668
acugucacccaaucccuca

SEQ ID NO: 1943670 - RNA, 19 nt, Artificial Sequence
  Description of Artificial Sequence: Synthetic oligonucleotide
  Sense strand starting at position 3716 of SEQ ID NO: 1880118
gggugacaguguaguaacu

SEQ ID NO: 1943671 - RNA, 19 nt, Artificial Sequence
  Description of Artificial Sequence: Synthetic oligonucleotide
  Antisense strand to SEQ ID NO: 1943670
aguuacuacacugucaccc

SEQ ID NO: 1943672 - RNA, 19 nt, Artificial Sequence
  Description of Artificial Sequence: Synthetic oligonucleotide
  Sense strand starting at position 3810 of SEQ ID NO: 1880118
gagaaaugcuuucugggua

SEQ ID NO: 1943673 - RNA, 19 nt, Artificial Sequence
  Description of Artificial Sequence: Synthetic oligonucleotide
  Antisense strand to SEQ ID NO: 1943672
uacccagaaagcauuucuc

SEQ ID NO: 1943674 - RNA, 19 nt, Artificial Sequence
  Description of Artificial Sequence: Synthetic oligonucleotide
  Sense strand starting at position 3811 of SEQ ID NO: 1880118
agaaaugcuuucuggguau

SEQ ID NO: 1943675 - RNA, 19 nt, Artificial Sequence
  Description of Artificial Sequence: Synthetic oligonucleotide
  Antisense strand to SEQ ID NO: 1943674
auacccagaaagcauuucu

SEQ ID NO: 1943676 - RNA, 19 nt, Artificial Sequence
  Description of Artificial Sequence: Synthetic oligonucleotide
  Sense strand starting at position 3813 of SEQ ID NO: 1880118
aaaugcuuucuggguaucu

SEQ ID NO: 1943677 - RNA, 19 nt, Artificial Sequence
  Description of Artificial Sequence: Synthetic oligonucleotide
  Antisense strand to SEQ ID NO: 1943676
agauacccagaaagcauuu

SEQ ID NO: 1943678 - RNA, 19 nt, Artificial Sequence
  Description of Artificial Sequence: Synthetic oligonucleotide
  Sense strand starting at position 3815 of SEQ ID NO: 1880118
augcuuucuggguaucuga

SEQ ID NO: 1943679 - RNA, 19 nt, Artificial Sequence
  Description of Artificial Sequence: Synthetic oligonucleotide
  Antisense strand to SEQ ID NO: 1943678
ucagauacccagaaagcau

SEQ ID NO: 1943680 - RNA, 19 nt, Artificial Sequence
  Description of Artificial Sequence: Synthetic oligonucleotide
  Sense strand starting at position 7 of SEQ ID NO: 1880119
aggaaaugccauuauucuc

SEQ ID NO: 1943681 - RNA, 19 nt, Artificial Sequence
  Description of Artificial Sequence: Synthetic oligonucleotide
  Antisense strand to SEQ ID NO: 1943680
gagaauaauggcauuuccu

SEQ ID NO: 1943682 - RNA, 19 nt, Artificial Sequence
  Description of Artificial Sequence: Synthetic oligonucleotide
  Sense strand starting at position 58 of SEQ ID NO: 1880119
agaccagauuagcugucau

SEQ ID NO: 1943683 - RNA, 19 nt, Artificial Sequence
  Description of Artificial Sequence: Synthetic oligonucleotide
  Antisense strand to SEQ ID NO: 1943682
augacagcuaaucuggucu

SEQ ID NO: 1943684 - RNA, 19 nt, Artificial Sequence
  Description of Artificial Sequence: Synthetic oligonucleotide
  Sense strand starting at position 90 of SEQ ID NO: 1880119
gggacuggauccuuguuaa

SEQ ID NO: 1943685 - RNA, 19 nt, Artificial Sequence
  Description of Artificial Sequence: Synthetic oligonucleotide
  Antisense strand to SEQ ID NO: 1943684
uuaacaaggauccaguccc

SEQ ID NO: 1943686 - RNA, 19 nt, Artificial Sequence
  Description of Artificial Sequence: Synthetic oligonucleotide
  Sense strand starting at position 93 of SEQ ID NO: 1880119
acuggauccuuguuaacac

SEQ ID NO: 1943687 - RNA, 19 nt, Artificial Sequence
  Description of Artificial Sequence: Synthetic oligonucleotide
  Antisense strand to SEQ ID NO: 1943686
guguuaacaaggauccagu

SEQ ID NO: 1943688 - RNA, 19 nt, Artificial Sequence
  Description of Artificial Sequence: Synthetic oligonucleotide
  Sense strand starting at position 853 of SEQ ID NO: 1880119
gauuuacagugccauuuga

SEQ ID NO: 1943689 - RNA, 19 nt, Artificial Sequence
  Description of Artificial Sequence: Synthetic oligonucleotide
  Antisense strand to SEQ ID NO: 1943688
ucaaauggcacuguaaauc

SEQ ID NO: 1943690 - RNA, 19 nt, Artificial Sequence
  Description of Artificial Sequence: Synthetic oligonucleotide
  Sense strand starting at position 1124 of SEQ ID NO: 1880119
ucgcuuaaagucuaaagaa

SEQ ID NO: 1943691 - RNA, 19 nt, Artificial Sequence
  Description of Artificial Sequence: Synthetic oligonucleotide
  Antisense strand to SEQ ID NO: 1943690
uucuuuagacuuuaagcga

SEQ ID NO: 1943692 - RNA, 19 nt, Artificial Sequence
  Description of Artificial Sequence: Synthetic oligonucleotide
  Sense strand starting at position 1340 of SEQ ID NO: 1880119
gaguguuaugucuacaacc

SEQ ID NO: 1943693 - RNA, 19 nt, Artificial Sequence
  Description of Artificial Sequence: Synthetic oligonucleotide
  Antisense strand to SEQ ID NO: 1943692
gguuguagacauaacacuc

SEQ ID NO: 1943694 - RNA, 19 nt, Artificial Sequence
  Description of Artificial Sequence: Synthetic oligonucleotide
  Sense strand starting at position 1390 of SEQ ID NO: 1880119
gcuuucuucccagagaaca

SEQ ID NO: 1943695 - RNA, 19 nt, Artificial Sequence
  Description of Artificial Sequence: Synthetic oligonucleotide
  Antisense strand to SEQ ID NO: 1943694
uguucucugggaagaaagc

SEQ ID NO: 1943696 - RNA, 19 nt, Artificial Sequence
  Description of Artificial Sequence: Synthetic oligonucleotide
  Sense strand starting at position 2530 of SEQ ID NO: 1880119
ugcagcauuccgcuugcaa

SEQ ID NO: 1943697 - RNA, 19 nt, Artificial Sequence
  Description of Artificial Sequence: Synthetic oligonucleotide
  Antisense strand to SEQ ID NO: 1943696
uugcaagcggaaugcugca

SEQ ID NO: 1943698 - RNA, 19 nt, Artificial Sequence
  Description of Artificial Sequence: Synthetic oligonucleotide
  Sense strand starting at position 2531 of SEQ ID NO: 1880119
gcagcauuccgcuugcaau

SEQ ID NO: 1943699 - RNA, 19 nt, Artificial Sequence
  Description of Artificial Sequence: Synthetic oligonucleotide
  Antisense strand to SEQ ID NO: 1943698
auugcaagcggaaugcugc

SEQ ID NO: 1943700 - RNA, 19 nt, Artificial Sequence
  Description of Artificial Sequence: Synthetic oligonucleotide
  Sense strand starting at position 2592 of SEQ ID NO: 1880119
uaaagaggcugcuuagaug

SEQ ID NO: 1943701 - RNA, 19 nt, Artificial Sequence
  Description of Artificial Sequence: Synthetic oligonucleotide
  Antisense strand to SEQ ID NO: 1943700
caucuaagcagccucuuua

SEQ ID NO: 1943702 - RNA, 19 nt, Artificial Sequence
  Description of Artificial Sequence: Synthetic oligonucleotide
  Sense strand starting at position 3342 of SEQ ID NO: 1880119
uuccaauucuugguuaaag

SEQ ID NO: 1943703 - RNA, 19 nt, Artificial Sequence
  Description of Artificial Sequence: Synthetic oligonucleotide
  Antisense strand to SEQ ID NO: 1943702
cuuuaaccaagaauuggaa

SEQ ID NO: 1943704 - RNA, 19 nt, Artificial Sequence
  Description of Artificial Sequence: Synthetic oligonucleotide
  Sense strand starting at position 3343 of SEQ ID NO: 1880119
uccaauucuugguuaaaga

SEQ ID NO: 1943705 - RNA, 19 nt, Artificial Sequence
  Description of Artificial Sequence: Synthetic oligonucleotide
  Antisense strand to SEQ ID NO: 1943704
ucuuuaaccaagaauugga

SEQ ID NO: 1943706 - RNA, 19 nt, Artificial Sequence
  Description of Artificial Sequence: Synthetic oligonucleotide
  Sense strand starting at position 3622 of SEQ ID NO: 1880119
gagaguucuccuuggagau

SEQ ID NO: 1943707 - RNA, 19 nt, Artificial Sequence
  Description of Artificial Sequence: Synthetic oligonucleotide
  Antisense strand to SEQ ID NO: 1943706
aucuccaaggagaacucuc

SEQ ID NO: 1943708 - RNA, 19 nt, Artificial Sequence
  Description of Artificial Sequence: Synthetic oligonucleotide
  Sense strand starting at position 3623 of SEQ ID NO: 1880119
agaguucuccuuggagauc

SEQ ID NO: 1943709 - RNA, 19 nt, Artificial Sequence
  Description of Artificial Sequence: Synthetic oligonucleotide
  Antisense strand to SEQ ID NO: 1943708
gaucuccaaggagaacucu

SEQ ID NO: 1943710 - RNA, 19 nt, Artificial Sequence
  Description of Artificial Sequence: Synthetic oligonucleotide
  Sense strand starting at position 3626 of SEQ ID NO: 1880119
guucuccuuggagaucaua

SEQ ID NO: 1943711 - RNA, 19 nt, Artificial Sequence
  Description of Artificial Sequence: Synthetic oligonucleotide
  Antisense strand to SEQ ID NO: 1943710
uaugaucuccaaggagaac

SEQ ID NO: 1943712 - RNA, 19 nt, Artificial Sequence
  Description of Artificial Sequence: Synthetic oligonucleotide
  Sense strand starting at position 3801 of SEQ ID NO: 1880119
gguaguaguggagaaaugu

SEQ ID NO: 1943713 - RNA, 19 nt, Artificial Sequence
  Description of Artificial Sequence: Synthetic oligonucleotide
  Antisense strand to SEQ ID NO: 1943712
acauuucuccacuacuacc

SEQ ID NO: 1943714 - RNA, 19 nt, Artificial Sequence
  Description of Artificial Sequence: Synthetic oligonucleotide
  Sense strand starting at position 8 of SEQ ID NO: 1880120
aggaaaugccauuauucuc

SEQ ID NO: 1943715 - RNA, 19 nt, Artificial Sequence
  Description of Artificial Sequence: Synthetic oligonucleotide
  Antisense strand to SEQ ID NO: 1943714
gagaauaauggcauuuccu

SEQ ID NO: 1943716 - RNA, 19 nt, Artificial Sequence
  Description of Artificial Sequence: Synthetic oligonucleotide
  Sense strand starting at position 91 of SEQ ID NO: 1880120
gggacuggauccuuguuaa

SEQ ID NO: 1943717 - RNA, 19 nt, Artificial Sequence
  Description of Artificial Sequence: Synthetic oligonucleotide
  Antisense strand to SEQ ID NO: 1943716
uuaacaaggauccaguccc

SEQ ID NO: 1943718 - RNA, 19 nt, Artificial Sequence
  Description of Artificial Sequence: Synthetic oligonucleotide
  Sense strand starting at position 94 of SEQ ID NO: 1880120
acuggauccuuguuaacac

SEQ ID NO: 1943719 - RNA, 19 nt, Artificial Sequence
  Description of Artificial Sequence: Synthetic oligonucleotide
  Antisense strand to SEQ ID NO: 1943718
guguuaacaaggauccagu

SEQ ID NO: 1943720 - RNA, 19 nt, Artificial Sequence
  Description of Artificial Sequence: Synthetic oligonucleotide
  Sense strand starting at position 680 of SEQ ID NO: 1880120
cugaccucagcugaucaaa

SEQ ID NO: 1943721 - RNA, 19 nt, Artificial Sequence
  Description of Artificial Sequence: Synthetic oligonucleotide
  Antisense strand to SEQ ID NO: 1943720
uuugaucagcugaggucag

SEQ ID NO: 1943722 - RNA, 19 nt, Artificial Sequence
  Description of Artificial Sequence: Synthetic oligonucleotide
  Sense strand starting at position 826 of SEQ ID NO: 1880120
uagauaguucugggaguua

SEQ ID NO: 1943723 - RNA, 19 nt, Artificial Sequence
  Description of Artificial Sequence: Synthetic oligonucleotide
  Antisense strand to SEQ ID NO: 1943722
uaacucccagaacuaucua

SEQ ID NO: 1943724 - RNA, 19 nt, Artificial Sequence
  Description of Artificial Sequence: Synthetic oligonucleotide
  Sense strand starting at position 854 of SEQ ID NO: 1880120
gauuuacagugccauuuga

SEQ ID NO: 1943725 - RNA, 19 nt, Artificial Sequence
  Description of Artificial Sequence: Synthetic oligonucleotide
  Antisense strand to SEQ ID NO: 1943724
ucaaauggcacuguaaauc

SEQ ID NO: 1943726 - RNA, 19 nt, Artificial Sequence
  Description of Artificial Sequence: Synthetic oligonucleotide
  Sense strand starting at position 1125 of SEQ ID NO: 1880120
ucgcuuaaagucuaaagaa

SEQ ID NO: 1943727 - RNA, 19 nt, Artificial Sequence
  Description of Artificial Sequence: Synthetic oligonucleotide
  Antisense strand to SEQ ID NO: 1943726
uucuuuagacuuuaagcga

SEQ ID NO: 1943728 - RNA, 19 nt, Artificial Sequence
  Description of Artificial Sequence: Synthetic oligonucleotide
  Sense strand starting at position 1341 of SEQ ID NO: 1880120
gaguguuaugucuacaacc

SEQ ID NO: 1943729 - RNA, 19 nt, Artificial Sequence
  Description of Artificial Sequence: Synthetic oligonucleotide
  Antisense strand to SEQ ID NO: 1943728
gguuguagacauaacacuc

SEQ ID NO: 1943730 - RNA, 19 nt, Artificial Sequence
  Description of Artificial Sequence: Synthetic oligonucleotide
  Sense strand starting at position 2107 of SEQ ID NO: 1880120
cugggauucucacuuccga

SEQ ID NO: 1943731 - RNA, 19 nt, Artificial Sequence
  Description of Artificial Sequence: Synthetic oligonucleotide
  Antisense strand to SEQ ID NO: 1943730
ucggaagugagaaucccag

SEQ ID NO: 1943732 - RNA, 19 nt, Artificial Sequence
  Description of Artificial Sequence: Synthetic oligonucleotide
  Sense strand starting at position 2513 of SEQ ID NO: 1880120
acauccuuauccuugugau

SEQ ID NO: 1943733 - RNA, 19 nt, Artificial Sequence
  Description of Artificial Sequence: Synthetic oligonucleotide
  Antisense strand to SEQ ID NO: 1943732
aucacaaggauaaggaugu

SEQ ID NO: 1943734 - RNA, 19 nt, Artificial Sequence
  Description of Artificial Sequence: Synthetic oligonucleotide
  Sense strand starting at position 2531 of SEQ ID NO: 1880120
ugcagcauuccgcuugcaa

SEQ ID NO: 1943735 - RNA, 19 nt, Artificial Sequence
  Description of Artificial Sequence: Synthetic oligonucleotide
  Antisense strand to SEQ ID NO: 1943734
uugcaagcggaaugcugca

SEQ ID NO: 1943736 - RNA, 19 nt, Artificial Sequence
  Description of Artificial Sequence: Synthetic oligonucleotide
  Sense strand starting at position 2532 of SEQ ID NO: 1880120
gcagcauuccgcuugcaau

SEQ ID NO: 1943737 - RNA, 19 nt, Artificial Sequence
  Description of Artificial Sequence: Synthetic oligonucleotide
  Antisense strand to SEQ ID NO: 1943736
auugcaagcggaaugcugc

SEQ ID NO: 1943738 - RNA, 19 nt, Artificial Sequence
  Description of Artificial Sequence: Synthetic oligonucleotide
  Sense strand starting at position 2550 of SEQ ID NO: 1880120
uuggaagccguuuaauauc

SEQ ID NO: 1943739 - RNA, 19 nt, Artificial Sequence
  Description of Artificial Sequence: Synthetic oligonucleotide
  Antisense strand to SEQ ID NO: 1943738
gauauuaaacggcuuccaa

SEQ ID NO: 1943740 - RNA, 19 nt, Artificial Sequence
  Description of Artificial Sequence: Synthetic oligonucleotide
  Sense strand starting at position 2593 of SEQ ID NO: 1880120
uaaagaggcugcuuagaug

SEQ ID NO: 1943741 - RNA, 19 nt, Artificial Sequence
  Description of Artificial Sequence: Synthetic oligonucleotide
  Antisense strand to SEQ ID NO: 1943740
caucuaagcagccucuuua

SEQ ID NO: 1943742 - RNA, 19 nt, Artificial Sequence
  Description of Artificial Sequence: Synthetic oligonucleotide
  Sense strand starting at position 2601 of SEQ ID NO: 1880120
cugcuuagaugacugcaaa

SEQ ID NO: 1943743 - RNA, 19 nt, Artificial Sequence
  Description of Artificial Sequence: Synthetic oligonucleotide
  Antisense strand to SEQ ID NO: 1943742
uuugcagucaucuaagcag

SEQ ID NO: 1943744 - RNA, 19 nt, Artificial Sequence
  Description of Artificial Sequence: Synthetic oligonucleotide
  Sense strand starting at position 2745 of SEQ ID NO: 1880120
uaugcugucccagaagaga

SEQ ID NO: 1943745 - RNA, 19 nt, Artificial Sequence
  Description of Artificial Sequence: Synthetic oligonucleotide
  Antisense strand to SEQ ID NO: 1943744
ucucuucugggacagcaua

SEQ ID NO: 1943746 - RNA, 19 nt, Artificial Sequence
  Description of Artificial Sequence: Synthetic oligonucleotide
  Sense strand starting at position 3263 of SEQ ID NO: 1880120
uucugagaccaguguuuga

SEQ ID NO: 1943747 - RNA, 19 nt, Artificial Sequence
  Description of Artificial Sequence: Synthetic oligonucleotide
  Antisense strand to SEQ ID NO: 1943746
ucaaacacuggucucagaa

SEQ ID NO: 1943748 - RNA, 19 nt, Artificial Sequence
  Description of Artificial Sequence: Synthetic oligonucleotide
  Sense strand starting at position 3343 of SEQ ID NO: 1880120
uuccaauucuugguuaaag

SEQ ID NO: 1943749 - RNA, 19 nt, Artificial Sequence
  Description of Artificial Sequence: Synthetic oligonucleotide
  Antisense strand to SEQ ID NO: 1943748
cuuuaaccaagaauuggaa

SEQ ID NO: 1943750 - RNA, 19 nt, Artificial Sequence
  Description of Artificial Sequence: Synthetic oligonucleotide
  Sense strand starting at position 3344 of SEQ ID NO: 1880120
uccaauucuugguuaaaga

SEQ ID NO: 1943751 - RNA, 19 nt, Artificial Sequence
  Description of Artificial Sequence: Synthetic oligonucleotide
  Antisense strand to SEQ ID NO: 1943750
ucuuuaaccaagaauugga

SEQ ID NO: 1943752 - RNA, 19 nt, Artificial Sequence
  Description of Artificial Sequence: Synthetic oligonucleotide
  Sense strand starting at position 3623 of SEQ ID NO: 1880120
gagaguucuccuuggagau

SEQ ID NO: 1943753 - RNA, 19 nt, Artificial Sequence
  Description of Artificial Sequence: Synthetic oligonucleotide
  Antisense strand to SEQ ID NO: 1943752
aucuccaaggagaacucuc

SEQ ID NO: 1943754 - RNA, 19 nt, Artificial Sequence
  Description of Artificial Sequence: Synthetic oligonucleotide
  Sense strand starting at position 3624 of SEQ ID NO: 1880120
agaguucuccuuggagauc

SEQ ID NO: 1943755 - RNA, 19 nt, Artificial Sequence
  Description of Artificial Sequence: Synthetic oligonucleotide
  Antisense strand to SEQ ID NO: 1943754
gaucuccaaggagaacucu

SEQ ID NO: 1943756 - RNA, 19 nt, Artificial Sequence
  Description of Artificial Sequence: Synthetic oligonucleotide
  Sense strand starting at position 3627 of SEQ ID NO: 1880120
guucuccuuggagaucaua

SEQ ID NO: 1943757 - RNA, 19 nt, Artificial Sequence
  Description of Artificial Sequence: Synthetic oligonucleotide
  Antisense strand to SEQ ID NO: 1943756
uaugaucuccaaggagaac

SEQ ID NO: 1943758 - RNA, 19 nt, Artificial Sequence
  Description of Artificial Sequence: Synthetic oligonucleotide
  Sense strand starting at position 3886 of SEQ ID NO: 1880120
uggguucuuccugaccaau

SEQ ID NO: 1943759 - RNA, 19 nt, Artificial Sequence
  Description of Artificial Sequence: Synthetic oligonucleotide
  Antisense strand to SEQ ID NO: 1943758
auuggucaggaagaaccca

SEQ ID NO: 1943760 - RNA, 19 nt, Artificial Sequence
  Description of Artificial Sequence: Synthetic oligonucleotide
  Sense strand starting at position 200 of SEQ ID NO: 1880121
ugaugcaaauaaugagaaa

SEQ ID NO: 1943761 - RNA, 19 nt, Artificial Sequence
  Description of Artificial Sequence: Synthetic oligonucleotide
  Antisense strand to SEQ ID NO: 1943760
uuucucauuauuugcauca

SEQ ID NO: 1943762 - RNA, 19 nt, Artificial Sequence
  Description of Artificial Sequence: Synthetic oligonucleotide
  Sense strand starting at position 408 of SEQ ID NO: 1880121
aaugucucagauggacuaa

SEQ ID NO: 1943763 - RNA, 19 nt, Artificial Sequence
  Description of Artificial Sequence: Synthetic oligonucleotide
  Antisense strand to SEQ ID NO: 1943762
uuaguccaucugagacauu

SEQ ID NO: 1943764 - RNA, 19 nt, Artificial Sequence
  Description of Artificial Sequence: Synthetic oligonucleotide
  Sense strand starting at position 853 of SEQ ID NO: 1880121
gagaaaggguauuaaggaa

SEQ ID NO: 1943765 - RNA, 19 nt, Artificial Sequence
  Description of Artificial Sequence: Synthetic oligonucleotide
  Antisense strand to SEQ ID NO: 1943764
uuccuuaauacccuuucuc

SEQ ID NO: 1943766 - RNA, 19 nt, Artificial Sequence
  Description of Artificial Sequence: Synthetic oligonucleotide
  Sense strand starting at position 865 of SEQ ID NO: 1880121
uaaggaauuugucagggua

SEQ ID NO: 1943767 - RNA, 19 nt, Artificial Sequence
  Description of Artificial Sequence: Synthetic oligonucleotide
  Antisense strand to SEQ ID NO: 1943766
uacccugacaaauuccuua

SEQ ID NO: 1943768 - RNA, 19 nt, Artificial Sequence
  Description of Artificial Sequence: Synthetic oligonucleotide
  Sense strand starting at position 867 of SEQ ID NO: 1880121
aggaauuugucaggguacu

SEQ ID NO: 1943769 - RNA, 19 nt, Artificial Sequence
  Description of Artificial Sequence: Synthetic oligonucleotide
  Antisense strand to SEQ ID NO: 1943768
aguacccugacaaauuccu

SEQ ID NO: 1943770 - RNA, 19 nt, Artificial Sequence
  Description of Artificial Sequence: Synthetic oligonucleotide
  Sense strand starting at position 887 of SEQ ID NO: 1880121
acgcgugucagguauaaac

SEQ ID NO: 1943771 - RNA, 19 nt, Artificial Sequence
  Description of Artificial Sequence: Synthetic oligonucleotide
  Antisense strand to SEQ ID NO: 1943770
guuuauaccugacacgcgu

SEQ ID NO: 1943772 - RNA, 19 nt, Artificial Sequence
  Description of Artificial Sequence: Synthetic oligonucleotide
  Sense strand starting at position 1036 of SEQ ID NO: 1880121
cugggugcuaucuagaaag

SEQ ID NO: 1943773 - RNA, 19 nt, Artificial Sequence
  Description of Artificial Sequence: Synthetic oligonucleotide
  Antisense strand to SEQ ID NO: 1943772
cuuucuagauagcacccag

SEQ ID NO: 1943774 - RNA, 19 nt, Artificial Sequence
  Description of Artificial Sequence: Synthetic oligonucleotide
  Sense strand starting at position 1038 of SEQ ID NO: 1880121
gggugcuaucuagaaaguu

SEQ ID NO: 1943775 - RNA, 19 nt, Artificial Sequence
  Description of Artificial Sequence: Synthetic oligonucleotide
  Antisense strand to SEQ ID NO: 1943774
aacuuucuagauagcaccc

SEQ ID NO: 1943776 - RNA, 19 nt, Artificial Sequence
  Description of Artificial Sequence: Synthetic oligonucleotide
  Sense strand starting at position 1047 of SEQ ID NO: 1880121
cuagaaaguugccuggcaa

SEQ ID NO: 1943777 - RNA, 19 nt, Artificial Sequence
  Description of Artificial Sequence: Synthetic oligonucleotide
  Antisense strand to SEQ ID NO: 1943776
uugccaggcaacuuucuag

SEQ ID NO: 1943778 - RNA, 19 nt, Artificial Sequence
  Description of Artificial Sequence: Synthetic oligonucleotide
  Sense strand starting at position 1048 of SEQ ID NO: 1880121
uagaaaguugccuggcaau

SEQ ID NO: 1943779 - RNA, 19 nt, Artificial Sequence
  Description of Artificial Sequence: Synthetic oligonucleotide
  Antisense strand to SEQ ID NO: 1943778
auugccaggcaacuuucua

SEQ ID NO: 1943780 - RNA, 19 nt, Artificial Sequence
  Description of Artificial Sequence: Synthetic oligonucleotide
  Sense strand starting at position 1074 of SEQ ID NO: 1880121
ggaugugggagcgagacau

SEQ ID NO: 1943781 - RNA, 19 nt, Artificial Sequence
  Description of Artificial Sequence: Synthetic oligonucleotide
  Antisense strand to SEQ ID NO: 1943780
augucucgcucccacaucc

SEQ ID NO: 1943782 - RNA, 19 nt, Artificial Sequence
  Description of Artificial Sequence: Synthetic oligonucleotide
  Sense strand starting at position 1078 of SEQ ID NO: 1880121
gugggagcgagacaucaaa

SEQ ID NO: 1943783 - RNA, 19 nt, Artificial Sequence
  Description of Artificial Sequence: Synthetic oligonucleotide
  Antisense strand to SEQ ID NO: 1943782
uuugaugucucgcucccac

SEQ ID NO: 1943784 - RNA, 19 nt, Artificial Sequence
  Description of Artificial Sequence: Synthetic oligonucleotide
  Sense strand starting at position 1139 of SEQ ID NO: 1880121
auaugaacugccggagaua

SEQ ID NO: 1943785 - RNA, 19 nt, Artificial Sequence
  Description of Artificial Sequence: Synthetic oligonucleotide
  Antisense strand to SEQ ID NO: 1943784
uaucuccggcaguucauau

SEQ ID NO: 1943786 - RNA, 19 nt, Artificial Sequence
  Description of Artificial Sequence: Synthetic oligonucleotide
  Sense strand starting at position 1142 of SEQ ID NO: 1880121
ugaacugccggagauagua

SEQ ID NO: 1943787 - RNA, 19 nt, Artificial Sequence
  Description of Artificial Sequence: Synthetic oligonucleotide
  Antisense strand to SEQ ID NO: 1943786
uacuaucuccggcaguuca

SEQ ID NO: 1943788 - RNA, 19 nt, Artificial Sequence
  Description of Artificial Sequence: Synthetic oligonucleotide
  Sense strand starting at position 1169 of SEQ ID NO: 1880121
guaccuggcuccucauaaa

SEQ ID NO: 1943789 - RNA, 19 nt, Artificial Sequence
  Description of Artificial Sequence: Synthetic oligonucleotide
  Antisense strand to SEQ ID NO: 1943788
uuuaugaggagccagguac

SEQ ID NO: 1943790 - RNA, 19 nt, Artificial Sequence
  Description of Artificial Sequence: Synthetic oligonucleotide
  Sense strand starting at position 1317 of SEQ ID NO: 1880121
acgcaaaguaagcguguua

SEQ ID NO: 1943791 - RNA, 19 nt, Artificial Sequence
  Description of Artificial Sequence: Synthetic oligonucleotide
  Antisense strand to SEQ ID NO: 1943790
uaacacgcuuacuuugcgu

SEQ ID NO: 1943792 - RNA, 19 nt, Artificial Sequence
  Description of Artificial Sequence: Synthetic oligonucleotide
  Sense strand starting at position 1375 of SEQ ID NO: 1880121
ccugcuuucuuccuggaga

SEQ ID NO: 1943793 - RNA, 19 nt, Artificial Sequence
  Description of Artificial Sequence: Synthetic oligonucleotide
  Antisense strand to SEQ ID NO: 1943792
ucuccaggaagaaagcagg

SEQ ID NO: 1943794 - RNA, 19 nt, Artificial Sequence
  Description of Artificial Sequence: Synthetic oligonucleotide
  Sense strand starting at position 1376 of SEQ ID NO: 1880121
cugcuuucuuccuggagaa

SEQ ID NO: 1943795 - RNA, 19 nt, Artificial Sequence
  Description of Artificial Sequence: Synthetic oligonucleotide
  Antisense strand to SEQ ID NO: 1943794
uucuccaggaagaaagcag

SEQ ID NO: 1943796 - RNA, 19 nt, Artificial Sequence
  Description of Artificial Sequence: Synthetic oligonucleotide
  Sense strand starting at position 1377 of SEQ ID NO: 1880121
ugcuuucuuccuggagaac

SEQ ID NO: 1943797 - RNA, 19 nt, Artificial Sequence
  Description of Artificial Sequence: Synthetic oligonucleotide
  Antisense strand to SEQ ID NO: 1943796
guucuccaggaagaaagca

SEQ ID NO: 1943798 - RNA, 19 nt, Artificial Sequence
  Description of Artificial Sequence: Synthetic oligonucleotide
  Sense strand starting at position 1378 of SEQ ID NO: 1880121
gcuuucuuccuggagaaca

SEQ ID NO: 1943799 - RNA, 19 nt, Artificial Sequence
  Description of Artificial Sequence: Synthetic oligonucleotide
  Antisense strand to SEQ ID NO: 1943798
uguucuccaggaagaaagc

SEQ ID NO: 1943800 - RNA, 19 nt, Artificial Sequence
  Description of Artificial Sequence: Synthetic oligonucleotide
  Sense strand starting at position 1397 of SEQ ID NO: 1880121
gcacccaucugcguaguuu

SEQ ID NO: 1943801 - RNA, 19 nt, Artificial Sequence
  Description of Artificial Sequence: Synthetic oligonucleotide
  Antisense strand to SEQ ID NO: 1943800
aaacuacgcagaugggugc

SEQ ID NO: 1943802 - RNA, 19 nt, Artificial Sequence
  Description of Artificial Sequence: Synthetic oligonucleotide
  Sense strand starting at position 1698 of SEQ ID NO: 1880121
gcgugcaggcgacauguua

SEQ ID NO: 1943803 - RNA, 19 nt, Artificial Sequence
  Description of Artificial Sequence: Synthetic oligonucleotide
  Antisense strand to SEQ ID NO: 1943802
uaacaugucgccugcacgc

SEQ ID NO: 1943804 - RNA, 19 nt, Artificial Sequence
  Description of Artificial Sequence: Synthetic oligonucleotide
  Sense strand starting at position 1705 of SEQ ID NO: 1880121
ggcgacauguuacuuccua

SEQ ID NO: 1943805 - RNA, 19 nt, Artificial Sequence
  Description of Artificial Sequence: Synthetic oligonucleotide
  Antisense strand to SEQ ID NO: 1943804
uaggaaguaacaugucgcc

SEQ ID NO: 1943806 - RNA, 19 nt, Artificial Sequence
  Description of Artificial Sequence: Synthetic oligonucleotide
  Sense strand starting at position 1706 of SEQ ID NO: 1880121
gcgacauguuacuuccuau

SEQ ID NO: 1943807 - RNA, 19 nt, Artificial Sequence
  Description of Artificial Sequence: Synthetic oligonucleotide
  Antisense strand to SEQ ID NO: 1943806
auaggaaguaacaugucgc

SEQ ID NO: 1943808 - RNA, 19 nt, Artificial Sequence
  Description of Artificial Sequence: Synthetic oligonucleotide
  Sense strand starting at position 1791 of SEQ ID NO: 1880121
agauaugacccuuagcgua

SEQ ID NO: 1943809 - RNA, 19 nt, Artificial Sequence
  Description of Artificial Sequence: Synthetic oligonucleotide
  Antisense strand to SEQ ID NO: 1943808
uacgcuaagggucauaucu

SEQ ID NO: 1943810 - RNA, 19 nt, Artificial Sequence
  Description of Artificial Sequence: Synthetic oligonucleotide
  Sense strand starting at position 2107 of SEQ ID NO: 1880121
cugggauucucucuuccga

SEQ ID NO: 1943811 - RNA, 19 nt, Artificial Sequence
  Description of Artificial Sequence: Synthetic oligonucleotide
  Antisense strand to SEQ ID NO: 1943810
ucggaagagagaaucccag

SEQ ID NO: 1943812 - RNA, 19 nt, Artificial Sequence
  Description of Artificial Sequence: Synthetic oligonucleotide
  Sense strand starting at position 2109 of SEQ ID NO: 1880121
gggauucucucuuccgauc

SEQ ID NO: 1943813 - RNA, 19 nt, Artificial Sequence
  Description of Artificial Sequence: Synthetic oligonucleotide
  Antisense strand to SEQ ID NO: 1943812
gaucggaagagagaauccc

SEQ ID NO: 1943814 - RNA, 19 nt, Artificial Sequence
  Description of Artificial Sequence: Synthetic oligonucleotide
  Sense strand starting at position 2292 of SEQ ID NO: 1880121
ugaccaaucugcugccaga

SEQ ID NO: 1943815 - RNA, 19 nt, Artificial Sequence
  Description of Artificial Sequence: Synthetic oligonucleotide
  Antisense strand to SEQ ID NO: 1943814
ucuggcagcagauugguca

SEQ ID NO: 1943816 - RNA, 19 nt, Artificial Sequence
  Description of Artificial Sequence: Synthetic oligonucleotide
  Sense strand starting at position 2513 of SEQ ID NO: 1880121
acaucuuuaucccugugau

SEQ ID NO: 1943817 - RNA, 19 nt, Artificial Sequence
  Description of Artificial Sequence: Synthetic oligonucleotide
  Antisense strand to SEQ ID NO: 1943816
aucacagggauaaagaugu

SEQ ID NO: 1943818 - RNA, 19 nt, Artificial Sequence
  Description of Artificial Sequence: Synthetic oligonucleotide
  Sense strand starting at position 2516 of SEQ ID NO: 1880121
ucuuuaucccugugaugca

SEQ ID NO: 1943819 - RNA, 19 nt, Artificial Sequence
  Description of Artificial Sequence: Synthetic oligonucleotide
  Antisense strand to SEQ ID NO: 1943818
ugcaucacagggauaaaga

SEQ ID NO: 1943820 - RNA, 19 nt, Artificial Sequence
  Description of Artificial Sequence: Synthetic oligonucleotide
  Sense strand starting at position 2907 of SEQ ID NO: 1880121
uuuaacaaugucuggauca

SEQ ID NO: 1943821 - RNA, 19 nt, Artificial Sequence
  Description of Artificial Sequence: Synthetic oligonucleotide
  Antisense strand to SEQ ID NO: 1943820
ugauccagacauuguuaaa

SEQ ID NO: 1943822 - RNA, 19 nt, Artificial Sequence
  Description of Artificial Sequence: Synthetic oligonucleotide
  Sense strand starting at position 2908 of SEQ ID NO: 1880121
uuaacaaugucuggaucau

SEQ ID NO: 1943823 - RNA, 19 nt, Artificial Sequence
  Description of Artificial Sequence: Synthetic oligonucleotide
  Antisense strand to SEQ ID NO: 1943822
augauccagacauuguuaa

SEQ ID NO: 1943824 - RNA, 19 nt, Artificial Sequence
  Description of Artificial Sequence: Synthetic oligonucleotide
  Sense strand starting at position 3248 of SEQ ID NO: 1880121
agaccaauauuugauguaa

SEQ ID NO: 1943825 - RNA, 19 nt, Artificial Sequence
  Description of Artificial Sequence: Synthetic oligonucleotide
  Antisense strand to SEQ ID NO: 1943824
uuacaucaaauauuggucu

SEQ ID NO: 1943826 - RNA, 19 nt, Artificial Sequence
  Description of Artificial Sequence: Synthetic oligonucleotide
  Sense strand starting at position 3471 of SEQ ID NO: 1880121
uugacuuuguucucgcgau

SEQ ID NO: 1943827 - RNA, 19 nt, Artificial Sequence
  Description of Artificial Sequence: Synthetic oligonucleotide
  Antisense strand to SEQ ID NO: 1943826
aucgcgagaacaaagucaa

SEQ ID NO: 1943828 - RNA, 19 nt, Artificial Sequence
  Description of Artificial Sequence: Synthetic oligonucleotide
  Sense strand starting at position 3607 of SEQ ID NO: 1880121
gagaguucuccuuggagac

SEQ ID NO: 1943829 - RNA, 19 nt, Artificial Sequence
  Description of Artificial Sequence: Synthetic oligonucleotide
  Antisense strand to SEQ ID NO: 1943828
gucuccaaggagaacucuc

SEQ ID NO: 1943830 - RNA, 19 nt, Artificial Sequence
  Description of Artificial Sequence: Synthetic oligonucleotide
  Sense strand starting at position 3609 of SEQ ID NO: 1880121
gaguucuccuuggagacca

SEQ ID NO: 1943831 - RNA, 19 nt, Artificial Sequence
  Description of Artificial Sequence: Synthetic oligonucleotide
  Antisense strand to SEQ ID NO: 1943830
uggucuccaaggagaacuc

SEQ ID NO: 1943832 - RNA, 19 nt, Artificial Sequence
  Description of Artificial Sequence: Synthetic oligonucleotide
  Sense strand starting at position 3625 of SEQ ID NO: 1880121
ccauaaagauucuguggca

SEQ ID NO: 1943833 - RNA, 19 nt, Artificial Sequence
  Description of Artificial Sequence: Synthetic oligonucleotide
  Antisense strand to SEQ ID NO: 1943832
ugccacagaaucuuuaugg

SEQ ID NO: 1943834 - RNA, 19 nt, Artificial Sequence
  Description of Artificial Sequence: Synthetic oligonucleotide
  Sense strand starting at position 3626 of SEQ ID NO: 1880121
cauaaagauucuguggcau

SEQ ID NO: 1943835 - RNA, 19 nt, Artificial Sequence
  Description of Artificial Sequence: Synthetic oligonucleotide
  Antisense strand to SEQ ID NO: 1943834
augccacagaaucuuuaug

SEQ ID NO: 1943836 - RNA, 19 nt, Artificial Sequence
  Description of Artificial Sequence: Synthetic oligonucleotide
  Sense strand starting at position 3865 of SEQ ID NO: 1880121
auggguucuuccugcccaa

SEQ ID NO: 1943837 - RNA, 19 nt, Artificial Sequence
  Description of Artificial Sequence: Synthetic oligonucleotide
  Antisense strand to SEQ ID NO: 1943836
uugggcaggaagaacccau

SEQ ID NO: 1943838 - RNA, 19 nt, Artificial Sequence
  Description of Artificial Sequence: Synthetic oligonucleotide
  Sense strand starting at position 3869 of SEQ ID NO: 1880121
guucuuccugcccaaugua

SEQ ID NO: 1943839 - RNA, 19 nt, Artificial Sequence
  Description of Artificial Sequence: Synthetic oligonucleotide
  Antisense strand to SEQ ID NO: 1943838
uacauugggcaggaagaac

SEQ ID NO: 1943840 - RNA, 19 nt, Artificial Sequence
  Description of Artificial Sequence: Synthetic oligonucleotide
  Sense strand starting at position 323 of SEQ ID NO: 1880122
gggccuuccucaguaguuu

SEQ ID NO: 1943841 - RNA, 19 nt, Artificial Sequence
  Description of Artificial Sequence: Synthetic oligonucleotide
  Antisense strand to SEQ ID NO: 1943840
aaacuacugaggaaggccc

SEQ ID NO: 1943842 - RNA, 19 nt, Artificial Sequence
  Description of Artificial Sequence: Synthetic oligonucleotide
  Sense strand starting at position 535 of SEQ ID NO: 1880122
aggccauuucuaggucagu

SEQ ID NO: 1943843 - RNA, 19 nt, Artificial Sequence
  Description of Artificial Sequence: Synthetic oligonucleotide
  Antisense strand to SEQ ID NO: 1943842
acugaccuagaaauggccu

SEQ ID NO: 1943844 - RNA, 19 nt, Artificial Sequence
  Description of Artificial Sequence: Synthetic oligonucleotide
  Sense strand starting at position 546 of SEQ ID NO: 1880122
aggucagucgugagguaca

SEQ ID NO: 1943845 - RNA, 19 nt, Artificial Sequence
  Description of Artificial Sequence: Synthetic oligonucleotide
  Antisense strand to SEQ ID NO: 1943844
uguaccucacgacugaccu

SEQ ID NO: 1943846 - RNA, 19 nt, Artificial Sequence
  Description of Artificial Sequence: Synthetic oligonucleotide
  Sense strand starting at position 575 of SEQ ID NO: 1880122
ggcagcucgcuccgagauu

SEQ ID NO: 1943847 - RNA, 19 nt, Artificial Sequence
  Description of Artificial Sequence: Synthetic oligonucleotide
  Antisense strand to SEQ ID NO: 1943846
aaucucggagcgagcugcc

SEQ ID NO: 1943848 - RNA, 19 nt, Artificial Sequence
  Description of Artificial Sequence: Synthetic oligonucleotide
  Sense strand starting at position 576 of SEQ ID NO: 1880122
gcagcucgcuccgagauuu

SEQ ID NO: 1943849 - RNA, 19 nt, Artificial Sequence
  Description of Artificial Sequence: Synthetic oligonucleotide
  Antisense strand to SEQ ID NO: 1943848
aaaucucggagcgagcugc

SEQ ID NO: 1943850 - RNA, 19 nt, Artificial Sequence
  Description of Artificial Sequence: Synthetic oligonucleotide
  Sense strand starting at position 767 of SEQ ID NO: 1880122
agaggcuggacucaguuau

SEQ ID NO: 1943851 - RNA, 19 nt, Artificial Sequence
  Description of Artificial Sequence: Synthetic oligonucleotide
  Antisense strand to SEQ ID NO: 1943850
auaacugaguccagccucu

SEQ ID NO: 1943852 - RNA, 19 nt, Artificial Sequence
  Description of Artificial Sequence: Synthetic oligonucleotide
  Sense strand starting at position 773 of SEQ ID NO: 1880122
uggacucaguuauuauaau

SEQ ID NO: 1943853 - RNA, 19 nt, Artificial Sequence
  Description of Artificial Sequence: Synthetic oligonucleotide
  Antisense strand to SEQ ID NO: 1943852
auuauaauaacugagucca

SEQ ID NO: 1943854 - RNA, 19 nt, Artificial Sequence
  Description of Artificial Sequence: Synthetic oligonucleotide
  Sense strand starting at position 774 of SEQ ID NO: 1880122
ggacucaguuauuauaauu

SEQ ID NO: 1943855 - RNA, 19 nt, Artificial Sequence
  Description of Artificial Sequence: Synthetic oligonucleotide
  Antisense strand to SEQ ID NO: 1943854
aauuauaauaacugagucc

SEQ ID NO: 1943856 - RNA, 19 nt, Artificial Sequence
  Description of Artificial Sequence: Synthetic oligonucleotide
  Sense strand starting at position 839 of SEQ ID NO: 1880122
guagaaaccuccucacaag

SEQ ID NO: 1943857 - RNA, 19 nt, Artificial Sequence
  Description of Artificial Sequence: Synthetic oligonucleotide
  Antisense strand to SEQ ID NO: 1943856
cuugugaggagguuucuac

SEQ ID NO: 1943858 - RNA, 19 nt, Artificial Sequence
  Description of Artificial Sequence: Synthetic oligonucleotide
  Sense strand starting at position 879 of SEQ ID NO: 1880122
ggagaauuagcaggguauu

SEQ ID NO: 1943859 - RNA, 19 nt, Artificial Sequence
  Description of Artificial Sequence: Synthetic oligonucleotide
  Antisense strand to SEQ ID NO: 1943858
aauacccugcuaauucucc

SEQ ID NO: 1943860 - RNA, 19 nt, Artificial Sequence
  Description of Artificial Sequence: Synthetic oligonucleotide
  Sense strand starting at position 880 of SEQ ID NO: 1880122
gagaauuagcaggguauuc

SEQ ID NO: 1943861 - RNA, 19 nt, Artificial Sequence
  Description of Artificial Sequence: Synthetic oligonucleotide
  Antisense strand to SEQ ID NO: 1943860
gaauacccugcuaauucuc

SEQ ID NO: 1943862 - RNA, 19 nt, Artificial Sequence
  Description of Artificial Sequence: Synthetic oligonucleotide
  Sense strand starting at position 890 of SEQ ID NO: 1880122
aggguauuccgccaagaca

SEQ ID NO: 1943863 - RNA, 19 nt, Artificial Sequence
  Description of Artificial Sequence: Synthetic oligonucleotide
  Antisense strand to SEQ ID NO: 1943862
ugucuuggcggaauacccu

SEQ ID NO: 1943864 - RNA, 19 nt, Artificial Sequence
  Description of Artificial Sequence: Synthetic oligonucleotide
  Sense strand starting at position 899 of SEQ ID NO: 1880122
cgccaagacauagguuaga

SEQ ID NO: 1943865 - RNA, 19 nt, Artificial Sequence
  Description of Artificial Sequence: Synthetic oligonucleotide
  Antisense strand to SEQ ID NO: 1943864
ucuaaccuaugucuuggcg

SEQ ID NO: 1943866 - RNA, 19 nt, Artificial Sequence
  Description of Artificial Sequence: Synthetic oligonucleotide
  Sense strand starting at position 999 of SEQ ID NO: 1880122
ggguguuaugucuacaacc

SEQ ID NO: 1943867 - RNA, 19 nt, Artificial Sequence
  Description of Artificial Sequence: Synthetic oligonucleotide
  Antisense strand to SEQ ID NO: 1943866
gguuguagacauaacaccc

SEQ ID NO: 1943868 - RNA, 19 nt, Artificial Sequence
  Description of Artificial Sequence: Synthetic oligonucleotide
  Sense strand starting at position 1072 of SEQ ID NO: 1880122
accaguucugaguacaacu

SEQ ID NO: 1943869 - RNA, 19 nt, Artificial Sequence
  Description of Artificial Sequence: Synthetic oligonucleotide
  Antisense strand to SEQ ID NO: 1943868
aguuguacucagaacuggu

SEQ ID NO: 1943870 - RNA, 19 nt, Artificial Sequence
  Description of Artificial Sequence: Synthetic oligonucleotide
  Sense strand starting at position 1138 of SEQ ID NO: 1880122
ccuacaaacucccgugaau

SEQ ID NO: 1943871 - RNA, 19 nt, Artificial Sequence
  Description of Artificial Sequence: Synthetic oligonucleotide
  Antisense strand to SEQ ID NO: 1943870
auucacgggaguuuguagg

SEQ ID NO: 1943872 - RNA, 19 nt, Artificial Sequence
  Description of Artificial Sequence: Synthetic oligonucleotide
  Sense strand starting at position 1149 of SEQ ID NO: 1880122
ccgugaaugcuguggugaa

SEQ ID NO: 1943873 - RNA, 19 nt, Artificial Sequence
  Description of Artificial Sequence: Synthetic oligonucleotide
  Antisense strand to SEQ ID NO: 1943872
uucaccacagcauucacgg

SEQ ID NO: 1943874 - RNA, 19 nt, Artificial Sequence
  Description of Artificial Sequence: Synthetic oligonucleotide
  Sense strand starting at position 1273 of SEQ ID NO: 1880122
uggugaaaccgcuacgaaa

SEQ ID NO: 1943875 - RNA, 19 nt, Artificial Sequence
  Description of Artificial Sequence: Synthetic oligonucleotide
  Antisense strand to SEQ ID NO: 1943874
uuucguagcgguuucacca

SEQ ID NO: 1943876 - RNA, 19 nt, Artificial Sequence
  Description of Artificial Sequence: Synthetic oligonucleotide
  Sense strand starting at position 1394 of SEQ ID NO: 1880122
ggaagaucgcgccacuucu

SEQ ID NO: 1943877 - RNA, 19 nt, Artificial Sequence
  Description of Artificial Sequence: Synthetic oligonucleotide
  Antisense strand to SEQ ID NO: 1943876
agaaguggcgcgaucuucc

SEQ ID NO: 1943878 - RNA, 19 nt, Artificial Sequence
  Description of Artificial Sequence: Synthetic oligonucleotide
  Sense strand starting at position 1404 of SEQ ID NO: 1880122
gccacuucuccagacugga

SEQ ID NO: 1943879 - RNA, 19 nt, Artificial Sequence
  Description of Artificial Sequence: Synthetic oligonucleotide
  Antisense strand to SEQ ID NO: 1943878
uccagucuggagaaguggc

SEQ ID NO: 1943880 - RNA, 19 nt, Artificial Sequence
  Description of Artificial Sequence: Synthetic oligonucleotide
  Sense strand starting at position 1428 of SEQ ID NO: 1880122
cagcgagacuugucuuagg

SEQ ID NO: 1943881 - RNA, 19 nt, Artificial Sequence
  Description of Artificial Sequence: Synthetic oligonucleotide
  Antisense strand to SEQ ID NO: 1943880
ccuaagacaagucucgcug

SEQ ID NO: 1943882 - RNA, 19 nt, Artificial Sequence
  Description of Artificial Sequence: Synthetic oligonucleotide
  Sense strand starting at position 1431 of SEQ ID NO: 1880122
cgagacuugucuuagggag

SEQ ID NO: 1943883 - RNA, 19 nt, Artificial Sequence
  Description of Artificial Sequence: Synthetic oligonucleotide
  Antisense strand to SEQ ID NO: 1943882
cucccuaagacaagucucg

SEQ ID NO: 1943884 - RNA, 19 nt, Artificial Sequence
  Description of Artificial Sequence: Synthetic oligonucleotide
  Sense strand starting at position 1668 of SEQ ID NO: 1880122
guaaguggauaguucuaag

SEQ ID NO: 1943885 - RNA, 19 nt, Artificial Sequence
  Description of Artificial Sequence: Synthetic oligonucleotide
  Antisense strand to SEQ ID NO: 1943884
cuuagaacuauccacuuac

SEQ ID NO: 1943886 - RNA, 19 nt, Artificial Sequence
  Description of Artificial Sequence: Synthetic oligonucleotide
  Sense strand starting at position 1671 of SEQ ID NO: 1880122
aguggauaguucuaagcug

SEQ ID NO: 1943887 - RNA, 19 nt, Artificial Sequence
  Description of Artificial Sequence: Synthetic oligonucleotide
  Antisense strand to SEQ ID NO: 1943886
cagcuuagaacuauccacu

SEQ ID NO: 1943888 - RNA, 19 nt, Artificial Sequence
  Description of Artificial Sequence: Synthetic oligonucleotide
  Sense strand starting at position 1957 of SEQ ID NO: 1880122
accaccuucguuugauaau

SEQ ID NO: 1943889 - RNA, 19 nt, Artificial Sequence
  Description of Artificial Sequence: Synthetic oligonucleotide
  Antisense strand to SEQ ID NO: 1943888
auuaucaaacgaagguggu

SEQ ID NO: 1943890 - RNA, 19 nt, Artificial Sequence
  Description of Artificial Sequence: Synthetic oligonucleotide
  Sense strand starting at position 1958 of SEQ ID NO: 1880122
ccaccuucguuugauaaua

SEQ ID NO: 1943891 - RNA, 19 nt, Artificial Sequence
  Description of Artificial Sequence: Synthetic oligonucleotide
  Antisense strand to SEQ ID NO: 1943890
uauuaucaaacgaaggugg

SEQ ID NO: 1943892 - RNA, 19 nt, Artificial Sequence
  Description of Artificial Sequence: Synthetic oligonucleotide
  Sense strand starting at position 1960 of SEQ ID NO: 1880122
accuucguuugauaauagu

SEQ ID NO: 1943893 - RNA, 19 nt, Artificial Sequence
  Description of Artificial Sequence: Synthetic oligonucleotide
  Antisense strand to SEQ ID NO: 1943892
acuauuaucaaacgaaggu

SEQ ID NO: 1943894 - RNA, 19 nt, Artificial Sequence
  Description of Artificial Sequence: Synthetic oligonucleotide
  Sense strand starting at position 2213 of SEQ ID NO: 1880122
uagaaaucgcccuauccgu

SEQ ID NO: 1943895 - RNA, 19 nt, Artificial Sequence
  Description of Artificial Sequence: Synthetic oligonucleotide
  Antisense strand to SEQ ID NO: 1943894
acggauagggcgauuucua

SEQ ID NO: 1943896 - RNA, 19 nt, Artificial Sequence
  Description of Artificial Sequence: Synthetic oligonucleotide
  Sense strand starting at position 2410 of SEQ ID NO: 1880122
cuaagacugugguacuuga

SEQ ID NO: 1943897 - RNA, 19 nt, Artificial Sequence
  Description of Artificial Sequence: Synthetic oligonucleotide
  Antisense strand to SEQ ID NO: 1943896
ucaaguaccacagucuuag

SEQ ID NO: 1943898 - RNA, 19 nt, Artificial Sequence
  Description of Artificial Sequence: Synthetic oligonucleotide
  Sense strand starting at position 2428 of SEQ ID NO: 1880122
aucuguguccugcagagaa

SEQ ID NO: 1943899 - RNA, 19 nt, Artificial Sequence
  Description of Artificial Sequence: Synthetic oligonucleotide
  Antisense strand to SEQ ID NO: 1943898
uucucugcaggacacagau

SEQ ID NO: 1943900 - RNA, 19 nt, Artificial Sequence
  Description of Artificial Sequence: Synthetic oligonucleotide
  Sense strand starting at position 2517 of SEQ ID NO: 1880122
cguuuaggauuacaaggaa

SEQ ID NO: 1943901 - RNA, 19 nt, Artificial Sequence
  Description of Artificial Sequence: Synthetic oligonucleotide
  Antisense strand to SEQ ID NO: 1943900
uuccuuguaauccuaaacg

SEQ ID NO: 1943902 - RNA, 19 nt, Artificial Sequence
  Description of Artificial Sequence: Synthetic oligonucleotide
  Sense strand starting at position 2552 of SEQ ID NO: 1880122
accuguuuaucuuugugau

SEQ ID NO: 1943903 - RNA, 19 nt, Artificial Sequence
  Description of Artificial Sequence: Synthetic oligonucleotide
  Antisense strand to SEQ ID NO: 1943902
aucacaaagauaaacaggu

SEQ ID NO: 1943904 - RNA, 19 nt, Artificial Sequence
  Description of Artificial Sequence: Synthetic oligonucleotide
  Sense strand starting at position 2553 of SEQ ID NO: 1880122
ccuguuuaucuuugugaug

SEQ ID NO: 1943905 - RNA, 19 nt, Artificial Sequence
  Description of Artificial Sequence: Synthetic oligonucleotide
  Antisense strand to SEQ ID NO: 1943904
caucacaaagauaaacagg

SEQ ID NO: 1943906 - RNA, 19 nt, Artificial Sequence
  Description of Artificial Sequence: Synthetic oligonucleotide
  Sense strand starting at position 2554 of SEQ ID NO: 1880122
cuguuuaucuuugugaugu

SEQ ID NO: 1943907 - RNA, 19 nt, Artificial Sequence
  Description of Artificial Sequence: Synthetic oligonucleotide
  Antisense strand to SEQ ID NO: 1943906
acaucacaaagauaaacag

SEQ ID NO: 1943908 - RNA, 19 nt, Artificial Sequence
  Description of Artificial Sequence: Synthetic oligonucleotide
  Sense strand starting at position 2644 of SEQ ID NO: 1880122
ucagauggguugcaaacua

SEQ ID NO: 1943909 - RNA, 19 nt, Artificial Sequence
  Description of Artificial Sequence: Synthetic oligonucleotide
  Antisense strand to SEQ ID NO: 1943908
uaguuugcaacccaucuga

SEQ ID NO: 1943910 - RNA, 19 nt, Artificial Sequence
  Description of Artificial Sequence: Synthetic oligonucleotide
  Sense strand starting at position 2685 of SEQ ID NO: 1880122
cuagaaguguuacaaagac

SEQ ID NO: 1943911 - RNA, 19 nt, Artificial Sequence
  Description of Artificial Sequence: Synthetic oligonucleotide
  Antisense strand to SEQ ID NO: 1943910
gucuuuguaacacuucuag

SEQ ID NO: 1943912 - RNA, 19 nt, Artificial Sequence
  Description of Artificial Sequence: Synthetic oligonucleotide
  Sense strand starting at position 2850 of SEQ ID NO: 1880122
cucagaaccuuagugcuua

SEQ ID NO: 1943913 - RNA, 19 nt, Artificial Sequence
  Description of Artificial Sequence: Synthetic oligonucleotide
  Antisense strand to SEQ ID NO: 1943912
uaagcacuaagguucugag

SEQ ID NO: 1943914 - RNA, 19 nt, Artificial Sequence
  Description of Artificial Sequence: Synthetic oligonucleotide
  Sense strand starting at position 2858 of SEQ ID NO: 1880122
cuuagugcuuaccucauau

SEQ ID NO: 1943915 - RNA, 19 nt, Artificial Sequence
  Description of Artificial Sequence: Synthetic oligonucleotide
  Antisense strand to SEQ ID NO: 1943914
auaugagguaagcacuaag

SEQ ID NO: 1943916 - RNA, 19 nt, Artificial Sequence
  Description of Artificial Sequence: Synthetic oligonucleotide
  Sense strand starting at position 3784 of SEQ ID NO: 1880122
cacacucggaugugugauu

SEQ ID NO: 1943917 - RNA, 19 nt, Artificial Sequence
  Description of Artificial Sequence: Synthetic oligonucleotide
  Antisense strand to SEQ ID NO: 1943916
aaucacacauccgagugug

SEQ ID NO: 1943918 - RNA, 19 nt, Artificial Sequence
  Description of Artificial Sequence: Synthetic oligonucleotide
  Sense strand starting at position 3801 of SEQ ID NO: 1880122
uuuaaagagaguugugguu

SEQ ID NO: 1943919 - RNA, 19 nt, Artificial Sequence
  Description of Artificial Sequence: Synthetic oligonucleotide
  Antisense strand to SEQ ID NO: 1943918
aaccacaacucucuuuaaa

SEQ ID NO: 1943920 - RNA, 19 nt, Artificial Sequence
  Description of Artificial Sequence: Synthetic oligonucleotide
  Sense strand starting at position 1776 of SEQ ID NO: 1880123
auacuaacgccuuguauau

SEQ ID NO: 1943921 - RNA, 19 nt, Artificial Sequence
  Description of Artificial Sequence: Synthetic oligonucleotide
  Antisense strand to SEQ ID NO: 1943920
auauacaaggcguuaguau

SEQ ID NO: 1943922 - RNA, 19 nt, Artificial Sequence
  Description of Artificial Sequence: Synthetic oligonucleotide
  Sense strand starting at position 1785 of SEQ ID NO: 1880123
ccuuguauaugcuuccaca

SEQ ID NO: 1943923 - RNA, 19 nt, Artificial Sequence
  Description of Artificial Sequence: Synthetic oligonucleotide
  Antisense strand to SEQ ID NO: 1943922
uguggaagcauauacaagg

SEQ ID NO: 1943924 - RNA, 19 nt, Artificial Sequence
  Description of Artificial Sequence: Synthetic oligonucleotide
  Sense strand starting at position 2336 of SEQ ID NO: 1880123
ggagaagugacuuaugccu

SEQ ID NO: 1943925 - RNA, 19 nt, Artificial Sequence
  Description of Artificial Sequence: Synthetic oligonucleotide
  Antisense strand to SEQ ID NO: 1943924
aggcauaagucacuucucc

SEQ ID NO: 1943926 - RNA, 19 nt, Artificial Sequence
  Description of Artificial Sequence: Synthetic oligonucleotide
  Sense strand starting at position 2391 of SEQ ID NO: 1880123
ccgcaaugaagcgaguauu

SEQ ID NO: 1943927 - RNA, 19 nt, Artificial Sequence
  Description of Artificial Sequence: Synthetic oligonucleotide
  Antisense strand to SEQ ID NO: 1943926
aauacucgcuucauugcgg

SEQ ID NO: 1943928 - RNA, 19 nt, Artificial Sequence
  Description of Artificial Sequence: Synthetic oligonucleotide
  Sense strand starting at position 2401 of SEQ ID NO: 1880123
gcgaguauuuaaucugugu

SEQ ID NO: 1943929 - RNA, 19 nt, Artificial Sequence
  Description of Artificial Sequence: Synthetic oligonucleotide
  Antisense strand to SEQ ID NO: 1943928
acacagauuaaauacucgc

SEQ ID NO: 1943930 - RNA, 19 nt, Artificial Sequence
  Description of Artificial Sequence: Synthetic oligonucleotide
  Sense strand starting at position 2410 of SEQ ID NO: 1880123
uaaucuguguccuguggaa

SEQ ID NO: 1943931 - RNA, 19 nt, Artificial Sequence
  Description of Artificial Sequence: Synthetic oligonucleotide
  Antisense strand to SEQ ID NO: 1943930
uuccacaggacacagauua

SEQ ID NO: 1943932 - RNA, 19 nt, Artificial Sequence
  Description of Artificial Sequence: Synthetic oligonucleotide
  Sense strand starting at position 2412 of SEQ ID NO: 1880123
aucuguguccuguggaagu

SEQ ID NO: 1943933 - RNA, 19 nt, Artificial Sequence
  Description of Artificial Sequence: Synthetic oligonucleotide
  Antisense strand to SEQ ID NO: 1943932
acuuccacaggacacagau

SEQ ID NO: 1943934 - RNA, 19 nt, Artificial Sequence
  Description of Artificial Sequence: Synthetic oligonucleotide
  Sense strand starting at position 2537 of SEQ ID NO: 1880123
cuugguuaucuuugugaug

SEQ ID NO: 1943935 - RNA, 19 nt, Artificial Sequence
  Description of Artificial Sequence: Synthetic oligonucleotide
  Antisense strand to SEQ ID NO: 1943934
caucacaaagauaaccaag

SEQ ID NO: 1943936 - RNA, 19 nt, Artificial Sequence
  Description of Artificial Sequence: Synthetic oligonucleotide
  Sense strand starting at position 2538 of SEQ ID NO: 1880123
uugguuaucuuugugaugu

SEQ ID NO: 1943937 - RNA, 19 nt, Artificial Sequence
  Description of Artificial Sequence: Synthetic oligonucleotide
  Antisense strand to SEQ ID NO: 1943936
acaucacaaagauaaccaa

SEQ ID NO: 1943938 - RNA, 19 nt, Artificial Sequence
  Description of Artificial Sequence: Synthetic oligonucleotide
  Sense strand starting at position 2622 of SEQ ID NO: 1880123
aggugacugugucucgaaa

SEQ ID NO: 1943939 - RNA, 19 nt, Artificial Sequence
  Description of Artificial Sequence: Synthetic oligonucleotide
  Antisense strand to SEQ ID NO: 1943938
uuucgagacacagucaccu

SEQ ID NO: 1943940 - RNA, 19 nt, Artificial Sequence
  Description of Artificial Sequence: Synthetic oligonucleotide
  Sense strand starting at position 3295 of SEQ ID NO: 1880123
ccgcuucauugcgggagau

SEQ ID NO: 1943941 - RNA, 19 nt, Artificial Sequence
  Description of Artificial Sequence: Synthetic oligonucleotide
  Antisense strand to SEQ ID NO: 1943940
aucucccgcaaugaagcgg

SEQ ID NO: 1943942 - RNA, 19 nt, Artificial Sequence
  Description of Artificial Sequence: Synthetic oligonucleotide
  Sense strand starting at position 3297 of SEQ ID NO: 1880123
gcuucauugcgggagauga

SEQ ID NO: 1943943 - RNA, 19 nt, Artificial Sequence
  Description of Artificial Sequence: Synthetic oligonucleotide
  Antisense strand to SEQ ID NO: 1943942
ucaucucccgcaaugaagc

SEQ ID NO: 1943944 - RNA, 19 nt, Artificial Sequence
  Description of Artificial Sequence: Synthetic oligonucleotide
  Sense strand starting at position 3810 of SEQ ID NO: 1880123
agugauguaucuucuacag

SEQ ID NO: 1943945 - RNA, 19 nt, Artificial Sequence
  Description of Artificial Sequence: Synthetic oligonucleotide
  Antisense strand to SEQ ID NO: 1943944
cuguagaagauacaucacu

SEQ ID NO: 1943946 - RNA, 19 nt, Artificial Sequence
  Description of Artificial Sequence: Synthetic oligonucleotide
  Sense strand starting at position 3812 of SEQ ID NO: 1880123
ugauguaucuucuacagua

SEQ ID NO: 1943947 - RNA, 19 nt, Artificial Sequence
  Description of Artificial Sequence: Synthetic oligonucleotide
  Antisense strand to SEQ ID NO: 1943946
uacuguagaagauacauca

SEQ ID NO: 1943948 - RNA, 19 nt, Artificial Sequence
  Description of Artificial Sequence: Synthetic oligonucleotide
  Sense strand starting at position 164 of SEQ ID NO: 1880124
cugugagagcaagauguaa

SEQ ID NO: 1943949 - RNA, 19 nt, Artificial Sequence
  Description of Artificial Sequence: Synthetic oligonucleotide
  Antisense strand to SEQ ID NO: 1943948
uuacaucuugcucucacag

SEQ ID NO: 1943950 - RNA, 19 nt, Artificial Sequence
  Description of Artificial Sequence: Synthetic oligonucleotide
  Sense strand starting at position 166 of SEQ ID NO: 1880124
gugagagcaagauguaaag

SEQ ID NO: 1943951 - RNA, 19 nt, Artificial Sequence
  Description of Artificial Sequence: Synthetic oligonucleotide
  Antisense strand to SEQ ID NO: 1943950
cuuuacaucuugcucucac

SEQ ID NO: 1943952 - RNA, 19 nt, Artificial Sequence
  Description of Artificial Sequence: Synthetic oligonucleotide
  Sense strand starting at position 172 of SEQ ID NO: 1880124
gcaagauguaaagauaguu

SEQ ID NO: 1943953 - RNA, 19 nt, Artificial Sequence
  Description of Artificial Sequence: Synthetic oligonucleotide
  Antisense strand to SEQ ID NO: 1943952
aacuaucuuuacaucuugc

SEQ ID NO: 1943954 - RNA, 19 nt, Artificial Sequence
  Description of Artificial Sequence: Synthetic oligonucleotide
  Sense strand starting at position 280 of SEQ ID NO: 1880124
uugguuauauguuaaccaa

SEQ ID NO: 1943955 - RNA, 19 nt, Artificial Sequence
  Description of Artificial Sequence: Synthetic oligonucleotide
  Antisense strand to SEQ ID NO: 1943954
uugguuaacauauaaccaa

SEQ ID NO: 1943956 - RNA, 19 nt, Artificial Sequence
  Description of Artificial Sequence: Synthetic oligonucleotide
  Sense strand starting at position 283 of SEQ ID NO: 1880124
guuauauguuaaccaauac

SEQ ID NO: 1943957 - RNA, 19 nt, Artificial Sequence
  Description of Artificial Sequence: Synthetic oligonucleotide
  Antisense strand to SEQ ID NO: 1943956
guauugguuaacauauaac

SEQ ID NO: 1943958 - RNA, 19 nt, Artificial Sequence
  Description of Artificial Sequence: Synthetic oligonucleotide
  Sense strand starting at position 305 of SEQ ID NO: 1880124
ucuugagaauucucgucuu

SEQ ID NO: 1943959 - RNA, 19 nt, Artificial Sequence
  Description of Artificial Sequence: Synthetic oligonucleotide
  Antisense strand to SEQ ID NO: 1943958
aagacgagaauucucaaga

SEQ ID NO: 1943960 - RNA, 19 nt, Artificial Sequence
  Description of Artificial Sequence: Synthetic oligonucleotide
  Sense strand starting at position 308 of SEQ ID NO: 1880124
ugagaauucucgucuucca

SEQ ID NO: 1943961 - RNA, 19 nt, Artificial Sequence
  Description of Artificial Sequence: Synthetic oligonucleotide
  Antisense strand to SEQ ID NO: 1943960
uggaagacgagaauucuca

SEQ ID NO: 1943962 - RNA, 19 nt, Artificial Sequence
  Description of Artificial Sequence: Synthetic oligonucleotide
  Sense strand starting at position 514 of SEQ ID NO: 1880124
uccuauugucuuuaucuga

SEQ ID NO: 1943963 - RNA, 19 nt, Artificial Sequence
  Description of Artificial Sequence: Synthetic oligonucleotide
  Antisense strand to SEQ ID NO: 1943962
ucagauaaagacaauagga

SEQ ID NO: 1943964 - RNA, 19 nt, Artificial Sequence
  Description of Artificial Sequence: Synthetic oligonucleotide
  Sense strand starting at position 765 of SEQ ID NO: 1880124
auagaauucgaguggcugu

SEQ ID NO: 1943965 - RNA, 19 nt, Artificial Sequence
  Description of Artificial Sequence: Synthetic oligonucleotide
  Antisense strand to SEQ ID NO: 1943964
acagccacucgaauucuau

SEQ ID NO: 1943966 - RNA, 19 nt, Artificial Sequence
  Description of Artificial Sequence: Synthetic oligonucleotide
  Sense strand starting at position 766 of SEQ ID NO: 1880124
uagaauucgaguggcuguu

SEQ ID NO: 1943967 - RNA, 19 nt, Artificial Sequence
  Description of Artificial Sequence: Synthetic oligonucleotide
  Antisense strand to SEQ ID NO: 1943966
aacagccacucgaauucua

SEQ ID NO: 1943968 - RNA, 19 nt, Artificial Sequence
  Description of Artificial Sequence: Synthetic oligonucleotide
  Sense strand starting at position 901 of SEQ ID NO: 1880124
gcaggauuccagcaggguu

SEQ ID NO: 1943969 - RNA, 19 nt, Artificial Sequence
  Description of Artificial Sequence: Synthetic oligonucleotide
  Antisense strand to SEQ ID NO: 1943968
aacccugcuggaauccugc

SEQ ID NO: 1943970 - RNA, 19 nt, Artificial Sequence
  Description of Artificial Sequence: Synthetic oligonucleotide
  Sense strand starting at position 1389 of SEQ ID NO: 1880124
cuuguaaucucaguuaccu

SEQ ID NO: 1943971 - RNA, 19 nt, Artificial Sequence
  Description of Artificial Sequence: Synthetic oligonucleotide
  Antisense strand to SEQ ID NO: 1943970
agguaacugagauuacaag

SEQ ID NO: 1943972 - RNA, 19 nt, Artificial Sequence
  Description of Artificial Sequence: Synthetic oligonucleotide
  Sense strand starting at position 1397 of SEQ ID NO: 1880124
cucaguuaccuaggagauc

SEQ ID NO: 1943973 - RNA, 19 nt, Artificial Sequence
  Description of Artificial Sequence: Synthetic oligonucleotide
  Antisense strand to SEQ ID NO: 1943972
gaucuccuagguaacugag

SEQ ID NO: 1943974 - RNA, 19 nt, Artificial Sequence
  Description of Artificial Sequence: Synthetic oligonucleotide
  Sense strand starting at position 1403 of SEQ ID NO: 1880124
uaccuaggagaucgaguau

SEQ ID NO: 1943975 - RNA, 19 nt, Artificial Sequence
  Description of Artificial Sequence: Synthetic oligonucleotide
  Antisense strand to SEQ ID NO: 1943974
auacucgaucuccuaggua

SEQ ID NO: 1943976 - RNA, 19 nt, Artificial Sequence
  Description of Artificial Sequence: Synthetic oligonucleotide
  Sense strand starting at position 1487 of SEQ ID NO: 1880124
cagugaacuguuugcuguu

SEQ ID NO: 1943977 - RNA, 19 nt, Artificial Sequence
  Description of Artificial Sequence: Synthetic oligonucleotide
  Antisense strand to SEQ ID NO: 1943976
aacagcaaacaguucacug

SEQ ID NO: 1943978 - RNA, 19 nt, Artificial Sequence
  Description of Artificial Sequence: Synthetic oligonucleotide
  Sense strand starting at position 1488 of SEQ ID NO: 1880124
agugaacuguuugcuguua

SEQ ID NO: 1943979 - RNA, 19 nt, Artificial Sequence
  Description of Artificial Sequence: Synthetic oligonucleotide
  Antisense strand to SEQ ID NO: 1943978
uaacagcaaacaguucacu

SEQ ID NO: 1943980 - RNA, 19 nt, Artificial Sequence
  Description of Artificial Sequence: Synthetic oligonucleotide
  Sense strand starting at position 1489 of SEQ ID NO: 1880124
gugaacuguuugcuguuaa

SEQ ID NO: 1943981 - RNA, 19 nt, Artificial Sequence
  Description of Artificial Sequence: Synthetic oligonucleotide
  Antisense strand to SEQ ID NO: 1943980
uuaacagcaaacaguucac

SEQ ID NO: 1943982 - RNA, 19 nt, Artificial Sequence
  Description of Artificial Sequence: Synthetic oligonucleotide
  Sense strand starting at position 1732 of SEQ ID NO: 1880124
uuugaaaguaagugacaga

SEQ ID NO: 1943983 - RNA, 19 nt, Artificial Sequence
  Description of Artificial Sequence: Synthetic oligonucleotide
  Antisense strand to SEQ ID NO: 1943982
ucugucacuuacuuucaaa

SEQ ID NO: 1943984 - RNA, 19 nt, Artificial Sequence
  Description of Artificial Sequence: Synthetic oligonucleotide
  Sense strand starting at position 1775 of SEQ ID NO: 1880124
uuuauacuaacgcguugua

SEQ ID NO: 1943985 - RNA, 19 nt, Artificial Sequence
  Description of Artificial Sequence: Synthetic oligonucleotide
  Antisense strand to SEQ ID NO: 1943984
uacaacgcguuaguauaaa

SEQ ID NO: 1943986 - RNA, 19 nt, Artificial Sequence
  Description of Artificial Sequence: Synthetic oligonucleotide
  Sense strand starting at position 1778 of SEQ ID NO: 1880124
auacuaacgcguuguauau

SEQ ID NO: 1943987 - RNA, 19 nt, Artificial Sequence
  Description of Artificial Sequence: Synthetic oligonucleotide
  Antisense strand to SEQ ID NO: 1943986
auauacaacgcguuaguau

SEQ ID NO: 1943988 - RNA, 19 nt, Artificial Sequence
  Description of Artificial Sequence: Synthetic oligonucleotide
  Sense strand starting at position 1787 of SEQ ID NO: 1880124
cguuguauaugcuuccaca

SEQ ID NO: 1943989 - RNA, 19 nt, Artificial Sequence
  Description of Artificial Sequence: Synthetic oligonucleotide
  Antisense strand to SEQ ID NO: 1943988
uguggaagcauauacaacg

SEQ ID NO: 1943990 - RNA, 19 nt, Artificial Sequence
  Description of Artificial Sequence: Synthetic oligonucleotide
  Sense strand starting at position 2367 of SEQ ID NO: 1880124
ccucgucugccgcaaugaa

SEQ ID NO: 1943991 - RNA, 19 nt, Artificial Sequence
  Description of Artificial Sequence: Synthetic oligonucleotide
  Antisense strand to SEQ ID NO: 1943990
uucauugcggcagacgagg

SEQ ID NO: 1943992 - RNA, 19 nt, Artificial Sequence
  Description of Artificial Sequence: Synthetic oligonucleotide
  Sense strand starting at position 2379 of SEQ ID NO: 1880124
caaugaagcggguacuuaa

SEQ ID NO: 1943993 - RNA, 19 nt, Artificial Sequence
  Description of Artificial Sequence: Synthetic oligonucleotide
  Antisense strand to SEQ ID NO: 1943992
uuaaguacccgcuucauug

SEQ ID NO: 1943994 - RNA, 19 nt, Artificial Sequence
  Description of Artificial Sequence: Synthetic oligonucleotide
  Sense strand starting at position 2386 of SEQ ID NO: 1880124
gcggguacuuaaucugugu

SEQ ID NO: 1943995 - RNA, 19 nt, Artificial Sequence
  Description of Artificial Sequence: Synthetic oligonucleotide
  Antisense strand to SEQ ID NO: 1943994
acacagauuaaguacccgc

SEQ ID NO: 1943996 - RNA, 19 nt, Artificial Sequence
  Description of Artificial Sequence: Synthetic oligonucleotide
  Sense strand starting at position 2522 of SEQ ID NO: 1880124
ccugguuaucuuuaugaug

SEQ ID NO: 1943997 - RNA, 19 nt, Artificial Sequence
  Description of Artificial Sequence: Synthetic oligonucleotide
  Antisense strand to SEQ ID NO: 1943996
caucauaaagauaaccagg

SEQ ID NO: 1943998 - RNA, 19 nt, Artificial Sequence
  Description of Artificial Sequence: Synthetic oligonucleotide
  Sense strand starting at position 2605 of SEQ ID NO: 1880124
agaggugacugugucucaa

SEQ ID NO: 1943999 - RNA, 19 nt, Artificial Sequence
  Description of Artificial Sequence: Synthetic oligonucleotide
  Antisense strand to SEQ ID NO: 1943998
uugagacacagucaccucu

SEQ ID NO: 1944000 - RNA, 19 nt, Artificial Sequence
  Description of Artificial Sequence: Synthetic oligonucleotide
  Sense strand starting at position 2761 of SEQ ID NO: 1880124
ugaagauaaugucaagaau

SEQ ID NO: 1944001 - RNA, 19 nt, Artificial Sequence
  Description of Artificial Sequence: Synthetic oligonucleotide
  Antisense strand to SEQ ID NO: 1944000
auucuugacauuaucuuca

SEQ ID NO: 1944002 - RNA, 19 nt, Artificial Sequence
  Description of Artificial Sequence: Synthetic oligonucleotide
  Sense strand starting at position 2834 of SEQ ID NO: 1880124
guagauguccaagguccau

SEQ ID NO: 1944003 - RNA, 19 nt, Artificial Sequence
  Description of Artificial Sequence: Synthetic oligonucleotide
  Antisense strand to SEQ ID NO: 1944002
auggaccuuggacaucuac

SEQ ID NO: 1944004 - RNA, 19 nt, Artificial Sequence
  Description of Artificial Sequence: Synthetic oligonucleotide
  Sense strand starting at position 2840 of SEQ ID NO: 1880124
guccaagguccauacgauu

SEQ ID NO: 1944005 - RNA, 19 nt, Artificial Sequence
  Description of Artificial Sequence: Synthetic oligonucleotide
  Antisense strand to SEQ ID NO: 1944004
aaucguauggaccuuggac

SEQ ID NO: 1944006 - RNA, 19 nt, Artificial Sequence
  Description of Artificial Sequence: Synthetic oligonucleotide
  Sense strand starting at position 2851 of SEQ ID NO: 1880124
auacgauuagcaugcguau

SEQ ID NO: 1944007 - RNA, 19 nt, Artificial Sequence
  Description of Artificial Sequence: Synthetic oligonucleotide
  Antisense strand to SEQ ID NO: 1944006
auacgcaugcuaaucguau

SEQ ID NO: 1944008 - RNA, 19 nt, Artificial Sequence
  Description of Artificial Sequence: Synthetic oligonucleotide
  Sense strand starting at position 2853 of SEQ ID NO: 1880124
acgauuagcaugcguauca

SEQ ID NO: 1944009 - RNA, 19 nt, Artificial Sequence
  Description of Artificial Sequence: Synthetic oligonucleotide
  Antisense strand to SEQ ID NO: 1944008
ugauacgcaugcuaaucgu

SEQ ID NO: 1944010 - RNA, 19 nt, Artificial Sequence
  Description of Artificial Sequence: Synthetic oligonucleotide
  Sense strand starting at position 3082 of SEQ ID NO: 1880124
ugcaguggccuuuaaugca

SEQ ID NO: 1944011 - RNA, 19 nt, Artificial Sequence
  Description of Artificial Sequence: Synthetic oligonucleotide
  Antisense strand to SEQ ID NO: 1944010
ugcauuaaaggccacugca

SEQ ID NO: 1944012 - RNA, 19 nt, Artificial Sequence
  Description of Artificial Sequence: Synthetic oligonucleotide
  Sense strand starting at position 3134 of SEQ ID NO: 1880124
caaagauaaucagguuuga

SEQ ID NO: 1944013 - RNA, 19 nt, Artificial Sequence
  Description of Artificial Sequence: Synthetic oligonucleotide
  Antisense strand to SEQ ID NO: 1944012
ucaaaccugauuaucuuug

SEQ ID NO: 1944014 - RNA, 19 nt, Artificial Sequence
  Description of Artificial Sequence: Synthetic oligonucleotide
  Sense strand starting at position 3139 of SEQ ID NO: 1880124
auaaucagguuugaaagga

SEQ ID NO: 1944015 - RNA, 19 nt, Artificial Sequence
  Description of Artificial Sequence: Synthetic oligonucleotide
  Antisense strand to SEQ ID NO: 1944014
uccuuucaaaccugauuau

SEQ ID NO: 1944016 - RNA, 19 nt, Artificial Sequence
  Description of Artificial Sequence: Synthetic oligonucleotide
  Sense strand starting at position 3183 of SEQ ID NO: 1880124
guccuagucugcucauuga

SEQ ID NO: 1944017 - RNA, 19 nt, Artificial Sequence
  Description of Artificial Sequence: Synthetic oligonucleotide
  Antisense strand to SEQ ID NO: 1944016
ucaaugagcagacuaggac

SEQ ID NO: 1944018 - RNA, 19 nt, Artificial Sequence
  Description of Artificial Sequence: Synthetic oligonucleotide
  Sense strand starting at position 3282 of SEQ ID NO: 1880124
gcuucauugcgggagacga

SEQ ID NO: 1944019 - RNA, 19 nt, Artificial Sequence
  Description of Artificial Sequence: Synthetic oligonucleotide
  Antisense strand to SEQ ID NO: 1944018
ucgucucccgcaaugaagc

SEQ ID NO: 1944020 - RNA, 19 nt, Artificial Sequence
  Description of Artificial Sequence: Synthetic oligonucleotide
  Sense strand starting at position 3429 of SEQ ID NO: 1880124
cacuguuaacuguacgauu

SEQ ID NO: 1944021 - RNA, 19 nt, Artificial Sequence
  Description of Artificial Sequence: Synthetic oligonucleotide
  Antisense strand to SEQ ID NO: 1944020
aaucguacaguuaacagug

SEQ ID NO: 1944022 - RNA, 19 nt, Artificial Sequence
  Description of Artificial Sequence: Synthetic oligonucleotide
  Sense strand starting at position 3803 of SEQ ID NO: 1880124
guauguaccuucuacagua

SEQ ID NO: 1944023 - RNA, 19 nt, Artificial Sequence
  Description of Artificial Sequence: Synthetic oligonucleotide
  Antisense strand to SEQ ID NO: 1944022
uacuguagaagguacauac

SEQ ID NO: 1944024 - RNA, 19 nt, Artificial Sequence
  Description of Artificial Sequence: Synthetic oligonucleotide
  Sense strand starting at position 3805 of SEQ ID NO: 1880124
auguaccuucuacaguaua

SEQ ID NO: 1944025 - RNA, 19 nt, Artificial Sequence
  Description of Artificial Sequence: Synthetic oligonucleotide
  Antisense strand to SEQ ID NO: 1944024
uauacuguagaagguacau

SEQ ID NO: 1944026 - RNA, 19 nt, Artificial Sequence
  Description of Artificial Sequence: Synthetic oligonucleotide
  Sense strand starting at position 3834 of SEQ ID NO: 1880124
uuaacagauucugucauug

SEQ ID NO: 1944027 - RNA, 19 nt, Artificial Sequence
  Description of Artificial Sequence: Synthetic oligonucleotide
  Antisense strand to SEQ ID NO: 1944026
caaugacagaaucuguuaa

SEQ ID NO: 1944028 - RNA, 19 nt, Artificial Sequence
  Description of Artificial Sequence: Synthetic oligonucleotide
  Sense strand starting at position 1776 of SEQ ID NO: 1880125
auacuaacgccuuguauau

SEQ ID NO: 1944029 - RNA, 19 nt, Artificial Sequence
  Description of Artificial Sequence: Synthetic oligonucleotide
  Antisense strand to SEQ ID NO: 1944028
auauacaaggcguuaguau

SEQ ID NO: 1944030 - RNA, 19 nt, Artificial Sequence
  Description of Artificial Sequence: Synthetic oligonucleotide
  Sense strand starting at position 1785 of SEQ ID NO: 1880125
ccuuguauaugcuuccaca

SEQ ID NO: 1944031 - RNA, 19 nt, Artificial Sequence
  Description of Artificial Sequence: Synthetic oligonucleotide
  Antisense strand to SEQ ID NO: 1944030
uguggaagcauauacaagg

SEQ ID NO: 1944032 - RNA, 19 nt, Artificial Sequence
  Description of Artificial Sequence: Synthetic oligonucleotide
  Sense strand starting at position 2336 of SEQ ID NO: 1880125
ggagaagugacuuaugccu

SEQ ID NO: 1944033 - RNA, 19 nt, Artificial Sequence
  Description of Artificial Sequence: Synthetic oligonucleotide
  Antisense strand to SEQ ID NO: 1944032
aggcauaagucacuucucc

SEQ ID NO: 1944034 - RNA, 19 nt, Artificial Sequence
  Description of Artificial Sequence: Synthetic oligonucleotide
  Sense strand starting at position 2391 of SEQ ID NO: 1880125
ccgcaaugaagcgaguauu

SEQ ID NO: 1944035 - RNA, 19 nt, Artificial Sequence
  Description of Artificial Sequence: Synthetic oligonucleotide
  Antisense strand to SEQ ID NO: 1944034
aauacucgcuucauugcgg

SEQ ID NO: 1944036 - RNA, 19 nt, Artificial Sequence
  Description of Artificial Sequence: Synthetic oligonucleotide
  Sense strand starting at position 2401 of SEQ ID NO: 1880125
gcgaguauuuaaucugugu

SEQ ID NO: 1944037 - RNA, 19 nt, Artificial Sequence
  Description of Artificial Sequence: Synthetic oligonucleotide
  Antisense strand to SEQ ID NO: 1944036
acacagauuaaauacucgc

SEQ ID NO: 1944038 - RNA, 19 nt, Artificial Sequence
  Description of Artificial Sequence: Synthetic oligonucleotide
  Sense strand starting at position 2410 of SEQ ID NO: 1880125
uaaucuguguccuguggaa

SEQ ID NO: 1944039 - RNA, 19 nt, Artificial Sequence
  Description of Artificial Sequence: Synthetic oligonucleotide
  Antisense strand to SEQ ID NO: 1944038
uuccacaggacacagauua

SEQ ID NO: 1944040 - RNA, 19 nt, Artificial Sequence
  Description of Artificial Sequence: Synthetic oligonucleotide
  Sense strand starting at position 2412 of SEQ ID NO: 1880125
aucuguguccuguggaagu

SEQ ID NO: 1944041 - RNA, 19 nt, Artificial Sequence
  Description of Artificial Sequence: Synthetic oligonucleotide
  Antisense strand to SEQ ID NO: 1944040
acuuccacaggacacagau

SEQ ID NO: 1944042 - RNA, 19 nt, Artificial Sequence
  Description of Artificial Sequence: Synthetic oligonucleotide
  Sense strand starting at position 2537 of SEQ ID NO: 1880125
cuugguuaucuuugugaug

SEQ ID NO: 1944043 - RNA, 19 nt, Artificial Sequence
  Description of Artificial Sequence: Synthetic oligonucleotide
  Antisense strand to SEQ ID NO: 1944042
caucacaaagauaaccaag

SEQ ID NO: 1944044 - RNA, 19 nt, Artificial Sequence
  Description of Artificial Sequence: Synthetic oligonucleotide
  Sense strand starting at position 2538 of SEQ ID NO: 1880125
uugguuaucuuugugaugu

SEQ ID NO: 1944045 - RNA, 19 nt, Artificial Sequence
  Description of Artificial Sequence: Synthetic oligonucleotide
  Antisense strand to SEQ ID NO: 1944044
acaucacaaagauaaccaa

SEQ ID NO: 1944046 - RNA, 19 nt, Artificial Sequence
  Description of Artificial Sequence: Synthetic oligonucleotide
  Sense strand starting at position 2622 of SEQ ID NO: 1880125
aggugacugugucucgaaa

SEQ ID NO: 1944047 - RNA, 19 nt, Artificial Sequence
  Description of Artificial Sequence: Synthetic oligonucleotide
  Antisense strand to SEQ ID NO: 1944046
uuucgagacacagucaccu

SEQ ID NO: 1944048 - RNA, 19 nt, Artificial Sequence
  Description of Artificial Sequence: Synthetic oligonucleotide
  Sense strand starting at position 3295 of SEQ ID NO: 1880125
ccgcuucauugcgggagau

SEQ ID NO: 1944049 - RNA, 19 nt, Artificial Sequence
  Description of Artificial Sequence: Synthetic oligonucleotide
  Antisense strand to SEQ ID NO: 1944048
aucucccgcaaugaagcgg

SEQ ID NO: 1944050 - RNA, 19 nt, Artificial Sequence
  Description of Artificial Sequence: Synthetic oligonucleotide
  Sense strand starting at position 3297 of SEQ ID NO: 1880125
gcuucauugcgggagauga

SEQ ID NO: 1944051 - RNA, 19 nt, Artificial Sequence
  Description of Artificial Sequence: Synthetic oligonucleotide
  Antisense strand to SEQ ID NO: 1944050
ucaucucccgcaaugaagc

SEQ ID NO: 1944052 - RNA, 19 nt, Artificial Sequence
  Description of Artificial Sequence: Synthetic oligonucleotide
  Sense strand starting at position 3810 of SEQ ID NO: 1880125
agugauguaucuucuacag

SEQ ID NO: 1944053 - RNA, 19 nt, Artificial Sequence
  Description of Artificial Sequence: Synthetic oligonucleotide
  Antisense strand to SEQ ID NO: 1944052
cuguagaagauacaucacu

SEQ ID NO: 1944054 - RNA, 19 nt, Artificial Sequence
  Description of Artificial Sequence: Synthetic oligonucleotide
  Sense strand starting at position 3812 of SEQ ID NO: 1880125
ugauguaucuucuacagua

SEQ ID NO: 1944055 - RNA, 19 nt, Artificial Sequence
  Description of Artificial Sequence: Synthetic oligonucleotide
  Antisense strand to SEQ ID NO: 1944054
uacuguagaagauacauca

SEQ ID NO: 1944056 - RNA, 19 nt, Artificial Sequence
  Description of Artificial Sequence: Synthetic oligonucleotide
  Sense strand starting at position 61 of SEQ ID NO: 1880126
auauuuagguuacaggaaa

SEQ ID NO: 1944057 - RNA, 19 nt, Artificial Sequence
  Description of Artificial Sequence: Synthetic oligonucleotide
  Antisense strand to SEQ ID NO: 1944056
uuuccuguaaccuaaauau

SEQ ID NO: 1944058 - RNA, 19 nt, Artificial Sequence
  Description of Artificial Sequence: Synthetic oligonucleotide
  Sense strand starting at position 80 of SEQ ID NO: 1880126
gcaaauauggaaugugauc

SEQ ID NO: 1944059 - RNA, 19 nt, Artificial Sequence
  Description of Artificial Sequence: Synthetic oligonucleotide
  Antisense strand to SEQ ID NO: 1944058
gaucacauuccauauuugc

SEQ ID NO: 1944060 - RNA, 19 nt, Artificial Sequence
  Description of Artificial Sequence: Synthetic oligonucleotide
  Sense strand starting at position 85 of SEQ ID NO: 1880126
uauggaaugugaucuaucu

SEQ ID NO: 1944061 - RNA, 19 nt, Artificial Sequence
  Description of Artificial Sequence: Synthetic oligonucleotide
  Antisense strand to SEQ ID NO: 1944060
agauagaucacauuccaua

SEQ ID NO: 1944062 - RNA, 19 nt, Artificial Sequence
  Description of Artificial Sequence: Synthetic oligonucleotide
  Sense strand starting at position 154 of SEQ ID NO: 1880126
gggaaaggguuggcauauu

SEQ ID NO: 1944063 - RNA, 19 nt, Artificial Sequence
  Description of Artificial Sequence: Synthetic oligonucleotide
  Antisense strand to SEQ ID NO: 1944062
aauaugccaacccuuuccc

SEQ ID NO: 1944064 - RNA, 19 nt, Artificial Sequence
  Description of Artificial Sequence: Synthetic oligonucleotide
  Sense strand starting at position 313 of SEQ ID NO: 1880126
ugaugccacuuugagaaga

SEQ ID NO: 1944065 - RNA, 19 nt, Artificial Sequence
  Description of Artificial Sequence: Synthetic oligonucleotide
  Antisense strand to SEQ ID NO: 1944064
ucuucucaaaguggcauca

SEQ ID NO: 1944066 - RNA, 19 nt, Artificial Sequence
  Description of Artificial Sequence: Synthetic oligonucleotide
  Sense strand starting at position 402 of SEQ ID NO: 1880126
uuuagauagcucuagguua

SEQ ID NO: 1944067 - RNA, 19 nt, Artificial Sequence
  Description of Artificial Sequence: Synthetic oligonucleotide
  Antisense strand to SEQ ID NO: 1944066
uaaccuagagcuaucuaaa

SEQ ID NO: 1944068 - RNA, 19 nt, Artificial Sequence
  Description of Artificial Sequence: Synthetic oligonucleotide
  Sense strand starting at position 432 of SEQ ID NO: 1880126
aggagacacuuggaagaua

SEQ ID NO: 1944069 - RNA, 19 nt, Artificial Sequence
  Description of Artificial Sequence: Synthetic oligonucleotide
  Antisense strand to SEQ ID NO: 1944068
uaucuuccaagugucuccu

SEQ ID NO: 1944070 - RNA, 19 nt, Artificial Sequence
  Description of Artificial Sequence: Synthetic oligonucleotide
  Sense strand starting at position 448 of SEQ ID NO: 1880126
auagaauucgaguggcugu

SEQ ID NO: 1944071 - RNA, 19 nt, Artificial Sequence
  Description of Artificial Sequence: Synthetic oligonucleotide
  Antisense strand to SEQ ID NO: 1944070
acagccacucgaauucuau

SEQ ID NO: 1944072 - RNA, 19 nt, Artificial Sequence
  Description of Artificial Sequence: Synthetic oligonucleotide
  Sense strand starting at position 449 of SEQ ID NO: 1880126
uagaauucgaguggcuguu

SEQ ID NO: 1944073 - RNA, 19 nt, Artificial Sequence
  Description of Artificial Sequence: Synthetic oligonucleotide
  Antisense strand to SEQ ID NO: 1944072
aacagccacucgaauucua

SEQ ID NO: 1944074 - RNA, 19 nt, Artificial Sequence
  Description of Artificial Sequence: Synthetic oligonucleotide
  Sense strand starting at position 484 of SEQ ID NO: 1880126
ugggaagggcguuguuaca

SEQ ID NO: 1944075 - RNA, 19 nt, Artificial Sequence
  Description of Artificial Sequence: Synthetic oligonucleotide
  Antisense strand to SEQ ID NO: 1944074
uguaacaacgcccuuccca

SEQ ID NO: 1944076 - RNA, 19 nt, Artificial Sequence
  Description of Artificial Sequence: Synthetic oligonucleotide
  Sense strand starting at position 584 of SEQ ID NO: 1880126
gcaggauuccagcaggguu

SEQ ID NO: 1944077 - RNA, 19 nt, Artificial Sequence
  Description of Artificial Sequence: Synthetic oligonucleotide
  Antisense strand to SEQ ID NO: 1944076
aacccugcuggaauccugc

SEQ ID NO: 1944078 - RNA, 19 nt, Artificial Sequence
  Description of Artificial Sequence: Synthetic oligonucleotide
  Sense strand starting at position 618 of SEQ ID NO: 1880126
ugguuuaaguucucauauu

SEQ ID NO: 1944079 - RNA, 19 nt, Artificial Sequence
  Description of Artificial Sequence: Synthetic oligonucleotide
  Antisense strand to SEQ ID NO: 1944078
aauaugagaacuuaaacca

SEQ ID NO: 1944080 - RNA, 19 nt, Artificial Sequence
  Description of Artificial Sequence: Synthetic oligonucleotide
  Sense strand starting at position 626 of SEQ ID NO: 1880126
guucucauauuauuaggaa

SEQ ID NO: 1944081 - RNA, 19 nt, Artificial Sequence
  Description of Artificial Sequence: Synthetic oligonucleotide
  Antisense strand to SEQ ID NO: 1944080
uuccuaauaauaugagaac

SEQ ID NO: 1944082 - RNA, 19 nt, Artificial Sequence
  Description of Artificial Sequence: Synthetic oligonucleotide
  Sense strand starting at position 755 of SEQ ID NO: 1880126
agagcaggguugucuaaau

SEQ ID NO: 1944083 - RNA, 19 nt, Artificial Sequence
  Description of Artificial Sequence: Synthetic oligonucleotide
  Antisense strand to SEQ ID NO: 1944082
auuuagacaacccugcucu

SEQ ID NO: 1944084 - RNA, 19 nt, Artificial Sequence
  Description of Artificial Sequence: Synthetic oligonucleotide
  Sense strand starting at position 810 of SEQ ID NO: 1880126
gacacuugucuugggccaa

SEQ ID NO: 1944085 - RNA, 19 nt, Artificial Sequence
  Description of Artificial Sequence: Synthetic oligonucleotide
  Antisense strand to SEQ ID NO: 1944084
uuggcccaagacaaguguc

SEQ ID NO: 1944086 - RNA, 19 nt, Artificial Sequence
  Description of Artificial Sequence: Synthetic oligonucleotide
  Sense strand starting at position 814 of SEQ ID NO: 1880126
cuugucuugggccaaacau

SEQ ID NO: 1944087 - RNA, 19 nt, Artificial Sequence
  Description of Artificial Sequence: Synthetic oligonucleotide
  Antisense strand to SEQ ID NO: 1944086
auguuuggcccaagacaag

SEQ ID NO: 1944088 - RNA, 19 nt, Artificial Sequence
  Description of Artificial Sequence: Synthetic oligonucleotide
  Sense strand starting at position 850 of SEQ ID NO: 1880126
auugaacuguaccuguaaa

SEQ ID NO: 1944089 - RNA, 19 nt, Artificial Sequence
  Description of Artificial Sequence: Synthetic oligonucleotide
  Antisense strand to SEQ ID NO: 1944088
uuuacagguacaguucaau

SEQ ID NO: 1944090 - RNA, 19 nt, Artificial Sequence
  Description of Artificial Sequence: Synthetic oligonucleotide
  Sense strand starting at position 860 of SEQ ID NO: 1880126
accuguaaagcuuguaaac

SEQ ID NO: 1944091 - RNA, 19 nt, Artificial Sequence
  Description of Artificial Sequence: Synthetic oligonucleotide
  Antisense strand to SEQ ID NO: 1944090
guuuacaagcuuuacaggu

SEQ ID NO: 1944092 - RNA, 19 nt, Artificial Sequence
  Description of Artificial Sequence: Synthetic oligonucleotide
  Sense strand starting at position 886 of SEQ ID NO: 1880126
gucuguaaagucuguaaac

SEQ ID NO: 1944093 - RNA, 19 nt, Artificial Sequence
  Description of Artificial Sequence: Synthetic oligonucleotide
  Antisense strand to SEQ ID NO: 1944092
guuuacagacuuuacagac

SEQ ID NO: 1944094 - RNA, 19 nt, Artificial Sequence
  Description of Artificial Sequence: Synthetic oligonucleotide
  Sense strand starting at position 1423 of SEQ ID NO: 1880126
ggcugaguauucucugguu

SEQ ID NO: 1944095 - RNA, 19 nt, Artificial Sequence
  Description of Artificial Sequence: Synthetic oligonucleotide
  Antisense strand to SEQ ID NO: 1944094
aaccagagaauacucagcc

SEQ ID NO: 1944096 - RNA, 19 nt, Artificial Sequence
  Description of Artificial Sequence: Synthetic oligonucleotide
  Sense strand starting at position 1425 of SEQ ID NO: 1880126
cugaguauucucugguuga

SEQ ID NO: 1944097 - RNA, 19 nt, Artificial Sequence
  Description of Artificial Sequence: Synthetic oligonucleotide
  Antisense strand to SEQ ID NO: 1944096
ucaaccagagaauacucag

SEQ ID NO: 1944098 - RNA, 19 nt, Artificial Sequence
  Description of Artificial Sequence: Synthetic oligonucleotide
  Sense strand starting at position 1428 of SEQ ID NO: 1880126
aguauucucugguugagga

SEQ ID NO: 1944099 - RNA, 19 nt, Artificial Sequence
  Description of Artificial Sequence: Synthetic oligonucleotide
  Antisense strand to SEQ ID NO: 1944098
uccucaaccagagaauacu

SEQ ID NO: 1944100 - RNA, 19 nt, Artificial Sequence
  Description of Artificial Sequence: Synthetic oligonucleotide
  Sense strand starting at position 1429 of SEQ ID NO: 1880126
guauucucugguugaggaa

SEQ ID NO: 1944101 - RNA, 19 nt, Artificial Sequence
  Description of Artificial Sequence: Synthetic oligonucleotide
  Antisense strand to SEQ ID NO: 1944100
uuccucaaccagagaauac

SEQ ID NO: 1944102 - RNA, 19 nt, Artificial Sequence
  Description of Artificial Sequence: Synthetic oligonucleotide
  Sense strand starting at position 1518 of SEQ ID NO: 1880126
guuugcuguuaaucccaua

SEQ ID NO: 1944103 - RNA, 19 nt, Artificial Sequence
  Description of Artificial Sequence: Synthetic oligonucleotide
  Antisense strand to SEQ ID NO: 1944102
uaugggauuaacagcaaac

SEQ ID NO: 1944104 - RNA, 19 nt, Artificial Sequence
  Description of Artificial Sequence: Synthetic oligonucleotide
  Sense strand starting at position 1634 of SEQ ID NO: 1880126
gaggucgagcgauauuaac

SEQ ID NO: 1944105 - RNA, 19 nt, Artificial Sequence
  Description of Artificial Sequence: Synthetic oligonucleotide
  Antisense strand to SEQ ID NO: 1944104
guuaauaucgcucgaccuc

SEQ ID NO: 1944106 - RNA, 19 nt, Artificial Sequence
  Description of Artificial Sequence: Synthetic oligonucleotide
  Sense strand starting at position 1666 of SEQ ID NO: 1880126
aucgacguaccucauagau

SEQ ID NO: 1944107 - RNA, 19 nt, Artificial Sequence
  Description of Artificial Sequence: Synthetic oligonucleotide
  Antisense strand to SEQ ID NO: 1944106
aucuaugagguacgucgau

SEQ ID NO: 1944108 - RNA, 19 nt, Artificial Sequence
  Description of Artificial Sequence: Synthetic oligonucleotide
  Sense strand starting at position 1678 of SEQ ID NO: 1880126
cauagauugcugggauuac

SEQ ID NO: 1944109 - RNA, 19 nt, Artificial Sequence
  Description of Artificial Sequence: Synthetic oligonucleotide
  Antisense strand to SEQ ID NO: 1944108
guaaucccagcaaucuaug

SEQ ID NO: 1944110 - RNA, 19 nt, Artificial Sequence
  Description of Artificial Sequence: Synthetic oligonucleotide
  Sense strand starting at position 1679 of SEQ ID NO: 1880126
auagauugcugggauuaca

SEQ ID NO: 1944111 - RNA, 19 nt, Artificial Sequence
  Description of Artificial Sequence: Synthetic oligonucleotide
  Antisense strand to SEQ ID NO: 1944110
uguaaucccagcaaucuau

SEQ ID NO: 1944112 - RNA, 19 nt, Artificial Sequence
  Description of Artificial Sequence: Synthetic oligonucleotide
  Sense strand starting at position 1791 of SEQ ID NO: 1880126
ugcguuucugcagcaaaca

SEQ ID NO: 1944113 - RNA, 19 nt, Artificial Sequence
  Description of Artificial Sequence: Synthetic oligonucleotide
  Antisense strand to SEQ ID NO: 1944112
uguuugcugcagaaacgca

SEQ ID NO: 1944114 - RNA, 19 nt, Artificial Sequence
  Description of Artificial Sequence: Synthetic oligonucleotide
  Sense strand starting at position 1792 of SEQ ID NO: 1880126
gcguuucugcagcaaacaa

SEQ ID NO: 1944115 - RNA, 19 nt, Artificial Sequence
  Description of Artificial Sequence: Synthetic oligonucleotide
  Antisense strand to SEQ ID NO: 1944114
uuguuugcugcagaaacgc

SEQ ID NO: 1944116 - RNA, 19 nt, Artificial Sequence
  Description of Artificial Sequence: Synthetic oligonucleotide
  Sense strand starting at position 1846 of SEQ ID NO: 1880126
gcgcgaaugcagucuacca

SEQ ID NO: 1944117 - RNA, 19 nt, Artificial Sequence
  Description of Artificial Sequence: Synthetic oligonucleotide
  Antisense strand to SEQ ID NO: 1944116
ugguagacugcauucgcgc

SEQ ID NO: 1944118 - RNA, 19 nt, Artificial Sequence
  Description of Artificial Sequence: Synthetic oligonucleotide
  Sense strand starting at position 1926 of SEQ ID NO: 1880126
cggagugcaauggauaaga

SEQ ID NO: 1944119 - RNA, 19 nt, Artificial Sequence
  Description of Artificial Sequence: Synthetic oligonucleotide
  Antisense strand to SEQ ID NO: 1944118
ucuuauccauugcacuccg

SEQ ID NO: 1944120 - RNA, 19 nt, Artificial Sequence
  Description of Artificial Sequence: Synthetic oligonucleotide
  Sense strand starting at position 1937 of SEQ ID NO: 1880126
ggauaagacucgcucugga

SEQ ID NO: 1944121 - RNA, 19 nt, Artificial Sequence
  Description of Artificial Sequence: Synthetic oligonucleotide
  Antisense strand to SEQ ID NO: 1944120
uccagagcgagucuuaucc

SEQ ID NO: 1944122 - RNA, 19 nt, Artificial Sequence
  Description of Artificial Sequence: Synthetic oligonucleotide
  Sense strand starting at position 1993 of SEQ ID NO: 1880126
guaaguaugaguuauugca

SEQ ID NO: 1944123 - RNA, 19 nt, Artificial Sequence
  Description of Artificial Sequence: Synthetic oligonucleotide
  Antisense strand to SEQ ID NO: 1944122
ugcaauaacucauacuuac

SEQ ID NO: 1944124 - RNA, 19 nt, Artificial Sequence
  Description of Artificial Sequence: Synthetic oligonucleotide
  Sense strand starting at position 2215 of SEQ ID NO: 1880126
cuggcucaucuacauagaa

SEQ ID NO: 1944125 - RNA, 19 nt, Artificial Sequence
  Description of Artificial Sequence: Synthetic oligonucleotide
  Antisense strand to SEQ ID NO: 1944124
uucuauguagaugagccag

SEQ ID NO: 1944126 - RNA, 19 nt, Artificial Sequence
  Description of Artificial Sequence: Synthetic oligonucleotide
  Sense strand starting at position 2524 of SEQ ID NO: 1880126
acauucuuauucuugugau

SEQ ID NO: 1944127 - RNA, 19 nt, Artificial Sequence
  Description of Artificial Sequence: Synthetic oligonucleotide
  Antisense strand to SEQ ID NO: 1944126
aucacaagaauaagaaugu

SEQ ID NO: 1944128 - RNA, 19 nt, Artificial Sequence
  Description of Artificial Sequence: Synthetic oligonucleotide
  Sense strand starting at position 2542 of SEQ ID NO: 1880126
uguagcauuccgcauauau

SEQ ID NO: 1944129 - RNA, 19 nt, Artificial Sequence
  Description of Artificial Sequence: Synthetic oligonucleotide
  Antisense strand to SEQ ID NO: 1944128
auauaugcggaaugcuaca

SEQ ID NO: 1944130 - RNA, 19 nt, Artificial Sequence
  Description of Artificial Sequence: Synthetic oligonucleotide
  Sense strand starting at position 2749 of SEQ ID NO: 1880126
aaccaugggucagacaagu

SEQ ID NO: 1944131 - RNA, 19 nt, Artificial Sequence
  Description of Artificial Sequence: Synthetic oligonucleotide
  Antisense strand to SEQ ID NO: 1944130
acuugucugacccaugguu

SEQ ID NO: 1944132 - RNA, 19 nt, Artificial Sequence
  Description of Artificial Sequence: Synthetic oligonucleotide
  Sense strand starting at position 3285 of SEQ ID NO: 1880126
cugccuugaccucacgaau

SEQ ID NO: 1944133 - RNA, 19 nt, Artificial Sequence
  Description of Artificial Sequence: Synthetic oligonucleotide
  Antisense strand to SEQ ID NO: 1944132
auucgugaggucaaggcag

SEQ ID NO: 1944134 - RNA, 19 nt, Artificial Sequence
  Description of Artificial Sequence: Synthetic oligonucleotide
  Sense strand starting at position 3712 of SEQ ID NO: 1880126
uccagugucacagguugau

SEQ ID NO: 1944135 - RNA, 19 nt, Artificial Sequence
  Description of Artificial Sequence: Synthetic oligonucleotide
  Antisense strand to SEQ ID NO: 1944134
aucaaccugugacacugga

SEQ ID NO: 1944136 - RNA, 19 nt, Artificial Sequence
  Description of Artificial Sequence: Synthetic oligonucleotide
  Sense strand starting at position 1667 of SEQ ID NO: 1880127
gcggccacuuaguguuaaa

SEQ ID NO: 1944137 - RNA, 19 nt, Artificial Sequence
  Description of Artificial Sequence: Synthetic oligonucleotide
  Antisense strand to SEQ ID NO: 1944136
uuuaacacuaaguggccgc

SEQ ID NO: 1944138 - RNA, 19 nt, Artificial Sequence
  Description of Artificial Sequence: Synthetic oligonucleotide
  Sense strand starting at position 1728 of SEQ ID NO: 1880127
ucccaucauugcgacugua

SEQ ID NO: 1944139 - RNA, 19 nt, Artificial Sequence
  Description of Artificial Sequence: Synthetic oligonucleotide
  Antisense strand to SEQ ID NO: 1944138
uacagucgcaaugauggga

SEQ ID NO: 1944140 - RNA, 19 nt, Artificial Sequence
  Description of Artificial Sequence: Synthetic oligonucleotide
  Sense strand starting at position 3082 of SEQ ID NO: 1880127
gggcaugaugcuggaguuu

SEQ ID NO: 1944141 - RNA, 19 nt, Artificial Sequence
  Description of Artificial Sequence: Synthetic oligonucleotide
  Antisense strand to SEQ ID NO: 1944140
aaacuccagcaucaugccc

SEQ ID NO: 1944142 - RNA, 19 nt, Artificial Sequence
  Description of Artificial Sequence: Synthetic oligonucleotide
  Sense strand starting at position 2 of SEQ ID NO: 1880128
ucugaugaagucuauccau

SEQ ID NO: 1944143 - RNA, 19 nt, Artificial Sequence
  Description of Artificial Sequence: Synthetic oligonucleotide
  Antisense strand to SEQ ID NO: 1944142
auggauagacuucaucaga

SEQ ID NO: 1944144 - RNA, 19 nt, Artificial Sequence
  Description of Artificial Sequence: Synthetic oligonucleotide
  Sense strand starting at position 50 of SEQ ID NO: 1880128
guguaaaucuucucuacag

SEQ ID NO: 1944145 - RNA, 19 nt, Artificial Sequence
  Description of Artificial Sequence: Synthetic oligonucleotide
  Antisense strand to SEQ ID NO: 1944144
cuguagagaagauuuacac

SEQ ID NO: 1944146 - RNA, 19 nt, Artificial Sequence
  Description of Artificial Sequence: Synthetic oligonucleotide
  Sense strand starting at position 52 of SEQ ID NO: 1880128
guaaaucuucucuacaggu

SEQ ID NO: 1944147 - RNA, 19 nt, Artificial Sequence
  Description of Artificial Sequence: Synthetic oligonucleotide
  Antisense strand to SEQ ID NO: 1944146
accuguagagaagauuuac

SEQ ID NO: 1944148 - RNA, 19 nt, Artificial Sequence
  Description of Artificial Sequence: Synthetic oligonucleotide
  Sense strand starting at position 161 of SEQ ID NO: 1880128
ugcuucuugcucuuguuua

SEQ ID NO: 1944149 - RNA, 19 nt, Artificial Sequence
  Description of Artificial Sequence: Synthetic oligonucleotide
  Antisense strand to SEQ ID NO: 1944148
uaaacaagagcaagaagca

SEQ ID NO: 1944150 - RNA, 19 nt, Artificial Sequence
  Description of Artificial Sequence: Synthetic oligonucleotide
  Sense strand starting at position 252 of SEQ ID NO: 1880128
uuggcaaaguaaucaucuu

SEQ ID NO: 1944151 - RNA, 19 nt, Artificial Sequence
  Description of Artificial Sequence: Synthetic oligonucleotide
  Antisense strand to SEQ ID NO: 1944150
aagaugauuacuuugccaa

SEQ ID NO: 1944152 - RNA, 19 nt, Artificial Sequence
  Description of Artificial Sequence: Synthetic oligonucleotide
  Sense strand starting at position 399 of SEQ ID NO: 1880128
cugaauauuuaguacuuga

SEQ ID NO: 1944153 - RNA, 19 nt, Artificial Sequence
  Description of Artificial Sequence: Synthetic oligonucleotide
  Antisense strand to SEQ ID NO: 1944152
ucaaguacuaaauauucag

SEQ ID NO: 1944154 - RNA, 19 nt, Artificial Sequence
  Description of Artificial Sequence: Synthetic oligonucleotide
  Sense strand starting at position 409 of SEQ ID NO: 1880128
aguacuugaucuuuaucuu

SEQ ID NO: 1944155 - RNA, 19 nt, Artificial Sequence
  Description of Artificial Sequence: Synthetic oligonucleotide
  Antisense strand to SEQ ID NO: 1944154
aagauaaagaucaaguacu

SEQ ID NO: 1944156 - RNA, 19 nt, Artificial Sequence
  Description of Artificial Sequence: Synthetic oligonucleotide
  Sense strand starting at position 410 of SEQ ID NO: 1880128
guacuugaucuuuaucuuc

SEQ ID NO: 1944157 - RNA, 19 nt, Artificial Sequence
  Description of Artificial Sequence: Synthetic oligonucleotide
  Antisense strand to SEQ ID NO: 1944156
gaagauaaagaucaaguac

SEQ ID NO: 1944158 - RNA, 19 nt, Artificial Sequence
  Description of Artificial Sequence: Synthetic oligonucleotide
  Sense strand starting at position 464 of SEQ ID NO: 1880128
uucggaagccuuuaauaua

SEQ ID NO: 1944159 - RNA, 19 nt, Artificial Sequence
  Description of Artificial Sequence: Synthetic oligonucleotide
  Antisense strand to SEQ ID NO: 1944158
uauauuaaaggcuuccgaa

SEQ ID NO: 1944160 - RNA, 19 nt, Artificial Sequence
  Description of Artificial Sequence: Synthetic oligonucleotide
  Sense strand starting at position 484 of SEQ ID NO: 1880128
acagaucuguuucuuuaca

SEQ ID NO: 1944161 - RNA, 19 nt, Artificial Sequence
  Description of Artificial Sequence: Synthetic oligonucleotide
  Antisense strand to SEQ ID NO: 1944160
uguaaagaaacagaucugu

SEQ ID NO: 1944162 - RNA, 19 nt, Artificial Sequence
  Description of Artificial Sequence: Synthetic oligonucleotide
  Sense strand starting at position 486 of SEQ ID NO: 1880128
agaucuguuucuuuacauc

SEQ ID NO: 1944163 - RNA, 19 nt, Artificial Sequence
  Description of Artificial Sequence: Synthetic oligonucleotide
  Antisense strand to SEQ ID NO: 1944162
gauguaaagaaacagaucu

SEQ ID NO: 1944164 - RNA, 19 nt, Artificial Sequence
  Description of Artificial Sequence: Synthetic oligonucleotide
  Sense strand starting at position 592 of SEQ ID NO: 1880128
ugccuuggauuugcucaau

SEQ ID NO: 1944165 - RNA, 19 nt, Artificial Sequence
  Description of Artificial Sequence: Synthetic oligonucleotide
  Antisense strand to SEQ ID NO: 1944164
auugagcaaauccaaggca

SEQ ID NO: 1944166 - RNA, 19 nt, Artificial Sequence
  Description of Artificial Sequence: Synthetic oligonucleotide
  Sense strand starting at position 885 of SEQ ID NO: 1880128
caaugacuccuggaguggu

SEQ ID NO: 1944167 - RNA, 19 nt, Artificial Sequence
  Description of Artificial Sequence: Synthetic oligonucleotide
  Antisense strand to SEQ ID NO: 1944166
accacuccaggagucauug

SEQ ID NO: 1944168 - RNA, 19 nt, Artificial Sequence
  Description of Artificial Sequence: Synthetic oligonucleotide
  Sense strand starting at position 921 of SEQ ID NO: 1880128
caauuaaguugaucgaagu

SEQ ID NO: 1944169 - RNA, 19 nt, Artificial Sequence
  Description of Artificial Sequence: Synthetic oligonucleotide
  Antisense strand to SEQ ID NO: 1944168
acuucgaucaacuuaauug

SEQ ID NO: 1944170 - RNA, 19 nt, Artificial Sequence
  Description of Artificial Sequence: Synthetic oligonucleotide
  Sense strand starting at position 938 of SEQ ID NO: 1880128
gugugaguugacuagguac

SEQ ID NO: 1944171 - RNA, 19 nt, Artificial Sequence
  Description of Artificial Sequence: Synthetic oligonucleotide
  Antisense strand to SEQ ID NO: 1944170
guaccuagucaacucacac

SEQ ID NO: 1944172 - RNA, 19 nt, Artificial Sequence
  Description of Artificial Sequence: Synthetic oligonucleotide
  Sense strand starting at position 940 of SEQ ID NO: 1880128
gugaguugacuagguacaa

SEQ ID NO: 1944173 - RNA, 19 nt, Artificial Sequence
  Description of Artificial Sequence: Synthetic oligonucleotide
  Antisense strand to SEQ ID NO: 1944172
uuguaccuagucaacucac

SEQ ID NO: 1944174 - RNA, 19 nt, Artificial Sequence
  Description of Artificial Sequence: Synthetic oligonucleotide
  Sense strand starting at position 941 of SEQ ID NO: 1880128
ugaguugacuagguacaau

SEQ ID NO: 1944175 - RNA, 19 nt, Artificial Sequence
  Description of Artificial Sequence: Synthetic oligonucleotide
  Antisense strand to SEQ ID NO: 1944174
auuguaccuagucaacuca

SEQ ID NO: 1944176 - RNA, 19 nt, Artificial Sequence
  Description of Artificial Sequence: Synthetic oligonucleotide
  Sense strand starting at position 1165 of SEQ ID NO: 1880128
ugagauuauccaugcuauc

SEQ ID NO: 1944177 - RNA, 19 nt, Artificial Sequence
  Description of Artificial Sequence: Synthetic oligonucleotide
  Antisense strand to SEQ ID NO: 1944176
gauagcauggauaaucuca

SEQ ID NO: 1944178 - RNA, 19 nt, Artificial Sequence
  Description of Artificial Sequence: Synthetic oligonucleotide
  Sense strand starting at position 1190 of SEQ ID NO: 1880128
uuuguaaugugucccauuu

SEQ ID NO: 1944179 - RNA, 19 nt, Artificial Sequence
  Description of Artificial Sequence: Synthetic oligonucleotide
  Antisense strand to SEQ ID NO: 1944178
aaaugggacacauuacaaa

SEQ ID NO: 1944180 - RNA, 19 nt, Artificial Sequence
  Description of Artificial Sequence: Synthetic oligonucleotide
  Sense strand starting at position 1233 of SEQ ID NO: 1880128
ggaguagaucgcagcgcau

SEQ ID NO: 1944181 - RNA, 19 nt, Artificial Sequence
  Description of Artificial Sequence: Synthetic oligonucleotide
  Antisense strand to SEQ ID NO: 1944180
augcgcugcgaucuacucc

SEQ ID NO: 1944182 - RNA, 19 nt, Artificial Sequence
  Description of Artificial Sequence: Synthetic oligonucleotide
  Sense strand starting at position 1353 of SEQ ID NO: 1880128
auguuaugucuacaaccga

SEQ ID NO: 1944183 - RNA, 19 nt, Artificial Sequence
  Description of Artificial Sequence: Synthetic oligonucleotide
  Antisense strand to SEQ ID NO: 1944182
ucgguuguagacauaacau

SEQ ID NO: 1944184 - RNA, 19 nt, Artificial Sequence
  Description of Artificial Sequence: Synthetic oligonucleotide
  Sense strand starting at position 1514 of SEQ ID NO: 1880128
agaagcagaggcuguuaaa

SEQ ID NO: 1944185 - RNA, 19 nt, Artificial Sequence
  Description of Artificial Sequence: Synthetic oligonucleotide
  Antisense strand to SEQ ID NO: 1944184
uuuaacagccucugcuucu

SEQ ID NO: 1944186 - RNA, 19 nt, Artificial Sequence
  Description of Artificial Sequence: Synthetic oligonucleotide
  Sense strand starting at position 1523 of SEQ ID NO: 1880128
ggcuguuaaagguaacucu

SEQ ID NO: 1944187 - RNA, 19 nt, Artificial Sequence
  Description of Artificial Sequence: Synthetic oligonucleotide
  Antisense strand to SEQ ID NO: 1944186
agaguuaccuuuaacagcc

SEQ ID NO: 1944188 - RNA, 19 nt, Artificial Sequence
  Description of Artificial Sequence: Synthetic oligonucleotide
  Sense strand starting at position 1526 of SEQ ID NO: 1880128
uguuaaagguaacucuaga

SEQ ID NO: 1944189 - RNA, 19 nt, Artificial Sequence
  Description of Artificial Sequence: Synthetic oligonucleotide
  Antisense strand to SEQ ID NO: 1944188
ucuagaguuaccuuuaaca

SEQ ID NO: 1944190 - RNA, 19 nt, Artificial Sequence
  Description of Artificial Sequence: Synthetic oligonucleotide
  Sense strand starting at position 1662 of SEQ ID NO: 1880128
gcgcuaguuagcuuauguu

SEQ ID NO: 1944191 - RNA, 19 nt, Artificial Sequence
  Description of Artificial Sequence: Synthetic oligonucleotide
  Antisense strand to SEQ ID NO: 1944190
aacauaagcuaacuagcgc

SEQ ID NO: 1944192 - RNA, 19 nt, Artificial Sequence
  Description of Artificial Sequence: Synthetic oligonucleotide
  Sense strand starting at position 1693 of SEQ ID NO: 1880128
cucggcugaccuuauaauu

SEQ ID NO: 1944193 - RNA, 19 nt, Artificial Sequence
  Description of Artificial Sequence: Synthetic oligonucleotide
  Antisense strand to SEQ ID NO: 1944192
aauuauaaggucagccgag

SEQ ID NO: 1944194 - RNA, 19 nt, Artificial Sequence
  Description of Artificial Sequence: Synthetic oligonucleotide
  Sense strand starting at position 1788 of SEQ ID NO: 1880128
gaugccguccaggauauaa

SEQ ID NO: 1944195 - RNA, 19 nt, Artificial Sequence
  Description of Artificial Sequence: Synthetic oligonucleotide
  Antisense strand to SEQ ID NO: 1944194
uuauauccuggacggcauc

SEQ ID NO: 1944196 - RNA, 19 nt, Artificial Sequence
  Description of Artificial Sequence: Synthetic oligonucleotide
  Sense strand starting at position 2910 of SEQ ID NO: 1880128
uagagagguugcucagaug

SEQ ID NO: 1944197 - RNA, 19 nt, Artificial Sequence
  Description of Artificial Sequence: Synthetic oligonucleotide
  Antisense strand to SEQ ID NO: 1944196
caucugagcaaccucucua

SEQ ID NO: 1944198 - RNA, 19 nt, Artificial Sequence
  Description of Artificial Sequence: Synthetic oligonucleotide
  Sense strand starting at position 2972 of SEQ ID NO: 1880128
uauaaagaugguuguccaa

SEQ ID NO: 1944199 - RNA, 19 nt, Artificial Sequence
  Description of Artificial Sequence: Synthetic oligonucleotide
  Antisense strand to SEQ ID NO: 1944198
uuggacaaccaucuuuaua

SEQ ID NO: 1944200 - RNA, 19 nt, Artificial Sequence
  Description of Artificial Sequence: Synthetic oligonucleotide
  Sense strand starting at position 2974 of SEQ ID NO: 1880128
uaaagaugguuguccaauu

SEQ ID NO: 1944201 - RNA, 19 nt, Artificial Sequence
  Description of Artificial Sequence: Synthetic oligonucleotide
  Antisense strand to SEQ ID NO: 1944200
aauuggacaaccaucuuua

SEQ ID NO: 1944202 - RNA, 19 nt, Artificial Sequence
  Description of Artificial Sequence: Synthetic oligonucleotide
  Sense strand starting at position 3208 of SEQ ID NO: 1880128
auuggaggugcuuaacuga

SEQ ID NO: 1944203 - RNA, 19 nt, Artificial Sequence
  Description of Artificial Sequence: Synthetic oligonucleotide
  Antisense strand to SEQ ID NO: 1944202
ucaguuaagcaccuccaau

SEQ ID NO: 1944204 - RNA, 19 nt, Artificial Sequence
  Description of Artificial Sequence: Synthetic oligonucleotide
  Sense strand starting at position 3211 of SEQ ID NO: 1880128
ggaggugcuuaacugauua

SEQ ID NO: 1944205 - RNA, 19 nt, Artificial Sequence
  Description of Artificial Sequence: Synthetic oligonucleotide
  Antisense strand to SEQ ID NO: 1944204
uaaucaguuaagcaccucc

SEQ ID NO: 1944206 - RNA, 19 nt, Artificial Sequence
  Description of Artificial Sequence: Synthetic oligonucleotide
  Sense strand starting at position 3649 of SEQ ID NO: 1880128
accagaugagcuggaguaa

SEQ ID NO: 1944207 - RNA, 19 nt, Artificial Sequence
  Description of Artificial Sequence: Synthetic oligonucleotide
  Antisense strand to SEQ ID NO: 1944206
uuacuccagcucaucuggu

SEQ ID NO: 1944208 - RNA, 19 nt, Artificial Sequence
  Description of Artificial Sequence: Synthetic oligonucleotide
  Sense strand starting at position 3692 of SEQ ID NO: 1880128
uuugcauuacccugauuga

SEQ ID NO: 1944209 - RNA, 19 nt, Artificial Sequence
  Description of Artificial Sequence: Synthetic oligonucleotide
  Antisense strand to SEQ ID NO: 1944208
ucaaucaggguaaugcaaa

SEQ ID NO: 1944210 - RNA, 19 nt, Artificial Sequence
  Description of Artificial Sequence: Synthetic oligonucleotide
  Sense strand starting at position 3693 of SEQ ID NO: 1880128
uugcauuacccugauugau

SEQ ID NO: 1944211 - RNA, 19 nt, Artificial Sequence
  Description of Artificial Sequence: Synthetic oligonucleotide
  Antisense strand to SEQ ID NO: 1944210
aucaaucaggguaaugcaa

SEQ ID NO: 1944212 - RNA, 19 nt, Artificial Sequence
  Description of Artificial Sequence: Synthetic oligonucleotide
  Sense strand starting at position 3695 of SEQ ID NO: 1880128
gcauuacccugauugauag

SEQ ID NO: 1944213 - RNA, 19 nt, Artificial Sequence
  Description of Artificial Sequence: Synthetic oligonucleotide
  Antisense strand to SEQ ID NO: 1944212
cuaucaaucaggguaaugc

SEQ ID NO: 1944214 - RNA, 19 nt, Artificial Sequence
  Description of Artificial Sequence: Synthetic oligonucleotide
  Sense strand starting at position 3702 of SEQ ID NO: 1880128
ccugauugauaguuaguga

SEQ ID NO: 1944215 - RNA, 19 nt, Artificial Sequence
  Description of Artificial Sequence: Synthetic oligonucleotide
  Antisense strand to SEQ ID NO: 1944214
ucacuaacuaucaaucagg

SEQ ID NO: 1944216 - RNA, 19 nt, Artificial Sequence
  Description of Artificial Sequence: Synthetic oligonucleotide
  Sense strand starting at position 3703 of SEQ ID NO: 1880128
cugauugauaguuagugau

SEQ ID NO: 1944217 - RNA, 19 nt, Artificial Sequence
  Description of Artificial Sequence: Synthetic oligonucleotide
  Antisense strand to SEQ ID NO: 1944216
aucacuaacuaucaaucag

SEQ ID NO: 1944218 - RNA, 19 nt, Artificial Sequence
  Description of Artificial Sequence: Synthetic oligonucleotide
  Sense strand starting at position 3705 of SEQ ID NO: 1880128
gauugauaguuagugaugu

SEQ ID NO: 1944219 - RNA, 19 nt, Artificial Sequence
  Description of Artificial Sequence: Synthetic oligonucleotide
  Antisense strand to SEQ ID NO: 1944218
acaucacuaacuaucaauc

SEQ ID NO: 1944220 - RNA, 19 nt, Artificial Sequence
  Description of Artificial Sequence: Synthetic oligonucleotide
  Sense strand starting at position 3824 of SEQ ID NO: 1880128
guucuucuugcagauuugu

SEQ ID NO: 1944221 - RNA, 19 nt, Artificial Sequence
  Description of Artificial Sequence: Synthetic oligonucleotide
  Antisense strand to SEQ ID NO: 1944220
acaaaucugcaagaagaac

SEQ ID NO: 1944222 - RNA, 19 nt, Artificial Sequence
  Description of Artificial Sequence: Synthetic oligonucleotide
  Sense strand starting at position 85 of SEQ ID NO: 1880130
aucaaaugugaugauguuu

SEQ ID NO: 1944223 - RNA, 19 nt, Artificial Sequence
  Description of Artificial Sequence: Synthetic oligonucleotide
  Antisense strand to SEQ ID NO: 1944222
aaacaucaucacauuugau

SEQ ID NO: 1944224 - RNA, 19 nt, Artificial Sequence
  Description of Artificial Sequence: Synthetic oligonucleotide
  Sense strand starting at position 90 of SEQ ID NO: 1880130
augugaugauguuuaagac

SEQ ID NO: 1944225 - RNA, 19 nt, Artificial Sequence
  Description of Artificial Sequence: Synthetic oligonucleotide
  Antisense strand to SEQ ID NO: 1944224
gucuuaaacaucaucacau

SEQ ID NO: 1944226 - RNA, 19 nt, Artificial Sequence
  Description of Artificial Sequence: Synthetic oligonucleotide
  Sense strand starting at position 91 of SEQ ID NO: 1880130
ugugaugauguuuaagacu

SEQ ID NO: 1944227 - RNA, 19 nt, Artificial Sequence
  Description of Artificial Sequence: Synthetic oligonucleotide
  Antisense strand to SEQ ID NO: 1944226
agucuuaaacaucaucaca

SEQ ID NO: 1944228 - RNA, 19 nt, Artificial Sequence
  Description of Artificial Sequence: Synthetic oligonucleotide
  Sense strand starting at position 305 of SEQ ID NO: 1880130
ugaagaggcugaucugauc

SEQ ID NO: 1944229 - RNA, 19 nt, Artificial Sequence
  Description of Artificial Sequence: Synthetic oligonucleotide
  Antisense strand to SEQ ID NO: 1944228
gaucagaucagccucuuca

SEQ ID NO: 1944230 - RNA, 19 nt, Artificial Sequence
  Description of Artificial Sequence: Synthetic oligonucleotide
  Sense strand starting at position 503 of SEQ ID NO: 1880130
uauugugauguuuaucaga

SEQ ID NO: 1944231 - RNA, 19 nt, Artificial Sequence
  Description of Artificial Sequence: Synthetic oligonucleotide
  Antisense strand to SEQ ID NO: 1944230
ucugauaaacaucacaaua

SEQ ID NO: 1944232 - RNA, 19 nt, Artificial Sequence
  Description of Artificial Sequence: Synthetic oligonucleotide
  Sense strand starting at position 584 of SEQ ID NO: 1880130
aguuaacuuguccaaguca

SEQ ID NO: 1944233 - RNA, 19 nt, Artificial Sequence
  Description of Artificial Sequence: Synthetic oligonucleotide
  Antisense strand to SEQ ID NO: 1944232
ugacuuggacaaguuaacu

SEQ ID NO: 1944234 - RNA, 19 nt, Artificial Sequence
  Description of Artificial Sequence: Synthetic oligonucleotide
  Sense strand starting at position 665 of SEQ ID NO: 1880130
ccacgaaucagaugauugu

SEQ ID NO: 1944235 - RNA, 19 nt, Artificial Sequence
  Description of Artificial Sequence: Synthetic oligonucleotide
  Antisense strand to SEQ ID NO: 1944234
acaaucaucugauucgugg

SEQ ID NO: 1944236 - RNA, 19 nt, Artificial Sequence
  Description of Artificial Sequence: Synthetic oligonucleotide
  Sense strand starting at position 668 of SEQ ID NO: 1880130
cgaaucagaugauuguagu

SEQ ID NO: 1944237 - RNA, 19 nt, Artificial Sequence
  Description of Artificial Sequence: Synthetic oligonucleotide
  Antisense strand to SEQ ID NO: 1944236
acuacaaucaucugauucg

SEQ ID NO: 1944238 - RNA, 19 nt, Artificial Sequence
  Description of Artificial Sequence: Synthetic oligonucleotide
  Sense strand starting at position 669 of SEQ ID NO: 1880130
gaaucagaugauuguagua

SEQ ID NO: 1944239 - RNA, 19 nt, Artificial Sequence
  Description of Artificial Sequence: Synthetic oligonucleotide
  Antisense strand to SEQ ID NO: 1944238
uacuacaaucaucugauuc

SEQ ID NO: 1944240 - RNA, 19 nt, Artificial Sequence
  Description of Artificial Sequence: Synthetic oligonucleotide
  Sense strand starting at position 701 of SEQ ID NO: 1880130
uugggagaucuguaugcug

SEQ ID NO: 1944241 - RNA, 19 nt, Artificial Sequence
  Description of Artificial Sequence: Synthetic oligonucleotide
  Antisense strand to SEQ ID NO: 1944240
cagcauacagaucucccaa

SEQ ID NO: 1944242 - RNA, 19 nt, Artificial Sequence
  Description of Artificial Sequence: Synthetic oligonucleotide
  Sense strand starting at position 703 of SEQ ID NO: 1880130
gggagaucuguaugcugac

SEQ ID NO: 1944243 - RNA, 19 nt, Artificial Sequence
  Description of Artificial Sequence: Synthetic oligonucleotide
  Antisense strand to SEQ ID NO: 1944242
gucagcauacagaucuccc

SEQ ID NO: 1944244 - RNA, 19 nt, Artificial Sequence
  Description of Artificial Sequence: Synthetic oligonucleotide
  Sense strand starting at position 721 of SEQ ID NO: 1880130
cucauagagcccuaacagu

SEQ ID NO: 1944245 - RNA, 19 nt, Artificial Sequence
  Description of Artificial Sequence: Synthetic oligonucleotide
  Antisense strand to SEQ ID NO: 1944244
acuguuagggcucuaugag

SEQ ID NO: 1944246 - RNA, 19 nt, Artificial Sequence
  Description of Artificial Sequence: Synthetic oligonucleotide
  Sense strand starting at position 776 of SEQ ID NO: 1880130
accagugaacuuuguagaa

SEQ ID NO: 1944247 - RNA, 19 nt, Artificial Sequence
  Description of Artificial Sequence: Synthetic oligonucleotide
  Antisense strand to SEQ ID NO: 1944246
uucuacaaaguucacuggu

SEQ ID NO: 1944248 - RNA, 19 nt, Artificial Sequence
  Description of Artificial Sequence: Synthetic oligonucleotide
  Sense strand starting at position 1007 of SEQ ID NO: 1880130
cuggcaguucuauaaggau

SEQ ID NO: 1944249 - RNA, 19 nt, Artificial Sequence
  Description of Artificial Sequence: Synthetic oligonucleotide
  Antisense strand to SEQ ID NO: 1944248
auccuuauagaacugccag

SEQ ID NO: 1944250 - RNA, 19 nt, Artificial Sequence
  Description of Artificial Sequence: Synthetic oligonucleotide
  Sense strand starting at position 1013 of SEQ ID NO: 1880130
guucuauaaggaugacuga

SEQ ID NO: 1944251 - RNA, 19 nt, Artificial Sequence
  Description of Artificial Sequence: Synthetic oligonucleotide
  Antisense strand to SEQ ID NO: 1944250
ucagucauccuuauagaac

SEQ ID NO: 1944252 - RNA, 19 nt, Artificial Sequence
  Description of Artificial Sequence: Synthetic oligonucleotide
  Sense strand starting at position 1175 of SEQ ID NO: 1880130
acauaauaagcaugugaua

SEQ ID NO: 1944253 - RNA, 19 nt, Artificial Sequence
  Description of Artificial Sequence: Synthetic oligonucleotide
  Antisense strand to SEQ ID NO: 1944252
uaucacaugcuuauuaugu

SEQ ID NO: 1944254 - RNA, 19 nt, Artificial Sequence
  Description of Artificial Sequence: Synthetic oligonucleotide
  Sense strand starting at position 1672 of SEQ ID NO: 1880130
guuaguguggucguuaaug

SEQ ID NO: 1944255 - RNA, 19 nt, Artificial Sequence
  Description of Artificial Sequence: Synthetic oligonucleotide
  Antisense strand to SEQ ID NO: 1944254
cauuaacgaccacacuaac

SEQ ID NO: 1944256 - RNA, 19 nt, Artificial Sequence
  Description of Artificial Sequence: Synthetic oligonucleotide
  Sense strand starting at position 1682 of SEQ ID NO: 1880130
ucguuaaugguccagaauc

SEQ ID NO: 1944257 - RNA, 19 nt, Artificial Sequence
  Description of Artificial Sequence: Synthetic oligonucleotide
  Antisense strand to SEQ ID NO: 1944256
gauucuggaccauuaacga

SEQ ID NO: 1944258 - RNA, 19 nt, Artificial Sequence
  Description of Artificial Sequence: Synthetic oligonucleotide
  Sense strand starting at position 1684 of SEQ ID NO: 1880130
guuaaugguccagaaucuc

SEQ ID NO: 1944259 - RNA, 19 nt, Artificial Sequence
  Description of Artificial Sequence: Synthetic oligonucleotide
  Antisense strand to SEQ ID NO: 1944258
gagauucuggaccauuaac

SEQ ID NO: 1944260 - RNA, 19 nt, Artificial Sequence
  Description of Artificial Sequence: Synthetic oligonucleotide
  Sense strand starting at position 1857 of SEQ ID NO: 1880130
gugucugauuugguagcuu

SEQ ID NO: 1944261 - RNA, 19 nt, Artificial Sequence
  Description of Artificial Sequence: Synthetic oligonucleotide
  Antisense strand to SEQ ID NO: 1944260
aagcuaccaaaucagacac

SEQ ID NO: 1944262 - RNA, 19 nt, Artificial Sequence
  Description of Artificial Sequence: Synthetic oligonucleotide
  Sense strand starting at position 2169 of SEQ ID NO: 1880130
uggugauauauguggauua

SEQ ID NO: 1944263 - RNA, 19 nt, Artificial Sequence
  Description of Artificial Sequence: Synthetic oligonucleotide
  Antisense strand to SEQ ID NO: 1944262
uaauccacauauaucacca

SEQ ID NO: 1944264 - RNA, 19 nt, Artificial Sequence
  Description of Artificial Sequence: Synthetic oligonucleotide
  Sense strand starting at position 2284 of SEQ ID NO: 1880130
cuucuauaugugggaccau

SEQ ID NO: 1944265 - RNA, 19 nt, Artificial Sequence
  Description of Artificial Sequence: Synthetic oligonucleotide
  Antisense strand to SEQ ID NO: 1944264
auggucccacauauagaag

SEQ ID NO: 1944266 - RNA, 19 nt, Artificial Sequence
  Description of Artificial Sequence: Synthetic oligonucleotide
  Sense strand starting at position 2297 of SEQ ID NO: 1880130
gaccaugaccggugaacuu

SEQ ID NO: 1944267 - RNA, 19 nt, Artificial Sequence
  Description of Artificial Sequence: Synthetic oligonucleotide
  Antisense strand to SEQ ID NO: 1944266
aaguucaccggucaugguc

SEQ ID NO: 1944268 - RNA, 19 nt, Artificial Sequence
  Description of Artificial Sequence: Synthetic oligonucleotide
  Sense strand starting at position 2460 of SEQ ID NO: 1880130
caguuaggucauugaaauc

SEQ ID NO: 1944269 - RNA, 19 nt, Artificial Sequence
  Description of Artificial Sequence: Synthetic oligonucleotide
  Antisense strand to SEQ ID NO: 1944268
gauuucaaugaccuaacug

SEQ ID NO: 1944270 - RNA, 19 nt, Artificial Sequence
  Description of Artificial Sequence: Synthetic oligonucleotide
  Sense strand starting at position 2498 of SEQ ID NO: 1880130
gcuuaauaugucgcuucuu

SEQ ID NO: 1944271 - RNA, 19 nt, Artificial Sequence
  Description of Artificial Sequence: Synthetic oligonucleotide
  Antisense strand to SEQ ID NO: 1944270
aagaagcgacauauuaagc

SEQ ID NO: 1944272 - RNA, 19 nt, Artificial Sequence
  Description of Artificial Sequence: Synthetic oligonucleotide
  Sense strand starting at position 2534 of SEQ ID NO: 1880130
uugauacuaucaguaugaa

SEQ ID NO: 1944273 - RNA, 19 nt, Artificial Sequence
  Description of Artificial Sequence: Synthetic oligonucleotide
  Antisense strand to SEQ ID NO: 1944272
uucauacugauaguaucaa

SEQ ID NO: 1944274 - RNA, 19 nt, Artificial Sequence
  Description of Artificial Sequence: Synthetic oligonucleotide
  Sense strand starting at position 2603 of SEQ ID NO: 1880130
uuucuaaaggagugacuga

SEQ ID NO: 1944275 - RNA, 19 nt, Artificial Sequence
  Description of Artificial Sequence: Synthetic oligonucleotide
  Antisense strand to SEQ ID NO: 1944274
ucagucacuccuuuagaaa

SEQ ID NO: 1944276 - RNA, 19 nt, Artificial Sequence
  Description of Artificial Sequence: Synthetic oligonucleotide
  Sense strand starting at position 2629 of SEQ ID NO: 1880130
gagacucaguaguugacua

SEQ ID NO: 1944277 - RNA, 19 nt, Artificial Sequence
  Description of Artificial Sequence: Synthetic oligonucleotide
  Antisense strand to SEQ ID NO: 1944276
uagucaacuacugagucuc

SEQ ID NO: 1944278 - RNA, 19 nt, Artificial Sequence
  Description of Artificial Sequence: Synthetic oligonucleotide
  Sense strand starting at position 2634 of SEQ ID NO: 1880130
ucaguaguugacuaugcaa

SEQ ID NO: 1944279 - RNA, 19 nt, Artificial Sequence
  Description of Artificial Sequence: Synthetic oligonucleotide
  Antisense strand to SEQ ID NO: 1944278
uugcauagucaacuacuga

SEQ ID NO: 1944280 - RNA, 19 nt, Artificial Sequence
  Description of Artificial Sequence: Synthetic oligonucleotide
  Sense strand starting at position 2757 of SEQ ID NO: 1880130
gggagacaugcuuaagcau

SEQ ID NO: 1944281 - RNA, 19 nt, Artificial Sequence
  Description of Artificial Sequence: Synthetic oligonucleotide
  Antisense strand to SEQ ID NO: 1944280
augcuuaagcaugucuccc

SEQ ID NO: 1944282 - RNA, 19 nt, Artificial Sequence
  Description of Artificial Sequence: Synthetic oligonucleotide
  Sense strand starting at position 2831 of SEQ ID NO: 1880130
ugagaaguuguuuagguug

SEQ ID NO: 1944283 - RNA, 19 nt, Artificial Sequence
  Description of Artificial Sequence: Synthetic oligonucleotide
  Antisense strand to SEQ ID NO: 1944282
caaccuaaacaacuucuca

SEQ ID NO: 1944284 - RNA, 19 nt, Artificial Sequence
  Description of Artificial Sequence: Synthetic oligonucleotide
  Sense strand starting at position 2842 of SEQ ID NO: 1880130
uuagguuggcauuaacaaa

SEQ ID NO: 1944285 - RNA, 19 nt, Artificial Sequence
  Description of Artificial Sequence: Synthetic oligonucleotide
  Antisense strand to SEQ ID NO: 1944284
uuuguuaaugccaaccuaa

SEQ ID NO: 1944286 - RNA, 19 nt, Artificial Sequence
  Description of Artificial Sequence: Synthetic oligonucleotide
  Sense strand starting at position 2924 of SEQ ID NO: 1880130
cugagaaguggugaacgau

SEQ ID NO: 1944287 - RNA, 19 nt, Artificial Sequence
  Description of Artificial Sequence: Synthetic oligonucleotide
  Antisense strand to SEQ ID NO: 1944286
aucguucaccacuucucag

SEQ ID NO: 1944288 - RNA, 19 nt, Artificial Sequence
  Description of Artificial Sequence: Synthetic oligonucleotide
  Sense strand starting at position 2943 of SEQ ID NO: 1880130
gagggaaucauagggccau

SEQ ID NO: 1944289 - RNA, 19 nt, Artificial Sequence
  Description of Artificial Sequence: Synthetic oligonucleotide
  Antisense strand to SEQ ID NO: 1944288
auggcccuaugauucccuc

SEQ ID NO: 1944290 - RNA, 19 nt, Artificial Sequence
  Description of Artificial Sequence: Synthetic oligonucleotide
  Sense strand starting at position 3080 of SEQ ID NO: 1880130
cuggaauagucaguuaaca

SEQ ID NO: 1944291 - RNA, 19 nt, Artificial Sequence
  Description of Artificial Sequence: Synthetic oligonucleotide
  Antisense strand to SEQ ID NO: 1944290
uguuaacugacuauuccag

SEQ ID NO: 1944292 - RNA, 19 nt, Artificial Sequence
  Description of Artificial Sequence: Synthetic oligonucleotide
  Sense strand starting at position 3088 of SEQ ID NO: 1880130
gucaguuaacaagacuugu

SEQ ID NO: 1944293 - RNA, 19 nt, Artificial Sequence
  Description of Artificial Sequence: Synthetic oligonucleotide
  Antisense strand to SEQ ID NO: 1944292
acaagucuuguuaacugac

SEQ ID NO: 1944294 - RNA, 19 nt, Artificial Sequence
  Description of Artificial Sequence: Synthetic oligonucleotide
  Sense strand starting at position 3134 of SEQ ID NO: 1880130
uuugguuaaguagagguaa

SEQ ID NO: 1944295 - RNA, 19 nt, Artificial Sequence
  Description of Artificial Sequence: Synthetic oligonucleotide
  Antisense strand to SEQ ID NO: 1944294
uuaccucuacuuaaccaaa

SEQ ID NO: 1944296 - RNA, 19 nt, Artificial Sequence
  Description of Artificial Sequence: Synthetic oligonucleotide
  Sense strand starting at position 3723 of SEQ ID NO: 1880130
uuauauaugccucaguuua

SEQ ID NO: 1944297 - RNA, 19 nt, Artificial Sequence
  Description of Artificial Sequence: Synthetic oligonucleotide
  Antisense strand to SEQ ID NO: 1944296
uaaacugaggcauauauaa

SEQ ID NO: 1944298 - RNA, 19 nt, Artificial Sequence
  Description of Artificial Sequence: Synthetic oligonucleotide
  Sense strand starting at position 3745 of SEQ ID NO: 1880130
aucuguauaagaggguaaa

SEQ ID NO: 1944299 - RNA, 19 nt, Artificial Sequence
  Description of Artificial Sequence: Synthetic oligonucleotide
  Antisense strand to SEQ ID NO: 1944298
uuuacccucuuauacagau

SEQ ID NO: 1944300 - RNA, 19 nt, Artificial Sequence
  Description of Artificial Sequence: Synthetic oligonucleotide
  Sense strand starting at position 3746 of SEQ ID NO: 1880130
ucuguauaagaggguaaau

SEQ ID NO: 1944301 - RNA, 19 nt, Artificial Sequence
  Description of Artificial Sequence: Synthetic oligonucleotide
  Antisense strand to SEQ ID NO: 1944300
auuuacccucuuauacaga

SEQ ID NO: 1944302 - RNA, 19 nt, Artificial Sequence
  Description of Artificial Sequence: Synthetic oligonucleotide
  Sense strand starting at position 138 of SEQ ID NO: 1880129
uccauuugaugaugaggaa

SEQ ID NO: 1944303 - RNA, 19 nt, Artificial Sequence
  Description of Artificial Sequence: Synthetic oligonucleotide
  Antisense strand to SEQ ID NO: 1944302
uuccucaucaucaaaugga

SEQ ID NO: 1944304 - RNA, 19 nt, Artificial Sequence
  Description of Artificial Sequence: Synthetic oligonucleotide
  Sense strand starting at position 141 of SEQ ID NO: 1880129
auuugaugaugaggaaucu

SEQ ID NO: 1944305 - RNA, 19 nt, Artificial Sequence
  Description of Artificial Sequence: Synthetic oligonucleotide
  Antisense strand to SEQ ID NO: 1944304
agauuccucaucaucaaau

SEQ ID NO: 1944306 - RNA, 19 nt, Artificial Sequence
  Description of Artificial Sequence: Synthetic oligonucleotide
  Sense strand starting at position 273 of SEQ ID NO: 1880129
aguaucacagcugagauua

SEQ ID NO: 1944307 - RNA, 19 nt, Artificial Sequence
  Description of Artificial Sequence: Synthetic oligonucleotide
  Antisense strand to SEQ ID NO: 1944306
uaaucucagcugugauacu

SEQ ID NO: 1944308 - RNA, 19 nt, Artificial Sequence
  Description of Artificial Sequence: Synthetic oligonucleotide
  Sense strand starting at position 393 of SEQ ID NO: 1880129
guuaguacucaauauauca

SEQ ID NO: 1944309 - RNA, 19 nt, Artificial Sequence
  Description of Artificial Sequence: Synthetic oligonucleotide
  Antisense strand to SEQ ID NO: 1944308
ugauauauugaguacuaac

SEQ ID NO: 1944310 - RNA, 19 nt, Artificial Sequence
  Description of Artificial Sequence: Synthetic oligonucleotide
  Sense strand starting at position 409 of SEQ ID NO: 1880129
ucacaagggucucuuaaau

SEQ ID NO: 1944311 - RNA, 19 nt, Artificial Sequence
  Description of Artificial Sequence: Synthetic oligonucleotide
  Antisense strand to SEQ ID NO: 1944310
auuuaagagacccuuguga

SEQ ID NO: 1944312 - RNA, 19 nt, Artificial Sequence
  Description of Artificial Sequence: Synthetic oligonucleotide
  Sense strand starting at position 543 of SEQ ID NO: 1880129
aagcucauguaucuuggaa

SEQ ID NO: 1944313 - RNA, 19 nt, Artificial Sequence
  Description of Artificial Sequence: Synthetic oligonucleotide
  Antisense strand to SEQ ID NO: 1944312
uuccaagauacaugagcuu

SEQ ID NO: 1944314 - RNA, 19 nt, Artificial Sequence
  Description of Artificial Sequence: Synthetic oligonucleotide
  Sense strand starting at position 693 of SEQ ID NO: 1880129
ccagguaauuucugaauuu

SEQ ID NO: 1944315 - RNA, 19 nt, Artificial Sequence
  Description of Artificial Sequence: Synthetic oligonucleotide
  Antisense strand to SEQ ID NO: 1944314
aaauucagaaauuaccugg

SEQ ID NO: 1944316 - RNA, 19 nt, Artificial Sequence
  Description of Artificial Sequence: Synthetic oligonucleotide
  Sense strand starting at position 820 of SEQ ID NO: 1880129
ucagaaacuugguccaaau

SEQ ID NO: 1944317 - RNA, 19 nt, Artificial Sequence
  Description of Artificial Sequence: Synthetic oligonucleotide
  Antisense strand to SEQ ID NO: 1944316
auuuggaccaaguuucuga

SEQ ID NO: 1944318 - RNA, 19 nt, Artificial Sequence
  Description of Artificial Sequence: Synthetic oligonucleotide
  Sense strand starting at position 977 of SEQ ID NO: 1880129
aagaaagugcaucagcuua

SEQ ID NO: 1944319 - RNA, 19 nt, Artificial Sequence
  Description of Artificial Sequence: Synthetic oligonucleotide
  Antisense strand to SEQ ID NO: 1944318
uaagcugaugcacuuucuu

SEQ ID NO: 1944320 - RNA, 19 nt, Artificial Sequence
  Description of Artificial Sequence: Synthetic oligonucleotide
  Sense strand starting at position 1079 of SEQ ID NO: 1880129
uuguuaucugcugagaucu

SEQ ID NO: 1944321 - RNA, 19 nt, Artificial Sequence
  Description of Artificial Sequence: Synthetic oligonucleotide
  Antisense strand to SEQ ID NO: 1944320
agaucucagcagauaacaa

SEQ ID NO: 1944322 - RNA, 19 nt, Artificial Sequence
  Description of Artificial Sequence: Synthetic oligonucleotide
  Sense strand starting at position 1114 of SEQ ID NO: 1880129
acaggaaaucugugucuca

SEQ ID NO: 1944323 - RNA, 19 nt, Artificial Sequence
  Description of Artificial Sequence: Synthetic oligonucleotide
  Antisense strand to SEQ ID NO: 1944322
ugagacacagauuuccugu

SEQ ID NO: 1944324 - RNA, 19 nt, Artificial Sequence
  Description of Artificial Sequence: Synthetic oligonucleotide
  Sense strand starting at position 1443 of SEQ ID NO: 1880129
agaagauagccuugggcua

SEQ ID NO: 1944325 - RNA, 19 nt, Artificial Sequence
  Description of Artificial Sequence: Synthetic oligonucleotide
  Antisense strand to SEQ ID NO: 1944324
uagcccaaggcuaucuucu

SEQ ID NO: 1944326 - RNA, 19 nt, Artificial Sequence
  Description of Artificial Sequence: Synthetic oligonucleotide
  Sense strand starting at position 1444 of SEQ ID NO: 1880129
gaagauagccuugggcuau

SEQ ID NO: 1944327 - RNA, 19 nt, Artificial Sequence
  Description of Artificial Sequence: Synthetic oligonucleotide
  Antisense strand to SEQ ID NO: 1944326
auagcccaaggcuaucuuc

SEQ ID NO: 1944328 - RNA, 19 nt, Artificial Sequence
  Description of Artificial Sequence: Synthetic oligonucleotide
  Sense strand starting at position 1476 of SEQ ID NO: 1880129
cugugucuccgucuguaaa

SEQ ID NO: 1944329 - RNA, 19 nt, Artificial Sequence
  Description of Artificial Sequence: Synthetic oligonucleotide
  Antisense strand to SEQ ID NO: 1944328
uuuacagacggagacacag

SEQ ID NO: 1944330 - RNA, 19 nt, Artificial Sequence
  Description of Artificial Sequence: Synthetic oligonucleotide
  Sense strand starting at position 1671 of SEQ ID NO: 1880129
aucaaaugugaugauguuu

SEQ ID NO: 1944331 - RNA, 19 nt, Artificial Sequence
  Description of Artificial Sequence: Synthetic oligonucleotide
  Antisense strand to SEQ ID NO: 1944330
aaacaucaucacauuugau

SEQ ID NO: 1944332 - RNA, 19 nt, Artificial Sequence
  Description of Artificial Sequence: Synthetic oligonucleotide
  Sense strand starting at position 1676 of SEQ ID NO: 1880129
augugaugauguuuaagac

SEQ ID NO: 1944333 - RNA, 19 nt, Artificial Sequence
  Description of Artificial Sequence: Synthetic oligonucleotide
  Antisense strand to SEQ ID NO: 1944332
gucuuaaacaucaucacau

SEQ ID NO: 1944334 - RNA, 19 nt, Artificial Sequence
  Description of Artificial Sequence: Synthetic oligonucleotide
  Sense strand starting at position 1677 of SEQ ID NO: 1880129
ugugaugauguuuaagacu

SEQ ID NO: 1944335 - RNA, 19 nt, Artificial Sequence
  Description of Artificial Sequence: Synthetic oligonucleotide
  Antisense strand to SEQ ID NO: 1944334
agucuuaaacaucaucaca

SEQ ID NO: 1944336 - RNA, 19 nt, Artificial Sequence
  Description of Artificial Sequence: Synthetic oligonucleotide
  Sense strand starting at position 1891 of SEQ ID NO: 1880129
ugaagaggcugaucugauc

SEQ ID NO: 1944337 - RNA, 19 nt, Artificial Sequence
  Description of Artificial Sequence: Synthetic oligonucleotide
  Antisense strand to SEQ ID NO: 1944336
gaucagaucagccucuuca

SEQ ID NO: 1944338 - RNA, 19 nt, Artificial Sequence
  Description of Artificial Sequence: Synthetic oligonucleotide
  Sense strand starting at position 2089 of SEQ ID NO: 1880129
uauugugauguuuaucaga

SEQ ID NO: 1944339 - RNA, 19 nt, Artificial Sequence
  Description of Artificial Sequence: Synthetic oligonucleotide
  Antisense strand to SEQ ID NO: 1944338
ucugauaaacaucacaaua

SEQ ID NO: 1944340 - RNA, 19 nt, Artificial Sequence
  Description of Artificial Sequence: Synthetic oligonucleotide
  Sense strand starting at position 2170 of SEQ ID NO: 1880129
aguuaacuuguccaaguca

SEQ ID NO: 1944341 - RNA, 19 nt, Artificial Sequence
  Description of Artificial Sequence: Synthetic oligonucleotide
  Antisense strand to SEQ ID NO: 1944340
ugacuuggacaaguuaacu

SEQ ID NO: 1944342 - RNA, 19 nt, Artificial Sequence
  Description of Artificial Sequence: Synthetic oligonucleotide
  Sense strand starting at position 2251 of SEQ ID NO: 1880129
ccacgaaucagaugauugu

SEQ ID NO: 1944343 - RNA, 19 nt, Artificial Sequence
  Description of Artificial Sequence: Synthetic oligonucleotide
  Antisense strand to SEQ ID NO: 1944342
acaaucaucugauucgugg

SEQ ID NO: 1944344 - RNA, 19 nt, Artificial Sequence
  Description of Artificial Sequence: Synthetic oligonucleotide
  Sense strand starting at position 2254 of SEQ ID NO: 1880129
cgaaucagaugauuguagu

SEQ ID NO: 1944345 - RNA, 19 nt, Artificial Sequence
  Description of Artificial Sequence: Synthetic oligonucleotide
  Antisense strand to SEQ ID NO: 1944344
acuacaaucaucugauucg

SEQ ID NO: 1944346 - RNA, 19 nt, Artificial Sequence
  Description of Artificial Sequence: Synthetic oligonucleotide
  Sense strand starting at position 2255 of SEQ ID NO: 1880129
gaaucagaugauuguagua

SEQ ID NO: 1944347 - RNA, 19 nt, Artificial Sequence
  Description of Artificial Sequence: Synthetic oligonucleotide
  Antisense strand to SEQ ID NO: 1944346
uacuacaaucaucugauuc

SEQ ID NO: 1944348 - RNA, 19 nt, Artificial Sequence
  Description of Artificial Sequence: Synthetic oligonucleotide
  Sense strand starting at position 2287 of SEQ ID NO: 1880129
uugggagaucuguaugcug

SEQ ID NO: 1944349 - RNA, 19 nt, Artificial Sequence
  Description of Artificial Sequence: Synthetic oligonucleotide
  Antisense strand to SEQ ID NO: 1944348
cagcauacagaucucccaa

SEQ ID NO: 1944350 - RNA, 19 nt, Artificial Sequence
  Description of Artificial Sequence: Synthetic oligonucleotide
  Sense strand starting at position 2289 of SEQ ID NO: 1880129
gggagaucuguaugcugac

SEQ ID NO: 1944351 - RNA, 19 nt, Artificial Sequence
  Description of Artificial Sequence: Synthetic oligonucleotide
  Antisense strand to SEQ ID NO: 1944350
gucagcauacagaucuccc

SEQ ID NO: 1944352 - RNA, 19 nt, Artificial Sequence
  Description of Artificial Sequence: Synthetic oligonucleotide
  Sense strand starting at position 2290 of SEQ ID NO: 1880129
ggagaucuguaugcugacu

SEQ ID NO: 1944353 - RNA, 19 nt, Artificial Sequence
  Description of Artificial Sequence: Synthetic oligonucleotide
  Antisense strand to SEQ ID NO: 1944352
agucagcauacagaucucc

SEQ ID NO: 1944354 - RNA, 19 nt, Artificial Sequence
  Description of Artificial Sequence: Synthetic oligonucleotide
  Sense strand starting at position 2307 of SEQ ID NO: 1880129
cucauagagcccuaacagu

SEQ ID NO: 1944355 - RNA, 19 nt, Artificial Sequence
  Description of Artificial Sequence: Synthetic oligonucleotide
  Antisense strand to SEQ ID NO: 1944354
acuguuagggcucuaugag

SEQ ID NO: 1944356 - RNA, 19 nt, Artificial Sequence
  Description of Artificial Sequence: Synthetic oligonucleotide
  Sense strand starting at position 2362 of SEQ ID NO: 1880129
accagugaacuuuguagaa

SEQ ID NO: 1944357 - RNA, 19 nt, Artificial Sequence
  Description of Artificial Sequence: Synthetic oligonucleotide
  Antisense strand to SEQ ID NO: 1944356
uucuacaaaguucacuggu

SEQ ID NO: 1944358 - RNA, 19 nt, Artificial Sequence
  Description of Artificial Sequence: Synthetic oligonucleotide
  Sense strand starting at position 2593 of SEQ ID NO: 1880129
cuggcaguucuauaaggau

SEQ ID NO: 1944359 - RNA, 19 nt, Artificial Sequence
  Description of Artificial Sequence: Synthetic oligonucleotide
  Antisense strand to SEQ ID NO: 1944358
auccuuauagaacugccag

SEQ ID NO: 1944360 - RNA, 19 nt, Artificial Sequence
  Description of Artificial Sequence: Synthetic oligonucleotide
  Sense strand starting at position 2599 of SEQ ID NO: 1880129
guucuauaaggaugacuga

SEQ ID NO: 1944361 - RNA, 19 nt, Artificial Sequence
  Description of Artificial Sequence: Synthetic oligonucleotide
  Antisense strand to SEQ ID NO: 1944360
ucagucauccuuauagaac

SEQ ID NO: 1944362 - RNA, 19 nt, Artificial Sequence
  Description of Artificial Sequence: Synthetic oligonucleotide
  Sense strand starting at position 2761 of SEQ ID NO: 1880129
acauaauaagcaugugaua

SEQ ID NO: 1944363 - RNA, 19 nt, Artificial Sequence
  Description of Artificial Sequence: Synthetic oligonucleotide
  Antisense strand to SEQ ID NO: 1944362
uaucacaugcuuauuaugu

SEQ ID NO: 1944364 - RNA, 19 nt, Artificial Sequence
  Description of Artificial Sequence: Synthetic oligonucleotide
  Sense strand starting at position 3258 of SEQ ID NO: 1880129
guuaguguggucguuaaug

SEQ ID NO: 1944365 - RNA, 19 nt, Artificial Sequence
  Description of Artificial Sequence: Synthetic oligonucleotide
  Antisense strand to SEQ ID NO: 1944364
cauuaacgaccacacuaac

SEQ ID NO: 1944366 - RNA, 19 nt, Artificial Sequence
  Description of Artificial Sequence: Synthetic oligonucleotide
  Sense strand starting at position 3268 of SEQ ID NO: 1880129
ucguuaaugguccagaauc

SEQ ID NO: 1944367 - RNA, 19 nt, Artificial Sequence
  Description of Artificial Sequence: Synthetic oligonucleotide
  Antisense strand to SEQ ID NO: 1944366
gauucuggaccauuaacga

SEQ ID NO: 1944368 - RNA, 19 nt, Artificial Sequence
  Description of Artificial Sequence: Synthetic oligonucleotide
  Sense strand starting at position 3270 of SEQ ID NO: 1880129
guuaaugguccagaaucuc

SEQ ID NO: 1944369 - RNA, 19 nt, Artificial Sequence
  Description of Artificial Sequence: Synthetic oligonucleotide
  Antisense strand to SEQ ID NO: 1944368
gagauucuggaccauuaac

SEQ ID NO: 1944370 - RNA, 19 nt, Artificial Sequence
  Description of Artificial Sequence: Synthetic oligonucleotide
  Sense strand starting at position 3443 of SEQ ID NO: 1880129
gugucugauuugguagcuu

SEQ ID NO: 1944371 - RNA, 19 nt, Artificial Sequence
  Description of Artificial Sequence: Synthetic oligonucleotide
  Antisense strand to SEQ ID NO: 1944370
aagcuaccaaaucagacac

SEQ ID NO: 1944372 - RNA, 19 nt, Artificial Sequence
  Description of Artificial Sequence: Synthetic oligonucleotide
  Sense strand starting at position 3553 of SEQ ID NO: 1880129
accaauuuauucuggagag

SEQ ID NO: 1944373 - RNA, 19 nt, Artificial Sequence
  Description of Artificial Sequence: Synthetic oligonucleotide
  Antisense strand to SEQ ID NO: 1944372
cucuccagaauaaauuggu

SEQ ID NO: 1944374 - RNA, 19 nt, Artificial Sequence
  Description of Artificial Sequence: Synthetic oligonucleotide
  Sense strand starting at position 3747 of SEQ ID NO: 1880129
cuuacucguggugauauau

SEQ ID NO: 1944375 - RNA, 19 nt, Artificial Sequence
  Description of Artificial Sequence: Synthetic oligonucleotide
  Antisense strand to SEQ ID NO: 1944374
auauaucaccacgaguaag

SEQ ID NO: 1944376 - RNA, 19 nt, Artificial Sequence
  Description of Artificial Sequence: Synthetic oligonucleotide
  Sense strand starting at position 3755 of SEQ ID NO: 1880129
uggugauauauguggauua

SEQ ID NO: 1944377 - RNA, 19 nt, Artificial Sequence
  Description of Artificial Sequence: Synthetic oligonucleotide
  Antisense strand to SEQ ID NO: 1944376
uaauccacauauaucacca

SEQ ID NO: 1944378 - RNA, 19 nt, Artificial Sequence
  Description of Artificial Sequence: Synthetic oligonucleotide
  Sense strand starting at position 3870 of SEQ ID NO: 1880129
cuucuauaugugggaccau

SEQ ID NO: 1944379 - RNA, 19 nt, Artificial Sequence
  Description of Artificial Sequence: Synthetic oligonucleotide
  Antisense strand to SEQ ID NO: 1944378
auggucccacauauagaag

SEQ ID NO: 1944380 - RNA, 19 nt, Artificial Sequence
  Description of Artificial Sequence: Synthetic oligonucleotide
  Sense strand starting at position 3883 of SEQ ID NO: 1880129
gaccaugaccggugaacuu

SEQ ID NO: 1944381 - RNA, 19 nt, Artificial Sequence
  Description of Artificial Sequence: Synthetic oligonucleotide
  Antisense strand to SEQ ID NO: 1944380
aaguucaccggucaugguc

SEQ ID NO: 1944382 - RNA, 19 nt, Artificial Sequence
  Description of Artificial Sequence: Synthetic oligonucleotide
  Sense strand starting at position 277 of SEQ ID NO: 1880131
uggacauagucacacuaau

SEQ ID NO: 1944383 - RNA, 19 nt, Artificial Sequence
  Description of Artificial Sequence: Synthetic oligonucleotide
  Antisense strand to SEQ ID NO: 1944382
auuagugugacuaugucca

SEQ ID NO: 1944384 - RNA, 19 nt, Artificial Sequence
  Description of Artificial Sequence: Synthetic oligonucleotide
  Sense strand starting at position 346 of SEQ ID NO: 1880131
ucagauaagugcuuugugu

SEQ ID NO: 1944385 - RNA, 19 nt, Artificial Sequence
  Description of Artificial Sequence: Synthetic oligonucleotide
  Antisense strand to SEQ ID NO: 1944384
acacaaagcacuuaucuga

SEQ ID NO: 1944386 - RNA, 19 nt, Artificial Sequence
  Description of Artificial Sequence: Synthetic oligonucleotide
  Sense strand starting at position 653 of SEQ ID NO: 1880131
ggcuguuucuccuuaggag

SEQ ID NO: 1944387 - RNA, 19 nt, Artificial Sequence
  Description of Artificial Sequence: Synthetic oligonucleotide
  Antisense strand to SEQ ID NO: 1944386
cuccuaaggagaaacagcc

SEQ ID NO: 1944388 - RNA, 19 nt, Artificial Sequence
  Description of Artificial Sequence: Synthetic oligonucleotide
  Sense strand starting at position 654 of SEQ ID NO: 1880131
gcuguuucuccuuaggaga

SEQ ID NO: 1944389 - RNA, 19 nt, Artificial Sequence
  Description of Artificial Sequence: Synthetic oligonucleotide
  Antisense strand to SEQ ID NO: 1944388
ucuccuaaggagaaacagc

SEQ ID NO: 1944390 - RNA, 19 nt, Artificial Sequence
  Description of Artificial Sequence: Synthetic oligonucleotide
  Sense strand starting at position 802 of SEQ ID NO: 1880131
ucuugcuaagguuauuaau

SEQ ID NO: 1944391 - RNA, 19 nt, Artificial Sequence
  Description of Artificial Sequence: Synthetic oligonucleotide
  Antisense strand to SEQ ID NO: 1944390
auuaauaaccuuagcaaga

SEQ ID NO: 1944392 - RNA, 19 nt, Artificial Sequence
  Description of Artificial Sequence: Synthetic oligonucleotide
  Sense strand starting at position 920 of SEQ ID NO: 1880131
ugcuuagaaucugugauau

SEQ ID NO: 1944393 - RNA, 19 nt, Artificial Sequence
  Description of Artificial Sequence: Synthetic oligonucleotide
  Antisense strand to SEQ ID NO: 1944392
auaucacagauucuaagca

SEQ ID NO: 1944394 - RNA, 19 nt, Artificial Sequence
  Description of Artificial Sequence: Synthetic oligonucleotide
  Sense strand starting at position 1113 of SEQ ID NO: 1880131
uguguugacccagaucuau

SEQ ID NO: 1944395 - RNA, 19 nt, Artificial Sequence
  Description of Artificial Sequence: Synthetic oligonucleotide
  Antisense strand to SEQ ID NO: 1944394
auagaucugggucaacaca

SEQ ID NO: 1944396 - RNA, 19 nt, Artificial Sequence
  Description of Artificial Sequence: Synthetic oligonucleotide
  Sense strand starting at position 1139 of SEQ ID NO: 1880131
gccuuaaccuuucugcaag

SEQ ID NO: 1944397 - RNA, 19 nt, Artificial Sequence
  Description of Artificial Sequence: Synthetic oligonucleotide
  Antisense strand to SEQ ID NO: 1944396
cuugcagaaagguuaaggc

SEQ ID NO: 1944398 - RNA, 19 nt, Artificial Sequence
  Description of Artificial Sequence: Synthetic oligonucleotide
  Sense strand starting at position 1284 of SEQ ID NO: 1880131
cuuauagugugagucugau

SEQ ID NO: 1944399 - RNA, 19 nt, Artificial Sequence
  Description of Artificial Sequence: Synthetic oligonucleotide
  Antisense strand to SEQ ID NO: 1944398
aucagacucacacuauaag

SEQ ID NO: 1944400 - RNA, 19 nt, Artificial Sequence
  Description of Artificial Sequence: Synthetic oligonucleotide
  Sense strand starting at position 1296 of SEQ ID NO: 1880131
gucugaugguaauaauuua

SEQ ID NO: 1944401 - RNA, 19 nt, Artificial Sequence
  Description of Artificial Sequence: Synthetic oligonucleotide
  Antisense strand to SEQ ID NO: 1944400
uaaauuauuaccaucagac

SEQ ID NO: 1944402 - RNA, 19 nt, Artificial Sequence
  Description of Artificial Sequence: Synthetic oligonucleotide
  Sense strand starting at position 1354 of SEQ ID NO: 1880131
aucauucucgaaggacauu

SEQ ID NO: 1944403 - RNA, 19 nt, Artificial Sequence
  Description of Artificial Sequence: Synthetic oligonucleotide
  Antisense strand to SEQ ID NO: 1944402
aauguccuucgagaaugau

SEQ ID NO: 1944404 - RNA, 19 nt, Artificial Sequence
  Description of Artificial Sequence: Synthetic oligonucleotide
  Sense strand starting at position 1651 of SEQ ID NO: 1880131
cggcucuuagaaugcuuaa

SEQ ID NO: 1944405 - RNA, 19 nt, Artificial Sequence
  Description of Artificial Sequence: Synthetic oligonucleotide
  Antisense strand to SEQ ID NO: 1944404
uuaagcauucuaagagccg

SEQ ID NO: 1944406 - RNA, 19 nt, Artificial Sequence
  Description of Artificial Sequence: Synthetic oligonucleotide
  Sense strand starting at position 1654 of SEQ ID NO: 1880131
cucuuagaaugcuuaaugu

SEQ ID NO: 1944407 - RNA, 19 nt, Artificial Sequence
  Description of Artificial Sequence: Synthetic oligonucleotide
  Antisense strand to SEQ ID NO: 1944406
acauuaagcauucuaagag

SEQ ID NO: 1944408 - RNA, 19 nt, Artificial Sequence
  Description of Artificial Sequence: Synthetic oligonucleotide
  Sense strand starting at position 2004 of SEQ ID NO: 1880131
uaugaaauucugggucaac

SEQ ID NO: 1944409 - RNA, 19 nt, Artificial Sequence
  Description of Artificial Sequence: Synthetic oligonucleotide
  Antisense strand to SEQ ID NO: 1944408
guugacccagaauuucaua

SEQ ID NO: 1944410 - RNA, 19 nt, Artificial Sequence
  Description of Artificial Sequence: Synthetic oligonucleotide
  Sense strand starting at position 2005 of SEQ ID NO: 1880131
augaaauucugggucaaca

SEQ ID NO: 1944411 - RNA, 19 nt, Artificial Sequence
  Description of Artificial Sequence: Synthetic oligonucleotide
  Antisense strand to SEQ ID NO: 1944410
uguugacccagaauuucau

SEQ ID NO: 1944412 - RNA, 19 nt, Artificial Sequence
  Description of Artificial Sequence: Synthetic oligonucleotide
  Sense strand starting at position 2042 of SEQ ID NO: 1880131
ugcuaaaguuguuccacua

SEQ ID NO: 1944413 - RNA, 19 nt, Artificial Sequence
  Description of Artificial Sequence: Synthetic oligonucleotide
  Antisense strand to SEQ ID NO: 1944412
uaguggaacaacuuuagca

SEQ ID NO: 1944414 - RNA, 19 nt, Artificial Sequence
  Description of Artificial Sequence: Synthetic oligonucleotide
  Sense strand starting at position 2074 of SEQ ID NO: 1880131
cauugagaacucugugguu

SEQ ID NO: 1944415 - RNA, 19 nt, Artificial Sequence
  Description of Artificial Sequence: Synthetic oligonucleotide
  Antisense strand to SEQ ID NO: 1944414
aaccacagaguucucaaug

SEQ ID NO: 1944416 - RNA, 19 nt, Artificial Sequence
  Description of Artificial Sequence: Synthetic oligonucleotide
  Sense strand starting at position 2076 of SEQ ID NO: 1880131
uugagaacucugugguugu

SEQ ID NO: 1944417 - RNA, 19 nt, Artificial Sequence
  Description of Artificial Sequence: Synthetic oligonucleotide
  Antisense strand to SEQ ID NO: 1944416
acaaccacagaguucucaa

SEQ ID NO: 1944418 - RNA, 19 nt, Artificial Sequence
  Description of Artificial Sequence: Synthetic oligonucleotide
  Sense strand starting at position 2079 of SEQ ID NO: 1880131
agaacucugugguuguuaa

SEQ ID NO: 1944419 - RNA, 19 nt, Artificial Sequence
  Description of Artificial Sequence: Synthetic oligonucleotide
  Antisense strand to SEQ ID NO: 1944418
uuaacaaccacagaguucu

SEQ ID NO: 1944420 - RNA, 19 nt, Artificial Sequence
  Description of Artificial Sequence: Synthetic oligonucleotide
  Sense strand starting at position 2080 of SEQ ID NO: 1880131
gaacucugugguuguuaaa

SEQ ID NO: 1944421 - RNA, 19 nt, Artificial Sequence
  Description of Artificial Sequence: Synthetic oligonucleotide
  Antisense strand to SEQ ID NO: 1944420
uuuaacaaccacagaguuc

SEQ ID NO: 1944422 - RNA, 19 nt, Artificial Sequence
  Description of Artificial Sequence: Synthetic oligonucleotide
  Sense strand starting at position 2179 of SEQ ID NO: 1880131
ugguaugucuagucauggu

SEQ ID NO: 1944423 - RNA, 19 nt, Artificial Sequence
  Description of Artificial Sequence: Synthetic oligonucleotide
  Antisense strand to SEQ ID NO: 1944422
accaugacuagacauacca

SEQ ID NO: 1944424 - RNA, 19 nt, Artificial Sequence
  Description of Artificial Sequence: Synthetic oligonucleotide
  Sense strand starting at position 2732 of SEQ ID NO: 1880131
ccaugcauccuugagguuu

SEQ ID NO: 1944425 - RNA, 19 nt, Artificial Sequence
  Description of Artificial Sequence: Synthetic oligonucleotide
  Antisense strand to SEQ ID NO: 1944424
aaaccucaaggaugcaugg

SEQ ID NO: 1944426 - RNA, 19 nt, Artificial Sequence
  Description of Artificial Sequence: Synthetic oligonucleotide
  Sense strand starting at position 2844 of SEQ ID NO: 1880131
ucacuaagucgugcagcua

SEQ ID NO: 1944427 - RNA, 19 nt, Artificial Sequence
  Description of Artificial Sequence: Synthetic oligonucleotide
  Antisense strand to SEQ ID NO: 1944426
uagcugcacgacuuaguga

SEQ ID NO: 1944428 - RNA, 19 nt, Artificial Sequence
  Description of Artificial Sequence: Synthetic oligonucleotide
  Sense strand starting at position 2845 of SEQ ID NO: 1880131
cacuaagucgugcagcuau

SEQ ID NO: 1944429 - RNA, 19 nt, Artificial Sequence
  Description of Artificial Sequence: Synthetic oligonucleotide
  Antisense strand to SEQ ID NO: 1944428
auagcugcacgacuuagug

SEQ ID NO: 1944430 - RNA, 19 nt, Artificial Sequence
  Description of Artificial Sequence: Synthetic oligonucleotide
  Sense strand starting at position 2963 of SEQ ID NO: 1880131
auaguaauuucggucucua

SEQ ID NO: 1944431 - RNA, 19 nt, Artificial Sequence
  Description of Artificial Sequence: Synthetic oligonucleotide
  Antisense strand to SEQ ID NO: 1944430
uagagaccgaaauuacuau

SEQ ID NO: 1944432 - RNA, 19 nt, Artificial Sequence
  Description of Artificial Sequence: Synthetic oligonucleotide
  Sense strand starting at position 3246 of SEQ ID NO: 1880131
uggcacuguugcccagauu

SEQ ID NO: 1944433 - RNA, 19 nt, Artificial Sequence
  Description of Artificial Sequence: Synthetic oligonucleotide
  Antisense strand to SEQ ID NO: 1944432
aaucugggcaacagugcca

SEQ ID NO: 1944434 - RNA, 19 nt, Artificial Sequence
  Description of Artificial Sequence: Synthetic oligonucleotide
  Sense strand starting at position 3247 of SEQ ID NO: 1880131
ggcacuguugcccagauua

SEQ ID NO: 1944435 - RNA, 19 nt, Artificial Sequence
  Description of Artificial Sequence: Synthetic oligonucleotide
  Antisense strand to SEQ ID NO: 1944434
uaaucugggcaacagugcc

SEQ ID NO: 1944436 - RNA, 19 nt, Artificial Sequence
  Description of Artificial Sequence: Synthetic oligonucleotide
  Sense strand starting at position 3249 of SEQ ID NO: 1880131
cacuguugcccagauuaga

SEQ ID NO: 1944437 - RNA, 19 nt, Artificial Sequence
  Description of Artificial Sequence: Synthetic oligonucleotide
  Antisense strand to SEQ ID NO: 1944436
ucuaaucugggcaacagug

SEQ ID NO: 1944438 - RNA, 19 nt, Artificial Sequence
  Description of Artificial Sequence: Synthetic oligonucleotide
  Sense strand starting at position 3346 of SEQ ID NO: 1880131
acccaugguuggucuugaa

SEQ ID NO: 1944439 - RNA, 19 nt, Artificial Sequence
  Description of Artificial Sequence: Synthetic oligonucleotide
  Antisense strand to SEQ ID NO: 1944438
uucaagaccaaccaugggu

SEQ ID NO: 1944440 - RNA, 19 nt, Artificial Sequence
  Description of Artificial Sequence: Synthetic oligonucleotide
  Sense strand starting at position 3465 of SEQ ID NO: 1880131
guuuccugcugagauuuau

SEQ ID NO: 1944441 - RNA, 19 nt, Artificial Sequence
  Description of Artificial Sequence: Synthetic oligonucleotide
  Antisense strand to SEQ ID NO: 1944440
auaaaucucagcaggaaac

SEQ ID NO: 1944442 - RNA, 19 nt, Artificial Sequence
  Description of Artificial Sequence: Synthetic oligonucleotide
  Sense strand starting at position 3596 of SEQ ID NO: 1880131
gcgaaaucugcucacugca

SEQ ID NO: 1944443 - RNA, 19 nt, Artificial Sequence
  Description of Artificial Sequence: Synthetic oligonucleotide
  Antisense strand to SEQ ID NO: 1944442
ugcagugagcagauuucgc

SEQ ID NO: 1944444 - RNA, 19 nt, Artificial Sequence
  Description of Artificial Sequence: Synthetic oligonucleotide
  Sense strand starting at position 3749 of SEQ ID NO: 1880131
aaguguacguuucuuuaac

SEQ ID NO: 1944445 - RNA, 19 nt, Artificial Sequence
  Description of Artificial Sequence: Synthetic oligonucleotide
  Antisense strand to SEQ ID NO: 1944444
guuaaagaaacguacacuu

SEQ ID NO: 1944446 - RNA, 19 nt, Artificial Sequence
  Description of Artificial Sequence: Synthetic oligonucleotide
  Sense strand starting at position 3750 of SEQ ID NO: 1880131
aguguacguuucuuuaacu

SEQ ID NO: 1944447 - RNA, 19 nt, Artificial Sequence
  Description of Artificial Sequence: Synthetic oligonucleotide
  Antisense strand to SEQ ID NO: 1944446
aguuaaagaaacguacacu

SEQ ID NO: 1944448 - RNA, 19 nt, Artificial Sequence
  Description of Artificial Sequence: Synthetic oligonucleotide
  Sense strand starting at position 3779 of SEQ ID NO: 1880131
gguuauguauccuuuacaa

SEQ ID NO: 1944449 - RNA, 19 nt, Artificial Sequence
  Description of Artificial Sequence: Synthetic oligonucleotide
  Antisense strand to SEQ ID NO: 1944448
uuguaaaggauacauaacc

SEQ ID NO: 1944450 - RNA, 19 nt, Artificial Sequence
  Description of Artificial Sequence: Synthetic oligonucleotide
  Sense strand starting at position 3819 of SEQ ID NO: 1880131
cuggauuaucuugggauug

SEQ ID NO: 1944451 - RNA, 19 nt, Artificial Sequence
  Description of Artificial Sequence: Synthetic oligonucleotide
  Antisense strand to SEQ ID NO: 1944450
caaucccaagauaauccag

SEQ ID NO: 1944452 - RNA, 19 nt, Artificial Sequence
  Description of Artificial Sequence: Synthetic oligonucleotide
  Sense strand starting at position 3858 of SEQ ID NO: 1880131
ccuugagaauuauucguuu

SEQ ID NO: 1944453 - RNA, 19 nt, Artificial Sequence
  Description of Artificial Sequence: Synthetic oligonucleotide
  Antisense strand to SEQ ID NO: 1944452
aaacgaauaauucucaagg

SEQ ID NO: 1944454 - RNA, 19 nt, Artificial Sequence
  Description of Artificial Sequence: Synthetic oligonucleotide
  Sense strand starting at position 3881 of SEQ ID NO: 1880131
ggcucuuuguaagucaagu

SEQ ID NO: 1944455 - RNA, 19 nt, Artificial Sequence
  Description of Artificial Sequence: Synthetic oligonucleotide
  Antisense strand to SEQ ID NO: 1944454
acuugacuuacaaagagcc

SEQ ID NO: 1944456 - RNA, 19 nt, Artificial Sequence
  Description of Artificial Sequence: Synthetic oligonucleotide
  Sense strand starting at position 3918 of SEQ ID NO: 1880131
ggacauugcgagugguaug

SEQ ID NO: 1944457 - RNA, 19 nt, Artificial Sequence
  Description of Artificial Sequence: Synthetic oligonucleotide
  Antisense strand to SEQ ID NO: 1944456
cauaccacucgcaaugucc

SEQ ID NO: 1944458 - RNA, 19 nt, Artificial Sequence
  Description of Artificial Sequence: Synthetic oligonucleotide
  Sense strand starting at position 3950 of SEQ ID NO: 1880131
ucuguuauauugcuuagaa

SEQ ID NO: 1944459 - RNA, 19 nt, Artificial Sequence
  Description of Artificial Sequence: Synthetic oligonucleotide
  Antisense strand to SEQ ID NO: 1944458
uucuaagcaauauaacaga

SEQ ID NO: 1944460 - RNA, 19 nt, Artificial Sequence
  Description of Artificial Sequence: Synthetic oligonucleotide
  Sense strand starting at position 3951 of SEQ ID NO: 1880131
cuguuauauugcuuagaaa

SEQ ID NO: 1944461 - RNA, 19 nt, Artificial Sequence
  Description of Artificial Sequence: Synthetic oligonucleotide
  Antisense strand to SEQ ID NO: 1944460
uuucuaagcaauauaacag

SEQ ID NO: 1944462 - RNA, 19 nt, Artificial Sequence
  Description of Artificial Sequence: Synthetic oligonucleotide
  Sense strand starting at position 223 of SEQ ID NO: 1880132
cuccuuguugcugagacaa

SEQ ID NO: 1944463 - RNA, 19 nt, Artificial Sequence
  Description of Artificial Sequence: Synthetic oligonucleotide
  Antisense strand to SEQ ID NO: 1944462
uugucucagcaacaaggag

SEQ ID NO: 1944464 - RNA, 19 nt, Artificial Sequence
  Description of Artificial Sequence: Synthetic oligonucleotide
  Sense strand starting at position 231 of SEQ ID NO: 1880132
ugcugagacaaauaguguu

SEQ ID NO: 1944465 - RNA, 19 nt, Artificial Sequence
  Description of Artificial Sequence: Synthetic oligonucleotide
  Antisense strand to SEQ ID NO: 1944464
aacacuauuugucucagca

SEQ ID NO: 1944466 - RNA, 19 nt, Artificial Sequence
  Description of Artificial Sequence: Synthetic oligonucleotide
  Sense strand starting at position 393 of SEQ ID NO: 1880132
uuuccauaguagucaaaug

SEQ ID NO: 1944467 - RNA, 19 nt, Artificial Sequence
  Description of Artificial Sequence: Synthetic oligonucleotide
  Antisense strand to SEQ ID NO: 1944466
cauuugacuacuauggaaa

SEQ ID NO: 1944468 - RNA, 19 nt, Artificial Sequence
  Description of Artificial Sequence: Synthetic oligonucleotide
  Sense strand starting at position 554 of SEQ ID NO: 1880132
augaaauccuguuuccuga

SEQ ID NO: 1944469 - RNA, 19 nt, Artificial Sequence
  Description of Artificial Sequence: Synthetic oligonucleotide
  Antisense strand to SEQ ID NO: 1944468
ucaggaaacaggauuucau

SEQ ID NO: 1944470 - RNA, 19 nt, Artificial Sequence
  Description of Artificial Sequence: Synthetic oligonucleotide
  Sense strand starting at position 645 of SEQ ID NO: 1880132
ggguuugcaggugauauag

SEQ ID NO: 1944471 - RNA, 19 nt, Artificial Sequence
  Description of Artificial Sequence: Synthetic oligonucleotide
  Antisense strand to SEQ ID NO: 1944470
cuauaucaccugcaaaccc

SEQ ID NO: 1944472 - RNA, 19 nt, Artificial Sequence
  Description of Artificial Sequence: Synthetic oligonucleotide
  Sense strand starting at position 656 of SEQ ID NO: 1880132
ugauauaguggaggccaua

SEQ ID NO: 1944473 - RNA, 19 nt, Artificial Sequence
  Description of Artificial Sequence: Synthetic oligonucleotide
  Antisense strand to SEQ ID NO: 1944472
uauggccuccacuauauca

SEQ ID NO: 1944474 - RNA, 19 nt, Artificial Sequence
  Description of Artificial Sequence: Synthetic oligonucleotide
  Sense strand starting at position 808 of SEQ ID NO: 1880132
gcccuaagagucuaacuuc

SEQ ID NO: 1944475 - RNA, 19 nt, Artificial Sequence
  Description of Artificial Sequence: Synthetic oligonucleotide
  Antisense strand to SEQ ID NO: 1944474
gaaguuagacucuuagggc

SEQ ID NO: 1944476 - RNA, 19 nt, Artificial Sequence
  Description of Artificial Sequence: Synthetic oligonucleotide
  Sense strand starting at position 921 of SEQ ID NO: 1880132
uuucuaagaucuuccagga

SEQ ID NO: 1944477 - RNA, 19 nt, Artificial Sequence
  Description of Artificial Sequence: Synthetic oligonucleotide
  Antisense strand to SEQ ID NO: 1944476
uccuggaagaucuuagaaa

SEQ ID NO: 1944478 - RNA, 19 nt, Artificial Sequence
  Description of Artificial Sequence: Synthetic oligonucleotide
  Sense strand starting at position 1123 of SEQ ID NO: 1880132
uaauuaggcuugucagaag

SEQ ID NO: 1944479 - RNA, 19 nt, Artificial Sequence
  Description of Artificial Sequence: Synthetic oligonucleotide
  Antisense strand to SEQ ID NO: 1944478
cuucugacaagccuaauua

SEQ ID NO: 1944480 - RNA, 19 nt, Artificial Sequence
  Description of Artificial Sequence: Synthetic oligonucleotide
  Sense strand starting at position 1175 of SEQ ID NO: 1880132
uugauuguuugaucacauc

SEQ ID NO: 1944481 - RNA, 19 nt, Artificial Sequence
  Description of Artificial Sequence: Synthetic oligonucleotide
  Antisense strand to SEQ ID NO: 1944480
gaugugaucaaacaaucaa

SEQ ID NO: 1944482 - RNA, 19 nt, Artificial Sequence
  Description of Artificial Sequence: Synthetic oligonucleotide
  Sense strand starting at position 1238 of SEQ ID NO: 1880132
guaacauucuuagucuuga

SEQ ID NO: 1944483 - RNA, 19 nt, Artificial Sequence
  Description of Artificial Sequence: Synthetic oligonucleotide
  Antisense strand to SEQ ID NO: 1944482
ucaagacuaagaauguuac

SEQ ID NO: 1944484 - RNA, 19 nt, Artificial Sequence
  Description of Artificial Sequence: Synthetic oligonucleotide
  Sense strand starting at position 1504 of SEQ ID NO: 1880132
cuacauauccaacgagaac

SEQ ID NO: 1944485 - RNA, 19 nt, Artificial Sequence
  Description of Artificial Sequence: Synthetic oligonucleotide
  Antisense strand to SEQ ID NO: 1944484
guucucguuggauauguag

SEQ ID NO: 1944486 - RNA, 19 nt, Artificial Sequence
  Description of Artificial Sequence: Synthetic oligonucleotide
  Sense strand starting at position 1705 of SEQ ID NO: 1880132
acggauucgguaugggaca

SEQ ID NO: 1944487 - RNA, 19 nt, Artificial Sequence
  Description of Artificial Sequence: Synthetic oligonucleotide
  Antisense strand to SEQ ID NO: 1944486
ugucccauaccgaauccgu

SEQ ID NO: 1944488 - RNA, 19 nt, Artificial Sequence
  Description of Artificial Sequence: Synthetic oligonucleotide
  Sense strand starting at position 1707 of SEQ ID NO: 1880132
ggauucgguaugggacauu

SEQ ID NO: 1944489 - RNA, 19 nt, Artificial Sequence
  Description of Artificial Sequence: Synthetic oligonucleotide
  Antisense strand to SEQ ID NO: 1944488
aaugucccauaccgaaucc

SEQ ID NO: 1944490 - RNA, 19 nt, Artificial Sequence
  Description of Artificial Sequence: Synthetic oligonucleotide
  Sense strand starting at position 1718 of SEQ ID NO: 1880132
gggacauucuuauuccuuu

SEQ ID NO: 1944491 - RNA, 19 nt, Artificial Sequence
  Description of Artificial Sequence: Synthetic oligonucleotide
  Antisense strand to SEQ ID NO: 1944490
aaaggaauaagaauguccc

SEQ ID NO: 1944492 - RNA, 19 nt, Artificial Sequence
  Description of Artificial Sequence: Synthetic oligonucleotide
  Sense strand starting at position 1749 of SEQ ID NO: 1880132
uuuguugagccugauauca

SEQ ID NO: 1944493 - RNA, 19 nt, Artificial Sequence
  Description of Artificial Sequence: Synthetic oligonucleotide
  Antisense strand to SEQ ID NO: 1944492
ugauaucaggcucaacaaa

SEQ ID NO: 1944494 - RNA, 19 nt, Artificial Sequence
  Description of Artificial Sequence: Synthetic oligonucleotide
  Sense strand starting at position 2058 of SEQ ID NO: 1880132
cuaagaauucuuuggcuag

SEQ ID NO: 1944495 - RNA, 19 nt, Artificial Sequence
  Description of Artificial Sequence: Synthetic oligonucleotide
  Antisense strand to SEQ ID NO: 1944494
cuagccaaagaauucuuag

SEQ ID NO: 1944496 - RNA, 19 nt, Artificial Sequence
  Description of Artificial Sequence: Synthetic oligonucleotide
  Sense strand starting at position 2090 of SEQ ID NO: 1880132
agaauauguucuccaguuu

SEQ ID NO: 1944497 - RNA, 19 nt, Artificial Sequence
  Description of Artificial Sequence: Synthetic oligonucleotide
  Antisense strand to SEQ ID NO: 1944496
aaacuggagaacauauucu

SEQ ID NO: 1944498 - RNA, 19 nt, Artificial Sequence
  Description of Artificial Sequence: Synthetic oligonucleotide
  Sense strand starting at position 2465 of SEQ ID NO: 1880132
caggauccacuuugaguuu

SEQ ID NO: 1944499 - RNA, 19 nt, Artificial Sequence
  Description of Artificial Sequence: Synthetic oligonucleotide
  Antisense strand to SEQ ID NO: 1944498
aaacucaaaguggauccug

SEQ ID NO: 1944500 - RNA, 19 nt, Artificial Sequence
  Description of Artificial Sequence: Synthetic oligonucleotide
  Sense strand starting at position 2608 of SEQ ID NO: 1880132
caauaaucaguugggugua

SEQ ID NO: 1944501 - RNA, 19 nt, Artificial Sequence
  Description of Artificial Sequence: Synthetic oligonucleotide
  Antisense strand to SEQ ID NO: 1944500
uacacccaacugauuauug

SEQ ID NO: 1944502 - RNA, 19 nt, Artificial Sequence
  Description of Artificial Sequence: Synthetic oligonucleotide
  Sense strand starting at position 2611 of SEQ ID NO: 1880132
uaaucaguuggguguauuu

SEQ ID NO: 1944503 - RNA, 19 nt, Artificial Sequence
  Description of Artificial Sequence: Synthetic oligonucleotide
  Antisense strand to SEQ ID NO: 1944502
aaauacacccaacugauua

SEQ ID NO: 1944504 - RNA, 19 nt, Artificial Sequence
  Description of Artificial Sequence: Synthetic oligonucleotide
  Sense strand starting at position 2622 of SEQ ID NO: 1880132
guguauuugggugggccua

SEQ ID NO: 1944505 - RNA, 19 nt, Artificial Sequence
  Description of Artificial Sequence: Synthetic oligonucleotide
  Antisense strand to SEQ ID NO: 1944504
uaggcccacccaaauacac

SEQ ID NO: 1944506 - RNA, 19 nt, Artificial Sequence
  Description of Artificial Sequence: Synthetic oligonucleotide
  Sense strand starting at position 2875 of SEQ ID NO: 1880132
guguuaaagguguacauua

SEQ ID NO: 1944507 - RNA, 19 nt, Artificial Sequence
  Description of Artificial Sequence: Synthetic oligonucleotide
  Antisense strand to SEQ ID NO: 1944506
uaauguacaccuuuaacac

SEQ ID NO: 1944508 - RNA, 19 nt, Artificial Sequence
  Description of Artificial Sequence: Synthetic oligonucleotide
  Sense strand starting at position 2877 of SEQ ID NO: 1880132
guuaaagguguacauuagu

SEQ ID NO: 1944509 - RNA, 19 nt, Artificial Sequence
  Description of Artificial Sequence: Synthetic oligonucleotide
  Antisense strand to SEQ ID NO: 1944508
acuaauguacaccuuuaac

SEQ ID NO: 1944510 - RNA, 19 nt, Artificial Sequence
  Description of Artificial Sequence: Synthetic oligonucleotide
  Sense strand starting at position 2885 of SEQ ID NO: 1880132
uguacauuaguuugggaag

SEQ ID NO: 1944511 - RNA, 19 nt, Artificial Sequence
  Description of Artificial Sequence: Synthetic oligonucleotide
  Antisense strand to SEQ ID NO: 1944510
cuucccaaacuaauguaca

SEQ ID NO: 1944512 - RNA, 19 nt, Artificial Sequence
  Description of Artificial Sequence: Synthetic oligonucleotide
  Sense strand starting at position 2946 of SEQ ID NO: 1880132
cgauaugccucuccauuua

SEQ ID NO: 1944513 - RNA, 19 nt, Artificial Sequence
  Description of Artificial Sequence: Synthetic oligonucleotide
  Antisense strand to SEQ ID NO: 1944512
uaaauggagaggcauaucg

SEQ ID NO: 1944514 - RNA, 19 nt, Artificial Sequence
  Description of Artificial Sequence: Synthetic oligonucleotide
  Sense strand starting at position 3184 of SEQ ID NO: 1880132
gcugaagacucacuuauua

SEQ ID NO: 1944515 - RNA, 19 nt, Artificial Sequence
  Description of Artificial Sequence: Synthetic oligonucleotide
  Antisense strand to SEQ ID NO: 1944514
uaauaagugagucuucagc

SEQ ID NO: 1944516 - RNA, 19 nt, Artificial Sequence
  Description of Artificial Sequence: Synthetic oligonucleotide
  Sense strand starting at position 3215 of SEQ ID NO: 1880132
uuuaauguauucuugggau

SEQ ID NO: 1944517 - RNA, 19 nt, Artificial Sequence
  Description of Artificial Sequence: Synthetic oligonucleotide
  Antisense strand to SEQ ID NO: 1944516
aucccaagaauacauuaaa

SEQ ID NO: 1944518 - RNA, 19 nt, Artificial Sequence
  Description of Artificial Sequence: Synthetic oligonucleotide
  Sense strand starting at position 3324 of SEQ ID NO: 1880132
uagugaacuggcuagaacu

SEQ ID NO: 1944519 - RNA, 19 nt, Artificial Sequence
  Description of Artificial Sequence: Synthetic oligonucleotide
  Antisense strand to SEQ ID NO: 1944518
aguucuagccaguucacua

SEQ ID NO: 1944520 - RNA, 19 nt, Artificial Sequence
  Description of Artificial Sequence: Synthetic oligonucleotide
  Sense strand starting at position 3354 of SEQ ID NO: 1880132
guugaauaagagugguacu

SEQ ID NO: 1944521 - RNA, 19 nt, Artificial Sequence
  Description of Artificial Sequence: Synthetic oligonucleotide
  Antisense strand to SEQ ID NO: 1944520
aguaccacucuuauucaac

SEQ ID NO: 1944522 - RNA, 19 nt, Artificial Sequence
  Description of Artificial Sequence: Synthetic oligonucleotide
  Sense strand starting at position 3355 of SEQ ID NO: 1880132
uugaauaagagugguacua

SEQ ID NO: 1944523 - RNA, 19 nt, Artificial Sequence
  Description of Artificial Sequence: Synthetic oligonucleotide
  Antisense strand to SEQ ID NO: 1944522
uaguaccacucuuauucaa

SEQ ID NO: 1944524 - RNA, 19 nt, Artificial Sequence
  Description of Artificial Sequence: Synthetic oligonucleotide
  Sense strand starting at position 3376 of SEQ ID NO: 1880132
agacaucuuuacuuuguuu

SEQ ID NO: 1944525 - RNA, 19 nt, Artificial Sequence
  Description of Artificial Sequence: Synthetic oligonucleotide
  Antisense strand to SEQ ID NO: 1944524
aaacaaaguaaagaugucu

SEQ ID NO: 1944526 - RNA, 19 nt, Artificial Sequence
  Description of Artificial Sequence: Synthetic oligonucleotide
  Sense strand starting at position 3478 of SEQ ID NO: 1880132
gaggaaguuucccucuaug

SEQ ID NO: 1944527 - RNA, 19 nt, Artificial Sequence
  Description of Artificial Sequence: Synthetic oligonucleotide
  Antisense strand to SEQ ID NO: 1944526
cauagagggaaacuuccuc

SEQ ID NO: 1944528 - RNA, 19 nt, Artificial Sequence
  Description of Artificial Sequence: Synthetic oligonucleotide
  Sense strand starting at position 3544 of SEQ ID NO: 1880132
ccaucaggaauagguguua

SEQ ID NO: 1944529 - RNA, 19 nt, Artificial Sequence
  Description of Artificial Sequence: Synthetic oligonucleotide
  Antisense strand to SEQ ID NO: 1944528
uaacaccuauuccugaugg

SEQ ID NO: 1944530 - RNA, 19 nt, Artificial Sequence
  Description of Artificial Sequence: Synthetic oligonucleotide
  Sense strand starting at position 3641 of SEQ ID NO: 1880132
gcauguuaacaugauggau

SEQ ID NO: 1944531 - RNA, 19 nt, Artificial Sequence
  Description of Artificial Sequence: Synthetic oligonucleotide
  Antisense strand to SEQ ID NO: 1944530
auccaucauguuaacaugc

SEQ ID NO: 1944532 - RNA, 19 nt, Artificial Sequence
  Description of Artificial Sequence: Synthetic oligonucleotide
  Sense strand starting at position 3762 of SEQ ID NO: 1880132
ugcuaauauuugguuuagu

SEQ ID NO: 1944533 - RNA, 19 nt, Artificial Sequence
  Description of Artificial Sequence: Synthetic oligonucleotide
  Antisense strand to SEQ ID NO: 1944532
acuaaaccaaauauuagca

SEQ ID NO: 1944534 - RNA, 19 nt, Artificial Sequence
  Description of Artificial Sequence: Synthetic oligonucleotide
  Sense strand starting at position 3763 of SEQ ID NO: 1880132
gcuaauauuugguuuagua

SEQ ID NO: 1944535 - RNA, 19 nt, Artificial Sequence
  Description of Artificial Sequence: Synthetic oligonucleotide
  Antisense strand to SEQ ID NO: 1944534
uacuaaaccaaauauuagc

SEQ ID NO: 1944536 - RNA, 19 nt, Artificial Sequence
  Description of Artificial Sequence: Synthetic oligonucleotide
  Sense strand starting at position 3880 of SEQ ID NO: 1880132
gugucuuuagcccaagaua

SEQ ID NO: 1944537 - RNA, 19 nt, Artificial Sequence
  Description of Artificial Sequence: Synthetic oligonucleotide
  Antisense strand to SEQ ID NO: 1944536
uaucuugggcuaaagacac

SEQ ID NO: 1944538 - RNA, 19 nt, Artificial Sequence
  Description of Artificial Sequence: Synthetic oligonucleotide
  Sense strand starting at position 3883 of SEQ ID NO: 1880132
ucuuuagcccaagauauga

SEQ ID NO: 1944539 - RNA, 19 nt, Artificial Sequence
  Description of Artificial Sequence: Synthetic oligonucleotide
  Antisense strand to SEQ ID NO: 1944538
ucauaucuugggcuaaaga

SEQ ID NO: 1944540 - RNA, 19 nt, Artificial Sequence
  Description of Artificial Sequence: Synthetic oligonucleotide
  Sense strand starting at position 3896 of SEQ ID NO: 1880132
auaugauauguccaucuug

SEQ ID NO: 1944541 - RNA, 19 nt, Artificial Sequence
  Description of Artificial Sequence: Synthetic oligonucleotide
  Antisense strand to SEQ ID NO: 1944540
caagauggacauaucauau

SEQ ID NO: 1944542 - RNA, 19 nt, Artificial Sequence
  Description of Artificial Sequence: Synthetic oligonucleotide
  Sense strand starting at position 105 of SEQ ID NO: 1880133
acacacaggucuccagaua

SEQ ID NO: 1944543 - RNA, 19 nt, Artificial Sequence
  Description of Artificial Sequence: Synthetic oligonucleotide
  Antisense strand to SEQ ID NO: 1944542
uaucuggagaccugugugu

SEQ ID NO: 1944544 - RNA, 19 nt, Artificial Sequence
  Description of Artificial Sequence: Synthetic oligonucleotide
  Sense strand starting at position 121 of SEQ ID NO: 1880133
auacuacauuuguggaaca

SEQ ID NO: 1944545 - RNA, 19 nt, Artificial Sequence
  Description of Artificial Sequence: Synthetic oligonucleotide
  Antisense strand to SEQ ID NO: 1944544
uguuccacaaauguaguau

SEQ ID NO: 1944546 - RNA, 19 nt, Artificial Sequence
  Description of Artificial Sequence: Synthetic oligonucleotide
  Sense strand starting at position 131 of SEQ ID NO: 1880133
uguggaacaucaguuuaag

SEQ ID NO: 1944547 - RNA, 19 nt, Artificial Sequence
  Description of Artificial Sequence: Synthetic oligonucleotide
  Antisense strand to SEQ ID NO: 1944546
cuuaaacugauguuccaca

SEQ ID NO: 1944548 - RNA, 19 nt, Artificial Sequence
  Description of Artificial Sequence: Synthetic oligonucleotide
  Sense strand starting at position 194 of SEQ ID NO: 1880133
aaagucgaggcauaguaau

SEQ ID NO: 1944549 - RNA, 19 nt, Artificial Sequence
  Description of Artificial Sequence: Synthetic oligonucleotide
  Antisense strand to SEQ ID NO: 1944548
auuacuaugccucgacuuu

SEQ ID NO: 1944550 - RNA, 19 nt, Artificial Sequence
  Description of Artificial Sequence: Synthetic oligonucleotide
  Sense strand starting at position 205 of SEQ ID NO: 1880133
auaguaaucccaggacuuu

SEQ ID NO: 1944551 - RNA, 19 nt, Artificial Sequence
  Description of Artificial Sequence: Synthetic oligonucleotide
  Antisense strand to SEQ ID NO: 1944550
aaaguccugggauuacuau

SEQ ID NO: 1944552 - RNA, 19 nt, Artificial Sequence
  Description of Artificial Sequence: Synthetic oligonucleotide
  Sense strand starting at position 957 of SEQ ID NO: 1880133
ggcaacauuucuuaucuga

SEQ ID NO: 1944553 - RNA, 19 nt, Artificial Sequence
  Description of Artificial Sequence: Synthetic oligonucleotide
  Antisense strand to SEQ ID NO: 1944552
ucagauaagaaauguugcc

SEQ ID NO: 1944554 - RNA, 19 nt, Artificial Sequence
  Description of Artificial Sequence: Synthetic oligonucleotide
  Sense strand starting at position 964 of SEQ ID NO: 1880133
uuucuuaucugaggaauuu

SEQ ID NO: 1944555 - RNA, 19 nt, Artificial Sequence
  Description of Artificial Sequence: Synthetic oligonucleotide
  Antisense strand to SEQ ID NO: 1944554
aaauuccucagauaagaaa

SEQ ID NO: 1944556 - RNA, 19 nt, Artificial Sequence
  Description of Artificial Sequence: Synthetic oligonucleotide
  Sense strand starting at position 990 of SEQ ID NO: 1880133
auuagaugucccuauuauu

SEQ ID NO: 1944557 - RNA, 19 nt, Artificial Sequence
  Description of Artificial Sequence: Synthetic oligonucleotide
  Antisense strand to SEQ ID NO: 1944556
aauaauagggacaucuaau

SEQ ID NO: 1944558 - RNA, 19 nt, Artificial Sequence
  Description of Artificial Sequence: Synthetic oligonucleotide
  Sense strand starting at position 993 of SEQ ID NO: 1880133
agaugucccuauuauucua

SEQ ID NO: 1944559 - RNA, 19 nt, Artificial Sequence
  Description of Artificial Sequence: Synthetic oligonucleotide
  Antisense strand to SEQ ID NO: 1944558
uagaauaauagggacaucu

SEQ ID NO: 1944560 - RNA, 19 nt, Artificial Sequence
  Description of Artificial Sequence: Synthetic oligonucleotide
  Sense strand starting at position 1048 of SEQ ID NO: 1880133
uuaaguaacuaggauuucu

SEQ ID NO: 1944561 - RNA, 19 nt, Artificial Sequence
  Description of Artificial Sequence: Synthetic oligonucleotide
  Antisense strand to SEQ ID NO: 1944560
agaaauccuaguuacuuaa

SEQ ID NO: 1944562 - RNA, 19 nt, Artificial Sequence
  Description of Artificial Sequence: Synthetic oligonucleotide
  Sense strand starting at position 1089 of SEQ ID NO: 1880133
uguugaaacucguugugca

SEQ ID NO: 1944563 - RNA, 19 nt, Artificial Sequence
  Description of Artificial Sequence: Synthetic oligonucleotide
  Antisense strand to SEQ ID NO: 1944562
ugcacaacgaguuucaaca

SEQ ID NO: 1944564 - RNA, 19 nt, Artificial Sequence
  Description of Artificial Sequence: Synthetic oligonucleotide
  Sense strand starting at position 1090 of SEQ ID NO: 1880133
guugaaacucguugugcag

SEQ ID NO: 1944565 - RNA, 19 nt, Artificial Sequence
  Description of Artificial Sequence: Synthetic oligonucleotide
  Antisense strand to SEQ ID NO: 1944564
cugcacaacgaguuucaac

SEQ ID NO: 1944566 - RNA, 19 nt, Artificial Sequence
  Description of Artificial Sequence: Synthetic oligonucleotide
  Sense strand starting at position 1169 of SEQ ID NO: 1880133
uggcuaauaugguccacau

SEQ ID NO: 1944567 - RNA, 19 nt, Artificial Sequence
  Description of Artificial Sequence: Synthetic oligonucleotide
  Antisense strand to SEQ ID NO: 1944566
auguggaccauauuagcca

SEQ ID NO: 1944568 - RNA, 19 nt, Artificial Sequence
  Description of Artificial Sequence: Synthetic oligonucleotide
  Sense strand starting at position 1171 of SEQ ID NO: 1880133
gcuaauaugguccacauua

SEQ ID NO: 1944569 - RNA, 19 nt, Artificial Sequence
  Description of Artificial Sequence: Synthetic oligonucleotide
  Antisense strand to SEQ ID NO: 1944568
uaauguggaccauauuagc

SEQ ID NO: 1944570 - RNA, 19 nt, Artificial Sequence
  Description of Artificial Sequence: Synthetic oligonucleotide
  Sense strand starting at position 2285 of SEQ ID NO: 1880133
cggcgagucaaccacuauu

SEQ ID NO: 1944571 - RNA, 19 nt, Artificial Sequence
  Description of Artificial Sequence: Synthetic oligonucleotide
  Antisense strand to SEQ ID NO: 1944570
aauagugguugacucgccg

SEQ ID NO: 1944572 - RNA, 19 nt, Artificial Sequence
  Description of Artificial Sequence: Synthetic oligonucleotide
  Sense strand starting at position 2288 of SEQ ID NO: 1880133
cgagucaaccacuauucga

SEQ ID NO: 1944573 - RNA, 19 nt, Artificial Sequence
  Description of Artificial Sequence: Synthetic oligonucleotide
  Antisense strand to SEQ ID NO: 1944572
ucgaauagugguugacucg

SEQ ID NO: 1944574 - RNA, 19 nt, Artificial Sequence
  Description of Artificial Sequence: Synthetic oligonucleotide
  Sense strand starting at position 2355 of SEQ ID NO: 1880133
uguccuauguccgugcaua

SEQ ID NO: 1944575 - RNA, 19 nt, Artificial Sequence
  Description of Artificial Sequence: Synthetic oligonucleotide
  Antisense strand to SEQ ID NO: 1944574
uaugcacggacauaggaca

SEQ ID NO: 1944576 - RNA, 19 nt, Artificial Sequence
  Description of Artificial Sequence: Synthetic oligonucleotide
  Sense strand starting at position 2360 of SEQ ID NO: 1880133
uauguccgugcauauuauu

SEQ ID NO: 1944577 - RNA, 19 nt, Artificial Sequence
  Description of Artificial Sequence: Synthetic oligonucleotide
  Antisense strand to SEQ ID NO: 1944576
aauaauaugcacggacaua

SEQ ID NO: 1944578 - RNA, 19 nt, Artificial Sequence
  Description of Artificial Sequence: Synthetic oligonucleotide
  Sense strand starting at position 2366 of SEQ ID NO: 1880133
cgugcauauuauuuggcaa

SEQ ID NO: 1944579 - RNA, 19 nt, Artificial Sequence
  Description of Artificial Sequence: Synthetic oligonucleotide
  Antisense strand to SEQ ID NO: 1944578
uugccaaauaauaugcacg

SEQ ID NO: 1944580 - RNA, 19 nt, Artificial Sequence
  Description of Artificial Sequence: Synthetic oligonucleotide
  Sense strand starting at position 2368 of SEQ ID NO: 1880133
ugcauauuauuuggcaaua

SEQ ID NO: 1944581 - RNA, 19 nt, Artificial Sequence
  Description of Artificial Sequence: Synthetic oligonucleotide
  Antisense strand to SEQ ID NO: 1944580
uauugccaaauaauaugca

SEQ ID NO: 1944582 - RNA, 19 nt, Artificial Sequence
  Description of Artificial Sequence: Synthetic oligonucleotide
  Sense strand starting at position 2399 of SEQ ID NO: 1880133
aguauuuauacacguuagu

SEQ ID NO: 1944583 - RNA, 19 nt, Artificial Sequence
  Description of Artificial Sequence: Synthetic oligonucleotide
  Antisense strand to SEQ ID NO: 1944582
acuaacguguauaaauacu

SEQ ID NO: 1944584 - RNA, 19 nt, Artificial Sequence
  Description of Artificial Sequence: Synthetic oligonucleotide
  Sense strand starting at position 2515 of SEQ ID NO: 1880133
cugucuuuggugggagaga

SEQ ID NO: 1944585 - RNA, 19 nt, Artificial Sequence
  Description of Artificial Sequence: Synthetic oligonucleotide
  Antisense strand to SEQ ID NO: 1944584
ucucucccaccaaagacag

SEQ ID NO: 1944586 - RNA, 19 nt, Artificial Sequence
  Description of Artificial Sequence: Synthetic oligonucleotide
  Sense strand starting at position 2516 of SEQ ID NO: 1880133
ugucuuuggugggagagau

SEQ ID NO: 1944587 - RNA, 19 nt, Artificial Sequence
  Description of Artificial Sequence: Synthetic oligonucleotide
  Antisense strand to SEQ ID NO: 1944586
aucucucccaccaaagaca

SEQ ID NO: 1944588 - RNA, 19 nt, Artificial Sequence
  Description of Artificial Sequence: Synthetic oligonucleotide
  Sense strand starting at position 2526 of SEQ ID NO: 1880133
gggagagauuugcaucagu

SEQ ID NO: 1944589 - RNA, 19 nt, Artificial Sequence
  Description of Artificial Sequence: Synthetic oligonucleotide
  Antisense strand to SEQ ID NO: 1944588
acugaugcaaaucucuccc

SEQ ID NO: 1944590 - RNA, 19 nt, Artificial Sequence
  Description of Artificial Sequence: Synthetic oligonucleotide
  Sense strand starting at position 2574 of SEQ ID NO: 1880133
ucuuuagauuuaggaacaa

SEQ ID NO: 1944591 - RNA, 19 nt, Artificial Sequence
  Description of Artificial Sequence: Synthetic oligonucleotide
  Antisense strand to SEQ ID NO: 1944590
uuguuccuaaaucuaaaga

SEQ ID NO: 1944592 - RNA, 19 nt, Artificial Sequence
  Description of Artificial Sequence: Synthetic oligonucleotide
  Sense strand starting at position 2603 of SEQ ID NO: 1880133
cucugacaccuuuaaaggu

SEQ ID NO: 1944593 - RNA, 19 nt, Artificial Sequence
  Description of Artificial Sequence: Synthetic oligonucleotide
  Antisense strand to SEQ ID NO: 1944592
accuuuaaaggugucagag

SEQ ID NO: 1944594 - RNA, 19 nt, Artificial Sequence
  Description of Artificial Sequence: Synthetic oligonucleotide
  Sense strand starting at position 2731 of SEQ ID NO: 1880133
uaaggugucuugccacuaa

SEQ ID NO: 1944595 - RNA, 19 nt, Artificial Sequence
  Description of Artificial Sequence: Synthetic oligonucleotide
  Antisense strand to SEQ ID NO: 1944594
uuaguggcaagacaccuua

SEQ ID NO: 1944596 - RNA, 19 nt, Artificial Sequence
  Description of Artificial Sequence: Synthetic oligonucleotide
  Sense strand starting at position 2816 of SEQ ID NO: 1880133
gaugguaugggccgagaau

SEQ ID NO: 1944597 - RNA, 19 nt, Artificial Sequence
  Description of Artificial Sequence: Synthetic oligonucleotide
  Antisense strand to SEQ ID NO: 1944596
auucucggcccauaccauc

SEQ ID NO: 1944598 - RNA, 19 nt, Artificial Sequence
  Description of Artificial Sequence: Synthetic oligonucleotide
  Sense strand starting at position 3128 of SEQ ID NO: 1880133
gaugguauguaagcuccua

SEQ ID NO: 1944599 - RNA, 19 nt, Artificial Sequence
  Description of Artificial Sequence: Synthetic oligonucleotide
  Antisense strand to SEQ ID NO: 1944598
uaggagcuuacauaccauc

SEQ ID NO: 1944600 - RNA, 19 nt, Artificial Sequence
  Description of Artificial Sequence: Synthetic oligonucleotide
  Sense strand starting at position 3164 of SEQ ID NO: 1880133
aggguaacucugcaguacu

SEQ ID NO: 1944601 - RNA, 19 nt, Artificial Sequence
  Description of Artificial Sequence: Synthetic oligonucleotide
  Antisense strand to SEQ ID NO: 1944600
aguacugcagaguuacccu

SEQ ID NO: 1944602 - RNA, 19 nt, Artificial Sequence
  Description of Artificial Sequence: Synthetic oligonucleotide
  Sense strand starting at position 3189 of SEQ ID NO: 1880133
cgugcauguugauaaauuu

SEQ ID NO: 1944603 - RNA, 19 nt, Artificial Sequence
  Description of Artificial Sequence: Synthetic oligonucleotide
  Antisense strand to SEQ ID NO: 1944602
aaauuuaucaacaugcacg

SEQ ID NO: 1944604 - RNA, 19 nt, Artificial Sequence
  Description of Artificial Sequence: Synthetic oligonucleotide
  Sense strand starting at position 3274 of SEQ ID NO: 1880133
agaggaagcuuucccuuaa

SEQ ID NO: 1944605 - RNA, 19 nt, Artificial Sequence
  Description of Artificial Sequence: Synthetic oligonucleotide
  Antisense strand to SEQ ID NO: 1944604
uuaagggaaagcuuccucu

SEQ ID NO: 1944606 - RNA, 19 nt, Artificial Sequence
  Description of Artificial Sequence: Synthetic oligonucleotide
  Sense strand starting at position 3275 of SEQ ID NO: 1880133
gaggaagcuuucccuuaag

SEQ ID NO: 1944607 - RNA, 19 nt, Artificial Sequence
  Description of Artificial Sequence: Synthetic oligonucleotide
  Antisense strand to SEQ ID NO: 1944606
cuuaagggaaagcuuccuc

SEQ ID NO: 1944608 - RNA, 19 nt, Artificial Sequence
  Description of Artificial Sequence: Synthetic oligonucleotide
  Sense strand starting at position 3405 of SEQ ID NO: 1880133
ccuagaugggcugaucacu

SEQ ID NO: 1944609 - RNA, 19 nt, Artificial Sequence
  Description of Artificial Sequence: Synthetic oligonucleotide
  Antisense strand to SEQ ID NO: 1944608
agugaucagcccaucuagg

SEQ ID NO: 1944610 - RNA, 19 nt, Artificial Sequence
  Description of Artificial Sequence: Synthetic oligonucleotide
  Sense strand starting at position 3721 of SEQ ID NO: 1880133
guggauaaguacuugugua

SEQ ID NO: 1944611 - RNA, 19 nt, Artificial Sequence
  Description of Artificial Sequence: Synthetic oligonucleotide
  Antisense strand to SEQ ID NO: 1944610
uacacaaguacuuauccac

SEQ ID NO: 1944612 - RNA, 19 nt, Artificial Sequence
  Description of Artificial Sequence: Synthetic oligonucleotide
  Sense strand starting at position 3722 of SEQ ID NO: 1880133
uggauaaguacuuguguaa

SEQ ID NO: 1944613 - RNA, 19 nt, Artificial Sequence
  Description of Artificial Sequence: Synthetic oligonucleotide
  Antisense strand to SEQ ID NO: 1944612
uuacacaaguacuuaucca

SEQ ID NO: 1944614 - RNA, 19 nt, Artificial Sequence
  Description of Artificial Sequence: Synthetic oligonucleotide
  Sense strand starting at position 3725 of SEQ ID NO: 1880133
auaaguacuuguguaacca

SEQ ID NO: 1944615 - RNA, 19 nt, Artificial Sequence
  Description of Artificial Sequence: Synthetic oligonucleotide
  Antisense strand to SEQ ID NO: 1944614
ugguuacacaaguacuuau

SEQ ID NO: 1944616 - RNA, 19 nt, Artificial Sequence
  Description of Artificial Sequence: Synthetic oligonucleotide
  Sense strand starting at position 3750 of SEQ ID NO: 1880133
ggcuucuccuugccugaua

SEQ ID NO: 1944617 - RNA, 19 nt, Artificial Sequence
  Description of Artificial Sequence: Synthetic oligonucleotide
  Antisense strand to SEQ ID NO: 1944616
uaucaggcaaggagaagcc

SEQ ID NO: 1944618 - RNA, 19 nt, Artificial Sequence
  Description of Artificial Sequence: Synthetic oligonucleotide
  Sense strand starting at position 3953 of SEQ ID NO: 1880133
cugggucagcgaugaaauc

SEQ ID NO: 1944619 - RNA, 19 nt, Artificial Sequence
  Description of Artificial Sequence: Synthetic oligonucleotide
  Antisense strand to SEQ ID NO: 1944618
gauuucaucgcugacccag

SEQ ID NO: 1944620 - RNA, 19 nt, Artificial Sequence
  Description of Artificial Sequence: Synthetic oligonucleotide
  Sense strand starting at position 3954 of SEQ ID NO: 1880133
ugggucagcgaugaaauca

SEQ ID NO: 1944621 - RNA, 19 nt, Artificial Sequence
  Description of Artificial Sequence: Synthetic oligonucleotide
  Antisense strand to SEQ ID NO: 1944620
ugauuucaucgcugaccca

SEQ ID NO: 1944622 - RNA, 19 nt, Artificial Sequence
  Description of Artificial Sequence: Synthetic oligonucleotide
  Sense strand starting at position 4 of SEQ ID NO: 1880134
ucauuagauugguuuguau

SEQ ID NO: 1944623 - RNA, 19 nt, Artificial Sequence
  Description of Artificial Sequence: Synthetic oligonucleotide
  Antisense strand to SEQ ID NO: 1944622
auacaaaccaaucuaauga

SEQ ID NO: 1944624 - RNA, 19 nt, Artificial Sequence
  Description of Artificial Sequence: Synthetic oligonucleotide
  Sense strand starting at position 212 of SEQ ID NO: 1880134
acugauggauaucucaguu

SEQ ID NO: 1944625 - RNA, 19 nt, Artificial Sequence
  Description of Artificial Sequence: Synthetic oligonucleotide
  Antisense strand to SEQ ID NO: 1944624
aacugagauauccaucagu

SEQ ID NO: 1944626 - RNA, 19 nt, Artificial Sequence
  Description of Artificial Sequence: Synthetic oligonucleotide
  Sense strand starting at position 216 of SEQ ID NO: 1880134
auggauaucucaguuguuu

SEQ ID NO: 1944627 - RNA, 19 nt, Artificial Sequence
  Description of Artificial Sequence: Synthetic oligonucleotide
  Antisense strand to SEQ ID NO: 1944626
aaacaacugagauauccau

SEQ ID NO: 1944628 - RNA, 19 nt, Artificial Sequence
  Description of Artificial Sequence: Synthetic oligonucleotide
  Sense strand starting at position 266 of SEQ ID NO: 1880134
uaugaacacgcauguguaa

SEQ ID NO: 1944629 - RNA, 19 nt, Artificial Sequence
  Description of Artificial Sequence: Synthetic oligonucleotide
  Antisense strand to SEQ ID NO: 1944628
uuacacaugcguguucaua

SEQ ID NO: 1944630 - RNA, 19 nt, Artificial Sequence
  Description of Artificial Sequence: Synthetic oligonucleotide
  Sense strand starting at position 326 of SEQ ID NO: 1880134
cuaggaguagaauggcuau

SEQ ID NO: 1944631 - RNA, 19 nt, Artificial Sequence
  Description of Artificial Sequence: Synthetic oligonucleotide
  Antisense strand to SEQ ID NO: 1944630
auagccauucuacuccuag

SEQ ID NO: 1944632 - RNA, 19 nt, Artificial Sequence
  Description of Artificial Sequence: Synthetic oligonucleotide
  Sense strand starting at position 329 of SEQ ID NO: 1880134
ggaguagaauggcuauauc

SEQ ID NO: 1944633 - RNA, 19 nt, Artificial Sequence
  Description of Artificial Sequence: Synthetic oligonucleotide
  Antisense strand to SEQ ID NO: 1944632
gauauagccauucuacucc

SEQ ID NO: 1944634 - RNA, 19 nt, Artificial Sequence
  Description of Artificial Sequence: Synthetic oligonucleotide
  Sense strand starting at position 332 of SEQ ID NO: 1880134
guagaauggcuauaucaua

SEQ ID NO: 1944635 - RNA, 19 nt, Artificial Sequence
  Description of Artificial Sequence: Synthetic oligonucleotide
  Antisense strand to SEQ ID NO: 1944634
uaugauauagccauucuac

SEQ ID NO: 1944636 - RNA, 19 nt, Artificial Sequence
  Description of Artificial Sequence: Synthetic oligonucleotide
  Sense strand starting at position 408 of SEQ ID NO: 1880134
auuccaaugaacgguguau

SEQ ID NO: 1944637 - RNA, 19 nt, Artificial Sequence
  Description of Artificial Sequence: Synthetic oligonucleotide
  Antisense strand to SEQ ID NO: 1944636
auacaccguucauuggaau

SEQ ID NO: 1944638 - RNA, 19 nt, Artificial Sequence
  Description of Artificial Sequence: Synthetic oligonucleotide
  Sense strand starting at position 410 of SEQ ID NO: 1880134
uccaaugaacgguguauaa

SEQ ID NO: 1944639 - RNA, 19 nt, Artificial Sequence
  Description of Artificial Sequence: Synthetic oligonucleotide
  Antisense strand to SEQ ID NO: 1944638
uuauacaccguucauugga

SEQ ID NO: 1944640 - RNA, 19 nt, Artificial Sequence
  Description of Artificial Sequence: Synthetic oligonucleotide
  Sense strand starting at position 434 of SEQ ID NO: 1880134
ccaguuguuccacagcuua

SEQ ID NO: 1944641 - RNA, 19 nt, Artificial Sequence
  Description of Artificial Sequence: Synthetic oligonucleotide
  Antisense strand to SEQ ID NO: 1944640
uaagcuguggaacaacugg

SEQ ID NO: 1944642 - RNA, 19 nt, Artificial Sequence
  Description of Artificial Sequence: Synthetic oligonucleotide
  Sense strand starting at position 458 of SEQ ID NO: 1880134
cacuuaguauuggcaguuu

SEQ ID NO: 1944643 - RNA, 19 nt, Artificial Sequence
  Description of Artificial Sequence: Synthetic oligonucleotide
  Antisense strand to SEQ ID NO: 1944642
aaacugccaauacuaagug

SEQ ID NO: 1944644 - RNA, 19 nt, Artificial Sequence
  Description of Artificial Sequence: Synthetic oligonucleotide
  Sense strand starting at position 575 of SEQ ID NO: 1880134
ccuaucugccacugguaua

SEQ ID NO: 1944645 - RNA, 19 nt, Artificial Sequence
  Description of Artificial Sequence: Synthetic oligonucleotide
  Antisense strand to SEQ ID NO: 1944644
uauaccaguggcagauagg

SEQ ID NO: 1944646 - RNA, 19 nt, Artificial Sequence
  Description of Artificial Sequence: Synthetic oligonucleotide
  Sense strand starting at position 607 of SEQ ID NO: 1880134
guugucuuccuaugauuaa

SEQ ID NO: 1944647 - RNA, 19 nt, Artificial Sequence
  Description of Artificial Sequence: Synthetic oligonucleotide
  Antisense strand to SEQ ID NO: 1944646
uuaaucauaggaagacaac

SEQ ID NO: 1944648 - RNA, 19 nt, Artificial Sequence
  Description of Artificial Sequence: Synthetic oligonucleotide
  Sense strand starting at position 886 of SEQ ID NO: 1880134
gaaguaguagccugagcaa

SEQ ID NO: 1944649 - RNA, 19 nt, Artificial Sequence
  Description of Artificial Sequence: Synthetic oligonucleotide
  Antisense strand to SEQ ID NO: 1944648
uugcucaggcuacuacuuc

SEQ ID NO: 1944650 - RNA, 19 nt, Artificial Sequence
  Description of Artificial Sequence: Synthetic oligonucleotide
  Sense strand starting at position 889 of SEQ ID NO: 1880134
guaguagccugagcaacau

SEQ ID NO: 1944651 - RNA, 19 nt, Artificial Sequence
  Description of Artificial Sequence: Synthetic oligonucleotide
  Antisense strand to SEQ ID NO: 1944650
auguugcucaggcuacuac

SEQ ID NO: 1944652 - RNA, 19 nt, Artificial Sequence
  Description of Artificial Sequence: Synthetic oligonucleotide
  Sense strand starting at position 906 of SEQ ID NO: 1880134
augugagacccugagucua

SEQ ID NO: 1944653 - RNA, 19 nt, Artificial Sequence
  Description of Artificial Sequence: Synthetic oligonucleotide
  Antisense strand to SEQ ID NO: 1944652
uagacucagggucucacau

SEQ ID NO: 1944654 - RNA, 19 nt, Artificial Sequence
  Description of Artificial Sequence: Synthetic oligonucleotide
  Sense strand starting at position 950 of SEQ ID NO: 1880134
agagaucuuuauguauucu

SEQ ID NO: 1944655 - RNA, 19 nt, Artificial Sequence
  Description of Artificial Sequence: Synthetic oligonucleotide
  Antisense strand to SEQ ID NO: 1944654
agaauacauaaagaucucu

SEQ ID NO: 1944656 - RNA, 19 nt, Artificial Sequence
  Description of Artificial Sequence: Synthetic oligonucleotide
  Sense strand starting at position 978 of SEQ ID NO: 1880134
aucagauauguguauuaca

SEQ ID NO: 1944657 - RNA, 19 nt, Artificial Sequence
  Description of Artificial Sequence: Synthetic oligonucleotide
  Antisense strand to SEQ ID NO: 1944656
uguaauacacauaucugau

SEQ ID NO: 1944658 - RNA, 19 nt, Artificial Sequence
  Description of Artificial Sequence: Synthetic oligonucleotide
  Sense strand starting at position 2098 of SEQ ID NO: 1880134
auaaauuucuuugagagcu

SEQ ID NO: 1944659 - RNA, 19 nt, Artificial Sequence
  Description of Artificial Sequence: Synthetic oligonucleotide
  Antisense strand to SEQ ID NO: 1944658
agcucucaaagaaauuuau

SEQ ID NO: 1944660 - RNA, 19 nt, Artificial Sequence
  Description of Artificial Sequence: Synthetic oligonucleotide
  Sense strand starting at position 2244 of SEQ ID NO: 1880134
ucucucggcccuuaaauaa

SEQ ID NO: 1944661 - RNA, 19 nt, Artificial Sequence
  Description of Artificial Sequence: Synthetic oligonucleotide
  Antisense strand to SEQ ID NO: 1944660
uuauuuaagggccgagaga

SEQ ID NO: 1944662 - RNA, 19 nt, Artificial Sequence
  Description of Artificial Sequence: Synthetic oligonucleotide
  Sense strand starting at position 2550 of SEQ ID NO: 1880134
aggucacaauguuccauua

SEQ ID NO: 1944663 - RNA, 19 nt, Artificial Sequence
  Description of Artificial Sequence: Synthetic oligonucleotide
  Antisense strand to SEQ ID NO: 1944662
uaauggaacauugugaccu

SEQ ID NO: 1944664 - RNA, 19 nt, Artificial Sequence
  Description of Artificial Sequence: Synthetic oligonucleotide
  Sense strand starting at position 2603 of SEQ ID NO: 1880134
uggucacauuguuuaaaua

SEQ ID NO: 1944665 - RNA, 19 nt, Artificial Sequence
  Description of Artificial Sequence: Synthetic oligonucleotide
  Antisense strand to SEQ ID NO: 1944664
uauuuaaacaaugugacca

SEQ ID NO: 1944666 - RNA, 19 nt, Artificial Sequence
  Description of Artificial Sequence: Synthetic oligonucleotide
  Sense strand starting at position 2604 of SEQ ID NO: 1880134
ggucacauuguuuaaauau

SEQ ID NO: 1944667 - RNA, 19 nt, Artificial Sequence
  Description of Artificial Sequence: Synthetic oligonucleotide
  Antisense strand to SEQ ID NO: 1944666
auauuuaaacaaugugacc

SEQ ID NO: 1944668 - RNA, 19 nt, Artificial Sequence
  Description of Artificial Sequence: Synthetic oligonucleotide
  Sense strand starting at position 2657 of SEQ ID NO: 1880134
acaauuaacguguacuaau

SEQ ID NO: 1944669 - RNA, 19 nt, Artificial Sequence
  Description of Artificial Sequence: Synthetic oligonucleotide
  Antisense strand to SEQ ID NO: 1944668
auuaguacacguuaauugu

SEQ ID NO: 1944670 - RNA, 19 nt, Artificial Sequence
  Description of Artificial Sequence: Synthetic oligonucleotide
  Sense strand starting at position 2756 of SEQ ID NO: 1880134
gagguaucaguuugcaaac

SEQ ID NO: 1944671 - RNA, 19 nt, Artificial Sequence
  Description of Artificial Sequence: Synthetic oligonucleotide
  Antisense strand to SEQ ID NO: 1944670
guuugcaaacugauaccuc

SEQ ID NO: 1944672 - RNA, 19 nt, Artificial Sequence
  Description of Artificial Sequence: Synthetic oligonucleotide
  Sense strand starting at position 2757 of SEQ ID NO: 1880134
agguaucaguuugcaaaca

SEQ ID NO: 1944673 - RNA, 19 nt, Artificial Sequence
  Description of Artificial Sequence: Synthetic oligonucleotide
  Antisense strand to SEQ ID NO: 1944672
uguuugcaaacugauaccu

SEQ ID NO: 1944674 - RNA, 19 nt, Artificial Sequence
  Description of Artificial Sequence: Synthetic oligonucleotide
  Sense strand starting at position 2806 of SEQ ID NO: 1880134
caccaaugcuuugugguaa

SEQ ID NO: 1944675 - RNA, 19 nt, Artificial Sequence
  Description of Artificial Sequence: Synthetic oligonucleotide
  Antisense strand to SEQ ID NO: 1944674
uuaccacaaagcauuggug

SEQ ID NO: 1944676 - RNA, 19 nt, Artificial Sequence
  Description of Artificial Sequence: Synthetic oligonucleotide
  Sense strand starting at position 2817 of SEQ ID NO: 1880134
ugugguaacccacaucuau

SEQ ID NO: 1944677 - RNA, 19 nt, Artificial Sequence
  Description of Artificial Sequence: Synthetic oligonucleotide
  Antisense strand to SEQ ID NO: 1944676
auagauguggguuaccaca

SEQ ID NO: 1944678 - RNA, 19 nt, Artificial Sequence
  Description of Artificial Sequence: Synthetic oligonucleotide
  Sense strand starting at position 2981 of SEQ ID NO: 1880134
gcugguuaacuuuaauucu

SEQ ID NO: 1944679 - RNA, 19 nt, Artificial Sequence
  Description of Artificial Sequence: Synthetic oligonucleotide
  Antisense strand to SEQ ID NO: 1944678
agaauuaaaguuaaccagc

SEQ ID NO: 1944680 - RNA, 19 nt, Artificial Sequence
  Description of Artificial Sequence: Synthetic oligonucleotide
  Sense strand starting at position 2984 of SEQ ID NO: 1880134
gguuaacuuuaauucuaag

SEQ ID NO: 1944681 - RNA, 19 nt, Artificial Sequence
  Description of Artificial Sequence: Synthetic oligonucleotide
  Antisense strand to SEQ ID NO: 1944680
cuuagaauuaaaguuaacc

SEQ ID NO: 1944682 - RNA, 19 nt, Artificial Sequence
  Description of Artificial Sequence: Synthetic oligonucleotide
  Sense strand starting at position 3347 of SEQ ID NO: 1880134
ggccauacuuucguaacaa

SEQ ID NO: 1944683 - RNA, 19 nt, Artificial Sequence
  Description of Artificial Sequence: Synthetic oligonucleotide
  Antisense strand to SEQ ID NO: 1944682
uuguuacgaaaguauggcc

SEQ ID NO: 1944684 - RNA, 19 nt, Artificial Sequence
  Description of Artificial Sequence: Synthetic oligonucleotide
  Sense strand starting at position 3435 of SEQ ID NO: 1880134
uuaacugagcugcauauaa

SEQ ID NO: 1944685 - RNA, 19 nt, Artificial Sequence
  Description of Artificial Sequence: Synthetic oligonucleotide
  Antisense strand to SEQ ID NO: 1944684
uuauaugcagcucaguuaa

SEQ ID NO: 1944686 - RNA, 19 nt, Artificial Sequence
  Description of Artificial Sequence: Synthetic oligonucleotide
  Sense strand starting at position 3442 of SEQ ID NO: 1880134
agcugcauauaauuagaga

SEQ ID NO: 1944687 - RNA, 19 nt, Artificial Sequence
  Description of Artificial Sequence: Synthetic oligonucleotide
  Antisense strand to SEQ ID NO: 1944686
ucucuaauuauaugcagcu

SEQ ID NO: 1944688 - RNA, 19 nt, Artificial Sequence
  Description of Artificial Sequence: Synthetic oligonucleotide
  Sense strand starting at position 3456 of SEQ ID NO: 1880134
agagaccuaucucaagaca

SEQ ID NO: 1944689 - RNA, 19 nt, Artificial Sequence
  Description of Artificial Sequence: Synthetic oligonucleotide
  Antisense strand to SEQ ID NO: 1944688
ugucuugagauaggucucu

SEQ ID NO: 1944690 - RNA, 19 nt, Artificial Sequence
  Description of Artificial Sequence: Synthetic oligonucleotide
  Sense strand starting at position 3623 of SEQ ID NO: 1880134
cuguacuagcaucauuaua

SEQ ID NO: 1944691 - RNA, 19 nt, Artificial Sequence
  Description of Artificial Sequence: Synthetic oligonucleotide
  Antisense strand to SEQ ID NO: 1944690
uauaaugaugcuaguacag

SEQ ID NO: 1944692 - RNA, 19 nt, Artificial Sequence
  Description of Artificial Sequence: Synthetic oligonucleotide
  Sense strand starting at position 3625 of SEQ ID NO: 1880134
guacuagcaucauuauauc

SEQ ID NO: 1944693 - RNA, 19 nt, Artificial Sequence
  Description of Artificial Sequence: Synthetic oligonucleotide
  Antisense strand to SEQ ID NO: 1944692
gauauaaugaugcuaguac

SEQ ID NO: 1944694 - RNA, 19 nt, Artificial Sequence
  Description of Artificial Sequence: Synthetic oligonucleotide
  Sense strand starting at position 3699 of SEQ ID NO: 1880134
agcucaucuuuggcaagau

SEQ ID NO: 1944695 - RNA, 19 nt, Artificial Sequence
  Description of Artificial Sequence: Synthetic oligonucleotide
  Antisense strand to SEQ ID NO: 1944694
aucuugccaaagaugagcu

SEQ ID NO: 1944696 - RNA, 19 nt, Artificial Sequence
  Description of Artificial Sequence: Synthetic oligonucleotide
  Sense strand starting at position 3757 of SEQ ID NO: 1880134
ccuagcacuccagagaguu

SEQ ID NO: 1944697 - RNA, 19 nt, Artificial Sequence
  Description of Artificial Sequence: Synthetic oligonucleotide
  Antisense strand to SEQ ID NO: 1944696
aacucucuggagugcuagg

SEQ ID NO: 1944698 - RNA, 19 nt, Artificial Sequence
  Description of Artificial Sequence: Synthetic oligonucleotide
  Sense strand starting at position 3781 of SEQ ID NO: 1880134
uucucaucacaucagugau

SEQ ID NO: 1944699 - RNA, 19 nt, Artificial Sequence
  Description of Artificial Sequence: Synthetic oligonucleotide
  Antisense strand to SEQ ID NO: 1944698
aucacugaugugaugagaa

SEQ ID NO: 1944700 - RNA, 19 nt, Artificial Sequence
  Description of Artificial Sequence: Synthetic oligonucleotide
  Sense strand starting at position 3784 of SEQ ID NO: 1880134
ucaucacaucagugaucuu

SEQ ID NO: 1944701 - RNA, 19 nt, Artificial Sequence
  Description of Artificial Sequence: Synthetic oligonucleotide
  Antisense strand to SEQ ID NO: 1944700
aagaucacugaugugauga

SEQ ID NO: 1944702 - RNA, 19 nt, Artificial Sequence
  Description of Artificial Sequence: Synthetic oligonucleotide
  Sense strand starting at position 10 of SEQ ID NO: 1880135
acagaauccuuagugguuu

SEQ ID NO: 1944703 - RNA, 19 nt, Artificial Sequence
  Description of Artificial Sequence: Synthetic oligonucleotide
  Antisense strand to SEQ ID NO: 1944702
aaaccacuaaggauucugu

SEQ ID NO: 1944704 - RNA, 19 nt, Artificial Sequence
  Description of Artificial Sequence: Synthetic oligonucleotide
  Sense strand starting at position 119 of SEQ ID NO: 1880135
cugucagcucaauacaaga

SEQ ID NO: 1944705 - RNA, 19 nt, Artificial Sequence
  Description of Artificial Sequence: Synthetic oligonucleotide
  Antisense strand to SEQ ID NO: 1944704
ucuuguauugagcugacag

SEQ ID NO: 1944706 - RNA, 19 nt, Artificial Sequence
  Description of Artificial Sequence: Synthetic oligonucleotide
  Sense strand starting at position 266 of SEQ ID NO: 1880135
aggugagguagguaucauu

SEQ ID NO: 1944707 - RNA, 19 nt, Artificial Sequence
  Description of Artificial Sequence: Synthetic oligonucleotide
  Antisense strand to SEQ ID NO: 1944706
aaugauaccuaccucaccu

SEQ ID NO: 1944708 - RNA, 19 nt, Artificial Sequence
  Description of Artificial Sequence: Synthetic oligonucleotide
  Sense strand starting at position 364 of SEQ ID NO: 1880135
ccauguuuggccuauggaa

SEQ ID NO: 1944709 - RNA, 19 nt, Artificial Sequence
  Description of Artificial Sequence: Synthetic oligonucleotide
  Antisense strand to SEQ ID NO: 1944708
uuccauaggccaaacaugg

SEQ ID NO: 1944710 - RNA, 19 nt, Artificial Sequence
  Description of Artificial Sequence: Synthetic oligonucleotide
  Sense strand starting at position 482 of SEQ ID NO: 1880135
aaguaugcugucuggauaa

SEQ ID NO: 1944711 - RNA, 19 nt, Artificial Sequence
  Description of Artificial Sequence: Synthetic oligonucleotide
  Antisense strand to SEQ ID NO: 1944710
uuauccagacagcauacuu

SEQ ID NO: 1944712 - RNA, 19 nt, Artificial Sequence
  Description of Artificial Sequence: Synthetic oligonucleotide
  Sense strand starting at position 484 of SEQ ID NO: 1880135
guaugcugucuggauaaac

SEQ ID NO: 1944713 - RNA, 19 nt, Artificial Sequence
  Description of Artificial Sequence: Synthetic oligonucleotide
  Antisense strand to SEQ ID NO: 1944712
guuuauccagacagcauac

SEQ ID NO: 1944714 - RNA, 19 nt, Artificial Sequence
  Description of Artificial Sequence: Synthetic oligonucleotide
  Sense strand starting at position 580 of SEQ ID NO: 1880135
gacagaaccgccuagaagu

SEQ ID NO: 1944715 - RNA, 19 nt, Artificial Sequence
  Description of Artificial Sequence: Synthetic oligonucleotide
  Antisense strand to SEQ ID NO: 1944714
acuucuaggcgguucuguc

SEQ ID NO: 1944716 - RNA, 19 nt, Artificial Sequence
  Description of Artificial Sequence: Synthetic oligonucleotide
  Sense strand starting at position 588 of SEQ ID NO: 1880135
cgccuagaaguauguauuu

SEQ ID NO: 1944717 - RNA, 19 nt, Artificial Sequence
  Description of Artificial Sequence: Synthetic oligonucleotide
  Antisense strand to SEQ ID NO: 1944716
aaauacauacuucuaggcg

SEQ ID NO: 1944718 - RNA, 19 nt, Artificial Sequence
  Description of Artificial Sequence: Synthetic oligonucleotide
  Sense strand starting at position 880 of SEQ ID NO: 1880135
guuauacuauguccagauu

SEQ ID NO: 1944719 - RNA, 19 nt, Artificial Sequence
  Description of Artificial Sequence: Synthetic oligonucleotide
  Antisense strand to SEQ ID NO: 1944718
aaucuggacauaguauaac

SEQ ID NO: 1944720 - RNA, 19 nt, Artificial Sequence
  Description of Artificial Sequence: Synthetic oligonucleotide
  Sense strand starting at position 883 of SEQ ID NO: 1880135
auacuauguccagauugug

SEQ ID NO: 1944721 - RNA, 19 nt, Artificial Sequence
  Description of Artificial Sequence: Synthetic oligonucleotide
  Antisense strand to SEQ ID NO: 1944720
cacaaucuggacauaguau

SEQ ID NO: 1944722 - RNA, 19 nt, Artificial Sequence
  Description of Artificial Sequence: Synthetic oligonucleotide
  Sense strand starting at position 886 of SEQ ID NO: 1880135
cuauguccagauugugaga

SEQ ID NO: 1944723 - RNA, 19 nt, Artificial Sequence
  Description of Artificial Sequence: Synthetic oligonucleotide
  Antisense strand to SEQ ID NO: 1944722
ucucacaaucuggacauag

SEQ ID NO: 1944724 - RNA, 19 nt, Artificial Sequence
  Description of Artificial Sequence: Synthetic oligonucleotide
  Sense strand starting at position 1008 of SEQ ID NO: 1880135
cugguuaguuugucagaag

SEQ ID NO: 1944725 - RNA, 19 nt, Artificial Sequence
  Description of Artificial Sequence: Synthetic oligonucleotide
  Antisense strand to SEQ ID NO: 1944724
cuucugacaaacuaaccag

SEQ ID NO: 1944726 - RNA, 19 nt, Artificial Sequence
  Description of Artificial Sequence: Synthetic oligonucleotide
  Sense strand starting at position 1052 of SEQ ID NO: 1880135
aagucuugggaacgauauu

SEQ ID NO: 1944727 - RNA, 19 nt, Artificial Sequence
  Description of Artificial Sequence: Synthetic oligonucleotide
  Antisense strand to SEQ ID NO: 1944726
aauaucguucccaagacuu

SEQ ID NO: 1944728 - RNA, 19 nt, Artificial Sequence
  Description of Artificial Sequence: Synthetic oligonucleotide
  Sense strand starting at position 1119 of SEQ ID NO: 1880135
uguauugcaucccuagaaa

SEQ ID NO: 1944729 - RNA, 19 nt, Artificial Sequence
  Description of Artificial Sequence: Synthetic oligonucleotide
  Antisense strand to SEQ ID NO: 1944728
uuucuagggaugcaauaca

SEQ ID NO: 1944730 - RNA, 19 nt, Artificial Sequence
  Description of Artificial Sequence: Synthetic oligonucleotide
  Sense strand starting at position 1209 of SEQ ID NO: 1880135
ugucaauaugacgaaguca

SEQ ID NO: 1944731 - RNA, 19 nt, Artificial Sequence
  Description of Artificial Sequence: Synthetic oligonucleotide
  Antisense strand to SEQ ID NO: 1944730
ugacuucgucauauugaca

SEQ ID NO: 1944732 - RNA, 19 nt, Artificial Sequence
  Description of Artificial Sequence: Synthetic oligonucleotide
  Sense strand starting at position 1221 of SEQ ID NO: 1880135
gaagucaaaugguugggau

SEQ ID NO: 1944733 - RNA, 19 nt, Artificial Sequence
  Description of Artificial Sequence: Synthetic oligonucleotide
  Antisense strand to SEQ ID NO: 1944732
aucccaaccauuugacuuc

SEQ ID NO: 1944734 - RNA, 19 nt, Artificial Sequence
  Description of Artificial Sequence: Synthetic oligonucleotide
  Sense strand starting at position 1222 of SEQ ID NO: 1880135
aagucaaaugguugggaua

SEQ ID NO: 1944735 - RNA, 19 nt, Artificial Sequence
  Description of Artificial Sequence: Synthetic oligonucleotide
  Antisense strand to SEQ ID NO: 1944734
uaucccaaccauuugacuu

SEQ ID NO: 1944736 - RNA, 19 nt, Artificial Sequence
  Description of Artificial Sequence: Synthetic oligonucleotide
  Sense strand starting at position 1265 of SEQ ID NO: 1880135
cuagaucuuugaguugcaa

SEQ ID NO: 1944737 - RNA, 19 nt, Artificial Sequence
  Description of Artificial Sequence: Synthetic oligonucleotide
  Antisense strand to SEQ ID NO: 1944736
uugcaacucaaagaucuag

SEQ ID NO: 1944738 - RNA, 19 nt, Artificial Sequence
  Description of Artificial Sequence: Synthetic oligonucleotide
  Sense strand starting at position 1396 of SEQ ID NO: 1880135
cagcuagaaguuggacaau

SEQ ID NO: 1944739 - RNA, 19 nt, Artificial Sequence
  Description of Artificial Sequence: Synthetic oligonucleotide
  Antisense strand to SEQ ID NO: 1944738
auuguccaacuucuagcug

SEQ ID NO: 1944740 - RNA, 19 nt, Artificial Sequence
  Description of Artificial Sequence: Synthetic oligonucleotide
  Sense strand starting at position 1408 of SEQ ID NO: 1880135
ggacaaugacuuuggagca

SEQ ID NO: 1944741 - RNA, 19 nt, Artificial Sequence
  Description of Artificial Sequence: Synthetic oligonucleotide
  Antisense strand to SEQ ID NO: 1944740
ugcuccaaagucauugucc

SEQ ID NO: 1944742 - RNA, 19 nt, Artificial Sequence
  Description of Artificial Sequence: Synthetic oligonucleotide
  Sense strand starting at position 1468 of SEQ ID NO: 1880135
ggugauacucuugagagca

SEQ ID NO: 1944743 - RNA, 19 nt, Artificial Sequence
  Description of Artificial Sequence: Synthetic oligonucleotide
  Antisense strand to SEQ ID NO: 1944742
ugcucucaagaguaucacc

SEQ ID NO: 1944744 - RNA, 19 nt, Artificial Sequence
  Description of Artificial Sequence: Synthetic oligonucleotide
  Sense strand starting at position 1523 of SEQ ID NO: 1880135
cgaaacaaugccggaaaga

SEQ ID NO: 1944745 - RNA, 19 nt, Artificial Sequence
  Description of Artificial Sequence: Synthetic oligonucleotide
  Antisense strand to SEQ ID NO: 1944744
ucuuuccggcauuguuucg

SEQ ID NO: 1944746 - RNA, 19 nt, Artificial Sequence
  Description of Artificial Sequence: Synthetic oligonucleotide
  Sense strand starting at position 1554 of SEQ ID NO: 1880135
guacuuacacauugauguu

SEQ ID NO: 1944747 - RNA, 19 nt, Artificial Sequence
  Description of Artificial Sequence: Synthetic oligonucleotide
  Antisense strand to SEQ ID NO: 1944746
aacaucaauguguaaguac

SEQ ID NO: 1944748 - RNA, 19 nt, Artificial Sequence
  Description of Artificial Sequence: Synthetic oligonucleotide
  Sense strand starting at position 1574 of SEQ ID NO: 1880135
gucugugaucuuuauaacu

SEQ ID NO: 1944749 - RNA, 19 nt, Artificial Sequence
  Description of Artificial Sequence: Synthetic oligonucleotide
  Antisense strand to SEQ ID NO: 1944748
aguuauaaagaucacagac

SEQ ID NO: 1944750 - RNA, 19 nt, Artificial Sequence
  Description of Artificial Sequence: Synthetic oligonucleotide
  Sense strand starting at position 1592 of SEQ ID NO: 1880135
ugaacauuagcuugacaaa

SEQ ID NO: 1944751 - RNA, 19 nt, Artificial Sequence
  Description of Artificial Sequence: Synthetic oligonucleotide
  Antisense strand to SEQ ID NO: 1944750
uuugucaagcuaauguuca

SEQ ID NO: 1944752 - RNA, 19 nt, Artificial Sequence
  Description of Artificial Sequence: Synthetic oligonucleotide
  Sense strand starting at position 1736 of SEQ ID NO: 1880135
gccaaaggauaucuuucuu

SEQ ID NO: 1944753 - RNA, 19 nt, Artificial Sequence
  Description of Artificial Sequence: Synthetic oligonucleotide
  Antisense strand to SEQ ID NO: 1944752
aagaaagauauccuuuggc

SEQ ID NO: 1944754 - RNA, 19 nt, Artificial Sequence
  Description of Artificial Sequence: Synthetic oligonucleotide
  Sense strand starting at position 2168 of SEQ ID NO: 1880135
ggccacuugucaguauuua

SEQ ID NO: 1944755 - RNA, 19 nt, Artificial Sequence
  Description of Artificial Sequence: Synthetic oligonucleotide
  Antisense strand to SEQ ID NO: 1944754
uaaauacugacaaguggcc

SEQ ID NO: 1944756 - RNA, 19 nt, Artificial Sequence
  Description of Artificial Sequence: Synthetic oligonucleotide
  Sense strand starting at position 2692 of SEQ ID NO: 1880135
acaguuuguccucagugac

SEQ ID NO: 1944757 - RNA, 19 nt, Artificial Sequence
  Description of Artificial Sequence: Synthetic oligonucleotide
  Antisense strand to SEQ ID NO: 1944756
gucacugaggacaaacugu

SEQ ID NO: 1944758 - RNA, 19 nt, Artificial Sequence
  Description of Artificial Sequence: Synthetic oligonucleotide
  Sense strand starting at position 2712 of SEQ ID NO: 1880135
ggcuuuguucuggaagggu

SEQ ID NO: 1944759 - RNA, 19 nt, Artificial Sequence
  Description of Artificial Sequence: Synthetic oligonucleotide
  Antisense strand to SEQ ID NO: 1944758
acccuuccagaacaaagcc

SEQ ID NO: 1944760 - RNA, 19 nt, Artificial Sequence
  Description of Artificial Sequence: Synthetic oligonucleotide
  Sense strand starting at position 2715 of SEQ ID NO: 1880135
uuuguucuggaaggguaua

SEQ ID NO: 1944761 - RNA, 19 nt, Artificial Sequence
  Description of Artificial Sequence: Synthetic oligonucleotide
  Antisense strand to SEQ ID NO: 1944760
uauacccuuccagaacaaa

SEQ ID NO: 1944762 - RNA, 19 nt, Artificial Sequence
  Description of Artificial Sequence: Synthetic oligonucleotide
  Sense strand starting at position 2770 of SEQ ID NO: 1880135
cugguuaccgcuucuuagu

SEQ ID NO: 1944763 - RNA, 19 nt, Artificial Sequence
  Description of Artificial Sequence: Synthetic oligonucleotide
  Antisense strand to SEQ ID NO: 1944762
acuaagaagcgguaaccag

SEQ ID NO: 1944764 - RNA, 19 nt, Artificial Sequence
  Description of Artificial Sequence: Synthetic oligonucleotide
  Sense strand starting at position 2969 of SEQ ID NO: 1880135
acauauaagugagcucaga

SEQ ID NO: 1944765 - RNA, 19 nt, Artificial Sequence
  Description of Artificial Sequence: Synthetic oligonucleotide
  Antisense strand to SEQ ID NO: 1944764
ucugagcucacuuauaugu

SEQ ID NO: 1944766 - RNA, 19 nt, Artificial Sequence
  Description of Artificial Sequence: Synthetic oligonucleotide
  Sense strand starting at position 3121 of SEQ ID NO: 1880135
agcccuuucuaaccaggua

SEQ ID NO: 1944767 - RNA, 19 nt, Artificial Sequence
  Description of Artificial Sequence: Synthetic oligonucleotide
  Antisense strand to SEQ ID NO: 1944766
uaccugguuagaaagggcu

SEQ ID NO: 1944768 - RNA, 19 nt, Artificial Sequence
  Description of Artificial Sequence: Synthetic oligonucleotide
  Sense strand starting at position 3124 of SEQ ID NO: 1880135
ccuuucuaaccagguauga

SEQ ID NO: 1944769 - RNA, 19 nt, Artificial Sequence
  Description of Artificial Sequence: Synthetic oligonucleotide
  Antisense strand to SEQ ID NO: 1944768
ucauaccugguuagaaagg

SEQ ID NO: 1944770 - RNA, 19 nt, Artificial Sequence
  Description of Artificial Sequence: Synthetic oligonucleotide
  Sense strand starting at position 3176 of SEQ ID NO: 1880135
ggacucauucuuggacaca

SEQ ID NO: 1944771 - RNA, 19 nt, Artificial Sequence
  Description of Artificial Sequence: Synthetic oligonucleotide
  Antisense strand to SEQ ID NO: 1944770
uguguccaagaaugagucc

SEQ ID NO: 1944772 - RNA, 19 nt, Artificial Sequence
  Description of Artificial Sequence: Synthetic oligonucleotide
  Sense strand starting at position 3195 of SEQ ID NO: 1880135
cugucuuagcccuaagggu

SEQ ID NO: 1944773 - RNA, 19 nt, Artificial Sequence
  Description of Artificial Sequence: Synthetic oligonucleotide
  Antisense strand to SEQ ID NO: 1944772
acccuuagggcuaagacag

SEQ ID NO: 1944774 - RNA, 19 nt, Artificial Sequence
  Description of Artificial Sequence: Synthetic oligonucleotide
  Sense strand starting at position 3676 of SEQ ID NO: 1880135
guuugaacucuugacuggu

SEQ ID NO: 1944775 - RNA, 19 nt, Artificial Sequence
  Description of Artificial Sequence: Synthetic oligonucleotide
  Antisense strand to SEQ ID NO: 1944774
accagucaagaguucaaac

SEQ ID NO: 1944776 - RNA, 19 nt, Artificial Sequence
  Description of Artificial Sequence: Synthetic oligonucleotide
  Sense strand starting at position 3727 of SEQ ID NO: 1880135
cccuguauuuacuuguuau

SEQ ID NO: 1944777 - RNA, 19 nt, Artificial Sequence
  Description of Artificial Sequence: Synthetic oligonucleotide
  Antisense strand to SEQ ID NO: 1944776
auaacaaguaaauacaggg

SEQ ID NO: 1944778 - RNA, 19 nt, Artificial Sequence
  Description of Artificial Sequence: Synthetic oligonucleotide
  Sense strand starting at position 3739 of SEQ ID NO: 1880135
uuguuauuccauuacggaa

SEQ ID NO: 1944779 - RNA, 19 nt, Artificial Sequence
  Description of Artificial Sequence: Synthetic oligonucleotide
  Antisense strand to SEQ ID NO: 1944778
uuccguaauggaauaacaa

SEQ ID NO: 1944780 - RNA, 19 nt, Artificial Sequence
  Description of Artificial Sequence: Synthetic oligonucleotide
  Sense strand starting at position 3978 of SEQ ID NO: 1880135
guagauggcaucuguagau

SEQ ID NO: 1944781 - RNA, 19 nt, Artificial Sequence
  Description of Artificial Sequence: Synthetic oligonucleotide
  Antisense strand to SEQ ID NO: 1944780
aucuacagaugccaucuac

SEQ ID NO: 1944782 - RNA, 19 nt, Artificial Sequence
  Description of Artificial Sequence: Synthetic oligonucleotide
  Sense strand starting at position 153 of SEQ ID NO: 1880136
ccacauaauuggguugagu

SEQ ID NO: 1944783 - RNA, 19 nt, Artificial Sequence
  Description of Artificial Sequence: Synthetic oligonucleotide
  Antisense strand to SEQ ID NO: 1944782
acucaacccaauuaugugg

SEQ ID NO: 1944784 - RNA, 19 nt, Artificial Sequence
  Description of Artificial Sequence: Synthetic oligonucleotide
  Sense strand starting at position 155 of SEQ ID NO: 1880136
acauaauuggguugaguuu

SEQ ID NO: 1944785 - RNA, 19 nt, Artificial Sequence
  Description of Artificial Sequence: Synthetic oligonucleotide
  Antisense strand to SEQ ID NO: 1944784
aaacucaacccaauuaugu

SEQ ID NO: 1944786 - RNA, 19 nt, Artificial Sequence
  Description of Artificial Sequence: Synthetic oligonucleotide
  Sense strand starting at position 156 of SEQ ID NO: 1880136
cauaauuggguugaguuua

SEQ ID NO: 1944787 - RNA, 19 nt, Artificial Sequence
  Description of Artificial Sequence: Synthetic oligonucleotide
  Antisense strand to SEQ ID NO: 1944786
uaaacucaacccaauuaug

SEQ ID NO: 1944788 - RNA, 19 nt, Artificial Sequence
  Description of Artificial Sequence: Synthetic oligonucleotide
  Sense strand starting at position 161 of SEQ ID NO: 1880136
uuggguugaguuuaucaau

SEQ ID NO: 1944789 - RNA, 19 nt, Artificial Sequence
  Description of Artificial Sequence: Synthetic oligonucleotide
  Antisense strand to SEQ ID NO: 1944788
auugauaaacucaacccaa

SEQ ID NO: 1944790 - RNA, 19 nt, Artificial Sequence
  Description of Artificial Sequence: Synthetic oligonucleotide
  Sense strand starting at position 415 of SEQ ID NO: 1880136
gauagaaaucacuggcgua

SEQ ID NO: 1944791 - RNA, 19 nt, Artificial Sequence
  Description of Artificial Sequence: Synthetic oligonucleotide
  Antisense strand to SEQ ID NO: 1944790
uacgccagugauuucuauc

SEQ ID NO: 1944792 - RNA, 19 nt, Artificial Sequence
  Description of Artificial Sequence: Synthetic oligonucleotide
  Sense strand starting at position 416 of SEQ ID NO: 1880136
auagaaaucacuggcguaa

SEQ ID NO: 1944793 - RNA, 19 nt, Artificial Sequence
  Description of Artificial Sequence: Synthetic oligonucleotide
  Antisense strand to SEQ ID NO: 1944792
uuacgccagugauuucuau

SEQ ID NO: 1944794 - RNA, 19 nt, Artificial Sequence
  Description of Artificial Sequence: Synthetic oligonucleotide
  Sense strand starting at position 420 of SEQ ID NO: 1880136
aaaucacuggcguaaugau

SEQ ID NO: 1944795 - RNA, 19 nt, Artificial Sequence
  Description of Artificial Sequence: Synthetic oligonucleotide
  Antisense strand to SEQ ID NO: 1944794
aucauuacgccagugauuu

SEQ ID NO: 1944796 - RNA, 19 nt, Artificial Sequence
  Description of Artificial Sequence: Synthetic oligonucleotide
  Sense strand starting at position 428 of SEQ ID NO: 1880136
ggcguaaugauccauccag

SEQ ID NO: 1944797 - RNA, 19 nt, Artificial Sequence
  Description of Artificial Sequence: Synthetic oligonucleotide
  Antisense strand to SEQ ID NO: 1944796
cuggauggaucauuacgcc

SEQ ID NO: 1944798 - RNA, 19 nt, Artificial Sequence
  Description of Artificial Sequence: Synthetic oligonucleotide
  Sense strand starting at position 952 of SEQ ID NO: 1880136
ugguauuagccucacuuaa

SEQ ID NO: 1944799 - RNA, 19 nt, Artificial Sequence
  Description of Artificial Sequence: Synthetic oligonucleotide
  Antisense strand to SEQ ID NO: 1944798
uuaagugaggcuaauacca

SEQ ID NO: 1944800 - RNA, 19 nt, Artificial Sequence
  Description of Artificial Sequence: Synthetic oligonucleotide
  Sense strand starting at position 1007 of SEQ ID NO: 1880136
ugguaauguaggcacuaua

SEQ ID NO: 1944801 - RNA, 19 nt, Artificial Sequence
  Description of Artificial Sequence: Synthetic oligonucleotide
  Antisense strand to SEQ ID NO: 1944800
uauagugccuacauuacca

SEQ ID NO: 1944802 - RNA, 19 nt, Artificial Sequence
  Description of Artificial Sequence: Synthetic oligonucleotide
  Sense strand starting at position 1103 of SEQ ID NO: 1880136
gccucuuguguagaggaaa

SEQ ID NO: 1944803 - RNA, 19 nt, Artificial Sequence
  Description of Artificial Sequence: Synthetic oligonucleotide
  Antisense strand to SEQ ID NO: 1944802
uuuccucuacacaagaggc

SEQ ID NO: 1944804 - RNA, 19 nt, Artificial Sequence
  Description of Artificial Sequence: Synthetic oligonucleotide
  Sense strand starting at position 1178 of SEQ ID NO: 1880136
cugguaucuugguuaggau

SEQ ID NO: 1944805 - RNA, 19 nt, Artificial Sequence
  Description of Artificial Sequence: Synthetic oligonucleotide
  Antisense strand to SEQ ID NO: 1944804
auccuaaccaagauaccag

SEQ ID NO: 1944806 - RNA, 19 nt, Artificial Sequence
  Description of Artificial Sequence: Synthetic oligonucleotide
  Sense strand starting at position 1179 of SEQ ID NO: 1880136
ugguaucuugguuaggauu

SEQ ID NO: 1944807 - RNA, 19 nt, Artificial Sequence
  Description of Artificial Sequence: Synthetic oligonucleotide
  Antisense strand to SEQ ID NO: 1944806
aauccuaaccaagauacca

SEQ ID NO: 1944808 - RNA, 19 nt, Artificial Sequence
  Description of Artificial Sequence: Synthetic oligonucleotide
  Sense strand starting at position 1520 of SEQ ID NO: 1880136
gcucaucagcuugaacuuu

SEQ ID NO: 1944809 - RNA, 19 nt, Artificial Sequence
  Description of Artificial Sequence: Synthetic oligonucleotide
  Antisense strand to SEQ ID NO: 1944808
aaaguucaagcugaugagc

SEQ ID NO: 1944810 - RNA, 19 nt, Artificial Sequence
  Description of Artificial Sequence: Synthetic oligonucleotide
  Sense strand starting at position 2015 of SEQ ID NO: 1880136
auugaagcucuguaaauga

SEQ ID NO: 1944811 - RNA, 19 nt, Artificial Sequence
  Description of Artificial Sequence: Synthetic oligonucleotide
  Antisense strand to SEQ ID NO: 1944810
ucauuuacagagcuucaau

SEQ ID NO: 1944812 - RNA, 19 nt, Artificial Sequence
  Description of Artificial Sequence: Synthetic oligonucleotide
  Sense strand starting at position 2082 of SEQ ID NO: 1880136
cucuauugugaguauuaca

SEQ ID NO: 1944813 - RNA, 19 nt, Artificial Sequence
  Description of Artificial Sequence: Synthetic oligonucleotide
  Antisense strand to SEQ ID NO: 1944812
uguaauacucacaauagag

SEQ ID NO: 1944814 - RNA, 19 nt, Artificial Sequence
  Description of Artificial Sequence: Synthetic oligonucleotide
  Sense strand starting at position 2291 of SEQ ID NO: 1880136
ucaguaaauuauguggaca

SEQ ID NO: 1944815 - RNA, 19 nt, Artificial Sequence
  Description of Artificial Sequence: Synthetic oligonucleotide
  Antisense strand to SEQ ID NO: 1944814
uguccacauaauuuacuga

SEQ ID NO: 1944816 - RNA, 19 nt, Artificial Sequence
  Description of Artificial Sequence: Synthetic oligonucleotide
  Sense strand starting at position 2303 of SEQ ID NO: 1880136
guggacaaaugacuuacau

SEQ ID NO: 1944817 - RNA, 19 nt, Artificial Sequence
  Description of Artificial Sequence: Synthetic oligonucleotide
  Antisense strand to SEQ ID NO: 1944816
auguaagucauuuguccac

SEQ ID NO: 1944818 - RNA, 19 nt, Artificial Sequence
  Description of Artificial Sequence: Synthetic oligonucleotide
  Sense strand starting at position 2402 of SEQ ID NO: 1880136
aguaaacgacuuugguuua

SEQ ID NO: 1944819 - RNA, 19 nt, Artificial Sequence
  Description of Artificial Sequence: Synthetic oligonucleotide
  Antisense strand to SEQ ID NO: 1944818
uaaaccaaagucguuuacu

SEQ ID NO: 1944820 - RNA, 19 nt, Artificial Sequence
  Description of Artificial Sequence: Synthetic oligonucleotide
  Sense strand starting at position 2405 of SEQ ID NO: 1880136
aaacgacuuugguuuacuu

SEQ ID NO: 1944821 - RNA, 19 nt, Artificial Sequence
  Description of Artificial Sequence: Synthetic oligonucleotide
  Antisense strand to SEQ ID NO: 1944820
aaguaaaccaaagucguuu

SEQ ID NO: 1944822 - RNA, 19 nt, Artificial Sequence
  Description of Artificial Sequence: Synthetic oligonucleotide
  Sense strand starting at position 2833 of SEQ ID NO: 1880136
aaagguuacugagcacaga

SEQ ID NO: 1944823 - RNA, 19 nt, Artificial Sequence
  Description of Artificial Sequence: Synthetic oligonucleotide
  Antisense strand to SEQ ID NO: 1944822
ucugugcucaguaaccuuu

SEQ ID NO: 1944824 - RNA, 19 nt, Artificial Sequence
  Description of Artificial Sequence: Synthetic oligonucleotide
  Sense strand starting at position 2869 of SEQ ID NO: 1880136
gaucgaaucucucuaaggu

SEQ ID NO: 1944825 - RNA, 19 nt, Artificial Sequence
  Description of Artificial Sequence: Synthetic oligonucleotide
  Antisense strand to SEQ ID NO: 1944824
accuuagagagauucgauc

SEQ ID NO: 1944826 - RNA, 19 nt, Artificial Sequence
  Description of Artificial Sequence: Synthetic oligonucleotide
  Sense strand starting at position 2870 of SEQ ID NO: 1880136
aucgaaucucucuaaggua

SEQ ID NO: 1944827 - RNA, 19 nt, Artificial Sequence
  Description of Artificial Sequence: Synthetic oligonucleotide
  Antisense strand to SEQ ID NO: 1944826
uaccuuagagagauucgau

SEQ ID NO: 1944828 - RNA, 19 nt, Artificial Sequence
  Description of Artificial Sequence: Synthetic oligonucleotide
  Sense strand starting at position 3012 of SEQ ID NO: 1880136
uaagcagguuuauuaguga

SEQ ID NO: 1944829 - RNA, 19 nt, Artificial Sequence
  Description of Artificial Sequence: Synthetic oligonucleotide
  Antisense strand to SEQ ID NO: 1944828
ucacuaauaaaccugcuua

SEQ ID NO: 1944830 - RNA, 19 nt, Artificial Sequence
  Description of Artificial Sequence: Synthetic oligonucleotide
  Sense strand starting at position 3015 of SEQ ID NO: 1880136
gcagguuuauuagugagau

SEQ ID NO: 1944831 - RNA, 19 nt, Artificial Sequence
  Description of Artificial Sequence: Synthetic oligonucleotide
  Antisense strand to SEQ ID NO: 1944830
aucucacuaauaaaccugc

SEQ ID NO: 1944832 - RNA, 19 nt, Artificial Sequence
  Description of Artificial Sequence: Synthetic oligonucleotide
  Sense strand starting at position 3027 of SEQ ID NO: 1880136
gugagauuacgguaauagc

SEQ ID NO: 1944833 - RNA, 19 nt, Artificial Sequence
  Description of Artificial Sequence: Synthetic oligonucleotide
  Antisense strand to SEQ ID NO: 1944832
gcuauuaccguaaucucac

SEQ ID NO: 1944834 - RNA, 19 nt, Artificial Sequence
  Description of Artificial Sequence: Synthetic oligonucleotide
  Sense strand starting at position 3137 of SEQ ID NO: 1880136
cccuguggucacugaggaa

SEQ ID NO: 1944835 - RNA, 19 nt, Artificial Sequence
  Description of Artificial Sequence: Synthetic oligonucleotide
  Antisense strand to SEQ ID NO: 1944834
uuccucagugaccacaggg

SEQ ID NO: 1944836 - RNA, 19 nt, Artificial Sequence
  Description of Artificial Sequence: Synthetic oligonucleotide
  Sense strand starting at position 3314 of SEQ ID NO: 1880136
gcaagaacuggucacguga

SEQ ID NO: 1944837 - RNA, 19 nt, Artificial Sequence
  Description of Artificial Sequence: Synthetic oligonucleotide
  Antisense strand to SEQ ID NO: 1944836
ucacgugaccaguucuugc

SEQ ID NO: 1944838 - RNA, 19 nt, Artificial Sequence
  Description of Artificial Sequence: Synthetic oligonucleotide
  Sense strand starting at position 3350 of SEQ ID NO: 1880136
gagucugggaaauguggua

SEQ ID NO: 1944839 - RNA, 19 nt, Artificial Sequence
  Description of Artificial Sequence: Synthetic oligonucleotide
  Antisense strand to SEQ ID NO: 1944838
uaccacauuucccagacuc

SEQ ID NO: 1944840 - RNA, 19 nt, Artificial Sequence
  Description of Artificial Sequence: Synthetic oligonucleotide
  Sense strand starting at position 3414 of SEQ ID NO: 1880136
uagaguucucugcaacugu

SEQ ID NO: 1944841 - RNA, 19 nt, Artificial Sequence
  Description of Artificial Sequence: Synthetic oligonucleotide
  Antisense strand to SEQ ID NO: 1944840
acaguugcagagaacucua

SEQ ID NO: 1944842 - RNA, 19 nt, Artificial Sequence
  Description of Artificial Sequence: Synthetic oligonucleotide
  Sense strand starting at position 3435 of SEQ ID NO: 1880136
guaacucauuuggauuaau

SEQ ID NO: 1944843 - RNA, 19 nt, Artificial Sequence
  Description of Artificial Sequence: Synthetic oligonucleotide
  Antisense strand to SEQ ID NO: 1944842
auuaauccaaaugaguuac

SEQ ID NO: 1944844 - RNA, 19 nt, Artificial Sequence
  Description of Artificial Sequence: Synthetic oligonucleotide
  Sense strand starting at position 3518 of SEQ ID NO: 1880136
ugauguaaucauggcuaac

SEQ ID NO: 1944845 - RNA, 19 nt, Artificial Sequence
  Description of Artificial Sequence: Synthetic oligonucleotide
  Antisense strand to SEQ ID NO: 1944844
guuagccaugauuacauca

SEQ ID NO: 1944846 - RNA, 19 nt, Artificial Sequence
  Description of Artificial Sequence: Synthetic oligonucleotide
  Sense strand starting at position 3543 of SEQ ID NO: 1880136
cuggaccuuccaggauuaa

SEQ ID NO: 1944847 - RNA, 19 nt, Artificial Sequence
  Description of Artificial Sequence: Synthetic oligonucleotide
  Antisense strand to SEQ ID NO: 1944846
uuaauccuggaagguccag

SEQ ID NO: 1944848 - RNA, 19 nt, Artificial Sequence
  Description of Artificial Sequence: Synthetic oligonucleotide
  Sense strand starting at position 3760 of SEQ ID NO: 1880136
gaccaaacgugauucucaa

SEQ ID NO: 1944849 - RNA, 19 nt, Artificial Sequence
  Description of Artificial Sequence: Synthetic oligonucleotide
  Antisense strand to SEQ ID NO: 1944848
uugagaaucacguuugguc

SEQ ID NO: 1944850 - RNA, 19 nt, Artificial Sequence
  Description of Artificial Sequence: Synthetic oligonucleotide
  Sense strand starting at position 3826 of SEQ ID NO: 1880136
gacagagagcugcaccaua

SEQ ID NO: 1944851 - RNA, 19 nt, Artificial Sequence
  Description of Artificial Sequence: Synthetic oligonucleotide
  Antisense strand to SEQ ID NO: 1944850
uauggugcagcucucuguc

SEQ ID NO: 1944852 - RNA, 19 nt, Artificial Sequence
  Description of Artificial Sequence: Synthetic oligonucleotide
  Sense strand starting at position 3837 of SEQ ID NO: 1880136
gcaccauagccugagagaa

SEQ ID NO: 1944853 - RNA, 19 nt, Artificial Sequence
  Description of Artificial Sequence: Synthetic oligonucleotide
  Antisense strand to SEQ ID NO: 1944852
uucucucaggcuauggugc

SEQ ID NO: 1944854 - RNA, 19 nt, Artificial Sequence
  Description of Artificial Sequence: Synthetic oligonucleotide
  Sense strand starting at position 3873 of SEQ ID NO: 1880136
ggagaucagacgugguaug

SEQ ID NO: 1944855 - RNA, 19 nt, Artificial Sequence
  Description of Artificial Sequence: Synthetic oligonucleotide
  Antisense strand to SEQ ID NO: 1944854
cauaccacgucugaucucc

SEQ ID NO: 1944856 - RNA, 19 nt, Artificial Sequence
  Description of Artificial Sequence: Synthetic oligonucleotide
  Sense strand starting at position 3874 of SEQ ID NO: 1880136
gagaucagacgugguauga

SEQ ID NO: 1944857 - RNA, 19 nt, Artificial Sequence
  Description of Artificial Sequence: Synthetic oligonucleotide
  Antisense strand to SEQ ID NO: 1944856
ucauaccacgucugaucuc

SEQ ID NO: 1944858 - RNA, 19 nt, Artificial Sequence
  Description of Artificial Sequence: Synthetic oligonucleotide
  Sense strand starting at position 3926 of SEQ ID NO: 1880136
gugcuagaaggcuagugaa

SEQ ID NO: 1944859 - RNA, 19 nt, Artificial Sequence
  Description of Artificial Sequence: Synthetic oligonucleotide
  Antisense strand to SEQ ID NO: 1944858
uucacuagccuucuagcac

SEQ ID NO: 1944860 - RNA, 19 nt, Artificial Sequence
  Description of Artificial Sequence: Synthetic oligonucleotide
  Sense strand starting at position 3956 of SEQ ID NO: 1880136
uaggaagcugccugaagau

SEQ ID NO: 1944861 - RNA, 19 nt, Artificial Sequence
  Description of Artificial Sequence: Synthetic oligonucleotide
  Antisense strand to SEQ ID NO: 1944860
aucuucaggcagcuuccua

SEQ ID NO: 1944862 - RNA, 19 nt, Artificial Sequence
  Description of Artificial Sequence: Synthetic oligonucleotide
  Sense strand starting at position 685 of SEQ ID NO: 1880137
caauaaagaugucagauag

SEQ ID NO: 1944863 - RNA, 19 nt, Artificial Sequence
  Description of Artificial Sequence: Synthetic oligonucleotide
  Antisense strand to SEQ ID NO: 1944862
cuaucugacaucuuuauug

SEQ ID NO: 1944864 - RNA, 19 nt, Artificial Sequence
  Description of Artificial Sequence: Synthetic oligonucleotide
  Sense strand starting at position 774 of SEQ ID NO: 1880137
auaauuguaucauuggcau

SEQ ID NO: 1944865 - RNA, 19 nt, Artificial Sequence
  Description of Artificial Sequence: Synthetic oligonucleotide
  Antisense strand to SEQ ID NO: 1944864
augccaaugauacaauuau

SEQ ID NO: 1944866 - RNA, 19 nt, Artificial Sequence
  Description of Artificial Sequence: Synthetic oligonucleotide
  Sense strand starting at position 964 of SEQ ID NO: 1880137
gagcguugggauuaccaga

SEQ ID NO: 1944867 - RNA, 19 nt, Artificial Sequence
  Description of Artificial Sequence: Synthetic oligonucleotide
  Antisense strand to SEQ ID NO: 1944866
ucugguaaucccaacgcuc

SEQ ID NO: 1944868 - RNA, 19 nt, Artificial Sequence
  Description of Artificial Sequence: Synthetic oligonucleotide
  Sense strand starting at position 1014 of SEQ ID NO: 1880137
acaucucagucuucuaguu

SEQ ID NO: 1944869 - RNA, 19 nt, Artificial Sequence
  Description of Artificial Sequence: Synthetic oligonucleotide
  Antisense strand to SEQ ID NO: 1944868
aacuagaagacugagaugu

SEQ ID NO: 1944870 - RNA, 19 nt, Artificial Sequence
  Description of Artificial Sequence: Synthetic oligonucleotide
  Sense strand starting at position 1093 of SEQ ID NO: 1880137
guaaguacuuuaucauguu

SEQ ID NO: 1944871 - RNA, 19 nt, Artificial Sequence
  Description of Artificial Sequence: Synthetic oligonucleotide
  Antisense strand to SEQ ID NO: 1944870
aacaugauaaaguacuuac

SEQ ID NO: 1944872 - RNA, 19 nt, Artificial Sequence
  Description of Artificial Sequence: Synthetic oligonucleotide
  Sense strand starting at position 1149 of SEQ ID NO: 1880137
aaguguugccuguuauugu

SEQ ID NO: 1944873 - RNA, 19 nt, Artificial Sequence
  Description of Artificial Sequence: Synthetic oligonucleotide
  Antisense strand to SEQ ID NO: 1944872
acaauaacaggcaacacuu

SEQ ID NO: 1944874 - RNA, 19 nt, Artificial Sequence
  Description of Artificial Sequence: Synthetic oligonucleotide
  Sense strand starting at position 1239 of SEQ ID NO: 1880137
ugaggaugacauuguaauu

SEQ ID NO: 1944875 - RNA, 19 nt, Artificial Sequence
  Description of Artificial Sequence: Synthetic oligonucleotide
  Antisense strand to SEQ ID NO: 1944874
aauuacaaugucauccuca

SEQ ID NO: 1944876 - RNA, 19 nt, Artificial Sequence
  Description of Artificial Sequence: Synthetic oligonucleotide
  Sense strand starting at position 1249 of SEQ ID NO: 1880137
auuguaauugauuacgucu

SEQ ID NO: 1944877 - RNA, 19 nt, Artificial Sequence
  Description of Artificial Sequence: Synthetic oligonucleotide
  Antisense strand to SEQ ID NO: 1944876
agacguaaucaauuacaau

SEQ ID NO: 1944878 - RNA, 19 nt, Artificial Sequence
  Description of Artificial Sequence: Synthetic oligonucleotide
  Sense strand starting at position 1264 of SEQ ID NO: 1880137
gucucagucucuccauuau

SEQ ID NO: 1944879 - RNA, 19 nt, Artificial Sequence
  Description of Artificial Sequence: Synthetic oligonucleotide
  Antisense strand to SEQ ID NO: 1944878
auaauggagagacugagac

SEQ ID NO: 1944880 - RNA, 19 nt, Artificial Sequence
  Description of Artificial Sequence: Synthetic oligonucleotide
  Sense strand starting at position 1329 of SEQ ID NO: 1880137
ucccuagagguuuacauau

SEQ ID NO: 1944881 - RNA, 19 nt, Artificial Sequence
  Description of Artificial Sequence: Synthetic oligonucleotide
  Antisense strand to SEQ ID NO: 1944880
auauguaaaccucuaggga

SEQ ID NO: 1944882 - RNA, 19 nt, Artificial Sequence
  Description of Artificial Sequence: Synthetic oligonucleotide
  Sense strand starting at position 1354 of SEQ ID NO: 1880137
guacucaauuauguaggaa

SEQ ID NO: 1944883 - RNA, 19 nt, Artificial Sequence
  Description of Artificial Sequence: Synthetic oligonucleotide
  Antisense strand to SEQ ID NO: 1944882
uuccuacauaauugaguac

SEQ ID NO: 1944884 - RNA, 19 nt, Artificial Sequence
  Description of Artificial Sequence: Synthetic oligonucleotide
  Sense strand starting at position 1549 of SEQ ID NO: 1880137
aauggugugucacccuaga

SEQ ID NO: 1944885 - RNA, 19 nt, Artificial Sequence
  Description of Artificial Sequence: Synthetic oligonucleotide
  Antisense strand to SEQ ID NO: 1944884
ucuagggugacacaccauu

SEQ ID NO: 1944886 - RNA, 19 nt, Artificial Sequence
  Description of Artificial Sequence: Synthetic oligonucleotide
  Sense strand starting at position 1733 of SEQ ID NO: 1880137
augccaggauccucgagaa

SEQ ID NO: 1944887 - RNA, 19 nt, Artificial Sequence
  Description of Artificial Sequence: Synthetic oligonucleotide
  Antisense strand to SEQ ID NO: 1944886
uucucgaggauccuggcau

SEQ ID NO: 1944888 - RNA, 19 nt, Artificial Sequence
  Description of Artificial Sequence: Synthetic oligonucleotide
  Sense strand starting at position 1803 of SEQ ID NO: 1880137
gcgggauaacuggaggagu

SEQ ID NO: 1944889 - RNA, 19 nt, Artificial Sequence
  Description of Artificial Sequence: Synthetic oligonucleotide
  Antisense strand to SEQ ID NO: 1944888
acuccuccaguuaucccgc

SEQ ID NO: 1944890 - RNA, 19 nt, Artificial Sequence
  Description of Artificial Sequence: Synthetic oligonucleotide
  Sense strand starting at position 1804 of SEQ ID NO: 1880137
cgggauaacuggaggaguu

SEQ ID NO: 1944891 - RNA, 19 nt, Artificial Sequence
  Description of Artificial Sequence: Synthetic oligonucleotide
  Antisense strand to SEQ ID NO: 1944890
aacuccuccaguuaucccg

SEQ ID NO: 1944892 - RNA, 19 nt, Artificial Sequence
  Description of Artificial Sequence: Synthetic oligonucleotide
  Sense strand starting at position 1830 of SEQ ID NO: 1880137
aguugagacuuucugcaac

SEQ ID NO: 1944893 - RNA, 19 nt, Artificial Sequence
  Description of Artificial Sequence: Synthetic oligonucleotide
  Antisense strand to SEQ ID NO: 1944892
guugcagaaagucucaacu

SEQ ID NO: 1944894 - RNA, 19 nt, Artificial Sequence
  Description of Artificial Sequence: Synthetic oligonucleotide
  Sense strand starting at position 1832 of SEQ ID NO: 1880137
uugagacuuucugcaaccu

SEQ ID NO: 1944895 - RNA, 19 nt, Artificial Sequence
  Description of Artificial Sequence: Synthetic oligonucleotide
  Antisense strand to SEQ ID NO: 1944894
agguugcagaaagucucaa

SEQ ID NO: 1944896 - RNA, 19 nt, Artificial Sequence
  Description of Artificial Sequence: Synthetic oligonucleotide
  Sense strand starting at position 2525 of SEQ ID NO: 1880137
gggaguccgagugguggaa

SEQ ID NO: 1944897 - RNA, 19 nt, Artificial Sequence
  Description of Artificial Sequence: Synthetic oligonucleotide
  Antisense strand to SEQ ID NO: 1944896
uuccaccacucggacuccc

SEQ ID NO: 1944898 - RNA, 19 nt, Artificial Sequence
  Description of Artificial Sequence: Synthetic oligonucleotide
  Sense strand starting at position 2636 of SEQ ID NO: 1880137
gggugaguuuagaaauggu

SEQ ID NO: 1944899 - RNA, 19 nt, Artificial Sequence
  Description of Artificial Sequence: Synthetic oligonucleotide
  Antisense strand to SEQ ID NO: 1944898
accauuucuaaacucaccc

SEQ ID NO: 1944900 - RNA, 19 nt, Artificial Sequence
  Description of Artificial Sequence: Synthetic oligonucleotide
  Sense strand starting at position 2676 of SEQ ID NO: 1880137
uaaauagugucauuugcug

SEQ ID NO: 1944901 - RNA, 19 nt, Artificial Sequence
  Description of Artificial Sequence: Synthetic oligonucleotide
  Antisense strand to SEQ ID NO: 1944900
cagcaaaugacacuauuua

SEQ ID NO: 1944902 - RNA, 19 nt, Artificial Sequence
  Description of Artificial Sequence: Synthetic oligonucleotide
  Sense strand starting at position 2682 of SEQ ID NO: 1880137
gugucauuugcugaagagc

SEQ ID NO: 1944903 - RNA, 19 nt, Artificial Sequence
  Description of Artificial Sequence: Synthetic oligonucleotide
  Antisense strand to SEQ ID NO: 1944902
gcucuucagcaaaugacac

SEQ ID NO: 1944904 - RNA, 19 nt, Artificial Sequence
  Description of Artificial Sequence: Synthetic oligonucleotide
  Sense strand starting at position 2730 of SEQ ID NO: 1880137
gggcauuccaaauauccga

SEQ ID NO: 1944905 - RNA, 19 nt, Artificial Sequence
  Description of Artificial Sequence: Synthetic oligonucleotide
  Antisense strand to SEQ ID NO: 1944904
ucggauauuuggaaugccc

SEQ ID NO: 1944906 - RNA, 19 nt, Artificial Sequence
  Description of Artificial Sequence: Synthetic oligonucleotide
  Sense strand starting at position 2753 of SEQ ID NO: 1880137
cacguaugagcuggcaaga

SEQ ID NO: 1944907 - RNA, 19 nt, Artificial Sequence
  Description of Artificial Sequence: Synthetic oligonucleotide
  Antisense strand to SEQ ID NO: 1944906
ucuugccagcucauacgug

SEQ ID NO: 1944908 - RNA, 19 nt, Artificial Sequence
  Description of Artificial Sequence: Synthetic oligonucleotide
  Sense strand starting at position 2779 of SEQ ID NO: 1880137
ggcagaaaugcuugugacg

SEQ ID NO: 1944909 - RNA, 19 nt, Artificial Sequence
  Description of Artificial Sequence: Synthetic oligonucleotide
  Antisense strand to SEQ ID NO: 1944908
cgucacaagcauuucugcc

SEQ ID NO: 1944910 - RNA, 19 nt, Artificial Sequence
  Description of Artificial Sequence: Synthetic oligonucleotide
  Sense strand starting at position 2831 of SEQ ID NO: 1880137
cugguucugcugucaguuu

SEQ ID NO: 1944911 - RNA, 19 nt, Artificial Sequence
  Description of Artificial Sequence: Synthetic oligonucleotide
  Antisense strand to SEQ ID NO: 1944910
aaacugacagcagaaccag

SEQ ID NO: 1944912 - RNA, 19 nt, Artificial Sequence
  Description of Artificial Sequence: Synthetic oligonucleotide
  Sense strand starting at position 2864 of SEQ ID NO: 1880137
aggaaagaauccugagaug

SEQ ID NO: 1944913 - RNA, 19 nt, Artificial Sequence
  Description of Artificial Sequence: Synthetic oligonucleotide
  Antisense strand to SEQ ID NO: 1944912
caucucaggauucuuuccu

SEQ ID NO: 1944914 - RNA, 19 nt, Artificial Sequence
  Description of Artificial Sequence: Synthetic oligonucleotide
  Sense strand starting at position 2869 of SEQ ID NO: 1880137
agaauccugagauguguua

SEQ ID NO: 1944915 - RNA, 19 nt, Artificial Sequence
  Description of Artificial Sequence: Synthetic oligonucleotide
  Antisense strand to SEQ ID NO: 1944914
uaacacaucucaggauucu

SEQ ID NO: 1944916 - RNA, 19 nt, Artificial Sequence
  Description of Artificial Sequence: Synthetic oligonucleotide
  Sense strand starting at position 2906 of SEQ ID NO: 1880137
ccuccagagagcuguuaug

SEQ ID NO: 1944917 - RNA, 19 nt, Artificial Sequence
  Description of Artificial Sequence: Synthetic oligonucleotide
  Antisense strand to SEQ ID NO: 1944916
cauaacagcucucuggagg

SEQ ID NO: 1944918 - RNA, 19 nt, Artificial Sequence
  Description of Artificial Sequence: Synthetic oligonucleotide
  Sense strand starting at position 2915 of SEQ ID NO: 1880137
agcuguuaugaccagaauu

SEQ ID NO: 1944919 - RNA, 19 nt, Artificial Sequence
  Description of Artificial Sequence: Synthetic oligonucleotide
  Antisense strand to SEQ ID NO: 1944918
aauucuggucauaacagcu

SEQ ID NO: 1944920 - RNA, 19 nt, Artificial Sequence
  Description of Artificial Sequence: Synthetic oligonucleotide
  Sense strand starting at position 2972 of SEQ ID NO: 1880137
uauuucuucugucugggua

SEQ ID NO: 1944921 - RNA, 19 nt, Artificial Sequence
  Description of Artificial Sequence: Synthetic oligonucleotide
  Antisense strand to SEQ ID NO: 1944920
uacccagacagaagaaaua

SEQ ID NO: 1944922 - RNA, 19 nt, Artificial Sequence
  Description of Artificial Sequence: Synthetic oligonucleotide
  Sense strand starting at position 3018 of SEQ ID NO: 1880137
gguacaugcaccugcuaga

SEQ ID NO: 1944923 - RNA, 19 nt, Artificial Sequence
  Description of Artificial Sequence: Synthetic oligonucleotide
  Antisense strand to SEQ ID NO: 1944922
ucuagcaggugcauguacc

SEQ ID NO: 1944924 - RNA, 19 nt, Artificial Sequence
  Description of Artificial Sequence: Synthetic oligonucleotide
  Sense strand starting at position 3060 of SEQ ID NO: 1880137
acugauugcuuuguaugua

SEQ ID NO: 1944925 - RNA, 19 nt, Artificial Sequence
  Description of Artificial Sequence: Synthetic oligonucleotide
  Antisense strand to SEQ ID NO: 1944924
uacauacaaagcaaucagu

SEQ ID NO: 1944926 - RNA, 19 nt, Artificial Sequence
  Description of Artificial Sequence: Synthetic oligonucleotide
  Sense strand starting at position 3374 of SEQ ID NO: 1880137
cucugagagccaugagaaa

SEQ ID NO: 1944927 - RNA, 19 nt, Artificial Sequence
  Description of Artificial Sequence: Synthetic oligonucleotide
  Antisense strand to SEQ ID NO: 1944926
uuucucauggcucucagag

SEQ ID NO: 1944928 - RNA, 19 nt, Artificial Sequence
  Description of Artificial Sequence: Synthetic oligonucleotide
  Sense strand starting at position 3591 of SEQ ID NO: 1880137
guuacagucucagcauauu

SEQ ID NO: 1944929 - RNA, 19 nt, Artificial Sequence
  Description of Artificial Sequence: Synthetic oligonucleotide
  Antisense strand to SEQ ID NO: 1944928
aauaugcugagacuguaac

SEQ ID NO: 1944930 - RNA, 19 nt, Artificial Sequence
  Description of Artificial Sequence: Synthetic oligonucleotide
  Sense strand starting at position 3731 of SEQ ID NO: 1880137
gcaauauaucaggguaugu

SEQ ID NO: 1944931 - RNA, 19 nt, Artificial Sequence
  Description of Artificial Sequence: Synthetic oligonucleotide
  Antisense strand to SEQ ID NO: 1944930
acauacccugauauauugc

SEQ ID NO: 1944932 - RNA, 19 nt, Artificial Sequence
  Description of Artificial Sequence: Synthetic oligonucleotide
  Sense strand starting at position 3760 of SEQ ID NO: 1880137
agaaauaacuggucugcaa

SEQ ID NO: 1944933 - RNA, 19 nt, Artificial Sequence
  Description of Artificial Sequence: Synthetic oligonucleotide
  Antisense strand to SEQ ID NO: 1944932
uugcagaccaguuauuucu

SEQ ID NO: 1944934 - RNA, 19 nt, Artificial Sequence
  Description of Artificial Sequence: Synthetic oligonucleotide
  Sense strand starting at position 3772 of SEQ ID NO: 1880137
ucugcaaggaaguguuaaa

SEQ ID NO: 1944935 - RNA, 19 nt, Artificial Sequence
  Description of Artificial Sequence: Synthetic oligonucleotide
  Antisense strand to SEQ ID NO: 1944934
uuuaacacuuccuugcaga

SEQ ID NO: 1944936 - RNA, 19 nt, Artificial Sequence
  Description of Artificial Sequence: Synthetic oligonucleotide
  Sense strand starting at position 3805 of SEQ ID NO: 1880137
cagguagucuaggugcaua

SEQ ID NO: 1944937 - RNA, 19 nt, Artificial Sequence
  Description of Artificial Sequence: Synthetic oligonucleotide
  Antisense strand to SEQ ID NO: 1944936
uaugcaccuagacuaccug

SEQ ID NO: 1944938 - RNA, 19 nt, Artificial Sequence
  Description of Artificial Sequence: Synthetic oligonucleotide
  Sense strand starting at position 3959 of SEQ ID NO: 1880137
gcaguauuaugaccugaag

SEQ ID NO: 1944939 - RNA, 19 nt, Artificial Sequence
  Description of Artificial Sequence: Synthetic oligonucleotide
  Antisense strand to SEQ ID NO: 1944938
cuucaggucauaauacugc

SEQ ID NO: 1944940 - RNA, 19 nt, Artificial Sequence
  Description of Artificial Sequence: Synthetic oligonucleotide
  Sense strand starting at position 3970 of SEQ ID NO: 1880137
accugaaggccucaacauu

SEQ ID NO: 1944941 - RNA, 19 nt, Artificial Sequence
  Description of Artificial Sequence: Synthetic oligonucleotide
  Antisense strand to SEQ ID NO: 1944940
aauguugaggccuucaggu

SEQ ID NO: 1944942 - RNA, 19 nt, Artificial Sequence
  Description of Artificial Sequence: Synthetic oligonucleotide
  Sense strand starting at position 111 of SEQ ID NO: 1880138
ggccuaguccgaggguaga

SEQ ID NO: 1944943 - RNA, 19 nt, Artificial Sequence
  Description of Artificial Sequence: Synthetic oligonucleotide
  Antisense strand to SEQ ID NO: 1944942
ucuacccucggacuaggcc

SEQ ID NO: 1944944 - RNA, 19 nt, Artificial Sequence
  Description of Artificial Sequence: Synthetic oligonucleotide
  Sense strand starting at position 332 of SEQ ID NO: 1880138
ugggccuccuuagaaaguu

SEQ ID NO: 1944945 - RNA, 19 nt, Artificial Sequence
  Description of Artificial Sequence: Synthetic oligonucleotide
  Antisense strand to SEQ ID NO: 1944944
aacuuucuaaggaggccca

SEQ ID NO: 1944946 - RNA, 19 nt, Artificial Sequence
  Description of Artificial Sequence: Synthetic oligonucleotide
  Sense strand starting at position 355 of SEQ ID NO: 1880138
uuagaagaguaauaagauc

SEQ ID NO: 1944947 - RNA, 19 nt, Artificial Sequence
  Description of Artificial Sequence: Synthetic oligonucleotide
  Antisense strand to SEQ ID NO: 1944946
gaucuuauuacucuucuaa

SEQ ID NO: 1944948 - RNA, 19 nt, Artificial Sequence
  Description of Artificial Sequence: Synthetic oligonucleotide
  Sense strand starting at position 362 of SEQ ID NO: 1880138
aguaauaagaucggagauc

SEQ ID NO: 1944949 - RNA, 19 nt, Artificial Sequence
  Description of Artificial Sequence: Synthetic oligonucleotide
  Antisense strand to SEQ ID NO: 1944948
gaucuccgaucuuauuacu

SEQ ID NO: 1944950 - RNA, 19 nt, Artificial Sequence
  Description of Artificial Sequence: Synthetic oligonucleotide
  Sense strand starting at position 363 of SEQ ID NO: 1880138
guaauaagaucggagaucu

SEQ ID NO: 1944951 - RNA, 19 nt, Artificial Sequence
  Description of Artificial Sequence: Synthetic oligonucleotide
  Antisense strand to SEQ ID NO: 1944950
agaucuccgaucuuauuac

SEQ ID NO: 1944952 - RNA, 19 nt, Artificial Sequence
  Description of Artificial Sequence: Synthetic oligonucleotide
  Sense strand starting at position 2698 of SEQ ID NO: 1880138
aggugcuacuucugggaaa

SEQ ID NO: 1944953 - RNA, 19 nt, Artificial Sequence
  Description of Artificial Sequence: Synthetic oligonucleotide
  Antisense strand to SEQ ID NO: 1944952
uuucccagaaguagcaccu

SEQ ID NO: 1944954 - RNA, 19 nt, Artificial Sequence
  Description of Artificial Sequence: Synthetic oligonucleotide
  Sense strand starting at position 2699 of SEQ ID NO: 1880138
ggugcuacuucugggaaag

SEQ ID NO: 1944955 - RNA, 19 nt, Artificial Sequence
  Description of Artificial Sequence: Synthetic oligonucleotide
  Antisense strand to SEQ ID NO: 1944954
cuuucccagaaguagcacc

SEQ ID NO: 1944956 - RNA, 19 nt, Artificial Sequence
  Description of Artificial Sequence: Synthetic oligonucleotide
  Sense strand starting at position 2700 of SEQ ID NO: 1880138
gugcuacuucugggaaaga

SEQ ID NO: 1944957 - RNA, 19 nt, Artificial Sequence
  Description of Artificial Sequence: Synthetic oligonucleotide
  Antisense strand to SEQ ID NO: 1944956
ucuuucccagaaguagcac

SEQ ID NO: 1944958 - RNA, 19 nt, Artificial Sequence
  Description of Artificial Sequence: Synthetic oligonucleotide
  Sense strand starting at position 2701 of SEQ ID NO: 1880138
ugcuacuucugggaaagag

SEQ ID NO: 1944959 - RNA, 19 nt, Artificial Sequence
  Description of Artificial Sequence: Synthetic oligonucleotide
  Antisense strand to SEQ ID NO: 1944958
cucuuucccagaaguagca

SEQ ID NO: 1944960 - RNA, 19 nt, Artificial Sequence
  Description of Artificial Sequence: Synthetic oligonucleotide
  Sense strand starting at position 3083 of SEQ ID NO: 1880138
gcaaacaguuagucccaua

SEQ ID NO: 1944961 - RNA, 19 nt, Artificial Sequence
  Description of Artificial Sequence: Synthetic oligonucleotide
  Antisense strand to SEQ ID NO: 1944960
uaugggacuaacuguuugc

SEQ ID NO: 1944962 - RNA, 19 nt, Artificial Sequence
  Description of Artificial Sequence: Synthetic oligonucleotide
  Sense strand starting at position 3246 of SEQ ID NO: 1880138
cgcuucuugcgaccucuua

SEQ ID NO: 1944963 - RNA, 19 nt, Artificial Sequence
  Description of Artificial Sequence: Synthetic oligonucleotide
  Antisense strand to SEQ ID NO: 1944962
uaagaggucgcaagaagcg

SEQ ID NO: 1944964 - RNA, 19 nt, Artificial Sequence
  Description of Artificial Sequence: Synthetic oligonucleotide
  Sense strand starting at position 108 of SEQ ID NO: 1880139
ggccuagacuaccuucuua

SEQ ID NO: 1944965 - RNA, 19 nt, Artificial Sequence
  Description of Artificial Sequence: Synthetic oligonucleotide
  Antisense strand to SEQ ID NO: 1944964
uaagaagguagucuaggcc

SEQ ID NO: 1944966 - RNA, 19 nt, Artificial Sequence
  Description of Artificial Sequence: Synthetic oligonucleotide
  Sense strand starting at position 113 of SEQ ID NO: 1880139
agacuaccuucuuaaaggu

SEQ ID NO: 1944967 - RNA, 19 nt, Artificial Sequence
  Description of Artificial Sequence: Synthetic oligonucleotide
  Antisense strand to SEQ ID NO: 1944966
accuuuaagaagguagucu

SEQ ID NO: 1944968 - RNA, 19 nt, Artificial Sequence
  Description of Artificial Sequence: Synthetic oligonucleotide
  Sense strand starting at position 222 of SEQ ID NO: 1880139
guaucugaaagcuaaguga

SEQ ID NO: 1944969 - RNA, 19 nt, Artificial Sequence
  Description of Artificial Sequence: Synthetic oligonucleotide
  Antisense strand to SEQ ID NO: 1944968
ucacuuagcuuucagauac

SEQ ID NO: 1944970 - RNA, 19 nt, Artificial Sequence
  Description of Artificial Sequence: Synthetic oligonucleotide
  Sense strand starting at position 245 of SEQ ID NO: 1880139
ugagucacuuucucauaca

SEQ ID NO: 1944971 - RNA, 19 nt, Artificial Sequence
  Description of Artificial Sequence: Synthetic oligonucleotide
  Antisense strand to SEQ ID NO: 1944970
uguaugagaaagugacuca

SEQ ID NO: 1944972 - RNA, 19 nt, Artificial Sequence
  Description of Artificial Sequence: Synthetic oligonucleotide
  Sense strand starting at position 433 of SEQ ID NO: 1880139
ucaauaaaugugggcuaaa

SEQ ID NO: 1944973 - RNA, 19 nt, Artificial Sequence
  Description of Artificial Sequence: Synthetic oligonucleotide
  Antisense strand to SEQ ID NO: 1944972
uuuagcccacauuuauuga

SEQ ID NO: 1944974 - RNA, 19 nt, Artificial Sequence
  Description of Artificial Sequence: Synthetic oligonucleotide
  Sense strand starting at position 464 of SEQ ID NO: 1880139
cccucaagagcuuguuuaa

SEQ ID NO: 1944975 - RNA, 19 nt, Artificial Sequence
  Description of Artificial Sequence: Synthetic oligonucleotide
  Antisense strand to SEQ ID NO: 1944974
uuaaacaagcucuugaggg

SEQ ID NO: 1944976 - RNA, 19 nt, Artificial Sequence
  Description of Artificial Sequence: Synthetic oligonucleotide
  Sense strand starting at position 1288 of SEQ ID NO: 1880139
ugcagauaaaguugagguu

SEQ ID NO: 1944977 - RNA, 19 nt, Artificial Sequence
  Description of Artificial Sequence: Synthetic oligonucleotide
  Antisense strand to SEQ ID NO: 1944976
aaccucaacuuuaucugca

SEQ ID NO: 1944978 - RNA, 19 nt, Artificial Sequence
  Description of Artificial Sequence: Synthetic oligonucleotide
  Sense strand starting at position 1301 of SEQ ID NO: 1880139
gagguugagcacuggauaa

SEQ ID NO: 1944979 - RNA, 19 nt, Artificial Sequence
  Description of Artificial Sequence: Synthetic oligonucleotide
  Antisense strand to SEQ ID NO: 1944978
uuauccagugcucaaccuc

SEQ ID NO: 1944980 - RNA, 19 nt, Artificial Sequence
  Description of Artificial Sequence: Synthetic oligonucleotide
  Sense strand starting at position 1413 of SEQ ID NO: 1880139
uacaaauacccguguagag

SEQ ID NO: 1944981 - RNA, 19 nt, Artificial Sequence
  Description of Artificial Sequence: Synthetic oligonucleotide
  Antisense strand to SEQ ID NO: 1944980
cucuacacggguauuugua

SEQ ID NO: 1944982 - RNA, 19 nt, Artificial Sequence
  Description of Artificial Sequence: Synthetic oligonucleotide
  Sense strand starting at position 1415 of SEQ ID NO: 1880139
caaauacccguguagaguu

SEQ ID NO: 1944983 - RNA, 19 nt, Artificial Sequence
  Description of Artificial Sequence: Synthetic oligonucleotide
  Antisense strand to SEQ ID NO: 1944982
aacucuacacggguauuug

SEQ ID NO: 1944984 - RNA, 19 nt, Artificial Sequence
  Description of Artificial Sequence: Synthetic oligonucleotide
  Sense strand starting at position 1464 of SEQ ID NO: 1880139
gggcauagugcuuaggaag

SEQ ID NO: 1944985 - RNA, 19 nt, Artificial Sequence
  Description of Artificial Sequence: Synthetic oligonucleotide
  Antisense strand to SEQ ID NO: 1944984
cuuccuaagcacuaugccc

SEQ ID NO: 1944986 - RNA, 19 nt, Artificial Sequence
  Description of Artificial Sequence: Synthetic oligonucleotide
  Sense strand starting at position 1516 of SEQ ID NO: 1880139
uucuuuauagggugagauc

SEQ ID NO: 1944987 - RNA, 19 nt, Artificial Sequence
  Description of Artificial Sequence: Synthetic oligonucleotide
  Antisense strand to SEQ ID NO: 1944986
gaucucacccuauaaagaa

SEQ ID NO: 1944988 - RNA, 19 nt, Artificial Sequence
  Description of Artificial Sequence: Synthetic oligonucleotide
  Sense strand starting at position 2144 of SEQ ID NO: 1880139
cuuagaaguuccgcccaga

SEQ ID NO: 1944989 - RNA, 19 nt, Artificial Sequence
  Description of Artificial Sequence: Synthetic oligonucleotide
  Antisense strand to SEQ ID NO: 1944988
ucugggcggaacuucuaag

SEQ ID NO: 1944990 - RNA, 19 nt, Artificial Sequence
  Description of Artificial Sequence: Synthetic oligonucleotide
  Sense strand starting at position 2160 of SEQ ID NO: 1880139
agaagcuccugcucaguaa

SEQ ID NO: 1944991 - RNA, 19 nt, Artificial Sequence
  Description of Artificial Sequence: Synthetic oligonucleotide
  Antisense strand to SEQ ID NO: 1944990
uuacugagcaggagcuucu

SEQ ID NO: 1944992 - RNA, 19 nt, Artificial Sequence
  Description of Artificial Sequence: Synthetic oligonucleotide
  Sense strand starting at position 2196 of SEQ ID NO: 1880139
agccucucgguuugggaau

SEQ ID NO: 1944993 - RNA, 19 nt, Artificial Sequence
  Description of Artificial Sequence: Synthetic oligonucleotide
  Antisense strand to SEQ ID NO: 1944992
auucccaaaccgagaggcu

SEQ ID NO: 1944994 - RNA, 19 nt, Artificial Sequence
  Description of Artificial Sequence: Synthetic oligonucleotide
  Sense strand starting at position 2312 of SEQ ID NO: 1880139
gccugaacccucuaaguuu

SEQ ID NO: 1944995 - RNA, 19 nt, Artificial Sequence
  Description of Artificial Sequence: Synthetic oligonucleotide
  Antisense strand to SEQ ID NO: 1944994
aaacuuagaggguucaggc

SEQ ID NO: 1944996 - RNA, 19 nt, Artificial Sequence
  Description of Artificial Sequence: Synthetic oligonucleotide
  Sense strand starting at position 2397 of SEQ ID NO: 1880139
gcgaaagacacuugggagu

SEQ ID NO: 1944997 - RNA, 19 nt, Artificial Sequence
  Description of Artificial Sequence: Synthetic oligonucleotide
  Antisense strand to SEQ ID NO: 1944996
acucccaagugucuuucgc

SEQ ID NO: 1944998 - RNA, 19 nt, Artificial Sequence
  Description of Artificial Sequence: Synthetic oligonucleotide
  Sense strand starting at position 2399 of SEQ ID NO: 1880139
gaaagacacuugggaguua

SEQ ID NO: 1944999 - RNA, 19 nt, Artificial Sequence
  Description of Artificial Sequence: Synthetic oligonucleotide
  Antisense strand to SEQ ID NO: 1944998
uaacucccaagugucuuuc

SEQ ID NO: 1945000 - RNA, 19 nt, Artificial Sequence
  Description of Artificial Sequence: Synthetic oligonucleotide
  Sense strand starting at position 2478 of SEQ ID NO: 1880139
gucugaacugaguguugga

SEQ ID NO: 1945001 - RNA, 19 nt, Artificial Sequence
  Description of Artificial Sequence: Synthetic oligonucleotide
  Antisense strand to SEQ ID NO: 1945000
uccaacacucaguucagac

SEQ ID NO: 1945002 - RNA, 19 nt, Artificial Sequence
  Description of Artificial Sequence: Synthetic oligonucleotide
  Sense strand starting at position 2481 of SEQ ID NO: 1880139
ugaacugaguguuggagau

SEQ ID NO: 1945003 - RNA, 19 nt, Artificial Sequence
  Description of Artificial Sequence: Synthetic oligonucleotide
  Antisense strand to SEQ ID NO: 1945002
aucuccaacacucaguuca

SEQ ID NO: 1945004 - RNA, 19 nt, Artificial Sequence
  Description of Artificial Sequence: Synthetic oligonucleotide
  Sense strand starting at position 2483 of SEQ ID NO: 1880139
aacugaguguuggagauaa

SEQ ID NO: 1945005 - RNA, 19 nt, Artificial Sequence
  Description of Artificial Sequence: Synthetic oligonucleotide
  Antisense strand to SEQ ID NO: 1945004
uuaucuccaacacucaguu

SEQ ID NO: 1945006 - RNA, 19 nt, Artificial Sequence
  Description of Artificial Sequence: Synthetic oligonucleotide
  Sense strand starting at position 2745 of SEQ ID NO: 1880139
augggaacugugcgccaaa

SEQ ID NO: 1945007 - RNA, 19 nt, Artificial Sequence
  Description of Artificial Sequence: Synthetic oligonucleotide
  Antisense strand to SEQ ID NO: 1945006
uuuggcgcacaguucccau

SEQ ID NO: 1945008 - RNA, 19 nt, Artificial Sequence
  Description of Artificial Sequence: Synthetic oligonucleotide
  Sense strand starting at position 2758 of SEQ ID NO: 1880139
gccaaaguccugggagcaa

SEQ ID NO: 1945009 - RNA, 19 nt, Artificial Sequence
  Description of Artificial Sequence: Synthetic oligonucleotide
  Antisense strand to SEQ ID NO: 1945008
uugcucccaggacuuuggc

SEQ ID NO: 1945010 - RNA, 19 nt, Artificial Sequence
  Description of Artificial Sequence: Synthetic oligonucleotide
  Sense strand starting at position 2767 of SEQ ID NO: 1880139
cugggagcaaagugucaua

SEQ ID NO: 1945011 - RNA, 19 nt, Artificial Sequence
  Description of Artificial Sequence: Synthetic oligonucleotide
  Antisense strand to SEQ ID NO: 1945010
uaugacacuuugcucccag

SEQ ID NO: 1945012 - RNA, 19 nt, Artificial Sequence
  Description of Artificial Sequence: Synthetic oligonucleotide
  Sense strand starting at position 2780 of SEQ ID NO: 1880139
gucauaacgcuccucguuu

SEQ ID NO: 1945013 - RNA, 19 nt, Artificial Sequence
  Description of Artificial Sequence: Synthetic oligonucleotide
  Antisense strand to SEQ ID NO: 1945012
aaacgaggagcguuaugac

SEQ ID NO: 1945014 - RNA, 19 nt, Artificial Sequence
  Description of Artificial Sequence: Synthetic oligonucleotide
  Sense strand starting at position 2841 of SEQ ID NO: 1880139
gugggaauccuuggccuuu

SEQ ID NO: 1945015 - RNA, 19 nt, Artificial Sequence
  Description of Artificial Sequence: Synthetic oligonucleotide
  Antisense strand to SEQ ID NO: 1945014
aaaggccaaggauucccac

SEQ ID NO: 1945016 - RNA, 19 nt, Artificial Sequence
  Description of Artificial Sequence: Synthetic oligonucleotide
  Sense strand starting at position 2875 of SEQ ID NO: 1880139
gaauguaaacgcuagcuuu

SEQ ID NO: 1945017 - RNA, 19 nt, Artificial Sequence
  Description of Artificial Sequence: Synthetic oligonucleotide
  Antisense strand to SEQ ID NO: 1945016
aaagcuagcguuuacauuc

SEQ ID NO: 1945018 - RNA, 19 nt, Artificial Sequence
  Description of Artificial Sequence: Synthetic oligonucleotide
  Sense strand starting at position 3009 of SEQ ID NO: 1880139
ccaauaggguaacagaaua

SEQ ID NO: 1945019 - RNA, 19 nt, Artificial Sequence
  Description of Artificial Sequence: Synthetic oligonucleotide
  Antisense strand to SEQ ID NO: 1945018
uauucuguuacccuauugg

SEQ ID NO: 1945020 - RNA, 19 nt, Artificial Sequence
  Description of Artificial Sequence: Synthetic oligonucleotide
  Sense strand starting at position 3218 of SEQ ID NO: 1880139
ugagauaaaucugggaauu

SEQ ID NO: 1945021 - RNA, 19 nt, Artificial Sequence
  Description of Artificial Sequence: Synthetic oligonucleotide
  Antisense strand to SEQ ID NO: 1945020
aauucccagauuuaucuca

SEQ ID NO: 1945022 - RNA, 19 nt, Artificial Sequence
  Description of Artificial Sequence: Synthetic oligonucleotide
  Sense strand starting at position 3280 of SEQ ID NO: 1880139
agaacaaaguuggcugauu

SEQ ID NO: 1945023 - RNA, 19 nt, Artificial Sequence
  Description of Artificial Sequence: Synthetic oligonucleotide
  Antisense strand to SEQ ID NO: 1945022
aaucagccaacuuuguucu

SEQ ID NO: 1945024 - RNA, 19 nt, Artificial Sequence
  Description of Artificial Sequence: Synthetic oligonucleotide
  Sense strand starting at position 3346 of SEQ ID NO: 1880139
aaaggaaucugauaaagga

SEQ ID NO: 1945025 - RNA, 19 nt, Artificial Sequence
  Description of Artificial Sequence: Synthetic oligonucleotide
  Antisense strand to SEQ ID NO: 1945024
uccuuuaucagauuccuuu

SEQ ID NO: 1945026 - RNA, 19 nt, Artificial Sequence
  Description of Artificial Sequence: Synthetic oligonucleotide
  Sense strand starting at position 3371 of SEQ ID NO: 1880139
acuggcuucccggaacaga

SEQ ID NO: 1945027 - RNA, 19 nt, Artificial Sequence
  Description of Artificial Sequence: Synthetic oligonucleotide
  Antisense strand to SEQ ID NO: 1945026
ucuguuccgggaagccagu

SEQ ID NO: 1945028 - RNA, 19 nt, Artificial Sequence
  Description of Artificial Sequence: Synthetic oligonucleotide
  Sense strand starting at position 3458 of SEQ ID NO: 1880139
ccgaguaauuaggagcaca

SEQ ID NO: 1945029 - RNA, 19 nt, Artificial Sequence
  Description of Artificial Sequence: Synthetic oligonucleotide
  Antisense strand to SEQ ID NO: 1945028
ugugcuccuaauuacucgg

SEQ ID NO: 1945030 - RNA, 19 nt, Artificial Sequence
  Description of Artificial Sequence: Synthetic oligonucleotide
  Sense strand starting at position 3471 of SEQ ID NO: 1880139
agcacauaauugggaagau

SEQ ID NO: 1945031 - RNA, 19 nt, Artificial Sequence
  Description of Artificial Sequence: Synthetic oligonucleotide
  Antisense strand to SEQ ID NO: 1945030
aucuucccaauuaugugcu

SEQ ID NO: 1945032 - RNA, 19 nt, Artificial Sequence
  Description of Artificial Sequence: Synthetic oligonucleotide
  Sense strand starting at position 3472 of SEQ ID NO: 1880139
gcacauaauugggaagaug

SEQ ID NO: 1945033 - RNA, 19 nt, Artificial Sequence
  Description of Artificial Sequence: Synthetic oligonucleotide
  Antisense strand to SEQ ID NO: 1945032
caucuucccaauuaugugc

SEQ ID NO: 1945034 - RNA, 19 nt, Artificial Sequence
  Description of Artificial Sequence: Synthetic oligonucleotide
  Sense strand starting at position 3505 of SEQ ID NO: 1880139
ugcaguuaucucugauaug

SEQ ID NO: 1945035 - RNA, 19 nt, Artificial Sequence
  Description of Artificial Sequence: Synthetic oligonucleotide
  Antisense strand to SEQ ID NO: 1945034
cauaucagagauaacugca

SEQ ID NO: 1945036 - RNA, 19 nt, Artificial Sequence
  Description of Artificial Sequence: Synthetic oligonucleotide
  Sense strand starting at position 3523 of SEQ ID NO: 1880139
ggccaauuggcuugaagaa

SEQ ID NO: 1945037 - RNA, 19 nt, Artificial Sequence
  Description of Artificial Sequence: Synthetic oligonucleotide
  Antisense strand to SEQ ID NO: 1945036
uucuucaagccaauuggcc

SEQ ID NO: 1945038 - RNA, 19 nt, Artificial Sequence
  Description of Artificial Sequence: Synthetic oligonucleotide
  Sense strand starting at position 3524 of SEQ ID NO: 1880139
gccaauuggcuugaagaaa

SEQ ID NO: 1945039 - RNA, 19 nt, Artificial Sequence
  Description of Artificial Sequence: Synthetic oligonucleotide
  Antisense strand to SEQ ID NO: 1945038
uuucuucaagccaauuggc

SEQ ID NO: 1945040 - RNA, 19 nt, Artificial Sequence
  Description of Artificial Sequence: Synthetic oligonucleotide
  Sense strand starting at position 3597 of SEQ ID NO: 1880139
auaauuaacugcuaaagag

SEQ ID NO: 1945041 - RNA, 19 nt, Artificial Sequence
  Description of Artificial Sequence: Synthetic oligonucleotide
  Antisense strand to SEQ ID NO: 1945040
cucuuuagcaguuaauuau

SEQ ID NO: 1945042 - RNA, 19 nt, Artificial Sequence
  Description of Artificial Sequence: Synthetic oligonucleotide
  Sense strand starting at position 3667 of SEQ ID NO: 1880139
uucgaaauccaguguuacu

SEQ ID NO: 1945043 - RNA, 19 nt, Artificial Sequence
  Description of Artificial Sequence: Synthetic oligonucleotide
  Antisense strand to SEQ ID NO: 1945042
aguaacacuggauuucgaa

SEQ ID NO: 1945044 - RNA, 19 nt, Artificial Sequence
  Description of Artificial Sequence: Synthetic oligonucleotide
  Sense strand starting at position 339 of SEQ ID NO: 1880140
ugcaaacucccaggucuaa

SEQ ID NO: 1945045 - RNA, 19 nt, Artificial Sequence
  Description of Artificial Sequence: Synthetic oligonucleotide
  Antisense strand to SEQ ID NO: 1945044
uuagaccugggaguuugca

SEQ ID NO: 1945046 - RNA, 19 nt, Artificial Sequence
  Description of Artificial Sequence: Synthetic oligonucleotide
  Sense strand starting at position 463 of SEQ ID NO: 1880140
ugaauugguccacggagga

SEQ ID NO: 1945047 - RNA, 19 nt, Artificial Sequence
  Description of Artificial Sequence: Synthetic oligonucleotide
  Antisense strand to SEQ ID NO: 1945046
uccuccguggaccaauuca

SEQ ID NO: 1945048 - RNA, 19 nt, Artificial Sequence
  Description of Artificial Sequence: Synthetic oligonucleotide
  Sense strand starting at position 532 of SEQ ID NO: 1880140
gcugucuugccugccagaa

SEQ ID NO: 1945049 - RNA, 19 nt, Artificial Sequence
  Description of Artificial Sequence: Synthetic oligonucleotide
  Antisense strand to SEQ ID NO: 1945048
uucuggcaggcaagacagc

SEQ ID NO: 1945050 - RNA, 19 nt, Artificial Sequence
  Description of Artificial Sequence: Synthetic oligonucleotide
  Sense strand starting at position 656 of SEQ ID NO: 1880140
uguuucugucacuaaauca

SEQ ID NO: 1945051 - RNA, 19 nt, Artificial Sequence
  Description of Artificial Sequence: Synthetic oligonucleotide
  Antisense strand to SEQ ID NO: 1945050
ugauuuagugacagaaaca

SEQ ID NO: 1945052 - RNA, 19 nt, Artificial Sequence
  Description of Artificial Sequence: Synthetic oligonucleotide
  Sense strand starting at position 850 of SEQ ID NO: 1880140
aagugauugcagcaacucu

SEQ ID NO: 1945053 - RNA, 19 nt, Artificial Sequence
  Description of Artificial Sequence: Synthetic oligonucleotide
  Antisense strand to SEQ ID NO: 1945052
agaguugcugcaaucacuu

SEQ ID NO: 1945054 - RNA, 19 nt, Artificial Sequence
  Description of Artificial Sequence: Synthetic oligonucleotide
  Sense strand starting at position 1096 of SEQ ID NO: 1880140
ucauuacaaguuggcuaau

SEQ ID NO: 1945055 - RNA, 19 nt, Artificial Sequence
  Description of Artificial Sequence: Synthetic oligonucleotide
  Antisense strand to SEQ ID NO: 1945054
auuagccaacuuguaauga

SEQ ID NO: 1945056 - RNA, 19 nt, Artificial Sequence
  Description of Artificial Sequence: Synthetic oligonucleotide
  Sense strand starting at position 1194 of SEQ ID NO: 1880140
auucuaucuuugucucaga

SEQ ID NO: 1945057 - RNA, 19 nt, Artificial Sequence
  Description of Artificial Sequence: Synthetic oligonucleotide
  Antisense strand to SEQ ID NO: 1945056
ucugagacaaagauagaau

SEQ ID NO: 1945058 - RNA, 19 nt, Artificial Sequence
  Description of Artificial Sequence: Synthetic oligonucleotide
  Sense strand starting at position 1231 of SEQ ID NO: 1880140
gguuuacucucuccuuaga

SEQ ID NO: 1945059 - RNA, 19 nt, Artificial Sequence
  Description of Artificial Sequence: Synthetic oligonucleotide
  Antisense strand to SEQ ID NO: 1945058
ucuaaggagagaguaaacc

SEQ ID NO: 1945060 - RNA, 19 nt, Artificial Sequence
  Description of Artificial Sequence: Synthetic oligonucleotide
  Sense strand starting at position 1415 of SEQ ID NO: 1880140
agucauucguauuucccaa

SEQ ID NO: 1945061 - RNA, 19 nt, Artificial Sequence
  Description of Artificial Sequence: Synthetic oligonucleotide
  Antisense strand to SEQ ID NO: 1945060
uugggaaauacgaaugacu

SEQ ID NO: 1945062 - RNA, 19 nt, Artificial Sequence
  Description of Artificial Sequence: Synthetic oligonucleotide
  Sense strand starting at position 1477 of SEQ ID NO: 1880140
gggagauacuuaccuccau

SEQ ID NO: 1945063 - RNA, 19 nt, Artificial Sequence
  Description of Artificial Sequence: Synthetic oligonucleotide
  Antisense strand to SEQ ID NO: 1945062
auggagguaaguaucuccc

SEQ ID NO: 1945064 - RNA, 19 nt, Artificial Sequence
  Description of Artificial Sequence: Synthetic oligonucleotide
  Sense strand starting at position 1632 of SEQ ID NO: 1880140
ggcuaacaagaguggucau

SEQ ID NO: 1945065 - RNA, 19 nt, Artificial Sequence
  Description of Artificial Sequence: Synthetic oligonucleotide
  Antisense strand to SEQ ID NO: 1945064
augaccacucuuguuagcc

SEQ ID NO: 1945066 - RNA, 19 nt, Artificial Sequence
  Description of Artificial Sequence: Synthetic oligonucleotide
  Sense strand starting at position 1702 of SEQ ID NO: 1880140
ucaggaaucugccucuaga

SEQ ID NO: 1945067 - RNA, 19 nt, Artificial Sequence
  Description of Artificial Sequence: Synthetic oligonucleotide
  Antisense strand to SEQ ID NO: 1945066
ucuagaggcagauuccuga

SEQ ID NO: 1945068 - RNA, 19 nt, Artificial Sequence
  Description of Artificial Sequence: Synthetic oligonucleotide
  Sense strand starting at position 1871 of SEQ ID NO: 1880140
guuugauuaacucaggguu

SEQ ID NO: 1945069 - RNA, 19 nt, Artificial Sequence
  Description of Artificial Sequence: Synthetic oligonucleotide
  Antisense strand to SEQ ID NO: 1945068
aacccugaguuaaucaaac

SEQ ID NO: 1945070 - RNA, 19 nt, Artificial Sequence
  Description of Artificial Sequence: Synthetic oligonucleotide
  Sense strand starting at position 1951 of SEQ ID NO: 1880140
acgaucuauuaucuaggaa

SEQ ID NO: 1945071 - RNA, 19 nt, Artificial Sequence
  Description of Artificial Sequence: Synthetic oligonucleotide
  Antisense strand to SEQ ID NO: 1945070
uuccuagauaauagaucgu

SEQ ID NO: 1945072 - RNA, 19 nt, Artificial Sequence
  Description of Artificial Sequence: Synthetic oligonucleotide
  Sense strand starting at position 1967 of SEQ ID NO: 1880140
gaagccaaucgauguauga

SEQ ID NO: 1945073 - RNA, 19 nt, Artificial Sequence
  Description of Artificial Sequence: Synthetic oligonucleotide
  Antisense strand to SEQ ID NO: 1945072
ucauacaucgauuggcuuc

SEQ ID NO: 1945074 - RNA, 19 nt, Artificial Sequence
  Description of Artificial Sequence: Synthetic oligonucleotide
  Sense strand starting at position 2028 of SEQ ID NO: 1880140
auggaagacucuuuaggug

SEQ ID NO: 1945075 - RNA, 19 nt, Artificial Sequence
  Description of Artificial Sequence: Synthetic oligonucleotide
  Antisense strand to SEQ ID NO: 1945074
caccuaaagagucuuccau

SEQ ID NO: 1945076 - RNA, 19 nt, Artificial Sequence
  Description of Artificial Sequence: Synthetic oligonucleotide
  Sense strand starting at position 2113 of SEQ ID NO: 1880140
cuucuaucuguccaaugua

SEQ ID NO: 1945077 - RNA, 19 nt, Artificial Sequence
  Description of Artificial Sequence: Synthetic oligonucleotide
  Antisense strand to SEQ ID NO: 1945076
uacauuggacagauagaag

SEQ ID NO: 1945078 - RNA, 19 nt, Artificial Sequence
  Description of Artificial Sequence: Synthetic oligonucleotide
  Sense strand starting at position 2249 of SEQ ID NO: 1880140
uagaguagcccuuaaguug

SEQ ID NO: 1945079 - RNA, 19 nt, Artificial Sequence
  Description of Artificial Sequence: Synthetic oligonucleotide
  Antisense strand to SEQ ID NO: 1945078
caacuuaagggcuacucua

SEQ ID NO: 1945080 - RNA, 19 nt, Artificial Sequence
  Description of Artificial Sequence: Synthetic oligonucleotide
  Sense strand starting at position 2292 of SEQ ID NO: 1880140
gccggaagcauuuaucugu

SEQ ID NO: 1945081 - RNA, 19 nt, Artificial Sequence
  Description of Artificial Sequence: Synthetic oligonucleotide
  Antisense strand to SEQ ID NO: 1945080
acagauaaaugcuuccggc

SEQ ID NO: 1945082 - RNA, 19 nt, Artificial Sequence
  Description of Artificial Sequence: Synthetic oligonucleotide
  Sense strand starting at position 2298 of SEQ ID NO: 1880140
agcauuuaucugugcucua

SEQ ID NO: 1945083 - RNA, 19 nt, Artificial Sequence
  Description of Artificial Sequence: Synthetic oligonucleotide
  Antisense strand to SEQ ID NO: 1945082
uagagcacagauaaaugcu

SEQ ID NO: 1945084 - RNA, 19 nt, Artificial Sequence
  Description of Artificial Sequence: Synthetic oligonucleotide
  Sense strand starting at position 2299 of SEQ ID NO: 1880140
gcauuuaucugugcucuaa

SEQ ID NO: 1945085 - RNA, 19 nt, Artificial Sequence
  Description of Artificial Sequence: Synthetic oligonucleotide
  Antisense strand to SEQ ID NO: 1945084
uuagagcacagauaaaugc

SEQ ID NO: 1945086 - RNA, 19 nt, Artificial Sequence
  Description of Artificial Sequence: Synthetic oligonucleotide
  Sense strand starting at position 2310 of SEQ ID NO: 1880140
ugcucuaacaaugggaguu

SEQ ID NO: 1945087 - RNA, 19 nt, Artificial Sequence
  Description of Artificial Sequence: Synthetic oligonucleotide
  Antisense strand to SEQ ID NO: 1945086
aacucccauuguuagagca

SEQ ID NO: 1945088 - RNA, 19 nt, Artificial Sequence
  Description of Artificial Sequence: Synthetic oligonucleotide
  Sense strand starting at position 2311 of SEQ ID NO: 1880140
gcucuaacaaugggaguuu

SEQ ID NO: 1945089 - RNA, 19 nt, Artificial Sequence
  Description of Artificial Sequence: Synthetic oligonucleotide
  Antisense strand to SEQ ID NO: 1945088
aaacucccauuguuagagc

SEQ ID NO: 1945090 - RNA, 19 nt, Artificial Sequence
  Description of Artificial Sequence: Synthetic oligonucleotide
  Sense strand starting at position 2405 of SEQ ID NO: 1880140
aggucuuucucugcauuua

SEQ ID NO: 1945091 - RNA, 19 nt, Artificial Sequence
  Description of Artificial Sequence: Synthetic oligonucleotide
  Antisense strand to SEQ ID NO: 1945090
uaaaugcagagaaagaccu

SEQ ID NO: 1945092 - RNA, 19 nt, Artificial Sequence
  Description of Artificial Sequence: Synthetic oligonucleotide
  Sense strand starting at position 2467 of SEQ ID NO: 1880140
cuggguccucacuaacaca

SEQ ID NO: 1945093 - RNA, 19 nt, Artificial Sequence
  Description of Artificial Sequence: Synthetic oligonucleotide
  Antisense strand to SEQ ID NO: 1945092
uguguuagugaggacccag

SEQ ID NO: 1945094 - RNA, 19 nt, Artificial Sequence
  Description of Artificial Sequence: Synthetic oligonucleotide
  Sense strand starting at position 2490 of SEQ ID NO: 1880140
cugucuuguguggaacuga

SEQ ID NO: 1945095 - RNA, 19 nt, Artificial Sequence
  Description of Artificial Sequence: Synthetic oligonucleotide
  Antisense strand to SEQ ID NO: 1945094
ucaguuccacacaagacag

SEQ ID NO: 1945096 - RNA, 19 nt, Artificial Sequence
  Description of Artificial Sequence: Synthetic oligonucleotide
  Sense strand starting at position 2499 of SEQ ID NO: 1880140
guggaacugacccgagauc

SEQ ID NO: 1945097 - RNA, 19 nt, Artificial Sequence
  Description of Artificial Sequence: Synthetic oligonucleotide
  Antisense strand to SEQ ID NO: 1945096
gaucucgggucaguuccac

SEQ ID NO: 1945098 - RNA, 19 nt, Artificial Sequence
  Description of Artificial Sequence: Synthetic oligonucleotide
  Sense strand starting at position 2785 of SEQ ID NO: 1880140
ucugcaaauccugagauug

SEQ ID NO: 1945099 - RNA, 19 nt, Artificial Sequence
  Description of Artificial Sequence: Synthetic oligonucleotide
  Antisense strand to SEQ ID NO: 1945098
caaucucaggauuugcaga

SEQ ID NO: 1945100 - RNA, 19 nt, Artificial Sequence
  Description of Artificial Sequence: Synthetic oligonucleotide
  Sense strand starting at position 3374 of SEQ ID NO: 1880140
augagaguccaguggacau

SEQ ID NO: 1945101 - RNA, 19 nt, Artificial Sequence
  Description of Artificial Sequence: Synthetic oligonucleotide
  Antisense strand to SEQ ID NO: 1945100
auguccacuggacucucau

SEQ ID NO: 1945102 - RNA, 19 nt, Artificial Sequence
  Description of Artificial Sequence: Synthetic oligonucleotide
  Sense strand starting at position 3723 of SEQ ID NO: 1880140
uuauucgacucauugauaa

SEQ ID NO: 1945103 - RNA, 19 nt, Artificial Sequence
  Description of Artificial Sequence: Synthetic oligonucleotide
  Antisense strand to SEQ ID NO: 1945102
uuaucaaugagucgaauaa

SEQ ID NO: 1945104 - RNA, 19 nt, Artificial Sequence
  Description of Artificial Sequence: Synthetic oligonucleotide
  Sense strand starting at position 3796 of SEQ ID NO: 1880140
ucauuagugccuuagacac

SEQ ID NO: 1945105 - RNA, 19 nt, Artificial Sequence
  Description of Artificial Sequence: Synthetic oligonucleotide
  Antisense strand to SEQ ID NO: 1945104
gugucuaaggcacuaauga

SEQ ID NO: 1945106 - RNA, 19 nt, Artificial Sequence
  Description of Artificial Sequence: Synthetic oligonucleotide
  Sense strand starting at position 3820 of SEQ ID NO: 1880140
ucugcuacucacuaguuau

SEQ ID NO: 1945107 - RNA, 19 nt, Artificial Sequence
  Description of Artificial Sequence: Synthetic oligonucleotide
  Antisense strand to SEQ ID NO: 1945106
auaacuagugaguagcaga

SEQ ID NO: 1945108 - RNA, 19 nt, Artificial Sequence
  Description of Artificial Sequence: Synthetic oligonucleotide
  Sense strand starting at position 3831 of SEQ ID NO: 1880140
cuaguuauauggccuugaa

SEQ ID NO: 1945109 - RNA, 19 nt, Artificial Sequence
  Description of Artificial Sequence: Synthetic oligonucleotide
  Antisense strand to SEQ ID NO: 1945108
uucaaggccauauaacuag

SEQ ID NO: 1945110 - RNA, 19 nt, Artificial Sequence
  Description of Artificial Sequence: Synthetic oligonucleotide
  Sense strand starting at position 3834 of SEQ ID NO: 1880140
guuauauggccuugaaagg

SEQ ID NO: 1945111 - RNA, 19 nt, Artificial Sequence
  Description of Artificial Sequence: Synthetic oligonucleotide
  Antisense strand to SEQ ID NO: 1945110
ccuuucaaggccauauaac

SEQ ID NO: 1945112 - RNA, 19 nt, Artificial Sequence
  Description of Artificial Sequence: Synthetic oligonucleotide
  Sense strand starting at position 3844 of SEQ ID NO: 1880140
cuugaaaggcuauauguau

SEQ ID NO: 1945113 - RNA, 19 nt, Artificial Sequence
  Description of Artificial Sequence: Synthetic oligonucleotide
  Antisense strand to SEQ ID NO: 1945112
auacauauagccuuucaag

SEQ ID NO: 1945114 - RNA, 19 nt, Artificial Sequence
  Description of Artificial Sequence: Synthetic oligonucleotide
  Sense strand starting at position 3850 of SEQ ID NO: 1880140
aggcuauauguauaguaaa

SEQ ID NO: 1945115 - RNA, 19 nt, Artificial Sequence
  Description of Artificial Sequence: Synthetic oligonucleotide
  Antisense strand to SEQ ID NO: 1945114
uuuacuauacauauagccu

SEQ ID NO: 1945116 - RNA, 19 nt, Artificial Sequence
  Description of Artificial Sequence: Synthetic oligonucleotide
  Sense strand starting at position 3893 of SEQ ID NO: 1880140
ccaacauugcuggguacaa

SEQ ID NO: 1945117 - RNA, 19 nt, Artificial Sequence
  Description of Artificial Sequence: Synthetic oligonucleotide
  Antisense strand to SEQ ID NO: 1945116
uuguacccagcaauguugg

SEQ ID NO: 1945118 - RNA, 19 nt, Artificial Sequence
  Description of Artificial Sequence: Synthetic oligonucleotide
  Sense strand starting at position 3894 of SEQ ID NO: 1880140
caacauugcuggguacaaa

SEQ ID NO: 1945119 - RNA, 19 nt, Artificial Sequence
  Description of Artificial Sequence: Synthetic oligonucleotide
  Antisense strand to SEQ ID NO: 1945118
uuuguacccagcaauguug

SEQ ID NO: 1945120 - RNA, 19 nt, Artificial Sequence
  Description of Artificial Sequence: Synthetic oligonucleotide
  Sense strand starting at position 3895 of SEQ ID NO: 1880140
aacauugcuggguacaaau

SEQ ID NO: 1945121 - RNA, 19 nt, Artificial Sequence
  Description of Artificial Sequence: Synthetic oligonucleotide
  Antisense strand to SEQ ID NO: 1945120
auuuguacccagcaauguu

SEQ ID NO: 1945122 - RNA, 19 nt, Artificial Sequence
  Description of Artificial Sequence: Synthetic oligonucleotide
  Sense strand starting at position 3944 of SEQ ID NO: 1880140
cuggcaaaugaguaaaucu

SEQ ID NO: 1945123 - RNA, 19 nt, Artificial Sequence
  Description of Artificial Sequence: Synthetic oligonucleotide
  Antisense strand to SEQ ID NO: 1945122
agauuuacucauuugccag

SEQ ID NO: 1945124 - RNA, 19 nt, Artificial Sequence
  Description of Artificial Sequence: Synthetic oligonucleotide
  Sense strand starting at position 1374 of SEQ ID NO: 1880141
ggccuugcugaagaugaga

SEQ ID NO: 1945125 - RNA, 19 nt, Artificial Sequence
  Description of Artificial Sequence: Synthetic oligonucleotide
  Antisense strand to SEQ ID NO: 1945124
ucucaucuucagcaaggcc

SEQ ID NO: 1945126 - RNA, 19 nt, Artificial Sequence
  Description of Artificial Sequence: Synthetic oligonucleotide
  Sense strand starting at position 1406 of SEQ ID NO: 1880141
ggaccaaagauucguguua

SEQ ID NO: 1945127 - RNA, 19 nt, Artificial Sequence
  Description of Artificial Sequence: Synthetic oligonucleotide
  Antisense strand to SEQ ID NO: 1945126
uaacacgaaucuuuggucc

SEQ ID NO: 1945128 - RNA, 19 nt, Artificial Sequence
  Description of Artificial Sequence: Synthetic oligonucleotide
  Sense strand starting at position 1407 of SEQ ID NO: 1880141
gaccaaagauucguguuag

SEQ ID NO: 1945129 - RNA, 19 nt, Artificial Sequence
  Description of Artificial Sequence: Synthetic oligonucleotide
  Antisense strand to SEQ ID NO: 1945128
cuaacacgaaucuuugguc

SEQ ID NO: 1945130 - RNA, 19 nt, Artificial Sequence
  Description of Artificial Sequence: Synthetic oligonucleotide
  Sense strand starting at position 2153 of SEQ ID NO: 1880141
aacugugaucgccacauaa

SEQ ID NO: 1945131 - RNA, 19 nt, Artificial Sequence
  Description of Artificial Sequence: Synthetic oligonucleotide
  Antisense strand to SEQ ID NO: 1945130
uuauguggcgaucacaguu

SEQ ID NO: 1945132 - RNA, 19 nt, Artificial Sequence
  Description of Artificial Sequence: Synthetic oligonucleotide
  Sense strand starting at position 2301 of SEQ ID NO: 1880141
gggcucuuucccugaaccu

SEQ ID NO: 1945133 - RNA, 19 nt, Artificial Sequence
  Description of Artificial Sequence: Synthetic oligonucleotide
  Antisense strand to SEQ ID NO: 1945132
agguucagggaaagagccc

SEQ ID NO: 1945134 - RNA, 19 nt, Artificial Sequence
  Description of Artificial Sequence: Synthetic oligonucleotide
  Sense strand starting at position 2342 of SEQ ID NO: 1880141
acaagaggauggcauauuu

SEQ ID NO: 1945135 - RNA, 19 nt, Artificial Sequence
  Description of Artificial Sequence: Synthetic oligonucleotide
  Antisense strand to SEQ ID NO: 1945134
aaauaugccauccucuugu

SEQ ID NO: 1945136 - RNA, 19 nt, Artificial Sequence
  Description of Artificial Sequence: Synthetic oligonucleotide
  Sense strand starting at position 2370 of SEQ ID NO: 1880141
gcuaccucagcuuaagauu

SEQ ID NO: 1945137 - RNA, 19 nt, Artificial Sequence
  Description of Artificial Sequence: Synthetic oligonucleotide
  Antisense strand to SEQ ID NO: 1945136
aaucuuaagcugagguagc

SEQ ID NO: 1945138 - RNA, 19 nt, Artificial Sequence
  Description of Artificial Sequence: Synthetic oligonucleotide
  Sense strand starting at position 2398 of SEQ ID NO: 1880141
gugccuuagaaaugguaua

SEQ ID NO: 1945139 - RNA, 19 nt, Artificial Sequence
  Description of Artificial Sequence: Synthetic oligonucleotide
  Antisense strand to SEQ ID NO: 1945138
uauaccauuucuaaggcac

SEQ ID NO: 1945140 - RNA, 19 nt, Artificial Sequence
  Description of Artificial Sequence: Synthetic oligonucleotide
  Sense strand starting at position 2542 of SEQ ID NO: 1880141
agcagauuugaacgccgua

SEQ ID NO: 1945141 - RNA, 19 nt, Artificial Sequence
  Description of Artificial Sequence: Synthetic oligonucleotide
  Antisense strand to SEQ ID NO: 1945140
uacggcguucaaaucugcu

SEQ ID NO: 1945142 - RNA, 19 nt, Artificial Sequence
  Description of Artificial Sequence: Synthetic oligonucleotide
  Sense strand starting at position 2545 of SEQ ID NO: 1880141
agauuugaacgccguauaa

SEQ ID NO: 1945143 - RNA, 19 nt, Artificial Sequence
  Description of Artificial Sequence: Synthetic oligonucleotide
  Antisense strand to SEQ ID NO: 1945142
uuauacggcguucaaaucu

SEQ ID NO: 1945144 - RNA, 19 nt, Artificial Sequence
  Description of Artificial Sequence: Synthetic oligonucleotide
  Sense strand starting at position 2571 of SEQ ID NO: 1880141
aggucaugucuugggucaa

SEQ ID NO: 1945145 - RNA, 19 nt, Artificial Sequence
  Description of Artificial Sequence: Synthetic oligonucleotide
  Antisense strand to SEQ ID NO: 1945144
uugacccaagacaugaccu

SEQ ID NO: 1945146 - RNA, 19 nt, Artificial Sequence
  Description of Artificial Sequence: Synthetic oligonucleotide
  Sense strand starting at position 2603 of SEQ ID NO: 1880141
ugaagaacgguuuguauca

SEQ ID NO: 1945147 - RNA, 19 nt, Artificial Sequence
  Description of Artificial Sequence: Synthetic oligonucleotide
  Antisense strand to SEQ ID NO: 1945146
ugauacaaaccguucuuca

SEQ ID NO: 1945148 - RNA, 19 nt, Artificial Sequence
  Description of Artificial Sequence: Synthetic oligonucleotide
  Sense strand starting at position 2604 of SEQ ID NO: 1880141
gaagaacgguuuguaucau

SEQ ID NO: 1945149 - RNA, 19 nt, Artificial Sequence
  Description of Artificial Sequence: Synthetic oligonucleotide
  Antisense strand to SEQ ID NO: 1945148
augauacaaaccguucuuc

SEQ ID NO: 1945150 - RNA, 19 nt, Artificial Sequence
  Description of Artificial Sequence: Synthetic oligonucleotide
  Sense strand starting at position 2655 of SEQ ID NO: 1880141
gaaauauucuaguugccga

SEQ ID NO: 1945151 - RNA, 19 nt, Artificial Sequence
  Description of Artificial Sequence: Synthetic oligonucleotide
  Antisense strand to SEQ ID NO: 1945150
ucggcaacuagaauauuuc

SEQ ID NO: 1945152 - RNA, 19 nt, Artificial Sequence
  Description of Artificial Sequence: Synthetic oligonucleotide
  Sense strand starting at position 2660 of SEQ ID NO: 1880141
auucuaguugccgagugaa

SEQ ID NO: 1945153 - RNA, 19 nt, Artificial Sequence
  Description of Artificial Sequence: Synthetic oligonucleotide
  Antisense strand to SEQ ID NO: 1945152
uucacucggcaacuagaau

SEQ ID NO: 1945154 - RNA, 19 nt, Artificial Sequence
  Description of Artificial Sequence: Synthetic oligonucleotide
  Sense strand starting at position 2816 of SEQ ID NO: 1880141
gaagcuagaugugcuaaga

SEQ ID NO: 1945155 - RNA, 19 nt, Artificial Sequence
  Description of Artificial Sequence: Synthetic oligonucleotide
  Antisense strand to SEQ ID NO: 1945154
ucuuagcacaucuagcuuc

SEQ ID NO: 1945156 - RNA, 19 nt, Artificial Sequence
  Description of Artificial Sequence: Synthetic oligonucleotide
  Sense strand starting at position 2867 of SEQ ID NO: 1880141
cugagaugagggugugaca

SEQ ID NO: 1945157 - RNA, 19 nt, Artificial Sequence
  Description of Artificial Sequence: Synthetic oligonucleotide
  Antisense strand to SEQ ID NO: 1945156
ugucacacccucaucucag

SEQ ID NO: 1945158 - RNA, 19 nt, Artificial Sequence
  Description of Artificial Sequence: Synthetic oligonucleotide
  Sense strand starting at position 2874 of SEQ ID NO: 1880141
gagggugugacauagcuaa

SEQ ID NO: 1945159 - RNA, 19 nt, Artificial Sequence
  Description of Artificial Sequence: Synthetic oligonucleotide
  Antisense strand to SEQ ID NO: 1945158
uuagcuaugucacacccuc

SEQ ID NO: 1945160 - RNA, 19 nt, Artificial Sequence
  Description of Artificial Sequence: Synthetic oligonucleotide
  Sense strand starting at position 3167 of SEQ ID NO: 1880141
ucuauaaacgcucgaacaa

SEQ ID NO: 1945161 - RNA, 19 nt, Artificial Sequence
  Description of Artificial Sequence: Synthetic oligonucleotide
  Antisense strand to SEQ ID NO: 1945160
uuguucgagcguuuauaga

SEQ ID NO: 1945162 - RNA, 19 nt, Artificial Sequence
  Description of Artificial Sequence: Synthetic oligonucleotide
  Sense strand starting at position 3191 of SEQ ID NO: 1880141
guugaugagcuucaggguu

SEQ ID NO: 1945163 - RNA, 19 nt, Artificial Sequence
  Description of Artificial Sequence: Synthetic oligonucleotide
  Antisense strand to SEQ ID NO: 1945162
aacccugaagcucaucaac

SEQ ID NO: 1945164 - RNA, 19 nt, Artificial Sequence
  Description of Artificial Sequence: Synthetic oligonucleotide
  Sense strand starting at position 3232 of SEQ ID NO: 1880141
gagggugucuugcccagaa

SEQ ID NO: 1945165 - RNA, 19 nt, Artificial Sequence
  Description of Artificial Sequence: Synthetic oligonucleotide
  Antisense strand to SEQ ID NO: 1945164
uucugggcaagacacccuc

SEQ ID NO: 1945166 - RNA, 19 nt, Artificial Sequence
  Description of Artificial Sequence: Synthetic oligonucleotide
  Sense strand starting at position 3234 of SEQ ID NO: 1880141
gggugucuugcccagaaag

SEQ ID NO: 1945167 - RNA, 19 nt, Artificial Sequence
  Description of Artificial Sequence: Synthetic oligonucleotide
  Antisense strand to SEQ ID NO: 1945166
cuuucugggcaagacaccc

SEQ ID NO: 1945168 - RNA, 19 nt, Artificial Sequence
  Description of Artificial Sequence: Synthetic oligonucleotide
  Sense strand starting at position 3236 of SEQ ID NO: 1880141
gugucuugcccagaaaggu

SEQ ID NO: 1945169 - RNA, 19 nt, Artificial Sequence
  Description of Artificial Sequence: Synthetic oligonucleotide
  Antisense strand to SEQ ID NO: 1945168
accuuucugggcaagacac

SEQ ID NO: 1945170 - RNA, 19 nt, Artificial Sequence
  Description of Artificial Sequence: Synthetic oligonucleotide
  Sense strand starting at position 3312 of SEQ ID NO: 1880141
auuuguacccuuuguacua

SEQ ID NO: 1945171 - RNA, 19 nt, Artificial Sequence
  Description of Artificial Sequence: Synthetic oligonucleotide
  Antisense strand to SEQ ID NO: 1945170
uaguacaaaggguacaaau

SEQ ID NO: 1945172 - RNA, 19 nt, Artificial Sequence
  Description of Artificial Sequence: Synthetic oligonucleotide
  Sense strand starting at position 3346 of SEQ ID NO: 1880141
ugguaaauguuuccuugag

SEQ ID NO: 1945173 - RNA, 19 nt, Artificial Sequence
  Description of Artificial Sequence: Synthetic oligonucleotide
  Antisense strand to SEQ ID NO: 1945172
cucaaggaaacauuuacca

SEQ ID NO: 1945174 - RNA, 19 nt, Artificial Sequence
  Description of Artificial Sequence: Synthetic oligonucleotide
  Sense strand starting at position 3347 of SEQ ID NO: 1880141
gguaaauguuuccuugagg

SEQ ID NO: 1945175 - RNA, 19 nt, Artificial Sequence
  Description of Artificial Sequence: Synthetic oligonucleotide
  Antisense strand to SEQ ID NO: 1945174
ccucaaggaaacauuuacc

SEQ ID NO: 1945176 - RNA, 19 nt, Artificial Sequence
  Description of Artificial Sequence: Synthetic oligonucleotide
  Sense strand starting at position 3350 of SEQ ID NO: 1880141
aaauguuuccuugaggucu

SEQ ID NO: 1945177 - RNA, 19 nt, Artificial Sequence
  Description of Artificial Sequence: Synthetic oligonucleotide
  Antisense strand to SEQ ID NO: 1945176
agaccucaaggaaacauuu

SEQ ID NO: 1945178 - RNA, 19 nt, Artificial Sequence
  Description of Artificial Sequence: Synthetic oligonucleotide
  Sense strand starting at position 3370 of SEQ ID NO: 1880141
ugagccuucucagcaaauu

SEQ ID NO: 1945179 - RNA, 19 nt, Artificial Sequence
  Description of Artificial Sequence: Synthetic oligonucleotide
  Antisense strand to SEQ ID NO: 1945178
aauuugcugagaaggcuca

SEQ ID NO: 1945180 - RNA, 19 nt, Artificial Sequence
  Description of Artificial Sequence: Synthetic oligonucleotide
  Sense strand starting at position 3430 of SEQ ID NO: 1880141
gcugcuaagaaguauaggu

SEQ ID NO: 1945181 - RNA, 19 nt, Artificial Sequence
  Description of Artificial Sequence: Synthetic oligonucleotide
  Antisense strand to SEQ ID NO: 1945180
accuauacuucuuagcagc

SEQ ID NO: 1945182 - RNA, 19 nt, Artificial Sequence
  Description of Artificial Sequence: Synthetic oligonucleotide
  Sense strand starting at position 3463 of SEQ ID NO: 1880141
gcaauuggcaucugaagag

SEQ ID NO: 1945183 - RNA, 19 nt, Artificial Sequence
  Description of Artificial Sequence: Synthetic oligonucleotide
  Antisense strand to SEQ ID NO: 1945182
cucuucagaugccaauugc

SEQ ID NO: 1945184 - RNA, 19 nt, Artificial Sequence
  Description of Artificial Sequence: Synthetic oligonucleotide
  Sense strand starting at position 3483 of SEQ ID NO: 1880141
agcagucuagugggaucaa

SEQ ID NO: 1945185 - RNA, 19 nt, Artificial Sequence
  Description of Artificial Sequence: Synthetic oligonucleotide
  Antisense strand to SEQ ID NO: 1945184
uugaucccacuagacugcu

SEQ ID NO: 1945186 - RNA, 19 nt, Artificial Sequence
  Description of Artificial Sequence: Synthetic oligonucleotide
  Sense strand starting at position 3564 of SEQ ID NO: 1880141
ugaauuauagaaugcuuag

SEQ ID NO: 1945187 - RNA, 19 nt, Artificial Sequence
  Description of Artificial Sequence: Synthetic oligonucleotide
  Antisense strand to SEQ ID NO: 1945186
cuaagcauucuauaauuca

SEQ ID NO: 1945188 - RNA, 19 nt, Artificial Sequence
  Description of Artificial Sequence: Synthetic oligonucleotide
  Sense strand starting at position 3570 of SEQ ID NO: 1880141
auagaaugcuuagccaaug

SEQ ID NO: 1945189 - RNA, 19 nt, Artificial Sequence
  Description of Artificial Sequence: Synthetic oligonucleotide
  Antisense strand to SEQ ID NO: 1945188
cauuggcuaagcauucuau

SEQ ID NO: 1945190 - RNA, 19 nt, Artificial Sequence
  Description of Artificial Sequence: Synthetic oligonucleotide
  Sense strand starting at position 3582 of SEQ ID NO: 1880141
gccaauguccacuggagaa

SEQ ID NO: 1945191 - RNA, 19 nt, Artificial Sequence
  Description of Artificial Sequence: Synthetic oligonucleotide
  Antisense strand to SEQ ID NO: 1945190
uucuccaguggacauuggc

SEQ ID NO: 1945192 - RNA, 19 nt, Artificial Sequence
  Description of Artificial Sequence: Synthetic oligonucleotide
  Sense strand starting at position 3642 of SEQ ID NO: 1880141
cacugcaucuggucacaga

SEQ ID NO: 1945193 - RNA, 19 nt, Artificial Sequence
  Description of Artificial Sequence: Synthetic oligonucleotide
  Antisense strand to SEQ ID NO: 1945192
ucugugaccagaugcagug

SEQ ID NO: 1945194 - RNA, 19 nt, Artificial Sequence
  Description of Artificial Sequence: Synthetic oligonucleotide
  Sense strand starting at position 3643 of SEQ ID NO: 1880141
acugcaucuggucacagaa

SEQ ID NO: 1945195 - RNA, 19 nt, Artificial Sequence
  Description of Artificial Sequence: Synthetic oligonucleotide
  Antisense strand to SEQ ID NO: 1945194
uucugugaccagaugcagu

SEQ ID NO: 1945196 - RNA, 19 nt, Artificial Sequence
  Description of Artificial Sequence: Synthetic oligonucleotide
  Sense strand starting at position 3658 of SEQ ID NO: 1880141
agaaauguuguguguugag

SEQ ID NO: 1945197 - RNA, 19 nt, Artificial Sequence
  Description of Artificial Sequence: Synthetic oligonucleotide
  Antisense strand to SEQ ID NO: 1945196
cucaacacacaacauuucu

SEQ ID NO: 1945198 - RNA, 19 nt, Artificial Sequence
  Description of Artificial Sequence: Synthetic oligonucleotide
  Sense strand starting at position 3773 of SEQ ID NO: 1880141
guaggucaggucuaacaac

SEQ ID NO: 1945199 - RNA, 19 nt, Artificial Sequence
  Description of Artificial Sequence: Synthetic oligonucleotide
  Antisense strand to SEQ ID NO: 1945198
guuguuagaccugaccuac

SEQ ID NO: 1945200 - RNA, 19 nt, Artificial Sequence
  Description of Artificial Sequence: Synthetic oligonucleotide
  Sense strand starting at position 3914 of SEQ ID NO: 1880141
agcugcagucuuggaggaa

SEQ ID NO: 1945201 - RNA, 19 nt, Artificial Sequence
  Description of Artificial Sequence: Synthetic oligonucleotide
  Antisense strand to SEQ ID NO: 1945200
uuccuccaagacugcagcu

SEQ ID NO: 1945202 - RNA, 19 nt, Artificial Sequence
  Description of Artificial Sequence: Synthetic oligonucleotide
  Sense strand starting at position 3941 of SEQ ID NO: 1880141
agaagacucuccucaaagu

SEQ ID NO: 1945203 - RNA, 19 nt, Artificial Sequence
  Description of Artificial Sequence: Synthetic oligonucleotide
  Antisense strand to SEQ ID NO: 1945202
acuuugaggagagucuucu

SEQ ID NO: 1945204 - RNA, 19 nt, Artificial Sequence
  Description of Artificial Sequence: Synthetic oligonucleotide
  Sense strand starting at position 67 of SEQ ID NO: 1880142
gguuauaaacuggacuguu

SEQ ID NO: 1945205 - RNA, 19 nt, Artificial Sequence
  Description of Artificial Sequence: Synthetic oligonucleotide
  Antisense strand to SEQ ID NO: 1945204
aacaguccaguuuauaacc

SEQ ID NO: 1945206 - RNA, 19 nt, Artificial Sequence
  Description of Artificial Sequence: Synthetic oligonucleotide
  Sense strand starting at position 100 of SEQ ID NO: 1880142
cuagaugaauuauugcuaa

SEQ ID NO: 1945207 - RNA, 19 nt, Artificial Sequence
  Description of Artificial Sequence: Synthetic oligonucleotide
  Antisense strand to SEQ ID NO: 1945206
uuagcaauaauucaucuag

SEQ ID NO: 1945208 - RNA, 19 nt, Artificial Sequence
  Description of Artificial Sequence: Synthetic oligonucleotide
  Sense strand starting at position 142 of SEQ ID NO: 1880142
uaguaauccagugggagca

SEQ ID NO: 1945209 - RNA, 19 nt, Artificial Sequence
  Description of Artificial Sequence: Synthetic oligonucleotide
  Antisense strand to SEQ ID NO: 1945208
ugcucccacuggauuacua

SEQ ID NO: 1945210 - RNA, 19 nt, Artificial Sequence
  Description of Artificial Sequence: Synthetic oligonucleotide
  Sense strand starting at position 271 of SEQ ID NO: 1880142
uagcauaaagcugaguaga

SEQ ID NO: 1945211 - RNA, 19 nt, Artificial Sequence
  Description of Artificial Sequence: Synthetic oligonucleotide
  Antisense strand to SEQ ID NO: 1945210
ucuacucagcuuuaugcua

SEQ ID NO: 1945212 - RNA, 19 nt, Artificial Sequence
  Description of Artificial Sequence: Synthetic oligonucleotide
  Sense strand starting at position 274 of SEQ ID NO: 1880142
cauaaagcugaguagagua

SEQ ID NO: 1945213 - RNA, 19 nt, Artificial Sequence
  Description of Artificial Sequence: Synthetic oligonucleotide
  Antisense strand to SEQ ID NO: 1945212
uacucuacucagcuuuaug

SEQ ID NO: 1945214 - RNA, 19 nt, Artificial Sequence
  Description of Artificial Sequence: Synthetic oligonucleotide
  Sense strand starting at position 281 of SEQ ID NO: 1880142
cugaguagaguauagucaa

SEQ ID NO: 1945215 - RNA, 19 nt, Artificial Sequence
  Description of Artificial Sequence: Synthetic oligonucleotide
  Antisense strand to SEQ ID NO: 1945214
uugacuauacucuacucag

SEQ ID NO: 1945216 - RNA, 19 nt, Artificial Sequence
  Description of Artificial Sequence: Synthetic oligonucleotide
  Sense strand starting at position 343 of SEQ ID NO: 1880142
ggcuaaguccuuuaacuca

SEQ ID NO: 1945217 - RNA, 19 nt, Artificial Sequence
  Description of Artificial Sequence: Synthetic oligonucleotide
  Antisense strand to SEQ ID NO: 1945216
ugaguuaaaggacuuagcc

SEQ ID NO: 1945218 - RNA, 19 nt, Artificial Sequence
  Description of Artificial Sequence: Synthetic oligonucleotide
  Sense strand starting at position 511 of SEQ ID NO: 1880142
acccuaugagguggguaau

SEQ ID NO: 1945219 - RNA, 19 nt, Artificial Sequence
  Description of Artificial Sequence: Synthetic oligonucleotide
  Antisense strand to SEQ ID NO: 1945218
auuacccaccucauagggu

SEQ ID NO: 1945220 - RNA, 19 nt, Artificial Sequence
  Description of Artificial Sequence: Synthetic oligonucleotide
  Sense strand starting at position 514 of SEQ ID NO: 1880142
cuaugagguggguaauacu

SEQ ID NO: 1945221 - RNA, 19 nt, Artificial Sequence
  Description of Artificial Sequence: Synthetic oligonucleotide
  Antisense strand to SEQ ID NO: 1945220
aguauuacccaccucauag

SEQ ID NO: 1945222 - RNA, 19 nt, Artificial Sequence
  Description of Artificial Sequence: Synthetic oligonucleotide
  Sense strand starting at position 523 of SEQ ID NO: 1880142
ggguaauacuauucucuuc

SEQ ID NO: 1945223 - RNA, 19 nt, Artificial Sequence
  Description of Artificial Sequence: Synthetic oligonucleotide
  Antisense strand to SEQ ID NO: 1945222
gaagagaauaguauuaccc

SEQ ID NO: 1945224 - RNA, 19 nt, Artificial Sequence
  Description of Artificial Sequence: Synthetic oligonucleotide
  Sense strand starting at position 710 of SEQ ID NO: 1880142
accauauggcaaggaauau

SEQ ID NO: 1945225 - RNA, 19 nt, Artificial Sequence
  Description of Artificial Sequence: Synthetic oligonucleotide
  Antisense strand to SEQ ID NO: 1945224
auauuccuugccauauggu

SEQ ID NO: 1945226 - RNA, 19 nt, Artificial Sequence
  Description of Artificial Sequence: Synthetic oligonucleotide
  Sense strand starting at position 739 of SEQ ID NO: 1880142
gaauaaguacuguggguca

SEQ ID NO: 1945227 - RNA, 19 nt, Artificial Sequence
  Description of Artificial Sequence: Synthetic oligonucleotide
  Antisense strand to SEQ ID NO: 1945226
ugacccacaguacuuauuc

SEQ ID NO: 1945228 - RNA, 19 nt, Artificial Sequence
  Description of Artificial Sequence: Synthetic oligonucleotide
  Sense strand starting at position 741 of SEQ ID NO: 1880142
auaaguacugugggucaca

SEQ ID NO: 1945229 - RNA, 19 nt, Artificial Sequence
  Description of Artificial Sequence: Synthetic oligonucleotide
  Antisense strand to SEQ ID NO: 1945228
ugugacccacaguacuuau

SEQ ID NO: 1945230 - RNA, 19 nt, Artificial Sequence
  Description of Artificial Sequence: Synthetic oligonucleotide
  Sense strand starting at position 841 of SEQ ID NO: 1880142
gugggucaccucugggaaa

SEQ ID NO: 1945231 - RNA, 19 nt, Artificial Sequence
  Description of Artificial Sequence: Synthetic oligonucleotide
  Antisense strand to SEQ ID NO: 1945230
uuucccagaggugacccac

SEQ ID NO: 1945232 - RNA, 19 nt, Artificial Sequence
  Description of Artificial Sequence: Synthetic oligonucleotide
  Sense strand starting at position 1054 of SEQ ID NO: 1880142
acuuguucucucuagguaa

SEQ ID NO: 1945233 - RNA, 19 nt, Artificial Sequence
  Description of Artificial Sequence: Synthetic oligonucleotide
  Antisense strand to SEQ ID NO: 1945232
uuaccuagagagaacaagu

SEQ ID NO: 1945234 - RNA, 19 nt, Artificial Sequence
  Description of Artificial Sequence: Synthetic oligonucleotide
  Sense strand starting at position 1057 of SEQ ID NO: 1880142
uguucucucuagguaauag

SEQ ID NO: 1945235 - RNA, 19 nt, Artificial Sequence
  Description of Artificial Sequence: Synthetic oligonucleotide
  Antisense strand to SEQ ID NO: 1945234
cuauuaccuagagagaaca

SEQ ID NO: 1945236 - RNA, 19 nt, Artificial Sequence
  Description of Artificial Sequence: Synthetic oligonucleotide
  Sense strand starting at position 1114 of SEQ ID NO: 1880142
uuauaugcacauggauuau

SEQ ID NO: 1945237 - RNA, 19 nt, Artificial Sequence
  Description of Artificial Sequence: Synthetic oligonucleotide
  Antisense strand to SEQ ID NO: 1945236
auaauccaugugcauauaa

SEQ ID NO: 1945238 - RNA, 19 nt, Artificial Sequence
  Description of Artificial Sequence: Synthetic oligonucleotide
  Sense strand starting at position 1172 of SEQ ID NO: 1880142
gauugugcugaaggaacau

SEQ ID NO: 1945239 - RNA, 19 nt, Artificial Sequence
  Description of Artificial Sequence: Synthetic oligonucleotide
  Antisense strand to SEQ ID NO: 1945238
auguuccuucagcacaauc

SEQ ID NO: 1945240 - RNA, 19 nt, Artificial Sequence
  Description of Artificial Sequence: Synthetic oligonucleotide
  Sense strand starting at position 1239 of SEQ ID NO: 1880142
augaaucuagggugccaaa

SEQ ID NO: 1945241 - RNA, 19 nt, Artificial Sequence
  Description of Artificial Sequence: Synthetic oligonucleotide
  Antisense strand to SEQ ID NO: 1945240
uuuggcacccuagauucau

SEQ ID NO: 1945242 - RNA, 19 nt, Artificial Sequence
  Description of Artificial Sequence: Synthetic oligonucleotide
  Sense strand starting at position 1275 of SEQ ID NO: 1880142
agggauuucuuugagagga

SEQ ID NO: 1945243 - RNA, 19 nt, Artificial Sequence
  Description of Artificial Sequence: Synthetic oligonucleotide
  Antisense strand to SEQ ID NO: 1945242
uccucucaaagaaaucccu

SEQ ID NO: 1945244 - RNA, 19 nt, Artificial Sequence
  Description of Artificial Sequence: Synthetic oligonucleotide
  Sense strand starting at position 1277 of SEQ ID NO: 1880142
ggauuucuuugagaggaaa

SEQ ID NO: 1945245 - RNA, 19 nt, Artificial Sequence
  Description of Artificial Sequence: Synthetic oligonucleotide
  Antisense strand to SEQ ID NO: 1945244
uuuccucucaaagaaaucc

SEQ ID NO: 1945246 - RNA, 19 nt, Artificial Sequence
  Description of Artificial Sequence: Synthetic oligonucleotide
  Sense strand starting at position 1721 of SEQ ID NO: 1880142
guguuagauguugaacaau

SEQ ID NO: 1945247 - RNA, 19 nt, Artificial Sequence
  Description of Artificial Sequence: Synthetic oligonucleotide
  Antisense strand to SEQ ID NO: 1945246
auuguucaacaucuaacac

SEQ ID NO: 1945248 - RNA, 19 nt, Artificial Sequence
  Description of Artificial Sequence: Synthetic oligonucleotide
  Sense strand starting at position 1989 of SEQ ID NO: 1880142
guaucaagugcugaucaag

SEQ ID NO: 1945249 - RNA, 19 nt, Artificial Sequence
  Description of Artificial Sequence: Synthetic oligonucleotide
  Antisense strand to SEQ ID NO: 1945248
cuugaucagcacuugauac

SEQ ID NO: 1945250 - RNA, 19 nt, Artificial Sequence
  Description of Artificial Sequence: Synthetic oligonucleotide
  Sense strand starting at position 1992 of SEQ ID NO: 1880142
ucaagugcugaucaaguuu

SEQ ID NO: 1945251 - RNA, 19 nt, Artificial Sequence
  Description of Artificial Sequence: Synthetic oligonucleotide
  Antisense strand to SEQ ID NO: 1945250
aaacuugaucagcacuuga

SEQ ID NO: 1945252 - RNA, 19 nt, Artificial Sequence
  Description of Artificial Sequence: Synthetic oligonucleotide
  Sense strand starting at position 1998 of SEQ ID NO: 1880142
gcugaucaaguuuaaaucu

SEQ ID NO: 1945253 - RNA, 19 nt, Artificial Sequence
  Description of Artificial Sequence: Synthetic oligonucleotide
  Antisense strand to SEQ ID NO: 1945252
agauuuaaacuugaucagc

SEQ ID NO: 1945254 - RNA, 19 nt, Artificial Sequence
  Description of Artificial Sequence: Synthetic oligonucleotide
  Sense strand starting at position 2047 of SEQ ID NO: 1880142
ucaagaauacagugauguc

SEQ ID NO: 1945255 - RNA, 19 nt, Artificial Sequence
  Description of Artificial Sequence: Synthetic oligonucleotide
  Antisense strand to SEQ ID NO: 1945254
gacaucacuguauucuuga

SEQ ID NO: 1945256 - RNA, 19 nt, Artificial Sequence
  Description of Artificial Sequence: Synthetic oligonucleotide
  Sense strand starting at position 2061 of SEQ ID NO: 1880142
augucuaaggauuguaacu

SEQ ID NO: 1945257 - RNA, 19 nt, Artificial Sequence
  Description of Artificial Sequence: Synthetic oligonucleotide
  Antisense strand to SEQ ID NO: 1945256
aguuacaauccuuagacau

SEQ ID NO: 1945258 - RNA, 19 nt, Artificial Sequence
  Description of Artificial Sequence: Synthetic oligonucleotide
  Sense strand starting at position 2066 of SEQ ID NO: 1880142
uaaggauuguaacuugaca

SEQ ID NO: 1945259 - RNA, 19 nt, Artificial Sequence
  Description of Artificial Sequence: Synthetic oligonucleotide
  Antisense strand to SEQ ID NO: 1945258
ugucaaguuacaauccuua

SEQ ID NO: 1945260 - RNA, 19 nt, Artificial Sequence
  Description of Artificial Sequence: Synthetic oligonucleotide
  Sense strand starting at position 2120 of SEQ ID NO: 1880142
aagagaacguuaucagcua

SEQ ID NO: 1945261 - RNA, 19 nt, Artificial Sequence
  Description of Artificial Sequence: Synthetic oligonucleotide
  Antisense strand to SEQ ID NO: 1945260
uagcugauaacguucucuu

SEQ ID NO: 1945262 - RNA, 19 nt, Artificial Sequence
  Description of Artificial Sequence: Synthetic oligonucleotide
  Sense strand starting at position 2347 of SEQ ID NO: 1880142
uuuguaacuguggaacaau

SEQ ID NO: 1945263 - RNA, 19 nt, Artificial Sequence
  Description of Artificial Sequence: Synthetic oligonucleotide
  Antisense strand to SEQ ID NO: 1945262
auuguuccacaguuacaaa

SEQ ID NO: 1945264 - RNA, 19 nt, Artificial Sequence
  Description of Artificial Sequence: Synthetic oligonucleotide
  Sense strand starting at position 2478 of SEQ ID NO: 1880142
ggcugaguccaugauguau

SEQ ID NO: 1945265 - RNA, 19 nt, Artificial Sequence
  Description of Artificial Sequence: Synthetic oligonucleotide
  Antisense strand to SEQ ID NO: 1945264
auacaucauggacucagcc

SEQ ID NO: 1945266 - RNA, 19 nt, Artificial Sequence
  Description of Artificial Sequence: Synthetic oligonucleotide
  Sense strand starting at position 2750 of SEQ ID NO: 1880142
uggucuaauaugggagacu

SEQ ID NO: 1945267 - RNA, 19 nt, Artificial Sequence
  Description of Artificial Sequence: Synthetic oligonucleotide
  Antisense strand to SEQ ID NO: 1945266
agucucccauauuagacca

SEQ ID NO: 1945268 - RNA, 19 nt, Artificial Sequence
  Description of Artificial Sequence: Synthetic oligonucleotide
  Sense strand starting at position 3016 of SEQ ID NO: 1880142
gacagaaauuauguugguu

SEQ ID NO: 1945269 - RNA, 19 nt, Artificial Sequence
  Description of Artificial Sequence: Synthetic oligonucleotide
  Antisense strand to SEQ ID NO: 1945268
aaccaacauaauuucuguc

SEQ ID NO: 1945270 - RNA, 19 nt, Artificial Sequence
  Description of Artificial Sequence: Synthetic oligonucleotide
  Sense strand starting at position 3400 of SEQ ID NO: 1880142
gugucugugguagacauaa

SEQ ID NO: 1945271 - RNA, 19 nt, Artificial Sequence
  Description of Artificial Sequence: Synthetic oligonucleotide
  Antisense strand to SEQ ID NO: 1945270
uuaugucuaccacagacac

SEQ ID NO: 1945272 - RNA, 19 nt, Artificial Sequence
  Description of Artificial Sequence: Synthetic oligonucleotide
  Sense strand starting at position 3411 of SEQ ID NO: 1880142
agacauaagcuuuaaaugu

SEQ ID NO: 1945273 - RNA, 19 nt, Artificial Sequence
  Description of Artificial Sequence: Synthetic oligonucleotide
  Antisense strand to SEQ ID NO: 1945272
acauuuaaagcuuaugucu

SEQ ID NO: 1945274 - RNA, 19 nt, Artificial Sequence
  Description of Artificial Sequence: Synthetic oligonucleotide
  Sense strand starting at position 3478 of SEQ ID NO: 1880142
aaaguagcauugcuggaaa

SEQ ID NO: 1945275 - RNA, 19 nt, Artificial Sequence
  Description of Artificial Sequence: Synthetic oligonucleotide
  Antisense strand to SEQ ID NO: 1945274
uuuccagcaaugcuacuuu

SEQ ID NO: 1945276 - RNA, 19 nt, Artificial Sequence
  Description of Artificial Sequence: Synthetic oligonucleotide
  Sense strand starting at position 3764 of SEQ ID NO: 1880142
gcagaaaugucauccacuu

SEQ ID NO: 1945277 - RNA, 19 nt, Artificial Sequence
  Description of Artificial Sequence: Synthetic oligonucleotide
  Antisense strand to SEQ ID NO: 1945276
aaguggaugacauuucugc

SEQ ID NO: 1945278 - RNA, 19 nt, Artificial Sequence
  Description of Artificial Sequence: Synthetic oligonucleotide
  Sense strand starting at position 3813 of SEQ ID NO: 1880142
acacuuacuucccuaguga

SEQ ID NO: 1945279 - RNA, 19 nt, Artificial Sequence
  Description of Artificial Sequence: Synthetic oligonucleotide
  Antisense strand to SEQ ID NO: 1945278
ucacuagggaaguaagugu

SEQ ID NO: 1945280 - RNA, 19 nt, Artificial Sequence
  Description of Artificial Sequence: Synthetic oligonucleotide
  Sense strand starting at position 3833 of SEQ ID NO: 1880142
ucaauugcucugcaacaga

SEQ ID NO: 1945281 - RNA, 19 nt, Artificial Sequence
  Description of Artificial Sequence: Synthetic oligonucleotide
  Antisense strand to SEQ ID NO: 1945280
ucuguugcagagcaauuga

SEQ ID NO: 1945282 - RNA, 19 nt, Artificial Sequence
  Description of Artificial Sequence: Synthetic oligonucleotide
  Sense strand starting at position 3973 of SEQ ID NO: 1880142
ggaguuugaaucugaaauc

SEQ ID NO: 1945283 - RNA, 19 nt, Artificial Sequence
  Description of Artificial Sequence: Synthetic oligonucleotide
  Antisense strand to SEQ ID NO: 1945282
gauuucagauucaaacucc

SEQ ID NO: 1945284 - RNA, 19 nt, Artificial Sequence
  Description of Artificial Sequence: Synthetic oligonucleotide
  Sense strand starting at position 197 of SEQ ID NO: 1880143
cccagacuuuccgaccuau

SEQ ID NO: 1945285 - RNA, 19 nt, Artificial Sequence
  Description of Artificial Sequence: Synthetic oligonucleotide
  Antisense strand to SEQ ID NO: 1945284
auaggucggaaagucuggg

SEQ ID NO: 1945286 - RNA, 19 nt, Artificial Sequence
  Description of Artificial Sequence: Synthetic oligonucleotide
  Sense strand starting at position 286 of SEQ ID NO: 1880143
aggcaugacuaccuggaua

SEQ ID NO: 1945287 - RNA, 19 nt, Artificial Sequence
  Description of Artificial Sequence: Synthetic oligonucleotide
  Antisense strand to SEQ ID NO: 1945286
uauccagguagucaugccu

SEQ ID NO: 1945288 - RNA, 19 nt, Artificial Sequence
  Description of Artificial Sequence: Synthetic oligonucleotide
  Sense strand starting at position 288 of SEQ ID NO: 1880143
gcaugacuaccuggauaau

SEQ ID NO: 1945289 - RNA, 19 nt, Artificial Sequence
  Description of Artificial Sequence: Synthetic oligonucleotide
  Antisense strand to SEQ ID NO: 1945288
auuauccagguagucaugc

SEQ ID NO: 1945290 - RNA, 19 nt, Artificial Sequence
  Description of Artificial Sequence: Synthetic oligonucleotide
  Sense strand starting at position 297 of SEQ ID NO: 1880143
ccuggauaaucacauuaug

SEQ ID NO: 1945291 - RNA, 19 nt, Artificial Sequence
  Description of Artificial Sequence: Synthetic oligonucleotide
  Antisense strand to SEQ ID NO: 1945290
cauaaugugauuauccagg

SEQ ID NO: 1945292 - RNA, 19 nt, Artificial Sequence
  Description of Artificial Sequence: Synthetic oligonucleotide
  Sense strand starting at position 312 of SEQ ID NO: 1880143
uauggagguugagauacua

SEQ ID NO: 1945293 - RNA, 19 nt, Artificial Sequence
  Description of Artificial Sequence: Synthetic oligonucleotide
  Antisense strand to SEQ ID NO: 1945292
uaguaucucaaccuccaua

SEQ ID NO: 1945294 - RNA, 19 nt, Artificial Sequence
  Description of Artificial Sequence: Synthetic oligonucleotide
  Sense strand starting at position 396 of SEQ ID NO: 1880143
caguauauuccaggagugu

SEQ ID NO: 1945295 - RNA, 19 nt, Artificial Sequence
  Description of Artificial Sequence: Synthetic oligonucleotide
  Antisense strand to SEQ ID NO: 1945294
acacuccuggaauauacug

SEQ ID NO: 1945296 - RNA, 19 nt, Artificial Sequence
  Description of Artificial Sequence: Synthetic oligonucleotide
  Sense strand starting at position 397 of SEQ ID NO: 1880143
aguauauuccaggaguguc

SEQ ID NO: 1945297 - RNA, 19 nt, Artificial Sequence
  Description of Artificial Sequence: Synthetic oligonucleotide
  Antisense strand to SEQ ID NO: 1945296
gacacuccuggaauauacu

SEQ ID NO: 1945298 - RNA, 19 nt, Artificial Sequence
  Description of Artificial Sequence: Synthetic oligonucleotide
  Sense strand starting at position 405 of SEQ ID NO: 1880143
ccaggagugucccuggaac

SEQ ID NO: 1945299 - RNA, 19 nt, Artificial Sequence
  Description of Artificial Sequence: Synthetic oligonucleotide
  Antisense strand to SEQ ID NO: 1945298
guuccagggacacuccugg

SEQ ID NO: 1945300 - RNA, 19 nt, Artificial Sequence
  Description of Artificial Sequence: Synthetic oligonucleotide
  Sense strand starting at position 407 of SEQ ID NO: 1880143
aggagugucccuggaacau

SEQ ID NO: 1945301 - RNA, 19 nt, Artificial Sequence
  Description of Artificial Sequence: Synthetic oligonucleotide
  Antisense strand to SEQ ID NO: 1945300
auguuccagggacacuccu

SEQ ID NO: 1945302 - RNA, 19 nt, Artificial Sequence
  Description of Artificial Sequence: Synthetic oligonucleotide
  Sense strand starting at position 429 of SEQ ID NO: 1880143
auguucucuuaauggacau

SEQ ID NO: 1945303 - RNA, 19 nt, Artificial Sequence
  Description of Artificial Sequence: Synthetic oligonucleotide
  Antisense strand to SEQ ID NO: 1945302
auguccauuaagagaacau

SEQ ID NO: 1945304 - RNA, 19 nt, Artificial Sequence
  Description of Artificial Sequence: Synthetic oligonucleotide
  Sense strand starting at position 448 of SEQ ID NO: 1880143
auacauguauaaggacaua

SEQ ID NO: 1945305 - RNA, 19 nt, Artificial Sequence
  Description of Artificial Sequence: Synthetic oligonucleotide
  Antisense strand to SEQ ID NO: 1945304
uauguccuuauacauguau

SEQ ID NO: 1945306 - RNA, 19 nt, Artificial Sequence
  Description of Artificial Sequence: Synthetic oligonucleotide
  Sense strand starting at position 526 of SEQ ID NO: 1880143
gauacaaguguugguagca

SEQ ID NO: 1945307 - RNA, 19 nt, Artificial Sequence
  Description of Artificial Sequence: Synthetic oligonucleotide
  Antisense strand to SEQ ID NO: 1945306
ugcuaccaacacuuguauc

SEQ ID NO: 1945308 - RNA, 19 nt, Artificial Sequence
  Description of Artificial Sequence: Synthetic oligonucleotide
  Sense strand starting at position 527 of SEQ ID NO: 1880143
auacaaguguugguagcau

SEQ ID NO: 1945309 - RNA, 19 nt, Artificial Sequence
  Description of Artificial Sequence: Synthetic oligonucleotide
  Antisense strand to SEQ ID NO: 1945308
augcuaccaacacuuguau

SEQ ID NO: 1945310 - RNA, 19 nt, Artificial Sequence
  Description of Artificial Sequence: Synthetic oligonucleotide
  Sense strand starting at position 531 of SEQ ID NO: 1880143
aaguguugguagcauacaa

SEQ ID NO: 1945311 - RNA, 19 nt, Artificial Sequence
  Description of Artificial Sequence: Synthetic oligonucleotide
  Antisense strand to SEQ ID NO: 1945310
uuguaugcuaccaacacuu

SEQ ID NO: 1945312 - RNA, 19 nt, Artificial Sequence
  Description of Artificial Sequence: Synthetic oligonucleotide
  Sense strand starting at position 900 of SEQ ID NO: 1880143
gcguuauggcgugcacuga

SEQ ID NO: 1945313 - RNA, 19 nt, Artificial Sequence
  Description of Artificial Sequence: Synthetic oligonucleotide
  Antisense strand to SEQ ID NO: 1945312
ucagugcacgccauaacgc

SEQ ID NO: 1945314 - RNA, 19 nt, Artificial Sequence
  Description of Artificial Sequence: Synthetic oligonucleotide
  Sense strand starting at position 1240 of SEQ ID NO: 1880143
uccaccuauucgggagaca

SEQ ID NO: 1945315 - RNA, 19 nt, Artificial Sequence
  Description of Artificial Sequence: Synthetic oligonucleotide
  Antisense strand to SEQ ID NO: 1945314
ugucucccgaauaggugga

SEQ ID NO: 1945316 - RNA, 19 nt, Artificial Sequence
  Description of Artificial Sequence: Synthetic oligonucleotide
  Sense strand starting at position 1305 of SEQ ID NO: 1880143
ccgauauugcgguucugca

SEQ ID NO: 1945317 - RNA, 19 nt, Artificial Sequence
  Description of Artificial Sequence: Synthetic oligonucleotide
  Antisense strand to SEQ ID NO: 1945316
ugcagaaccgcaauaucgg

SEQ ID NO: 1945318 - RNA, 19 nt, Artificial Sequence
  Description of Artificial Sequence: Synthetic oligonucleotide
  Sense strand starting at position 1420 of SEQ ID NO: 1880143
aaaguauaucagcggccaa

SEQ ID NO: 1945319 - RNA, 19 nt, Artificial Sequence
  Description of Artificial Sequence: Synthetic oligonucleotide
  Antisense strand to SEQ ID NO: 1945318
uuggccgcugauauacuuu

SEQ ID NO: 1945320 - RNA, 19 nt, Artificial Sequence
  Description of Artificial Sequence: Synthetic oligonucleotide
  Sense strand starting at position 2054 of SEQ ID NO: 1880143
cuuggaggauucugggaga

SEQ ID NO: 1945321 - RNA, 19 nt, Artificial Sequence
  Description of Artificial Sequence: Synthetic oligonucleotide
  Antisense strand to SEQ ID NO: 1945320
ucucccagaauccuccaag

SEQ ID NO: 1945322 - RNA, 19 nt, Artificial Sequence
  Description of Artificial Sequence: Synthetic oligonucleotide
  Sense strand starting at position 2057 of SEQ ID NO: 1880143
ggaggauucugggagaaac

SEQ ID NO: 1945323 - RNA, 19 nt, Artificial Sequence
  Description of Artificial Sequence: Synthetic oligonucleotide
  Antisense strand to SEQ ID NO: 1945322
guuucucccagaauccucc

SEQ ID NO: 1945324 - RNA, 19 nt, Artificial Sequence
  Description of Artificial Sequence: Synthetic oligonucleotide
  Sense strand starting at position 2088 of SEQ ID NO: 1880143
gcggacgaguccugaggaa

SEQ ID NO: 1945325 - RNA, 19 nt, Artificial Sequence
  Description of Artificial Sequence: Synthetic oligonucleotide
  Antisense strand to SEQ ID NO: 1945324
uuccucaggacucguccgc

SEQ ID NO: 1945326 - RNA, 19 nt, Artificial Sequence
  Description of Artificial Sequence: Synthetic oligonucleotide
  Sense strand starting at position 2158 of SEQ ID NO: 1880143
gaacauaggucccaggaaa

SEQ ID NO: 1945327 - RNA, 19 nt, Artificial Sequence
  Description of Artificial Sequence: Synthetic oligonucleotide
  Antisense strand to SEQ ID NO: 1945326
uuuccugggaccuauguuc

SEQ ID NO: 1945328 - RNA, 19 nt, Artificial Sequence
  Description of Artificial Sequence: Synthetic oligonucleotide
  Sense strand starting at position 2273 of SEQ ID NO: 1880143
acggcucauugcuccuaga

SEQ ID NO: 1945329 - RNA, 19 nt, Artificial Sequence
  Description of Artificial Sequence: Synthetic oligonucleotide
  Antisense strand to SEQ ID NO: 1945328
ucuaggagcaaugagccgu

SEQ ID NO: 1945330 - RNA, 19 nt, Artificial Sequence
  Description of Artificial Sequence: Synthetic oligonucleotide
  Sense strand starting at position 2276 of SEQ ID NO: 1880143
gcucauugcuccuagauca

SEQ ID NO: 1945331 - RNA, 19 nt, Artificial Sequence
  Description of Artificial Sequence: Synthetic oligonucleotide
  Antisense strand to SEQ ID NO: 1945330
ugaucuaggagcaaugagc

SEQ ID NO: 1945332 - RNA, 19 nt, Artificial Sequence
  Description of Artificial Sequence: Synthetic oligonucleotide
  Sense strand starting at position 2406 of SEQ ID NO: 1880143
uucugugaucgugacuuua

SEQ ID NO: 1945333 - RNA, 19 nt, Artificial Sequence
  Description of Artificial Sequence: Synthetic oligonucleotide
  Antisense strand to SEQ ID NO: 1945332
uaaagucacgaucacagaa

SEQ ID NO: 1945334 - RNA, 19 nt, Artificial Sequence
  Description of Artificial Sequence: Synthetic oligonucleotide
  Sense strand starting at position 2408 of SEQ ID NO: 1880143
cugugaucgugacuuuaau

SEQ ID NO: 1945335 - RNA, 19 nt, Artificial Sequence
  Description of Artificial Sequence: Synthetic oligonucleotide
  Antisense strand to SEQ ID NO: 1945334
auuaaagucacgaucacag

SEQ ID NO: 1945336 - RNA, 19 nt, Artificial Sequence
  Description of Artificial Sequence: Synthetic oligonucleotide
  Sense strand starting at position 2827 of SEQ ID NO: 1880143
cuguguucgagcgauucuu

SEQ ID NO: 1945337 - RNA, 19 nt, Artificial Sequence
  Description of Artificial Sequence: Synthetic oligonucleotide
  Antisense strand to SEQ ID NO: 1945336
aagaaucgcucgaacacag

SEQ ID NO: 1945338 - RNA, 19 nt, Artificial Sequence
  Description of Artificial Sequence: Synthetic oligonucleotide
  Sense strand starting at position 2829 of SEQ ID NO: 1880143
guguucgagcgauucuucu

SEQ ID NO: 1945339 - RNA, 19 nt, Artificial Sequence
  Description of Artificial Sequence: Synthetic oligonucleotide
  Antisense strand to SEQ ID NO: 1945338
agaagaaucgcucgaacac

SEQ ID NO: 1945340 - RNA, 19 nt, Artificial Sequence
  Description of Artificial Sequence: Synthetic oligonucleotide
  Sense strand starting at position 3354 of SEQ ID NO: 1880143
ggauauucauaggugagug

SEQ ID NO: 1945341 - RNA, 19 nt, Artificial Sequence
  Description of Artificial Sequence: Synthetic oligonucleotide
  Antisense strand to SEQ ID NO: 1945340
cacucaccuaugaauaucc

SEQ ID NO: 1945342 - RNA, 19 nt, Artificial Sequence
  Description of Artificial Sequence: Synthetic oligonucleotide
  Sense strand starting at position 3362 of SEQ ID NO: 1880143
auaggugagugacuucuuu

SEQ ID NO: 1945343 - RNA, 19 nt, Artificial Sequence
  Description of Artificial Sequence: Synthetic oligonucleotide
  Antisense strand to SEQ ID NO: 1945342
aaagaagucacucaccuau

SEQ ID NO: 1945344 - RNA, 19 nt, Artificial Sequence
  Description of Artificial Sequence: Synthetic oligonucleotide
  Sense strand starting at position 3490 of SEQ ID NO: 1880143
ggaauagaguacguaugua

SEQ ID NO: 1945345 - RNA, 19 nt, Artificial Sequence
  Description of Artificial Sequence: Synthetic oligonucleotide
  Antisense strand to SEQ ID NO: 1945344
uacauacguacucuauucc

SEQ ID NO: 1945346 - RNA, 19 nt, Artificial Sequence
  Description of Artificial Sequence: Synthetic oligonucleotide
  Sense strand starting at position 3494 of SEQ ID NO: 1880143
uagaguacguauguaugua

SEQ ID NO: 1945347 - RNA, 19 nt, Artificial Sequence
  Description of Artificial Sequence: Synthetic oligonucleotide
  Antisense strand to SEQ ID NO: 1945346
uacauacauacguacucua

SEQ ID NO: 1945348 - RNA, 19 nt, Artificial Sequence
  Description of Artificial Sequence: Synthetic oligonucleotide
  Sense strand starting at position 3495 of SEQ ID NO: 1880143
agaguacguauguauguau

SEQ ID NO: 1945349 - RNA, 19 nt, Artificial Sequence
  Description of Artificial Sequence: Synthetic oligonucleotide
  Antisense strand to SEQ ID NO: 1945348
auacauacauacguacucu

SEQ ID NO: 1945350 - RNA, 19 nt, Artificial Sequence
  Description of Artificial Sequence: Synthetic oligonucleotide
  Sense strand starting at position 32 of SEQ ID NO: 1880144
guaucauauugacccagua

SEQ ID NO: 1945351 - RNA, 19 nt, Artificial Sequence
  Description of Artificial Sequence: Synthetic oligonucleotide
  Antisense strand to SEQ ID NO: 1945350
uacugggucaauaugauac

SEQ ID NO: 1945352 - RNA, 19 nt, Artificial Sequence
  Description of Artificial Sequence: Synthetic oligonucleotide
  Sense strand starting at position 106 of SEQ ID NO: 1880144
gaagaaaggugucuugggu

SEQ ID NO: 1945353 - RNA, 19 nt, Artificial Sequence
  Description of Artificial Sequence: Synthetic oligonucleotide
  Antisense strand to SEQ ID NO: 1945352
acccaagacaccuuucuuc

SEQ ID NO: 1945354 - RNA, 19 nt, Artificial Sequence
  Description of Artificial Sequence: Synthetic oligonucleotide
  Sense strand starting at position 125 of SEQ ID NO: 1880144
ggucacugacuauguacaa

SEQ ID NO: 1945355 - RNA, 19 nt, Artificial Sequence
  Description of Artificial Sequence: Synthetic oligonucleotide
  Antisense strand to SEQ ID NO: 1945354
uuguacauagucagugacc

SEQ ID NO: 1945356 - RNA, 19 nt, Artificial Sequence
  Description of Artificial Sequence: Synthetic oligonucleotide
  Sense strand starting at position 142 of SEQ ID NO: 1880144
aagagagccucaguucuca

SEQ ID NO: 1945357 - RNA, 19 nt, Artificial Sequence
  Description of Artificial Sequence: Synthetic oligonucleotide
  Antisense strand to SEQ ID NO: 1945356
ugagaacugaggcucucuu

SEQ ID NO: 1945358 - RNA, 19 nt, Artificial Sequence
  Description of Artificial Sequence: Synthetic oligonucleotide
  Sense strand starting at position 313 of SEQ ID NO: 1880144
gguaaagaguguuccaaag

SEQ ID NO: 1945359 - RNA, 19 nt, Artificial Sequence
  Description of Artificial Sequence: Synthetic oligonucleotide
  Antisense strand to SEQ ID NO: 1945358
cuuuggaacacucuuuacc

SEQ ID NO: 1945360 - RNA, 19 nt, Artificial Sequence
  Description of Artificial Sequence: Synthetic oligonucleotide
  Sense strand starting at position 341 of SEQ ID NO: 1880144
auggcauugacaggccaaa

SEQ ID NO: 1945361 - RNA, 19 nt, Artificial Sequence
  Description of Artificial Sequence: Synthetic oligonucleotide
  Antisense strand to SEQ ID NO: 1945360
uuuggccugucaaugccau

SEQ ID NO: 1945362 - RNA, 19 nt, Artificial Sequence
  Description of Artificial Sequence: Synthetic oligonucleotide
  Sense strand starting at position 584 of SEQ ID NO: 1880144
uugacaacugucuaaugca

SEQ ID NO: 1945363 - RNA, 19 nt, Artificial Sequence
  Description of Artificial Sequence: Synthetic oligonucleotide
  Antisense strand to SEQ ID NO: 1945362
ugcauuagacaguugucaa

SEQ ID NO: 1945364 - RNA, 19 nt, Artificial Sequence
  Description of Artificial Sequence: Synthetic oligonucleotide
  Sense strand starting at position 998 of SEQ ID NO: 1880144
cuguaaguuguagaaguua

SEQ ID NO: 1945365 - RNA, 19 nt, Artificial Sequence
  Description of Artificial Sequence: Synthetic oligonucleotide
  Antisense strand to SEQ ID NO: 1945364
uaacuucuacaacuuacag

SEQ ID NO: 1945366 - RNA, 19 nt, Artificial Sequence
  Description of Artificial Sequence: Synthetic oligonucleotide
  Sense strand starting at position 1094 of SEQ ID NO: 1880144
caguacuaagaagguuaau

SEQ ID NO: 1945367 - RNA, 19 nt, Artificial Sequence
  Description of Artificial Sequence: Synthetic oligonucleotide
  Antisense strand to SEQ ID NO: 1945366
auuaaccuucuuaguacug

SEQ ID NO: 1945368 - RNA, 19 nt, Artificial Sequence
  Description of Artificial Sequence: Synthetic oligonucleotide
  Sense strand starting at position 1227 of SEQ ID NO: 1880144
ggaagcuaucucugauuag

SEQ ID NO: 1945369 - RNA, 19 nt, Artificial Sequence
  Description of Artificial Sequence: Synthetic oligonucleotide
  Antisense strand to SEQ ID NO: 1945368
cuaaucagagauagcuucc

SEQ ID NO: 1945370 - RNA, 19 nt, Artificial Sequence
  Description of Artificial Sequence: Synthetic oligonucleotide
  Sense strand starting at position 1616 of SEQ ID NO: 1880144
caccaugcucggcaagaga

SEQ ID NO: 1945371 - RNA, 19 nt, Artificial Sequence
  Description of Artificial Sequence: Synthetic oligonucleotide
  Antisense strand to SEQ ID NO: 1945370
ucucuugccgagcauggug

SEQ ID NO: 1945372 - RNA, 19 nt, Artificial Sequence
  Description of Artificial Sequence: Synthetic oligonucleotide
  Sense strand starting at position 1739 of SEQ ID NO: 1880144
gacggauacagagguaacu

SEQ ID NO: 1945373 - RNA, 19 nt, Artificial Sequence
  Description of Artificial Sequence: Synthetic oligonucleotide
  Antisense strand to SEQ ID NO: 1945372
aguuaccucuguauccguc

SEQ ID NO: 1945374 - RNA, 19 nt, Artificial Sequence
  Description of Artificial Sequence: Synthetic oligonucleotide
  Sense strand starting at position 1832 of SEQ ID NO: 1880144
aaguauuuagaguggcagu

SEQ ID NO: 1945375 - RNA, 19 nt, Artificial Sequence
  Description of Artificial Sequence: Synthetic oligonucleotide
  Antisense strand to SEQ ID NO: 1945374
acugccacucuaaauacuu

SEQ ID NO: 1945376 - RNA, 19 nt, Artificial Sequence
  Description of Artificial Sequence: Synthetic oligonucleotide
  Sense strand starting at position 1833 of SEQ ID NO: 1880144
aguauuuagaguggcaguu

SEQ ID NO: 1945377 - RNA, 19 nt, Artificial Sequence
  Description of Artificial Sequence: Synthetic oligonucleotide
  Antisense strand to SEQ ID NO: 1945376
aacugccacucuaaauacu

SEQ ID NO: 1945378 - RNA, 19 nt, Artificial Sequence
  Description of Artificial Sequence: Synthetic oligonucleotide
  Sense strand starting at position 2358 of SEQ ID NO: 1880144
caguuaauaucucuggaug

SEQ ID NO: 1945379 - RNA, 19 nt, Artificial Sequence
  Description of Artificial Sequence: Synthetic oligonucleotide
  Antisense strand to SEQ ID NO: 1945378
cauccagagauauuaacug

SEQ ID NO: 1945380 - RNA, 19 nt, Artificial Sequence
  Description of Artificial Sequence: Synthetic oligonucleotide
  Sense strand starting at position 2359 of SEQ ID NO: 1880144
aguuaauaucucuggauga

SEQ ID NO: 1945381 - RNA, 19 nt, Artificial Sequence
  Description of Artificial Sequence: Synthetic oligonucleotide
  Antisense strand to SEQ ID NO: 1945380
ucauccagagauauuaacu

SEQ ID NO: 1945382 - RNA, 19 nt, Artificial Sequence
  Description of Artificial Sequence: Synthetic oligonucleotide
  Sense strand starting at position 2369 of SEQ ID NO: 1880144
ucuggaugaucuucugagu

SEQ ID NO: 1945383 - RNA, 19 nt, Artificial Sequence
  Description of Artificial Sequence: Synthetic oligonucleotide
  Antisense strand to SEQ ID NO: 1945382
acucagaagaucauccaga

SEQ ID NO: 1945384 - RNA, 19 nt, Artificial Sequence
  Description of Artificial Sequence: Synthetic oligonucleotide
  Sense strand starting at position 2374 of SEQ ID NO: 1880144
augaucuucugaguaaagc

SEQ ID NO: 1945385 - RNA, 19 nt, Artificial Sequence
  Description of Artificial Sequence: Synthetic oligonucleotide
  Antisense strand to SEQ ID NO: 1945384
gcuuuacucagaagaucau

SEQ ID NO: 1945386 - RNA, 19 nt, Artificial Sequence
  Description of Artificial Sequence: Synthetic oligonucleotide
  Sense strand starting at position 2375 of SEQ ID NO: 1880144
ugaucuucugaguaaagcu

SEQ ID NO: 1945387 - RNA, 19 nt, Artificial Sequence
  Description of Artificial Sequence: Synthetic oligonucleotide
  Antisense strand to SEQ ID NO: 1945386
agcuuuacucagaagauca

SEQ ID NO: 1945388 - RNA, 19 nt, Artificial Sequence
  Description of Artificial Sequence: Synthetic oligonucleotide
  Sense strand starting at position 2382 of SEQ ID NO: 1880144
cugaguaaagcuugagaaa

SEQ ID NO: 1945389 - RNA, 19 nt, Artificial Sequence
  Description of Artificial Sequence: Synthetic oligonucleotide
  Antisense strand to SEQ ID NO: 1945388
uuucucaagcuuuacucag

SEQ ID NO: 1945390 - RNA, 19 nt, Artificial Sequence
  Description of Artificial Sequence: Synthetic oligonucleotide
  Sense strand starting at position 2434 of SEQ ID NO: 1880144
aaaugacuggauugcugau

SEQ ID NO: 1945391 - RNA, 19 nt, Artificial Sequence
  Description of Artificial Sequence: Synthetic oligonucleotide
  Antisense strand to SEQ ID NO: 1945390
aucagcaauccagucauuu

SEQ ID NO: 1945392 - RNA, 19 nt, Artificial Sequence
  Description of Artificial Sequence: Synthetic oligonucleotide
  Sense strand starting at position 2440 of SEQ ID NO: 1880144
cuggauugcugauuaauac

SEQ ID NO: 1945393 - RNA, 19 nt, Artificial Sequence
  Description of Artificial Sequence: Synthetic oligonucleotide
  Antisense strand to SEQ ID NO: 1945392
guauuaaucagcaauccag

SEQ ID NO: 1945394 - RNA, 19 nt, Artificial Sequence
  Description of Artificial Sequence: Synthetic oligonucleotide
  Sense strand starting at position 2441 of SEQ ID NO: 1880144
uggauugcugauuaauacu

SEQ ID NO: 1945395 - RNA, 19 nt, Artificial Sequence
  Description of Artificial Sequence: Synthetic oligonucleotide
  Antisense strand to SEQ ID NO: 1945394
aguauuaaucagcaaucca

SEQ ID NO: 1945396 - RNA, 19 nt, Artificial Sequence
  Description of Artificial Sequence: Synthetic oligonucleotide
  Sense strand starting at position 2518 of SEQ ID NO: 1880144
ccuccagacuacucuggua

SEQ ID NO: 1945397 - RNA, 19 nt, Artificial Sequence
  Description of Artificial Sequence: Synthetic oligonucleotide
  Antisense strand to SEQ ID NO: 1945396
uaccagaguagucuggagg

SEQ ID NO: 1945398 - RNA, 19 nt, Artificial Sequence
  Description of Artificial Sequence: Synthetic oligonucleotide
  Sense strand starting at position 2520 of SEQ ID NO: 1880144
uccagacuacucugguaaa

SEQ ID NO: 1945399 - RNA, 19 nt, Artificial Sequence
  Description of Artificial Sequence: Synthetic oligonucleotide
  Antisense strand to SEQ ID NO: 1945398
uuuaccagaguagucugga

SEQ ID NO: 1945400 - RNA, 19 nt, Artificial Sequence
  Description of Artificial Sequence: Synthetic oligonucleotide
  Sense strand starting at position 2530 of SEQ ID NO: 1880144
ucugguaaagcugauucua

SEQ ID NO: 1945401 - RNA, 19 nt, Artificial Sequence
  Description of Artificial Sequence: Synthetic oligonucleotide
  Antisense strand to SEQ ID NO: 1945400
uagaaucagcuuuaccaga

SEQ ID NO: 1945402 - RNA, 19 nt, Artificial Sequence
  Description of Artificial Sequence: Synthetic oligonucleotide
  Sense strand starting at position 2532 of SEQ ID NO: 1880144
ugguaaagcugauucuaga

SEQ ID NO: 1945403 - RNA, 19 nt, Artificial Sequence
  Description of Artificial Sequence: Synthetic oligonucleotide
  Antisense strand to SEQ ID NO: 1945402
ucuagaaucagcuuuacca

SEQ ID NO: 1945404 - RNA, 19 nt, Artificial Sequence
  Description of Artificial Sequence: Synthetic oligonucleotide
  Sense strand starting at position 2676 of SEQ ID NO: 1880144
agauacucuuagguagaau

SEQ ID NO: 1945405 - RNA, 19 nt, Artificial Sequence
  Description of Artificial Sequence: Synthetic oligonucleotide
  Antisense strand to SEQ ID NO: 1945404
auucuaccuaagaguaucu

SEQ ID NO: 1945406 - RNA, 19 nt, Artificial Sequence
  Description of Artificial Sequence: Synthetic oligonucleotide
  Sense strand starting at position 2684 of SEQ ID NO: 1880144
uuagguagaaucuguauga

SEQ ID NO: 1945407 - RNA, 19 nt, Artificial Sequence
  Description of Artificial Sequence: Synthetic oligonucleotide
  Antisense strand to SEQ ID NO: 1945406
ucauacagauucuaccuaa

SEQ ID NO: 1945408 - RNA, 19 nt, Artificial Sequence
  Description of Artificial Sequence: Synthetic oligonucleotide
  Sense strand starting at position 2685 of SEQ ID NO: 1880144
uagguagaaucuguaugaa

SEQ ID NO: 1945409 - RNA, 19 nt, Artificial Sequence
  Description of Artificial Sequence: Synthetic oligonucleotide
  Antisense strand to SEQ ID NO: 1945408
uucauacagauucuaccua

SEQ ID NO: 1945410 - RNA, 19 nt, Artificial Sequence
  Description of Artificial Sequence: Synthetic oligonucleotide
  Sense strand starting at position 2688 of SEQ ID NO: 1880144
guagaaucuguaugaagau

SEQ ID NO: 1945411 - RNA, 19 nt, Artificial Sequence
  Description of Artificial Sequence: Synthetic oligonucleotide
  Antisense strand to SEQ ID NO: 1945410
aucuucauacagauucuac

SEQ ID NO: 1945412 - RNA, 19 nt, Artificial Sequence
  Description of Artificial Sequence: Synthetic oligonucleotide
  Sense strand starting at position 3111 of SEQ ID NO: 1880144
aagccuucugugucacgua

SEQ ID NO: 1945413 - RNA, 19 nt, Artificial Sequence
  Description of Artificial Sequence: Synthetic oligonucleotide
  Antisense strand to SEQ ID NO: 1945412
uacgugacacagaaggcuu

SEQ ID NO: 1945414 - RNA, 19 nt, Artificial Sequence
  Description of Artificial Sequence: Synthetic oligonucleotide
  Sense strand starting at position 3156 of SEQ ID NO: 1880144
agaggucuccgucaugaau

SEQ ID NO: 1945415 - RNA, 19 nt, Artificial Sequence
  Description of Artificial Sequence: Synthetic oligonucleotide
  Antisense strand to SEQ ID NO: 1945414
auucaugacggagaccucu

SEQ ID NO: 1945416 - RNA, 19 nt, Artificial Sequence
  Description of Artificial Sequence: Synthetic oligonucleotide
  Sense strand starting at position 3159 of SEQ ID NO: 1880144
ggucuccgucaugaaucaa

SEQ ID NO: 1945417 - RNA, 19 nt, Artificial Sequence
  Description of Artificial Sequence: Synthetic oligonucleotide
  Antisense strand to SEQ ID NO: 1945416
uugauucaugacggagacc

SEQ ID NO: 1945418 - RNA, 19 nt, Artificial Sequence
  Description of Artificial Sequence: Synthetic oligonucleotide
  Sense strand starting at position 3225 of SEQ ID NO: 1880144
gaguaacuggcacacuaua

SEQ ID NO: 1945419 - RNA, 19 nt, Artificial Sequence
  Description of Artificial Sequence: Synthetic oligonucleotide
  Antisense strand to SEQ ID NO: 1945418
uauagugugccaguuacuc

SEQ ID NO: 1945420 - RNA, 19 nt, Artificial Sequence
  Description of Artificial Sequence: Synthetic oligonucleotide
  Sense strand starting at position 3305 of SEQ ID NO: 1880144
acaguuaaaggguaguuau

SEQ ID NO: 1945421 - RNA, 19 nt, Artificial Sequence
  Description of Artificial Sequence: Synthetic oligonucleotide
  Antisense strand to SEQ ID NO: 1945420
auaacuacccuuuaacugu

SEQ ID NO: 1945422 - RNA, 19 nt, Artificial Sequence
  Description of Artificial Sequence: Synthetic oligonucleotide
  Sense strand starting at position 3356 of SEQ ID NO: 1880144
uaguacugucaguaucaca

SEQ ID NO: 1945423 - RNA, 19 nt, Artificial Sequence
  Description of Artificial Sequence: Synthetic oligonucleotide
  Antisense strand to SEQ ID NO: 1945422
ugugauacugacaguacua

SEQ ID NO: 1945424 - RNA, 19 nt, Artificial Sequence
  Description of Artificial Sequence: Synthetic oligonucleotide
  Sense strand starting at position 3455 of SEQ ID NO: 1880144
cuggguuaggcagacuuaa

SEQ ID NO: 1945425 - RNA, 19 nt, Artificial Sequence
  Description of Artificial Sequence: Synthetic oligonucleotide
  Antisense strand to SEQ ID NO: 1945424
uuaagucugccuaacccag

SEQ ID NO: 1945426 - RNA, 19 nt, Artificial Sequence
  Description of Artificial Sequence: Synthetic oligonucleotide
  Sense strand starting at position 3668 of SEQ ID NO: 1880144
caucaauagcugugagaaa

SEQ ID NO: 1945427 - RNA, 19 nt, Artificial Sequence
  Description of Artificial Sequence: Synthetic oligonucleotide
  Antisense strand to SEQ ID NO: 1945426
uuucucacagcuauugaug

SEQ ID NO: 1945428 - RNA, 19 nt, Artificial Sequence
  Description of Artificial Sequence: Synthetic oligonucleotide
  Sense strand starting at position 3752 of SEQ ID NO: 1880144
augagaacuuaguuaagca

SEQ ID NO: 1945429 - RNA, 19 nt, Artificial Sequence
  Description of Artificial Sequence: Synthetic oligonucleotide
  Antisense strand to SEQ ID NO: 1945428
ugcuuaacuaaguucucau

SEQ ID NO: 1945430 - RNA, 19 nt, Artificial Sequence
  Description of Artificial Sequence: Synthetic oligonucleotide
  Sense strand starting at position 439 of SEQ ID NO: 1880145
ggacuugaauacuaaagag

SEQ ID NO: 1945431 - RNA, 19 nt, Artificial Sequence
  Description of Artificial Sequence: Synthetic oligonucleotide
  Antisense strand to SEQ ID NO: 1945430
cucuuuaguauucaagucc

SEQ ID NO: 1945432 - RNA, 19 nt, Artificial Sequence
  Description of Artificial Sequence: Synthetic oligonucleotide
  Sense strand starting at position 454 of SEQ ID NO: 1880145
agagauaauuccgucuccu

SEQ ID NO: 1945433 - RNA, 19 nt, Artificial Sequence
  Description of Artificial Sequence: Synthetic oligonucleotide
  Antisense strand to SEQ ID NO: 1945432
aggagacggaauuaucucu

SEQ ID NO: 1945434 - RNA, 19 nt, Artificial Sequence
  Description of Artificial Sequence: Synthetic oligonucleotide
  Sense strand starting at position 1478 of SEQ ID NO: 1880145
ugaaucacuccugacugua

SEQ ID NO: 1945435 - RNA, 19 nt, Artificial Sequence
  Description of Artificial Sequence: Synthetic oligonucleotide
  Antisense strand to SEQ ID NO: 1945434
uacagucaggagugauuca

SEQ ID NO: 1945436 - RNA, 19 nt, Artificial Sequence
  Description of Artificial Sequence: Synthetic oligonucleotide
  Sense strand starting at position 1497 of SEQ ID NO: 1880145
ccaacaaguugacaagaau

SEQ ID NO: 1945437 - RNA, 19 nt, Artificial Sequence
  Description of Artificial Sequence: Synthetic oligonucleotide
  Antisense strand to SEQ ID NO: 1945436
auucuugucaacuuguugg

SEQ ID NO: 1945438 - RNA, 19 nt, Artificial Sequence
  Description of Artificial Sequence: Synthetic oligonucleotide
  Sense strand starting at position 1581 of SEQ ID NO: 1880145
gccagaugcuggcucaaug

SEQ ID NO: 1945439 - RNA, 19 nt, Artificial Sequence
  Description of Artificial Sequence: Synthetic oligonucleotide
  Antisense strand to SEQ ID NO: 1945438
cauugagccagcaucuggc

SEQ ID NO: 1945440 - RNA, 19 nt, Artificial Sequence
  Description of Artificial Sequence: Synthetic oligonucleotide
  Sense strand starting at position 1748 of SEQ ID NO: 1880145
cauaaugcaucuguaggaa

SEQ ID NO: 1945441 - RNA, 19 nt, Artificial Sequence
  Description of Artificial Sequence: Synthetic oligonucleotide
  Antisense strand to SEQ ID NO: 1945440
uuccuacagaugcauuaug

SEQ ID NO: 1945442 - RNA, 19 nt, Artificial Sequence
  Description of Artificial Sequence: Synthetic oligonucleotide
  Sense strand starting at position 1751 of SEQ ID NO: 1880145
aaugcaucuguaggaagaa

SEQ ID NO: 1945443 - RNA, 19 nt, Artificial Sequence
  Description of Artificial Sequence: Synthetic oligonucleotide
  Antisense strand to SEQ ID NO: 1945442
uucuuccuacagaugcauu

SEQ ID NO: 1945444 - RNA, 19 nt, Artificial Sequence
  Description of Artificial Sequence: Synthetic oligonucleotide
  Sense strand starting at position 1870 of SEQ ID NO: 1880145
uagaguguuggguaguaca

SEQ ID NO: 1945445 - RNA, 19 nt, Artificial Sequence
  Description of Artificial Sequence: Synthetic oligonucleotide
  Antisense strand to SEQ ID NO: 1945444
uguacuacccaacacucua

SEQ ID NO: 1945446 - RNA, 19 nt, Artificial Sequence
  Description of Artificial Sequence: Synthetic oligonucleotide
  Sense strand starting at position 1885 of SEQ ID NO: 1880145
uacagucagcccugugaua

SEQ ID NO: 1945447 - RNA, 19 nt, Artificial Sequence
  Description of Artificial Sequence: Synthetic oligonucleotide
  Antisense strand to SEQ ID NO: 1945446
uaucacagggcugacugua

SEQ ID NO: 1945448 - RNA, 19 nt, Artificial Sequence
  Description of Artificial Sequence: Synthetic oligonucleotide
  Sense strand starting at position 1887 of SEQ ID NO: 1880145
cagucagcccugugauacu

SEQ ID NO: 1945449 - RNA, 19 nt, Artificial Sequence
  Description of Artificial Sequence: Synthetic oligonucleotide
  Antisense strand to SEQ ID NO: 1945448
aguaucacagggcugacug

SEQ ID NO: 1945450 - RNA, 19 nt, Artificial Sequence
  Description of Artificial Sequence: Synthetic oligonucleotide
  Sense strand starting at position 1945 of SEQ ID NO: 1880145
aggaauguaucagcaaagu

SEQ ID NO: 1945451 - RNA, 19 nt, Artificial Sequence
  Description of Artificial Sequence: Synthetic oligonucleotide
  Antisense strand to SEQ ID NO: 1945450
acuuugcugauacauuccu

SEQ ID NO: 1945452 - RNA, 19 nt, Artificial Sequence
  Description of Artificial Sequence: Synthetic oligonucleotide
  Sense strand starting at position 1991 of SEQ ID NO: 1880145
guccuccaguugucaucaa

SEQ ID NO: 1945453 - RNA, 19 nt, Artificial Sequence
  Description of Artificial Sequence: Synthetic oligonucleotide
  Antisense strand to SEQ ID NO: 1945452
uugaugacaacuggaggac

SEQ ID NO: 1945454 - RNA, 19 nt, Artificial Sequence
  Description of Artificial Sequence: Synthetic oligonucleotide
  Sense strand starting at position 1995 of SEQ ID NO: 1880145
uccaguugucaucaaguuu

SEQ ID NO: 1945455 - RNA, 19 nt, Artificial Sequence
  Description of Artificial Sequence: Synthetic oligonucleotide
  Antisense strand to SEQ ID NO: 1945454
aaacuugaugacaacugga

SEQ ID NO: 1945456 - RNA, 19 nt, Artificial Sequence
  Description of Artificial Sequence: Synthetic oligonucleotide
  Sense strand starting at position 2001 of SEQ ID NO: 1880145
ugucaucaaguuuacaaau

SEQ ID NO: 1945457 - RNA, 19 nt, Artificial Sequence
  Description of Artificial Sequence: Synthetic oligonucleotide
  Antisense strand to SEQ ID NO: 1945456
auuuguaaacuugaugaca

SEQ ID NO: 1945458 - RNA, 19 nt, Artificial Sequence
  Description of Artificial Sequence: Synthetic oligonucleotide
  Sense strand starting at position 2055 of SEQ ID NO: 1880145
uguauaccuucugcucuau

SEQ ID NO: 1945459 - RNA, 19 nt, Artificial Sequence
  Description of Artificial Sequence: Synthetic oligonucleotide
  Antisense strand to SEQ ID NO: 1945458
auagagcagaagguauaca

SEQ ID NO: 1945460 - RNA, 19 nt, Artificial Sequence
  Description of Artificial Sequence: Synthetic oligonucleotide
  Sense strand starting at position 2104 of SEQ ID NO: 1880145
agaaaugugugaucaggug

SEQ ID NO: 1945461 - RNA, 19 nt, Artificial Sequence
  Description of Artificial Sequence: Synthetic oligonucleotide
  Antisense strand to SEQ ID NO: 1945460
caccugaucacacauuucu

SEQ ID NO: 1945462 - RNA, 19 nt, Artificial Sequence
  Description of Artificial Sequence: Synthetic oligonucleotide
  Sense strand starting at position 2123 of SEQ ID NO: 1880145
uucauuauaccguggagag

SEQ ID NO: 1945463 - RNA, 19 nt, Artificial Sequence
  Description of Artificial Sequence: Synthetic oligonucleotide
  Antisense strand to SEQ ID NO: 1945462
cucuccacgguauaaugaa

SEQ ID NO: 1945464 - RNA, 19 nt, Artificial Sequence
  Description of Artificial Sequence: Synthetic oligonucleotide
  Sense strand starting at position 2133 of SEQ ID NO: 1880145
cguggagagcuggauaaca

SEQ ID NO: 1945465 - RNA, 19 nt, Artificial Sequence
  Description of Artificial Sequence: Synthetic oligonucleotide
  Antisense strand to SEQ ID NO: 1945464
uguuauccagcucuccacg

SEQ ID NO: 1945466 - RNA, 19 nt, Artificial Sequence
  Description of Artificial Sequence: Synthetic oligonucleotide
  Sense strand starting at position 2174 of SEQ ID NO: 1880145
gguaacuuucgggauugga

SEQ ID NO: 1945467 - RNA, 19 nt, Artificial Sequence
  Description of Artificial Sequence: Synthetic oligonucleotide
  Antisense strand to SEQ ID NO: 1945466
uccaaucccgaaaguuacc

SEQ ID NO: 1945468 - RNA, 19 nt, Artificial Sequence
  Description of Artificial Sequence: Synthetic oligonucleotide
  Sense strand starting at position 2177 of SEQ ID NO: 1880145
aacuuucgggauuggaauu

SEQ ID NO: 1945469 - RNA, 19 nt, Artificial Sequence
  Description of Artificial Sequence: Synthetic oligonucleotide
  Antisense strand to SEQ ID NO: 1945468
aauuccaaucccgaaaguu

SEQ ID NO: 1945470 - RNA, 19 nt, Artificial Sequence
  Description of Artificial Sequence: Synthetic oligonucleotide
  Sense strand starting at position 2436 of SEQ ID NO: 1880145
uggucaggcugguccaaau

SEQ ID NO: 1945471 - RNA, 19 nt, Artificial Sequence
  Description of Artificial Sequence: Synthetic oligonucleotide
  Antisense strand to SEQ ID NO: 1945470
auuuggaccagccugacca

SEQ ID NO: 1945472 - RNA, 19 nt, Artificial Sequence
  Description of Artificial Sequence: Synthetic oligonucleotide
  Sense strand starting at position 2653 of SEQ ID NO: 1880145
gugauagacaguuacuguu

SEQ ID NO: 1945473 - RNA, 19 nt, Artificial Sequence
  Description of Artificial Sequence: Synthetic oligonucleotide
  Antisense strand to SEQ ID NO: 1945472
aacaguaacugucuaucac

SEQ ID NO: 1945474 - RNA, 19 nt, Artificial Sequence
  Description of Artificial Sequence: Synthetic oligonucleotide
  Sense strand starting at position 2709 of SEQ ID NO: 1880145
uuaccacuccauuggugau

SEQ ID NO: 1945475 - RNA, 19 nt, Artificial Sequence
  Description of Artificial Sequence: Synthetic oligonucleotide
  Antisense strand to SEQ ID NO: 1945474
aucaccaauggagugguaa

SEQ ID NO: 1945476 - RNA, 19 nt, Artificial Sequence
  Description of Artificial Sequence: Synthetic oligonucleotide
  Sense strand starting at position 2711 of SEQ ID NO: 1880145
accacuccauuggugauaa

SEQ ID NO: 1945477 - RNA, 19 nt, Artificial Sequence
  Description of Artificial Sequence: Synthetic oligonucleotide
  Antisense strand to SEQ ID NO: 1945476
uuaucaccaauggaguggu

SEQ ID NO: 1945478 - RNA, 19 nt, Artificial Sequence
  Description of Artificial Sequence: Synthetic oligonucleotide
  Sense strand starting at position 2727 of SEQ ID NO: 1880145
uaauuucuuugauccgguu

SEQ ID NO: 1945479 - RNA, 19 nt, Artificial Sequence
  Description of Artificial Sequence: Synthetic oligonucleotide
  Antisense strand to SEQ ID NO: 1945478
aaccggaucaaagaaauua

SEQ ID NO: 1945480 - RNA, 19 nt, Artificial Sequence
  Description of Artificial Sequence: Synthetic oligonucleotide
  Sense strand starting at position 2743 of SEQ ID NO: 1880145
guuuacagcuccuuagaaa

SEQ ID NO: 1945481 - RNA, 19 nt, Artificial Sequence
  Description of Artificial Sequence: Synthetic oligonucleotide
  Antisense strand to SEQ ID NO: 1945480
uuucuaaggagcuguaaac

SEQ ID NO: 1945482 - RNA, 19 nt, Artificial Sequence
  Description of Artificial Sequence: Synthetic oligonucleotide
  Sense strand starting at position 2830 of SEQ ID NO: 1880145
ccguaaaucugcuuuauac

SEQ ID NO: 1945483 - RNA, 19 nt, Artificial Sequence
  Description of Artificial Sequence: Synthetic oligonucleotide
  Antisense strand to SEQ ID NO: 1945482
guauaaagcagauuuacgg

SEQ ID NO: 1945484 - RNA, 19 nt, Artificial Sequence
  Description of Artificial Sequence: Synthetic oligonucleotide
  Sense strand starting at position 2832 of SEQ ID NO: 1880145
guaaaucugcuuuauacgu

SEQ ID NO: 1945485 - RNA, 19 nt, Artificial Sequence
  Description of Artificial Sequence: Synthetic oligonucleotide
  Antisense strand to SEQ ID NO: 1945484
acguauaaagcagauuuac

SEQ ID NO: 1945486 - RNA, 19 nt, Artificial Sequence
  Description of Artificial Sequence: Synthetic oligonucleotide
  Sense strand starting at position 2839 of SEQ ID NO: 1880145
ugcuuuauacguuacccaa

SEQ ID NO: 1945487 - RNA, 19 nt, Artificial Sequence
  Description of Artificial Sequence: Synthetic oligonucleotide
  Antisense strand to SEQ ID NO: 1945486
uuggguaacguauaaagca

SEQ ID NO: 1945488 - RNA, 19 nt, Artificial Sequence
  Description of Artificial Sequence: Synthetic oligonucleotide
  Sense strand starting at position 2886 of SEQ ID NO: 1880145
ccauacaaauucguguaua

SEQ ID NO: 1945489 - RNA, 19 nt, Artificial Sequence
  Description of Artificial Sequence: Synthetic oligonucleotide
  Antisense strand to SEQ ID NO: 1945488
uauacacgaauuuguaugg

SEQ ID NO: 1945490 - RNA, 19 nt, Artificial Sequence
  Description of Artificial Sequence: Synthetic oligonucleotide
  Sense strand starting at position 2889 of SEQ ID NO: 1880145
uacaaauucguguauaguu

SEQ ID NO: 1945491 - RNA, 19 nt, Artificial Sequence
  Description of Artificial Sequence: Synthetic oligonucleotide
  Antisense strand to SEQ ID NO: 1945490
aacuauacacgaauuugua

SEQ ID NO: 1945492 - RNA, 19 nt, Artificial Sequence
  Description of Artificial Sequence: Synthetic oligonucleotide
  Sense strand starting at position 2894 of SEQ ID NO: 1880145
auucguguauaguucauga

SEQ ID NO: 1945493 - RNA, 19 nt, Artificial Sequence
  Description of Artificial Sequence: Synthetic oligonucleotide
  Antisense strand to SEQ ID NO: 1945492
ucaugaacuauacacgaau

SEQ ID NO: 1945494 - RNA, 19 nt, Artificial Sequence
  Description of Artificial Sequence: Synthetic oligonucleotide
  Sense strand starting at position 3088 of SEQ ID NO: 1880145
aaaggaugaucucaaugug

SEQ ID NO: 1945495 - RNA, 19 nt, Artificial Sequence
  Description of Artificial Sequence: Synthetic oligonucleotide
  Antisense strand to SEQ ID NO: 1945494
cacauugagaucauccuuu

SEQ ID NO: 1945496 - RNA, 19 nt, Artificial Sequence
  Description of Artificial Sequence: Synthetic oligonucleotide
  Sense strand starting at position 3091 of SEQ ID NO: 1880145
ggaugaucucaaugugguc

SEQ ID NO: 1945497 - RNA, 19 nt, Artificial Sequence
  Description of Artificial Sequence: Synthetic oligonucleotide
  Antisense strand to SEQ ID NO: 1945496
gaccacauugagaucaucc

SEQ ID NO: 1945498 - RNA, 19 nt, Artificial Sequence
  Description of Artificial Sequence: Synthetic oligonucleotide
  Sense strand starting at position 3296 of SEQ ID NO: 1880145
ucaaaucuguucuuaugga

SEQ ID NO: 1945499 - RNA, 19 nt, Artificial Sequence
  Description of Artificial Sequence: Synthetic oligonucleotide
  Antisense strand to SEQ ID NO: 1945498
uccauaagaacagauuuga

SEQ ID NO: 1945500 - RNA, 19 nt, Artificial Sequence
  Description of Artificial Sequence: Synthetic oligonucleotide
  Sense strand starting at position 3381 of SEQ ID NO: 1880145
gguugucuaauagguuaua

SEQ ID NO: 1945501 - RNA, 19 nt, Artificial Sequence
  Description of Artificial Sequence: Synthetic oligonucleotide
  Antisense strand to SEQ ID NO: 1945500
uauaaccuauuagacaacc

SEQ ID NO: 1945502 - RNA, 19 nt, Artificial Sequence
  Description of Artificial Sequence: Synthetic oligonucleotide
  Sense strand starting at position 3382 of SEQ ID NO: 1880145
guugucuaauagguuauaa

SEQ ID NO: 1945503 - RNA, 19 nt, Artificial Sequence
  Description of Artificial Sequence: Synthetic oligonucleotide
  Antisense strand to SEQ ID NO: 1945502
uuauaaccuauuagacaac

SEQ ID NO: 1945504 - RNA, 19 nt, Artificial Sequence
  Description of Artificial Sequence: Synthetic oligonucleotide
  Sense strand starting at position 3384 of SEQ ID NO: 1880145
ugucuaauagguuauaaac

SEQ ID NO: 1945505 - RNA, 19 nt, Artificial Sequence
  Description of Artificial Sequence: Synthetic oligonucleotide
  Antisense strand to SEQ ID NO: 1945504
guuuauaaccuauuagaca

SEQ ID NO: 1945506 - RNA, 19 nt, Artificial Sequence
  Description of Artificial Sequence: Synthetic oligonucleotide
  Sense strand starting at position 3406 of SEQ ID NO: 1880145
uguggucucgucuauccaa

SEQ ID NO: 1945507 - RNA, 19 nt, Artificial Sequence
  Description of Artificial Sequence: Synthetic oligonucleotide
  Antisense strand to SEQ ID NO: 1945506
uuggauagacgagaccaca

SEQ ID NO: 1945508 - RNA, 19 nt, Artificial Sequence
  Description of Artificial Sequence: Synthetic oligonucleotide
  Sense strand starting at position 3409 of SEQ ID NO: 1880145
ggucucgucuauccaaauc

SEQ ID NO: 1945509 - RNA, 19 nt, Artificial Sequence
  Description of Artificial Sequence: Synthetic oligonucleotide
  Antisense strand to SEQ ID NO: 1945508
gauuuggauagacgagacc

SEQ ID NO: 1945510 - RNA, 19 nt, Artificial Sequence
  Description of Artificial Sequence: Synthetic oligonucleotide
  Sense strand starting at position 65 of SEQ ID NO: 1880146
aucuuaagacuuuguauag

SEQ ID NO: 1945511 - RNA, 19 nt, Artificial Sequence
  Description of Artificial Sequence: Synthetic oligonucleotide
  Antisense strand to SEQ ID NO: 1945510
cuauacaaagucuuaagau

SEQ ID NO: 1945512 - RNA, 19 nt, Artificial Sequence
  Description of Artificial Sequence: Synthetic oligonucleotide
  Sense strand starting at position 66 of SEQ ID NO: 1880146
ucuuaagacuuuguauagu

SEQ ID NO: 1945513 - RNA, 19 nt, Artificial Sequence
  Description of Artificial Sequence: Synthetic oligonucleotide
  Antisense strand to SEQ ID NO: 1945512
acuauacaaagucuuaaga

SEQ ID NO: 1945514 - RNA, 19 nt, Artificial Sequence
  Description of Artificial Sequence: Synthetic oligonucleotide
  Sense strand starting at position 765 of SEQ ID NO: 1880146
cagggucuugccuagaaca

SEQ ID NO: 1945515 - RNA, 19 nt, Artificial Sequence
  Description of Artificial Sequence: Synthetic oligonucleotide
  Antisense strand to SEQ ID NO: 1945514
uguucuaggcaagacccug

SEQ ID NO: 1945516 - RNA, 19 nt, Artificial Sequence
  Description of Artificial Sequence: Synthetic oligonucleotide
  Sense strand starting at position 767 of SEQ ID NO: 1880146
gggucuugccuagaacaca

SEQ ID NO: 1945517 - RNA, 19 nt, Artificial Sequence
  Description of Artificial Sequence: Synthetic oligonucleotide
  Antisense strand to SEQ ID NO: 1945516
uguguucuaggcaagaccc

SEQ ID NO: 1945518 - RNA, 19 nt, Artificial Sequence
  Description of Artificial Sequence: Synthetic oligonucleotide
  Sense strand starting at position 928 of SEQ ID NO: 1880146
aaagcauagcaccaagagu

SEQ ID NO: 1945519 - RNA, 19 nt, Artificial Sequence
  Description of Artificial Sequence: Synthetic oligonucleotide
  Antisense strand to SEQ ID NO: 1945518
acucuuggugcuaugcuuu

SEQ ID NO: 1945520 - RNA, 19 nt, Artificial Sequence
  Description of Artificial Sequence: Synthetic oligonucleotide
  Sense strand starting at position 941 of SEQ ID NO: 1880146
aagaguggugugcagagau

SEQ ID NO: 1945521 - RNA, 19 nt, Artificial Sequence
  Description of Artificial Sequence: Synthetic oligonucleotide
  Antisense strand to SEQ ID NO: 1945520
aucucugcacaccacucuu

SEQ ID NO: 1945522 - RNA, 19 nt, Artificial Sequence
  Description of Artificial Sequence: Synthetic oligonucleotide
  Sense strand starting at position 1737 of SEQ ID NO: 1880146
uugccagagcaaugaaaca

SEQ ID NO: 1945523 - RNA, 19 nt, Artificial Sequence
  Description of Artificial Sequence: Synthetic oligonucleotide
  Antisense strand to SEQ ID NO: 1945522
uguuucauugcucuggcaa

SEQ ID NO: 1945524 - RNA, 19 nt, Artificial Sequence
  Description of Artificial Sequence: Synthetic oligonucleotide
  Sense strand starting at position 2017 of SEQ ID NO: 1880146
ugcauugcgcgauccggaa

SEQ ID NO: 1945525 - RNA, 19 nt, Artificial Sequence
  Description of Artificial Sequence: Synthetic oligonucleotide
  Antisense strand to SEQ ID NO: 1945524
uuccggaucgcgcaaugca

SEQ ID NO: 1945526 - RNA, 19 nt, Artificial Sequence
  Description of Artificial Sequence: Synthetic oligonucleotide
  Sense strand starting at position 2212 of SEQ ID NO: 1880146
agccgaaauuugagggugu

SEQ ID NO: 1945527 - RNA, 19 nt, Artificial Sequence
  Description of Artificial Sequence: Synthetic oligonucleotide
  Antisense strand to SEQ ID NO: 1945526
acacccucaaauuucggcu

SEQ ID NO: 1945528 - RNA, 19 nt, Artificial Sequence
  Description of Artificial Sequence: Synthetic oligonucleotide
  Sense strand starting at position 2223 of SEQ ID NO: 1880146
gagggugugaccuaucuua

SEQ ID NO: 1945529 - RNA, 19 nt, Artificial Sequence
  Description of Artificial Sequence: Synthetic oligonucleotide
  Antisense strand to SEQ ID NO: 1945528
uaagauaggucacacccuc

SEQ ID NO: 1945530 - RNA, 19 nt, Artificial Sequence
  Description of Artificial Sequence: Synthetic oligonucleotide
  Sense strand starting at position 2260 of SEQ ID NO: 1880146
ggaucucugaguggaaggu

SEQ ID NO: 1945531 - RNA, 19 nt, Artificial Sequence
  Description of Artificial Sequence: Synthetic oligonucleotide
  Antisense strand to SEQ ID NO: 1945530
accuuccacucagagaucc

SEQ ID NO: 1945532 - RNA, 19 nt, Artificial Sequence
  Description of Artificial Sequence: Synthetic oligonucleotide
  Sense strand starting at position 2266 of SEQ ID NO: 1880146
cugaguggaagguguacua

SEQ ID NO: 1945533 - RNA, 19 nt, Artificial Sequence
  Description of Artificial Sequence: Synthetic oligonucleotide
  Antisense strand to SEQ ID NO: 1945532
uaguacaccuuccacucag

SEQ ID NO: 1945534 - RNA, 19 nt, Artificial Sequence
  Description of Artificial Sequence: Synthetic oligonucleotide
  Sense strand starting at position 2348 of SEQ ID NO: 1880146
uguuccugacucuagcaaa

SEQ ID NO: 1945535 - RNA, 19 nt, Artificial Sequence
  Description of Artificial Sequence: Synthetic oligonucleotide
  Antisense strand to SEQ ID NO: 1945534
uuugcuagagucaggaaca

SEQ ID NO: 1945536 - RNA, 19 nt, Artificial Sequence
  Description of Artificial Sequence: Synthetic oligonucleotide
  Sense strand starting at position 2449 of SEQ ID NO: 1880146
gaggauuauuucuagaguu

SEQ ID NO: 1945537 - RNA, 19 nt, Artificial Sequence
  Description of Artificial Sequence: Synthetic oligonucleotide
  Antisense strand to SEQ ID NO: 1945536
aacucuagaaauaauccuc

SEQ ID NO: 1945538 - RNA, 19 nt, Artificial Sequence
  Description of Artificial Sequence: Synthetic oligonucleotide
  Sense strand starting at position 2470 of SEQ ID NO: 1880146
aaggucagaggucaaugua

SEQ ID NO: 1945539 - RNA, 19 nt, Artificial Sequence
  Description of Artificial Sequence: Synthetic oligonucleotide
  Antisense strand to SEQ ID NO: 1945538
uacauugaccucugaccuu

SEQ ID NO: 1945540 - RNA, 19 nt, Artificial Sequence
  Description of Artificial Sequence: Synthetic oligonucleotide
  Sense strand starting at position 2479 of SEQ ID NO: 1880146
ggucaauguagcgaggagu

SEQ ID NO: 1945541 - RNA, 19 nt, Artificial Sequence
  Description of Artificial Sequence: Synthetic oligonucleotide
  Antisense strand to SEQ ID NO: 1945540
acuccucgcuacauugacc

SEQ ID NO: 1945542 - RNA, 19 nt, Artificial Sequence
  Description of Artificial Sequence: Synthetic oligonucleotide
  Sense strand starting at position 2480 of SEQ ID NO: 1880146
gucaauguagcgaggaguu

SEQ ID NO: 1945543 - RNA, 19 nt, Artificial Sequence
  Description of Artificial Sequence: Synthetic oligonucleotide
  Antisense strand to SEQ ID NO: 1945542
aacuccucgcuacauugac

SEQ ID NO: 1945544 - RNA, 19 nt, Artificial Sequence
  Description of Artificial Sequence: Synthetic oligonucleotide
  Sense strand starting at position 2561 of SEQ ID NO: 1880146
gggacagauuuguggauaa

SEQ ID NO: 1945545 - RNA, 19 nt, Artificial Sequence
  Description of Artificial Sequence: Synthetic oligonucleotide
  Antisense strand to SEQ ID NO: 1945544
uuauccacaaaucuguccc

SEQ ID NO: 1945546 - RNA, 19 nt, Artificial Sequence
  Description of Artificial Sequence: Synthetic oligonucleotide
  Sense strand starting at position 2984 of SEQ ID NO: 1880146
gggauuuaguccugagaag

SEQ ID NO: 1945547 - RNA, 19 nt, Artificial Sequence
  Description of Artificial Sequence: Synthetic oligonucleotide
  Antisense strand to SEQ ID NO: 1945546
cuucucaggacuaaauccc

SEQ ID NO: 1945548 - RNA, 19 nt, Artificial Sequence
  Description of Artificial Sequence: Synthetic oligonucleotide
  Sense strand starting at position 3031 of SEQ ID NO: 1880146
ccugaaauguuccuaaugu

SEQ ID NO: 1945549 - RNA, 19 nt, Artificial Sequence
  Description of Artificial Sequence: Synthetic oligonucleotide
  Antisense strand to SEQ ID NO: 1945548
acauuaggaacauuucagg

SEQ ID NO: 1945550 - RNA, 19 nt, Artificial Sequence
  Description of Artificial Sequence: Synthetic oligonucleotide
  Sense strand starting at position 3110 of SEQ ID NO: 1880146
cuacuauuccaacggagag

SEQ ID NO: 1945551 - RNA, 19 nt, Artificial Sequence
  Description of Artificial Sequence: Synthetic oligonucleotide
  Antisense strand to SEQ ID NO: 1945550
cucuccguuggaauaguag

SEQ ID NO: 1945552 - RNA, 19 nt, Artificial Sequence
  Description of Artificial Sequence: Synthetic oligonucleotide
  Sense strand starting at position 3172 of SEQ ID NO: 1880146
ucacauacguuagcucauu

SEQ ID NO: 1945553 - RNA, 19 nt, Artificial Sequence
  Description of Artificial Sequence: Synthetic oligonucleotide
  Antisense strand to SEQ ID NO: 1945552
aaugagcuaacguauguga

SEQ ID NO: 1945554 - RNA, 19 nt, Artificial Sequence
  Description of Artificial Sequence: Synthetic oligonucleotide
  Sense strand starting at position 3214 of SEQ ID NO: 1880146
auacauuuaucguucccuu

SEQ ID NO: 1945555 - RNA, 19 nt, Artificial Sequence
  Description of Artificial Sequence: Synthetic oligonucleotide
  Antisense strand to SEQ ID NO: 1945554
aagggaacgauaaauguau

SEQ ID NO: 1945556 - RNA, 19 nt, Artificial Sequence
  Description of Artificial Sequence: Synthetic oligonucleotide
  Sense strand starting at position 3250 of SEQ ID NO: 1880146
ugagacuuggauugguuaa

SEQ ID NO: 1945557 - RNA, 19 nt, Artificial Sequence
  Description of Artificial Sequence: Synthetic oligonucleotide
  Antisense strand to SEQ ID NO: 1945556
uuaaccaauccaagucuca

SEQ ID NO: 1945558 - RNA, 19 nt, Artificial Sequence
  Description of Artificial Sequence: Synthetic oligonucleotide
  Sense strand starting at position 3257 of SEQ ID NO: 1880146
uggauugguuaaccaguuu

SEQ ID NO: 1945559 - RNA, 19 nt, Artificial Sequence
  Description of Artificial Sequence: Synthetic oligonucleotide
  Antisense strand to SEQ ID NO: 1945558
aaacugguuaaccaaucca

SEQ ID NO: 1945560 - RNA, 19 nt, Artificial Sequence
  Description of Artificial Sequence: Synthetic oligonucleotide
  Sense strand starting at position 3263 of SEQ ID NO: 1880146
gguuaaccaguuuggcuaa

SEQ ID NO: 1945561 - RNA, 19 nt, Artificial Sequence
  Description of Artificial Sequence: Synthetic oligonucleotide
  Antisense strand to SEQ ID NO: 1945560
uuagccaaacugguuaacc

SEQ ID NO: 1945562 - RNA, 19 nt, Artificial Sequence
  Description of Artificial Sequence: Synthetic oligonucleotide
  Sense strand starting at position 3273 of SEQ ID NO: 1880146
uuuggcuaaggucaaauaa

SEQ ID NO: 1945563 - RNA, 19 nt, Artificial Sequence
  Description of Artificial Sequence: Synthetic oligonucleotide
  Antisense strand to SEQ ID NO: 1945562
uuauuugaccuuagccaaa

SEQ ID NO: 1945564 - RNA, 19 nt, Artificial Sequence
  Description of Artificial Sequence: Synthetic oligonucleotide
  Sense strand starting at position 3284 of SEQ ID NO: 1880146
ucaaauaaugagcgucaga

SEQ ID NO: 1945565 - RNA, 19 nt, Artificial Sequence
  Description of Artificial Sequence: Synthetic oligonucleotide
  Antisense strand to SEQ ID NO: 1945564
ucugacgcucauuauuuga

SEQ ID NO: 1945566 - RNA, 19 nt, Artificial Sequence
  Description of Artificial Sequence: Synthetic oligonucleotide
  Sense strand starting at position 3317 of SEQ ID NO: 1880146
aggucugucugacucuauu

SEQ ID NO: 1945567 - RNA, 19 nt, Artificial Sequence
  Description of Artificial Sequence: Synthetic oligonucleotide
  Antisense strand to SEQ ID NO: 1945566
aauagagucagacagaccu

SEQ ID NO: 1945568 - RNA, 19 nt, Artificial Sequence
  Description of Artificial Sequence: Synthetic oligonucleotide
  Sense strand starting at position 3352 of SEQ ID NO: 1880146
uuauguugagagugauuaa

SEQ ID NO: 1945569 - RNA, 19 nt, Artificial Sequence
  Description of Artificial Sequence: Synthetic oligonucleotide
  Antisense strand to SEQ ID NO: 1945568
uuaaucacucucaacauaa

SEQ ID NO: 1945570 - RNA, 19 nt, Artificial Sequence
  Description of Artificial Sequence: Synthetic oligonucleotide
  Sense strand starting at position 3364 of SEQ ID NO: 1880146
ugauuaaacguuuacagca

SEQ ID NO: 1945571 - RNA, 19 nt, Artificial Sequence
  Description of Artificial Sequence: Synthetic oligonucleotide
  Antisense strand to SEQ ID NO: 1945570
ugcuguaaacguuuaauca

SEQ ID NO: 1945572 - RNA, 19 nt, Artificial Sequence
  Description of Artificial Sequence: Synthetic oligonucleotide
  Sense strand starting at position 3404 of SEQ ID NO: 1880146
aguucucaguuccuaaagu

SEQ ID NO: 1945573 - RNA, 19 nt, Artificial Sequence
  Description of Artificial Sequence: Synthetic oligonucleotide
  Antisense strand to SEQ ID NO: 1945572
acuuuaggaacugagaacu

SEQ ID NO: 1945574 - RNA, 19 nt, Artificial Sequence
  Description of Artificial Sequence: Synthetic oligonucleotide
  Sense strand starting at position 3463 of SEQ ID NO: 1880146
ccuucuuuccaguaaggug

SEQ ID NO: 1945575 - RNA, 19 nt, Artificial Sequence
  Description of Artificial Sequence: Synthetic oligonucleotide
  Antisense strand to SEQ ID NO: 1945574
caccuuacuggaaagaagg

SEQ ID NO: 1945576 - RNA, 19 nt, Artificial Sequence
  Description of Artificial Sequence: Synthetic oligonucleotide
  Sense strand starting at position 3501 of SEQ ID NO: 1880146
gguacucuacaccaaguau

SEQ ID NO: 1945577 - RNA, 19 nt, Artificial Sequence
  Description of Artificial Sequence: Synthetic oligonucleotide
  Antisense strand to SEQ ID NO: 1945576
auacuugguguagaguacc

SEQ ID NO: 1945578 - RNA, 19 nt, Artificial Sequence
  Description of Artificial Sequence: Synthetic oligonucleotide
  Sense strand starting at position 3557 of SEQ ID NO: 1880146
aauguacagcauugaaguu

SEQ ID NO: 1945579 - RNA, 19 nt, Artificial Sequence
  Description of Artificial Sequence: Synthetic oligonucleotide
  Antisense strand to SEQ ID NO: 1945578
aacuucaaugcuguacauu

SEQ ID NO: 1945580 - RNA, 19 nt, Artificial Sequence
  Description of Artificial Sequence: Synthetic oligonucleotide
  Sense strand starting at position 3670 of SEQ ID NO: 1880146
uuuaaagcacugugauaac

SEQ ID NO: 1945581 - RNA, 19 nt, Artificial Sequence
  Description of Artificial Sequence: Synthetic oligonucleotide
  Antisense strand to SEQ ID NO: 1945580
guuaucacagugcuuuaaa

SEQ ID NO: 1945582 - RNA, 19 nt, Artificial Sequence
  Description of Artificial Sequence: Synthetic oligonucleotide
  Sense strand starting at position 3719 of SEQ ID NO: 1880146
gguugcuguccucauguaa

SEQ ID NO: 1945583 - RNA, 19 nt, Artificial Sequence
  Description of Artificial Sequence: Synthetic oligonucleotide
  Antisense strand to SEQ ID NO: 1945582
uuacaugaggacagcaacc

SEQ ID NO: 1945584 - RNA, 19 nt, Artificial Sequence
  Description of Artificial Sequence: Synthetic oligonucleotide
  Sense strand starting at position 3796 of SEQ ID NO: 1880146
uggugaguuuguaaaggua

SEQ ID NO: 1945585 - RNA, 19 nt, Artificial Sequence
  Description of Artificial Sequence: Synthetic oligonucleotide
  Antisense strand to SEQ ID NO: 1945584
uaccuuuacaaacucacca

SEQ ID NO: 1945586 - RNA, 19 nt, Artificial Sequence
  Description of Artificial Sequence: Synthetic oligonucleotide
  Sense strand starting at position 3799 of SEQ ID NO: 1880146
ugaguuuguaaagguauua

SEQ ID NO: 1945587 - RNA, 19 nt, Artificial Sequence
  Description of Artificial Sequence: Synthetic oligonucleotide
  Antisense strand to SEQ ID NO: 1945586
uaauaccuuuacaaacuca

SEQ ID NO: 1945588 - RNA, 19 nt, Artificial Sequence
  Description of Artificial Sequence: Synthetic oligonucleotide
  Sense strand starting at position 3895 of SEQ ID NO: 1880146
uaagguuacgaguacgaga

SEQ ID NO: 1945589 - RNA, 19 nt, Artificial Sequence
  Description of Artificial Sequence: Synthetic oligonucleotide
  Antisense strand to SEQ ID NO: 1945588
ucucguacucguaaccuua

SEQ ID NO: 1945590 - RNA, 19 nt, Artificial Sequence
  Description of Artificial Sequence: Synthetic oligonucleotide
  Sense strand starting at position 1 of SEQ ID NO: 1880147
ggcucuguguuccugacau

SEQ ID NO: 1945591 - RNA, 19 nt, Artificial Sequence
  Description of Artificial Sequence: Synthetic oligonucleotide
  Antisense strand to SEQ ID NO: 1945590
augucaggaacacagagcc

SEQ ID NO: 1945592 - RNA, 19 nt, Artificial Sequence
  Description of Artificial Sequence: Synthetic oligonucleotide
  Sense strand starting at position 487 of SEQ ID NO: 1880147
cuaggugcuugccagagau

SEQ ID NO: 1945593 - RNA, 19 nt, Artificial Sequence
  Description of Artificial Sequence: Synthetic oligonucleotide
  Antisense strand to SEQ ID NO: 1945592
aucucuggcaagcaccuag

SEQ ID NO: 1945594 - RNA, 19 nt, Artificial Sequence
  Description of Artificial Sequence: Synthetic oligonucleotide
  Sense strand starting at position 489 of SEQ ID NO: 1880147
aggugcuugccagagauug

SEQ ID NO: 1945595 - RNA, 19 nt, Artificial Sequence
  Description of Artificial Sequence: Synthetic oligonucleotide
  Antisense strand to SEQ ID NO: 1945594
caaucucuggcaagcaccu

SEQ ID NO: 1945596 - RNA, 19 nt, Artificial Sequence
  Description of Artificial Sequence: Synthetic oligonucleotide
  Sense strand starting at position 499 of SEQ ID NO: 1880147
cagagauuguggcuggaag

SEQ ID NO: 1945597 - RNA, 19 nt, Artificial Sequence
  Description of Artificial Sequence: Synthetic oligonucleotide
  Antisense strand to SEQ ID NO: 1945596
cuuccagccacaaucucug

SEQ ID NO: 1945598 - RNA, 19 nt, Artificial Sequence
  Description of Artificial Sequence: Synthetic oligonucleotide
  Sense strand starting at position 501 of SEQ ID NO: 1880147
gagauuguggcuggaagca

SEQ ID NO: 1945599 - RNA, 19 nt, Artificial Sequence
  Description of Artificial Sequence: Synthetic oligonucleotide
  Antisense strand to SEQ ID NO: 1945598
ugcuuccagccacaaucuc

SEQ ID NO: 1945600 - RNA, 19 nt, Artificial Sequence
  Description of Artificial Sequence: Synthetic oligonucleotide
  Sense strand starting at position 1082 of SEQ ID NO: 1880147
ugcucucucccaggaaaga

SEQ ID NO: 1945601 - RNA, 19 nt, Artificial Sequence
  Description of Artificial Sequence: Synthetic oligonucleotide
  Antisense strand to SEQ ID NO: 1945600
ucuuuccugggagagagca

SEQ ID NO: 1945602 - RNA, 19 nt, Artificial Sequence
  Description of Artificial Sequence: Synthetic oligonucleotide
  Sense strand starting at position 1332 of SEQ ID NO: 1880147
acgguucuggugcaauaga

SEQ ID NO: 1945603 - RNA, 19 nt, Artificial Sequence
  Description of Artificial Sequence: Synthetic oligonucleotide
  Antisense strand to SEQ ID NO: 1945602
ucuauugcaccagaaccgu

SEQ ID NO: 1945604 - RNA, 19 nt, Artificial Sequence
  Description of Artificial Sequence: Synthetic oligonucleotide
  Sense strand starting at position 1365 of SEQ ID NO: 1880147
ucgggauucccgugggcau

SEQ ID NO: 1945605 - RNA, 19 nt, Artificial Sequence
  Description of Artificial Sequence: Synthetic oligonucleotide
  Antisense strand to SEQ ID NO: 1945604
augcccacgggaaucccga

SEQ ID NO: 1945606 - RNA, 19 nt, Artificial Sequence
  Description of Artificial Sequence: Synthetic oligonucleotide
  Sense strand starting at position 1632 of SEQ ID NO: 1880147
ccuucuagguucccucaua

SEQ ID NO: 1945607 - RNA, 19 nt, Artificial Sequence
  Description of Artificial Sequence: Synthetic oligonucleotide
  Antisense strand to SEQ ID NO: 1945606
uaugagggaaccuagaagg

SEQ ID NO: 1945608 - RNA, 19 nt, Artificial Sequence
  Description of Artificial Sequence: Synthetic oligonucleotide
  Sense strand starting at position 1664 of SEQ ID NO: 1880147
auuauaagcccugaacugu

SEQ ID NO: 1945609 - RNA, 19 nt, Artificial Sequence
  Description of Artificial Sequence: Synthetic oligonucleotide
  Antisense strand to SEQ ID NO: 1945608
acaguucagggcuuauaau

SEQ ID NO: 1945610 - RNA, 19 nt, Artificial Sequence
  Description of Artificial Sequence: Synthetic oligonucleotide
  Sense strand starting at position 1696 of SEQ ID NO: 1880147
uggucuuagccaugggcau

SEQ ID NO: 1945611 - RNA, 19 nt, Artificial Sequence
  Description of Artificial Sequence: Synthetic oligonucleotide
  Antisense strand to SEQ ID NO: 1945610
augcccauggcuaagacca

SEQ ID NO: 1945612 - RNA, 19 nt, Artificial Sequence
  Description of Artificial Sequence: Synthetic oligonucleotide
  Sense strand starting at position 1697 of SEQ ID NO: 1880147
ggucuuagccaugggcauu

SEQ ID NO: 1945613 - RNA, 19 nt, Artificial Sequence
  Description of Artificial Sequence: Synthetic oligonucleotide
  Antisense strand to SEQ ID NO: 1945612
aaugcccauggcuaagacc

SEQ ID NO: 1945614 - RNA, 19 nt, Artificial Sequence
  Description of Artificial Sequence: Synthetic oligonucleotide
  Sense strand starting at position 2538 of SEQ ID NO: 1880147
acugaauuguucuuugcau

SEQ ID NO: 1945615 - RNA, 19 nt, Artificial Sequence
  Description of Artificial Sequence: Synthetic oligonucleotide
  Antisense strand to SEQ ID NO: 1945614
augcaaagaacaauucagu

SEQ ID NO: 1945616 - RNA, 19 nt, Artificial Sequence
  Description of Artificial Sequence: Synthetic oligonucleotide
  Sense strand starting at position 2540 of SEQ ID NO: 1880147
ugaauuguucuuugcauag

SEQ ID NO: 1945617 - RNA, 19 nt, Artificial Sequence
  Description of Artificial Sequence: Synthetic oligonucleotide
  Antisense strand to SEQ ID NO: 1945616
cuaugcaaagaacaauuca

SEQ ID NO: 1945618 - RNA, 19 nt, Artificial Sequence
  Description of Artificial Sequence: Synthetic oligonucleotide
  Sense strand starting at position 2544 of SEQ ID NO: 1880147
uuguucuuugcauagauaa

SEQ ID NO: 1945619 - RNA, 19 nt, Artificial Sequence
  Description of Artificial Sequence: Synthetic oligonucleotide
  Antisense strand to SEQ ID NO: 1945618
uuaucuaugcaaagaacaa

SEQ ID NO: 1945620 - RNA, 19 nt, Artificial Sequence
  Description of Artificial Sequence: Synthetic oligonucleotide
  Sense strand starting at position 2652 of SEQ ID NO: 1880147
ggaguaucucgugggcuga

SEQ ID NO: 1945621 - RNA, 19 nt, Artificial Sequence
  Description of Artificial Sequence: Synthetic oligonucleotide
  Antisense strand to SEQ ID NO: 1945620
ucagcccacgagauacucc

SEQ ID NO: 1945622 - RNA, 19 nt, Artificial Sequence
  Description of Artificial Sequence: Synthetic oligonucleotide
  Sense strand starting at position 2653 of SEQ ID NO: 1880147
gaguaucucgugggcugau

SEQ ID NO: 1945623 - RNA, 19 nt, Artificial Sequence
  Description of Artificial Sequence: Synthetic oligonucleotide
  Antisense strand to SEQ ID NO: 1945622
aucagcccacgagauacuc

SEQ ID NO: 1945624 - RNA, 19 nt, Artificial Sequence
  Description of Artificial Sequence: Synthetic oligonucleotide
  Sense strand starting at position 3035 of SEQ ID NO: 1880147
aagguuuguccaggaaaug

SEQ ID NO: 1945625 - RNA, 19 nt, Artificial Sequence
  Description of Artificial Sequence: Synthetic oligonucleotide
  Antisense strand to SEQ ID NO: 1945624
cauuuccuggacaaaccuu

SEQ ID NO: 1945626 - RNA, 19 nt, Artificial Sequence
  Description of Artificial Sequence: Synthetic oligonucleotide
  Sense strand starting at position 3139 of SEQ ID NO: 1880147
gaagaugccucagugguga

SEQ ID NO: 1945627 - RNA, 19 nt, Artificial Sequence
  Description of Artificial Sequence: Synthetic oligonucleotide
  Antisense strand to SEQ ID NO: 1945626
ucaccacugaggcaucuuc

SEQ ID NO: 1945628 - RNA, 19 nt, Artificial Sequence
  Description of Artificial Sequence: Synthetic oligonucleotide
  Sense strand starting at position 3469 of SEQ ID NO: 1880147
accugcaaguguugguaua

SEQ ID NO: 1945629 - RNA, 19 nt, Artificial Sequence
  Description of Artificial Sequence: Synthetic oligonucleotide
  Antisense strand to SEQ ID NO: 1945628
uauaccaacacuugcaggu

SEQ ID NO: 1945630 - RNA, 19 nt, Artificial Sequence
  Description of Artificial Sequence: Synthetic oligonucleotide
  Sense strand starting at position 3470 of SEQ ID NO: 1880147
ccugcaaguguugguauaa

SEQ ID NO: 1945631 - RNA, 19 nt, Artificial Sequence
  Description of Artificial Sequence: Synthetic oligonucleotide
  Antisense strand to SEQ ID NO: 1945630
uuauaccaacacuugcagg

SEQ ID NO: 1945632 - RNA, 19 nt, Artificial Sequence
  Description of Artificial Sequence: Synthetic oligonucleotide
  Sense strand starting at position 3471 of SEQ ID NO: 1880147
cugcaaguguugguauaaa

SEQ ID NO: 1945633 - RNA, 19 nt, Artificial Sequence
  Description of Artificial Sequence: Synthetic oligonucleotide
  Antisense strand to SEQ ID NO: 1945632
uuuauaccaacacuugcag

SEQ ID NO: 1945634 - RNA, 19 nt, Artificial Sequence
  Description of Artificial Sequence: Synthetic oligonucleotide
  Sense strand starting at position 3527 of SEQ ID NO: 1880147
cccagcugguuccauauua

SEQ ID NO: 1945635 - RNA, 19 nt, Artificial Sequence
  Description of Artificial Sequence: Synthetic oligonucleotide
  Antisense strand to SEQ ID NO: 1945634
uaauauggaaccagcuggg

SEQ ID NO: 1945636 - RNA, 19 nt, Artificial Sequence
  Description of Artificial Sequence: Synthetic oligonucleotide
  Sense strand starting at position 3535 of SEQ ID NO: 1880147
guuccauauuauggucuuu

SEQ ID NO: 1945637 - RNA, 19 nt, Artificial Sequence
  Description of Artificial Sequence: Synthetic oligonucleotide
  Antisense strand to SEQ ID NO: 1945636
aaagaccauaauauggaac

SEQ ID NO: 1945638 - RNA, 19 nt, Artificial Sequence
  Description of Artificial Sequence: Synthetic oligonucleotide
  Sense strand starting at position 225 of SEQ ID NO: 1880148
ccugaucaucccugggcaa

SEQ ID NO: 1945639 - RNA, 19 nt, Artificial Sequence
  Description of Artificial Sequence: Synthetic oligonucleotide
  Antisense strand to SEQ ID NO: 1945638
uugcccagggaugaucagg

SEQ ID NO: 1945640 - RNA, 19 nt, Artificial Sequence
  Description of Artificial Sequence: Synthetic oligonucleotide
  Sense strand starting at position 226 of SEQ ID NO: 1880148
cugaucaucccugggcaau

SEQ ID NO: 1945641 - RNA, 19 nt, Artificial Sequence
  Description of Artificial Sequence: Synthetic oligonucleotide
  Antisense strand to SEQ ID NO: 1945640
auugcccagggaugaucag

SEQ ID NO: 1945642 - RNA, 19 nt, Artificial Sequence
  Description of Artificial Sequence: Synthetic oligonucleotide
  Sense strand starting at position 227 of SEQ ID NO: 1880148
ugaucaucccugggcaaug

SEQ ID NO: 1945643 - RNA, 19 nt, Artificial Sequence
  Description of Artificial Sequence: Synthetic oligonucleotide
  Antisense strand to SEQ ID NO: 1945642
cauugcccagggaugauca

SEQ ID NO: 1945644 - RNA, 19 nt, Artificial Sequence
  Description of Artificial Sequence: Synthetic oligonucleotide
  Sense strand starting at position 359 of SEQ ID NO: 1880148
gauguuuauguguauacgu

SEQ ID NO: 1945645 - RNA, 19 nt, Artificial Sequence
  Description of Artificial Sequence: Synthetic oligonucleotide
  Antisense strand to SEQ ID NO: 1945644
acguauacacauaaacauc

SEQ ID NO: 1945646 - RNA, 19 nt, Artificial Sequence
  Description of Artificial Sequence: Synthetic oligonucleotide
  Sense strand starting at position 364 of SEQ ID NO: 1880148
uuauguguauacguaucua

SEQ ID NO: 1945647 - RNA, 19 nt, Artificial Sequence
  Description of Artificial Sequence: Synthetic oligonucleotide
  Antisense strand to SEQ ID NO: 1945646
uagauacguauacacauaa

SEQ ID NO: 1945648 - RNA, 19 nt, Artificial Sequence
  Description of Artificial Sequence: Synthetic oligonucleotide
  Sense strand starting at position 413 of SEQ ID NO: 1880148
ugcagagaccuuuguccuu

SEQ ID NO: 1945649 - RNA, 19 nt, Artificial Sequence
  Description of Artificial Sequence: Synthetic oligonucleotide
  Antisense strand to SEQ ID NO: 1945648
aaggacaaaggucucugca

SEQ ID NO: 1945650 - RNA, 19 nt, Artificial Sequence
  Description of Artificial Sequence: Synthetic oligonucleotide
  Sense strand starting at position 923 of SEQ ID NO: 1880148
uggcauaccuuagacagaa

SEQ ID NO: 1945651 - RNA, 19 nt, Artificial Sequence
  Description of Artificial Sequence: Synthetic oligonucleotide
  Antisense strand to SEQ ID NO: 1945650
uucugucuaagguaugcca

SEQ ID NO: 1945652 - RNA, 19 nt, Artificial Sequence
  Description of Artificial Sequence: Synthetic oligonucleotide
  Sense strand starting at position 1179 of SEQ ID NO: 1880148
aaacuaugcugggauuugu

SEQ ID NO: 1945653 - RNA, 19 nt, Artificial Sequence
  Description of Artificial Sequence: Synthetic oligonucleotide
  Antisense strand to SEQ ID NO: 1945652
acaaaucccagcauaguuu

SEQ ID NO: 1945654 - RNA, 19 nt, Artificial Sequence
  Description of Artificial Sequence: Synthetic oligonucleotide
  Sense strand starting at position 1190 of SEQ ID NO: 1880148
ggauuuguaccaggcgugu

SEQ ID NO: 1945655 - RNA, 19 nt, Artificial Sequence
  Description of Artificial Sequence: Synthetic oligonucleotide
  Antisense strand to SEQ ID NO: 1945654
acacgccugguacaaaucc

SEQ ID NO: 1945656 - RNA, 19 nt, Artificial Sequence
  Description of Artificial Sequence: Synthetic oligonucleotide
  Sense strand starting at position 1215 of SEQ ID NO: 1880148
gcgcuagucgcugugacua

SEQ ID NO: 1945657 - RNA, 19 nt, Artificial Sequence
  Description of Artificial Sequence: Synthetic oligonucleotide
  Antisense strand to SEQ ID NO: 1945656
uagucacagcgacuagcgc

SEQ ID NO: 1945658 - RNA, 19 nt, Artificial Sequence
  Description of Artificial Sequence: Synthetic oligonucleotide
  Sense strand starting at position 1294 of SEQ ID NO: 1880148
ggguauuucucuggacaac

SEQ ID NO: 1945659 - RNA, 19 nt, Artificial Sequence
  Description of Artificial Sequence: Synthetic oligonucleotide
  Antisense strand to SEQ ID NO: 1945658
guuguccagagaaauaccc

SEQ ID NO: 1945660 - RNA, 19 nt, Artificial Sequence
  Description of Artificial Sequence: Synthetic oligonucleotide
  Sense strand starting at position 1613 of SEQ ID NO: 1880148
gguggcugaccuugaaguu

SEQ ID NO: 1945661 - RNA, 19 nt, Artificial Sequence
  Description of Artificial Sequence: Synthetic oligonucleotide
  Antisense strand to SEQ ID NO: 1945660
aacuucaaggucagccacc

SEQ ID NO: 1945662 - RNA, 19 nt, Artificial Sequence
  Description of Artificial Sequence: Synthetic oligonucleotide
  Sense strand starting at position 1614 of SEQ ID NO: 1880148
guggcugaccuugaaguua

SEQ ID NO: 1945663 - RNA, 19 nt, Artificial Sequence
  Description of Artificial Sequence: Synthetic oligonucleotide
  Antisense strand to SEQ ID NO: 1945662
uaacuucaaggucagccac

SEQ ID NO: 1945664 - RNA, 19 nt, Artificial Sequence
  Description of Artificial Sequence: Synthetic oligonucleotide
  Sense strand starting at position 1663 of SEQ ID NO: 1880148
ccgagagcaauuugcguua

SEQ ID NO: 1945665 - RNA, 19 nt, Artificial Sequence
  Description of Artificial Sequence: Synthetic oligonucleotide
  Antisense strand to SEQ ID NO: 1945664
uaacgcaaauugcucucgg

SEQ ID NO: 1945666 - RNA, 19 nt, Artificial Sequence
  Description of Artificial Sequence: Synthetic oligonucleotide
  Sense strand starting at position 1666 of SEQ ID NO: 1880148
agagcaauuugcguuagaa

SEQ ID NO: 1945667 - RNA, 19 nt, Artificial Sequence
  Description of Artificial Sequence: Synthetic oligonucleotide
  Antisense strand to SEQ ID NO: 1945666
uucuaacgcaaauugcucu

SEQ ID NO: 1945668 - RNA, 19 nt, Artificial Sequence
  Description of Artificial Sequence: Synthetic oligonucleotide
  Sense strand starting at position 1668 of SEQ ID NO: 1880148
agcaauuugcguuagaagu

SEQ ID NO: 1945669 - RNA, 19 nt, Artificial Sequence
  Description of Artificial Sequence: Synthetic oligonucleotide
  Antisense strand to SEQ ID NO: 1945668
acuucuaacgcaaauugcu

SEQ ID NO: 1945670 - RNA, 19 nt, Artificial Sequence
  Description of Artificial Sequence: Synthetic oligonucleotide
  Sense strand starting at position 1674 of SEQ ID NO: 1880148
uugcguuagaaguacuaga

SEQ ID NO: 1945671 - RNA, 19 nt, Artificial Sequence
  Description of Artificial Sequence: Synthetic oligonucleotide
  Antisense strand to SEQ ID NO: 1945670
ucuaguacuucuaacgcaa

SEQ ID NO: 1945672 - RNA, 19 nt, Artificial Sequence
  Description of Artificial Sequence: Synthetic oligonucleotide
  Sense strand starting at position 2066 of SEQ ID NO: 1880148
ugacgagagucucuuuaaa

SEQ ID NO: 1945673 - RNA, 19 nt, Artificial Sequence
  Description of Artificial Sequence: Synthetic oligonucleotide
  Antisense strand to SEQ ID NO: 1945672
uuuaaagagacucucguca

SEQ ID NO: 1945674 - RNA, 19 nt, Artificial Sequence
  Description of Artificial Sequence: Synthetic oligonucleotide
  Sense strand starting at position 2181 of SEQ ID NO: 1880148
accggaauuugccaggauu

SEQ ID NO: 1945675 - RNA, 19 nt, Artificial Sequence
  Description of Artificial Sequence: Synthetic oligonucleotide
  Antisense strand to SEQ ID NO: 1945674
aauccuggcaaauuccggu

SEQ ID NO: 1945676 - RNA, 19 nt, Artificial Sequence
  Description of Artificial Sequence: Synthetic oligonucleotide
  Sense strand starting at position 2238 of SEQ ID NO: 1880148
guuccaccugcguacauau

SEQ ID NO: 1945677 - RNA, 19 nt, Artificial Sequence
  Description of Artificial Sequence: Synthetic oligonucleotide
  Antisense strand to SEQ ID NO: 1945676
auauguacgcagguggaac

SEQ ID NO: 1945678 - RNA, 19 nt, Artificial Sequence
  Description of Artificial Sequence: Synthetic oligonucleotide
  Sense strand starting at position 2288 of SEQ ID NO: 1880148
ggcggacuuguuuagauuc

SEQ ID NO: 1945679 - RNA, 19 nt, Artificial Sequence
  Description of Artificial Sequence: Synthetic oligonucleotide
  Antisense strand to SEQ ID NO: 1945678
gaaucuaaacaaguccgcc

SEQ ID NO: 1945680 - RNA, 19 nt, Artificial Sequence
  Description of Artificial Sequence: Synthetic oligonucleotide
  Sense strand starting at position 2295 of SEQ ID NO: 1880148
uuguuuagauucuuccuua

SEQ ID NO: 1945681 - RNA, 19 nt, Artificial Sequence
  Description of Artificial Sequence: Synthetic oligonucleotide
  Antisense strand to SEQ ID NO: 1945680
uaaggaagaaucuaaacaa

SEQ ID NO: 1945682 - RNA, 19 nt, Artificial Sequence
  Description of Artificial Sequence: Synthetic oligonucleotide
  Sense strand starting at position 2298 of SEQ ID NO: 1880148
uuuagauucuuccuuaagg

SEQ ID NO: 1945683 - RNA, 19 nt, Artificial Sequence
  Description of Artificial Sequence: Synthetic oligonucleotide
  Antisense strand to SEQ ID NO: 1945682
ccuuaaggaagaaucuaaa

SEQ ID NO: 1945684 - RNA, 19 nt, Artificial Sequence
  Description of Artificial Sequence: Synthetic oligonucleotide
  Sense strand starting at position 2299 of SEQ ID NO: 1880148
uuagauucuuccuuaagga

SEQ ID NO: 1945685 - RNA, 19 nt, Artificial Sequence
  Description of Artificial Sequence: Synthetic oligonucleotide
  Antisense strand to SEQ ID NO: 1945684
uccuuaaggaagaaucuaa

SEQ ID NO: 1945686 - RNA, 19 nt, Artificial Sequence
  Description of Artificial Sequence: Synthetic oligonucleotide
  Sense strand starting at position 2559 of SEQ ID NO: 1880148
ccacaauuccuggguuuga

SEQ ID NO: 1945687 - RNA, 19 nt, Artificial Sequence
  Description of Artificial Sequence: Synthetic oligonucleotide
  Antisense strand to SEQ ID NO: 1945686
ucaaacccaggaauugugg

SEQ ID NO: 1945688 - RNA, 19 nt, Artificial Sequence
  Description of Artificial Sequence: Synthetic oligonucleotide
  Sense strand starting at position 2568 of SEQ ID NO: 1880148
cuggguuugagcugccaca

SEQ ID NO: 1945689 - RNA, 19 nt, Artificial Sequence
  Description of Artificial Sequence: Synthetic oligonucleotide
  Antisense strand to SEQ ID NO: 1945688
uguggcagcucaaacccag

SEQ ID NO: 1945690 - RNA, 19 nt, Artificial Sequence
  Description of Artificial Sequence: Synthetic oligonucleotide
  Sense strand starting at position 2610 of SEQ ID NO: 1880148
ggacaaugcucccuuguuc

SEQ ID NO: 1945691 - RNA, 19 nt, Artificial Sequence
  Description of Artificial Sequence: Synthetic oligonucleotide
  Antisense strand to SEQ ID NO: 1945690
gaacaagggagcauugucc

SEQ ID NO: 1945692 - RNA, 19 nt, Artificial Sequence
  Description of Artificial Sequence: Synthetic oligonucleotide
  Sense strand starting at position 2686 of SEQ ID NO: 1880148
agaacacgcuuugauuuau

SEQ ID NO: 1945693 - RNA, 19 nt, Artificial Sequence
  Description of Artificial Sequence: Synthetic oligonucleotide
  Antisense strand to SEQ ID NO: 1945692
auaaaucaaagcguguucu

SEQ ID NO: 1945694 - RNA, 19 nt, Artificial Sequence
  Description of Artificial Sequence: Synthetic oligonucleotide
  Sense strand starting at position 2958 of SEQ ID NO: 1880148
ggauuuaaauagcacaaau

SEQ ID NO: 1945695 - RNA, 19 nt, Artificial Sequence
  Description of Artificial Sequence: Synthetic oligonucleotide
  Antisense strand to SEQ ID NO: 1945694
auuugugcuauuuaaaucc

SEQ ID NO: 1945696 - RNA, 19 nt, Artificial Sequence
  Description of Artificial Sequence: Synthetic oligonucleotide
  Sense strand starting at position 2983 of SEQ ID NO: 1880148
auuucugcaucagaugaau

SEQ ID NO: 1945697 - RNA, 19 nt, Artificial Sequence
  Description of Artificial Sequence: Synthetic oligonucleotide
  Antisense strand to SEQ ID NO: 1945696
auucaucugaugcagaaau

SEQ ID NO: 1945698 - RNA, 19 nt, Artificial Sequence
  Description of Artificial Sequence: Synthetic oligonucleotide
  Sense strand starting at position 3035 of SEQ ID NO: 1880148
agcacauucguacacuuua

SEQ ID NO: 1945699 - RNA, 19 nt, Artificial Sequence
  Description of Artificial Sequence: Synthetic oligonucleotide
  Antisense strand to SEQ ID NO: 1945698
uaaaguguacgaaugugcu

SEQ ID NO: 1945700 - RNA, 19 nt, Artificial Sequence
  Description of Artificial Sequence: Synthetic oligonucleotide
  Sense strand starting at position 3040 of SEQ ID NO: 1880148
auucguacacuuuaggauu

SEQ ID NO: 1945701 - RNA, 19 nt, Artificial Sequence
  Description of Artificial Sequence: Synthetic oligonucleotide
  Antisense strand to SEQ ID NO: 1945700
aauccuaaaguguacgaau

SEQ ID NO: 1945702 - RNA, 19 nt, Artificial Sequence
  Description of Artificial Sequence: Synthetic oligonucleotide
  Sense strand starting at position 3094 of SEQ ID NO: 1880148
agggaucuccucugcaaca

SEQ ID NO: 1945703 - RNA, 19 nt, Artificial Sequence
  Description of Artificial Sequence: Synthetic oligonucleotide
  Antisense strand to SEQ ID NO: 1945702
uguugcagaggagaucccu

SEQ ID NO: 1945704 - RNA, 19 nt, Artificial Sequence
  Description of Artificial Sequence: Synthetic oligonucleotide
  Sense strand starting at position 3188 of SEQ ID NO: 1880148
augaacaacuuauucguua

SEQ ID NO: 1945705 - RNA, 19 nt, Artificial Sequence
  Description of Artificial Sequence: Synthetic oligonucleotide
  Antisense strand to SEQ ID NO: 1945704
uaacgaauaaguuguucau

SEQ ID NO: 1945706 - RNA, 19 nt, Artificial Sequence
  Description of Artificial Sequence: Synthetic oligonucleotide
  Sense strand starting at position 3192 of SEQ ID NO: 1880148
acaacuuauucguuaguua

SEQ ID NO: 1945707 - RNA, 19 nt, Artificial Sequence
  Description of Artificial Sequence: Synthetic oligonucleotide
  Antisense strand to SEQ ID NO: 1945706
uaacuaacgaauaaguugu

SEQ ID NO: 1945708 - RNA, 19 nt, Artificial Sequence
  Description of Artificial Sequence: Synthetic oligonucleotide
  Sense strand starting at position 3760 of SEQ ID NO: 1880148
guuauagccuuagcaggau

SEQ ID NO: 1945709 - RNA, 19 nt, Artificial Sequence
  Description of Artificial Sequence: Synthetic oligonucleotide
  Antisense strand to SEQ ID NO: 1945708
auccugcuaaggcuauaac

SEQ ID NO: 1945710 - RNA, 19 nt, Artificial Sequence
  Description of Artificial Sequence: Synthetic oligonucleotide
  Sense strand starting at position 3855 of SEQ ID NO: 1880148
aggaaaugauugcuuacag

SEQ ID NO: 1945711 - RNA, 19 nt, Artificial Sequence
  Description of Artificial Sequence: Synthetic oligonucleotide
  Antisense strand to SEQ ID NO: 1945710
cuguaagcaaucauuuccu

SEQ ID NO: 1945712 - RNA, 19 nt, Artificial Sequence
  Description of Artificial Sequence: Synthetic oligonucleotide
  Sense strand starting at position 3856 of SEQ ID NO: 1880148
ggaaaugauugcuuacagu

SEQ ID NO: 1945713 - RNA, 19 nt, Artificial Sequence
  Description of Artificial Sequence: Synthetic oligonucleotide
  Antisense strand to SEQ ID NO: 1945712
acuguaagcaaucauuucc

SEQ ID NO: 1945714 - RNA, 19 nt, Artificial Sequence
  Description of Artificial Sequence: Synthetic oligonucleotide
  Sense strand starting at position 3880 of SEQ ID NO: 1880148
gguggaguuagguggaaau

SEQ ID NO: 1945715 - RNA, 19 nt, Artificial Sequence
  Description of Artificial Sequence: Synthetic oligonucleotide
  Antisense strand to SEQ ID NO: 1945714
auuuccaccuaacuccacc

SEQ ID NO: 1945716 - RNA, 19 nt, Artificial Sequence
  Description of Artificial Sequence: Synthetic oligonucleotide
  Sense strand starting at position 3980 of SEQ ID NO: 1880148
guaaacauuugucaaugau

SEQ ID NO: 1945717 - RNA, 19 nt, Artificial Sequence
  Description of Artificial Sequence: Synthetic oligonucleotide
  Antisense strand to SEQ ID NO: 1945716
aucauugacaaauguuuac

SEQ ID NO: 1945718 - RNA, 19 nt, Artificial Sequence
  Description of Artificial Sequence: Synthetic oligonucleotide
  Sense strand starting at position 35 of SEQ ID NO: 1880149
guguuaaguguggagaacu

SEQ ID NO: 1945719 - RNA, 19 nt, Artificial Sequence
  Description of Artificial Sequence: Synthetic oligonucleotide
  Antisense strand to SEQ ID NO: 1945718
aguucuccacacuuaacac

SEQ ID NO: 1945720 - RNA, 19 nt, Artificial Sequence
  Description of Artificial Sequence: Synthetic oligonucleotide
  Sense strand starting at position 89 of SEQ ID NO: 1880149
agauacuuucuggguaacu

SEQ ID NO: 1945721 - RNA, 19 nt, Artificial Sequence
  Description of Artificial Sequence: Synthetic oligonucleotide
  Antisense strand to SEQ ID NO: 1945720
aguuacccagaaaguaucu

SEQ ID NO: 1945722 - RNA, 19 nt, Artificial Sequence
  Description of Artificial Sequence: Synthetic oligonucleotide
  Sense strand starting at position 90 of SEQ ID NO: 1880149
gauacuuucuggguaacuc

SEQ ID NO: 1945723 - RNA, 19 nt, Artificial Sequence
  Description of Artificial Sequence: Synthetic oligonucleotide
  Antisense strand to SEQ ID NO: 1945722
gaguuacccagaaaguauc

SEQ ID NO: 1945724 - RNA, 19 nt, Artificial Sequence
  Description of Artificial Sequence: Synthetic oligonucleotide
  Sense strand starting at position 91 of SEQ ID NO: 1880149
auacuuucuggguaacuca

SEQ ID NO: 1945725 - RNA, 19 nt, Artificial Sequence
  Description of Artificial Sequence: Synthetic oligonucleotide
  Antisense strand to SEQ ID NO: 1945724
ugaguuacccagaaaguau

SEQ ID NO: 1945726 - RNA, 19 nt, Artificial Sequence
  Description of Artificial Sequence: Synthetic oligonucleotide
  Sense strand starting at position 119 of SEQ ID NO: 1880149
ugauaaauggcauaguuuc

SEQ ID NO: 1945727 - RNA, 19 nt, Artificial Sequence
  Description of Artificial Sequence: Synthetic oligonucleotide
  Antisense strand to SEQ ID NO: 1945726
gaaacuaugccauuuauca

SEQ ID NO: 1945728 - RNA, 19 nt, Artificial Sequence
  Description of Artificial Sequence: Synthetic oligonucleotide
  Sense strand starting at position 190 of SEQ ID NO: 1880149
ucuugagagcgggaaucua

SEQ ID NO: 1945729 - RNA, 19 nt, Artificial Sequence
  Description of Artificial Sequence: Synthetic oligonucleotide
  Antisense strand to SEQ ID NO: 1945728
uagauucccgcucucaaga

SEQ ID NO: 1945730 - RNA, 19 nt, Artificial Sequence
  Description of Artificial Sequence: Synthetic oligonucleotide
  Sense strand starting at position 200 of SEQ ID NO: 1880149
gggaaucuaccaugcuaau

SEQ ID NO: 1945731 - RNA, 19 nt, Artificial Sequence
  Description of Artificial Sequence: Synthetic oligonucleotide
  Antisense strand to SEQ ID NO: 1945730
auuagcaugguagauuccc

SEQ ID NO: 1945732 - RNA, 19 nt, Artificial Sequence
  Description of Artificial Sequence: Synthetic oligonucleotide
  Sense strand starting at position 211 of SEQ ID NO: 1880149
augcuaauuccuuauggua

SEQ ID NO: 1945733 - RNA, 19 nt, Artificial Sequence
  Description of Artificial Sequence: Synthetic oligonucleotide
  Antisense strand to SEQ ID NO: 1945732
uaccauaaggaauuagcau

SEQ ID NO: 1945734 - RNA, 19 nt, Artificial Sequence
  Description of Artificial Sequence: Synthetic oligonucleotide
  Sense strand starting at position 286 of SEQ ID NO: 1880149
ugagaagugagucgaaacu

SEQ ID NO: 1945735 - RNA, 19 nt, Artificial Sequence
  Description of Artificial Sequence: Synthetic oligonucleotide
  Antisense strand to SEQ ID NO: 1945734
aguuucgacucacuucuca

SEQ ID NO: 1945736 - RNA, 19 nt, Artificial Sequence
  Description of Artificial Sequence: Synthetic oligonucleotide
  Sense strand starting at position 441 of SEQ ID NO: 1880149
cugugacuuuaccuaagaa

SEQ ID NO: 1945737 - RNA, 19 nt, Artificial Sequence
  Description of Artificial Sequence: Synthetic oligonucleotide
  Antisense strand to SEQ ID NO: 1945736
uucuuagguaaagucacag

SEQ ID NO: 1945738 - RNA, 19 nt, Artificial Sequence
  Description of Artificial Sequence: Synthetic oligonucleotide
  Sense strand starting at position 529 of SEQ ID NO: 1880149
gguguaauuauugaugauu

SEQ ID NO: 1945739 - RNA, 19 nt, Artificial Sequence
  Description of Artificial Sequence: Synthetic oligonucleotide
  Antisense strand to SEQ ID NO: 1945738
aaucaucaauaauuacacc

SEQ ID NO: 1945740 - RNA, 19 nt, Artificial Sequence
  Description of Artificial Sequence: Synthetic oligonucleotide
  Sense strand starting at position 591 of SEQ ID NO: 1880149
aagcuuuaaggaggucaga

SEQ ID NO: 1945741 - RNA, 19 nt, Artificial Sequence
  Description of Artificial Sequence: Synthetic oligonucleotide
  Antisense strand to SEQ ID NO: 1945740
ucugaccuccuuaaagcuu

SEQ ID NO: 1945742 - RNA, 19 nt, Artificial Sequence
  Description of Artificial Sequence: Synthetic oligonucleotide
  Sense strand starting at position 838 of SEQ ID NO: 1880149
auaggaaacuuaguggcau

SEQ ID NO: 1945743 - RNA, 19 nt, Artificial Sequence
  Description of Artificial Sequence: Synthetic oligonucleotide
  Antisense strand to SEQ ID NO: 1945742
augccacuaaguuuccuau

SEQ ID NO: 1945744 - RNA, 19 nt, Artificial Sequence
  Description of Artificial Sequence: Synthetic oligonucleotide
  Sense strand starting at position 850 of SEQ ID NO: 1880149
guggcauaccuugaaacuc

SEQ ID NO: 1945745 - RNA, 19 nt, Artificial Sequence
  Description of Artificial Sequence: Synthetic oligonucleotide
  Antisense strand to SEQ ID NO: 1945744
gaguuucaagguaugccac

SEQ ID NO: 1945746 - RNA, 19 nt, Artificial Sequence
  Description of Artificial Sequence: Synthetic oligonucleotide
  Sense strand starting at position 1007 of SEQ ID NO: 1880149
gaguccaauuuauaagaga

SEQ ID NO: 1945747 - RNA, 19 nt, Artificial Sequence
  Description of Artificial Sequence: Synthetic oligonucleotide
  Antisense strand to SEQ ID NO: 1945746
ucucuuauaaauuggacuc

SEQ ID NO: 1945748 - RNA, 19 nt, Artificial Sequence
  Description of Artificial Sequence: Synthetic oligonucleotide
  Sense strand starting at position 1402 of SEQ ID NO: 1880149
agugacacgaugcaagauu

SEQ ID NO: 1945749 - RNA, 19 nt, Artificial Sequence
  Description of Artificial Sequence: Synthetic oligonucleotide
  Antisense strand to SEQ ID NO: 1945748
aaucuugcaucgugucacu

SEQ ID NO: 1945750 - RNA, 19 nt, Artificial Sequence
  Description of Artificial Sequence: Synthetic oligonucleotide
  Sense strand starting at position 1486 of SEQ ID NO: 1880149
ggguaaaucugaguauucu

SEQ ID NO: 1945751 - RNA, 19 nt, Artificial Sequence
  Description of Artificial Sequence: Synthetic oligonucleotide
  Antisense strand to SEQ ID NO: 1945750
agaauacucagauuuaccc

SEQ ID NO: 1945752 - RNA, 19 nt, Artificial Sequence
  Description of Artificial Sequence: Synthetic oligonucleotide
  Sense strand starting at position 1487 of SEQ ID NO: 1880149
gguaaaucugaguauucuc

SEQ ID NO: 1945753 - RNA, 19 nt, Artificial Sequence
  Description of Artificial Sequence: Synthetic oligonucleotide
  Antisense strand to SEQ ID NO: 1945752
gagaauacucagauuuacc

SEQ ID NO: 1945754 - RNA, 19 nt, Artificial Sequence
  Description of Artificial Sequence: Synthetic oligonucleotide
  Sense strand starting at position 1534 of SEQ ID NO: 1880149
cagcauagccgucuuguca

SEQ ID NO: 1945755 - RNA, 19 nt, Artificial Sequence
  Description of Artificial Sequence: Synthetic oligonucleotide
  Antisense strand to SEQ ID NO: 1945754
ugacaagacggcuaugcug

SEQ ID NO: 1945756 - RNA, 19 nt, Artificial Sequence
  Description of Artificial Sequence: Synthetic oligonucleotide
  Sense strand starting at position 1554 of SEQ ID NO: 1880149
ucccuaccuguguaacaga

SEQ ID NO: 1945757 - RNA, 19 nt, Artificial Sequence
  Description of Artificial Sequence: Synthetic oligonucleotide
  Antisense strand to SEQ ID NO: 1945756
ucuguuacacagguaggga

SEQ ID NO: 1945758 - RNA, 19 nt, Artificial Sequence
  Description of Artificial Sequence: Synthetic oligonucleotide
  Sense strand starting at position 1622 of SEQ ID NO: 1880149
uuuguuucucuugauauag

SEQ ID NO: 1945759 - RNA, 19 nt, Artificial Sequence
  Description of Artificial Sequence: Synthetic oligonucleotide
  Antisense strand to SEQ ID NO: 1945758
cuauaucaagagaaacaaa

SEQ ID NO: 1945760 - RNA, 19 nt, Artificial Sequence
  Description of Artificial Sequence: Synthetic oligonucleotide
  Sense strand starting at position 1761 of SEQ ID NO: 1880149
auuccuauccaguaguaag

SEQ ID NO: 1945761 - RNA, 19 nt, Artificial Sequence
  Description of Artificial Sequence: Synthetic oligonucleotide
  Antisense strand to SEQ ID NO: 1945760
cuuacuacuggauaggaau

SEQ ID NO: 1945762 - RNA, 19 nt, Artificial Sequence
  Description of Artificial Sequence: Synthetic oligonucleotide
  Sense strand starting at position 1839 of SEQ ID NO: 1880149
acuaaaucuguguaauugu

SEQ ID NO: 1945763 - RNA, 19 nt, Artificial Sequence
  Description of Artificial Sequence: Synthetic oligonucleotide
  Antisense strand to SEQ ID NO: 1945762
acaauuacacagauuuagu

SEQ ID NO: 1945764 - RNA, 19 nt, Artificial Sequence
  Description of Artificial Sequence: Synthetic oligonucleotide
  Sense strand starting at position 1952 of SEQ ID NO: 1880149
aagacaucagugugaccua

SEQ ID NO: 1945765 - RNA, 19 nt, Artificial Sequence
  Description of Artificial Sequence: Synthetic oligonucleotide
  Antisense strand to SEQ ID NO: 1945764
uaggucacacugaugucuu

SEQ ID NO: 1945766 - RNA, 19 nt, Artificial Sequence
  Description of Artificial Sequence: Synthetic oligonucleotide
  Sense strand starting at position 2121 of SEQ ID NO: 1880149
accuucuggcuugaauaua

SEQ ID NO: 1945767 - RNA, 19 nt, Artificial Sequence
  Description of Artificial Sequence: Synthetic oligonucleotide
  Antisense strand to SEQ ID NO: 1945766
uauauucaagccagaaggu

SEQ ID NO: 1945768 - RNA, 19 nt, Artificial Sequence
  Description of Artificial Sequence: Synthetic oligonucleotide
  Sense strand starting at position 2587 of SEQ ID NO: 1880149
auuagaucauguucuauac

SEQ ID NO: 1945769 - RNA, 19 nt, Artificial Sequence
  Description of Artificial Sequence: Synthetic oligonucleotide
  Antisense strand to SEQ ID NO: 1945768
guauagaacaugaucuaau

SEQ ID NO: 1945770 - RNA, 19 nt, Artificial Sequence
  Description of Artificial Sequence: Synthetic oligonucleotide
  Sense strand starting at position 2654 of SEQ ID NO: 1880149
auaugagggcuuugaagau

SEQ ID NO: 1945771 - RNA, 19 nt, Artificial Sequence
  Description of Artificial Sequence: Synthetic oligonucleotide
  Antisense strand to SEQ ID NO: 1945770
aucuucaaagcccucauau

SEQ ID NO: 1945772 - RNA, 19 nt, Artificial Sequence
  Description of Artificial Sequence: Synthetic oligonucleotide
  Sense strand starting at position 2997 of SEQ ID NO: 1880149
ggaaugugugaacgggaga

SEQ ID NO: 1945773 - RNA, 19 nt, Artificial Sequence
  Description of Artificial Sequence: Synthetic oligonucleotide
  Antisense strand to SEQ ID NO: 1945772
ucucccguucacacauucc

SEQ ID NO: 1945774 - RNA, 19 nt, Artificial Sequence
  Description of Artificial Sequence: Synthetic oligonucleotide
  Sense strand starting at position 3000 of SEQ ID NO: 1880149
augugugaacgggagaguu

SEQ ID NO: 1945775 - RNA, 19 nt, Artificial Sequence
  Description of Artificial Sequence: Synthetic oligonucleotide
  Antisense strand to SEQ ID NO: 1945774
aacucucccguucacacau

SEQ ID NO: 1945776 - RNA, 19 nt, Artificial Sequence
  Description of Artificial Sequence: Synthetic oligonucleotide
  Sense strand starting at position 3063 of SEQ ID NO: 1880149
agaagacauuaguuuacuu

SEQ ID NO: 1945777 - RNA, 19 nt, Artificial Sequence
  Description of Artificial Sequence: Synthetic oligonucleotide
  Antisense strand to SEQ ID NO: 1945776
aaguaaacuaaugucuucu

SEQ ID NO: 1945778 - RNA, 19 nt, Artificial Sequence
  Description of Artificial Sequence: Synthetic oligonucleotide
  Sense strand starting at position 3067 of SEQ ID NO: 1880149
gacauuaguuuacuuagga

SEQ ID NO: 1945779 - RNA, 19 nt, Artificial Sequence
  Description of Artificial Sequence: Synthetic oligonucleotide
  Antisense strand to SEQ ID NO: 1945778
uccuaaguaaacuaauguc

SEQ ID NO: 1945780 - RNA, 19 nt, Artificial Sequence
  Description of Artificial Sequence: Synthetic oligonucleotide
  Sense strand starting at position 3068 of SEQ ID NO: 1880149
acauuaguuuacuuaggaa

SEQ ID NO: 1945781 - RNA, 19 nt, Artificial Sequence
  Description of Artificial Sequence: Synthetic oligonucleotide
  Antisense strand to SEQ ID NO: 1945780
uuccuaaguaaacuaaugu

SEQ ID NO: 1945782 - RNA, 19 nt, Artificial Sequence
  Description of Artificial Sequence: Synthetic oligonucleotide
  Sense strand starting at position 3269 of SEQ ID NO: 1880149
cuaaauauuugguacagau

SEQ ID NO: 1945783 - RNA, 19 nt, Artificial Sequence
  Description of Artificial Sequence: Synthetic oligonucleotide
  Antisense strand to SEQ ID NO: 1945782
aucuguaccaaauauuuag

SEQ ID NO: 1945784 - RNA, 19 nt, Artificial Sequence
  Description of Artificial Sequence: Synthetic oligonucleotide
  Sense strand starting at position 3287 of SEQ ID NO: 1880149
uuguaaguaccuuaacaga

SEQ ID NO: 1945785 - RNA, 19 nt, Artificial Sequence
  Description of Artificial Sequence: Synthetic oligonucleotide
  Antisense strand to SEQ ID NO: 1945784
ucuguuaagguacuuacaa

SEQ ID NO: 1945786 - RNA, 19 nt, Artificial Sequence
  Description of Artificial Sequence: Synthetic oligonucleotide
  Sense strand starting at position 3372 of SEQ ID NO: 1880149
uacagcaugggcuauuaua

SEQ ID NO: 1945787 - RNA, 19 nt, Artificial Sequence
  Description of Artificial Sequence: Synthetic oligonucleotide
  Antisense strand to SEQ ID NO: 1945786
uauaauagcccaugcugua

SEQ ID NO: 1945788 - RNA, 19 nt, Artificial Sequence
  Description of Artificial Sequence: Synthetic oligonucleotide
  Sense strand starting at position 3490 of SEQ ID NO: 1880149
uuucccuuagacuauguau

SEQ ID NO: 1945789 - RNA, 19 nt, Artificial Sequence
  Description of Artificial Sequence: Synthetic oligonucleotide
  Antisense strand to SEQ ID NO: 1945788
auacauagucuaagggaaa

SEQ ID NO: 1945790 - RNA, 19 nt, Artificial Sequence
  Description of Artificial Sequence: Synthetic oligonucleotide
  Sense strand starting at position 3607 of SEQ ID NO: 1880149
acuugaagauguuccauaa

SEQ ID NO: 1945791 - RNA, 19 nt, Artificial Sequence
  Description of Artificial Sequence: Synthetic oligonucleotide
  Antisense strand to SEQ ID NO: 1945790
uuauggaacaucuucaagu

SEQ ID NO: 1945792 - RNA, 19 nt, Artificial Sequence
  Description of Artificial Sequence: Synthetic oligonucleotide
  Sense strand starting at position 3611 of SEQ ID NO: 1880149
gaagauguuccauaagucc

SEQ ID NO: 1945793 - RNA, 19 nt, Artificial Sequence
  Description of Artificial Sequence: Synthetic oligonucleotide
  Antisense strand to SEQ ID NO: 1945792
ggacuuauggaacaucuuc

SEQ ID NO: 1945794 - RNA, 19 nt, Artificial Sequence
  Description of Artificial Sequence: Synthetic oligonucleotide
  Sense strand starting at position 3791 of SEQ ID NO: 1880149
guaacagguuucucagaca

SEQ ID NO: 1945795 - RNA, 19 nt, Artificial Sequence
  Description of Artificial Sequence: Synthetic oligonucleotide
  Antisense strand to SEQ ID NO: 1945794
ugucugagaaaccuguuac

SEQ ID NO: 1945796 - RNA, 19 nt, Artificial Sequence
  Description of Artificial Sequence: Synthetic oligonucleotide
  Sense strand starting at position 3902 of SEQ ID NO: 1880149
ucgguacugcccugaauuu

SEQ ID NO: 1945797 - RNA, 19 nt, Artificial Sequence
  Description of Artificial Sequence: Synthetic oligonucleotide
  Antisense strand to SEQ ID NO: 1945796
aaauucagggcaguaccga

SEQ ID NO: 1945798 - RNA, 19 nt, Artificial Sequence
  Description of Artificial Sequence: Synthetic oligonucleotide
  Sense strand starting at position 266 of SEQ ID NO: 1880150
acaagauaucucggaaggu

SEQ ID NO: 1945799 - RNA, 19 nt, Artificial Sequence
  Description of Artificial Sequence: Synthetic oligonucleotide
  Antisense strand to SEQ ID NO: 1945798
accuuccgagauaucuugu

SEQ ID NO: 1945800 - RNA, 19 nt, Artificial Sequence
  Description of Artificial Sequence: Synthetic oligonucleotide
  Sense strand starting at position 276 of SEQ ID NO: 1880150
ucggaagguuccagaguga

SEQ ID NO: 1945801 - RNA, 19 nt, Artificial Sequence
  Description of Artificial Sequence: Synthetic oligonucleotide
  Antisense strand to SEQ ID NO: 1945800
ucacucuggaaccuuccga

SEQ ID NO: 1945802 - RNA, 19 nt, Artificial Sequence
  Description of Artificial Sequence: Synthetic oligonucleotide
  Sense strand starting at position 593 of SEQ ID NO: 1880150
agaaccucuccucggaaau

SEQ ID NO: 1945803 - RNA, 19 nt, Artificial Sequence
  Description of Artificial Sequence: Synthetic oligonucleotide
  Antisense strand to SEQ ID NO: 1945802
auuuccgaggagagguucu

SEQ ID NO: 1945804 - RNA, 19 nt, Artificial Sequence
  Description of Artificial Sequence: Synthetic oligonucleotide
  Sense strand starting at position 1618 of SEQ ID NO: 1880150
agcuguggucgcagaagca

SEQ ID NO: 1945805 - RNA, 19 nt, Artificial Sequence
  Description of Artificial Sequence: Synthetic oligonucleotide
  Antisense strand to SEQ ID NO: 1945804
ugcuucugcgaccacagcu

SEQ ID NO: 1945806 - RNA, 19 nt, Artificial Sequence
  Description of Artificial Sequence: Synthetic oligonucleotide
  Sense strand starting at position 1801 of SEQ ID NO: 1880150
cgcugugagucauuuccuu

SEQ ID NO: 1945807 - RNA, 19 nt, Artificial Sequence
  Description of Artificial Sequence: Synthetic oligonucleotide
  Antisense strand to SEQ ID NO: 1945806
aaggaaaugacucacagcg

SEQ ID NO: 1945808 - RNA, 19 nt, Artificial Sequence
  Description of Artificial Sequence: Synthetic oligonucleotide
  Sense strand starting at position 1809 of SEQ ID NO: 1880150
gucauuuccuuggaauccu

SEQ ID NO: 1945809 - RNA, 19 nt, Artificial Sequence
  Description of Artificial Sequence: Synthetic oligonucleotide
  Antisense strand to SEQ ID NO: 1945808
aggauuccaaggaaaugac

SEQ ID NO: 1945810 - RNA, 19 nt, Artificial Sequence
  Description of Artificial Sequence: Synthetic oligonucleotide
  Sense strand starting at position 1839 of SEQ ID NO: 1880150
uuauuucccuuagaaggaa

SEQ ID NO: 1945811 - RNA, 19 nt, Artificial Sequence
  Description of Artificial Sequence: Synthetic oligonucleotide
  Antisense strand to SEQ ID NO: 1945810
uuccuucuaagggaaauaa

SEQ ID NO: 1945812 - RNA, 19 nt, Artificial Sequence
  Description of Artificial Sequence: Synthetic oligonucleotide
  Sense strand starting at position 2296 of SEQ ID NO: 1880150
gcagcugagaaauguacuu

SEQ ID NO: 1945813 - RNA, 19 nt, Artificial Sequence
  Description of Artificial Sequence: Synthetic oligonucleotide
  Antisense strand to SEQ ID NO: 1945812
aaguacauuucucagcugc

SEQ ID NO: 1945814 - RNA, 19 nt, Artificial Sequence
  Description of Artificial Sequence: Synthetic oligonucleotide
  Sense strand starting at position 2301 of SEQ ID NO: 1880150
ugagaaauguacuucccag

SEQ ID NO: 1945815 - RNA, 19 nt, Artificial Sequence
  Description of Artificial Sequence: Synthetic oligonucleotide
  Antisense strand to SEQ ID NO: 1945814
cugggaaguacauuucuca

SEQ ID NO: 1945816 - RNA, 19 nt, Artificial Sequence
  Description of Artificial Sequence: Synthetic oligonucleotide
  Sense strand starting at position 2307 of SEQ ID NO: 1880150
auguacuucccagggcaga

SEQ ID NO: 1945817 - RNA, 19 nt, Artificial Sequence
  Description of Artificial Sequence: Synthetic oligonucleotide
  Antisense strand to SEQ ID NO: 1945816
ucugcccugggaaguacau

SEQ ID NO: 1945818 - RNA, 19 nt, Artificial Sequence
  Description of Artificial Sequence: Synthetic oligonucleotide
  Sense strand starting at position 2354 of SEQ ID NO: 1880150
cgacaucuguuuguuuaga

SEQ ID NO: 1945819 - RNA, 19 nt, Artificial Sequence
  Description of Artificial Sequence: Synthetic oligonucleotide
  Antisense strand to SEQ ID NO: 1945818
ucuaaacaaacagaugucg

SEQ ID NO: 1945820 - RNA, 19 nt, Artificial Sequence
  Description of Artificial Sequence: Synthetic oligonucleotide
  Sense strand starting at position 2355 of SEQ ID NO: 1880150
gacaucuguuuguuuagaa

SEQ ID NO: 1945821 - RNA, 19 nt, Artificial Sequence
  Description of Artificial Sequence: Synthetic oligonucleotide
  Antisense strand to SEQ ID NO: 1945820
uucuaaacaaacagauguc

SEQ ID NO: 1945822 - RNA, 19 nt, Artificial Sequence
  Description of Artificial Sequence: Synthetic oligonucleotide
  Sense strand starting at position 2356 of SEQ ID NO: 1880150
acaucuguuuguuuagaag

SEQ ID NO: 1945823 - RNA, 19 nt, Artificial Sequence
  Description of Artificial Sequence: Synthetic oligonucleotide
  Antisense strand to SEQ ID NO: 1945822
cuucuaaacaaacagaugu

SEQ ID NO: 1945824 - RNA, 19 nt, Artificial Sequence
  Description of Artificial Sequence: Synthetic oligonucleotide
  Sense strand starting at position 2362 of SEQ ID NO: 1880150
guuuguuuagaaggguuga

SEQ ID NO: 1945825 - RNA, 19 nt, Artificial Sequence
  Description of Artificial Sequence: Synthetic oligonucleotide
  Antisense strand to SEQ ID NO: 1945824
ucaacccuucuaaacaaac

SEQ ID NO: 1945826 - RNA, 19 nt, Artificial Sequence
  Description of Artificial Sequence: Synthetic oligonucleotide
  Sense strand starting at position 2363 of SEQ ID NO: 1880150
uuuguuuagaaggguugaa

SEQ ID NO: 1945827 - RNA, 19 nt, Artificial Sequence
  Description of Artificial Sequence: Synthetic oligonucleotide
  Antisense strand to SEQ ID NO: 1945826
uucaacccuucuaaacaaa

SEQ ID NO: 1945828 - RNA, 19 nt, Artificial Sequence
  Description of Artificial Sequence: Synthetic oligonucleotide
  Sense strand starting at position 2559 of SEQ ID NO: 1880150
ugcuaacugcuauaaugau

SEQ ID NO: 1945829 - RNA, 19 nt, Artificial Sequence
  Description of Artificial Sequence: Synthetic oligonucleotide
  Antisense strand to SEQ ID NO: 1945828
aucauuauagcaguuagca

SEQ ID NO: 1945830 - RNA, 19 nt, Artificial Sequence
  Description of Artificial Sequence: Synthetic oligonucleotide
  Sense strand starting at position 2772 of SEQ ID NO: 1880150
uauagaaaugccugguaac

SEQ ID NO: 1945831 - RNA, 19 nt, Artificial Sequence
  Description of Artificial Sequence: Synthetic oligonucleotide
  Antisense strand to SEQ ID NO: 1945830
guuaccaggcauuucuaua

SEQ ID NO: 1945832 - RNA, 19 nt, Artificial Sequence
  Description of Artificial Sequence: Synthetic oligonucleotide
  Sense strand starting at position 2773 of SEQ ID NO: 1880150
auagaaaugccugguaacu

SEQ ID NO: 1945833 - RNA, 19 nt, Artificial Sequence
  Description of Artificial Sequence: Synthetic oligonucleotide
  Antisense strand to SEQ ID NO: 1945832
aguuaccaggcauuucuau

SEQ ID NO: 1945834 - RNA, 19 nt, Artificial Sequence
  Description of Artificial Sequence: Synthetic oligonucleotide
  Sense strand starting at position 2783 of SEQ ID NO: 1880150
cugguaacuuuacuacgaa

SEQ ID NO: 1945835 - RNA, 19 nt, Artificial Sequence
  Description of Artificial Sequence: Synthetic oligonucleotide
  Antisense strand to SEQ ID NO: 1945834
uucguaguaaaguuaccag

SEQ ID NO: 1945836 - RNA, 19 nt, Artificial Sequence
  Description of Artificial Sequence: Synthetic oligonucleotide
  Sense strand starting at position 2786 of SEQ ID NO: 1880150
guaacuuuacuacgaacau

SEQ ID NO: 1945837 - RNA, 19 nt, Artificial Sequence
  Description of Artificial Sequence: Synthetic oligonucleotide
  Antisense strand to SEQ ID NO: 1945836
auguucguaguaaaguuac

SEQ ID NO: 1945838 - RNA, 19 nt, Artificial Sequence
  Description of Artificial Sequence: Synthetic oligonucleotide
  Sense strand starting at position 2845 of SEQ ID NO: 1880150
ggaugcuggaagugucauu

SEQ ID NO: 1945839 - RNA, 19 nt, Artificial Sequence
  Description of Artificial Sequence: Synthetic oligonucleotide
  Antisense strand to SEQ ID NO: 1945838
aaugacacuuccagcaucc

SEQ ID NO: 1945840 - RNA, 19 nt, Artificial Sequence
  Description of Artificial Sequence: Synthetic oligonucleotide
  Sense strand starting at position 2850 of SEQ ID NO: 1880150
cuggaagugucauuccacu

SEQ ID NO: 1945841 - RNA, 19 nt, Artificial Sequence
  Description of Artificial Sequence: Synthetic oligonucleotide
  Antisense strand to SEQ ID NO: 1945840
aguggaaugacacuuccag

SEQ ID NO: 1945842 - RNA, 19 nt, Artificial Sequence
  Description of Artificial Sequence: Synthetic oligonucleotide
  Sense strand starting at position 3077 of SEQ ID NO: 1880150
acuugaauugcugacguca

SEQ ID NO: 1945843 - RNA, 19 nt, Artificial Sequence
  Description of Artificial Sequence: Synthetic oligonucleotide
  Antisense strand to SEQ ID NO: 1945842
ugacgucagcaauucaagu

SEQ ID NO: 1945844 - RNA, 19 nt, Artificial Sequence
  Description of Artificial Sequence: Synthetic oligonucleotide
  Sense strand starting at position 3090 of SEQ ID NO: 1880150
acgucaguagcagaauuau

SEQ ID NO: 1945845 - RNA, 19 nt, Artificial Sequence
  Description of Artificial Sequence: Synthetic oligonucleotide
  Antisense strand to SEQ ID NO: 1945844
auaauucugcuacugacgu

SEQ ID NO: 1945846 - RNA, 19 nt, Artificial Sequence
  Description of Artificial Sequence: Synthetic oligonucleotide
  Sense strand starting at position 3123 of SEQ ID NO: 1880150
agagaauuaugacaguuua

SEQ ID NO: 1945847 - RNA, 19 nt, Artificial Sequence
  Description of Artificial Sequence: Synthetic oligonucleotide
  Antisense strand to SEQ ID NO: 1945846
uaaacugucauaauucucu

SEQ ID NO: 1945848 - RNA, 19 nt, Artificial Sequence
  Description of Artificial Sequence: Synthetic oligonucleotide
  Sense strand starting at position 3172 of SEQ ID NO: 1880150
acguuaagcauuugugcuu

SEQ ID NO: 1945849 - RNA, 19 nt, Artificial Sequence
  Description of Artificial Sequence: Synthetic oligonucleotide
  Antisense strand to SEQ ID NO: 1945848
aagcacaaaugcuuaacgu

SEQ ID NO: 1945850 - RNA, 19 nt, Artificial Sequence
  Description of Artificial Sequence: Synthetic oligonucleotide
  Sense strand starting at position 3173 of SEQ ID NO: 1880150
cguuaagcauuugugcuua

SEQ ID NO: 1945851 - RNA, 19 nt, Artificial Sequence
  Description of Artificial Sequence: Synthetic oligonucleotide
  Antisense strand to SEQ ID NO: 1945850
uaagcacaaaugcuuaacg

SEQ ID NO: 1945852 - RNA, 19 nt, Artificial Sequence
  Description of Artificial Sequence: Synthetic oligonucleotide
  Sense strand starting at position 3242 of SEQ ID NO: 1880150
guuaacauccaguguaagu

SEQ ID NO: 1945853 - RNA, 19 nt, Artificial Sequence
  Description of Artificial Sequence: Synthetic oligonucleotide
  Antisense strand to SEQ ID NO: 1945852
acuuacacuggauguuaac

SEQ ID NO: 1945854 - RNA, 19 nt, Artificial Sequence
  Description of Artificial Sequence: Synthetic oligonucleotide
  Sense strand starting at position 3391 of SEQ ID NO: 1880150
guguaacaguucucaauuu

SEQ ID NO: 1945855 - RNA, 19 nt, Artificial Sequence
  Description of Artificial Sequence: Synthetic oligonucleotide
  Antisense strand to SEQ ID NO: 1945854
aaauugagaacuguuacac

SEQ ID NO: 1945856 - RNA, 19 nt, Artificial Sequence
  Description of Artificial Sequence: Synthetic oligonucleotide
  Sense strand starting at position 3392 of SEQ ID NO: 1880150
uguaacaguucucaauuua

SEQ ID NO: 1945857 - RNA, 19 nt, Artificial Sequence
  Description of Artificial Sequence: Synthetic oligonucleotide
  Antisense strand to SEQ ID NO: 1945856
uaaauugagaacuguuaca

SEQ ID NO: 1945858 - RNA, 19 nt, Artificial Sequence
  Description of Artificial Sequence: Synthetic oligonucleotide
  Sense strand starting at position 3512 of SEQ ID NO: 1880150
uggaaauaaugcuaacaaa

SEQ ID NO: 1945859 - RNA, 19 nt, Artificial Sequence
  Description of Artificial Sequence: Synthetic oligonucleotide
  Antisense strand to SEQ ID NO: 1945858
uuuguuagcauuauuucca

SEQ ID NO: 1945860 - RNA, 19 nt, Artificial Sequence
  Description of Artificial Sequence: Synthetic oligonucleotide
  Sense strand starting at position 3537 of SEQ ID NO: 1880150
cgcugaaauuccucacaac

SEQ ID NO: 1945861 - RNA, 19 nt, Artificial Sequence
  Description of Artificial Sequence: Synthetic oligonucleotide
  Antisense strand to SEQ ID NO: 1945860
guugugaggaauuucagcg

SEQ ID NO: 1945862 - RNA, 19 nt, Artificial Sequence
  Description of Artificial Sequence: Synthetic oligonucleotide
  Sense strand starting at position 3624 of SEQ ID NO: 1880150
cccauauaauguccuguua

SEQ ID NO: 1945863 - RNA, 19 nt, Artificial Sequence
  Description of Artificial Sequence: Synthetic oligonucleotide
  Antisense strand to SEQ ID NO: 1945862
uaacaggacauuauauggg

SEQ ID NO: 1945864 - RNA, 19 nt, Artificial Sequence
  Description of Artificial Sequence: Synthetic oligonucleotide
  Sense strand starting at position 3866 of SEQ ID NO: 1880150
ugcucuuggcaauaguauu

SEQ ID NO: 1945865 - RNA, 19 nt, Artificial Sequence
  Description of Artificial Sequence: Synthetic oligonucleotide
  Antisense strand to SEQ ID NO: 1945864
aauacuauugccaagagca

SEQ ID NO: 1945866 - RNA, 19 nt, Artificial Sequence
  Description of Artificial Sequence: Synthetic oligonucleotide
  Sense strand starting at position 3879 of SEQ ID NO: 1880150
aguauuuccugauaugauu

SEQ ID NO: 1945867 - RNA, 19 nt, Artificial Sequence
  Description of Artificial Sequence: Synthetic oligonucleotide
  Antisense strand to SEQ ID NO: 1945866
aaucauaucaggaaauacu

SEQ ID NO: 1945868 - RNA, 19 nt, Artificial Sequence
  Description of Artificial Sequence: Synthetic oligonucleotide
  Sense strand starting at position 3885 of SEQ ID NO: 1880150
uccugauaugauugucucu

SEQ ID NO: 1945869 - RNA, 19 nt, Artificial Sequence
  Description of Artificial Sequence: Synthetic oligonucleotide
  Antisense strand to SEQ ID NO: 1945868
agagacaaucauaucagga

SEQ ID NO: 1945870 - RNA, 19 nt, Artificial Sequence
  Description of Artificial Sequence: Synthetic oligonucleotide
  Sense strand starting at position 3887 of SEQ ID NO: 1880150
cugauaugauugucucuua

SEQ ID NO: 1945871 - RNA, 19 nt, Artificial Sequence
  Description of Artificial Sequence: Synthetic oligonucleotide
  Antisense strand to SEQ ID NO: 1945870
uaagagacaaucauaucag

SEQ ID NO: 1945872 - RNA, 19 nt, Artificial Sequence
  Description of Artificial Sequence: Synthetic oligonucleotide
  Sense strand starting at position 3888 of SEQ ID NO: 1880150
ugauaugauugucucuuag

SEQ ID NO: 1945873 - RNA, 19 nt, Artificial Sequence
  Description of Artificial Sequence: Synthetic oligonucleotide
  Antisense strand to SEQ ID NO: 1945872
cuaagagacaaucauauca

SEQ ID NO: 1945874 - RNA, 19 nt, Artificial Sequence
  Description of Artificial Sequence: Synthetic oligonucleotide
  Sense strand starting at position 3890 of SEQ ID NO: 1880150
auaugauugucucuuagaa

SEQ ID NO: 1945875 - RNA, 19 nt, Artificial Sequence
  Description of Artificial Sequence: Synthetic oligonucleotide
  Antisense strand to SEQ ID NO: 1945874
uucuaagagacaaucauau

SEQ ID NO: 1945876 - RNA, 19 nt, Artificial Sequence
  Description of Artificial Sequence: Synthetic oligonucleotide
  Sense strand starting at position 3897 of SEQ ID NO: 1880150
ugucucuuagaauagguga

SEQ ID NO: 1945877 - RNA, 19 nt, Artificial Sequence
  Description of Artificial Sequence: Synthetic oligonucleotide
  Antisense strand to SEQ ID NO: 1945876
ucaccuauucuaagagaca

SEQ ID NO: 1945878 - RNA, 19 nt, Artificial Sequence
  Description of Artificial Sequence: Synthetic oligonucleotide
  Sense strand starting at position 608 of SEQ ID NO: 1880151
ccacuaauuuggcaagcaa

SEQ ID NO: 1945879 - RNA, 19 nt, Artificial Sequence
  Description of Artificial Sequence: Synthetic oligonucleotide
  Antisense strand to SEQ ID NO: 1945878
uugcuugccaaauuagugg

SEQ ID NO: 1945880 - RNA, 19 nt, Artificial Sequence
  Description of Artificial Sequence: Synthetic oligonucleotide
  Sense strand starting at position 638 of SEQ ID NO: 1880151
aggcaagugucuucuccaa

SEQ ID NO: 1945881 - RNA, 19 nt, Artificial Sequence
  Description of Artificial Sequence: Synthetic oligonucleotide
  Antisense strand to SEQ ID NO: 1945880
uuggagaagacacuugccu

SEQ ID NO: 1945882 - RNA, 19 nt, Artificial Sequence
  Description of Artificial Sequence: Synthetic oligonucleotide
  Sense strand starting at position 640 of SEQ ID NO: 1880151
gcaagugucuucuccaaga

SEQ ID NO: 1945883 - RNA, 19 nt, Artificial Sequence
  Description of Artificial Sequence: Synthetic oligonucleotide
  Antisense strand to SEQ ID NO: 1945882
ucuuggagaagacacuugc

SEQ ID NO: 1945884 - RNA, 19 nt, Artificial Sequence
  Description of Artificial Sequence: Synthetic oligonucleotide
  Sense strand starting at position 715 of SEQ ID NO: 1880151
gccagagcuucuuccacaa

SEQ ID NO: 1945885 - RNA, 19 nt, Artificial Sequence
  Description of Artificial Sequence: Synthetic oligonucleotide
  Antisense strand to SEQ ID NO: 1945884
uuguggaagaagcucuggc

SEQ ID NO: 1945886 - RNA, 19 nt, Artificial Sequence
  Description of Artificial Sequence: Synthetic oligonucleotide
  Sense strand starting at position 740 of SEQ ID NO: 1880151
acugucguccggguguuaa

SEQ ID NO: 1945887 - RNA, 19 nt, Artificial Sequence
  Description of Artificial Sequence: Synthetic oligonucleotide
  Antisense strand to SEQ ID NO: 1945886
uuaacacccggacgacagu

SEQ ID NO: 1945888 - RNA, 19 nt, Artificial Sequence
  Description of Artificial Sequence: Synthetic oligonucleotide
  Sense strand starting at position 834 of SEQ ID NO: 1880151
agucaaagccuaugaaggu

SEQ ID NO: 1945889 - RNA, 19 nt, Artificial Sequence
  Description of Artificial Sequence: Synthetic oligonucleotide
  Antisense strand to SEQ ID NO: 1945888
accuucauaggcuuugacu

SEQ ID NO: 1945890 - RNA, 19 nt, Artificial Sequence
  Description of Artificial Sequence: Synthetic oligonucleotide
  Sense strand starting at position 918 of SEQ ID NO: 1880151
uugaguccuggugacucua

SEQ ID NO: 1945891 - RNA, 19 nt, Artificial Sequence
  Description of Artificial Sequence: Synthetic oligonucleotide
  Antisense strand to SEQ ID NO: 1945890
uagagucaccaggacucaa

SEQ ID NO: 1945892 - RNA, 19 nt, Artificial Sequence
  Description of Artificial Sequence: Synthetic oligonucleotide
  Sense strand starting at position 920 of SEQ ID NO: 1880151
gaguccuggugacucuauu

SEQ ID NO: 1945893 - RNA, 19 nt, Artificial Sequence
  Description of Artificial Sequence: Synthetic oligonucleotide
  Antisense strand to SEQ ID NO: 1945892
aauagagucaccaggacuc

SEQ ID NO: 1945894 - RNA, 19 nt, Artificial Sequence
  Description of Artificial Sequence: Synthetic oligonucleotide
  Sense strand starting at position 2541 of SEQ ID NO: 1880151
caguuaauuccagguggag

SEQ ID NO: 1945895 - RNA, 19 nt, Artificial Sequence
  Description of Artificial Sequence: Synthetic oligonucleotide
  Antisense strand to SEQ ID NO: 1945894
cuccaccuggaauuaacug

SEQ ID NO: 1945896 - RNA, 19 nt, Artificial Sequence
  Description of Artificial Sequence: Synthetic oligonucleotide
  Sense strand starting at position 2543 of SEQ ID NO: 1880151
guuaauuccagguggagac

SEQ ID NO: 1945897 - RNA, 19 nt, Artificial Sequence
  Description of Artificial Sequence: Synthetic oligonucleotide
  Antisense strand to SEQ ID NO: 1945896
gucuccaccuggaauuaac

SEQ ID NO: 1945898 - RNA, 19 nt, Artificial Sequence
  Description of Artificial Sequence: Synthetic oligonucleotide
  Sense strand starting at position 2596 of SEQ ID NO: 1880151
guuuauacugagugccagu

SEQ ID NO: 1945899 - RNA, 19 nt, Artificial Sequence
  Description of Artificial Sequence: Synthetic oligonucleotide
  Antisense strand to SEQ ID NO: 1945898
acuggcacucaguauaaac

SEQ ID NO: 1945900 - RNA, 19 nt, Artificial Sequence
  Description of Artificial Sequence: Synthetic oligonucleotide
  Sense strand starting at position 2634 of SEQ ID NO: 1880151
ugagguacccuccgaggaa

SEQ ID NO: 1945901 - RNA, 19 nt, Artificial Sequence
  Description of Artificial Sequence: Synthetic oligonucleotide
  Antisense strand to SEQ ID NO: 1945900
uuccucggaggguaccuca

SEQ ID NO: 1945902 - RNA, 19 nt, Artificial Sequence
  Description of Artificial Sequence: Synthetic oligonucleotide
  Sense strand starting at position 2814 of SEQ ID NO: 1880151
cugagaaacuaggacucau

SEQ ID NO: 1945903 - RNA, 19 nt, Artificial Sequence
  Description of Artificial Sequence: Synthetic oligonucleotide
  Antisense strand to SEQ ID NO: 1945902
augaguccuaguuucucag

SEQ ID NO: 1945904 - RNA, 19 nt, Artificial Sequence
  Description of Artificial Sequence: Synthetic oligonucleotide
  Sense strand starting at position 2896 of SEQ ID NO: 1880151
aaaucuaaaucaggguuga

SEQ ID NO: 1945905 - RNA, 19 nt, Artificial Sequence
  Description of Artificial Sequence: Synthetic oligonucleotide
  Antisense strand to SEQ ID NO: 1945904
ucaacccugauuuagauuu

SEQ ID NO: 1945906 - RNA, 19 nt, Artificial Sequence
  Description of Artificial Sequence: Synthetic oligonucleotide
  Sense strand starting at position 2897 of SEQ ID NO: 1880151
aaucuaaaucaggguugau

SEQ ID NO: 1945907 - RNA, 19 nt, Artificial Sequence
  Description of Artificial Sequence: Synthetic oligonucleotide
  Antisense strand to SEQ ID NO: 1945906
aucaacccugauuuagauu

SEQ ID NO: 1945908 - RNA, 19 nt, Artificial Sequence
  Description of Artificial Sequence: Synthetic oligonucleotide
  Sense strand starting at position 2935 of SEQ ID NO: 1880151
caguguagacagugaguau

SEQ ID NO: 1945909 - RNA, 19 nt, Artificial Sequence
  Description of Artificial Sequence: Synthetic oligonucleotide
  Antisense strand to SEQ ID NO: 1945908
auacucacugucuacacug

SEQ ID NO: 1945910 - RNA, 19 nt, Artificial Sequence
  Description of Artificial Sequence: Synthetic oligonucleotide
  Sense strand starting at position 2936 of SEQ ID NO: 1880151
aguguagacagugaguauu

SEQ ID NO: 1945911 - RNA, 19 nt, Artificial Sequence
  Description of Artificial Sequence: Synthetic oligonucleotide
  Antisense strand to SEQ ID NO: 1945910
aauacucacugucuacacu

SEQ ID NO: 1945912 - RNA, 19 nt, Artificial Sequence
  Description of Artificial Sequence: Synthetic oligonucleotide
  Sense strand starting at position 2944 of SEQ ID NO: 1880151
cagugaguauuucuugugu

SEQ ID NO: 1945913 - RNA, 19 nt, Artificial Sequence
  Description of Artificial Sequence: Synthetic oligonucleotide
  Antisense strand to SEQ ID NO: 1945912
acacaagaaauacucacug

SEQ ID NO: 1945914 - RNA, 19 nt, Artificial Sequence
  Description of Artificial Sequence: Synthetic oligonucleotide
  Sense strand starting at position 2948 of SEQ ID NO: 1880151
gaguauuucuuguguucug

SEQ ID NO: 1945915 - RNA, 19 nt, Artificial Sequence
  Description of Artificial Sequence: Synthetic oligonucleotide
  Antisense strand to SEQ ID NO: 1945914
cagaacacaagaaauacuc

SEQ ID NO: 1945916 - RNA, 19 nt, Artificial Sequence
  Description of Artificial Sequence: Synthetic oligonucleotide
  Sense strand starting at position 3002 of SEQ ID NO: 1880151
aguagaaucuuaguagguu

SEQ ID NO: 1945917 - RNA, 19 nt, Artificial Sequence
  Description of Artificial Sequence: Synthetic oligonucleotide
  Antisense strand to SEQ ID NO: 1945916
aaccuacuaagauucuacu

SEQ ID NO: 1945918 - RNA, 19 nt, Artificial Sequence
  Description of Artificial Sequence: Synthetic oligonucleotide
  Sense strand starting at position 3003 of SEQ ID NO: 1880151
guagaaucuuaguagguua

SEQ ID NO: 1945919 - RNA, 19 nt, Artificial Sequence
  Description of Artificial Sequence: Synthetic oligonucleotide
  Antisense strand to SEQ ID NO: 1945918
uaaccuacuaagauucuac

SEQ ID NO: 1945920 - RNA, 19 nt, Artificial Sequence
  Description of Artificial Sequence: Synthetic oligonucleotide
  Sense strand starting at position 3150 of SEQ ID NO: 1880151
aagaguauguccucacgca

SEQ ID NO: 1945921 - RNA, 19 nt, Artificial Sequence
  Description of Artificial Sequence: Synthetic oligonucleotide
  Antisense strand to SEQ ID NO: 1945920
ugcgugaggacauacucuu

SEQ ID NO: 1945922 - RNA, 19 nt, Artificial Sequence
  Description of Artificial Sequence: Synthetic oligonucleotide
  Sense strand starting at position 3336 of SEQ ID NO: 1880151
caguguugucauuguuggu

SEQ ID NO: 1945923 - RNA, 19 nt, Artificial Sequence
  Description of Artificial Sequence: Synthetic oligonucleotide
  Antisense strand to SEQ ID NO: 1945922
accaacaaugacaacacug

SEQ ID NO: 1945924 - RNA, 19 nt, Artificial Sequence
  Description of Artificial Sequence: Synthetic oligonucleotide
  Sense strand starting at position 3337 of SEQ ID NO: 1880151
aguguugucauuguugguu

SEQ ID NO: 1945925 - RNA, 19 nt, Artificial Sequence
  Description of Artificial Sequence: Synthetic oligonucleotide
  Antisense strand to SEQ ID NO: 1945924
aaccaacaaugacaacacu

SEQ ID NO: 1945926 - RNA, 19 nt, Artificial Sequence
  Description of Artificial Sequence: Synthetic oligonucleotide
  Sense strand starting at position 3340 of SEQ ID NO: 1880151
guugucauuguugguugaa

SEQ ID NO: 1945927 - RNA, 19 nt, Artificial Sequence
  Description of Artificial Sequence: Synthetic oligonucleotide
  Antisense strand to SEQ ID NO: 1945926
uucaaccaacaaugacaac

SEQ ID NO: 1945928 - RNA, 19 nt, Artificial Sequence
  Description of Artificial Sequence: Synthetic oligonucleotide
  Sense strand starting at position 3341 of SEQ ID NO: 1880151
uugucauuguugguugaau

SEQ ID NO: 1945929 - RNA, 19 nt, Artificial Sequence
  Description of Artificial Sequence: Synthetic oligonucleotide
  Antisense strand to SEQ ID NO: 1945928
auucaaccaacaaugacaa

SEQ ID NO: 1945930 - RNA, 19 nt, Artificial Sequence
  Description of Artificial Sequence: Synthetic oligonucleotide
  Sense strand starting at position 3342 of SEQ ID NO: 1880151
ugucauuguugguugaauc

SEQ ID NO: 1945931 - RNA, 19 nt, Artificial Sequence
  Description of Artificial Sequence: Synthetic oligonucleotide
  Antisense strand to SEQ ID NO: 1945930
gauucaaccaacaaugaca

SEQ ID NO: 1945932 - RNA, 19 nt, Artificial Sequence
  Description of Artificial Sequence: Synthetic oligonucleotide
  Sense strand starting at position 3343 of SEQ ID NO: 1880151
gucauuguugguugaauca

SEQ ID NO: 1945933 - RNA, 19 nt, Artificial Sequence
  Description of Artificial Sequence: Synthetic oligonucleotide
  Antisense strand to SEQ ID NO: 1945932
ugauucaaccaacaaugac

SEQ ID NO: 1945934 - RNA, 19 nt, Artificial Sequence
  Description of Artificial Sequence: Synthetic oligonucleotide
  Sense strand starting at position 3366 of SEQ ID NO: 1880151
cagauaagggacugucuuu

SEQ ID NO: 1945935 - RNA, 19 nt, Artificial Sequence
  Description of Artificial Sequence: Synthetic oligonucleotide
  Antisense strand to SEQ ID NO: 1945934
aaagacagucccuuaucug

SEQ ID NO: 1945936 - RNA, 19 nt, Artificial Sequence
  Description of Artificial Sequence: Synthetic oligonucleotide
  Sense strand starting at position 3396 of SEQ ID NO: 1880151
cugaaucucccauguguac

SEQ ID NO: 1945937 - RNA, 19 nt, Artificial Sequence
  Description of Artificial Sequence: Synthetic oligonucleotide
  Antisense strand to SEQ ID NO: 1945936
guacacaugggagauucag

SEQ ID NO: 1945938 - RNA, 19 nt, Artificial Sequence
  Description of Artificial Sequence: Synthetic oligonucleotide
  Sense strand starting at position 3453 of SEQ ID NO: 1880151
ucuuuagugucuuuagcuu

SEQ ID NO: 1945939 - RNA, 19 nt, Artificial Sequence
  Description of Artificial Sequence: Synthetic oligonucleotide
  Antisense strand to SEQ ID NO: 1945938
aagcuaaagacacuaaaga

SEQ ID NO: 1945940 - RNA, 19 nt, Artificial Sequence
  Description of Artificial Sequence: Synthetic oligonucleotide
  Sense strand starting at position 3708 of SEQ ID NO: 1880151
gcaccaacaucaucaguga

SEQ ID NO: 1945941 - RNA, 19 nt, Artificial Sequence
  Description of Artificial Sequence: Synthetic oligonucleotide
  Antisense strand to SEQ ID NO: 1945940
ucacugaugauguuggugc

SEQ ID NO: 1945942 - RNA, 19 nt, Artificial Sequence
  Description of Artificial Sequence: Synthetic oligonucleotide
  Sense strand starting at position 3856 of SEQ ID NO: 1880151
ggcacuucuuaccuugaca

SEQ ID NO: 1945943 - RNA, 19 nt, Artificial Sequence
  Description of Artificial Sequence: Synthetic oligonucleotide
  Antisense strand to SEQ ID NO: 1945942
ugucaagguaagaagugcc

SEQ ID NO: 1945944 - RNA, 19 nt, Artificial Sequence
  Description of Artificial Sequence: Synthetic oligonucleotide
  Sense strand starting at position 3910 of SEQ ID NO: 1880151
uagcuuaugucgccauaau

SEQ ID NO: 1945945 - RNA, 19 nt, Artificial Sequence
  Description of Artificial Sequence: Synthetic oligonucleotide
  Antisense strand to SEQ ID NO: 1945944
auuauggcgacauaagcua

SEQ ID NO: 1945946 - RNA, 19 nt, Artificial Sequence
  Description of Artificial Sequence: Synthetic oligonucleotide
  Sense strand starting at position 3911 of SEQ ID NO: 1880151
agcuuaugucgccauaaug

SEQ ID NO: 1945947 - RNA, 19 nt, Artificial Sequence
  Description of Artificial Sequence: Synthetic oligonucleotide
  Antisense strand to SEQ ID NO: 1945946
cauuauggcgacauaagcu

SEQ ID NO: 1945948 - RNA, 19 nt, Artificial Sequence
  Description of Artificial Sequence: Synthetic oligonucleotide
  Sense strand starting at position 3925 of SEQ ID NO: 1880151
uaaugaaccugggucuuga

SEQ ID NO: 1945949 - RNA, 19 nt, Artificial Sequence
  Description of Artificial Sequence: Synthetic oligonucleotide
  Antisense strand to SEQ ID NO: 1945948
ucaagacccagguucauua

SEQ ID NO: 1945950 - RNA, 19 nt, Artificial Sequence
  Description of Artificial Sequence: Synthetic oligonucleotide
  Sense strand starting at position 3929 of SEQ ID NO: 1880151
gaaccugggucuugaaaga

SEQ ID NO: 1945951 - RNA, 19 nt, Artificial Sequence
  Description of Artificial Sequence: Synthetic oligonucleotide
  Antisense strand to SEQ ID NO: 1945950
ucuuucaagacccagguuc

SEQ ID NO: 1945952 - RNA, 19 nt, Artificial Sequence
  Description of Artificial Sequence: Synthetic oligonucleotide
  Sense strand starting at position 3939 of SEQ ID NO: 1880151
cuugaaagagucuguagau

SEQ ID NO: 1945953 - RNA, 19 nt, Artificial Sequence
  Description of Artificial Sequence: Synthetic oligonucleotide
  Antisense strand to SEQ ID NO: 1945952
aucuacagacucuuucaag

SEQ ID NO: 1945954 - RNA, 19 nt, Artificial Sequence
  Description of Artificial Sequence: Synthetic oligonucleotide
  Sense strand starting at position 3940 of SEQ ID NO: 1880151
uugaaagagucuguagauu

SEQ ID NO: 1945955 - RNA, 19 nt, Artificial Sequence
  Description of Artificial Sequence: Synthetic oligonucleotide
  Antisense strand to SEQ ID NO: 1945954
aaucuacagacucuuucaa

SEQ ID NO: 1945956 - RNA, 19 nt, Artificial Sequence
  Description of Artificial Sequence: Synthetic oligonucleotide
  Sense strand starting at position 3952 of SEQ ID NO: 1880151
guagauuggccaggaguga

SEQ ID NO: 1945957 - RNA, 19 nt, Artificial Sequence
  Description of Artificial Sequence: Synthetic oligonucleotide
  Antisense strand to SEQ ID NO: 1945956
ucacuccuggccaaucuac

SEQ ID NO: 1945958 - RNA, 19 nt, Artificial Sequence
  Description of Artificial Sequence: Synthetic oligonucleotide
  Sense strand starting at position 534 of SEQ ID NO: 1880152
uuccgauauuugcucauga

SEQ ID NO: 1945959 - RNA, 19 nt, Artificial Sequence
  Description of Artificial Sequence: Synthetic oligonucleotide
  Antisense strand to SEQ ID NO: 1945958
ucaugagcaaauaucggaa

SEQ ID NO: 1945960 - RNA, 19 nt, Artificial Sequence
  Description of Artificial Sequence: Synthetic oligonucleotide
  Sense strand starting at position 535 of SEQ ID NO: 1880152
uccgauauuugcucaugau

SEQ ID NO: 1945961 - RNA, 19 nt, Artificial Sequence
  Description of Artificial Sequence: Synthetic oligonucleotide
  Antisense strand to SEQ ID NO: 1945960
aucaugagcaaauaucgga

SEQ ID NO: 1945962 - RNA, 19 nt, Artificial Sequence
  Description of Artificial Sequence: Synthetic oligonucleotide
  Sense strand starting at position 544 of SEQ ID NO: 1880152
ugcucaugauaaguuccaa

SEQ ID NO: 1945963 - RNA, 19 nt, Artificial Sequence
  Description of Artificial Sequence: Synthetic oligonucleotide
  Antisense strand to SEQ ID NO: 1945962
uuggaacuuaucaugagca

SEQ ID NO: 1945964 - RNA, 19 nt, Artificial Sequence
  Description of Artificial Sequence: Synthetic oligonucleotide
  Sense strand starting at position 572 of SEQ ID NO: 1880152
guguuccuccaaggaaauc

SEQ ID NO: 1945965 - RNA, 19 nt, Artificial Sequence
  Description of Artificial Sequence: Synthetic oligonucleotide
  Antisense strand to SEQ ID NO: 1945964
gauuuccuuggaggaacac

SEQ ID NO: 1945966 - RNA, 19 nt, Artificial Sequence
  Description of Artificial Sequence: Synthetic oligonucleotide
  Sense strand starting at position 620 of SEQ ID NO: 1880152
ggcagugaugucugagaga

SEQ ID NO: 1945967 - RNA, 19 nt, Artificial Sequence
  Description of Artificial Sequence: Synthetic oligonucleotide
  Antisense strand to SEQ ID NO: 1945966
ucucucagacaucacugcc

SEQ ID NO: 1945968 - RNA, 19 nt, Artificial Sequence
  Description of Artificial Sequence: Synthetic oligonucleotide
  Sense strand starting at position 625 of SEQ ID NO: 1880152
ugaugucugagagacaguu

SEQ ID NO: 1945969 - RNA, 19 nt, Artificial Sequence
  Description of Artificial Sequence: Synthetic oligonucleotide
  Antisense strand to SEQ ID NO: 1945968
aacugucucucagacauca

SEQ ID NO: 1945970 - RNA, 19 nt, Artificial Sequence
  Description of Artificial Sequence: Synthetic oligonucleotide
  Sense strand starting at position 633 of SEQ ID NO: 1880152
gagagacaguucccaaauc

SEQ ID NO: 1945971 - RNA, 19 nt, Artificial Sequence
  Description of Artificial Sequence: Synthetic oligonucleotide
  Antisense strand to SEQ ID NO: 1945970
gauuugggaacugucucuc

SEQ ID NO: 1945972 - RNA, 19 nt, Artificial Sequence
  Description of Artificial Sequence: Synthetic oligonucleotide
  Sense strand starting at position 709 of SEQ ID NO: 1880152
guaaaucaauguuuaaguc

SEQ ID NO: 1945973 - RNA, 19 nt, Artificial Sequence
  Description of Artificial Sequence: Synthetic oligonucleotide
  Antisense strand to SEQ ID NO: 1945972
gacuuaaacauugauuuac

SEQ ID NO: 1945974 - RNA, 19 nt, Artificial Sequence
  Description of Artificial Sequence: Synthetic oligonucleotide
  Sense strand starting at position 739 of SEQ ID NO: 1880152
acaguuaaagucuauguga

SEQ ID NO: 1945975 - RNA, 19 nt, Artificial Sequence
  Description of Artificial Sequence: Synthetic oligonucleotide
  Antisense strand to SEQ ID NO: 1945974
ucacauagacuuuaacugu

SEQ ID NO: 1945976 - RNA, 19 nt, Artificial Sequence
  Description of Artificial Sequence: Synthetic oligonucleotide
  Sense strand starting at position 741 of SEQ ID NO: 1880152
aguuaaagucuaugugaaa

SEQ ID NO: 1945977 - RNA, 19 nt, Artificial Sequence
  Description of Artificial Sequence: Synthetic oligonucleotide
  Antisense strand to SEQ ID NO: 1945976
uuucacauagacuuuaacu

SEQ ID NO: 1945978 - RNA, 19 nt, Artificial Sequence
  Description of Artificial Sequence: Synthetic oligonucleotide
  Sense strand starting at position 742 of SEQ ID NO: 1880152
guuaaagucuaugugaaag

SEQ ID NO: 1945979 - RNA, 19 nt, Artificial Sequence
  Description of Artificial Sequence: Synthetic oligonucleotide
  Antisense strand to SEQ ID NO: 1945978
cuuucacauagacuuuaac

SEQ ID NO: 1945980 - RNA, 19 nt, Artificial Sequence
  Description of Artificial Sequence: Synthetic oligonucleotide
  Sense strand starting at position 748 of SEQ ID NO: 1880152
gucuaugugaaagguaacu

SEQ ID NO: 1945981 - RNA, 19 nt, Artificial Sequence
  Description of Artificial Sequence: Synthetic oligonucleotide
  Antisense strand to SEQ ID NO: 1945980
aguuaccuuucacauagac

SEQ ID NO: 1945982 - RNA, 19 nt, Artificial Sequence
  Description of Artificial Sequence: Synthetic oligonucleotide
  Sense strand starting at position 753 of SEQ ID NO: 1880152
ugugaaagguaacuuucua

SEQ ID NO: 1945983 - RNA, 19 nt, Artificial Sequence
  Description of Artificial Sequence: Synthetic oligonucleotide
  Antisense strand to SEQ ID NO: 1945982
uagaaaguuaccuuucaca

SEQ ID NO: 1945984 - RNA, 19 nt, Artificial Sequence
  Description of Artificial Sequence: Synthetic oligonucleotide
  Sense strand starting at position 757 of SEQ ID NO: 1880152
aaagguaacuuucuaggca

SEQ ID NO: 1945985 - RNA, 19 nt, Artificial Sequence
  Description of Artificial Sequence: Synthetic oligonucleotide
  Antisense strand to SEQ ID NO: 1945984
ugccuagaaaguuaccuuu

SEQ ID NO: 1945986 - RNA, 19 nt, Artificial Sequence
  Description of Artificial Sequence: Synthetic oligonucleotide
  Sense strand starting at position 761 of SEQ ID NO: 1880152
guaacuuucuaggcagaga

SEQ ID NO: 1945987 - RNA, 19 nt, Artificial Sequence
  Description of Artificial Sequence: Synthetic oligonucleotide
  Antisense strand to SEQ ID NO: 1945986
ucucugccuagaaaguuac

SEQ ID NO: 1945988 - RNA, 19 nt, Artificial Sequence
  Description of Artificial Sequence: Synthetic oligonucleotide
  Sense strand starting at position 815 of SEQ ID NO: 1880152
ucagaagacauguguuuga

SEQ ID NO: 1945989 - RNA, 19 nt, Artificial Sequence
  Description of Artificial Sequence: Synthetic oligonucleotide
  Antisense strand to SEQ ID NO: 1945988
ucaaacacaugucuucuga

SEQ ID NO: 1945990 - RNA, 19 nt, Artificial Sequence
  Description of Artificial Sequence: Synthetic oligonucleotide
  Sense strand starting at position 818 of SEQ ID NO: 1880152
gaagacauguguuugaguu

SEQ ID NO: 1945991 - RNA, 19 nt, Artificial Sequence
  Description of Artificial Sequence: Synthetic oligonucleotide
  Antisense strand to SEQ ID NO: 1945990
aacucaaacacaugucuuc

SEQ ID NO: 1945992 - RNA, 19 nt, Artificial Sequence
  Description of Artificial Sequence: Synthetic oligonucleotide
  Sense strand starting at position 852 of SEQ ID NO: 1880152
cuugguuaauacucauaag

SEQ ID NO: 1945993 - RNA, 19 nt, Artificial Sequence
  Description of Artificial Sequence: Synthetic oligonucleotide
  Antisense strand to SEQ ID NO: 1945992
cuuaugaguauuaaccaag

SEQ ID NO: 1945994 - RNA, 19 nt, Artificial Sequence
  Description of Artificial Sequence: Synthetic oligonucleotide
  Sense strand starting at position 1239 of SEQ ID NO: 1880152
cugcaauauuagucagaug

SEQ ID NO: 1945995 - RNA, 19 nt, Artificial Sequence
  Description of Artificial Sequence: Synthetic oligonucleotide
  Antisense strand to SEQ ID NO: 1945994
caucugacuaauauugcag

SEQ ID NO: 1945996 - RNA, 19 nt, Artificial Sequence
  Description of Artificial Sequence: Synthetic oligonucleotide
  Sense strand starting at position 1286 of SEQ ID NO: 1880152
uauuguuacugggccagau

SEQ ID NO: 1945997 - RNA, 19 nt, Artificial Sequence
  Description of Artificial Sequence: Synthetic oligonucleotide
  Antisense strand to SEQ ID NO: 1945996
aucuggcccaguaacaaua

SEQ ID NO: 1945998 - RNA, 19 nt, Artificial Sequence
  Description of Artificial Sequence: Synthetic oligonucleotide
  Sense strand starting at position 1335 of SEQ ID NO: 1880152
cuggaaauauauguacacu

SEQ ID NO: 1945999 - RNA, 19 nt, Artificial Sequence
  Description of Artificial Sequence: Synthetic oligonucleotide
  Antisense strand to SEQ ID NO: 1945998
aguguacauauauuuccag

SEQ ID NO: 1946000 - RNA, 19 nt, Artificial Sequence
  Description of Artificial Sequence: Synthetic oligonucleotide
  Sense strand starting at position 1655 of SEQ ID NO: 1880152
cccucugagaccgggaaua

SEQ ID NO: 1946001 - RNA, 19 nt, Artificial Sequence
  Description of Artificial Sequence: Synthetic oligonucleotide
  Antisense strand to SEQ ID NO: 1946000
uauucccggucucagaggg

SEQ ID NO: 1946002 - RNA, 19 nt, Artificial Sequence
  Description of Artificial Sequence: Synthetic oligonucleotide
  Sense strand starting at position 1721 of SEQ ID NO: 1880152
cccagaauccgagagcacu

SEQ ID NO: 1946003 - RNA, 19 nt, Artificial Sequence
  Description of Artificial Sequence: Synthetic oligonucleotide
  Antisense strand to SEQ ID NO: 1946002
agugcucucggauucuggg

SEQ ID NO: 1946004 - RNA, 19 nt, Artificial Sequence
  Description of Artificial Sequence: Synthetic oligonucleotide
  Sense strand starting at position 2076 of SEQ ID NO: 1880152
gcggguugacccgcuuuaa

SEQ ID NO: 1946005 - RNA, 19 nt, Artificial Sequence
  Description of Artificial Sequence: Synthetic oligonucleotide
  Antisense strand to SEQ ID NO: 1946004
uuaaagcgggucaacccgc

SEQ ID NO: 1946006 - RNA, 19 nt, Artificial Sequence
  Description of Artificial Sequence: Synthetic oligonucleotide
  Sense strand starting at position 2727 of SEQ ID NO: 1880152
acugaaguucuguacucau

SEQ ID NO: 1946007 - RNA, 19 nt, Artificial Sequence
  Description of Artificial Sequence: Synthetic oligonucleotide
  Antisense strand to SEQ ID NO: 1946006
augaguacagaacuucagu

SEQ ID NO: 1946008 - RNA, 19 nt, Artificial Sequence
  Description of Artificial Sequence: Synthetic oligonucleotide
  Sense strand starting at position 2834 of SEQ ID NO: 1880152
accugacaugagugaaauc

SEQ ID NO: 1946009 - RNA, 19 nt, Artificial Sequence
  Description of Artificial Sequence: Synthetic oligonucleotide
  Antisense strand to SEQ ID NO: 1946008
gauuucacucaugucaggu

SEQ ID NO: 1946010 - RNA, 19 nt, Artificial Sequence
  Description of Artificial Sequence: Synthetic oligonucleotide
  Sense strand starting at position 2919 of SEQ ID NO: 1880152
auaguagcauauguuagaa

SEQ ID NO: 1946011 - RNA, 19 nt, Artificial Sequence
  Description of Artificial Sequence: Synthetic oligonucleotide
  Antisense strand to SEQ ID NO: 1946010
uucuaacauaugcuacuau

SEQ ID NO: 1946012 - RNA, 19 nt, Artificial Sequence
  Description of Artificial Sequence: Synthetic oligonucleotide
  Sense strand starting at position 3101 of SEQ ID NO: 1880152
ugagaagugaccuguggug

SEQ ID NO: 1946013 - RNA, 19 nt, Artificial Sequence
  Description of Artificial Sequence: Synthetic oligonucleotide
  Antisense strand to SEQ ID NO: 1946012
caccacaggucacuucuca

SEQ ID NO: 1946014 - RNA, 19 nt, Artificial Sequence
  Description of Artificial Sequence: Synthetic oligonucleotide
  Sense strand starting at position 3103 of SEQ ID NO: 1880152
agaagugaccuguggugaa

SEQ ID NO: 1946015 - RNA, 19 nt, Artificial Sequence
  Description of Artificial Sequence: Synthetic oligonucleotide
  Antisense strand to SEQ ID NO: 1946014
uucaccacaggucacuucu

SEQ ID NO: 1946016 - RNA, 19 nt, Artificial Sequence
  Description of Artificial Sequence: Synthetic oligonucleotide
  Sense strand starting at position 3115 of SEQ ID NO: 1880152
uggugaaagcuuuacuaau

SEQ ID NO: 1946017 - RNA, 19 nt, Artificial Sequence
  Description of Artificial Sequence: Synthetic oligonucleotide
  Antisense strand to SEQ ID NO: 1946016
auuaguaaagcuuucacca

SEQ ID NO: 1946018 - RNA, 19 nt, Artificial Sequence
  Description of Artificial Sequence: Synthetic oligonucleotide
  Sense strand starting at position 3117 of SEQ ID NO: 1880152
gugaaagcuuuacuaauca

SEQ ID NO: 1946019 - RNA, 19 nt, Artificial Sequence
  Description of Artificial Sequence: Synthetic oligonucleotide
  Antisense strand to SEQ ID NO: 1946018
ugauuaguaaagcuuucac

SEQ ID NO: 1946020 - RNA, 19 nt, Artificial Sequence
  Description of Artificial Sequence: Synthetic oligonucleotide
  Sense strand starting at position 3224 of SEQ ID NO: 1880152
aguaucaguguccaaacuu

SEQ ID NO: 1946021 - RNA, 19 nt, Artificial Sequence
  Description of Artificial Sequence: Synthetic oligonucleotide
  Antisense strand to SEQ ID NO: 1946020
aaguuuggacacugauacu

SEQ ID NO: 1946022 - RNA, 19 nt, Artificial Sequence
  Description of Artificial Sequence: Synthetic oligonucleotide
  Sense strand starting at position 3346 of SEQ ID NO: 1880152
uuaaacguucuaggucaga

SEQ ID NO: 1946023 - RNA, 19 nt, Artificial Sequence
  Description of Artificial Sequence: Synthetic oligonucleotide
  Antisense strand to SEQ ID NO: 1946022
ucugaccuagaacguuuaa

SEQ ID NO: 1946024 - RNA, 19 nt, Artificial Sequence
  Description of Artificial Sequence: Synthetic oligonucleotide
  Sense strand starting at position 3404 of SEQ ID NO: 1880152
ccucuuaagcaauguuaag

SEQ ID NO: 1946025 - RNA, 19 nt, Artificial Sequence
  Description of Artificial Sequence: Synthetic oligonucleotide
  Antisense strand to SEQ ID NO: 1946024
cuuaacauugcuuaagagg

SEQ ID NO: 1946026 - RNA, 19 nt, Artificial Sequence
  Description of Artificial Sequence: Synthetic oligonucleotide
  Sense strand starting at position 3553 of SEQ ID NO: 1880152
cugugucauccuugauuug

SEQ ID NO: 1946027 - RNA, 19 nt, Artificial Sequence
  Description of Artificial Sequence: Synthetic oligonucleotide
  Antisense strand to SEQ ID NO: 1946026
caaaucaaggaugacacag

SEQ ID NO: 1946028 - RNA, 19 nt, Artificial Sequence
  Description of Artificial Sequence: Synthetic oligonucleotide
  Sense strand starting at position 3554 of SEQ ID NO: 1880152
ugugucauccuugauuugu

SEQ ID NO: 1946029 - RNA, 19 nt, Artificial Sequence
  Description of Artificial Sequence: Synthetic oligonucleotide
  Antisense strand to SEQ ID NO: 1946028
acaaaucaaggaugacaca

SEQ ID NO: 1946030 - RNA, 19 nt, Artificial Sequence
  Description of Artificial Sequence: Synthetic oligonucleotide
  Sense strand starting at position 3632 of SEQ ID NO: 1880152
uaggcauggcgggauugaa

SEQ ID NO: 1946031 - RNA, 19 nt, Artificial Sequence
  Description of Artificial Sequence: Synthetic oligonucleotide
  Antisense strand to SEQ ID NO: 1946030
uucaaucccgccaugccua

SEQ ID NO: 1946032 - RNA, 19 nt, Artificial Sequence
  Description of Artificial Sequence: Synthetic oligonucleotide
  Sense strand starting at position 3822 of SEQ ID NO: 1880152
gaggcagaauuguuaaaug

SEQ ID NO: 1946033 - RNA, 19 nt, Artificial Sequence
  Description of Artificial Sequence: Synthetic oligonucleotide
  Antisense strand to SEQ ID NO: 1946032
cauuuaacaauucugccuc

SEQ ID NO: 1946034 - RNA, 19 nt, Artificial Sequence
  Description of Artificial Sequence: Synthetic oligonucleotide
  Sense strand starting at position 3969 of SEQ ID NO: 1880152
ugaugccuucuuuggauga

SEQ ID NO: 1946035 - RNA, 19 nt, Artificial Sequence
  Description of Artificial Sequence: Synthetic oligonucleotide
  Antisense strand to SEQ ID NO: 1946034
ucauccaaagaaggcauca

SEQ ID NO: 1946036 - RNA, 19 nt, Artificial Sequence
  Description of Artificial Sequence: Synthetic oligonucleotide
  Sense strand starting at position 3982 of SEQ ID NO: 1880152
ggaugagauauguguaagu

SEQ ID NO: 1946037 - RNA, 19 nt, Artificial Sequence
  Description of Artificial Sequence: Synthetic oligonucleotide
  Antisense strand to SEQ ID NO: 1946036
acuuacacauaucucaucc

SEQ ID NO: 1946038 - RNA, 19 nt, Artificial Sequence
  Description of Artificial Sequence: Synthetic oligonucleotide
  Sense strand starting at position 73 of SEQ ID NO: 1880153
gcuguaaguaaggaauaau

SEQ ID NO: 1946039 - RNA, 19 nt, Artificial Sequence
  Description of Artificial Sequence: Synthetic oligonucleotide
  Antisense strand to SEQ ID NO: 1946038
auuauuccuuacuuacagc

SEQ ID NO: 1946040 - RNA, 19 nt, Artificial Sequence
  Description of Artificial Sequence: Synthetic oligonucleotide
  Sense strand starting at position 115 of SEQ ID NO: 1880153
guuggaauugauugaauua

SEQ ID NO: 1946041 - RNA, 19 nt, Artificial Sequence
  Description of Artificial Sequence: Synthetic oligonucleotide
  Antisense strand to SEQ ID NO: 1946040
uaauucaaucaauuccaac

SEQ ID NO: 1946042 - RNA, 19 nt, Artificial Sequence
  Description of Artificial Sequence: Synthetic oligonucleotide
  Sense strand starting at position 543 of SEQ ID NO: 1880153
aggaacugguacuuaaagu

SEQ ID NO: 1946043 - RNA, 19 nt, Artificial Sequence
  Description of Artificial Sequence: Synthetic oligonucleotide
  Antisense strand to SEQ ID NO: 1946042
acuuuaaguaccaguuccu

SEQ ID NO: 1946044 - RNA, 19 nt, Artificial Sequence
  Description of Artificial Sequence: Synthetic oligonucleotide
  Sense strand starting at position 554 of SEQ ID NO: 1880153
cuuaaagugucucccagaa

SEQ ID NO: 1946045 - RNA, 19 nt, Artificial Sequence
  Description of Artificial Sequence: Synthetic oligonucleotide
  Antisense strand to SEQ ID NO: 1946044
uucugggagacacuuuaag

SEQ ID NO: 1946046 - RNA, 19 nt, Artificial Sequence
  Description of Artificial Sequence: Synthetic oligonucleotide
  Sense strand starting at position 610 of SEQ ID NO: 1880153
uauguauucgaggagggca

SEQ ID NO: 1946047 - RNA, 19 nt, Artificial Sequence
  Description of Artificial Sequence: Synthetic oligonucleotide
  Antisense strand to SEQ ID NO: 1946046
ugcccuccucgaauacaua

SEQ ID NO: 1946048 - RNA, 19 nt, Artificial Sequence
  Description of Artificial Sequence: Synthetic oligonucleotide
  Sense strand starting at position 630 of SEQ ID NO: 1880153
agcuaauguauggaugcaa

SEQ ID NO: 1946049 - RNA, 19 nt, Artificial Sequence
  Description of Artificial Sequence: Synthetic oligonucleotide
  Antisense strand to SEQ ID NO: 1946048
uugcauccauacauuagcu

SEQ ID NO: 1946050 - RNA, 19 nt, Artificial Sequence
  Description of Artificial Sequence: Synthetic oligonucleotide
  Sense strand starting at position 680 of SEQ ID NO: 1880153
gcaagugaggaguaaggua

SEQ ID NO: 1946051 - RNA, 19 nt, Artificial Sequence
  Description of Artificial Sequence: Synthetic oligonucleotide
  Antisense strand to SEQ ID NO: 1946050
uaccuuacuccucacuugc

SEQ ID NO: 1946052 - RNA, 19 nt, Artificial Sequence
  Description of Artificial Sequence: Synthetic oligonucleotide
  Sense strand starting at position 954 of SEQ ID NO: 1880153
guuagaugggcacaucuau

SEQ ID NO: 1946053 - RNA, 19 nt, Artificial Sequence
  Description of Artificial Sequence: Synthetic oligonucleotide
  Antisense strand to SEQ ID NO: 1946052
auagaugugcccaucuaac

SEQ ID NO: 1946054 - RNA, 19 nt, Artificial Sequence
  Description of Artificial Sequence: Synthetic oligonucleotide
  Sense strand starting at position 1000 of SEQ ID NO: 1880153
agggacagauacucuguua

SEQ ID NO: 1946055 - RNA, 19 nt, Artificial Sequence
  Description of Artificial Sequence: Synthetic oligonucleotide
  Antisense strand to SEQ ID NO: 1946054
uaacagaguaucugucccu

SEQ ID NO: 1946056 - RNA, 19 nt, Artificial Sequence
  Description of Artificial Sequence: Synthetic oligonucleotide
  Sense strand starting at position 1003 of SEQ ID NO: 1880153
gacagauacucuguuauug

SEQ ID NO: 1946057 - RNA, 19 nt, Artificial Sequence
  Description of Artificial Sequence: Synthetic oligonucleotide
  Antisense strand to SEQ ID NO: 1946056
caauaacagaguaucuguc

SEQ ID NO: 1946058 - RNA, 19 nt, Artificial Sequence
  Description of Artificial Sequence: Synthetic oligonucleotide
  Sense strand starting at position 1180 of SEQ ID NO: 1880153
ggaggauuaguuuggugau

SEQ ID NO: 1946059 - RNA, 19 nt, Artificial Sequence
  Description of Artificial Sequence: Synthetic oligonucleotide
  Antisense strand to SEQ ID NO: 1946058
aucaccaaacuaauccucc

SEQ ID NO: 1946060 - RNA, 19 nt, Artificial Sequence
  Description of Artificial Sequence: Synthetic oligonucleotide
  Sense strand starting at position 1213 of SEQ ID NO: 1880153
aaaucuauugggcaguuua

SEQ ID NO: 1946061 - RNA, 19 nt, Artificial Sequence
  Description of Artificial Sequence: Synthetic oligonucleotide
  Antisense strand to SEQ ID NO: 1946060
uaaacugcccaauagauuu

SEQ ID NO: 1946062 - RNA, 19 nt, Artificial Sequence
  Description of Artificial Sequence: Synthetic oligonucleotide
  Sense strand starting at position 1559 of SEQ ID NO: 1880153
ugcuguuggccugauuucu

SEQ ID NO: 1946063 - RNA, 19 nt, Artificial Sequence
  Description of Artificial Sequence: Synthetic oligonucleotide
  Antisense strand to SEQ ID NO: 1946062
agaaaucaggccaacagca

SEQ ID NO: 1946064 - RNA, 19 nt, Artificial Sequence
  Description of Artificial Sequence: Synthetic oligonucleotide
  Sense strand starting at position 1687 of SEQ ID NO: 1880153
ggcuuaacaccaugacauu

SEQ ID NO: 1946065 - RNA, 19 nt, Artificial Sequence
  Description of Artificial Sequence: Synthetic oligonucleotide
  Antisense strand to SEQ ID NO: 1946064
aaugucaugguguuaagcc

SEQ ID NO: 1946066 - RNA, 19 nt, Artificial Sequence
  Description of Artificial Sequence: Synthetic oligonucleotide
  Sense strand starting at position 1817 of SEQ ID NO: 1880153
cugucaagucccuggaaau

SEQ ID NO: 1946067 - RNA, 19 nt, Artificial Sequence
  Description of Artificial Sequence: Synthetic oligonucleotide
  Antisense strand to SEQ ID NO: 1946066
auuuccagggacuugacag

SEQ ID NO: 1946068 - RNA, 19 nt, Artificial Sequence
  Description of Artificial Sequence: Synthetic oligonucleotide
  Sense strand starting at position 1818 of SEQ ID NO: 1880153
ugucaagucccuggaaaug

SEQ ID NO: 1946069 - RNA, 19 nt, Artificial Sequence
  Description of Artificial Sequence: Synthetic oligonucleotide
  Antisense strand to SEQ ID NO: 1946068
cauuuccagggacuugaca

SEQ ID NO: 1946070 - RNA, 19 nt, Artificial Sequence
  Description of Artificial Sequence: Synthetic oligonucleotide
  Sense strand starting at position 1830 of SEQ ID NO: 1880153
ggaaauguggaauggaguu

SEQ ID NO: 1946071 - RNA, 19 nt, Artificial Sequence
  Description of Artificial Sequence: Synthetic oligonucleotide
  Antisense strand to SEQ ID NO: 1946070
aacuccauuccacauuucc

SEQ ID NO: 1946072 - RNA, 19 nt, Artificial Sequence
  Description of Artificial Sequence: Synthetic oligonucleotide
  Sense strand starting at position 1904 of SEQ ID NO: 1880153
caaggacuauguccguaaa

SEQ ID NO: 1946073 - RNA, 19 nt, Artificial Sequence
  Description of Artificial Sequence: Synthetic oligonucleotide
  Antisense strand to SEQ ID NO: 1946072
uuuacggacauaguccuug

SEQ ID NO: 1946074 - RNA, 19 nt, Artificial Sequence
  Description of Artificial Sequence: Synthetic oligonucleotide
  Sense strand starting at position 1905 of SEQ ID NO: 1880153
aaggacuauguccguaaau

SEQ ID NO: 1946075 - RNA, 19 nt, Artificial Sequence
  Description of Artificial Sequence: Synthetic oligonucleotide
  Antisense strand to SEQ ID NO: 1946074
auuuacggacauaguccuu

SEQ ID NO: 1946076 - RNA, 19 nt, Artificial Sequence
  Description of Artificial Sequence: Synthetic oligonucleotide
  Sense strand starting at position 1907 of SEQ ID NO: 1880153
ggacuauguccguaaaucu

SEQ ID NO: 1946077 - RNA, 19 nt, Artificial Sequence
  Description of Artificial Sequence: Synthetic oligonucleotide
  Antisense strand to SEQ ID NO: 1946076
agauuuacggacauagucc

SEQ ID NO: 1946078 - RNA, 19 nt, Artificial Sequence
  Description of Artificial Sequence: Synthetic oligonucleotide
  Sense strand starting at position 1947 of SEQ ID NO: 1880153
ugagccaggugauccaaau

SEQ ID NO: 1946079 - RNA, 19 nt, Artificial Sequence
  Description of Artificial Sequence: Synthetic oligonucleotide
  Antisense strand to SEQ ID NO: 1946078
auuuggaucaccuggcuca

SEQ ID NO: 1946080 - RNA, 19 nt, Artificial Sequence
  Description of Artificial Sequence: Synthetic oligonucleotide
  Sense strand starting at position 1971 of SEQ ID NO: 1880153
cucuguugucccuacagaa

SEQ ID NO: 1946081 - RNA, 19 nt, Artificial Sequence
  Description of Artificial Sequence: Synthetic oligonucleotide
  Antisense strand to SEQ ID NO: 1946080
uucuguagggacaacagag

SEQ ID NO: 1946082 - RNA, 19 nt, Artificial Sequence
  Description of Artificial Sequence: Synthetic oligonucleotide
  Sense strand starting at position 1992 of SEQ ID NO: 1880153
agucucaauugagucacau

SEQ ID NO: 1946083 - RNA, 19 nt, Artificial Sequence
  Description of Artificial Sequence: Synthetic oligonucleotide
  Antisense strand to SEQ ID NO: 1946082
augugacucaauugagacu

SEQ ID NO: 1946084 - RNA, 19 nt, Artificial Sequence
  Description of Artificial Sequence: Synthetic oligonucleotide
  Sense strand starting at position 2079 of SEQ ID NO: 1880153
aggcaaacugccuaucaaa

SEQ ID NO: 1946085 - RNA, 19 nt, Artificial Sequence
  Description of Artificial Sequence: Synthetic oligonucleotide
  Antisense strand to SEQ ID NO: 1946084
uuugauaggcaguuugccu

SEQ ID NO: 1946086 - RNA, 19 nt, Artificial Sequence
  Description of Artificial Sequence: Synthetic oligonucleotide
  Sense strand starting at position 2112 of SEQ ID NO: 1880153
ugucaaacucagggaaucu

SEQ ID NO: 1946087 - RNA, 19 nt, Artificial Sequence
  Description of Artificial Sequence: Synthetic oligonucleotide
  Antisense strand to SEQ ID NO: 1946086
agauucccugaguuugaca

SEQ ID NO: 1946088 - RNA, 19 nt, Artificial Sequence
  Description of Artificial Sequence: Synthetic oligonucleotide
  Sense strand starting at position 2154 of SEQ ID NO: 1880153
guuccaguccaagggaaau

SEQ ID NO: 1946089 - RNA, 19 nt, Artificial Sequence
  Description of Artificial Sequence: Synthetic oligonucleotide
  Antisense strand to SEQ ID NO: 1946088
auuucccuuggacuggaac

SEQ ID NO: 1946090 - RNA, 19 nt, Artificial Sequence
  Description of Artificial Sequence: Synthetic oligonucleotide
  Sense strand starting at position 2231 of SEQ ID NO: 1880153
cacagcuggcaguaugaaa

SEQ ID NO: 1946091 - RNA, 19 nt, Artificial Sequence
  Description of Artificial Sequence: Synthetic oligonucleotide
  Antisense strand to SEQ ID NO: 1946090
uuucauacugccagcugug

SEQ ID NO: 1946092 - RNA, 19 nt, Artificial Sequence
  Description of Artificial Sequence: Synthetic oligonucleotide
  Sense strand starting at position 2313 of SEQ ID NO: 1880153
guaauuggugcugaacaaa

SEQ ID NO: 1946093 - RNA, 19 nt, Artificial Sequence
  Description of Artificial Sequence: Synthetic oligonucleotide
  Antisense strand to SEQ ID NO: 1946092
uuuguucagcaccaauuac

SEQ ID NO: 1946094 - RNA, 19 nt, Artificial Sequence
  Description of Artificial Sequence: Synthetic oligonucleotide
  Sense strand starting at position 2443 of SEQ ID NO: 1880153
gguuuaggaagcugauaau

SEQ ID NO: 1946095 - RNA, 19 nt, Artificial Sequence
  Description of Artificial Sequence: Synthetic oligonucleotide
  Antisense strand to SEQ ID NO: 1946094
auuaucagcuuccuaaacc

SEQ ID NO: 1946096 - RNA, 19 nt, Artificial Sequence
  Description of Artificial Sequence: Synthetic oligonucleotide
  Sense strand starting at position 2526 of SEQ ID NO: 1880153
gucuuuccaggcuaaggaa

SEQ ID NO: 1946097 - RNA, 19 nt, Artificial Sequence
  Description of Artificial Sequence: Synthetic oligonucleotide
  Antisense strand to SEQ ID NO: 1946096
uuccuuagccuggaaagac

SEQ ID NO: 1946098 - RNA, 19 nt, Artificial Sequence
  Description of Artificial Sequence: Synthetic oligonucleotide
  Sense strand starting at position 2542 of SEQ ID NO: 1880153
gaagcaauaguuugaaaga

SEQ ID NO: 1946099 - RNA, 19 nt, Artificial Sequence
  Description of Artificial Sequence: Synthetic oligonucleotide
  Antisense strand to SEQ ID NO: 1946098
ucuuucaaacuauugcuuc

SEQ ID NO: 1946100 - RNA, 19 nt, Artificial Sequence
  Description of Artificial Sequence: Synthetic oligonucleotide
  Sense strand starting at position 2572 of SEQ ID NO: 1880153
augggcaacucagaaauuu

SEQ ID NO: 1946101 - RNA, 19 nt, Artificial Sequence
  Description of Artificial Sequence: Synthetic oligonucleotide
  Antisense strand to SEQ ID NO: 1946100
aaauuucugaguugcccau

SEQ ID NO: 1946102 - RNA, 19 nt, Artificial Sequence
  Description of Artificial Sequence: Synthetic oligonucleotide
  Sense strand starting at position 2873 of SEQ ID NO: 1880153
guauaacauguacagguau

SEQ ID NO: 1946103 - RNA, 19 nt, Artificial Sequence
  Description of Artificial Sequence: Synthetic oligonucleotide
  Antisense strand to SEQ ID NO: 1946102
auaccuguacauguuauac

SEQ ID NO: 1946104 - RNA, 19 nt, Artificial Sequence
  Description of Artificial Sequence: Synthetic oligonucleotide
  Sense strand starting at position 2988 of SEQ ID NO: 1880153
augaguuuauauguacaca

SEQ ID NO: 1946105 - RNA, 19 nt, Artificial Sequence
  Description of Artificial Sequence: Synthetic oligonucleotide
  Antisense strand to SEQ ID NO: 1946104
uguguacauauaaacucau

SEQ ID NO: 1946106 - RNA, 19 nt, Artificial Sequence
  Description of Artificial Sequence: Synthetic oligonucleotide
  Sense strand starting at position 2991 of SEQ ID NO: 1880153
aguuuauauguacacaagu

SEQ ID NO: 1946107 - RNA, 19 nt, Artificial Sequence
  Description of Artificial Sequence: Synthetic oligonucleotide
  Antisense strand to SEQ ID NO: 1946106
acuuguguacauauaaacu

SEQ ID NO: 1946108 - RNA, 19 nt, Artificial Sequence
  Description of Artificial Sequence: Synthetic oligonucleotide
  Sense strand starting at position 3044 of SEQ ID NO: 1880153
uggugauccauguauguac

SEQ ID NO: 1946109 - RNA, 19 nt, Artificial Sequence
  Description of Artificial Sequence: Synthetic oligonucleotide
  Antisense strand to SEQ ID NO: 1946108
guacauacauggaucacca

SEQ ID NO: 1946110 - RNA, 19 nt, Artificial Sequence
  Description of Artificial Sequence: Synthetic oligonucleotide
  Sense strand starting at position 3616 of SEQ ID NO: 1880153
uggaaauaugugggcaucu

SEQ ID NO: 1946111 - RNA, 19 nt, Artificial Sequence
  Description of Artificial Sequence: Synthetic oligonucleotide
  Antisense strand to SEQ ID NO: 1946110
agaugcccacauauuucca

SEQ ID NO: 1946112 - RNA, 19 nt, Artificial Sequence
  Description of Artificial Sequence: Synthetic oligonucleotide
  Sense strand starting at position 3617 of SEQ ID NO: 1880153
ggaaauaugugggcaucuu

SEQ ID NO: 1946113 - RNA, 19 nt, Artificial Sequence
  Description of Artificial Sequence: Synthetic oligonucleotide
  Antisense strand to SEQ ID NO: 1946112
aagaugcccacauauuucc

SEQ ID NO: 1946114 - RNA, 19 nt, Artificial Sequence
  Description of Artificial Sequence: Synthetic oligonucleotide
  Sense strand starting at position 3618 of SEQ ID NO: 1880153
gaaauaugugggcaucuua

SEQ ID NO: 1946115 - RNA, 19 nt, Artificial Sequence
  Description of Artificial Sequence: Synthetic oligonucleotide
  Antisense strand to SEQ ID NO: 1946114
uaagaugcccacauauuuc

SEQ ID NO: 1946116 - RNA, 19 nt, Artificial Sequence
  Description of Artificial Sequence: Synthetic oligonucleotide
  Sense strand starting at position 3916 of SEQ ID NO: 1880153
uaaaguugugccuaagacu

SEQ ID NO: 1946117 - RNA, 19 nt, Artificial Sequence
  Description of Artificial Sequence: Synthetic oligonucleotide
  Antisense strand to SEQ ID NO: 1946116
agucuuaggcacaacuuua

SEQ ID NO: 1946118 - RNA, 19 nt, Artificial Sequence
  Description of Artificial Sequence: Synthetic oligonucleotide
  Sense strand starting at position 151 of SEQ ID NO: 1880154
ccucaauaagacgagcuau

SEQ ID NO: 1946119 - RNA, 19 nt, Artificial Sequence
  Description of Artificial Sequence: Synthetic oligonucleotide
  Antisense strand to SEQ ID NO: 1946118
auagcucgucuuauugagg

SEQ ID NO: 1946120 - RNA, 19 nt, Artificial Sequence
  Description of Artificial Sequence: Synthetic oligonucleotide
  Sense strand starting at position 312 of SEQ ID NO: 1880154
ucacaaauugguugcaaca

SEQ ID NO: 1946121 - RNA, 19 nt, Artificial Sequence
  Description of Artificial Sequence: Synthetic oligonucleotide
  Antisense strand to SEQ ID NO: 1946120
uguugcaaccaauuuguga

SEQ ID NO: 1946122 - RNA, 19 nt, Artificial Sequence
  Description of Artificial Sequence: Synthetic oligonucleotide
  Sense strand starting at position 420 of SEQ ID NO: 1880154
ggaaguacgagccauggau

SEQ ID NO: 1946123 - RNA, 19 nt, Artificial Sequence
  Description of Artificial Sequence: Synthetic oligonucleotide
  Antisense strand to SEQ ID NO: 1946122
auccauggcucguacuucc

SEQ ID NO: 1946124 - RNA, 19 nt, Artificial Sequence
  Description of Artificial Sequence: Synthetic oligonucleotide
  Sense strand starting at position 429 of SEQ ID NO: 1880154
agccauggaucugcagauu

SEQ ID NO: 1946125 - RNA, 19 nt, Artificial Sequence
  Description of Artificial Sequence: Synthetic oligonucleotide
  Antisense strand to SEQ ID NO: 1946124
aaucugcagauccauggcu

SEQ ID NO: 1946126 - RNA, 19 nt, Artificial Sequence
  Description of Artificial Sequence: Synthetic oligonucleotide
  Sense strand starting at position 882 of SEQ ID NO: 1880154
ggagcuacucucugagggu

SEQ ID NO: 1946127 - RNA, 19 nt, Artificial Sequence
  Description of Artificial Sequence: Synthetic oligonucleotide
  Antisense strand to SEQ ID NO: 1946126
acccucagagaguagcucc

SEQ ID NO: 1946128 - RNA, 19 nt, Artificial Sequence
  Description of Artificial Sequence: Synthetic oligonucleotide
  Sense strand starting at position 976 of SEQ ID NO: 1880154
uggaccuucucuuccaaga

SEQ ID NO: 1946129 - RNA, 19 nt, Artificial Sequence
  Description of Artificial Sequence: Synthetic oligonucleotide
  Antisense strand to SEQ ID NO: 1946128
ucuuggaagagaaggucca

SEQ ID NO: 1946130 - RNA, 19 nt, Artificial Sequence
  Description of Artificial Sequence: Synthetic oligonucleotide
  Sense strand starting at position 1112 of SEQ ID NO: 1880154
cugguuugucagccugcau

SEQ ID NO: 1946131 - RNA, 19 nt, Artificial Sequence
  Description of Artificial Sequence: Synthetic oligonucleotide
  Antisense strand to SEQ ID NO: 1946130
augcaggcugacaaaccag

SEQ ID NO: 1946132 - RNA, 19 nt, Artificial Sequence
  Description of Artificial Sequence: Synthetic oligonucleotide
  Sense strand starting at position 1163 of SEQ ID NO: 1880154
gggcaaaucuucucccaga

SEQ ID NO: 1946133 - RNA, 19 nt, Artificial Sequence
  Description of Artificial Sequence: Synthetic oligonucleotide
  Antisense strand to SEQ ID NO: 1946132
ucugggagaagauuugccc

SEQ ID NO: 1946134 - RNA, 19 nt, Artificial Sequence
  Description of Artificial Sequence: Synthetic oligonucleotide
  Sense strand starting at position 1164 of SEQ ID NO: 1880154
ggcaaaucuucucccagag

SEQ ID NO: 1946135 - RNA, 19 nt, Artificial Sequence
  Description of Artificial Sequence: Synthetic oligonucleotide
  Antisense strand to SEQ ID NO: 1946134
cucugggagaagauuugcc

SEQ ID NO: 1946136 - RNA, 19 nt, Artificial Sequence
  Description of Artificial Sequence: Synthetic oligonucleotide
  Sense strand starting at position 1223 of SEQ ID NO: 1880154
ccagaagaugcccauguaa

SEQ ID NO: 1946137 - RNA, 19 nt, Artificial Sequence
  Description of Artificial Sequence: Synthetic oligonucleotide
  Antisense strand to SEQ ID NO: 1946136
uuacaugggcaucuucugg

SEQ ID NO: 1946138 - RNA, 19 nt, Artificial Sequence
  Description of Artificial Sequence: Synthetic oligonucleotide
  Sense strand starting at position 1281 of SEQ ID NO: 1880154
cccuaagacuggucagaaa

SEQ ID NO: 1946139 - RNA, 19 nt, Artificial Sequence
  Description of Artificial Sequence: Synthetic oligonucleotide
  Antisense strand to SEQ ID NO: 1946138
uuucugaccagucuuaggg

SEQ ID NO: 1946140 - RNA, 19 nt, Artificial Sequence
  Description of Artificial Sequence: Synthetic oligonucleotide
  Sense strand starting at position 1397 of SEQ ID NO: 1880154
guuccuuccucuuugaaag

SEQ ID NO: 1946141 - RNA, 19 nt, Artificial Sequence
  Description of Artificial Sequence: Synthetic oligonucleotide
  Antisense strand to SEQ ID NO: 1946140
cuuucaaagaggaaggaac

SEQ ID NO: 1946142 - RNA, 19 nt, Artificial Sequence
  Description of Artificial Sequence: Synthetic oligonucleotide
  Sense strand starting at position 1495 of SEQ ID NO: 1880154
cgaagauacgcugauuccu

SEQ ID NO: 1946143 - RNA, 19 nt, Artificial Sequence
  Description of Artificial Sequence: Synthetic oligonucleotide
  Antisense strand to SEQ ID NO: 1946142
aggaaucagcguaucuucg

SEQ ID NO: 1946144 - RNA, 19 nt, Artificial Sequence
  Description of Artificial Sequence: Synthetic oligonucleotide
  Sense strand starting at position 1503 of SEQ ID NO: 1880154
cgcugauuccuggcagcua

SEQ ID NO: 1946145 - RNA, 19 nt, Artificial Sequence
  Description of Artificial Sequence: Synthetic oligonucleotide
  Antisense strand to SEQ ID NO: 1946144
uagcugccaggaaucagcg

SEQ ID NO: 1946146 - RNA, 19 nt, Artificial Sequence
  Description of Artificial Sequence: Synthetic oligonucleotide
  Sense strand starting at position 1702 of SEQ ID NO: 1880154
gcaagcuucgugucaugca

SEQ ID NO: 1946147 - RNA, 19 nt, Artificial Sequence
  Description of Artificial Sequence: Synthetic oligonucleotide
  Antisense strand to SEQ ID NO: 1946146
ugcaugacacgaagcuugc

SEQ ID NO: 1946148 - RNA, 19 nt, Artificial Sequence
  Description of Artificial Sequence: Synthetic oligonucleotide
  Sense strand starting at position 1720 of SEQ ID NO: 1880154
agcagaggcugucugauuu

SEQ ID NO: 1946149 - RNA, 19 nt, Artificial Sequence
  Description of Artificial Sequence: Synthetic oligonucleotide
  Antisense strand to SEQ ID NO: 1946148
aaaucagacagccucugcu

SEQ ID NO: 1946150 - RNA, 19 nt, Artificial Sequence
  Description of Artificial Sequence: Synthetic oligonucleotide
  Sense strand starting at position 1724 of SEQ ID NO: 1880154
gaggcugucugauuuaugu

SEQ ID NO: 1946151 - RNA, 19 nt, Artificial Sequence
  Description of Artificial Sequence: Synthetic oligonucleotide
  Antisense strand to SEQ ID NO: 1946150
acauaaaucagacagccuc

SEQ ID NO: 1946152 - RNA, 19 nt, Artificial Sequence
  Description of Artificial Sequence: Synthetic oligonucleotide
  Sense strand starting at position 1733 of SEQ ID NO: 1880154
ugauuuauguaucaggaac

SEQ ID NO: 1946153 - RNA, 19 nt, Artificial Sequence
  Description of Artificial Sequence: Synthetic oligonucleotide
  Antisense strand to SEQ ID NO: 1946152
guuccugauacauaaauca

SEQ ID NO: 1946154 - RNA, 19 nt, Artificial Sequence
  Description of Artificial Sequence: Synthetic oligonucleotide
  Sense strand starting at position 1735 of SEQ ID NO: 1880154
auuuauguaucaggaacca

SEQ ID NO: 1946155 - RNA, 19 nt, Artificial Sequence
  Description of Artificial Sequence: Synthetic oligonucleotide
  Antisense strand to SEQ ID NO: 1946154
ugguuccugauacauaaau

SEQ ID NO: 1946156 - RNA, 19 nt, Artificial Sequence
  Description of Artificial Sequence: Synthetic oligonucleotide
  Sense strand starting at position 1774 of SEQ ID NO: 1880154
ccuguaucacugggacuuu

SEQ ID NO: 1946157 - RNA, 19 nt, Artificial Sequence
  Description of Artificial Sequence: Synthetic oligonucleotide
  Antisense strand to SEQ ID NO: 1946156
aaagucccagugauacagg

SEQ ID NO: 1946158 - RNA, 19 nt, Artificial Sequence
  Description of Artificial Sequence: Synthetic oligonucleotide
  Sense strand starting at position 1802 of SEQ ID NO: 1880154
ugucuugaggauugcucau

SEQ ID NO: 1946159 - RNA, 19 nt, Artificial Sequence
  Description of Artificial Sequence: Synthetic oligonucleotide
  Antisense strand to SEQ ID NO: 1946158
augagcaauccucaagaca

SEQ ID NO: 1946160 - RNA, 19 nt, Artificial Sequence
  Description of Artificial Sequence: Synthetic oligonucleotide
  Sense strand starting at position 1808 of SEQ ID NO: 1880154
gaggauugcucaucuccca

SEQ ID NO: 1946161 - RNA, 19 nt, Artificial Sequence
  Description of Artificial Sequence: Synthetic oligonucleotide
  Antisense strand to SEQ ID NO: 1946160
ugggagaugagcaauccuc

SEQ ID NO: 1946162 - RNA, 19 nt, Artificial Sequence
  Description of Artificial Sequence: Synthetic oligonucleotide
  Sense strand starting at position 1857 of SEQ ID NO: 1880154
gaagcaggcuucucaagaa

SEQ ID NO: 1946163 - RNA, 19 nt, Artificial Sequence
  Description of Artificial Sequence: Synthetic oligonucleotide
  Antisense strand to SEQ ID NO: 1946162
uucuugagaagccugcuuc

SEQ ID NO: 1946164 - RNA, 19 nt, Artificial Sequence
  Description of Artificial Sequence: Synthetic oligonucleotide
  Sense strand starting at position 1936 of SEQ ID NO: 1880154
cggcuuugggcagaaacau

SEQ ID NO: 1946165 - RNA, 19 nt, Artificial Sequence
  Description of Artificial Sequence: Synthetic oligonucleotide
  Antisense strand to SEQ ID NO: 1946164
auguuucugcccaaagccg

SEQ ID NO: 1946166 - RNA, 19 nt, Artificial Sequence
  Description of Artificial Sequence: Synthetic oligonucleotide
  Sense strand starting at position 2257 of SEQ ID NO: 1880154
augagugcaaugugguaua

SEQ ID NO: 1946167 - RNA, 19 nt, Artificial Sequence
  Description of Artificial Sequence: Synthetic oligonucleotide
  Antisense strand to SEQ ID NO: 1946166
uauaccacauugcacucau

SEQ ID NO: 1946168 - RNA, 19 nt, Artificial Sequence
  Description of Artificial Sequence: Synthetic oligonucleotide
  Sense strand starting at position 2551 of SEQ ID NO: 1880154
uguugauagaggcaugcaa

SEQ ID NO: 1946169 - RNA, 19 nt, Artificial Sequence
  Description of Artificial Sequence: Synthetic oligonucleotide
  Antisense strand to SEQ ID NO: 1946168
uugcaugccucuaucaaca

SEQ ID NO: 1946170 - RNA, 19 nt, Artificial Sequence
  Description of Artificial Sequence: Synthetic oligonucleotide
  Sense strand starting at position 2932 of SEQ ID NO: 1880154
ccauccaugucauugugaa

SEQ ID NO: 1946171 - RNA, 19 nt, Artificial Sequence
  Description of Artificial Sequence: Synthetic oligonucleotide
  Antisense strand to SEQ ID NO: 1946170
uucacaaugacauggaugg

SEQ ID NO: 1946172 - RNA, 19 nt, Artificial Sequence
  Description of Artificial Sequence: Synthetic oligonucleotide
  Sense strand starting at position 2944 of SEQ ID NO: 1880154
uugugaaugacaggaucua

SEQ ID NO: 1946173 - RNA, 19 nt, Artificial Sequence
  Description of Artificial Sequence: Synthetic oligonucleotide
  Antisense strand to SEQ ID NO: 1946172
uagauccugucauucacaa

SEQ ID NO: 1946174 - RNA, 19 nt, Artificial Sequence
  Description of Artificial Sequence: Synthetic oligonucleotide
  Sense strand starting at position 3017 of SEQ ID NO: 1880154
uccacucaucggugauaga

SEQ ID NO: 1946175 - RNA, 19 nt, Artificial Sequence
  Description of Artificial Sequence: Synthetic oligonucleotide
  Antisense strand to SEQ ID NO: 1946174
ucuaucaccgaugagugga

SEQ ID NO: 1946176 - RNA, 19 nt, Artificial Sequence
  Description of Artificial Sequence: Synthetic oligonucleotide
  Sense strand starting at position 3018 of SEQ ID NO: 1880154
ccacucaucggugauagac

SEQ ID NO: 1946177 - RNA, 19 nt, Artificial Sequence
  Description of Artificial Sequence: Synthetic oligonucleotide
  Antisense strand to SEQ ID NO: 1946176
gucuaucaccgaugagugg

SEQ ID NO: 1946178 - RNA, 19 nt, Artificial Sequence
  Description of Artificial Sequence: Synthetic oligonucleotide
  Sense strand starting at position 3365 of SEQ ID NO: 1880154
ggaguuugugucuaacuuu

SEQ ID NO: 1946179 - RNA, 19 nt, Artificial Sequence
  Description of Artificial Sequence: Synthetic oligonucleotide
  Antisense strand to SEQ ID NO: 1946178
aaaguuagacacaaacucc

SEQ ID NO: 1946180 - RNA, 19 nt, Artificial Sequence
  Description of Artificial Sequence: Synthetic oligonucleotide
  Sense strand starting at position 3397 of SEQ ID NO: 1880154
ggaacuaguauuggcagaa

SEQ ID NO: 1946181 - RNA, 19 nt, Artificial Sequence
  Description of Artificial Sequence: Synthetic oligonucleotide
  Antisense strand to SEQ ID NO: 1946180
uucugccaauacuaguucc

SEQ ID NO: 1946182 - RNA, 19 nt, Artificial Sequence
  Description of Artificial Sequence: Synthetic oligonucleotide
  Sense strand starting at position 3398 of SEQ ID NO: 1880154
gaacuaguauuggcagaag

SEQ ID NO: 1946183 - RNA, 19 nt, Artificial Sequence
  Description of Artificial Sequence: Synthetic oligonucleotide
  Antisense strand to SEQ ID NO: 1946182
cuucugccaauacuaguuc

SEQ ID NO: 1946184 - RNA, 19 nt, Artificial Sequence
  Description of Artificial Sequence: Synthetic oligonucleotide
  Sense strand starting at position 3514 of SEQ ID NO: 1880154
uuuagaguccauuguaaca

SEQ ID NO: 1946185 - RNA, 19 nt, Artificial Sequence
  Description of Artificial Sequence: Synthetic oligonucleotide
  Antisense strand to SEQ ID NO: 1946184
uguuacaauggacucuaaa

SEQ ID NO: 1946186 - RNA, 19 nt, Artificial Sequence
  Description of Artificial Sequence: Synthetic oligonucleotide
  Sense strand starting at position 3583 of SEQ ID NO: 1880154
gcuggugagauaugugaac

SEQ ID NO: 1946187 - RNA, 19 nt, Artificial Sequence
  Description of Artificial Sequence: Synthetic oligonucleotide
  Antisense strand to SEQ ID NO: 1946186
guucacauaucucaccagc

SEQ ID NO: 1946188 - RNA, 19 nt, Artificial Sequence
  Description of Artificial Sequence: Synthetic oligonucleotide
  Sense strand starting at position 3585 of SEQ ID NO: 1880154
uggugagauaugugaacuu

SEQ ID NO: 1946189 - RNA, 19 nt, Artificial Sequence
  Description of Artificial Sequence: Synthetic oligonucleotide
  Antisense strand to SEQ ID NO: 1946188
aaguucacauaucucacca

SEQ ID NO: 1946190 - RNA, 19 nt, Artificial Sequence
  Description of Artificial Sequence: Synthetic oligonucleotide
  Sense strand starting at position 3671 of SEQ ID NO: 1880154
gugugugcucgagucagca

SEQ ID NO: 1946191 - RNA, 19 nt, Artificial Sequence
  Description of Artificial Sequence: Synthetic oligonucleotide
  Antisense strand to SEQ ID NO: 1946190
ugcugacucgagcacacac

SEQ ID NO: 1946192 - RNA, 19 nt, Artificial Sequence
  Description of Artificial Sequence: Synthetic oligonucleotide
  Sense strand starting at position 3885 of SEQ ID NO: 1880154
aaucuugugaggugcuuga

SEQ ID NO: 1946193 - RNA, 19 nt, Artificial Sequence
  Description of Artificial Sequence: Synthetic oligonucleotide
  Antisense strand to SEQ ID NO: 1946192
ucaagcaccucacaagauu

SEQ ID NO: 1946194 - RNA, 19 nt, Artificial Sequence
  Description of Artificial Sequence: Synthetic oligonucleotide
  Sense strand starting at position 3889 of SEQ ID NO: 1880154
uugugaggugcuugaugaa

SEQ ID NO: 1946195 - RNA, 19 nt, Artificial Sequence
  Description of Artificial Sequence: Synthetic oligonucleotide
  Antisense strand to SEQ ID NO: 1946194
uucaucaagcaccucacaa

SEQ ID NO: 1946196 - RNA, 19 nt, Artificial Sequence
  Description of Artificial Sequence: Synthetic oligonucleotide
  Sense strand starting at position 3901 of SEQ ID NO: 1880154
ugaugaacauggccauuau

SEQ ID NO: 1946197 - RNA, 19 nt, Artificial Sequence
  Description of Artificial Sequence: Synthetic oligonucleotide
  Antisense strand to SEQ ID NO: 1946196
auaauggccauguucauca

SEQ ID NO: 1946198 - RNA, 19 nt, Artificial Sequence
  Description of Artificial Sequence: Synthetic oligonucleotide
  Sense strand starting at position 80 of SEQ ID NO: 1880155
gguacuaugcauuacgcau

SEQ ID NO: 1946199 - RNA, 19 nt, Artificial Sequence
  Description of Artificial Sequence: Synthetic oligonucleotide
  Antisense strand to SEQ ID NO: 1946198
augcguaaugcauaguacc

SEQ ID NO: 1946200 - RNA, 19 nt, Artificial Sequence
  Description of Artificial Sequence: Synthetic oligonucleotide
  Sense strand starting at position 86 of SEQ ID NO: 1880155
augcauuacgcauggcuaa

SEQ ID NO: 1946201 - RNA, 19 nt, Artificial Sequence
  Description of Artificial Sequence: Synthetic oligonucleotide
  Antisense strand to SEQ ID NO: 1946200
uuagccaugcguaaugcau

SEQ ID NO: 1946202 - RNA, 19 nt, Artificial Sequence
  Description of Artificial Sequence: Synthetic oligonucleotide
  Sense strand starting at position 87 of SEQ ID NO: 1880155
ugcauuacgcauggcuaau

SEQ ID NO: 1946203 - RNA, 19 nt, Artificial Sequence
  Description of Artificial Sequence: Synthetic oligonucleotide
  Antisense strand to SEQ ID NO: 1946202
auuagccaugcguaaugca

SEQ ID NO: 1946204 - RNA, 19 nt, Artificial Sequence
  Description of Artificial Sequence: Synthetic oligonucleotide
  Sense strand starting at position 260 of SEQ ID NO: 1880155
ucauaauaacccugaggua

SEQ ID NO: 1946205 - RNA, 19 nt, Artificial Sequence
  Description of Artificial Sequence: Synthetic oligonucleotide
  Antisense strand to SEQ ID NO: 1946204
uaccucaggguuauuauga

SEQ ID NO: 1946206 - RNA, 19 nt, Artificial Sequence
  Description of Artificial Sequence: Synthetic oligonucleotide
  Sense strand starting at position 304 of SEQ ID NO: 1880155
gggagugaggcuuggaaag

SEQ ID NO: 1946207 - RNA, 19 nt, Artificial Sequence
  Description of Artificial Sequence: Synthetic oligonucleotide
  Antisense strand to SEQ ID NO: 1946206
cuuuccaagccucacuccc

SEQ ID NO: 1946208 - RNA, 19 nt, Artificial Sequence
  Description of Artificial Sequence: Synthetic oligonucleotide
  Sense strand starting at position 326 of SEQ ID NO: 1880155
aaaugacuugccugaggac

SEQ ID NO: 1946209 - RNA, 19 nt, Artificial Sequence
  Description of Artificial Sequence: Synthetic oligonucleotide
  Antisense strand to SEQ ID NO: 1946208
guccucaggcaagucauuu

SEQ ID NO: 1946210 - RNA, 19 nt, Artificial Sequence
  Description of Artificial Sequence: Synthetic oligonucleotide
  Sense strand starting at position 352 of SEQ ID NO: 1880155
ugguaagugcaagaaucaa

SEQ ID NO: 1946211 - RNA, 19 nt, Artificial Sequence
  Description of Artificial Sequence: Synthetic oligonucleotide
  Antisense strand to SEQ ID NO: 1946210
uugauucuugcacuuacca

SEQ ID NO: 1946212 - RNA, 19 nt, Artificial Sequence
  Description of Artificial Sequence: Synthetic oligonucleotide
  Sense strand starting at position 398 of SEQ ID NO: 1880155
aggucuauagugugaaucu

SEQ ID NO: 1946213 - RNA, 19 nt, Artificial Sequence
  Description of Artificial Sequence: Synthetic oligonucleotide
  Antisense strand to SEQ ID NO: 1946212
agauucacacuauagaccu

SEQ ID NO: 1946214 - RNA, 19 nt, Artificial Sequence
  Description of Artificial Sequence: Synthetic oligonucleotide
  Sense strand starting at position 534 of SEQ ID NO: 1880155
ugaggauccugucucucua

SEQ ID NO: 1946215 - RNA, 19 nt, Artificial Sequence
  Description of Artificial Sequence: Synthetic oligonucleotide
  Antisense strand to SEQ ID NO: 1946214
uagagagacaggauccuca

SEQ ID NO: 1946216 - RNA, 19 nt, Artificial Sequence
  Description of Artificial Sequence: Synthetic oligonucleotide
  Sense strand starting at position 646 of SEQ ID NO: 1880155
cuuucuccguguuuaucaa

SEQ ID NO: 1946217 - RNA, 19 nt, Artificial Sequence
  Description of Artificial Sequence: Synthetic oligonucleotide
  Antisense strand to SEQ ID NO: 1946216
uugauaaacacggagaaag

SEQ ID NO: 1946218 - RNA, 19 nt, Artificial Sequence
  Description of Artificial Sequence: Synthetic oligonucleotide
  Sense strand starting at position 647 of SEQ ID NO: 1880155
uuucuccguguuuaucaaa

SEQ ID NO: 1946219 - RNA, 19 nt, Artificial Sequence
  Description of Artificial Sequence: Synthetic oligonucleotide
  Antisense strand to SEQ ID NO: 1946218
uuugauaaacacggagaaa

SEQ ID NO: 1946220 - RNA, 19 nt, Artificial Sequence
  Description of Artificial Sequence: Synthetic oligonucleotide
  Sense strand starting at position 681 of SEQ ID NO: 1880155
cuguauuacucacuaguag

SEQ ID NO: 1946221 - RNA, 19 nt, Artificial Sequence
  Description of Artificial Sequence: Synthetic oligonucleotide
  Antisense strand to SEQ ID NO: 1946220
cuacuagugaguaauacag

SEQ ID NO: 1946222 - RNA, 19 nt, Artificial Sequence
  Description of Artificial Sequence: Synthetic oligonucleotide
  Sense strand starting at position 682 of SEQ ID NO: 1880155
uguauuacucacuaguagu

SEQ ID NO: 1946223 - RNA, 19 nt, Artificial Sequence
  Description of Artificial Sequence: Synthetic oligonucleotide
  Antisense strand to SEQ ID NO: 1946222
acuacuagugaguaauaca

SEQ ID NO: 1946224 - RNA, 19 nt, Artificial Sequence
  Description of Artificial Sequence: Synthetic oligonucleotide
  Sense strand starting at position 2370 of SEQ ID NO: 1880155
gcgcauauaacgguuaguu

SEQ ID NO: 1946225 - RNA, 19 nt, Artificial Sequence
  Description of Artificial Sequence: Synthetic oligonucleotide
  Antisense strand to SEQ ID NO: 1946224
aacuaaccguuauaugcgc

SEQ ID NO: 1946226 - RNA, 19 nt, Artificial Sequence
  Description of Artificial Sequence: Synthetic oligonucleotide
  Sense strand starting at position 2816 of SEQ ID NO: 1880155
gaaguuauuuaugauucgu

SEQ ID NO: 1946227 - RNA, 19 nt, Artificial Sequence
  Description of Artificial Sequence: Synthetic oligonucleotide
  Antisense strand to SEQ ID NO: 1946226
acgaaucauaaauaacuuc

SEQ ID NO: 1946228 - RNA, 19 nt, Artificial Sequence
  Description of Artificial Sequence: Synthetic oligonucleotide
  Sense strand starting at position 2822 of SEQ ID NO: 1880155
auuuaugauucgugacauu

SEQ ID NO: 1946229 - RNA, 19 nt, Artificial Sequence
  Description of Artificial Sequence: Synthetic oligonucleotide
  Antisense strand to SEQ ID NO: 1946228
aaugucacgaaucauaaau

SEQ ID NO: 1946230 - RNA, 19 nt, Artificial Sequence
  Description of Artificial Sequence: Synthetic oligonucleotide
  Sense strand starting at position 3074 of SEQ ID NO: 1880155
gcggcccuguugagagaaa

SEQ ID NO: 1946231 - RNA, 19 nt, Artificial Sequence
  Description of Artificial Sequence: Synthetic oligonucleotide
  Antisense strand to SEQ ID NO: 1946230
uuucucucaacagggccgc

SEQ ID NO: 1946232 - RNA, 19 nt, Artificial Sequence
  Description of Artificial Sequence: Synthetic oligonucleotide
  Sense strand starting at position 3096 of SEQ ID NO: 1880155
ggaggauagcguuacacuu

SEQ ID NO: 1946233 - RNA, 19 nt, Artificial Sequence
  Description of Artificial Sequence: Synthetic oligonucleotide
  Antisense strand to SEQ ID NO: 1946232
aaguguaacgcuauccucc

SEQ ID NO: 1946234 - RNA, 19 nt, Artificial Sequence
  Description of Artificial Sequence: Synthetic oligonucleotide
  Sense strand starting at position 3178 of SEQ ID NO: 1880155
uuuauuacuuugucaugac

SEQ ID NO: 1946235 - RNA, 19 nt, Artificial Sequence
  Description of Artificial Sequence: Synthetic oligonucleotide
  Antisense strand to SEQ ID NO: 1946234
gucaugacaaaguaauaaa

SEQ ID NO: 1946236 - RNA, 19 nt, Artificial Sequence
  Description of Artificial Sequence: Synthetic oligonucleotide
  Sense strand starting at position 3182 of SEQ ID NO: 1880155
uuacuuugucaugacauau

SEQ ID NO: 1946237 - RNA, 19 nt, Artificial Sequence
  Description of Artificial Sequence: Synthetic oligonucleotide
  Antisense strand to SEQ ID NO: 1946236
auaugucaugacaaaguaa

SEQ ID NO: 1946238 - RNA, 19 nt, Artificial Sequence
  Description of Artificial Sequence: Synthetic oligonucleotide
  Sense strand starting at position 3193 of SEQ ID NO: 1880155
ugacauauuugauggaaca

SEQ ID NO: 1946239 - RNA, 19 nt, Artificial Sequence
  Description of Artificial Sequence: Synthetic oligonucleotide
  Antisense strand to SEQ ID NO: 1946238
uguuccaucaaauauguca

SEQ ID NO: 1946240 - RNA, 19 nt, Artificial Sequence
  Description of Artificial Sequence: Synthetic oligonucleotide
  Sense strand starting at position 3282 of SEQ ID NO: 1880155
uuggguuuccaguggcuga

SEQ ID NO: 1946241 - RNA, 19 nt, Artificial Sequence
  Description of Artificial Sequence: Synthetic oligonucleotide
  Antisense strand to SEQ ID NO: 1946240
ucagccacuggaaacccaa

SEQ ID NO: 1946242 - RNA, 19 nt, Artificial Sequence
  Description of Artificial Sequence: Synthetic oligonucleotide
  Sense strand starting at position 3287 of SEQ ID NO: 1880155
uuuccaguggcugauuaga

SEQ ID NO: 1946243 - RNA, 19 nt, Artificial Sequence
  Description of Artificial Sequence: Synthetic oligonucleotide
  Antisense strand to SEQ ID NO: 1946242
ucuaaucagccacuggaaa

SEQ ID NO: 1946244 - RNA, 19 nt, Artificial Sequence
  Description of Artificial Sequence: Synthetic oligonucleotide
  Sense strand starting at position 3289 of SEQ ID NO: 1880155
uccaguggcugauuagaaa

SEQ ID NO: 1946245 - RNA, 19 nt, Artificial Sequence
  Description of Artificial Sequence: Synthetic oligonucleotide
  Antisense strand to SEQ ID NO: 1946244
uuucuaaucagccacugga

SEQ ID NO: 1946246 - RNA, 19 nt, Artificial Sequence
  Description of Artificial Sequence: Synthetic oligonucleotide
  Sense strand starting at position 3309 of SEQ ID NO: 1880155
ugggcugcuacugauaaca

SEQ ID NO: 1946247 - RNA, 19 nt, Artificial Sequence
  Description of Artificial Sequence: Synthetic oligonucleotide
  Antisense strand to SEQ ID NO: 1946246
uguuaucaguagcagccca

SEQ ID NO: 1946248 - RNA, 19 nt, Artificial Sequence
  Description of Artificial Sequence: Synthetic oligonucleotide
  Sense strand starting at position 3333 of SEQ ID NO: 1880155
auguuuacacgcuacuuua

SEQ ID NO: 1946249 - RNA, 19 nt, Artificial Sequence
  Description of Artificial Sequence: Synthetic oligonucleotide
  Antisense strand to SEQ ID NO: 1946248
uaaaguagcguguaaacau

SEQ ID NO: 1946250 - RNA, 19 nt, Artificial Sequence
  Description of Artificial Sequence: Synthetic oligonucleotide
  Sense strand starting at position 3474 of SEQ ID NO: 1880155
ugaugcaaagacuauguau

SEQ ID NO: 1946251 - RNA, 19 nt, Artificial Sequence
  Description of Artificial Sequence: Synthetic oligonucleotide
  Antisense strand to SEQ ID NO: 1946250
auacauagucuuugcauca

SEQ ID NO: 1946252 - RNA, 19 nt, Artificial Sequence
  Description of Artificial Sequence: Synthetic oligonucleotide
  Sense strand starting at position 3477 of SEQ ID NO: 1880155
ugcaaagacuauguaucuu

SEQ ID NO: 1946253 - RNA, 19 nt, Artificial Sequence
  Description of Artificial Sequence: Synthetic oligonucleotide
  Antisense strand to SEQ ID NO: 1946252
aagauacauagucuuugca

SEQ ID NO: 1946254 - RNA, 19 nt, Artificial Sequence
  Description of Artificial Sequence: Synthetic oligonucleotide
  Sense strand starting at position 3513 of SEQ ID NO: 1880155
guuaaauaguacccauaaa

SEQ ID NO: 1946255 - RNA, 19 nt, Artificial Sequence
  Description of Artificial Sequence: Synthetic oligonucleotide
  Antisense strand to SEQ ID NO: 1946254
uuuauggguacuauuuaac

SEQ ID NO: 1946256 - RNA, 19 nt, Artificial Sequence
  Description of Artificial Sequence: Synthetic oligonucleotide
  Sense strand starting at position 3705 of SEQ ID NO: 1880155
ugcaguuaccauuguuaaa

SEQ ID NO: 1946257 - RNA, 19 nt, Artificial Sequence
  Description of Artificial Sequence: Synthetic oligonucleotide
  Antisense strand to SEQ ID NO: 1946256
uuuaacaaugguaacugca

SEQ ID NO: 1946258 - RNA, 19 nt, Artificial Sequence
  Description of Artificial Sequence: Synthetic oligonucleotide
  Sense strand starting at position 3727 of SEQ ID NO: 1880155
gcaaguuaaugaucugagg

SEQ ID NO: 1946259 - RNA, 19 nt, Artificial Sequence
  Description of Artificial Sequence: Synthetic oligonucleotide
  Antisense strand to SEQ ID NO: 1946258
ccucagaucauuaacuugc

SEQ ID NO: 1946260 - RNA, 19 nt, Artificial Sequence
  Description of Artificial Sequence: Synthetic oligonucleotide
  Sense strand starting at position 3769 of SEQ ID NO: 1880155
cugaauagauuugaagguu

SEQ ID NO: 1946261 - RNA, 19 nt, Artificial Sequence
  Description of Artificial Sequence: Synthetic oligonucleotide
  Antisense strand to SEQ ID NO: 1946260
aaccuucaaaucuauucag

SEQ ID NO: 1946262 - RNA, 19 nt, Artificial Sequence
  Description of Artificial Sequence: Synthetic oligonucleotide
  Sense strand starting at position 3793 of SEQ ID NO: 1880155
guaagcuuaacgggauaga

SEQ ID NO: 1946263 - RNA, 19 nt, Artificial Sequence
  Description of Artificial Sequence: Synthetic oligonucleotide
  Antisense strand to SEQ ID NO: 1946262
ucuaucccguuaagcuuac

SEQ ID NO: 1946264 - RNA, 19 nt, Artificial Sequence
  Description of Artificial Sequence: Synthetic oligonucleotide
  Sense strand starting at position 3811 of SEQ ID NO: 1880155
acuguaauguccuuaaaca

SEQ ID NO: 1946265 - RNA, 19 nt, Artificial Sequence
  Description of Artificial Sequence: Synthetic oligonucleotide
  Antisense strand to SEQ ID NO: 1946264
uguuuaaggacauuacagu

SEQ ID NO: 1946266 - RNA, 19 nt, Artificial Sequence
  Description of Artificial Sequence: Synthetic oligonucleotide
  Sense strand starting at position 3812 of SEQ ID NO: 1880155
cuguaauguccuuaaacag

SEQ ID NO: 1946267 - RNA, 19 nt, Artificial Sequence
  Description of Artificial Sequence: Synthetic oligonucleotide
  Antisense strand to SEQ ID NO: 1946266
cuguuuaaggacauuacag

SEQ ID NO: 1946268 - RNA, 19 nt, Artificial Sequence
  Description of Artificial Sequence: Synthetic oligonucleotide
  Sense strand starting at position 3850 of SEQ ID NO: 1880155
auaucacuauaggaugaaa

SEQ ID NO: 1946269 - RNA, 19 nt, Artificial Sequence
  Description of Artificial Sequence: Synthetic oligonucleotide
  Antisense strand to SEQ ID NO: 1946268
uuucauccuauagugauau

SEQ ID NO: 1946270 - RNA, 19 nt, Artificial Sequence
  Description of Artificial Sequence: Synthetic oligonucleotide
  Sense strand starting at position 3865 of SEQ ID NO: 1880155
gaaagcaaaugauuaguau

SEQ ID NO: 1946271 - RNA, 19 nt, Artificial Sequence
  Description of Artificial Sequence: Synthetic oligonucleotide
  Antisense strand to SEQ ID NO: 1946270
auacuaaucauuugcuuuc

SEQ ID NO: 1946272 - RNA, 19 nt, Artificial Sequence
  Description of Artificial Sequence: Synthetic oligonucleotide
  Sense strand starting at position 3920 of SEQ ID NO: 1880155
ggcauauauuagcccugga

SEQ ID NO: 1946273 - RNA, 19 nt, Artificial Sequence
  Description of Artificial Sequence: Synthetic oligonucleotide
  Antisense strand to SEQ ID NO: 1946272
uccagggcuaauauaugcc

SEQ ID NO: 1946274 - RNA, 19 nt, Artificial Sequence
  Description of Artificial Sequence: Synthetic oligonucleotide
  Sense strand starting at position 3923 of SEQ ID NO: 1880155
auauauuagcccuggaaag

SEQ ID NO: 1946275 - RNA, 19 nt, Artificial Sequence
  Description of Artificial Sequence: Synthetic oligonucleotide
  Antisense strand to SEQ ID NO: 1946274
cuuuccagggcuaauauau

SEQ ID NO: 1946276 - RNA, 19 nt, Artificial Sequence
  Description of Artificial Sequence: Synthetic oligonucleotide
  Sense strand starting at position 3935 of SEQ ID NO: 1880155
uggaaaggauccuaaugac

SEQ ID NO: 1946277 - RNA, 19 nt, Artificial Sequence
  Description of Artificial Sequence: Synthetic oligonucleotide
  Antisense strand to SEQ ID NO: 1946276
gucauuaggauccuuucca

SEQ ID NO: 1946278 - RNA, 19 nt, Artificial Sequence
  Description of Artificial Sequence: Synthetic oligonucleotide
  Sense strand starting at position 20 of SEQ ID NO: 1880156
ggaaguaacacguaguaag

SEQ ID NO: 1946279 - RNA, 19 nt, Artificial Sequence
  Description of Artificial Sequence: Synthetic oligonucleotide
  Antisense strand to SEQ ID NO: 1946278
cuuacuacguguuacuucc

SEQ ID NO: 1946280 - RNA, 19 nt, Artificial Sequence
  Description of Artificial Sequence: Synthetic oligonucleotide
  Sense strand starting at position 48 of SEQ ID NO: 1880156
uaugcugggcauugaugaa

SEQ ID NO: 1946281 - RNA, 19 nt, Artificial Sequence
  Description of Artificial Sequence: Synthetic oligonucleotide
  Antisense strand to SEQ ID NO: 1946280
uucaucaaugcccagcaua

SEQ ID NO: 1946282 - RNA, 19 nt, Artificial Sequence
  Description of Artificial Sequence: Synthetic oligonucleotide
  Sense strand starting at position 58 of SEQ ID NO: 1880156
auugaugaauccuugguuu

SEQ ID NO: 1946283 - RNA, 19 nt, Artificial Sequence
  Description of Artificial Sequence: Synthetic oligonucleotide
  Antisense strand to SEQ ID NO: 1946282
aaaccaaggauucaucaau

SEQ ID NO: 1946284 - RNA, 19 nt, Artificial Sequence
  Description of Artificial Sequence: Synthetic oligonucleotide
  Sense strand starting at position 60 of SEQ ID NO: 1880156
ugaugaauccuugguuuau

SEQ ID NO: 1946285 - RNA, 19 nt, Artificial Sequence
  Description of Artificial Sequence: Synthetic oligonucleotide
  Antisense strand to SEQ ID NO: 1946284
auaaaccaaggauucauca

SEQ ID NO: 1946286 - RNA, 19 nt, Artificial Sequence
  Description of Artificial Sequence: Synthetic oligonucleotide
  Sense strand starting at position 61 of SEQ ID NO: 1880156
gaugaauccuugguuuauu

SEQ ID NO: 1946287 - RNA, 19 nt, Artificial Sequence
  Description of Artificial Sequence: Synthetic oligonucleotide
  Antisense strand to SEQ ID NO: 1946286
aauaaaccaaggauucauc

SEQ ID NO: 1946288 - RNA, 19 nt, Artificial Sequence
  Description of Artificial Sequence: Synthetic oligonucleotide
  Sense strand starting at position 234 of SEQ ID NO: 1880156
aaauaacugcucgaggcuu

SEQ ID NO: 1946289 - RNA, 19 nt, Artificial Sequence
  Description of Artificial Sequence: Synthetic oligonucleotide
  Antisense strand to SEQ ID NO: 1946288
aagccucgagcaguuauuu

SEQ ID NO: 1946290 - RNA, 19 nt, Artificial Sequence
  Description of Artificial Sequence: Synthetic oligonucleotide
  Sense strand starting at position 249 of SEQ ID NO: 1880156
gcuuaacagggucacuaua

SEQ ID NO: 1946291 - RNA, 19 nt, Artificial Sequence
  Description of Artificial Sequence: Synthetic oligonucleotide
  Antisense strand to SEQ ID NO: 1946290
uauagugacccuguuaagc

SEQ ID NO: 1946292 - RNA, 19 nt, Artificial Sequence
  Description of Artificial Sequence: Synthetic oligonucleotide
  Sense strand starting at position 273 of SEQ ID NO: 1880156
ggcucaguucuccaggagu

SEQ ID NO: 1946293 - RNA, 19 nt, Artificial Sequence
  Description of Artificial Sequence: Synthetic oligonucleotide
  Antisense strand to SEQ ID NO: 1946292
acuccuggagaacugagcc

SEQ ID NO: 1946294 - RNA, 19 nt, Artificial Sequence
  Description of Artificial Sequence: Synthetic oligonucleotide
  Sense strand starting at position 334 of SEQ ID NO: 1880156
cccaguuguagagauggca

SEQ ID NO: 1946295 - RNA, 19 nt, Artificial Sequence
  Description of Artificial Sequence: Synthetic oligonucleotide
  Antisense strand to SEQ ID NO: 1946294
ugccaucucuacaacuggg

SEQ ID NO: 1946296 - RNA, 19 nt, Artificial Sequence
  Description of Artificial Sequence: Synthetic oligonucleotide
  Sense strand starting at position 337 of SEQ ID NO: 1880156
aguuguagagauggcauua

SEQ ID NO: 1946297 - RNA, 19 nt, Artificial Sequence
  Description of Artificial Sequence: Synthetic oligonucleotide
  Antisense strand to SEQ ID NO: 1946296
uaaugccaucucuacaacu

SEQ ID NO: 1946298 - RNA, 19 nt, Artificial Sequence
  Description of Artificial Sequence: Synthetic oligonucleotide
  Sense strand starting at position 404 of SEQ ID NO: 1880156
ccaggagcccauugacaaa

SEQ ID NO: 1946299 - RNA, 19 nt, Artificial Sequence
  Description of Artificial Sequence: Synthetic oligonucleotide
  Antisense strand to SEQ ID NO: 1946298
uuugucaaugggcuccugg

SEQ ID NO: 1946300 - RNA, 19 nt, Artificial Sequence
  Description of Artificial Sequence: Synthetic oligonucleotide
  Sense strand starting at position 600 of SEQ ID NO: 1880156
ccagaucaaugucugauca

SEQ ID NO: 1946301 - RNA, 19 nt, Artificial Sequence
  Description of Artificial Sequence: Synthetic oligonucleotide
  Antisense strand to SEQ ID NO: 1946300
ugaucagacauugaucugg

SEQ ID NO: 1946302 - RNA, 19 nt, Artificial Sequence
  Description of Artificial Sequence: Synthetic oligonucleotide
  Sense strand starting at position 653 of SEQ ID NO: 1880156
ugaugucuccuguagucau

SEQ ID NO: 1946303 - RNA, 19 nt, Artificial Sequence
  Description of Artificial Sequence: Synthetic oligonucleotide
  Antisense strand to SEQ ID NO: 1946302
augacuacaggagacauca

SEQ ID NO: 1946304 - RNA, 19 nt, Artificial Sequence
  Description of Artificial Sequence: Synthetic oligonucleotide
  Sense strand starting at position 704 of SEQ ID NO: 1880156
ggcuauaaaucuccagcca

SEQ ID NO: 1946305 - RNA, 19 nt, Artificial Sequence
  Description of Artificial Sequence: Synthetic oligonucleotide
  Antisense strand to SEQ ID NO: 1946304
uggcuggagauuuauagcc

SEQ ID NO: 1946306 - RNA, 19 nt, Artificial Sequence
  Description of Artificial Sequence: Synthetic oligonucleotide
  Sense strand starting at position 820 of SEQ ID NO: 1880156
aguuuaacuaguggcagaa

SEQ ID NO: 1946307 - RNA, 19 nt, Artificial Sequence
  Description of Artificial Sequence: Synthetic oligonucleotide
  Antisense strand to SEQ ID NO: 1946306
uucugccacuaguuaaacu

SEQ ID NO: 1946308 - RNA, 19 nt, Artificial Sequence
  Description of Artificial Sequence: Synthetic oligonucleotide
  Sense strand starting at position 847 of SEQ ID NO: 1880156
uccuuaacaccaugggaau

SEQ ID NO: 1946309 - RNA, 19 nt, Artificial Sequence
  Description of Artificial Sequence: Synthetic oligonucleotide
  Antisense strand to SEQ ID NO: 1946308
auucccaugguguuaagga

SEQ ID NO: 1946310 - RNA, 19 nt, Artificial Sequence
  Description of Artificial Sequence: Synthetic oligonucleotide
  Sense strand starting at position 870 of SEQ ID NO: 1880156
cucccucuccuguaggaga

SEQ ID NO: 1946311 - RNA, 19 nt, Artificial Sequence
  Description of Artificial Sequence: Synthetic oligonucleotide
  Antisense strand to SEQ ID NO: 1946310
ucuccuacaggagagggag

SEQ ID NO: 1946312 - RNA, 19 nt, Artificial Sequence
  Description of Artificial Sequence: Synthetic oligonucleotide
  Sense strand starting at position 1507 of SEQ ID NO: 1880156
cugcaaaguguuuaucaca

SEQ ID NO: 1946313 - RNA, 19 nt, Artificial Sequence
  Description of Artificial Sequence: Synthetic oligonucleotide
  Antisense strand to SEQ ID NO: 1946312
ugugauaaacacuuugcag

SEQ ID NO: 1946314 - RNA, 19 nt, Artificial Sequence
  Description of Artificial Sequence: Synthetic oligonucleotide
  Sense strand starting at position 2031 of SEQ ID NO: 1880156
cagauuagggccugggaaa

SEQ ID NO: 1946315 - RNA, 19 nt, Artificial Sequence
  Description of Artificial Sequence: Synthetic oligonucleotide
  Antisense strand to SEQ ID NO: 1946314
uuucccaggcccuaaucug

SEQ ID NO: 1946316 - RNA, 19 nt, Artificial Sequence
  Description of Artificial Sequence: Synthetic oligonucleotide
  Sense strand starting at position 2032 of SEQ ID NO: 1880156
agauuagggccugggaaau

SEQ ID NO: 1946317 - RNA, 19 nt, Artificial Sequence
  Description of Artificial Sequence: Synthetic oligonucleotide
  Antisense strand to SEQ ID NO: 1946316
auuucccaggcccuaaucu

SEQ ID NO: 1946318 - RNA, 19 nt, Artificial Sequence
  Description of Artificial Sequence: Synthetic oligonucleotide
  Sense strand starting at position 2258 of SEQ ID NO: 1880156
ggugccauucuagaagagu

SEQ ID NO: 1946319 - RNA, 19 nt, Artificial Sequence
  Description of Artificial Sequence: Synthetic oligonucleotide
  Antisense strand to SEQ ID NO: 1946318
acucuucuagaauggcacc

SEQ ID NO: 1946320 - RNA, 19 nt, Artificial Sequence
  Description of Artificial Sequence: Synthetic oligonucleotide
  Sense strand starting at position 2261 of SEQ ID NO: 1880156
gccauucuagaagaguguu

SEQ ID NO: 1946321 - RNA, 19 nt, Artificial Sequence
  Description of Artificial Sequence: Synthetic oligonucleotide
  Antisense strand to SEQ ID NO: 1946320
aacacucuucuagaauggc

SEQ ID NO: 1946322 - RNA, 19 nt, Artificial Sequence
  Description of Artificial Sequence: Synthetic oligonucleotide
  Sense strand starting at position 2264 of SEQ ID NO: 1880156
auucuagaagaguguuaca

SEQ ID NO: 1946323 - RNA, 19 nt, Artificial Sequence
  Description of Artificial Sequence: Synthetic oligonucleotide
  Antisense strand to SEQ ID NO: 1946322
uguaacacucuucuagaau

SEQ ID NO: 1946324 - RNA, 19 nt, Artificial Sequence
  Description of Artificial Sequence: Synthetic oligonucleotide
  Sense strand starting at position 2417 of SEQ ID NO: 1880156
gccaaucauagggaauugu

SEQ ID NO: 1946325 - RNA, 19 nt, Artificial Sequence
  Description of Artificial Sequence: Synthetic oligonucleotide
  Antisense strand to SEQ ID NO: 1946324
acaauucccuaugauuggc

SEQ ID NO: 1946326 - RNA, 19 nt, Artificial Sequence
  Description of Artificial Sequence: Synthetic oligonucleotide
  Sense strand starting at position 2544 of SEQ ID NO: 1880156
gucuguuuccaccacauga

SEQ ID NO: 1946327 - RNA, 19 nt, Artificial Sequence
  Description of Artificial Sequence: Synthetic oligonucleotide
  Antisense strand to SEQ ID NO: 1946326
ucaugugguggaaacagac

SEQ ID NO: 1946328 - RNA, 19 nt, Artificial Sequence
  Description of Artificial Sequence: Synthetic oligonucleotide
  Sense strand starting at position 2566 of SEQ ID NO: 1880156
ggcagauagguucaagggu

SEQ ID NO: 1946329 - RNA, 19 nt, Artificial Sequence
  Description of Artificial Sequence: Synthetic oligonucleotide
  Antisense strand to SEQ ID NO: 1946328
acccuugaaccuaucugcc

SEQ ID NO: 1946330 - RNA, 19 nt, Artificial Sequence
  Description of Artificial Sequence: Synthetic oligonucleotide
  Sense strand starting at position 2658 of SEQ ID NO: 1880156
cgggaaaugggacguagau

SEQ ID NO: 1946331 - RNA, 19 nt, Artificial Sequence
  Description of Artificial Sequence: Synthetic oligonucleotide
  Antisense strand to SEQ ID NO: 1946330
aucuacgucccauuucccg

SEQ ID NO: 1946332 - RNA, 19 nt, Artificial Sequence
  Description of Artificial Sequence: Synthetic oligonucleotide
  Sense strand starting at position 2959 of SEQ ID NO: 1880156
gacucuuagggucauuauc

SEQ ID NO: 1946333 - RNA, 19 nt, Artificial Sequence
  Description of Artificial Sequence: Synthetic oligonucleotide
  Antisense strand to SEQ ID NO: 1946332
gauaaugacccuaagaguc

SEQ ID NO: 1946334 - RNA, 19 nt, Artificial Sequence
  Description of Artificial Sequence: Synthetic oligonucleotide
  Sense strand starting at position 2979 of SEQ ID NO: 1880156
cacuuagugcuuuggagaa

SEQ ID NO: 1946335 - RNA, 19 nt, Artificial Sequence
  Description of Artificial Sequence: Synthetic oligonucleotide
  Antisense strand to SEQ ID NO: 1946334
uucuccaaagcacuaagug

SEQ ID NO: 1946336 - RNA, 19 nt, Artificial Sequence
  Description of Artificial Sequence: Synthetic oligonucleotide
  Sense strand starting at position 3055 of SEQ ID NO: 1880156
ggaauuaacccucgucuau

SEQ ID NO: 1946337 - RNA, 19 nt, Artificial Sequence
  Description of Artificial Sequence: Synthetic oligonucleotide
  Antisense strand to SEQ ID NO: 1946336
auagacgaggguuaauucc

SEQ ID NO: 1946338 - RNA, 19 nt, Artificial Sequence
  Description of Artificial Sequence: Synthetic oligonucleotide
  Sense strand starting at position 3080 of SEQ ID NO: 1880156
agagaucuguaaucucauu

SEQ ID NO: 1946339 - RNA, 19 nt, Artificial Sequence
  Description of Artificial Sequence: Synthetic oligonucleotide
  Antisense strand to SEQ ID NO: 1946338
aaugagauuacagaucucu

SEQ ID NO: 1946340 - RNA, 19 nt, Artificial Sequence
  Description of Artificial Sequence: Synthetic oligonucleotide
  Sense strand starting at position 3085 of SEQ ID NO: 1880156
ucuguaaucucauuaggag

SEQ ID NO: 1946341 - RNA, 19 nt, Artificial Sequence
  Description of Artificial Sequence: Synthetic oligonucleotide
  Antisense strand to SEQ ID NO: 1946340
cuccuaaugagauuacaga

SEQ ID NO: 1946342 - RNA, 19 nt, Artificial Sequence
  Description of Artificial Sequence: Synthetic oligonucleotide
  Sense strand starting at position 3297 of SEQ ID NO: 1880156
cagagcuccugacugagaa

SEQ ID NO: 1946343 - RNA, 19 nt, Artificial Sequence
  Description of Artificial Sequence: Synthetic oligonucleotide
  Antisense strand to SEQ ID NO: 1946342
uucucagucaggagcucug

SEQ ID NO: 1946344 - RNA, 19 nt, Artificial Sequence
  Description of Artificial Sequence: Synthetic oligonucleotide
  Sense strand starting at position 3400 of SEQ ID NO: 1880156
ccagguaccuuugucaaag

SEQ ID NO: 1946345 - RNA, 19 nt, Artificial Sequence
  Description of Artificial Sequence: Synthetic oligonucleotide
  Antisense strand to SEQ ID NO: 1946344
cuuugacaaagguaccugg

SEQ ID NO: 1946346 - RNA, 19 nt, Artificial Sequence
  Description of Artificial Sequence: Synthetic oligonucleotide
  Sense strand starting at position 3490 of SEQ ID NO: 1880156
ugaauacaagucugagagu

SEQ ID NO: 1946347 - RNA, 19 nt, Artificial Sequence
  Description of Artificial Sequence: Synthetic oligonucleotide
  Antisense strand to SEQ ID NO: 1946346
acucucagacuuguauuca

SEQ ID NO: 1946348 - RNA, 19 nt, Artificial Sequence
  Description of Artificial Sequence: Synthetic oligonucleotide
  Sense strand starting at position 3587 of SEQ ID NO: 1880156
aaauaaucaggugguuagu

SEQ ID NO: 1946349 - RNA, 19 nt, Artificial Sequence
  Description of Artificial Sequence: Synthetic oligonucleotide
  Antisense strand to SEQ ID NO: 1946348
acuaaccaccugauuauuu

SEQ ID NO: 1946350 - RNA, 19 nt, Artificial Sequence
  Description of Artificial Sequence: Synthetic oligonucleotide
  Sense strand starting at position 3589 of SEQ ID NO: 1880156
auaaucaggugguuaguua

SEQ ID NO: 1946351 - RNA, 19 nt, Artificial Sequence
  Description of Artificial Sequence: Synthetic oligonucleotide
  Antisense strand to SEQ ID NO: 1946350
uaacuaaccaccugauuau

SEQ ID NO: 1946352 - RNA, 19 nt, Artificial Sequence
  Description of Artificial Sequence: Synthetic oligonucleotide
  Sense strand starting at position 3600 of SEQ ID NO: 1880156
guuaguuacuucccagaag

SEQ ID NO: 1946353 - RNA, 19 nt, Artificial Sequence
  Description of Artificial Sequence: Synthetic oligonucleotide
  Antisense strand to SEQ ID NO: 1946352
cuucugggaaguaacuaac

SEQ ID NO: 1946354 - RNA, 19 nt, Artificial Sequence
  Description of Artificial Sequence: Synthetic oligonucleotide
  Sense strand starting at position 3760 of SEQ ID NO: 1880156
ccaugauauaggugagucu

SEQ ID NO: 1946355 - RNA, 19 nt, Artificial Sequence
  Description of Artificial Sequence: Synthetic oligonucleotide
  Antisense strand to SEQ ID NO: 1946354
agacucaccuauaucaugg

SEQ ID NO: 1946356 - RNA, 19 nt, Artificial Sequence
  Description of Artificial Sequence: Synthetic oligonucleotide
  Sense strand starting at position 3761 of SEQ ID NO: 1880156
caugauauaggugagucuu

SEQ ID NO: 1946357 - RNA, 19 nt, Artificial Sequence
  Description of Artificial Sequence: Synthetic oligonucleotide
  Antisense strand to SEQ ID NO: 1946356
aagacucaccuauaucaug

SEQ ID NO: 1946358 - RNA, 19 nt, Artificial Sequence
  Description of Artificial Sequence: Synthetic oligonucleotide
  Sense strand starting at position 324 of SEQ ID NO: 1880157
gcuagagcgguucagaacu

SEQ ID NO: 1946359 - RNA, 19 nt, Artificial Sequence
  Description of Artificial Sequence: Synthetic oligonucleotide
  Antisense strand to SEQ ID NO: 1946358
aguucugaaccgcucuagc

SEQ ID NO: 1946360 - RNA, 19 nt, Artificial Sequence
  Description of Artificial Sequence: Synthetic oligonucleotide
  Sense strand starting at position 411 of SEQ ID NO: 1880157
agaccuugaccaggucaua

SEQ ID NO: 1946361 - RNA, 19 nt, Artificial Sequence
  Description of Artificial Sequence: Synthetic oligonucleotide
  Antisense strand to SEQ ID NO: 1946360
uaugaccuggucaaggucu

SEQ ID NO: 1946362 - RNA, 19 nt, Artificial Sequence
  Description of Artificial Sequence: Synthetic oligonucleotide
  Sense strand starting at position 416 of SEQ ID NO: 1880157
uugaccaggucauagauaa

SEQ ID NO: 1946363 - RNA, 19 nt, Artificial Sequence
  Description of Artificial Sequence: Synthetic oligonucleotide
  Antisense strand to SEQ ID NO: 1946362
uuaucuaugaccuggucaa

SEQ ID NO: 1946364 - RNA, 19 nt, Artificial Sequence
  Description of Artificial Sequence: Synthetic oligonucleotide
  Sense strand starting at position 719 of SEQ ID NO: 1880157
aggcgaacuucaucauggu

SEQ ID NO: 1946365 - RNA, 19 nt, Artificial Sequence
  Description of Artificial Sequence: Synthetic oligonucleotide
  Antisense strand to SEQ ID NO: 1946364
accaugaugaaguucgccu

SEQ ID NO: 1946366 - RNA, 19 nt, Artificial Sequence
  Description of Artificial Sequence: Synthetic oligonucleotide
  Sense strand starting at position 992 of SEQ ID NO: 1880157
ucuugaagaccucguaaag

SEQ ID NO: 1946367 - RNA, 19 nt, Artificial Sequence
  Description of Artificial Sequence: Synthetic oligonucleotide
  Antisense strand to SEQ ID NO: 1946366
cuuuacgaggucuucaaga

SEQ ID NO: 1946368 - RNA, 19 nt, Artificial Sequence
  Description of Artificial Sequence: Synthetic oligonucleotide
  Sense strand starting at position 1529 of SEQ ID NO: 1880157
ggugugaaggacgguuuaa

SEQ ID NO: 1946369 - RNA, 19 nt, Artificial Sequence
  Description of Artificial Sequence: Synthetic oligonucleotide
  Antisense strand to SEQ ID NO: 1946368
uuaaaccguccuucacacc

SEQ ID NO: 1946370 - RNA, 19 nt, Artificial Sequence
  Description of Artificial Sequence: Synthetic oligonucleotide
  Sense strand starting at position 1909 of SEQ ID NO: 1880157
gguaaagagucgccaugca

SEQ ID NO: 1946371 - RNA, 19 nt, Artificial Sequence
  Description of Artificial Sequence: Synthetic oligonucleotide
  Antisense strand to SEQ ID NO: 1946370
ugcauggcgacucuuuacc

SEQ ID NO: 1946372 - RNA, 19 nt, Artificial Sequence
  Description of Artificial Sequence: Synthetic oligonucleotide
  Sense strand starting at position 1988 of SEQ ID NO: 1880157
uggucaucuccauggcagu

SEQ ID NO: 1946373 - RNA, 19 nt, Artificial Sequence
  Description of Artificial Sequence: Synthetic oligonucleotide
  Antisense strand to SEQ ID NO: 1946372
acugccauggagaugacca

SEQ ID NO: 1946374 - RNA, 19 nt, Artificial Sequence
  Description of Artificial Sequence: Synthetic oligonucleotide
  Sense strand starting at position 2007 of SEQ ID NO: 1880157
gacguuccacggugcgaau

SEQ ID NO: 1946375 - RNA, 19 nt, Artificial Sequence
  Description of Artificial Sequence: Synthetic oligonucleotide
  Antisense strand to SEQ ID NO: 1946374
auucgcaccguggaacguc

SEQ ID NO: 1946376 - RNA, 19 nt, Artificial Sequence
  Description of Artificial Sequence: Synthetic oligonucleotide
  Sense strand starting at position 2043 of SEQ ID NO: 1880157
ggcuuccggccuuacauaa

SEQ ID NO: 1946377 - RNA, 19 nt, Artificial Sequence
  Description of Artificial Sequence: Synthetic oligonucleotide
  Antisense strand to SEQ ID NO: 1946376
uuauguaaggccggaagcc

SEQ ID NO: 1946378 - RNA, 19 nt, Artificial Sequence
  Description of Artificial Sequence: Synthetic oligonucleotide
  Sense strand starting at position 2134 of SEQ ID NO: 1880157
gugggagccuaggaaguau

SEQ ID NO: 1946379 - RNA, 19 nt, Artificial Sequence
  Description of Artificial Sequence: Synthetic oligonucleotide
  Antisense strand to SEQ ID NO: 1946378
auacuuccuaggcucccac

SEQ ID NO: 1946380 - RNA, 19 nt, Artificial Sequence
  Description of Artificial Sequence: Synthetic oligonucleotide
  Sense strand starting at position 2238 of SEQ ID NO: 1880157
auacgaaagugagucagaa

SEQ ID NO: 1946381 - RNA, 19 nt, Artificial Sequence
  Description of Artificial Sequence: Synthetic oligonucleotide
  Antisense strand to SEQ ID NO: 1946380
uucugacucacuuucguau

SEQ ID NO: 1946382 - RNA, 19 nt, Artificial Sequence
  Description of Artificial Sequence: Synthetic oligonucleotide
  Sense strand starting at position 2320 of SEQ ID NO: 1880157
gguauaaaucaguagcaua

SEQ ID NO: 1946383 - RNA, 19 nt, Artificial Sequence
  Description of Artificial Sequence: Synthetic oligonucleotide
  Antisense strand to SEQ ID NO: 1946382
uaugcuacugauuuauacc

SEQ ID NO: 1946384 - RNA, 19 nt, Artificial Sequence
  Description of Artificial Sequence: Synthetic oligonucleotide
  Sense strand starting at position 2710 of SEQ ID NO: 1880157
ugaauaaaguucuagauga

SEQ ID NO: 1946385 - RNA, 19 nt, Artificial Sequence
  Description of Artificial Sequence: Synthetic oligonucleotide
  Antisense strand to SEQ ID NO: 1946384
ucaucuagaacuuuauuca

SEQ ID NO: 1946386 - RNA, 19 nt, Artificial Sequence
  Description of Artificial Sequence: Synthetic oligonucleotide
  Sense strand starting at position 2755 of SEQ ID NO: 1880157
ugaugagguucagaagauu

SEQ ID NO: 1946387 - RNA, 19 nt, Artificial Sequence
  Description of Artificial Sequence: Synthetic oligonucleotide
  Antisense strand to SEQ ID NO: 1946386
aaucuucugaaccucauca

SEQ ID NO: 1946388 - RNA, 19 nt, Artificial Sequence
  Description of Artificial Sequence: Synthetic oligonucleotide
  Sense strand starting at position 2769 of SEQ ID NO: 1880157
agauuucccugaggaagug

SEQ ID NO: 1946389 - RNA, 19 nt, Artificial Sequence
  Description of Artificial Sequence: Synthetic oligonucleotide
  Antisense strand to SEQ ID NO: 1946388
cacuuccucagggaaaucu

SEQ ID NO: 1946390 - RNA, 19 nt, Artificial Sequence
  Description of Artificial Sequence: Synthetic oligonucleotide
  Sense strand starting at position 2781 of SEQ ID NO: 1880157
ggaagugacaaguguagcu

SEQ ID NO: 1946391 - RNA, 19 nt, Artificial Sequence
  Description of Artificial Sequence: Synthetic oligonucleotide
  Antisense strand to SEQ ID NO: 1946390
agcuacacuugucacuucc

SEQ ID NO: 1946392 - RNA, 19 nt, Artificial Sequence
  Description of Artificial Sequence: Synthetic oligonucleotide
  Sense strand starting at position 2880 of SEQ ID NO: 1880157
ugcauuuccuacugaggag

SEQ ID NO: 1946393 - RNA, 19 nt, Artificial Sequence
  Description of Artificial Sequence: Synthetic oligonucleotide
  Antisense strand to SEQ ID NO: 1946392
cuccucaguaggaaaugca

SEQ ID NO: 1946394 - RNA, 19 nt, Artificial Sequence
  Description of Artificial Sequence: Synthetic oligonucleotide
  Sense strand starting at position 2920 of SEQ ID NO: 1880157
ggaaaucagcaaggguuga

SEQ ID NO: 1946395 - RNA, 19 nt, Artificial Sequence
  Description of Artificial Sequence: Synthetic oligonucleotide
  Antisense strand to SEQ ID NO: 1946394
ucaacccuugcugauuucc

SEQ ID NO: 1946396 - RNA, 19 nt, Artificial Sequence
  Description of Artificial Sequence: Synthetic oligonucleotide
  Sense strand starting at position 3019 of SEQ ID NO: 1880157
ggccuaucauucucacaag

SEQ ID NO: 1946397 - RNA, 19 nt, Artificial Sequence
  Description of Artificial Sequence: Synthetic oligonucleotide
  Antisense strand to SEQ ID NO: 1946396
cuugugagaaugauaggcc

SEQ ID NO: 1946398 - RNA, 19 nt, Artificial Sequence
  Description of Artificial Sequence: Synthetic oligonucleotide
  Sense strand starting at position 3035 of SEQ ID NO: 1880157
aagugugauccgcagacca

SEQ ID NO: 1946399 - RNA, 19 nt, Artificial Sequence
  Description of Artificial Sequence: Synthetic oligonucleotide
  Antisense strand to SEQ ID NO: 1946398
uggucugcggaucacacuu

SEQ ID NO: 1946400 - RNA, 19 nt, Artificial Sequence
  Description of Artificial Sequence: Synthetic oligonucleotide
  Sense strand starting at position 3069 of SEQ ID NO: 1880157
ccuggagugcuuuauuaaa

SEQ ID NO: 1946401 - RNA, 19 nt, Artificial Sequence
  Description of Artificial Sequence: Synthetic oligonucleotide
  Antisense strand to SEQ ID NO: 1946400
uuuaauaaagcacuccagg

SEQ ID NO: 1946402 - RNA, 19 nt, Artificial Sequence
  Description of Artificial Sequence: Synthetic oligonucleotide
  Sense strand starting at position 3117 of SEQ ID NO: 1880157
augagaaucucugugcgua

SEQ ID NO: 1946403 - RNA, 19 nt, Artificial Sequence
  Description of Artificial Sequence: Synthetic oligonucleotide
  Antisense strand to SEQ ID NO: 1946402
uacgcacagagauucucau

SEQ ID NO: 1946404 - RNA, 19 nt, Artificial Sequence
  Description of Artificial Sequence: Synthetic oligonucleotide
  Sense strand starting at position 3118 of SEQ ID NO: 1880157
ugagaaucucugugcguag

SEQ ID NO: 1946405 - RNA, 19 nt, Artificial Sequence
  Description of Artificial Sequence: Synthetic oligonucleotide
  Antisense strand to SEQ ID NO: 1946404
cuacgcacagagauucuca

SEQ ID NO: 1946406 - RNA, 19 nt, Artificial Sequence
  Description of Artificial Sequence: Synthetic oligonucleotide
  Sense strand starting at position 3119 of SEQ ID NO: 1880157
gagaaucucugugcguaga

SEQ ID NO: 1946407 - RNA, 19 nt, Artificial Sequence
  Description of Artificial Sequence: Synthetic oligonucleotide
  Antisense strand to SEQ ID NO: 1946406
ucuacgcacagagauucuc

SEQ ID NO: 1946408 - RNA, 19 nt, Artificial Sequence
  Description of Artificial Sequence: Synthetic oligonucleotide
  Sense strand starting at position 3120 of SEQ ID NO: 1880157
agaaucucugugcguagaa

SEQ ID NO: 1946409 - RNA, 19 nt, Artificial Sequence
  Description of Artificial Sequence: Synthetic oligonucleotide
  Antisense strand to SEQ ID NO: 1946408
uucuacgcacagagauucu

SEQ ID NO: 1946410 - RNA, 19 nt, Artificial Sequence
  Description of Artificial Sequence: Synthetic oligonucleotide
  Sense strand starting at position 3121 of SEQ ID NO: 1880157
gaaucucugugcguagaaa

SEQ ID NO: 1946411 - RNA, 19 nt, Artificial Sequence
  Description of Artificial Sequence: Synthetic oligonucleotide
  Antisense strand to SEQ ID NO: 1946410
uuucuacgcacagagauuc

SEQ ID NO: 1946412 - RNA, 19 nt, Artificial Sequence
  Description of Artificial Sequence: Synthetic oligonucleotide
  Sense strand starting at position 3122 of SEQ ID NO: 1880157
aaucucugugcguagaaau

SEQ ID NO: 1946413 - RNA, 19 nt, Artificial Sequence
  Description of Artificial Sequence: Synthetic oligonucleotide
  Antisense strand to SEQ ID NO: 1946412
auuucuacgcacagagauu

SEQ ID NO: 1946414 - RNA, 19 nt, Artificial Sequence
  Description of Artificial Sequence: Synthetic oligonucleotide
  Sense strand starting at position 3475 of SEQ ID NO: 1880157
gggacagacuccugcaaca

SEQ ID NO: 1946415 - RNA, 19 nt, Artificial Sequence
  Description of Artificial Sequence: Synthetic oligonucleotide
  Antisense strand to SEQ ID NO: 1946414
uguugcaggagucuguccc

SEQ ID NO: 1946416 - RNA, 19 nt, Artificial Sequence
  Description of Artificial Sequence: Synthetic oligonucleotide
  Sense strand starting at position 3582 of SEQ ID NO: 1880157
uuaagaaucuggcuuauau

SEQ ID NO: 1946417 - RNA, 19 nt, Artificial Sequence
  Description of Artificial Sequence: Synthetic oligonucleotide
  Antisense strand to SEQ ID NO: 1946416
auauaagccagauucuuaa

SEQ ID NO: 1946418 - RNA, 19 nt, Artificial Sequence
  Description of Artificial Sequence: Synthetic oligonucleotide
  Sense strand starting at position 3593 of SEQ ID NO: 1880157
gcuuauauagcaugucuaa

SEQ ID NO: 1946419 - RNA, 19 nt, Artificial Sequence
  Description of Artificial Sequence: Synthetic oligonucleotide
  Antisense strand to SEQ ID NO: 1946418
uuagacaugcuauauaagc

SEQ ID NO: 1946420 - RNA, 19 nt, Artificial Sequence
  Description of Artificial Sequence: Synthetic oligonucleotide
  Sense strand starting at position 3605 of SEQ ID NO: 1880157
ugucuaacauagcaugaua

SEQ ID NO: 1946421 - RNA, 19 nt, Artificial Sequence
  Description of Artificial Sequence: Synthetic oligonucleotide
  Antisense strand to SEQ ID NO: 1946420
uaucaugcuauguuagaca

SEQ ID NO: 1946422 - RNA, 19 nt, Artificial Sequence
  Description of Artificial Sequence: Synthetic oligonucleotide
  Sense strand starting at position 3669 of SEQ ID NO: 1880157
ggcuccuugaggugagaaa

SEQ ID NO: 1946423 - RNA, 19 nt, Artificial Sequence
  Description of Artificial Sequence: Synthetic oligonucleotide
  Antisense strand to SEQ ID NO: 1946422
uuucucaccucaaggagcc

SEQ ID NO: 1946424 - RNA, 19 nt, Artificial Sequence
  Description of Artificial Sequence: Synthetic oligonucleotide
  Sense strand starting at position 3720 of SEQ ID NO: 1880157
ggaguaaagucugcucaga

SEQ ID NO: 1946425 - RNA, 19 nt, Artificial Sequence
  Description of Artificial Sequence: Synthetic oligonucleotide
  Antisense strand to SEQ ID NO: 1946424
ucugagcagacuuuacucc

SEQ ID NO: 1946426 - RNA, 19 nt, Artificial Sequence
  Description of Artificial Sequence: Synthetic oligonucleotide
  Sense strand starting at position 3722 of SEQ ID NO: 1880157
aguaaagucugcucagauu

SEQ ID NO: 1946427 - RNA, 19 nt, Artificial Sequence
  Description of Artificial Sequence: Synthetic oligonucleotide
  Antisense strand to SEQ ID NO: 1946426
aaucugagcagacuuuacu

SEQ ID NO: 1946428 - RNA, 19 nt, Artificial Sequence
  Description of Artificial Sequence: Synthetic oligonucleotide
  Sense strand starting at position 3731 of SEQ ID NO: 1880157
ugcucagauuccucuggca

SEQ ID NO: 1946429 - RNA, 19 nt, Artificial Sequence
  Description of Artificial Sequence: Synthetic oligonucleotide
  Antisense strand to SEQ ID NO: 1946428
ugccagaggaaucugagca

SEQ ID NO: 1946430 - RNA, 19 nt, Artificial Sequence
  Description of Artificial Sequence: Synthetic oligonucleotide
  Sense strand starting at position 3733 of SEQ ID NO: 1880157
cucagauuccucuggcacu

SEQ ID NO: 1946431 - RNA, 19 nt, Artificial Sequence
  Description of Artificial Sequence: Synthetic oligonucleotide
  Antisense strand to SEQ ID NO: 1946430
agugccagaggaaucugag

SEQ ID NO: 1946432 - RNA, 19 nt, Artificial Sequence
  Description of Artificial Sequence: Synthetic oligonucleotide
  Sense strand starting at position 3753 of SEQ ID NO: 1880157
ucucuaagcugauaaaggu

SEQ ID NO: 1946433 - RNA, 19 nt, Artificial Sequence
  Description of Artificial Sequence: Synthetic oligonucleotide
  Antisense strand to SEQ ID NO: 1946432
accuuuaucagcuuagaga

SEQ ID NO: 1946434 - RNA, 19 nt, Artificial Sequence
  Description of Artificial Sequence: Synthetic oligonucleotide
  Sense strand starting at position 3760 of SEQ ID NO: 1880157
gcugauaaagguuguaaag

SEQ ID NO: 1946435 - RNA, 19 nt, Artificial Sequence
  Description of Artificial Sequence: Synthetic oligonucleotide
  Antisense strand to SEQ ID NO: 1946434
cuuuacaaccuuuaucagc

SEQ ID NO: 1946436 - RNA, 19 nt, Artificial Sequence
  Description of Artificial Sequence: Synthetic oligonucleotide
  Sense strand starting at position 3762 of SEQ ID NO: 1880157
ugauaaagguuguaaagaa

SEQ ID NO: 1946437 - RNA, 19 nt, Artificial Sequence
  Description of Artificial Sequence: Synthetic oligonucleotide
  Antisense strand to SEQ ID NO: 1946436
uucuuuacaaccuuuauca

SEQ ID NO: 1946438 - RNA, 19 nt, Artificial Sequence
  Description of Artificial Sequence: Synthetic oligonucleotide
  Sense strand starting at position 116 of SEQ ID NO: 1880158
auaagauucuggcucgaga

SEQ ID NO: 1946439 - RNA, 19 nt, Artificial Sequence
  Description of Artificial Sequence: Synthetic oligonucleotide
  Antisense strand to SEQ ID NO: 1946438
ucucgagccagaaucuuau

SEQ ID NO: 1946440 - RNA, 19 nt, Artificial Sequence
  Description of Artificial Sequence: Synthetic oligonucleotide
  Sense strand starting at position 118 of SEQ ID NO: 1880158
aagauucuggcucgagaga

SEQ ID NO: 1946441 - RNA, 19 nt, Artificial Sequence
  Description of Artificial Sequence: Synthetic oligonucleotide
  Antisense strand to SEQ ID NO: 1946440
ucucucgagccagaaucuu

SEQ ID NO: 1946442 - RNA, 19 nt, Artificial Sequence
  Description of Artificial Sequence: Synthetic oligonucleotide
  Sense strand starting at position 136 of SEQ ID NO: 1880158
aagguagugucaccuagaa

SEQ ID NO: 1946443 - RNA, 19 nt, Artificial Sequence
  Description of Artificial Sequence: Synthetic oligonucleotide
  Antisense strand to SEQ ID NO: 1946442
uucuaggugacacuaccuu

SEQ ID NO: 1946444 - RNA, 19 nt, Artificial Sequence
  Description of Artificial Sequence: Synthetic oligonucleotide
  Sense strand starting at position 138 of SEQ ID NO: 1880158
gguagugucaccuagaagg

SEQ ID NO: 1946445 - RNA, 19 nt, Artificial Sequence
  Description of Artificial Sequence: Synthetic oligonucleotide
  Antisense strand to SEQ ID NO: 1946444
ccuucuaggugacacuacc

SEQ ID NO: 1946446 - RNA, 19 nt, Artificial Sequence
  Description of Artificial Sequence: Synthetic oligonucleotide
  Sense strand starting at position 148 of SEQ ID NO: 1880158
ccuagaaggcaaggucaua

SEQ ID NO: 1946447 - RNA, 19 nt, Artificial Sequence
  Description of Artificial Sequence: Synthetic oligonucleotide
  Antisense strand to SEQ ID NO: 1946446
uaugaccuugccuucuagg

SEQ ID NO: 1946448 - RNA, 19 nt, Artificial Sequence
  Description of Artificial Sequence: Synthetic oligonucleotide
  Sense strand starting at position 188 of SEQ ID NO: 1880158
ucaggagauccauguugag

SEQ ID NO: 1946449 - RNA, 19 nt, Artificial Sequence
  Description of Artificial Sequence: Synthetic oligonucleotide
  Antisense strand to SEQ ID NO: 1946448
cucaacauggaucuccuga

SEQ ID NO: 1946450 - RNA, 19 nt, Artificial Sequence
  Description of Artificial Sequence: Synthetic oligonucleotide
  Sense strand starting at position 213 of SEQ ID NO: 1880158
uuccauuacucaguagugu

SEQ ID NO: 1946451 - RNA, 19 nt, Artificial Sequence
  Description of Artificial Sequence: Synthetic oligonucleotide
  Antisense strand to SEQ ID NO: 1946450
acacuacugaguaauggaa

SEQ ID NO: 1946452 - RNA, 19 nt, Artificial Sequence
  Description of Artificial Sequence: Synthetic oligonucleotide
  Sense strand starting at position 214 of SEQ ID NO: 1880158
uccauuacucaguagugua

SEQ ID NO: 1946453 - RNA, 19 nt, Artificial Sequence
  Description of Artificial Sequence: Synthetic oligonucleotide
  Antisense strand to SEQ ID NO: 1946452
uacacuacugaguaaugga

SEQ ID NO: 1946454 - RNA, 19 nt, Artificial Sequence
  Description of Artificial Sequence: Synthetic oligonucleotide
  Sense strand starting at position 219 of SEQ ID NO: 1880158
uacucaguaguguaagacu

SEQ ID NO: 1946455 - RNA, 19 nt, Artificial Sequence
  Description of Artificial Sequence: Synthetic oligonucleotide
  Antisense strand to SEQ ID NO: 1946454
agucuuacacuacugagua

SEQ ID NO: 1946456 - RNA, 19 nt, Artificial Sequence
  Description of Artificial Sequence: Synthetic oligonucleotide
  Sense strand starting at position 264 of SEQ ID NO: 1880158
aguuuccuugucuguugaa

SEQ ID NO: 1946457 - RNA, 19 nt, Artificial Sequence
  Description of Artificial Sequence: Synthetic oligonucleotide
  Antisense strand to SEQ ID NO: 1946456
uucaacagacaaggaaacu

SEQ ID NO: 1946458 - RNA, 19 nt, Artificial Sequence
  Description of Artificial Sequence: Synthetic oligonucleotide
  Sense strand starting at position 273 of SEQ ID NO: 1880158
gucuguugaaucgggcuaa

SEQ ID NO: 1946459 - RNA, 19 nt, Artificial Sequence
  Description of Artificial Sequence: Synthetic oligonucleotide
  Antisense strand to SEQ ID NO: 1946458
uuagcccgauucaacagac

SEQ ID NO: 1946460 - RNA, 19 nt, Artificial Sequence
  Description of Artificial Sequence: Synthetic oligonucleotide
  Sense strand starting at position 277 of SEQ ID NO: 1880158
guugaaucgggcuaauaaa

SEQ ID NO: 1946461 - RNA, 19 nt, Artificial Sequence
  Description of Artificial Sequence: Synthetic oligonucleotide
  Antisense strand to SEQ ID NO: 1946460
uuuauuagcccgauucaac

SEQ ID NO: 1946462 - RNA, 19 nt, Artificial Sequence
  Description of Artificial Sequence: Synthetic oligonucleotide
  Sense strand starting at position 298 of SEQ ID NO: 1880158
cuaucaaugcuguauauga

SEQ ID NO: 1946463 - RNA, 19 nt, Artificial Sequence
  Description of Artificial Sequence: Synthetic oligonucleotide
  Antisense strand to SEQ ID NO: 1946462
ucauauacagcauugauag

SEQ ID NO: 1946464 - RNA, 19 nt, Artificial Sequence
  Description of Artificial Sequence: Synthetic oligonucleotide
  Sense strand starting at position 300 of SEQ ID NO: 1880158
aucaaugcuguauaugaua

SEQ ID NO: 1946465 - RNA, 19 nt, Artificial Sequence
  Description of Artificial Sequence: Synthetic oligonucleotide
  Antisense strand to SEQ ID NO: 1946464
uaucauauacagcauugau

SEQ ID NO: 1946466 - RNA, 19 nt, Artificial Sequence
  Description of Artificial Sequence: Synthetic oligonucleotide
  Sense strand starting at position 455 of SEQ ID NO: 1880158
ggaugagcugucagcgauu

SEQ ID NO: 1946467 - RNA, 19 nt, Artificial Sequence
  Description of Artificial Sequence: Synthetic oligonucleotide
  Antisense strand to SEQ ID NO: 1946466
aaucgcugacagcucaucc

SEQ ID NO: 1946468 - RNA, 19 nt, Artificial Sequence
  Description of Artificial Sequence: Synthetic oligonucleotide
  Sense strand starting at position 458 of SEQ ID NO: 1880158
ugagcugucagcgauucca

SEQ ID NO: 1946469 - RNA, 19 nt, Artificial Sequence
  Description of Artificial Sequence: Synthetic oligonucleotide
  Antisense strand to SEQ ID NO: 1946468
uggaaucgcugacagcuca

SEQ ID NO: 1946470 - RNA, 19 nt, Artificial Sequence
  Description of Artificial Sequence: Synthetic oligonucleotide
  Sense strand starting at position 851 of SEQ ID NO: 1880158
ugaguuaagaauugugaag

SEQ ID NO: 1946471 - RNA, 19 nt, Artificial Sequence
  Description of Artificial Sequence: Synthetic oligonucleotide
  Antisense strand to SEQ ID NO: 1946470
cuucacaauucuuaacuca

SEQ ID NO: 1946472 - RNA, 19 nt, Artificial Sequence
  Description of Artificial Sequence: Synthetic oligonucleotide
  Sense strand starting at position 1161 of SEQ ID NO: 1880158
uucuguucucccuauugca

SEQ ID NO: 1946473 - RNA, 19 nt, Artificial Sequence
  Description of Artificial Sequence: Synthetic oligonucleotide
  Antisense strand to SEQ ID NO: 1946472
ugcaauagggagaacagaa

SEQ ID NO: 1946474 - RNA, 19 nt, Artificial Sequence
  Description of Artificial Sequence: Synthetic oligonucleotide
  Sense strand starting at position 1210 of SEQ ID NO: 1880158
acgugaauauauguacaug

SEQ ID NO: 1946475 - RNA, 19 nt, Artificial Sequence
  Description of Artificial Sequence: Synthetic oligonucleotide
  Antisense strand to SEQ ID NO: 1946474
cauguacauauauucacgu

SEQ ID NO: 1946476 - RNA, 19 nt, Artificial Sequence
  Description of Artificial Sequence: Synthetic oligonucleotide
  Sense strand starting at position 1213 of SEQ ID NO: 1880158
ugaauauauguacaugcuu

SEQ ID NO: 1946477 - RNA, 19 nt, Artificial Sequence
  Description of Artificial Sequence: Synthetic oligonucleotide
  Antisense strand to SEQ ID NO: 1946476
aagcauguacauauauuca

SEQ ID NO: 1946478 - RNA, 19 nt, Artificial Sequence
  Description of Artificial Sequence: Synthetic oligonucleotide
  Sense strand starting at position 1374 of SEQ ID NO: 1880158
cgugaucccucaucacaga

SEQ ID NO: 1946479 - RNA, 19 nt, Artificial Sequence
  Description of Artificial Sequence: Synthetic oligonucleotide
  Antisense strand to SEQ ID NO: 1946478
ucugugaugagggaucacg

SEQ ID NO: 1946480 - RNA, 19 nt, Artificial Sequence
  Description of Artificial Sequence: Synthetic oligonucleotide
  Sense strand starting at position 1412 of SEQ ID NO: 1880158
caagauacuccgugggaca

SEQ ID NO: 1946481 - RNA, 19 nt, Artificial Sequence
  Description of Artificial Sequence: Synthetic oligonucleotide
  Antisense strand to SEQ ID NO: 1946480
ugucccacggaguaucuug

SEQ ID NO: 1946482 - RNA, 19 nt, Artificial Sequence
  Description of Artificial Sequence: Synthetic oligonucleotide
  Sense strand starting at position 1470 of SEQ ID NO: 1880158
aacucugggucuucgaaca

SEQ ID NO: 1946483 - RNA, 19 nt, Artificial Sequence
  Description of Artificial Sequence: Synthetic oligonucleotide
  Antisense strand to SEQ ID NO: 1946482
uguucgaagacccagaguu

SEQ ID NO: 1946484 - RNA, 19 nt, Artificial Sequence
  Description of Artificial Sequence: Synthetic oligonucleotide
  Sense strand starting at position 1502 of SEQ ID NO: 1880158
gcuucuucgcugucagcga

SEQ ID NO: 1946485 - RNA, 19 nt, Artificial Sequence
  Description of Artificial Sequence: Synthetic oligonucleotide
  Antisense strand to SEQ ID NO: 1946484
ucgcugacagcgaagaagc

SEQ ID NO: 1946486 - RNA, 19 nt, Artificial Sequence
  Description of Artificial Sequence: Synthetic oligonucleotide
  Sense strand starting at position 1629 of SEQ ID NO: 1880158
aagugcagauccucagaga

SEQ ID NO: 1946487 - RNA, 19 nt, Artificial Sequence
  Description of Artificial Sequence: Synthetic oligonucleotide
  Antisense strand to SEQ ID NO: 1946486
ucucugaggaucugcacuu

SEQ ID NO: 1946488 - RNA, 19 nt, Artificial Sequence
  Description of Artificial Sequence: Synthetic oligonucleotide
  Sense strand starting at position 1645 of SEQ ID NO: 1880158
agaccuuaguugucaggga

SEQ ID NO: 1946489 - RNA, 19 nt, Artificial Sequence
  Description of Artificial Sequence: Synthetic oligonucleotide
  Antisense strand to SEQ ID NO: 1946488
ucccugacaacuaaggucu

SEQ ID NO: 1946490 - RNA, 19 nt, Artificial Sequence
  Description of Artificial Sequence: Synthetic oligonucleotide
  Sense strand starting at position 2066 of SEQ ID NO: 1880158
ucuuucuaauuggcggaaa

SEQ ID NO: 1946491 - RNA, 19 nt, Artificial Sequence
  Description of Artificial Sequence: Synthetic oligonucleotide
  Antisense strand to SEQ ID NO: 1946490
uuuccgccaauuagaaaga

SEQ ID NO: 1946492 - RNA, 19 nt, Artificial Sequence
  Description of Artificial Sequence: Synthetic oligonucleotide
  Sense strand starting at position 2068 of SEQ ID NO: 1880158
uuucuaauuggcggaaauu

SEQ ID NO: 1946493 - RNA, 19 nt, Artificial Sequence
  Description of Artificial Sequence: Synthetic oligonucleotide
  Antisense strand to SEQ ID NO: 1946492
aauuuccgccaauuagaaa

SEQ ID NO: 1946494 - RNA, 19 nt, Artificial Sequence
  Description of Artificial Sequence: Synthetic oligonucleotide
  Sense strand starting at position 2069 of SEQ ID NO: 1880158
uucuaauuggcggaaauug

SEQ ID NO: 1946495 - RNA, 19 nt, Artificial Sequence
  Description of Artificial Sequence: Synthetic oligonucleotide
  Antisense strand to SEQ ID NO: 1946494
caauuuccgccaauuagaa

SEQ ID NO: 1946496 - RNA, 19 nt, Artificial Sequence
  Description of Artificial Sequence: Synthetic oligonucleotide
  Sense strand starting at position 2090 of SEQ ID NO: 1880158
ucaccagacgcuuauugaa

SEQ ID NO: 1946497 - RNA, 19 nt, Artificial Sequence
  Description of Artificial Sequence: Synthetic oligonucleotide
  Antisense strand to SEQ ID NO: 1946496
uucaauaagcgucugguga

SEQ ID NO: 1946498 - RNA, 19 nt, Artificial Sequence
  Description of Artificial Sequence: Synthetic oligonucleotide
  Sense strand starting at position 2092 of SEQ ID NO: 1880158
accagacgcuuauugaaga

SEQ ID NO: 1946499 - RNA, 19 nt, Artificial Sequence
  Description of Artificial Sequence: Synthetic oligonucleotide
  Antisense strand to SEQ ID NO: 1946498
ucuucaauaagcgucuggu

SEQ ID NO: 1946500 - RNA, 19 nt, Artificial Sequence
  Description of Artificial Sequence: Synthetic oligonucleotide
  Sense strand starting at position 2128 of SEQ ID NO: 1880158
ucaccuuguguuugggagu

SEQ ID NO: 1946501 - RNA, 19 nt, Artificial Sequence
  Description of Artificial Sequence: Synthetic oligonucleotide
  Antisense strand to SEQ ID NO: 1946500
acucccaaacacaagguga

SEQ ID NO: 1946502 - RNA, 19 nt, Artificial Sequence
  Description of Artificial Sequence: Synthetic oligonucleotide
  Sense strand starting at position 2134 of SEQ ID NO: 1880158
uguguuugggaguguugga

SEQ ID NO: 1946503 - RNA, 19 nt, Artificial Sequence
  Description of Artificial Sequence: Synthetic oligonucleotide
  Antisense strand to SEQ ID NO: 1946502
uccaacacucccaaacaca

SEQ ID NO: 1946504 - RNA, 19 nt, Artificial Sequence
  Description of Artificial Sequence: Synthetic oligonucleotide
  Sense strand starting at position 2302 of SEQ ID NO: 1880158
aauaaauuagccgggagua

SEQ ID NO: 1946505 - RNA, 19 nt, Artificial Sequence
  Description of Artificial Sequence: Synthetic oligonucleotide
  Antisense strand to SEQ ID NO: 1946504
uacucccggcuaauuuauu

SEQ ID NO: 1946506 - RNA, 19 nt, Artificial Sequence
  Description of Artificial Sequence: Synthetic oligonucleotide
  Sense strand starting at position 2303 of SEQ ID NO: 1880158
auaaauuagccgggaguaa

SEQ ID NO: 1946507 - RNA, 19 nt, Artificial Sequence
  Description of Artificial Sequence: Synthetic oligonucleotide
  Antisense strand to SEQ ID NO: 1946506
uuacucccggcuaauuuau

SEQ ID NO: 1946508 - RNA, 19 nt, Artificial Sequence
  Description of Artificial Sequence: Synthetic oligonucleotide
  Sense strand starting at position 2304 of SEQ ID NO: 1880158
uaaauuagccgggaguaau

SEQ ID NO: 1946509 - RNA, 19 nt, Artificial Sequence
  Description of Artificial Sequence: Synthetic oligonucleotide
  Antisense strand to SEQ ID NO: 1946508
auuacucccggcuaauuua

SEQ ID NO: 1946510 - RNA, 19 nt, Artificial Sequence
  Description of Artificial Sequence: Synthetic oligonucleotide
  Sense strand starting at position 2710 of SEQ ID NO: 1880158
aggaaucacugaggauaca

SEQ ID NO: 1946511 - RNA, 19 nt, Artificial Sequence
  Description of Artificial Sequence: Synthetic oligonucleotide
  Antisense strand to SEQ ID NO: 1946510
uguauccucagugauuccu

SEQ ID NO: 1946512 - RNA, 19 nt, Artificial Sequence
  Description of Artificial Sequence: Synthetic oligonucleotide
  Sense strand starting at position 3138 of SEQ ID NO: 1880158
auuucugcuuaucagagau

SEQ ID NO: 1946513 - RNA, 19 nt, Artificial Sequence
  Description of Artificial Sequence: Synthetic oligonucleotide
  Antisense strand to SEQ ID NO: 1946512
aucucugauaagcagaaau

SEQ ID NO: 1946514 - RNA, 19 nt, Artificial Sequence
  Description of Artificial Sequence: Synthetic oligonucleotide
  Sense strand starting at position 3140 of SEQ ID NO: 1880158
uucugcuuaucagagauuu

SEQ ID NO: 1946515 - RNA, 19 nt, Artificial Sequence
  Description of Artificial Sequence: Synthetic oligonucleotide
  Antisense strand to SEQ ID NO: 1946514
aaaucucugauaagcagaa

SEQ ID NO: 1946516 - RNA, 19 nt, Artificial Sequence
  Description of Artificial Sequence: Synthetic oligonucleotide
  Sense strand starting at position 3845 of SEQ ID NO: 1880158
uuuggagccugucuauagu

SEQ ID NO: 1946517 - RNA, 19 nt, Artificial Sequence
  Description of Artificial Sequence: Synthetic oligonucleotide
  Antisense strand to SEQ ID NO: 1946516
acuauagacaggcuccaaa

SEQ ID NO: 1946518 - RNA, 19 nt, Artificial Sequence
  Description of Artificial Sequence: Synthetic oligonucleotide
  Sense strand starting at position 132 of SEQ ID NO: 1880159
ugagcaaauguguggaugu

SEQ ID NO: 1946519 - RNA, 19 nt, Artificial Sequence
  Description of Artificial Sequence: Synthetic oligonucleotide
  Antisense strand to SEQ ID NO: 1946518
acauccacacauuugcuca

SEQ ID NO: 1946520 - RNA, 19 nt, Artificial Sequence
  Description of Artificial Sequence: Synthetic oligonucleotide
  Sense strand starting at position 134 of SEQ ID NO: 1880159
agcaaauguguggauguga

SEQ ID NO: 1946521 - RNA, 19 nt, Artificial Sequence
  Description of Artificial Sequence: Synthetic oligonucleotide
  Antisense strand to SEQ ID NO: 1946520
ucacauccacacauuugcu

SEQ ID NO: 1946522 - RNA, 19 nt, Artificial Sequence
  Description of Artificial Sequence: Synthetic oligonucleotide
  Sense strand starting at position 147 of SEQ ID NO: 1880159
augugaguugcugguguga

SEQ ID NO: 1946523 - RNA, 19 nt, Artificial Sequence
  Description of Artificial Sequence: Synthetic oligonucleotide
  Antisense strand to SEQ ID NO: 1946522
ucacaccagcaacucacau

SEQ ID NO: 1946524 - RNA, 19 nt, Artificial Sequence
  Description of Artificial Sequence: Synthetic oligonucleotide
  Sense strand starting at position 179 of SEQ ID NO: 1880159
gcguguaaacuggugccau

SEQ ID NO: 1946525 - RNA, 19 nt, Artificial Sequence
  Description of Artificial Sequence: Synthetic oligonucleotide
  Antisense strand to SEQ ID NO: 1946524
auggcaccaguuuacacgc

SEQ ID NO: 1946526 - RNA, 19 nt, Artificial Sequence
  Description of Artificial Sequence: Synthetic oligonucleotide
  Sense strand starting at position 586 of SEQ ID NO: 1880159
cgguuuccgacagacagua

SEQ ID NO: 1946527 - RNA, 19 nt, Artificial Sequence
  Description of Artificial Sequence: Synthetic oligonucleotide
  Antisense strand to SEQ ID NO: 1946526
uacugucugucggaaaccg

SEQ ID NO: 1946528 - RNA, 19 nt, Artificial Sequence
  Description of Artificial Sequence: Synthetic oligonucleotide
  Sense strand starting at position 639 of SEQ ID NO: 1880159
ccucaagacuuugaucaga

SEQ ID NO: 1946529 - RNA, 19 nt, Artificial Sequence
  Description of Artificial Sequence: Synthetic oligonucleotide
  Antisense strand to SEQ ID NO: 1946528
ucugaucaaagucuugagg

SEQ ID NO: 1946530 - RNA, 19 nt, Artificial Sequence
  Description of Artificial Sequence: Synthetic oligonucleotide
  Sense strand starting at position 644 of SEQ ID NO: 1880159
agacuuugaucagaccuuu

SEQ ID NO: 1946531 - RNA, 19 nt, Artificial Sequence
  Description of Artificial Sequence: Synthetic oligonucleotide
  Antisense strand to SEQ ID NO: 1946530
aaaggucugaucaaagucu

SEQ ID NO: 1946532 - RNA, 19 nt, Artificial Sequence
  Description of Artificial Sequence: Synthetic oligonucleotide
  Sense strand starting at position 693 of SEQ ID NO: 1880159
caaguaaggcacuggucua

SEQ ID NO: 1946533 - RNA, 19 nt, Artificial Sequence
  Description of Artificial Sequence: Synthetic oligonucleotide
  Antisense strand to SEQ ID NO: 1946532
uagaccagugccuuacuug

SEQ ID NO: 1946534 - RNA, 19 nt, Artificial Sequence
  Description of Artificial Sequence: Synthetic oligonucleotide
  Sense strand starting at position 722 of SEQ ID NO: 1880159
ggugaagucagaugauagc

SEQ ID NO: 1946535 - RNA, 19 nt, Artificial Sequence
  Description of Artificial Sequence: Synthetic oligonucleotide
  Antisense strand to SEQ ID NO: 1946534
gcuaucaucugacuucacc

SEQ ID NO: 1946536 - RNA, 19 nt, Artificial Sequence
  Description of Artificial Sequence: Synthetic oligonucleotide
  Sense strand starting at position 725 of SEQ ID NO: 1880159
gaagucagaugauagcaau

SEQ ID NO: 1946537 - RNA, 19 nt, Artificial Sequence
  Description of Artificial Sequence: Synthetic oligonucleotide
  Antisense strand to SEQ ID NO: 1946536
auugcuaucaucugacuuc

SEQ ID NO: 1946538 - RNA, 19 nt, Artificial Sequence
  Description of Artificial Sequence: Synthetic oligonucleotide
  Sense strand starting at position 895 of SEQ ID NO: 1880159
ugagaacuuccaugcuaaa

SEQ ID NO: 1946539 - RNA, 19 nt, Artificial Sequence
  Description of Artificial Sequence: Synthetic oligonucleotide
  Antisense strand to SEQ ID NO: 1946538
uuuagcauggaaguucuca

SEQ ID NO: 1946540 - RNA, 19 nt, Artificial Sequence
  Description of Artificial Sequence: Synthetic oligonucleotide
  Sense strand starting at position 918 of SEQ ID NO: 1880159
ucaugagcuuaucuggaaa

SEQ ID NO: 1946541 - RNA, 19 nt, Artificial Sequence
  Description of Artificial Sequence: Synthetic oligonucleotide
  Antisense strand to SEQ ID NO: 1946540
uuuccagauaagcucauga

SEQ ID NO: 1946542 - RNA, 19 nt, Artificial Sequence
  Description of Artificial Sequence: Synthetic oligonucleotide
  Sense strand starting at position 920 of SEQ ID NO: 1880159
augagcuuaucuggaaauu

SEQ ID NO: 1946543 - RNA, 19 nt, Artificial Sequence
  Description of Artificial Sequence: Synthetic oligonucleotide
  Antisense strand to SEQ ID NO: 1946542
aauuuccagauaagcucau

SEQ ID NO: 1946544 - RNA, 19 nt, Artificial Sequence
  Description of Artificial Sequence: Synthetic oligonucleotide
  Sense strand starting at position 946 of SEQ ID NO: 1880159
uccugauagcaaugagauu

SEQ ID NO: 1946545 - RNA, 19 nt, Artificial Sequence
  Description of Artificial Sequence: Synthetic oligonucleotide
  Antisense strand to SEQ ID NO: 1946544
aaucucauugcuaucagga

SEQ ID NO: 1946546 - RNA, 19 nt, Artificial Sequence
  Description of Artificial Sequence: Synthetic oligonucleotide
  Sense strand starting at position 955 of SEQ ID NO: 1880159
caaugagauugguguggga

SEQ ID NO: 1946547 - RNA, 19 nt, Artificial Sequence
  Description of Artificial Sequence: Synthetic oligonucleotide
  Antisense strand to SEQ ID NO: 1946546
ucccacaccaaucucauug

SEQ ID NO: 1946548 - RNA, 19 nt, Artificial Sequence
  Description of Artificial Sequence: Synthetic oligonucleotide
  Sense strand starting at position 957 of SEQ ID NO: 1880159
augagauuggugugggaau

SEQ ID NO: 1946549 - RNA, 19 nt, Artificial Sequence
  Description of Artificial Sequence: Synthetic oligonucleotide
  Antisense strand to SEQ ID NO: 1946548
auucccacaccaaucucau

SEQ ID NO: 1946550 - RNA, 19 nt, Artificial Sequence
  Description of Artificial Sequence: Synthetic oligonucleotide
  Sense strand starting at position 958 of SEQ ID NO: 1880159
ugagauuggugugggaauu

SEQ ID NO: 1946551 - RNA, 19 nt, Artificial Sequence
  Description of Artificial Sequence: Synthetic oligonucleotide
  Antisense strand to SEQ ID NO: 1946550
aauucccacaccaaucuca

SEQ ID NO: 1946552 - RNA, 19 nt, Artificial Sequence
  Description of Artificial Sequence: Synthetic oligonucleotide
  Sense strand starting at position 959 of SEQ ID NO: 1880159
gagauuggugugggaauuc

SEQ ID NO: 1946553 - RNA, 19 nt, Artificial Sequence
  Description of Artificial Sequence: Synthetic oligonucleotide
  Antisense strand to SEQ ID NO: 1946552
gaauucccacaccaaucuc

SEQ ID NO: 1946554 - RNA, 19 nt, Artificial Sequence
  Description of Artificial Sequence: Synthetic oligonucleotide
  Sense strand starting at position 1383 of SEQ ID NO: 1880159
cgaggucuaucauguccuu

SEQ ID NO: 1946555 - RNA, 19 nt, Artificial Sequence
  Description of Artificial Sequence: Synthetic oligonucleotide
  Antisense strand to SEQ ID NO: 1946554
aaggacaugauagaccucg

SEQ ID NO: 1946556 - RNA, 19 nt, Artificial Sequence
  Description of Artificial Sequence: Synthetic oligonucleotide
  Sense strand starting at position 1386 of SEQ ID NO: 1880159
ggucuaucauguccuuaau

SEQ ID NO: 1946557 - RNA, 19 nt, Artificial Sequence
  Description of Artificial Sequence: Synthetic oligonucleotide
  Antisense strand to SEQ ID NO: 1946556
auuaaggacaugauagacc

SEQ ID NO: 1946558 - RNA, 19 nt, Artificial Sequence
  Description of Artificial Sequence: Synthetic oligonucleotide
  Sense strand starting at position 1388 of SEQ ID NO: 1880159
ucuaucauguccuuaaugu

SEQ ID NO: 1946559 - RNA, 19 nt, Artificial Sequence
  Description of Artificial Sequence: Synthetic oligonucleotide
  Antisense strand to SEQ ID NO: 1946558
acauuaaggacaugauaga

SEQ ID NO: 1946560 - RNA, 19 nt, Artificial Sequence
  Description of Artificial Sequence: Synthetic oligonucleotide
  Sense strand starting at position 1389 of SEQ ID NO: 1880159
cuaucauguccuuaauguc

SEQ ID NO: 1946561 - RNA, 19 nt, Artificial Sequence
  Description of Artificial Sequence: Synthetic oligonucleotide
  Antisense strand to SEQ ID NO: 1946560
gacauuaaggacaugauag

SEQ ID NO: 1946562 - RNA, 19 nt, Artificial Sequence
  Description of Artificial Sequence: Synthetic oligonucleotide
  Sense strand starting at position 1395 of SEQ ID NO: 1880159
uguccuuaauguccuauca

SEQ ID NO: 1946563 - RNA, 19 nt, Artificial Sequence
  Description of Artificial Sequence: Synthetic oligonucleotide
  Antisense strand to SEQ ID NO: 1946562
ugauaggacauuaaggaca

SEQ ID NO: 1946564 - RNA, 19 nt, Artificial Sequence
  Description of Artificial Sequence: Synthetic oligonucleotide
  Sense strand starting at position 1407 of SEQ ID NO: 1880159
ccuaucaugucagucaguu

SEQ ID NO: 1946565 - RNA, 19 nt, Artificial Sequence
  Description of Artificial Sequence: Synthetic oligonucleotide
  Antisense strand to SEQ ID NO: 1946564
aacugacugacaugauagg

SEQ ID NO: 1946566 - RNA, 19 nt, Artificial Sequence
  Description of Artificial Sequence: Synthetic oligonucleotide
  Sense strand starting at position 1469 of SEQ ID NO: 1880159
ucaccugaacugugagaag

SEQ ID NO: 1946567 - RNA, 19 nt, Artificial Sequence
  Description of Artificial Sequence: Synthetic oligonucleotide
  Antisense strand to SEQ ID NO: 1946566
cuucucacaguucagguga

SEQ ID NO: 1946568 - RNA, 19 nt, Artificial Sequence
  Description of Artificial Sequence: Synthetic oligonucleotide
  Sense strand starting at position 3114 of SEQ ID NO: 1880159
ggcccagucucgcggagau

SEQ ID NO: 1946569 - RNA, 19 nt, Artificial Sequence
  Description of Artificial Sequence: Synthetic oligonucleotide
  Antisense strand to SEQ ID NO: 1946568
aucuccgcgagacugggcc

SEQ ID NO: 1946570 - RNA, 19 nt, Artificial Sequence
  Description of Artificial Sequence: Synthetic oligonucleotide
  Sense strand starting at position 3126 of SEQ ID NO: 1880159
cggagauguguuccgcgga

SEQ ID NO: 1946571 - RNA, 19 nt, Artificial Sequence
  Description of Artificial Sequence: Synthetic oligonucleotide
  Antisense strand to SEQ ID NO: 1946570
uccgcggaacacaucuccg

SEQ ID NO: 1946572 - RNA, 19 nt, Artificial Sequence
  Description of Artificial Sequence: Synthetic oligonucleotide
  Sense strand starting at position 3222 of SEQ ID NO: 1880159
gcugaagucuagcgggaag

SEQ ID NO: 1946573 - RNA, 19 nt, Artificial Sequence
  Description of Artificial Sequence: Synthetic oligonucleotide
  Antisense strand to SEQ ID NO: 1946572
cuucccgcuagacuucagc

SEQ ID NO: 1946574 - RNA, 19 nt, Artificial Sequence
  Description of Artificial Sequence: Synthetic oligonucleotide
  Sense strand starting at position 3378 of SEQ ID NO: 1880159
ucaacaaauuguuugugga

SEQ ID NO: 1946575 - RNA, 19 nt, Artificial Sequence
  Description of Artificial Sequence: Synthetic oligonucleotide
  Antisense strand to SEQ ID NO: 1946574
uccacaaacaauuuguuga

SEQ ID NO: 1946576 - RNA, 19 nt, Artificial Sequence
  Description of Artificial Sequence: Synthetic oligonucleotide
  Sense strand starting at position 3480 of SEQ ID NO: 1880159
uugaaacggucccucuuua

SEQ ID NO: 1946577 - RNA, 19 nt, Artificial Sequence
  Description of Artificial Sequence: Synthetic oligonucleotide
  Antisense strand to SEQ ID NO: 1946576
uaaagagggaccguuucaa

SEQ ID NO: 1946578 - RNA, 19 nt, Artificial Sequence
  Description of Artificial Sequence: Synthetic oligonucleotide
  Sense strand starting at position 3487 of SEQ ID NO: 1880159
ggucccucuuuaucuauua

SEQ ID NO: 1946579 - RNA, 19 nt, Artificial Sequence
  Description of Artificial Sequence: Synthetic oligonucleotide
  Antisense strand to SEQ ID NO: 1946578
uaauagauaaagagggacc

SEQ ID NO: 1946580 - RNA, 19 nt, Artificial Sequence
  Description of Artificial Sequence: Synthetic oligonucleotide
  Sense strand starting at position 3786 of SEQ ID NO: 1880159
gaucuuaggugagccguaa

SEQ ID NO: 1946581 - RNA, 19 nt, Artificial Sequence
  Description of Artificial Sequence: Synthetic oligonucleotide
  Antisense strand to SEQ ID NO: 1946580
uuacggcucaccuaagauc

SEQ ID NO: 1946582 - RNA, 19 nt, Artificial Sequence
  Description of Artificial Sequence: Synthetic oligonucleotide
  Sense strand starting at position 3797 of SEQ ID NO: 1880159
agccguaagggugggauau

SEQ ID NO: 1946583 - RNA, 19 nt, Artificial Sequence
  Description of Artificial Sequence: Synthetic oligonucleotide
  Antisense strand to SEQ ID NO: 1946582
auaucccacccuuacggcu

SEQ ID NO: 1946584 - RNA, 19 nt, Artificial Sequence
  Description of Artificial Sequence: Synthetic oligonucleotide
  Sense strand starting at position 3798 of SEQ ID NO: 1880159
gccguaagggugggauaua

SEQ ID NO: 1946585 - RNA, 19 nt, Artificial Sequence
  Description of Artificial Sequence: Synthetic oligonucleotide
  Antisense strand to SEQ ID NO: 1946584
uauaucccacccuuacggc

SEQ ID NO: 1946586 - RNA, 19 nt, Artificial Sequence
  Description of Artificial Sequence: Synthetic oligonucleotide
  Sense strand starting at position 3799 of SEQ ID NO: 1880159
ccguaagggugggauauaa

SEQ ID NO: 1946587 - RNA, 19 nt, Artificial Sequence
  Description of Artificial Sequence: Synthetic oligonucleotide
  Antisense strand to SEQ ID NO: 1946586
uuauaucccacccuuacgg

SEQ ID NO: 1946588 - RNA, 19 nt, Artificial Sequence
  Description of Artificial Sequence: Synthetic oligonucleotide
  Sense strand starting at position 3833 of SEQ ID NO: 1880159
gugagaagcucuucuagcu

SEQ ID NO: 1946589 - RNA, 19 nt, Artificial Sequence
  Description of Artificial Sequence: Synthetic oligonucleotide
  Antisense strand to SEQ ID NO: 1946588
agcuagaagagcuucucac

SEQ ID NO: 1946590 - RNA, 19 nt, Artificial Sequence
  Description of Artificial Sequence: Synthetic oligonucleotide
  Sense strand starting at position 3939 of SEQ ID NO: 1880159
ugucacuuccucuagggaa

SEQ ID NO: 1946591 - RNA, 19 nt, Artificial Sequence
  Description of Artificial Sequence: Synthetic oligonucleotide
  Antisense strand to SEQ ID NO: 1946590
uucccuagaggaagugaca

SEQ ID NO: 1946592 - RNA, 19 nt, Artificial Sequence
  Description of Artificial Sequence: Synthetic oligonucleotide
  Sense strand starting at position 3972 of SEQ ID NO: 1880159
agcauacuaugccagacau

SEQ ID NO: 1946593 - RNA, 19 nt, Artificial Sequence
  Description of Artificial Sequence: Synthetic oligonucleotide
  Antisense strand to SEQ ID NO: 1946592
augucuggcauaguaugcu

SEQ ID NO: 1946594 - RNA, 19 nt, Artificial Sequence
  Description of Artificial Sequence: Synthetic oligonucleotide
  Sense strand starting at position 81 of SEQ ID NO: 1880160
gcaauauccacggaccagu

SEQ ID NO: 1946595 - RNA, 19 nt, Artificial Sequence
  Description of Artificial Sequence: Synthetic oligonucleotide
  Antisense strand to SEQ ID NO: 1946594
acugguccguggauauugc

SEQ ID NO: 1946596 - RNA, 19 nt, Artificial Sequence
  Description of Artificial Sequence: Synthetic oligonucleotide
  Sense strand starting at position 153 of SEQ ID NO: 1880160
aguauuagcaugggucuca

SEQ ID NO: 1946597 - RNA, 19 nt, Artificial Sequence
  Description of Artificial Sequence: Synthetic oligonucleotide
  Antisense strand to SEQ ID NO: 1946596
ugagacccaugcuaauacu

SEQ ID NO: 1946598 - RNA, 19 nt, Artificial Sequence
  Description of Artificial Sequence: Synthetic oligonucleotide
  Sense strand starting at position 210 of SEQ ID NO: 1880160
ucaggaucaaugcagugau

SEQ ID NO: 1946599 - RNA, 19 nt, Artificial Sequence
  Description of Artificial Sequence: Synthetic oligonucleotide
  Antisense strand to SEQ ID NO: 1946598
aucacugcauugauccuga

SEQ ID NO: 1946600 - RNA, 19 nt, Artificial Sequence
  Description of Artificial Sequence: Synthetic oligonucleotide
  Sense strand starting at position 213 of SEQ ID NO: 1880160
ggaucaaugcagugauuac

SEQ ID NO: 1946601 - RNA, 19 nt, Artificial Sequence
  Description of Artificial Sequence: Synthetic oligonucleotide
  Antisense strand to SEQ ID NO: 1946600
guaaucacugcauugaucc

SEQ ID NO: 1946602 - RNA, 19 nt, Artificial Sequence
  Description of Artificial Sequence: Synthetic oligonucleotide
  Sense strand starting at position 217 of SEQ ID NO: 1880160
caaugcagugauuacgaaa

SEQ ID NO: 1946603 - RNA, 19 nt, Artificial Sequence
  Description of Artificial Sequence: Synthetic oligonucleotide
  Antisense strand to SEQ ID NO: 1946602
uuucguaaucacugcauug

SEQ ID NO: 1946604 - RNA, 19 nt, Artificial Sequence
  Description of Artificial Sequence: Synthetic oligonucleotide
  Sense strand starting at position 224 of SEQ ID NO: 1880160
gugauuacgaaagagaguu

SEQ ID NO: 1946605 - RNA, 19 nt, Artificial Sequence
  Description of Artificial Sequence: Synthetic oligonucleotide
  Antisense strand to SEQ ID NO: 1946604
aacucucuuucguaaucac

SEQ ID NO: 1946606 - RNA, 19 nt, Artificial Sequence
  Description of Artificial Sequence: Synthetic oligonucleotide
  Sense strand starting at position 242 of SEQ ID NO: 1880160
ugggucauagucuaugcau

SEQ ID NO: 1946607 - RNA, 19 nt, Artificial Sequence
  Description of Artificial Sequence: Synthetic oligonucleotide
  Antisense strand to SEQ ID NO: 1946606
augcauagacuaugaccca

SEQ ID NO: 1946608 - RNA, 19 nt, Artificial Sequence
  Description of Artificial Sequence: Synthetic oligonucleotide
  Sense strand starting at position 244 of SEQ ID NO: 1880160
ggucauagucuaugcaugu

SEQ ID NO: 1946609 - RNA, 19 nt, Artificial Sequence
  Description of Artificial Sequence: Synthetic oligonucleotide
  Antisense strand to SEQ ID NO: 1946608
acaugcauagacuaugacc

SEQ ID NO: 1946610 - RNA, 19 nt, Artificial Sequence
  Description of Artificial Sequence: Synthetic oligonucleotide
  Sense strand starting at position 248 of SEQ ID NO: 1880160
auagucuaugcauguaacu

SEQ ID NO: 1946611 - RNA, 19 nt, Artificial Sequence
  Description of Artificial Sequence: Synthetic oligonucleotide
  Antisense strand to SEQ ID NO: 1946610
aguuacaugcauagacuau

SEQ ID NO: 1946612 - RNA, 19 nt, Artificial Sequence
  Description of Artificial Sequence: Synthetic oligonucleotide
  Sense strand starting at position 322 of SEQ ID NO: 1880160
acaguccaugugugucaua

SEQ ID NO: 1946613 - RNA, 19 nt, Artificial Sequence
  Description of Artificial Sequence: Synthetic oligonucleotide
  Antisense strand to SEQ ID NO: 1946612
uaugacacacauggacugu

SEQ ID NO: 1946614 - RNA, 19 nt, Artificial Sequence
  Description of Artificial Sequence: Synthetic oligonucleotide
  Sense strand starting at position 427 of SEQ ID NO: 1880160
ggcucauucuggguguuga

SEQ ID NO: 1946615 - RNA, 19 nt, Artificial Sequence
  Description of Artificial Sequence: Synthetic oligonucleotide
  Antisense strand to SEQ ID NO: 1946614
ucaacacccagaaugagcc

SEQ ID NO: 1946616 - RNA, 19 nt, Artificial Sequence
  Description of Artificial Sequence: Synthetic oligonucleotide
  Sense strand starting at position 428 of SEQ ID NO: 1880160
gcucauucuggguguugaa

SEQ ID NO: 1946617 - RNA, 19 nt, Artificial Sequence
  Description of Artificial Sequence: Synthetic oligonucleotide
  Antisense strand to SEQ ID NO: 1946616
uucaacacccagaaugagc

SEQ ID NO: 1946618 - RNA, 19 nt, Artificial Sequence
  Description of Artificial Sequence: Synthetic oligonucleotide
  Sense strand starting at position 435 of SEQ ID NO: 1880160
cuggguguugaaggaauca

SEQ ID NO: 1946619 - RNA, 19 nt, Artificial Sequence
  Description of Artificial Sequence: Synthetic oligonucleotide
  Antisense strand to SEQ ID NO: 1946618
ugauuccuucaacacccag

SEQ ID NO: 1946620 - RNA, 19 nt, Artificial Sequence
  Description of Artificial Sequence: Synthetic oligonucleotide
  Sense strand starting at position 473 of SEQ ID NO: 1880160
ccuuguguuguguauaagu

SEQ ID NO: 1946621 - RNA, 19 nt, Artificial Sequence
  Description of Artificial Sequence: Synthetic oligonucleotide
  Antisense strand to SEQ ID NO: 1946620
acuuauacacaacacaagg

SEQ ID NO: 1946622 - RNA, 19 nt, Artificial Sequence
  Description of Artificial Sequence: Synthetic oligonucleotide
  Sense strand starting at position 611 of SEQ ID NO: 1880160
uugaaauagccuugugauc

SEQ ID NO: 1946623 - RNA, 19 nt, Artificial Sequence
  Description of Artificial Sequence: Synthetic oligonucleotide
  Antisense strand to SEQ ID NO: 1946622
gaucacaaggcuauuucaa

SEQ ID NO: 1946624 - RNA, 19 nt, Artificial Sequence
  Description of Artificial Sequence: Synthetic oligonucleotide
  Sense strand starting at position 807 of SEQ ID NO: 1880160
cugccuguugcccaauaau

SEQ ID NO: 1946625 - RNA, 19 nt, Artificial Sequence
  Description of Artificial Sequence: Synthetic oligonucleotide
  Antisense strand to SEQ ID NO: 1946624
auuauugggcaacaggcag

SEQ ID NO: 1946626 - RNA, 19 nt, Artificial Sequence
  Description of Artificial Sequence: Synthetic oligonucleotide
  Sense strand starting at position 810 of SEQ ID NO: 1880160
ccuguugcccaauaauagu

SEQ ID NO: 1946627 - RNA, 19 nt, Artificial Sequence
  Description of Artificial Sequence: Synthetic oligonucleotide
  Antisense strand to SEQ ID NO: 1946626
acuauuauugggcaacagg

SEQ ID NO: 1946628 - RNA, 19 nt, Artificial Sequence
  Description of Artificial Sequence: Synthetic oligonucleotide
  Sense strand starting at position 827 of SEQ ID NO: 1880160
gugaccgauuuccaagaaa

SEQ ID NO: 1946629 - RNA, 19 nt, Artificial Sequence
  Description of Artificial Sequence: Synthetic oligonucleotide
  Antisense strand to SEQ ID NO: 1946628
uuucuuggaaaucggucac

SEQ ID NO: 1946630 - RNA, 19 nt, Artificial Sequence
  Description of Artificial Sequence: Synthetic oligonucleotide
  Sense strand starting at position 949 of SEQ ID NO: 1880160
agagaaguaaagcgggauu

SEQ ID NO: 1946631 - RNA, 19 nt, Artificial Sequence
  Description of Artificial Sequence: Synthetic oligonucleotide
  Antisense strand to SEQ ID NO: 1946630
aaucccgcuuuacuucucu

SEQ ID NO: 1946632 - RNA, 19 nt, Artificial Sequence
  Description of Artificial Sequence: Synthetic oligonucleotide
  Sense strand starting at position 951 of SEQ ID NO: 1880160
agaaguaaagcgggauugu

SEQ ID NO: 1946633 - RNA, 19 nt, Artificial Sequence
  Description of Artificial Sequence: Synthetic oligonucleotide
  Antisense strand to SEQ ID NO: 1946632
acaaucccgcuuuacuucu

SEQ ID NO: 1946634 - RNA, 19 nt, Artificial Sequence
  Description of Artificial Sequence: Synthetic oligonucleotide
  Sense strand starting at position 952 of SEQ ID NO: 1880160
gaaguaaagcgggauugua

SEQ ID NO: 1946635 - RNA, 19 nt, Artificial Sequence
  Description of Artificial Sequence: Synthetic oligonucleotide
  Antisense strand to SEQ ID NO: 1946634
uacaaucccgcuuuacuuc

SEQ ID NO: 1946636 - RNA, 19 nt, Artificial Sequence
  Description of Artificial Sequence: Synthetic oligonucleotide
  Sense strand starting at position 960 of SEQ ID NO: 1880160
gcgggauuguaaagggaau

SEQ ID NO: 1946637 - RNA, 19 nt, Artificial Sequence
  Description of Artificial Sequence: Synthetic oligonucleotide
  Antisense strand to SEQ ID NO: 1946636
auucccuuuacaaucccgc

SEQ ID NO: 1946638 - RNA, 19 nt, Artificial Sequence
  Description of Artificial Sequence: Synthetic oligonucleotide
  Sense strand starting at position 1376 of SEQ ID NO: 1880160
ggcgcaguccuggaagaug

SEQ ID NO: 1946639 - RNA, 19 nt, Artificial Sequence
  Description of Artificial Sequence: Synthetic oligonucleotide
  Antisense strand to SEQ ID NO: 1946638
caucuuccaggacugcgcc

SEQ ID NO: 1946640 - RNA, 19 nt, Artificial Sequence
  Description of Artificial Sequence: Synthetic oligonucleotide
  Sense strand starting at position 1648 of SEQ ID NO: 1880160
ggucggagagcauguugaa

SEQ ID NO: 1946641 - RNA, 19 nt, Artificial Sequence
  Description of Artificial Sequence: Synthetic oligonucleotide
  Antisense strand to SEQ ID NO: 1946640
uucaacaugcucuccgacc

SEQ ID NO: 1946642 - RNA, 19 nt, Artificial Sequence
  Description of Artificial Sequence: Synthetic oligonucleotide
  Sense strand starting at position 2085 of SEQ ID NO: 1880160
gaugucucucuuuguggga

SEQ ID NO: 1946643 - RNA, 19 nt, Artificial Sequence
  Description of Artificial Sequence: Synthetic oligonucleotide
  Antisense strand to SEQ ID NO: 1946642
ucccacaaagagagacauc

SEQ ID NO: 1946644 - RNA, 19 nt, Artificial Sequence
  Description of Artificial Sequence: Synthetic oligonucleotide
  Sense strand starting at position 2140 of SEQ ID NO: 1880160
gggcgugucuggacgucaa

SEQ ID NO: 1946645 - RNA, 19 nt, Artificial Sequence
  Description of Artificial Sequence: Synthetic oligonucleotide
  Antisense strand to SEQ ID NO: 1946644
uugacguccagacacgccc

SEQ ID NO: 1946646 - RNA, 19 nt, Artificial Sequence
  Description of Artificial Sequence: Synthetic oligonucleotide
  Sense strand starting at position 2144 of SEQ ID NO: 1880160
gugucuggacgucaaucuu

SEQ ID NO: 1946647 - RNA, 19 nt, Artificial Sequence
  Description of Artificial Sequence: Synthetic oligonucleotide
  Antisense strand to SEQ ID NO: 1946646
aagauugacguccagacac

SEQ ID NO: 1946648 - RNA, 19 nt, Artificial Sequence
  Description of Artificial Sequence: Synthetic oligonucleotide
  Sense strand starting at position 2239 of SEQ ID NO: 1880160
ccuguugacucagucauaa

SEQ ID NO: 1946649 - RNA, 19 nt, Artificial Sequence
  Description of Artificial Sequence: Synthetic oligonucleotide
  Antisense strand to SEQ ID NO: 1946648
uuaugacugagucaacagg

SEQ ID NO: 1946650 - RNA, 19 nt, Artificial Sequence
  Description of Artificial Sequence: Synthetic oligonucleotide
  Sense strand starting at position 2422 of SEQ ID NO: 1880160
cgugaaaugugaccucauc

SEQ ID NO: 1946651 - RNA, 19 nt, Artificial Sequence
  Description of Artificial Sequence: Synthetic oligonucleotide
  Antisense strand to SEQ ID NO: 1946650
gaugaggucacauuucacg

SEQ ID NO: 1946652 - RNA, 19 nt, Artificial Sequence
  Description of Artificial Sequence: Synthetic oligonucleotide
  Sense strand starting at position 2528 of SEQ ID NO: 1880160
gcaggaucguuccuauuac

SEQ ID NO: 1946653 - RNA, 19 nt, Artificial Sequence
  Description of Artificial Sequence: Synthetic oligonucleotide
  Antisense strand to SEQ ID NO: 1946652
guaauaggaacgauccugc

SEQ ID NO: 1946654 - RNA, 19 nt, Artificial Sequence
  Description of Artificial Sequence: Synthetic oligonucleotide
  Sense strand starting at position 2580 of SEQ ID NO: 1880160
ucaggaucuucgcugucaa

SEQ ID NO: 1946655 - RNA, 19 nt, Artificial Sequence
  Description of Artificial Sequence: Synthetic oligonucleotide
  Antisense strand to SEQ ID NO: 1946654
uugacagcgaagauccuga

SEQ ID NO: 1946656 - RNA, 19 nt, Artificial Sequence
  Description of Artificial Sequence: Synthetic oligonucleotide
  Sense strand starting at position 2581 of SEQ ID NO: 1880160
caggaucuucgcugucaag

SEQ ID NO: 1946657 - RNA, 19 nt, Artificial Sequence
  Description of Artificial Sequence: Synthetic oligonucleotide
  Antisense strand to SEQ ID NO: 1946656
cuugacagcgaagauccug

SEQ ID NO: 1946658 - RNA, 19 nt, Artificial Sequence
  Description of Artificial Sequence: Synthetic oligonucleotide
  Sense strand starting at position 2600 of SEQ ID NO: 1880160
gcuuccuucccugggugaa

SEQ ID NO: 1946659 - RNA, 19 nt, Artificial Sequence
  Description of Artificial Sequence: Synthetic oligonucleotide
  Antisense strand to SEQ ID NO: 1946658
uucacccagggaaggaagc

SEQ ID NO: 1946660 - RNA, 19 nt, Artificial Sequence
  Description of Artificial Sequence: Synthetic oligonucleotide
  Sense strand starting at position 2601 of SEQ ID NO: 1880160
cuuccuucccugggugaau

SEQ ID NO: 1946661 - RNA, 19 nt, Artificial Sequence
  Description of Artificial Sequence: Synthetic oligonucleotide
  Antisense strand to SEQ ID NO: 1946660
auucacccagggaaggaag

SEQ ID NO: 1946662 - RNA, 19 nt, Artificial Sequence
  Description of Artificial Sequence: Synthetic oligonucleotide
  Sense strand starting at position 2693 of SEQ ID NO: 1880160
uacuuugugguagacacaa

SEQ ID NO: 1946663 - RNA, 19 nt, Artificial Sequence
  Description of Artificial Sequence: Synthetic oligonucleotide
  Antisense strand to SEQ ID NO: 1946662
uugugucuaccacaaagua

SEQ ID NO: 1946664 - RNA, 19 nt, Artificial Sequence
  Description of Artificial Sequence: Synthetic oligonucleotide
  Sense strand starting at position 2828 of SEQ ID NO: 1880160
aguacaaucgacugaccua

SEQ ID NO: 1946665 - RNA, 19 nt, Artificial Sequence
  Description of Artificial Sequence: Synthetic oligonucleotide
  Antisense strand to SEQ ID NO: 1946664
uaggucagucgauuguacu

SEQ ID NO: 1946666 - RNA, 19 nt, Artificial Sequence
  Description of Artificial Sequence: Synthetic oligonucleotide
  Sense strand starting at position 2841 of SEQ ID NO: 1880160
gaccuacaugaagguuuau

SEQ ID NO: 1946667 - RNA, 19 nt, Artificial Sequence
  Description of Artificial Sequence: Synthetic oligonucleotide
  Antisense strand to SEQ ID NO: 1946666
auaaaccuucauguagguc

SEQ ID NO: 1946668 - RNA, 19 nt, Artificial Sequence
  Description of Artificial Sequence: Synthetic oligonucleotide
  Sense strand starting at position 3167 of SEQ ID NO: 1880160
ggccaagacucuucuauug

SEQ ID NO: 1946669 - RNA, 19 nt, Artificial Sequence
  Description of Artificial Sequence: Synthetic oligonucleotide
  Antisense strand to SEQ ID NO: 1946668
caauagaagagucuuggcc

SEQ ID NO: 1946670 - RNA, 19 nt, Artificial Sequence
  Description of Artificial Sequence: Synthetic oligonucleotide
  Sense strand starting at position 3210 of SEQ ID NO: 1880160
aguuauccagaagguaacu

SEQ ID NO: 1946671 - RNA, 19 nt, Artificial Sequence
  Description of Artificial Sequence: Synthetic oligonucleotide
  Antisense strand to SEQ ID NO: 1946670
aguuaccuucuggauaacu

SEQ ID NO: 1946672 - RNA, 19 nt, Artificial Sequence
  Description of Artificial Sequence: Synthetic oligonucleotide
  Sense strand starting at position 3389 of SEQ ID NO: 1880160
gcagucuggucaucucuau

SEQ ID NO: 1946673 - RNA, 19 nt, Artificial Sequence
  Description of Artificial Sequence: Synthetic oligonucleotide
  Antisense strand to SEQ ID NO: 1946672
auagagaugaccagacugc

SEQ ID NO: 1946674 - RNA, 19 nt, Artificial Sequence
  Description of Artificial Sequence: Synthetic oligonucleotide
  Sense strand starting at position 80 of SEQ ID NO: 1880161
ccagcaggcuuuguguuua

SEQ ID NO: 1946675 - RNA, 19 nt, Artificial Sequence
  Description of Artificial Sequence: Synthetic oligonucleotide
  Antisense strand to SEQ ID NO: 1946674
uaaacacaaagccugcugg

SEQ ID NO: 1946676 - RNA, 19 nt, Artificial Sequence
  Description of Artificial Sequence: Synthetic oligonucleotide
  Sense strand starting at position 115 of SEQ ID NO: 1880161
ggguuugcucaugggauga

SEQ ID NO: 1946677 - RNA, 19 nt, Artificial Sequence
  Description of Artificial Sequence: Synthetic oligonucleotide
  Antisense strand to SEQ ID NO: 1946676
ucaucccaugagcaaaccc

SEQ ID NO: 1946678 - RNA, 19 nt, Artificial Sequence
  Description of Artificial Sequence: Synthetic oligonucleotide
  Sense strand starting at position 206 of SEQ ID NO: 1880161
ucagaucacuggcaacuuu

SEQ ID NO: 1946679 - RNA, 19 nt, Artificial Sequence
  Description of Artificial Sequence: Synthetic oligonucleotide
  Antisense strand to SEQ ID NO: 1946678
aaaguugccagugaucuga

SEQ ID NO: 1946680 - RNA, 19 nt, Artificial Sequence
  Description of Artificial Sequence: Synthetic oligonucleotide
  Sense strand starting at position 267 of SEQ ID NO: 1880161
guaaauuguggcugccuca

SEQ ID NO: 1946681 - RNA, 19 nt, Artificial Sequence
  Description of Artificial Sequence: Synthetic oligonucleotide
  Antisense strand to SEQ ID NO: 1946680
ugaggcagccacaauuuac

SEQ ID NO: 1946682 - RNA, 19 nt, Artificial Sequence
  Description of Artificial Sequence: Synthetic oligonucleotide
  Sense strand starting at position 270 of SEQ ID NO: 1880161
aauuguggcugccucagaa

SEQ ID NO: 1946683 - RNA, 19 nt, Artificial Sequence
  Description of Artificial Sequence: Synthetic oligonucleotide
  Antisense strand to SEQ ID NO: 1946682
uucugaggcagccacaauu

SEQ ID NO: 1946684 - RNA, 19 nt, Artificial Sequence
  Description of Artificial Sequence: Synthetic oligonucleotide
  Sense strand starting at position 461 of SEQ ID NO: 1880161
ggccucaguuaccuggaua

SEQ ID NO: 1946685 - RNA, 19 nt, Artificial Sequence
  Description of Artificial Sequence: Synthetic oligonucleotide
  Antisense strand to SEQ ID NO: 1946684
uauccagguaacugaggcc

SEQ ID NO: 1946686 - RNA, 19 nt, Artificial Sequence
  Description of Artificial Sequence: Synthetic oligonucleotide
  Sense strand starting at position 661 of SEQ ID NO: 1880161
aagaauacgccuugugcuu

SEQ ID NO: 1946687 - RNA, 19 nt, Artificial Sequence
  Description of Artificial Sequence: Synthetic oligonucleotide
  Antisense strand to SEQ ID NO: 1946686
aagcacaaggcguauucuu

SEQ ID NO: 1946688 - RNA, 19 nt, Artificial Sequence
  Description of Artificial Sequence: Synthetic oligonucleotide
  Sense strand starting at position 667 of SEQ ID NO: 1880161
acgccuugugcuuauccau

SEQ ID NO: 1946689 - RNA, 19 nt, Artificial Sequence
  Description of Artificial Sequence: Synthetic oligonucleotide
  Antisense strand to SEQ ID NO: 1946688
auggauaagcacaaggcgu

SEQ ID NO: 1946690 - RNA, 19 nt, Artificial Sequence
  Description of Artificial Sequence: Synthetic oligonucleotide
  Sense strand starting at position 674 of SEQ ID NO: 1880161
gugcuuauccauugcagag

SEQ ID NO: 1946691 - RNA, 19 nt, Artificial Sequence
  Description of Artificial Sequence: Synthetic oligonucleotide
  Antisense strand to SEQ ID NO: 1946690
cucugcaauggauaagcac

SEQ ID NO: 1946692 - RNA, 19 nt, Artificial Sequence
  Description of Artificial Sequence: Synthetic oligonucleotide
  Sense strand starting at position 955 of SEQ ID NO: 1880161
gguucuugacccuagcagu

SEQ ID NO: 1946693 - RNA, 19 nt, Artificial Sequence
  Description of Artificial Sequence: Synthetic oligonucleotide
  Antisense strand to SEQ ID NO: 1946692
acugcuagggucaagaacc

SEQ ID NO: 1946694 - RNA, 19 nt, Artificial Sequence
  Description of Artificial Sequence: Synthetic oligonucleotide
  Sense strand starting at position 996 of SEQ ID NO: 1880161
gcguacuguuccucccaga

SEQ ID NO: 1946695 - RNA, 19 nt, Artificial Sequence
  Description of Artificial Sequence: Synthetic oligonucleotide
  Antisense strand to SEQ ID NO: 1946694
ucugggaggaacaguacgc

SEQ ID NO: 1946696 - RNA, 19 nt, Artificial Sequence
  Description of Artificial Sequence: Synthetic oligonucleotide
  Sense strand starting at position 1086 of SEQ ID NO: 1880161
ggagaaguguagcuuucga

SEQ ID NO: 1946697 - RNA, 19 nt, Artificial Sequence
  Description of Artificial Sequence: Synthetic oligonucleotide
  Antisense strand to SEQ ID NO: 1946696
ucgaaagcuacacuucucc

SEQ ID NO: 1946698 - RNA, 19 nt, Artificial Sequence
  Description of Artificial Sequence: Synthetic oligonucleotide
  Sense strand starting at position 1319 of SEQ ID NO: 1880161
ccacucuucccauaggagu

SEQ ID NO: 1946699 - RNA, 19 nt, Artificial Sequence
  Description of Artificial Sequence: Synthetic oligonucleotide
  Antisense strand to SEQ ID NO: 1946698
acuccuaugggaagagugg

SEQ ID NO: 1946700 - RNA, 19 nt, Artificial Sequence
  Description of Artificial Sequence: Synthetic oligonucleotide
  Sense strand starting at position 1361 of SEQ ID NO: 1880161
ggcuguauugauuaguaca

SEQ ID NO: 1946701 - RNA, 19 nt, Artificial Sequence
  Description of Artificial Sequence: Synthetic oligonucleotide
  Antisense strand to SEQ ID NO: 1946700
uguacuaaucaauacagcc

SEQ ID NO: 1946702 - RNA, 19 nt, Artificial Sequence
  Description of Artificial Sequence: Synthetic oligonucleotide
  Sense strand starting at position 1363 of SEQ ID NO: 1880161
cuguauugauuaguacaau

SEQ ID NO: 1946703 - RNA, 19 nt, Artificial Sequence
  Description of Artificial Sequence: Synthetic oligonucleotide
  Antisense strand to SEQ ID NO: 1946702
auuguacuaaucaauacag

SEQ ID NO: 1946704 - RNA, 19 nt, Artificial Sequence
  Description of Artificial Sequence: Synthetic oligonucleotide
  Sense strand starting at position 1548 of SEQ ID NO: 1880161
gcaacuuucugggucacuu

SEQ ID NO: 1946705 - RNA, 19 nt, Artificial Sequence
  Description of Artificial Sequence: Synthetic oligonucleotide
  Antisense strand to SEQ ID NO: 1946704
aagugacccagaaaguugc

SEQ ID NO: 1946706 - RNA, 19 nt, Artificial Sequence
  Description of Artificial Sequence: Synthetic oligonucleotide
  Sense strand starting at position 2002 of SEQ ID NO: 1880161
ccuuguucccagcaaguaa

SEQ ID NO: 1946707 - RNA, 19 nt, Artificial Sequence
  Description of Artificial Sequence: Synthetic oligonucleotide
  Antisense strand to SEQ ID NO: 1946706
uuacuugcugggaacaagg

SEQ ID NO: 1946708 - RNA, 19 nt, Artificial Sequence
  Description of Artificial Sequence: Synthetic oligonucleotide
  Sense strand starting at position 2168 of SEQ ID NO: 1880161
aggguaguugggugucuga

SEQ ID NO: 1946709 - RNA, 19 nt, Artificial Sequence
  Description of Artificial Sequence: Synthetic oligonucleotide
  Antisense strand to SEQ ID NO: 1946708
ucagacacccaacuacccu

SEQ ID NO: 1946710 - RNA, 19 nt, Artificial Sequence
  Description of Artificial Sequence: Synthetic oligonucleotide
  Sense strand starting at position 2171 of SEQ ID NO: 1880161
guaguugggugucugauga

SEQ ID NO: 1946711 - RNA, 19 nt, Artificial Sequence
  Description of Artificial Sequence: Synthetic oligonucleotide
  Antisense strand to SEQ ID NO: 1946710
ucaucagacacccaacuac

SEQ ID NO: 1946712 - RNA, 19 nt, Artificial Sequence
  Description of Artificial Sequence: Synthetic oligonucleotide
  Sense strand starting at position 2380 of SEQ ID NO: 1880161
ggcgucuuccuaggagaau

SEQ ID NO: 1946713 - RNA, 19 nt, Artificial Sequence
  Description of Artificial Sequence: Synthetic oligonucleotide
  Antisense strand to SEQ ID NO: 1946712
auucuccuaggaagacgcc

SEQ ID NO: 1946714 - RNA, 19 nt, Artificial Sequence
  Description of Artificial Sequence: Synthetic oligonucleotide
  Sense strand starting at position 2411 of SEQ ID NO: 1880161
gcaagaaagcccuggccua

SEQ ID NO: 1946715 - RNA, 19 nt, Artificial Sequence
  Description of Artificial Sequence: Synthetic oligonucleotide
  Antisense strand to SEQ ID NO: 1946714
uaggccagggcuuucuugc

SEQ ID NO: 1946716 - RNA, 19 nt, Artificial Sequence
  Description of Artificial Sequence: Synthetic oligonucleotide
  Sense strand starting at position 2440 of SEQ ID NO: 1880161
cugucagcugucuggacaa

SEQ ID NO: 1946717 - RNA, 19 nt, Artificial Sequence
  Description of Artificial Sequence: Synthetic oligonucleotide
  Antisense strand to SEQ ID NO: 1946716
uuguccagacagcugacag

SEQ ID NO: 1946718 - RNA, 19 nt, Artificial Sequence
  Description of Artificial Sequence: Synthetic oligonucleotide
  Sense strand starting at position 2608 of SEQ ID NO: 1880161
ugucgucaccaugacuaua

SEQ ID NO: 1946719 - RNA, 19 nt, Artificial Sequence
  Description of Artificial Sequence: Synthetic oligonucleotide
  Antisense strand to SEQ ID NO: 1946718
uauagucauggugacgaca

SEQ ID NO: 1946720 - RNA, 19 nt, Artificial Sequence
  Description of Artificial Sequence: Synthetic oligonucleotide
  Sense strand starting at position 2783 of SEQ ID NO: 1880161
uuuggaaacuggucaguca

SEQ ID NO: 1946721 - RNA, 19 nt, Artificial Sequence
  Description of Artificial Sequence: Synthetic oligonucleotide
  Antisense strand to SEQ ID NO: 1946720
ugacugaccaguuuccaaa

SEQ ID NO: 1946722 - RNA, 19 nt, Artificial Sequence
  Description of Artificial Sequence: Synthetic oligonucleotide
  Sense strand starting at position 2846 of SEQ ID NO: 1880161
gauggacacgugcaugaau

SEQ ID NO: 1946723 - RNA, 19 nt, Artificial Sequence
  Description of Artificial Sequence: Synthetic oligonucleotide
  Antisense strand to SEQ ID NO: 1946722
auucaugcacguguccauc

SEQ ID NO: 1946724 - RNA, 19 nt, Artificial Sequence
  Description of Artificial Sequence: Synthetic oligonucleotide
  Sense strand starting at position 2877 of SEQ ID NO: 1880161
acagcuuuccugugaguuu

SEQ ID NO: 1946725 - RNA, 19 nt, Artificial Sequence
  Description of Artificial Sequence: Synthetic oligonucleotide
  Antisense strand to SEQ ID NO: 1946724
aaacucacaggaaagcugu

SEQ ID NO: 1946726 - RNA, 19 nt, Artificial Sequence
  Description of Artificial Sequence: Synthetic oligonucleotide
  Sense strand starting at position 3629 of SEQ ID NO: 1880161
agucacagccuuuagaguu

SEQ ID NO: 1946727 - RNA, 19 nt, Artificial Sequence
  Description of Artificial Sequence: Synthetic oligonucleotide
  Antisense strand to SEQ ID NO: 1946726
aacucuaaaggcugugacu

SEQ ID NO: 1946728 - RNA, 19 nt, Artificial Sequence
  Description of Artificial Sequence: Synthetic oligonucleotide
  Sense strand starting at position 3636 of SEQ ID NO: 1880161
gccuuuagaguuugacagu

SEQ ID NO: 1946729 - RNA, 19 nt, Artificial Sequence
  Description of Artificial Sequence: Synthetic oligonucleotide
  Antisense strand to SEQ ID NO: 1946728
acugucaaacucuaaaggc

SEQ ID NO: 1946730 - RNA, 19 nt, Artificial Sequence
  Description of Artificial Sequence: Synthetic oligonucleotide
  Sense strand starting at position 3666 of SEQ ID NO: 1880161
acccuagcuuugucaguuu

SEQ ID NO: 1946731 - RNA, 19 nt, Artificial Sequence
  Description of Artificial Sequence: Synthetic oligonucleotide
  Antisense strand to SEQ ID NO: 1946730
aaacugacaaagcuagggu

SEQ ID NO: 1946732 - RNA, 19 nt, Artificial Sequence
  Description of Artificial Sequence: Synthetic oligonucleotide
  Sense strand starting at position 3677 of SEQ ID NO: 1880161
gucaguuucucaccauaua

SEQ ID NO: 1946733 - RNA, 19 nt, Artificial Sequence
  Description of Artificial Sequence: Synthetic oligonucleotide
  Antisense strand to SEQ ID NO: 1946732
uauauggugagaaacugac

SEQ ID NO: 1946734 - RNA, 19 nt, Artificial Sequence
  Description of Artificial Sequence: Synthetic oligonucleotide
  Sense strand starting at position 3703 of SEQ ID NO: 1880161
aggcaaguccauuaacaug

SEQ ID NO: 1946735 - RNA, 19 nt, Artificial Sequence
  Description of Artificial Sequence: Synthetic oligonucleotide
  Antisense strand to SEQ ID NO: 1946734
cauguuaauggacuugccu

SEQ ID NO: 1946736 - RNA, 19 nt, Artificial Sequence
  Description of Artificial Sequence: Synthetic oligonucleotide
  Sense strand starting at position 3708 of SEQ ID NO: 1880161
aguccauuaacaugucgga

SEQ ID NO: 1946737 - RNA, 19 nt, Artificial Sequence
  Description of Artificial Sequence: Synthetic oligonucleotide
  Antisense strand to SEQ ID NO: 1946736
uccgacauguuaauggacu

SEQ ID NO: 1946738 - RNA, 19 nt, Artificial Sequence
  Description of Artificial Sequence: Synthetic oligonucleotide
  Sense strand starting at position 3713 of SEQ ID NO: 1880161
auuaacaugucggaucuca

SEQ ID NO: 1946739 - RNA, 19 nt, Artificial Sequence
  Description of Artificial Sequence: Synthetic oligonucleotide
  Antisense strand to SEQ ID NO: 1946738
ugagauccgacauguuaau

SEQ ID NO: 1946740 - RNA, 19 nt, Artificial Sequence
  Description of Artificial Sequence: Synthetic oligonucleotide
  Sense strand starting at position 3774 of SEQ ID NO: 1880161
gaaucuagugagcauuagu

SEQ ID NO: 1946741 - RNA, 19 nt, Artificial Sequence
  Description of Artificial Sequence: Synthetic oligonucleotide
  Antisense strand to SEQ ID NO: 1946740
acuaaugcucacuagauuc

SEQ ID NO: 1946742 - RNA, 19 nt, Artificial Sequence
  Description of Artificial Sequence: Synthetic oligonucleotide
  Sense strand starting at position 3777 of SEQ ID NO: 1880161
ucuagugagcauuaguaau

SEQ ID NO: 1946743 - RNA, 19 nt, Artificial Sequence
  Description of Artificial Sequence: Synthetic oligonucleotide
  Antisense strand to SEQ ID NO: 1946742
auuacuaaugcucacuaga

SEQ ID NO: 1946744 - RNA, 19 nt, Artificial Sequence
  Description of Artificial Sequence: Synthetic oligonucleotide
  Sense strand starting at position 3779 of SEQ ID NO: 1880161
uagugagcauuaguaauaa

SEQ ID NO: 1946745 - RNA, 19 nt, Artificial Sequence
  Description of Artificial Sequence: Synthetic oligonucleotide
  Antisense strand to SEQ ID NO: 1946744
uuauuacuaaugcucacua

SEQ ID NO: 1946746 - RNA, 19 nt, Artificial Sequence
  Description of Artificial Sequence: Synthetic oligonucleotide
  Sense strand starting at position 3907 of SEQ ID NO: 1880161
ccuaguaugguacaaguua

SEQ ID NO: 1946747 - RNA, 19 nt, Artificial Sequence
  Description of Artificial Sequence: Synthetic oligonucleotide
  Antisense strand to SEQ ID NO: 1946746
uaacuuguaccauacuagg

SEQ ID NO: 1946748 - RNA, 19 nt, Artificial Sequence
  Description of Artificial Sequence: Synthetic oligonucleotide
  Sense strand starting at position 3956 of SEQ ID NO: 1880161
ccagcugucccaugaggua

SEQ ID NO: 1946749 - RNA, 19 nt, Artificial Sequence
  Description of Artificial Sequence: Synthetic oligonucleotide
  Antisense strand to SEQ ID NO: 1946748
uaccucaugggacagcugg

SEQ ID NO: 1946750 - RNA, 19 nt, Artificial Sequence
  Description of Artificial Sequence: Synthetic oligonucleotide
  Sense strand starting at position 3975 of SEQ ID NO: 1880161
gguccauuauuaucuccau

SEQ ID NO: 1946751 - RNA, 19 nt, Artificial Sequence
  Description of Artificial Sequence: Synthetic oligonucleotide
  Antisense strand to SEQ ID NO: 1946750
auggagauaauaauggacc

SEQ ID NO: 1946752 - RNA, 19 nt, Artificial Sequence
  Description of Artificial Sequence: Synthetic oligonucleotide
  Sense strand starting at position 3981 of SEQ ID NO: 1880161
uuauuaucuccauguuggu

SEQ ID NO: 1946753 - RNA, 19 nt, Artificial Sequence
  Description of Artificial Sequence: Synthetic oligonucleotide
  Antisense strand to SEQ ID NO: 1946752
accaacauggagauaauaa

SEQ ID NO: 1946754 - RNA, 19 nt, Artificial Sequence
  Description of Artificial Sequence: Synthetic oligonucleotide
  Sense strand starting at position 190 of SEQ ID NO: 1880162
agaguucuaccagggcaga

SEQ ID NO: 1946755 - RNA, 19 nt, Artificial Sequence
  Description of Artificial Sequence: Synthetic oligonucleotide
  Antisense strand to SEQ ID NO: 1946754
ucugcccugguagaacucu

SEQ ID NO: 1946756 - RNA, 19 nt, Artificial Sequence
  Description of Artificial Sequence: Synthetic oligonucleotide
  Sense strand starting at position 333 of SEQ ID NO: 1880162
gcccauuagucccuagaac

SEQ ID NO: 1946757 - RNA, 19 nt, Artificial Sequence
  Description of Artificial Sequence: Synthetic oligonucleotide
  Antisense strand to SEQ ID NO: 1946756
guucuagggacuaaugggc

SEQ ID NO: 1946758 - RNA, 19 nt, Artificial Sequence
  Description of Artificial Sequence: Synthetic oligonucleotide
  Sense strand starting at position 493 of SEQ ID NO: 1880162
ggagaaauagaccgcgcuu

SEQ ID NO: 1946759 - RNA, 19 nt, Artificial Sequence
  Description of Artificial Sequence: Synthetic oligonucleotide
  Antisense strand to SEQ ID NO: 1946758
aagcgcggucuauuucucc

SEQ ID NO: 1946760 - RNA, 19 nt, Artificial Sequence
  Description of Artificial Sequence: Synthetic oligonucleotide
  Sense strand starting at position 539 of SEQ ID NO: 1880162
ucccgucuccuuuaagagu

SEQ ID NO: 1946761 - RNA, 19 nt, Artificial Sequence
  Description of Artificial Sequence: Synthetic oligonucleotide
  Antisense strand to SEQ ID NO: 1946760
acucuuaaaggagacggga

SEQ ID NO: 1946762 - RNA, 19 nt, Artificial Sequence
  Description of Artificial Sequence: Synthetic oligonucleotide
  Sense strand starting at position 1095 of SEQ ID NO: 1880162
gauucuucccaggguagca

SEQ ID NO: 1946763 - RNA, 19 nt, Artificial Sequence
  Description of Artificial Sequence: Synthetic oligonucleotide
  Antisense strand to SEQ ID NO: 1946762
ugcuacccugggaagaauc

SEQ ID NO: 1946764 - RNA, 19 nt, Artificial Sequence
  Description of Artificial Sequence: Synthetic oligonucleotide
  Sense strand starting at position 1649 of SEQ ID NO: 1880162
cacagaugcccgcauacau

SEQ ID NO: 1946765 - RNA, 19 nt, Artificial Sequence
  Description of Artificial Sequence: Synthetic oligonucleotide
  Antisense strand to SEQ ID NO: 1946764
auguaugcgggcaucugug

SEQ ID NO: 1946766 - RNA, 19 nt, Artificial Sequence
  Description of Artificial Sequence: Synthetic oligonucleotide
  Sense strand starting at position 1863 of SEQ ID NO: 1880162
ccagguggcuuucuuaaag

SEQ ID NO: 1946767 - RNA, 19 nt, Artificial Sequence
  Description of Artificial Sequence: Synthetic oligonucleotide
  Antisense strand to SEQ ID NO: 1946766
cuuuaagaaagccaccugg

SEQ ID NO: 1946768 - RNA, 19 nt, Artificial Sequence
  Description of Artificial Sequence: Synthetic oligonucleotide
  Sense strand starting at position 1869 of SEQ ID NO: 1880162
ggcuuucuuaaagggaaag

SEQ ID NO: 1946769 - RNA, 19 nt, Artificial Sequence
  Description of Artificial Sequence: Synthetic oligonucleotide
  Antisense strand to SEQ ID NO: 1946768
cuuucccuuuaagaaagcc

SEQ ID NO: 1946770 - RNA, 19 nt, Artificial Sequence
  Description of Artificial Sequence: Synthetic oligonucleotide
  Sense strand starting at position 1870 of SEQ ID NO: 1880162
gcuuucuuaaagggaaagu

SEQ ID NO: 1946771 - RNA, 19 nt, Artificial Sequence
  Description of Artificial Sequence: Synthetic oligonucleotide
  Antisense strand to SEQ ID NO: 1946770
acuuucccuuuaagaaagc

SEQ ID NO: 1946772 - RNA, 19 nt, Artificial Sequence
  Description of Artificial Sequence: Synthetic oligonucleotide
  Sense strand starting at position 1992 of SEQ ID NO: 1880162
gggcuaagaguuuggugaa

SEQ ID NO: 1946773 - RNA, 19 nt, Artificial Sequence
  Description of Artificial Sequence: Synthetic oligonucleotide
  Antisense strand to SEQ ID NO: 1946772
uucaccaaacucuuagccc

SEQ ID NO: 1946774 - RNA, 19 nt, Artificial Sequence
  Description of Artificial Sequence: Synthetic oligonucleotide
  Sense strand starting at position 2005 of SEQ ID NO: 1880162
ggugaaaguuugaagagug

SEQ ID NO: 1946775 - RNA, 19 nt, Artificial Sequence
  Description of Artificial Sequence: Synthetic oligonucleotide
  Antisense strand to SEQ ID NO: 1946774
cacucuucaaacuuucacc

SEQ ID NO: 1946776 - RNA, 19 nt, Artificial Sequence
  Description of Artificial Sequence: Synthetic oligonucleotide
  Sense strand starting at position 2129 of SEQ ID NO: 1880162
cuccuccucccagggaaua

SEQ ID NO: 1946777 - RNA, 19 nt, Artificial Sequence
  Description of Artificial Sequence: Synthetic oligonucleotide
  Antisense strand to SEQ ID NO: 1946776
uauucccugggaggaggag

SEQ ID NO: 1946778 - RNA, 19 nt, Artificial Sequence
  Description of Artificial Sequence: Synthetic oligonucleotide
  Sense strand starting at position 2466 of SEQ ID NO: 1880162
gguccuacuccuuggaacu

SEQ ID NO: 1946779 - RNA, 19 nt, Artificial Sequence
  Description of Artificial Sequence: Synthetic oligonucleotide
  Antisense strand to SEQ ID NO: 1946778
aguuccaaggaguaggacc

SEQ ID NO: 1946780 - RNA, 19 nt, Artificial Sequence
  Description of Artificial Sequence: Synthetic oligonucleotide
  Sense strand starting at position 2496 of SEQ ID NO: 1880162
gguagcccuuucucaaauu

SEQ ID NO: 1946781 - RNA, 19 nt, Artificial Sequence
  Description of Artificial Sequence: Synthetic oligonucleotide
  Antisense strand to SEQ ID NO: 1946780
aauuugagaaagggcuacc

SEQ ID NO: 1946782 - RNA, 19 nt, Artificial Sequence
  Description of Artificial Sequence: Synthetic oligonucleotide
  Sense strand starting at position 2594 of SEQ ID NO: 1880162
uccuccuuccauggugaga

SEQ ID NO: 1946783 - RNA, 19 nt, Artificial Sequence
  Description of Artificial Sequence: Synthetic oligonucleotide
  Antisense strand to SEQ ID NO: 1946782
ucucaccauggaaggagga

SEQ ID NO: 1946784 - RNA, 19 nt, Artificial Sequence
  Description of Artificial Sequence: Synthetic oligonucleotide
  Sense strand starting at position 2607 of SEQ ID NO: 1880162
gugagacagaccuggguua

SEQ ID NO: 1946785 - RNA, 19 nt, Artificial Sequence
  Description of Artificial Sequence: Synthetic oligonucleotide
  Antisense strand to SEQ ID NO: 1946784
uaacccaggucugucucac

SEQ ID NO: 1946786 - RNA, 19 nt, Artificial Sequence
  Description of Artificial Sequence: Synthetic oligonucleotide
  Sense strand starting at position 2839 of SEQ ID NO: 1880162
ccaguuaguucugucagag

SEQ ID NO: 1946787 - RNA, 19 nt, Artificial Sequence
  Description of Artificial Sequence: Synthetic oligonucleotide
  Antisense strand to SEQ ID NO: 1946786
cucugacagaacuaacugg

SEQ ID NO: 1946788 - RNA, 19 nt, Artificial Sequence
  Description of Artificial Sequence: Synthetic oligonucleotide
  Sense strand starting at position 2884 of SEQ ID NO: 1880162
agggcaucugcucagggaa

SEQ ID NO: 1946789 - RNA, 19 nt, Artificial Sequence
  Description of Artificial Sequence: Synthetic oligonucleotide
  Antisense strand to SEQ ID NO: 1946788
uucccugagcagaugcccu

SEQ ID NO: 1946790 - RNA, 19 nt, Artificial Sequence
  Description of Artificial Sequence: Synthetic oligonucleotide
  Sense strand starting at position 3034 of SEQ ID NO: 1880162
cgugaaaccaauuguugag

SEQ ID NO: 1946791 - RNA, 19 nt, Artificial Sequence
  Description of Artificial Sequence: Synthetic oligonucleotide
  Antisense strand to SEQ ID NO: 1946790
cucaacaauugguuucacg

SEQ ID NO: 1946792 - RNA, 19 nt, Artificial Sequence
  Description of Artificial Sequence: Synthetic oligonucleotide
  Sense strand starting at position 3040 of SEQ ID NO: 1880162
accaauuguugagugagau

SEQ ID NO: 1946793 - RNA, 19 nt, Artificial Sequence
  Description of Artificial Sequence: Synthetic oligonucleotide
  Antisense strand to SEQ ID NO: 1946792
aucucacucaacaauuggu

SEQ ID NO: 1946794 - RNA, 19 nt, Artificial Sequence
  Description of Artificial Sequence: Synthetic oligonucleotide
  Sense strand starting at position 3041 of SEQ ID NO: 1880162
ccaauuguugagugagauu

SEQ ID NO: 1946795 - RNA, 19 nt, Artificial Sequence
  Description of Artificial Sequence: Synthetic oligonucleotide
  Antisense strand to SEQ ID NO: 1946794
aaucucacucaacaauugg

SEQ ID NO: 1946796 - RNA, 19 nt, Artificial Sequence
  Description of Artificial Sequence: Synthetic oligonucleotide
  Sense strand starting at position 3110 of SEQ ID NO: 1880162
ccaggcauucccugaaaug

SEQ ID NO: 1946797 - RNA, 19 nt, Artificial Sequence
  Description of Artificial Sequence: Synthetic oligonucleotide
  Antisense strand to SEQ ID NO: 1946796
cauuucagggaaugccugg

SEQ ID NO: 1946798 - RNA, 19 nt, Artificial Sequence
  Description of Artificial Sequence: Synthetic oligonucleotide
  Sense strand starting at position 3218 of SEQ ID NO: 1880162
uuggacuccugaucagauc

SEQ ID NO: 1946799 - RNA, 19 nt, Artificial Sequence
  Description of Artificial Sequence: Synthetic oligonucleotide
  Antisense strand to SEQ ID NO: 1946798
gaucugaucaggaguccaa

SEQ ID NO: 1946800 - RNA, 19 nt, Artificial Sequence
  Description of Artificial Sequence: Synthetic oligonucleotide
  Sense strand starting at position 3246 of SEQ ID NO: 1880162
accuuagucuuaucagcga

SEQ ID NO: 1946801 - RNA, 19 nt, Artificial Sequence
  Description of Artificial Sequence: Synthetic oligonucleotide
  Antisense strand to SEQ ID NO: 1946800
ucgcugauaagacuaaggu

SEQ ID NO: 1946802 - RNA, 19 nt, Artificial Sequence
  Description of Artificial Sequence: Synthetic oligonucleotide
  Sense strand starting at position 3249 of SEQ ID NO: 1880162
uuagucuuaucagcgagau

SEQ ID NO: 1946803 - RNA, 19 nt, Artificial Sequence
  Description of Artificial Sequence: Synthetic oligonucleotide
  Antisense strand to SEQ ID NO: 1946802
aucucgcugauaagacuaa

SEQ ID NO: 1946804 - RNA, 19 nt, Artificial Sequence
  Description of Artificial Sequence: Synthetic oligonucleotide
  Sense strand starting at position 3250 of SEQ ID NO: 1880162
uagucuuaucagcgagauu

SEQ ID NO: 1946805 - RNA, 19 nt, Artificial Sequence
  Description of Artificial Sequence: Synthetic oligonucleotide
  Antisense strand to SEQ ID NO: 1946804
aaucucgcugauaagacua

SEQ ID NO: 1946806 - RNA, 19 nt, Artificial Sequence
  Description of Artificial Sequence: Synthetic oligonucleotide
  Sense strand starting at position 3251 of SEQ ID NO: 1880162
agucuuaucagcgagauua

SEQ ID NO: 1946807 - RNA, 19 nt, Artificial Sequence
  Description of Artificial Sequence: Synthetic oligonucleotide
  Antisense strand to SEQ ID NO: 1946806
uaaucucgcugauaagacu

SEQ ID NO: 1946808 - RNA, 19 nt, Artificial Sequence
  Description of Artificial Sequence: Synthetic oligonucleotide
  Sense strand starting at position 3253 of SEQ ID NO: 1880162
ucuuaucagcgagauuauu

SEQ ID NO: 1946809 - RNA, 19 nt, Artificial Sequence
  Description of Artificial Sequence: Synthetic oligonucleotide
  Antisense strand to SEQ ID NO: 1946808
aauaaucucgcugauaaga

SEQ ID NO: 1946810 - RNA, 19 nt, Artificial Sequence
  Description of Artificial Sequence: Synthetic oligonucleotide
  Sense strand starting at position 3302 of SEQ ID NO: 1880162
gguauagcauguuugggau

SEQ ID NO: 1946811 - RNA, 19 nt, Artificial Sequence
  Description of Artificial Sequence: Synthetic oligonucleotide
  Antisense strand to SEQ ID NO: 1946810
aucccaaacaugcuauacc

SEQ ID NO: 1946812 - RNA, 19 nt, Artificial Sequence
  Description of Artificial Sequence: Synthetic oligonucleotide
  Sense strand starting at position 3350 of SEQ ID NO: 1880162
guuucuugcgugaguugug

SEQ ID NO: 1946813 - RNA, 19 nt, Artificial Sequence
  Description of Artificial Sequence: Synthetic oligonucleotide
  Antisense strand to SEQ ID NO: 1946812
cacaacucacgcaagaaac

SEQ ID NO: 1946814 - RNA, 19 nt, Artificial Sequence
  Description of Artificial Sequence: Synthetic oligonucleotide
  Sense strand starting at position 3427 of SEQ ID NO: 1880162
ccgauuguguauuugugua

SEQ ID NO: 1946815 - RNA, 19 nt, Artificial Sequence
  Description of Artificial Sequence: Synthetic oligonucleotide
  Antisense strand to SEQ ID NO: 1946814
uacacaaauacacaaucgg

SEQ ID NO: 1946816 - RNA, 19 nt, Artificial Sequence
  Description of Artificial Sequence: Synthetic oligonucleotide
  Sense strand starting at position 3431 of SEQ ID NO: 1880162
uuguguauuuguguaggua

SEQ ID NO: 1946817 - RNA, 19 nt, Artificial Sequence
  Description of Artificial Sequence: Synthetic oligonucleotide
  Antisense strand to SEQ ID NO: 1946816
uaccuacacaaauacacaa

SEQ ID NO: 1946818 - RNA, 19 nt, Artificial Sequence
  Description of Artificial Sequence: Synthetic oligonucleotide
  Sense strand starting at position 3432 of SEQ ID NO: 1880162
uguguauuuguguagguac

SEQ ID NO: 1946819 - RNA, 19 nt, Artificial Sequence
  Description of Artificial Sequence: Synthetic oligonucleotide
  Antisense strand to SEQ ID NO: 1946818
guaccuacacaaauacaca

SEQ ID NO: 1946820 - RNA, 19 nt, Artificial Sequence
  Description of Artificial Sequence: Synthetic oligonucleotide
  Sense strand starting at position 3434 of SEQ ID NO: 1880162
uguauuuguguagguacau

SEQ ID NO: 1946821 - RNA, 19 nt, Artificial Sequence
  Description of Artificial Sequence: Synthetic oligonucleotide
  Antisense strand to SEQ ID NO: 1946820
auguaccuacacaaauaca

SEQ ID NO: 1946822 - RNA, 19 nt, Artificial Sequence
  Description of Artificial Sequence: Synthetic oligonucleotide
  Sense strand starting at position 3435 of SEQ ID NO: 1880162
guauuuguguagguacauc

SEQ ID NO: 1946823 - RNA, 19 nt, Artificial Sequence
  Description of Artificial Sequence: Synthetic oligonucleotide
  Antisense strand to SEQ ID NO: 1946822
gauguaccuacacaaauac

SEQ ID NO: 1946824 - RNA, 19 nt, Artificial Sequence
  Description of Artificial Sequence: Synthetic oligonucleotide
  Sense strand starting at position 3444 of SEQ ID NO: 1880162
uagguacaucuguggaaga

SEQ ID NO: 1946825 - RNA, 19 nt, Artificial Sequence
  Description of Artificial Sequence: Synthetic oligonucleotide
  Antisense strand to SEQ ID NO: 1946824
ucuuccacagauguaccua

SEQ ID NO: 1946826 - RNA, 19 nt, Artificial Sequence
  Description of Artificial Sequence: Synthetic oligonucleotide
  Sense strand starting at position 3446 of SEQ ID NO: 1880162
gguacaucuguggaagacu

SEQ ID NO: 1946827 - RNA, 19 nt, Artificial Sequence
  Description of Artificial Sequence: Synthetic oligonucleotide
  Antisense strand to SEQ ID NO: 1946826
agucuuccacagauguacc

SEQ ID NO: 1946828 - RNA, 19 nt, Artificial Sequence
  Description of Artificial Sequence: Synthetic oligonucleotide
  Sense strand starting at position 3561 of SEQ ID NO: 1880162
ggacguaacuuccuccaua

SEQ ID NO: 1946829 - RNA, 19 nt, Artificial Sequence
  Description of Artificial Sequence: Synthetic oligonucleotide
  Antisense strand to SEQ ID NO: 1946828
uauggaggaaguuacgucc

SEQ ID NO: 1946830 - RNA, 19 nt, Artificial Sequence
  Description of Artificial Sequence: Synthetic oligonucleotide
  Sense strand starting at position 3564 of SEQ ID NO: 1880162
cguaacuuccuccauaagu

SEQ ID NO: 1946831 - RNA, 19 nt, Artificial Sequence
  Description of Artificial Sequence: Synthetic oligonucleotide
  Antisense strand to SEQ ID NO: 1946830
acuuauggaggaaguuacg

SEQ ID NO: 1946832 - RNA, 19 nt, Artificial Sequence
  Description of Artificial Sequence: Synthetic oligonucleotide
  Sense strand starting at position 3954 of SEQ ID NO: 1880162
cucugaggcuccgucagaa

SEQ ID NO: 1946833 - RNA, 19 nt, Artificial Sequence
  Description of Artificial Sequence: Synthetic oligonucleotide
  Antisense strand to SEQ ID NO: 1946832
uucugacggagccucagag

SEQ ID NO: 1946834 - RNA, 19 nt, Artificial Sequence
  Description of Artificial Sequence: Synthetic oligonucleotide
  Sense strand starting at position 45 of SEQ ID NO: 1880163
ucaucuacuugauugagca

SEQ ID NO: 1946835 - RNA, 19 nt, Artificial Sequence
  Description of Artificial Sequence: Synthetic oligonucleotide
  Antisense strand to SEQ ID NO: 1946834
ugcucaaucaaguagauga

SEQ ID NO: 1946836 - RNA, 19 nt, Artificial Sequence
  Description of Artificial Sequence: Synthetic oligonucleotide
  Sense strand starting at position 219 of SEQ ID NO: 1880163
cauuccugggccggaaauu

SEQ ID NO: 1946837 - RNA, 19 nt, Artificial Sequence
  Description of Artificial Sequence: Synthetic oligonucleotide
  Antisense strand to SEQ ID NO: 1946836
aauuuccggcccaggaaug

SEQ ID NO: 1946838 - RNA, 19 nt, Artificial Sequence
  Description of Artificial Sequence: Synthetic oligonucleotide
  Sense strand starting at position 358 of SEQ ID NO: 1880163
ccaggucuccacuaugcuu

SEQ ID NO: 1946839 - RNA, 19 nt, Artificial Sequence
  Description of Artificial Sequence: Synthetic oligonucleotide
  Antisense strand to SEQ ID NO: 1946838
aagcauaguggagaccugg

SEQ ID NO: 1946840 - RNA, 19 nt, Artificial Sequence
  Description of Artificial Sequence: Synthetic oligonucleotide
  Sense strand starting at position 360 of SEQ ID NO: 1880163
aggucuccacuaugcuuaa

SEQ ID NO: 1946841 - RNA, 19 nt, Artificial Sequence
  Description of Artificial Sequence: Synthetic oligonucleotide
  Antisense strand to SEQ ID NO: 1946840
uuaagcauaguggagaccu

SEQ ID NO: 1946842 - RNA, 19 nt, Artificial Sequence
  Description of Artificial Sequence: Synthetic oligonucleotide
  Sense strand starting at position 361 of SEQ ID NO: 1880163
ggucuccacuaugcuuaaa

SEQ ID NO: 1946843 - RNA, 19 nt, Artificial Sequence
  Description of Artificial Sequence: Synthetic oligonucleotide
  Antisense strand to SEQ ID NO: 1946842
uuuaagcauaguggagacc

SEQ ID NO: 1946844 - RNA, 19 nt, Artificial Sequence
  Description of Artificial Sequence: Synthetic oligonucleotide
  Sense strand starting at position 489 of SEQ ID NO: 1880163
agaagacacuccuuucugu

SEQ ID NO: 1946845 - RNA, 19 nt, Artificial Sequence
  Description of Artificial Sequence: Synthetic oligonucleotide
  Antisense strand to SEQ ID NO: 1946844
acagaaaggagugucuucu

SEQ ID NO: 1946846 - RNA, 19 nt, Artificial Sequence
  Description of Artificial Sequence: Synthetic oligonucleotide
  Sense strand starting at position 725 of SEQ ID NO: 1880163
gauggagacugccuacuuu

SEQ ID NO: 1946847 - RNA, 19 nt, Artificial Sequence
  Description of Artificial Sequence: Synthetic oligonucleotide
  Antisense strand to SEQ ID NO: 1946846
aaaguaggcagucuccauc

SEQ ID NO: 1946848 - RNA, 19 nt, Artificial Sequence
  Description of Artificial Sequence: Synthetic oligonucleotide
  Sense strand starting at position 777 of SEQ ID NO: 1880163
ccucaaauggugcgagaug

SEQ ID NO: 1946849 - RNA, 19 nt, Artificial Sequence
  Description of Artificial Sequence: Synthetic oligonucleotide
  Antisense strand to SEQ ID NO: 1946848
caucucgcaccauuugagg

SEQ ID NO: 1946850 - RNA, 19 nt, Artificial Sequence
  Description of Artificial Sequence: Synthetic oligonucleotide
  Sense strand starting at position 958 of SEQ ID NO: 1880163
ugccaugaucagugacgga

SEQ ID NO: 1946851 - RNA, 19 nt, Artificial Sequence
  Description of Artificial Sequence: Synthetic oligonucleotide
  Antisense strand to SEQ ID NO: 1946850
uccgucacugaucauggca

SEQ ID NO: 1946852 - RNA, 19 nt, Artificial Sequence
  Description of Artificial Sequence: Synthetic oligonucleotide
  Sense strand starting at position 1297 of SEQ ID NO: 1880163
uggcguagucucuaggaaa

SEQ ID NO: 1946853 - RNA, 19 nt, Artificial Sequence
  Description of Artificial Sequence: Synthetic oligonucleotide
  Antisense strand to SEQ ID NO: 1946852
uuuccuagagacuacgcca

SEQ ID NO: 1946854 - RNA, 19 nt, Artificial Sequence
  Description of Artificial Sequence: Synthetic oligonucleotide
  Sense strand starting at position 1375 of SEQ ID NO: 1880163
ggguuugcaaucuggaacu

SEQ ID NO: 1946855 - RNA, 19 nt, Artificial Sequence
  Description of Artificial Sequence: Synthetic oligonucleotide
  Antisense strand to SEQ ID NO: 1946854
aguuccagauugcaaaccc

SEQ ID NO: 1946856 - RNA, 19 nt, Artificial Sequence
  Description of Artificial Sequence: Synthetic oligonucleotide
  Sense strand starting at position 1947 of SEQ ID NO: 1880163
gguccagcuccagaacuaa

SEQ ID NO: 1946857 - RNA, 19 nt, Artificial Sequence
  Description of Artificial Sequence: Synthetic oligonucleotide
  Antisense strand to SEQ ID NO: 1946856
uuaguucuggagcuggacc

SEQ ID NO: 1946858 - RNA, 19 nt, Artificial Sequence
  Description of Artificial Sequence: Synthetic oligonucleotide
  Sense strand starting at position 2110 of SEQ ID NO: 1880163
agaaguaucgcguaggaag

SEQ ID NO: 1946859 - RNA, 19 nt, Artificial Sequence
  Description of Artificial Sequence: Synthetic oligonucleotide
  Antisense strand to SEQ ID NO: 1946858
cuuccuacgcgauacuucu

SEQ ID NO: 1946860 - RNA, 19 nt, Artificial Sequence
  Description of Artificial Sequence: Synthetic oligonucleotide
  Sense strand starting at position 2131 of SEQ ID NO: 1880163
gaaggagagucagagauga

SEQ ID NO: 1946861 - RNA, 19 nt, Artificial Sequence
  Description of Artificial Sequence: Synthetic oligonucleotide
  Antisense strand to SEQ ID NO: 1946860
ucaucucugacucuccuuc

SEQ ID NO: 1946862 - RNA, 19 nt, Artificial Sequence
  Description of Artificial Sequence: Synthetic oligonucleotide
  Sense strand starting at position 2190 of SEQ ID NO: 1880163
ccucacuaacgcgaguaaa

SEQ ID NO: 1946863 - RNA, 19 nt, Artificial Sequence
  Description of Artificial Sequence: Synthetic oligonucleotide
  Antisense strand to SEQ ID NO: 1946862
uuuacucgcguuagugagg

SEQ ID NO: 1946864 - RNA, 19 nt, Artificial Sequence
  Description of Artificial Sequence: Synthetic oligonucleotide
  Sense strand starting at position 2258 of SEQ ID NO: 1880163
agggcuuucgaauaauccu

SEQ ID NO: 1946865 - RNA, 19 nt, Artificial Sequence
  Description of Artificial Sequence: Synthetic oligonucleotide
  Antisense strand to SEQ ID NO: 1946864
aggauuauucgaaagcccu

SEQ ID NO: 1946866 - RNA, 19 nt, Artificial Sequence
  Description of Artificial Sequence: Synthetic oligonucleotide
  Sense strand starting at position 2266 of SEQ ID NO: 1880163
cgaauaauccugugaagaa

SEQ ID NO: 1946867 - RNA, 19 nt, Artificial Sequence
  Description of Artificial Sequence: Synthetic oligonucleotide
  Antisense strand to SEQ ID NO: 1946866
uucuucacaggauuauucg

SEQ ID NO: 1946868 - RNA, 19 nt, Artificial Sequence
  Description of Artificial Sequence: Synthetic oligonucleotide
  Sense strand starting at position 2273 of SEQ ID NO: 1880163
uccugugaagaauguauua

SEQ ID NO: 1946869 - RNA, 19 nt, Artificial Sequence
  Description of Artificial Sequence: Synthetic oligonucleotide
  Antisense strand to SEQ ID NO: 1946868
uaauacauucuucacagga

SEQ ID NO: 1946870 - RNA, 19 nt, Artificial Sequence
  Description of Artificial Sequence: Synthetic oligonucleotide
  Sense strand starting at position 2355 of SEQ ID NO: 1880163
cucaucuguuaaguagaga

SEQ ID NO: 1946871 - RNA, 19 nt, Artificial Sequence
  Description of Artificial Sequence: Synthetic oligonucleotide
  Antisense strand to SEQ ID NO: 1946870
ucucuacuuaacagaugag

SEQ ID NO: 1946872 - RNA, 19 nt, Artificial Sequence
  Description of Artificial Sequence: Synthetic oligonucleotide
  Sense strand starting at position 2360 of SEQ ID NO: 1880163
cuguuaaguagagacagua

SEQ ID NO: 1946873 - RNA, 19 nt, Artificial Sequence
  Description of Artificial Sequence: Synthetic oligonucleotide
  Antisense strand to SEQ ID NO: 1946872
uacugucucuacuuaacag

SEQ ID NO: 1946874 - RNA, 19 nt, Artificial Sequence
  Description of Artificial Sequence: Synthetic oligonucleotide
  Sense strand starting at position 2375 of SEQ ID NO: 1880163
aguaauagugacuauguca

SEQ ID NO: 1946875 - RNA, 19 nt, Artificial Sequence
  Description of Artificial Sequence: Synthetic oligonucleotide
  Antisense strand to SEQ ID NO: 1946874
ugacauagucacuauuacu

SEQ ID NO: 1946876 - RNA, 19 nt, Artificial Sequence
  Description of Artificial Sequence: Synthetic oligonucleotide
  Sense strand starting at position 2388 of SEQ ID NO: 1880163
augucagagggaugaugua

SEQ ID NO: 1946877 - RNA, 19 nt, Artificial Sequence
  Description of Artificial Sequence: Synthetic oligonucleotide
  Antisense strand to SEQ ID NO: 1946876
uacaucaucccucugacau

SEQ ID NO: 1946878 - RNA, 19 nt, Artificial Sequence
  Description of Artificial Sequence: Synthetic oligonucleotide
  Sense strand starting at position 2411 of SEQ ID NO: 1880163
cugagacaauccguguaaa

SEQ ID NO: 1946879 - RNA, 19 nt, Artificial Sequence
  Description of Artificial Sequence: Synthetic oligonucleotide
  Antisense strand to SEQ ID NO: 1946878
uuuacacggauugucucag

SEQ ID NO: 1946880 - RNA, 19 nt, Artificial Sequence
  Description of Artificial Sequence: Synthetic oligonucleotide
  Sense strand starting at position 2412 of SEQ ID NO: 1880163
ugagacaauccguguaaac

SEQ ID NO: 1946881 - RNA, 19 nt, Artificial Sequence
  Description of Artificial Sequence: Synthetic oligonucleotide
  Antisense strand to SEQ ID NO: 1946880
guuuacacggauugucuca

SEQ ID NO: 1946882 - RNA, 19 nt, Artificial Sequence
  Description of Artificial Sequence: Synthetic oligonucleotide
  Sense strand starting at position 2414 of SEQ ID NO: 1880163
agacaauccguguaaacua

SEQ ID NO: 1946883 - RNA, 19 nt, Artificial Sequence
  Description of Artificial Sequence: Synthetic oligonucleotide
  Antisense strand to SEQ ID NO: 1946882
uaguuuacacggauugucu

SEQ ID NO: 1946884 - RNA, 19 nt, Artificial Sequence
  Description of Artificial Sequence: Synthetic oligonucleotide
  Sense strand starting at position 2425 of SEQ ID NO: 1880163
guaaacuauuuggaaugca

SEQ ID NO: 1946885 - RNA, 19 nt, Artificial Sequence
  Description of Artificial Sequence: Synthetic oligonucleotide
  Antisense strand to SEQ ID NO: 1946884
ugcauuccaaauaguuuac

SEQ ID NO: 1946886 - RNA, 19 nt, Artificial Sequence
  Description of Artificial Sequence: Synthetic oligonucleotide
  Sense strand starting at position 2718 of SEQ ID NO: 1880163
ucugguauuccauggaguu

SEQ ID NO: 1946887 - RNA, 19 nt, Artificial Sequence
  Description of Artificial Sequence: Synthetic oligonucleotide
  Antisense strand to SEQ ID NO: 1946886
aacuccauggaauaccaga

SEQ ID NO: 1946888 - RNA, 19 nt, Artificial Sequence
  Description of Artificial Sequence: Synthetic oligonucleotide
  Sense strand starting at position 2719 of SEQ ID NO: 1880163
cugguauuccauggaguuc

SEQ ID NO: 1946889 - RNA, 19 nt, Artificial Sequence
  Description of Artificial Sequence: Synthetic oligonucleotide
  Antisense strand to SEQ ID NO: 1946888
gaacuccauggaauaccag

SEQ ID NO: 1946890 - RNA, 19 nt, Artificial Sequence
  Description of Artificial Sequence: Synthetic oligonucleotide
  Sense strand starting at position 2720 of SEQ ID NO: 1880163
ugguauuccauggaguucu

SEQ ID NO: 1946891 - RNA, 19 nt, Artificial Sequence
  Description of Artificial Sequence: Synthetic oligonucleotide
  Antisense strand to SEQ ID NO: 1946890
agaacuccauggaauacca

SEQ ID NO: 1946892 - RNA, 19 nt, Artificial Sequence
  Description of Artificial Sequence: Synthetic oligonucleotide
  Sense strand starting at position 3123 of SEQ ID NO: 1880163
uuagaaauccaacguaauu

SEQ ID NO: 1946893 - RNA, 19 nt, Artificial Sequence
  Description of Artificial Sequence: Synthetic oligonucleotide
  Antisense strand to SEQ ID NO: 1946892
aauuacguuggauuucuaa

SEQ ID NO: 1946894 - RNA, 19 nt, Artificial Sequence
  Description of Artificial Sequence: Synthetic oligonucleotide
  Sense strand starting at position 3259 of SEQ ID NO: 1880163
gcaugcuuuaaguagugga

SEQ ID NO: 1946895 - RNA, 19 nt, Artificial Sequence
  Description of Artificial Sequence: Synthetic oligonucleotide
  Antisense strand to SEQ ID NO: 1946894
uccacuacuuaaagcaugc

SEQ ID NO: 1946896 - RNA, 19 nt, Artificial Sequence
  Description of Artificial Sequence: Synthetic oligonucleotide
  Sense strand starting at position 3263 of SEQ ID NO: 1880163
gcuuuaaguaguggaacuu

SEQ ID NO: 1946897 - RNA, 19 nt, Artificial Sequence
  Description of Artificial Sequence: Synthetic oligonucleotide
  Antisense strand to SEQ ID NO: 1946896
aaguuccacuacuuaaagc

SEQ ID NO: 1946898 - RNA, 19 nt, Artificial Sequence
  Description of Artificial Sequence: Synthetic oligonucleotide
  Sense strand starting at position 3264 of SEQ ID NO: 1880163
cuuuaaguaguggaacuua

SEQ ID NO: 1946899 - RNA, 19 nt, Artificial Sequence
  Description of Artificial Sequence: Synthetic oligonucleotide
  Antisense strand to SEQ ID NO: 1946898
uaaguuccacuacuuaaag

SEQ ID NO: 1946900 - RNA, 19 nt, Artificial Sequence
  Description of Artificial Sequence: Synthetic oligonucleotide
  Sense strand starting at position 3288 of SEQ ID NO: 1880163
gaaccuauaguuugguuga

SEQ ID NO: 1946901 - RNA, 19 nt, Artificial Sequence
  Description of Artificial Sequence: Synthetic oligonucleotide
  Antisense strand to SEQ ID NO: 1946900
ucaaccaaacuauagguuc

SEQ ID NO: 1946902 - RNA, 19 nt, Artificial Sequence
  Description of Artificial Sequence: Synthetic oligonucleotide
  Sense strand starting at position 3290 of SEQ ID NO: 1880163
accuauaguuugguugaaa

SEQ ID NO: 1946903 - RNA, 19 nt, Artificial Sequence
  Description of Artificial Sequence: Synthetic oligonucleotide
  Antisense strand to SEQ ID NO: 1946902
uuucaaccaaacuauaggu

SEQ ID NO: 1946904 - RNA, 19 nt, Artificial Sequence
  Description of Artificial Sequence: Synthetic oligonucleotide
  Sense strand starting at position 3291 of SEQ ID NO: 1880163
ccuauaguuugguugaaau

SEQ ID NO: 1946905 - RNA, 19 nt, Artificial Sequence
  Description of Artificial Sequence: Synthetic oligonucleotide
  Antisense strand to SEQ ID NO: 1946904
auuucaaccaaacuauagg

SEQ ID NO: 1946906 - RNA, 19 nt, Artificial Sequence
  Description of Artificial Sequence: Synthetic oligonucleotide
  Sense strand starting at position 3293 of SEQ ID NO: 1880163
uauaguuugguugaaauug

SEQ ID NO: 1946907 - RNA, 19 nt, Artificial Sequence
  Description of Artificial Sequence: Synthetic oligonucleotide
  Antisense strand to SEQ ID NO: 1946906
caauuucaaccaaacuaua

SEQ ID NO: 1946908 - RNA, 19 nt, Artificial Sequence
  Description of Artificial Sequence: Synthetic oligonucleotide
  Sense strand starting at position 3321 of SEQ ID NO: 1880163
aagggaucauggcuguaca

SEQ ID NO: 1946909 - RNA, 19 nt, Artificial Sequence
  Description of Artificial Sequence: Synthetic oligonucleotide
  Antisense strand to SEQ ID NO: 1946908
uguacagccaugaucccuu

SEQ ID NO: 1946910 - RNA, 19 nt, Artificial Sequence
  Description of Artificial Sequence: Synthetic oligonucleotide
  Sense strand starting at position 3322 of SEQ ID NO: 1880163
agggaucauggcuguacaa

SEQ ID NO: 1946911 - RNA, 19 nt, Artificial Sequence
  Description of Artificial Sequence: Synthetic oligonucleotide
  Antisense strand to SEQ ID NO: 1946910
uuguacagccaugaucccu

SEQ ID NO: 1946912 - RNA, 19 nt, Artificial Sequence
  Description of Artificial Sequence: Synthetic oligonucleotide
  Sense strand starting at position 3324 of SEQ ID NO: 1880163
ggaucauggcuguacaaug

SEQ ID NO: 1946913 - RNA, 19 nt, Artificial Sequence
  Description of Artificial Sequence: Synthetic oligonucleotide
  Antisense strand to SEQ ID NO: 1946912
cauuguacagccaugaucc

SEQ ID NO: 1946914 - RNA, 19 nt, Artificial Sequence
  Description of Artificial Sequence: Synthetic oligonucleotide
  Sense strand starting at position 2211 of SEQ ID NO: 1880164
ccuauaugguggcagguua

SEQ ID NO: 1946915 - RNA, 19 nt, Artificial Sequence
  Description of Artificial Sequence: Synthetic oligonucleotide
  Antisense strand to SEQ ID NO: 1946914
uaaccugccaccauauagg

SEQ ID NO: 1946916 - RNA, 19 nt, Artificial Sequence
  Description of Artificial Sequence: Synthetic oligonucleotide
  Sense strand starting at position 2290 of SEQ ID NO: 1880164
acacaaauguguuacucaa

SEQ ID NO: 1946917 - RNA, 19 nt, Artificial Sequence
  Description of Artificial Sequence: Synthetic oligonucleotide
  Antisense strand to SEQ ID NO: 1946916
uugaguaacacauuugugu

SEQ ID NO: 1946918 - RNA, 19 nt, Artificial Sequence
  Description of Artificial Sequence: Synthetic oligonucleotide
  Sense strand starting at position 2292 of SEQ ID NO: 1880164
acaaauguguuacucaaga

SEQ ID NO: 1946919 - RNA, 19 nt, Artificial Sequence
  Description of Artificial Sequence: Synthetic oligonucleotide
  Antisense strand to SEQ ID NO: 1946918
ucuugaguaacacauuugu

SEQ ID NO: 1946920 - RNA, 19 nt, Artificial Sequence
  Description of Artificial Sequence: Synthetic oligonucleotide
  Sense strand starting at position 2319 of SEQ ID NO: 1880164
uggcauuucugagcaccuu

SEQ ID NO: 1946921 - RNA, 19 nt, Artificial Sequence
  Description of Artificial Sequence: Synthetic oligonucleotide
  Antisense strand to SEQ ID NO: 1946920
aaggugcucagaaaugcca

SEQ ID NO: 1946922 - RNA, 19 nt, Artificial Sequence
  Description of Artificial Sequence: Synthetic oligonucleotide
  Sense strand starting at position 2373 of SEQ ID NO: 1880164
gcaccacaauccucggaaa

SEQ ID NO: 1946923 - RNA, 19 nt, Artificial Sequence
  Description of Artificial Sequence: Synthetic oligonucleotide
  Antisense strand to SEQ ID NO: 1946922
uuuccgaggauuguggugc

SEQ ID NO: 1946924 - RNA, 19 nt, Artificial Sequence
  Description of Artificial Sequence: Synthetic oligonucleotide
  Sense strand starting at position 2375 of SEQ ID NO: 1880164
accacaauccucggaaaug

SEQ ID NO: 1946925 - RNA, 19 nt, Artificial Sequence
  Description of Artificial Sequence: Synthetic oligonucleotide
  Antisense strand to SEQ ID NO: 1946924
cauuuccgaggauuguggu

SEQ ID NO: 1946926 - RNA, 19 nt, Artificial Sequence
  Description of Artificial Sequence: Synthetic oligonucleotide
  Sense strand starting at position 2376 of SEQ ID NO: 1880164
ccacaauccucggaaaugu

SEQ ID NO: 1946927 - RNA, 19 nt, Artificial Sequence
  Description of Artificial Sequence: Synthetic oligonucleotide
  Antisense strand to SEQ ID NO: 1946926
acauuuccgaggauugugg

SEQ ID NO: 1946928 - RNA, 19 nt, Artificial Sequence
  Description of Artificial Sequence: Synthetic oligonucleotide
  Sense strand starting at position 2408 of SEQ ID NO: 1880164
agagcagauuucuacaaag

SEQ ID NO: 1946929 - RNA, 19 nt, Artificial Sequence
  Description of Artificial Sequence: Synthetic oligonucleotide
  Antisense strand to SEQ ID NO: 1946928
cuuuguagaaaucugcucu

SEQ ID NO: 1946930 - RNA, 19 nt, Artificial Sequence
  Description of Artificial Sequence: Synthetic oligonucleotide
  Sense strand starting at position 2456 of SEQ ID NO: 1880164
gcuccagacugcuaagaac

SEQ ID NO: 1946931 - RNA, 19 nt, Artificial Sequence
  Description of Artificial Sequence: Synthetic oligonucleotide
  Antisense strand to SEQ ID NO: 1946930
guucuuagcagucuggagc

SEQ ID NO: 1946932 - RNA, 19 nt, Artificial Sequence
  Description of Artificial Sequence: Synthetic oligonucleotide
  Sense strand starting at position 2495 of SEQ ID NO: 1880164
aagggaaguucccuggacu

SEQ ID NO: 1946933 - RNA, 19 nt, Artificial Sequence
  Description of Artificial Sequence: Synthetic oligonucleotide
  Antisense strand to SEQ ID NO: 1946932
aguccagggaacuucccuu

SEQ ID NO: 1946934 - RNA, 19 nt, Artificial Sequence
  Description of Artificial Sequence: Synthetic oligonucleotide
  Sense strand starting at position 2531 of SEQ ID NO: 1880164
ggaaguuacacauagcugu

SEQ ID NO: 1946935 - RNA, 19 nt, Artificial Sequence
  Description of Artificial Sequence: Synthetic oligonucleotide
  Antisense strand to SEQ ID NO: 1946934
acagcuauguguaacuucc

SEQ ID NO: 1946936 - RNA, 19 nt, Artificial Sequence
  Description of Artificial Sequence: Synthetic oligonucleotide
  Sense strand starting at position 2580 of SEQ ID NO: 1880164
cgaggaaugugaccagcuu

SEQ ID NO: 1946937 - RNA, 19 nt, Artificial Sequence
  Description of Artificial Sequence: Synthetic oligonucleotide
  Antisense strand to SEQ ID NO: 1946936
aagcuggucacauuccucg

SEQ ID NO: 1946938 - RNA, 19 nt, Artificial Sequence
  Description of Artificial Sequence: Synthetic oligonucleotide
  Sense strand starting at position 2581 of SEQ ID NO: 1880164
gaggaaugugaccagcuuu

SEQ ID NO: 1946939 - RNA, 19 nt, Artificial Sequence
  Description of Artificial Sequence: Synthetic oligonucleotide
  Antisense strand to SEQ ID NO: 1946938
aaagcuggucacauuccuc

SEQ ID NO: 1946940 - RNA, 19 nt, Artificial Sequence
  Description of Artificial Sequence: Synthetic oligonucleotide
  Sense strand starting at position 2712 of SEQ ID NO: 1880164
ggcugcucgagcuuugcaa

SEQ ID NO: 1946941 - RNA, 19 nt, Artificial Sequence
  Description of Artificial Sequence: Synthetic oligonucleotide
  Antisense strand to SEQ ID NO: 1946940
uugcaaagcucgagcagcc

SEQ ID NO: 1946942 - RNA, 19 nt, Artificial Sequence
  Description of Artificial Sequence: Synthetic oligonucleotide
  Sense strand starting at position 2786 of SEQ ID NO: 1880164
gcacuugacaagugaucag

SEQ ID NO: 1946943 - RNA, 19 nt, Artificial Sequence
  Description of Artificial Sequence: Synthetic oligonucleotide
  Antisense strand to SEQ ID NO: 1946942
cugaucacuugucaagugc

SEQ ID NO: 1946944 - RNA, 19 nt, Artificial Sequence
  Description of Artificial Sequence: Synthetic oligonucleotide
  Sense strand starting at position 2790 of SEQ ID NO: 1880164
uugacaagugaucagccaa

SEQ ID NO: 1946945 - RNA, 19 nt, Artificial Sequence
  Description of Artificial Sequence: Synthetic oligonucleotide
  Antisense strand to SEQ ID NO: 1946944
uuggcugaucacuugucaa

SEQ ID NO: 1946946 - RNA, 19 nt, Artificial Sequence
  Description of Artificial Sequence: Synthetic oligonucleotide
  Sense strand starting at position 2908 of SEQ ID NO: 1880164
gcgugucagacccucaguu

SEQ ID NO: 1946947 - RNA, 19 nt, Artificial Sequence
  Description of Artificial Sequence: Synthetic oligonucleotide
  Antisense strand to SEQ ID NO: 1946946
aacugagggucugacacgc

SEQ ID NO: 1946948 - RNA, 19 nt, Artificial Sequence
  Description of Artificial Sequence: Synthetic oligonucleotide
  Sense strand starting at position 3225 of SEQ ID NO: 1880164
gacuauugaccaggugcaa

SEQ ID NO: 1946949 - RNA, 19 nt, Artificial Sequence
  Description of Artificial Sequence: Synthetic oligonucleotide
  Antisense strand to SEQ ID NO: 1946948
uugcaccuggucaauaguc

SEQ ID NO: 1946950 - RNA, 19 nt, Artificial Sequence
  Description of Artificial Sequence: Synthetic oligonucleotide
  Sense strand starting at position 3535 of SEQ ID NO: 1880164
ugaagacaaucuccuggua

SEQ ID NO: 1946951 - RNA, 19 nt, Artificial Sequence
  Description of Artificial Sequence: Synthetic oligonucleotide
  Antisense strand to SEQ ID NO: 1946950
uaccaggagauugucuuca

SEQ ID NO: 1946952 - RNA, 19 nt, Artificial Sequence
  Description of Artificial Sequence: Synthetic oligonucleotide
  Sense strand starting at position 3538 of SEQ ID NO: 1880164
agacaaucuccugguacca

SEQ ID NO: 1946953 - RNA, 19 nt, Artificial Sequence
  Description of Artificial Sequence: Synthetic oligonucleotide
  Antisense strand to SEQ ID NO: 1946952
ugguaccaggagauugucu

SEQ ID NO: 1946954 - RNA, 19 nt, Artificial Sequence
  Description of Artificial Sequence: Synthetic oligonucleotide
  Sense strand starting at position 3571 of SEQ ID NO: 1880164
agguuagaauuaugcucaa

SEQ ID NO: 1946955 - RNA, 19 nt, Artificial Sequence
  Description of Artificial Sequence: Synthetic oligonucleotide
  Antisense strand to SEQ ID NO: 1946954
uugagcauaauucuaaccu

SEQ ID NO: 1946956 - RNA, 19 nt, Artificial Sequence
  Description of Artificial Sequence: Synthetic oligonucleotide
  Sense strand starting at position 3616 of SEQ ID NO: 1880164
agcaguucugcuggugaag

SEQ ID NO: 1946957 - RNA, 19 nt, Artificial Sequence
  Description of Artificial Sequence: Synthetic oligonucleotide
  Antisense strand to SEQ ID NO: 1946956
cuucaccagcagaacugcu

SEQ ID NO: 1946958 - RNA, 19 nt, Artificial Sequence
  Description of Artificial Sequence: Synthetic oligonucleotide
  Sense strand starting at position 3618 of SEQ ID NO: 1880164
caguucugcuggugaagac

SEQ ID NO: 1946959 - RNA, 19 nt, Artificial Sequence
  Description of Artificial Sequence: Synthetic oligonucleotide
  Antisense strand to SEQ ID NO: 1946958
gucuucaccagcagaacug

SEQ ID NO: 1946960 - RNA, 19 nt, Artificial Sequence
  Description of Artificial Sequence: Synthetic oligonucleotide
  Sense strand starting at position 3619 of SEQ ID NO: 1880164
aguucugcuggugaagaca

SEQ ID NO: 1946961 - RNA, 19 nt, Artificial Sequence
  Description of Artificial Sequence: Synthetic oligonucleotide
  Antisense strand to SEQ ID NO: 1946960
ugucuucaccagcagaacu

SEQ ID NO: 1946962 - RNA, 19 nt, Artificial Sequence
  Description of Artificial Sequence: Synthetic oligonucleotide
  Sense strand starting at position 3882 of SEQ ID NO: 1880164
cagguugucugcugaguca

SEQ ID NO: 1946963 - RNA, 19 nt, Artificial Sequence
  Description of Artificial Sequence: Synthetic oligonucleotide
  Antisense strand to SEQ ID NO: 1946962
ugacucagcagacaaccug

SEQ ID NO: 1946964 - RNA, 19 nt, Artificial Sequence
  Description of Artificial Sequence: Synthetic oligonucleotide
  Sense strand starting at position 12 of SEQ ID NO: 1880165
uggcuauuaccaugauuag

SEQ ID NO: 1946965 - RNA, 19 nt, Artificial Sequence
  Description of Artificial Sequence: Synthetic oligonucleotide
  Antisense strand to SEQ ID NO: 1946964
cuaaucaugguaauagcca

SEQ ID NO: 1946966 - RNA, 19 nt, Artificial Sequence
  Description of Artificial Sequence: Synthetic oligonucleotide
  Sense strand starting at position 13 of SEQ ID NO: 1880165
ggcuauuaccaugauuagu

SEQ ID NO: 1946967 - RNA, 19 nt, Artificial Sequence
  Description of Artificial Sequence: Synthetic oligonucleotide
  Antisense strand to SEQ ID NO: 1946966
acuaaucaugguaauagcc

SEQ ID NO: 1946968 - RNA, 19 nt, Artificial Sequence
  Description of Artificial Sequence: Synthetic oligonucleotide
  Sense strand starting at position 53 of SEQ ID NO: 1880165
uuuauucugguugaaaucu

SEQ ID NO: 1946969 - RNA, 19 nt, Artificial Sequence
  Description of Artificial Sequence: Synthetic oligonucleotide
  Antisense strand to SEQ ID NO: 1946968
agauuucaaccagaauaaa

SEQ ID NO: 1946970 - RNA, 19 nt, Artificial Sequence
  Description of Artificial Sequence: Synthetic oligonucleotide
  Sense strand starting at position 160 of SEQ ID NO: 1880165
gaaagaaauguaggcuauu

SEQ ID NO: 1946971 - RNA, 19 nt, Artificial Sequence
  Description of Artificial Sequence: Synthetic oligonucleotide
  Antisense strand to SEQ ID NO: 1946970
aauagccuacauuucuuuc

SEQ ID NO: 1946972 - RNA, 19 nt, Artificial Sequence
  Description of Artificial Sequence: Synthetic oligonucleotide
  Sense strand starting at position 213 of SEQ ID NO: 1880165
gcgcucaugguagaaagaa

SEQ ID NO: 1946973 - RNA, 19 nt, Artificial Sequence
  Description of Artificial Sequence: Synthetic oligonucleotide
  Antisense strand to SEQ ID NO: 1946972
uucuuucuaccaugagcgc

SEQ ID NO: 1946974 - RNA, 19 nt, Artificial Sequence
  Description of Artificial Sequence: Synthetic oligonucleotide
  Sense strand starting at position 399 of SEQ ID NO: 1880165
uccacuuucuauuucguua

SEQ ID NO: 1946975 - RNA, 19 nt, Artificial Sequence
  Description of Artificial Sequence: Synthetic oligonucleotide
  Antisense strand to SEQ ID NO: 1946974
uaacgaaauagaaagugga

SEQ ID NO: 1946976 - RNA, 19 nt, Artificial Sequence
  Description of Artificial Sequence: Synthetic oligonucleotide
  Sense strand starting at position 418 of SEQ ID NO: 1880165
augacaaucuguccuugga

SEQ ID NO: 1946977 - RNA, 19 nt, Artificial Sequence
  Description of Artificial Sequence: Synthetic oligonucleotide
  Antisense strand to SEQ ID NO: 1946976
uccaaggacagauugucau

SEQ ID NO: 1946978 - RNA, 19 nt, Artificial Sequence
  Description of Artificial Sequence: Synthetic oligonucleotide
  Sense strand starting at position 420 of SEQ ID NO: 1880165
gacaaucuguccuuggaau

SEQ ID NO: 1946979 - RNA, 19 nt, Artificial Sequence
  Description of Artificial Sequence: Synthetic oligonucleotide
  Antisense strand to SEQ ID NO: 1946978
auuccaaggacagauuguc

SEQ ID NO: 1946980 - RNA, 19 nt, Artificial Sequence
  Description of Artificial Sequence: Synthetic oligonucleotide
  Sense strand starting at position 421 of SEQ ID NO: 1880165
acaaucuguccuuggaauu

SEQ ID NO: 1946981 - RNA, 19 nt, Artificial Sequence
  Description of Artificial Sequence: Synthetic oligonucleotide
  Antisense strand to SEQ ID NO: 1946980
aauuccaaggacagauugu

SEQ ID NO: 1946982 - RNA, 19 nt, Artificial Sequence
  Description of Artificial Sequence: Synthetic oligonucleotide
  Sense strand starting at position 455 of SEQ ID NO: 1880165
uguacuuucguuuccgcua

SEQ ID NO: 1946983 - RNA, 19 nt, Artificial Sequence
  Description of Artificial Sequence: Synthetic oligonucleotide
  Antisense strand to SEQ ID NO: 1946982
uagcggaaacgaaaguaca

SEQ ID NO: 1946984 - RNA, 19 nt, Artificial Sequence
  Description of Artificial Sequence: Synthetic oligonucleotide
  Sense strand starting at position 491 of SEQ ID NO: 1880165
ucaacugaacauugguaua

SEQ ID NO: 1946985 - RNA, 19 nt, Artificial Sequence
  Description of Artificial Sequence: Synthetic oligonucleotide
  Antisense strand to SEQ ID NO: 1946984
uauaccaauguucaguuga

SEQ ID NO: 1946986 - RNA, 19 nt, Artificial Sequence
  Description of Artificial Sequence: Synthetic oligonucleotide
  Sense strand starting at position 493 of SEQ ID NO: 1880165
aacugaacauugguauagu

SEQ ID NO: 1946987 - RNA, 19 nt, Artificial Sequence
  Description of Artificial Sequence: Synthetic oligonucleotide
  Antisense strand to SEQ ID NO: 1946986
acuauaccaauguucaguu

SEQ ID NO: 1946988 - RNA, 19 nt, Artificial Sequence
  Description of Artificial Sequence: Synthetic oligonucleotide
  Sense strand starting at position 496 of SEQ ID NO: 1880165
ugaacauugguauagucuu

SEQ ID NO: 1946989 - RNA, 19 nt, Artificial Sequence
  Description of Artificial Sequence: Synthetic oligonucleotide
  Antisense strand to SEQ ID NO: 1946988
aagacuauaccaauguuca

SEQ ID NO: 1946990 - RNA, 19 nt, Artificial Sequence
  Description of Artificial Sequence: Synthetic oligonucleotide
  Sense strand starting at position 577 of SEQ ID NO: 1880165
gcaggaaucagguagccaa

SEQ ID NO: 1946991 - RNA, 19 nt, Artificial Sequence
  Description of Artificial Sequence: Synthetic oligonucleotide
  Antisense strand to SEQ ID NO: 1946990
uuggcuaccugauuccugc

SEQ ID NO: 1946992 - RNA, 19 nt, Artificial Sequence
  Description of Artificial Sequence: Synthetic oligonucleotide
  Sense strand starting at position 691 of SEQ ID NO: 1880165
ccuaaaguacuuugggaua

SEQ ID NO: 1946993 - RNA, 19 nt, Artificial Sequence
  Description of Artificial Sequence: Synthetic oligonucleotide
  Antisense strand to SEQ ID NO: 1946992
uaucccaaaguacuuuagg

SEQ ID NO: 1946994 - RNA, 19 nt, Artificial Sequence
  Description of Artificial Sequence: Synthetic oligonucleotide
  Sense strand starting at position 704 of SEQ ID NO: 1880165
gggauagcuccuuaaguga

SEQ ID NO: 1946995 - RNA, 19 nt, Artificial Sequence
  Description of Artificial Sequence: Synthetic oligonucleotide
  Antisense strand to SEQ ID NO: 1946994
ucacuuaaggagcuauccc

SEQ ID NO: 1946996 - RNA, 19 nt, Artificial Sequence
  Description of Artificial Sequence: Synthetic oligonucleotide
  Sense strand starting at position 823 of SEQ ID NO: 1880165
uugacuucguucuuuauuu

SEQ ID NO: 1946997 - RNA, 19 nt, Artificial Sequence
  Description of Artificial Sequence: Synthetic oligonucleotide
  Antisense strand to SEQ ID NO: 1946996
aaauaaagaacgaagucaa

SEQ ID NO: 1946998 - RNA, 19 nt, Artificial Sequence
  Description of Artificial Sequence: Synthetic oligonucleotide
  Sense strand starting at position 898 of SEQ ID NO: 1880165
uuguucuaagaaugaaacu

SEQ ID NO: 1946999 - RNA, 19 nt, Artificial Sequence
  Description of Artificial Sequence: Synthetic oligonucleotide
  Antisense strand to SEQ ID NO: 1946998
aguuucauucuuagaacaa

SEQ ID NO: 1947000 - RNA, 19 nt, Artificial Sequence
  Description of Artificial Sequence: Synthetic oligonucleotide
  Sense strand starting at position 941 of SEQ ID NO: 1880165
gacagauguaucuaggguu

SEQ ID NO: 1947001 - RNA, 19 nt, Artificial Sequence
  Description of Artificial Sequence: Synthetic oligonucleotide
  Antisense strand to SEQ ID NO: 1947000
aacccuagauacaucuguc

SEQ ID NO: 1947002 - RNA, 19 nt, Artificial Sequence
  Description of Artificial Sequence: Synthetic oligonucleotide
  Sense strand starting at position 1081 of SEQ ID NO: 1880165
gaggucugccuuuaauaau

SEQ ID NO: 1947003 - RNA, 19 nt, Artificial Sequence
  Description of Artificial Sequence: Synthetic oligonucleotide
  Antisense strand to SEQ ID NO: 1947002
auuauuaaaggcagaccuc

SEQ ID NO: 1947004 - RNA, 19 nt, Artificial Sequence
  Description of Artificial Sequence: Synthetic oligonucleotide
  Sense strand starting at position 1298 of SEQ ID NO: 1880165
ggucgacucgccagaaguc

SEQ ID NO: 1947005 - RNA, 19 nt, Artificial Sequence
  Description of Artificial Sequence: Synthetic oligonucleotide
  Antisense strand to SEQ ID NO: 1947004
gacuucuggcgagucgacc

SEQ ID NO: 1947006 - RNA, 19 nt, Artificial Sequence
  Description of Artificial Sequence: Synthetic oligonucleotide
  Sense strand starting at position 1755 of SEQ ID NO: 1880165
cugggaauccauuggccaa

SEQ ID NO: 1947007 - RNA, 19 nt, Artificial Sequence
  Description of Artificial Sequence: Synthetic oligonucleotide
  Antisense strand to SEQ ID NO: 1947006
uuggccaauggauucccag

SEQ ID NO: 1947008 - RNA, 19 nt, Artificial Sequence
  Description of Artificial Sequence: Synthetic oligonucleotide
  Sense strand starting at position 2074 of SEQ ID NO: 1880165
gggaaaucggcaggaguga

SEQ ID NO: 1947009 - RNA, 19 nt, Artificial Sequence
  Description of Artificial Sequence: Synthetic oligonucleotide
  Antisense strand to SEQ ID NO: 1947008
ucacuccugccgauuuccc

SEQ ID NO: 1947010 - RNA, 19 nt, Artificial Sequence
  Description of Artificial Sequence: Synthetic oligonucleotide
  Sense strand starting at position 2075 of SEQ ID NO: 1880165
ggaaaucggcaggagugau

SEQ ID NO: 1947011 - RNA, 19 nt, Artificial Sequence
  Description of Artificial Sequence: Synthetic oligonucleotide
  Antisense strand to SEQ ID NO: 1947010
aucacuccugccgauuucc

SEQ ID NO: 1947012 - RNA, 19 nt, Artificial Sequence
  Description of Artificial Sequence: Synthetic oligonucleotide
  Sense strand starting at position 2102 of SEQ ID NO: 1880165
ggaagacuuugaguguaac

SEQ ID NO: 1947013 - RNA, 19 nt, Artificial Sequence
  Description of Artificial Sequence: Synthetic oligonucleotide
  Antisense strand to SEQ ID NO: 1947012
guuacacucaaagucuucc

SEQ ID NO: 1947014 - RNA, 19 nt, Artificial Sequence
  Description of Artificial Sequence: Synthetic oligonucleotide
  Sense strand starting at position 2103 of SEQ ID NO: 1880165
gaagacuuugaguguaacu

SEQ ID NO: 1947015 - RNA, 19 nt, Artificial Sequence
  Description of Artificial Sequence: Synthetic oligonucleotide
  Antisense strand to SEQ ID NO: 1947014
aguuacacucaaagucuuc

SEQ ID NO: 1947016 - RNA, 19 nt, Artificial Sequence
  Description of Artificial Sequence: Synthetic oligonucleotide
  Sense strand starting at position 2289 of SEQ ID NO: 1880165
ggcggaaaucacugaggga

SEQ ID NO: 1947017 - RNA, 19 nt, Artificial Sequence
  Description of Artificial Sequence: Synthetic oligonucleotide
  Antisense strand to SEQ ID NO: 1947016
ucccucagugauuuccgcc

SEQ ID NO: 1947018 - RNA, 19 nt, Artificial Sequence
  Description of Artificial Sequence: Synthetic oligonucleotide
  Sense strand starting at position 3212 of SEQ ID NO: 1880165
ggaauaaugucaucuguag

SEQ ID NO: 1947019 - RNA, 19 nt, Artificial Sequence
  Description of Artificial Sequence: Synthetic oligonucleotide
  Antisense strand to SEQ ID NO: 1947018
cuacagaugacauuauucc

SEQ ID NO: 1947020 - RNA, 19 nt, Artificial Sequence
  Description of Artificial Sequence: Synthetic oligonucleotide
  Sense strand starting at position 3216 of SEQ ID NO: 1880165
uaaugucaucuguaguuag

SEQ ID NO: 1947021 - RNA, 19 nt, Artificial Sequence
  Description of Artificial Sequence: Synthetic oligonucleotide
  Antisense strand to SEQ ID NO: 1947020
cuaacuacagaugacauua

SEQ ID NO: 1947022 - RNA, 19 nt, Artificial Sequence
  Description of Artificial Sequence: Synthetic oligonucleotide
  Sense strand starting at position 3325 of SEQ ID NO: 1880165
cuggguuagaaucagugua

SEQ ID NO: 1947023 - RNA, 19 nt, Artificial Sequence
  Description of Artificial Sequence: Synthetic oligonucleotide
  Antisense strand to SEQ ID NO: 1947022
uacacugauucuaacccag

SEQ ID NO: 1947024 - RNA, 19 nt, Artificial Sequence
  Description of Artificial Sequence: Synthetic oligonucleotide
  Sense strand starting at position 3393 of SEQ ID NO: 1880165
aaggaacuuguaugucaga

SEQ ID NO: 1947025 - RNA, 19 nt, Artificial Sequence
  Description of Artificial Sequence: Synthetic oligonucleotide
  Antisense strand to SEQ ID NO: 1947024
ucugacauacaaguuccuu

SEQ ID NO: 1947026 - RNA, 19 nt, Artificial Sequence
  Description of Artificial Sequence: Synthetic oligonucleotide
  Sense strand starting at position 3402 of SEQ ID NO: 1880165
guaugucagagguagagug

SEQ ID NO: 1947027 - RNA, 19 nt, Artificial Sequence
  Description of Artificial Sequence: Synthetic oligonucleotide
  Antisense strand to SEQ ID NO: 1947026
cacucuaccucugacauac

SEQ ID NO: 1947028 - RNA, 19 nt, Artificial Sequence
  Description of Artificial Sequence: Synthetic oligonucleotide
  Sense strand starting at position 3474 of SEQ ID NO: 1880165
cggcgauugaugcacauuu

SEQ ID NO: 1947029 - RNA, 19 nt, Artificial Sequence
  Description of Artificial Sequence: Synthetic oligonucleotide
  Antisense strand to SEQ ID NO: 1947028
aaaugugcaucaaucgccg

SEQ ID NO: 1947030 - RNA, 19 nt, Artificial Sequence
  Description of Artificial Sequence: Synthetic oligonucleotide
  Sense strand starting at position 3523 of SEQ ID NO: 1880165
guaccugauggcgagaaca

SEQ ID NO: 1947031 - RNA, 19 nt, Artificial Sequence
  Description of Artificial Sequence: Synthetic oligonucleotide
  Antisense strand to SEQ ID NO: 1947030
uguucucgccaucagguac

SEQ ID NO: 1947032 - RNA, 19 nt, Artificial Sequence
  Description of Artificial Sequence: Synthetic oligonucleotide
  Sense strand starting at position 3614 of SEQ ID NO: 1880165
agagguaaagugggucaaa

SEQ ID NO: 1947033 - RNA, 19 nt, Artificial Sequence
  Description of Artificial Sequence: Synthetic oligonucleotide
  Antisense strand to SEQ ID NO: 1947032
uuugacccacuuuaccucu

SEQ ID NO: 1947034 - RNA, 19 nt, Artificial Sequence
  Description of Artificial Sequence: Synthetic oligonucleotide
  Sense strand starting at position 3647 of SEQ ID NO: 1880165
aaaguaagguuguuagauc

SEQ ID NO: 1947035 - RNA, 19 nt, Artificial Sequence
  Description of Artificial Sequence: Synthetic oligonucleotide
  Antisense strand to SEQ ID NO: 1947034
gaucuaacaaccuuacuuu

SEQ ID NO: 1947036 - RNA, 19 nt, Artificial Sequence
  Description of Artificial Sequence: Synthetic oligonucleotide
  Sense strand starting at position 3760 of SEQ ID NO: 1880165
gccuuauggaaagauguuu

SEQ ID NO: 1947037 - RNA, 19 nt, Artificial Sequence
  Description of Artificial Sequence: Synthetic oligonucleotide
  Antisense strand to SEQ ID NO: 1947036
aaacaucuuuccauaaggc

SEQ ID NO: 1947038 - RNA, 19 nt, Artificial Sequence
  Description of Artificial Sequence: Synthetic oligonucleotide
  Sense strand starting at position 3888 of SEQ ID NO: 1880165
uguggaucccuauauguau

SEQ ID NO: 1947039 - RNA, 19 nt, Artificial Sequence
  Description of Artificial Sequence: Synthetic oligonucleotide
  Antisense strand to SEQ ID NO: 1947038
auacauauagggauccaca

SEQ ID NO: 1947040 - RNA, 19 nt, Artificial Sequence
  Description of Artificial Sequence: Synthetic oligonucleotide
  Sense strand starting at position 3891 of SEQ ID NO: 1880165
ggaucccuauauguauauu

SEQ ID NO: 1947041 - RNA, 19 nt, Artificial Sequence
  Description of Artificial Sequence: Synthetic oligonucleotide
  Antisense strand to SEQ ID NO: 1947040
aauauacauauagggaucc

SEQ ID NO: 1947042 - RNA, 19 nt, Artificial Sequence
  Description of Artificial Sequence: Synthetic oligonucleotide
  Sense strand starting at position 3937 of SEQ ID NO: 1880165
uaggguggccauuauaauu

SEQ ID NO: 1947043 - RNA, 19 nt, Artificial Sequence
  Description of Artificial Sequence: Synthetic oligonucleotide
  Antisense strand to SEQ ID NO: 1947042
aauuauaauggccacccua

SEQ ID NO: 1947044 - RNA, 19 nt, Artificial Sequence
  Description of Artificial Sequence: Synthetic oligonucleotide
  Sense strand starting at position 591 of SEQ ID NO: 1880166
ggugauagaccuuguauca

SEQ ID NO: 1947045 - RNA, 19 nt, Artificial Sequence
  Description of Artificial Sequence: Synthetic oligonucleotide
  Antisense strand to SEQ ID NO: 1947044
ugauacaaggucuaucacc

SEQ ID NO: 1947046 - RNA, 19 nt, Artificial Sequence
  Description of Artificial Sequence: Synthetic oligonucleotide
  Sense strand starting at position 924 of SEQ ID NO: 1880166
gcaacugaauagugagaau

SEQ ID NO: 1947047 - RNA, 19 nt, Artificial Sequence
  Description of Artificial Sequence: Synthetic oligonucleotide
  Antisense strand to SEQ ID NO: 1947046
auucucacuauucaguugc

SEQ ID NO: 1947048 - RNA, 19 nt, Artificial Sequence
  Description of Artificial Sequence: Synthetic oligonucleotide
  Sense strand starting at position 933 of SEQ ID NO: 1880166
uagugagaaugagacgaau

SEQ ID NO: 1947049 - RNA, 19 nt, Artificial Sequence
  Description of Artificial Sequence: Synthetic oligonucleotide
  Antisense strand to SEQ ID NO: 1947048
auucgucucauucucacua

SEQ ID NO: 1947050 - RNA, 19 nt, Artificial Sequence
  Description of Artificial Sequence: Synthetic oligonucleotide
  Sense strand starting at position 1058 of SEQ ID NO: 1880166
aagaaucacuguugguaag

SEQ ID NO: 1947051 - RNA, 19 nt, Artificial Sequence
  Description of Artificial Sequence: Synthetic oligonucleotide
  Antisense strand to SEQ ID NO: 1947050
cuuaccaacagugauucuu

SEQ ID NO: 1947052 - RNA, 19 nt, Artificial Sequence
  Description of Artificial Sequence: Synthetic oligonucleotide
  Sense strand starting at position 1059 of SEQ ID NO: 1880166
agaaucacuguugguaaga

SEQ ID NO: 1947053 - RNA, 19 nt, Artificial Sequence
  Description of Artificial Sequence: Synthetic oligonucleotide
  Antisense strand to SEQ ID NO: 1947052
ucuuaccaacagugauucu

SEQ ID NO: 1947054 - RNA, 19 nt, Artificial Sequence
  Description of Artificial Sequence: Synthetic oligonucleotide
  Sense strand starting at position 1060 of SEQ ID NO: 1880166
gaaucacuguugguaagau

SEQ ID NO: 1947055 - RNA, 19 nt, Artificial Sequence
  Description of Artificial Sequence: Synthetic oligonucleotide
  Antisense strand to SEQ ID NO: 1947054
aucuuaccaacagugauuc

SEQ ID NO: 1947056 - RNA, 19 nt, Artificial Sequence
  Description of Artificial Sequence: Synthetic oligonucleotide
  Sense strand starting at position 1061 of SEQ ID NO: 1880166
aaucacuguugguaagaua

SEQ ID NO: 1947057 - RNA, 19 nt, Artificial Sequence
  Description of Artificial Sequence: Synthetic oligonucleotide
  Antisense strand to SEQ ID NO: 1947056
uaucuuaccaacagugauu

SEQ ID NO: 1947058 - RNA, 19 nt, Artificial Sequence
  Description of Artificial Sequence: Synthetic oligonucleotide
  Sense strand starting at position 1247 of SEQ ID NO: 1880166
uaucucuuguucugaggga

SEQ ID NO: 1947059 - RNA, 19 nt, Artificial Sequence
  Description of Artificial Sequence: Synthetic oligonucleotide
  Antisense strand to SEQ ID NO: 1947058
ucccucagaacaagagaua

SEQ ID NO: 1947060 - RNA, 19 nt, Artificial Sequence
  Description of Artificial Sequence: Synthetic oligonucleotide
  Sense strand starting at position 1262 of SEQ ID NO: 1880166
gggaaagcaggcugguaau

SEQ ID NO: 1947061 - RNA, 19 nt, Artificial Sequence
  Description of Artificial Sequence: Synthetic oligonucleotide
  Antisense strand to SEQ ID NO: 1947060
auuaccagccugcuuuccc

SEQ ID NO: 1947062 - RNA, 19 nt, Artificial Sequence
  Description of Artificial Sequence: Synthetic oligonucleotide
  Sense strand starting at position 1308 of SEQ ID NO: 1880166
ggccacagccauuagagau

SEQ ID NO: 1947063 - RNA, 19 nt, Artificial Sequence
  Description of Artificial Sequence: Synthetic oligonucleotide
  Antisense strand to SEQ ID NO: 1947062
aucucuaauggcuguggcc

SEQ ID NO: 1947064 - RNA, 19 nt, Artificial Sequence
  Description of Artificial Sequence: Synthetic oligonucleotide
  Sense strand starting at position 1413 of SEQ ID NO: 1880166
aaccuaagguccugaaagu

SEQ ID NO: 1947065 - RNA, 19 nt, Artificial Sequence
  Description of Artificial Sequence: Synthetic oligonucleotide
  Antisense strand to SEQ ID NO: 1947064
acuuucaggaccuuagguu

SEQ ID NO: 1947066 - RNA, 19 nt, Artificial Sequence
  Description of Artificial Sequence: Synthetic oligonucleotide
  Sense strand starting at position 1424 of SEQ ID NO: 1880166
cugaaagugggcugaagaa

SEQ ID NO: 1947067 - RNA, 19 nt, Artificial Sequence
  Description of Artificial Sequence: Synthetic oligonucleotide
  Antisense strand to SEQ ID NO: 1947066
uucuucagcccacuuucag

SEQ ID NO: 1947068 - RNA, 19 nt, Artificial Sequence
  Description of Artificial Sequence: Synthetic oligonucleotide
  Sense strand starting at position 1436 of SEQ ID NO: 1880166
ugaagaauuccggguacac

SEQ ID NO: 1947069 - RNA, 19 nt, Artificial Sequence
  Description of Artificial Sequence: Synthetic oligonucleotide
  Antisense strand to SEQ ID NO: 1947068
guguacccggaauucuuca

SEQ ID NO: 1947070 - RNA, 19 nt, Artificial Sequence
  Description of Artificial Sequence: Synthetic oligonucleotide
  Sense strand starting at position 1660 of SEQ ID NO: 1880166
ucgaaucaguuuccuaaau

SEQ ID NO: 1947071 - RNA, 19 nt, Artificial Sequence
  Description of Artificial Sequence: Synthetic oligonucleotide
  Antisense strand to SEQ ID NO: 1947070
auuuaggaaacugauucga

SEQ ID NO: 1947072 - RNA, 19 nt, Artificial Sequence
  Description of Artificial Sequence: Synthetic oligonucleotide
  Sense strand starting at position 1661 of SEQ ID NO: 1880166
cgaaucaguuuccuaaauu

SEQ ID NO: 1947073 - RNA, 19 nt, Artificial Sequence
  Description of Artificial Sequence: Synthetic oligonucleotide
  Antisense strand to SEQ ID NO: 1947072
aauuuaggaaacugauucg

SEQ ID NO: 1947074 - RNA, 19 nt, Artificial Sequence
  Description of Artificial Sequence: Synthetic oligonucleotide
  Sense strand starting at position 2007 of SEQ ID NO: 1880166
ugcugucuccaccaagaca

SEQ ID NO: 1947075 - RNA, 19 nt, Artificial Sequence
  Description of Artificial Sequence: Synthetic oligonucleotide
  Antisense strand to SEQ ID NO: 1947074
ugucuugguggagacagca

SEQ ID NO: 1947076 - RNA, 19 nt, Artificial Sequence
  Description of Artificial Sequence: Synthetic oligonucleotide
  Sense strand starting at position 2096 of SEQ ID NO: 1880166
ccuuguggcuggucuugaa

SEQ ID NO: 1947077 - RNA, 19 nt, Artificial Sequence
  Description of Artificial Sequence: Synthetic oligonucleotide
  Antisense strand to SEQ ID NO: 1947076
uucaagaccagccacaagg

SEQ ID NO: 1947078 - RNA, 19 nt, Artificial Sequence
  Description of Artificial Sequence: Synthetic oligonucleotide
  Sense strand starting at position 2194 of SEQ ID NO: 1880166
cgcgaauaccugcaguugu

SEQ ID NO: 1947079 - RNA, 19 nt, Artificial Sequence
  Description of Artificial Sequence: Synthetic oligonucleotide
  Antisense strand to SEQ ID NO: 1947078
acaacugcagguauucgcg

SEQ ID NO: 1947080 - RNA, 19 nt, Artificial Sequence
  Description of Artificial Sequence: Synthetic oligonucleotide
  Sense strand starting at position 2204 of SEQ ID NO: 1880166
ugcaguuguccauagccuu

SEQ ID NO: 1947081 - RNA, 19 nt, Artificial Sequence
  Description of Artificial Sequence: Synthetic oligonucleotide
  Antisense strand to SEQ ID NO: 1947080
aaggcuauggacaacugca

SEQ ID NO: 1947082 - RNA, 19 nt, Artificial Sequence
  Description of Artificial Sequence: Synthetic oligonucleotide
  Sense strand starting at position 2227 of SEQ ID NO: 1880166
uguuaacuuuaugagauag

SEQ ID NO: 1947083 - RNA, 19 nt, Artificial Sequence
  Description of Artificial Sequence: Synthetic oligonucleotide
  Antisense strand to SEQ ID NO: 1947082
cuaucucauaaaguuaaca

SEQ ID NO: 1947084 - RNA, 19 nt, Artificial Sequence
  Description of Artificial Sequence: Synthetic oligonucleotide
  Sense strand starting at position 2492 of SEQ ID NO: 1880166
uaaagaguuuauugugguu

SEQ ID NO: 1947085 - RNA, 19 nt, Artificial Sequence
  Description of Artificial Sequence: Synthetic oligonucleotide
  Antisense strand to SEQ ID NO: 1947084
aaccacaauaaacucuuua

SEQ ID NO: 1947086 - RNA, 19 nt, Artificial Sequence
  Description of Artificial Sequence: Synthetic oligonucleotide
  Sense strand starting at position 2800 of SEQ ID NO: 1880166
cuggucuauuucuaaagag

SEQ ID NO: 1947087 - RNA, 19 nt, Artificial Sequence
  Description of Artificial Sequence: Synthetic oligonucleotide
  Antisense strand to SEQ ID NO: 1947086
cucuuuagaaauagaccag

SEQ ID NO: 1947088 - RNA, 19 nt, Artificial Sequence
  Description of Artificial Sequence: Synthetic oligonucleotide
  Sense strand starting at position 2849 of SEQ ID NO: 1880166
aacugcauguauccgaauu

SEQ ID NO: 1947089 - RNA, 19 nt, Artificial Sequence
  Description of Artificial Sequence: Synthetic oligonucleotide
  Antisense strand to SEQ ID NO: 1947088
aauucggauacaugcaguu

SEQ ID NO: 1947090 - RNA, 19 nt, Artificial Sequence
  Description of Artificial Sequence: Synthetic oligonucleotide
  Sense strand starting at position 3816 of SEQ ID NO: 1880166
uuuaaaguuuccuuaguuc

SEQ ID NO: 1947091 - RNA, 19 nt, Artificial Sequence
  Description of Artificial Sequence: Synthetic oligonucleotide
  Antisense strand to SEQ ID NO: 1947090
gaacuaaggaaacuuuaaa

SEQ ID NO: 1947092 - RNA, 19 nt, Artificial Sequence
  Description of Artificial Sequence: Synthetic oligonucleotide
  Sense strand starting at position 36 of SEQ ID NO: 1880167
ggauuaagcugaucaacuu

SEQ ID NO: 1947093 - RNA, 19 nt, Artificial Sequence
  Description of Artificial Sequence: Synthetic oligonucleotide
  Antisense strand to SEQ ID NO: 1947092
aaguugaucagcuuaaucc

SEQ ID NO: 1947094 - RNA, 19 nt, Artificial Sequence
  Description of Artificial Sequence: Synthetic oligonucleotide
  Sense strand starting at position 238 of SEQ ID NO: 1880167
ucagaaguucgagacccau

SEQ ID NO: 1947095 - RNA, 19 nt, Artificial Sequence
  Description of Artificial Sequence: Synthetic oligonucleotide
  Antisense strand to SEQ ID NO: 1947094
augggucucgaacuucuga

SEQ ID NO: 1947096 - RNA, 19 nt, Artificial Sequence
  Description of Artificial Sequence: Synthetic oligonucleotide
  Sense strand starting at position 511 of SEQ ID NO: 1880167
agcccugguccugaaacau

SEQ ID NO: 1947097 - RNA, 19 nt, Artificial Sequence
  Description of Artificial Sequence: Synthetic oligonucleotide
  Antisense strand to SEQ ID NO: 1947096
auguuucaggaccagggcu

SEQ ID NO: 1947098 - RNA, 19 nt, Artificial Sequence
  Description of Artificial Sequence: Synthetic oligonucleotide
  Sense strand starting at position 567 of SEQ ID NO: 1880167
ugaccugcgcugucaaagu

SEQ ID NO: 1947099 - RNA, 19 nt, Artificial Sequence
  Description of Artificial Sequence: Synthetic oligonucleotide
  Antisense strand to SEQ ID NO: 1947098
acuuugacagcgcagguca

SEQ ID NO: 1947100 - RNA, 19 nt, Artificial Sequence
  Description of Artificial Sequence: Synthetic oligonucleotide
  Sense strand starting at position 578 of SEQ ID NO: 1880167
gucaaagucuuuccagguu

SEQ ID NO: 1947101 - RNA, 19 nt, Artificial Sequence
  Description of Artificial Sequence: Synthetic oligonucleotide
  Antisense strand to SEQ ID NO: 1947100
aaccuggaaagacuuugac

SEQ ID NO: 1947102 - RNA, 19 nt, Artificial Sequence
  Description of Artificial Sequence: Synthetic oligonucleotide
  Sense strand starting at position 743 of SEQ ID NO: 1880167
aguccucgaucaccagaaa

SEQ ID NO: 1947103 - RNA, 19 nt, Artificial Sequence
  Description of Artificial Sequence: Synthetic oligonucleotide
  Antisense strand to SEQ ID NO: 1947102
uuucuggugaucgaggacu

SEQ ID NO: 1947104 - RNA, 19 nt, Artificial Sequence
  Description of Artificial Sequence: Synthetic oligonucleotide
  Sense strand starting at position 847 of SEQ ID NO: 1880167
ugguccucagaaugauaca

SEQ ID NO: 1947105 - RNA, 19 nt, Artificial Sequence
  Description of Artificial Sequence: Synthetic oligonucleotide
  Antisense strand to SEQ ID NO: 1947104
uguaucauucugaggacca

SEQ ID NO: 1947106 - RNA, 19 nt, Artificial Sequence
  Description of Artificial Sequence: Synthetic oligonucleotide
  Sense strand starting at position 950 of SEQ ID NO: 1880167
gagucuuaugcugguuaac

SEQ ID NO: 1947107 - RNA, 19 nt, Artificial Sequence
  Description of Artificial Sequence: Synthetic oligonucleotide
  Antisense strand to SEQ ID NO: 1947106
guuaaccagcauaagacuc

SEQ ID NO: 1947108 - RNA, 19 nt, Artificial Sequence
  Description of Artificial Sequence: Synthetic oligonucleotide
  Sense strand starting at position 952 of SEQ ID NO: 1880167
gucuuaugcugguuaacug

SEQ ID NO: 1947109 - RNA, 19 nt, Artificial Sequence
  Description of Artificial Sequence: Synthetic oligonucleotide
  Antisense strand to SEQ ID NO: 1947108
caguuaaccagcauaagac

SEQ ID NO: 1947110 - RNA, 19 nt, Artificial Sequence
  Description of Artificial Sequence: Synthetic oligonucleotide
  Sense strand starting at position 961 of SEQ ID NO: 1880167
ugguuaacuguacaugcaa

SEQ ID NO: 1947111 - RNA, 19 nt, Artificial Sequence
  Description of Artificial Sequence: Synthetic oligonucleotide
  Antisense strand to SEQ ID NO: 1947110
uugcauguacaguuaacca

SEQ ID NO: 1947112 - RNA, 19 nt, Artificial Sequence
  Description of Artificial Sequence: Synthetic oligonucleotide
  Sense strand starting at position 991 of SEQ ID NO: 1880167
uucugcuguucuguggaaa

SEQ ID NO: 1947113 - RNA, 19 nt, Artificial Sequence
  Description of Artificial Sequence: Synthetic oligonucleotide
  Antisense strand to SEQ ID NO: 1947112
uuuccacagaacagcagaa

SEQ ID NO: 1947114 - RNA, 19 nt, Artificial Sequence
  Description of Artificial Sequence: Synthetic oligonucleotide
  Sense strand starting at position 994 of SEQ ID NO: 1880167
ugcuguucuguggaaacaa

SEQ ID NO: 1947115 - RNA, 19 nt, Artificial Sequence
  Description of Artificial Sequence: Synthetic oligonucleotide
  Antisense strand to SEQ ID NO: 1947114
uuguuuccacagaacagca

SEQ ID NO: 1947116 - RNA, 19 nt, Artificial Sequence
  Description of Artificial Sequence: Synthetic oligonucleotide
  Sense strand starting at position 1021 of SEQ ID NO: 1880167
ugauaaaggucucuggcua

SEQ ID NO: 1947117 - RNA, 19 nt, Artificial Sequence
  Description of Artificial Sequence: Synthetic oligonucleotide
  Antisense strand to SEQ ID NO: 1947116
uagccagagaccuuuauca

SEQ ID NO: 1947118 - RNA, 19 nt, Artificial Sequence
  Description of Artificial Sequence: Synthetic oligonucleotide
  Sense strand starting at position 1022 of SEQ ID NO: 1880167
gauaaaggucucuggcuac

SEQ ID NO: 1947119 - RNA, 19 nt, Artificial Sequence
  Description of Artificial Sequence: Synthetic oligonucleotide
  Antisense strand to SEQ ID NO: 1947118
guagccagagaccuuuauc

SEQ ID NO: 1947120 - RNA, 19 nt, Artificial Sequence
  Description of Artificial Sequence: Synthetic oligonucleotide
  Sense strand starting at position 1084 of SEQ ID NO: 1880167
uguugcagaucaguuacaa

SEQ ID NO: 1947121 - RNA, 19 nt, Artificial Sequence
  Description of Artificial Sequence: Synthetic oligonucleotide
  Antisense strand to SEQ ID NO: 1947120
uuguaacugaucugcaaca

SEQ ID NO: 1947122 - RNA, 19 nt, Artificial Sequence
  Description of Artificial Sequence: Synthetic oligonucleotide
  Sense strand starting at position 1174 of SEQ ID NO: 1880167
gcagcugcagcuucgauaa

SEQ ID NO: 1947123 - RNA, 19 nt, Artificial Sequence
  Description of Artificial Sequence: Synthetic oligonucleotide
  Antisense strand to SEQ ID NO: 1947122
uuaucgaagcugcagcugc

SEQ ID NO: 1947124 - RNA, 19 nt, Artificial Sequence
  Description of Artificial Sequence: Synthetic oligonucleotide
  Sense strand starting at position 1233 of SEQ ID NO: 1880167
gccucaccuguccaucauu

SEQ ID NO: 1947125 - RNA, 19 nt, Artificial Sequence
  Description of Artificial Sequence: Synthetic oligonucleotide
  Antisense strand to SEQ ID NO: 1947124
aaugauggacaggugaggc

SEQ ID NO: 1947126 - RNA, 19 nt, Artificial Sequence
  Description of Artificial Sequence: Synthetic oligonucleotide
  Sense strand starting at position 1270 of SEQ ID NO: 1880167
ccgggaucucuguagacua

SEQ ID NO: 1947127 - RNA, 19 nt, Artificial Sequence
  Description of Artificial Sequence: Synthetic oligonucleotide
  Antisense strand to SEQ ID NO: 1947126
uagucuacagagaucccgg

SEQ ID NO: 1947128 - RNA, 19 nt, Artificial Sequence
  Description of Artificial Sequence: Synthetic oligonucleotide
  Sense strand starting at position 1280 of SEQ ID NO: 1880167
uguagacuaagucagucau

SEQ ID NO: 1947129 - RNA, 19 nt, Artificial Sequence
  Description of Artificial Sequence: Synthetic oligonucleotide
  Antisense strand to SEQ ID NO: 1947128
augacugacuuagucuaca

SEQ ID NO: 1947130 - RNA, 19 nt, Artificial Sequence
  Description of Artificial Sequence: Synthetic oligonucleotide
  Sense strand starting at position 1286 of SEQ ID NO: 1880167
cuaagucagucauccugua

SEQ ID NO: 1947131 - RNA, 19 nt, Artificial Sequence
  Description of Artificial Sequence: Synthetic oligonucleotide
  Antisense strand to SEQ ID NO: 1947130
uacaggaugacugacuuag

SEQ ID NO: 1947132 - RNA, 19 nt, Artificial Sequence
  Description of Artificial Sequence: Synthetic oligonucleotide
  Sense strand starting at position 1344 of SEQ ID NO: 1880167
uuucucagucuugauggga

SEQ ID NO: 1947133 - RNA, 19 nt, Artificial Sequence
  Description of Artificial Sequence: Synthetic oligonucleotide
  Antisense strand to SEQ ID NO: 1947132
ucccaucaagacugagaaa

SEQ ID NO: 1947134 - RNA, 19 nt, Artificial Sequence
  Description of Artificial Sequence: Synthetic oligonucleotide
  Sense strand starting at position 1372 of SEQ ID NO: 1880167
ccgccuauuacagguaaga

SEQ ID NO: 1947135 - RNA, 19 nt, Artificial Sequence
  Description of Artificial Sequence: Synthetic oligonucleotide
  Antisense strand to SEQ ID NO: 1947134
ucuuaccuguaauaggcgg

SEQ ID NO: 1947136 - RNA, 19 nt, Artificial Sequence
  Description of Artificial Sequence: Synthetic oligonucleotide
  Sense strand starting at position 1388 of SEQ ID NO: 1880167
agagguuuagaccgauuaa

SEQ ID NO: 1947137 - RNA, 19 nt, Artificial Sequence
  Description of Artificial Sequence: Synthetic oligonucleotide
  Antisense strand to SEQ ID NO: 1947136
uuaaucggucuaaaccucu

SEQ ID NO: 1947138 - RNA, 19 nt, Artificial Sequence
  Description of Artificial Sequence: Synthetic oligonucleotide
  Sense strand starting at position 1400 of SEQ ID NO: 1880167
cgauuaaguuacuuccuga

SEQ ID NO: 1947139 - RNA, 19 nt, Artificial Sequence
  Description of Artificial Sequence: Synthetic oligonucleotide
  Antisense strand to SEQ ID NO: 1947138
ucaggaaguaacuuaaucg

SEQ ID NO: 1947140 - RNA, 19 nt, Artificial Sequence
  Description of Artificial Sequence: Synthetic oligonucleotide
  Sense strand starting at position 1405 of SEQ ID NO: 1880167
aaguuacuuccugaagguc

SEQ ID NO: 1947141 - RNA, 19 nt, Artificial Sequence
  Description of Artificial Sequence: Synthetic oligonucleotide
  Antisense strand to SEQ ID NO: 1947140
gaccuucaggaaguaacuu

SEQ ID NO: 1947142 - RNA, 19 nt, Artificial Sequence
  Description of Artificial Sequence: Synthetic oligonucleotide
  Sense strand starting at position 1422 of SEQ ID NO: 1880167
ucgcuuagucacuuagcga

SEQ ID NO: 1947143 - RNA, 19 nt, Artificial Sequence
  Description of Artificial Sequence: Synthetic oligonucleotide
  Antisense strand to SEQ ID NO: 1947142
ucgcuaagugacuaagcga

SEQ ID NO: 1947144 - RNA, 19 nt, Artificial Sequence
  Description of Artificial Sequence: Synthetic oligonucleotide
  Sense strand starting at position 2032 of SEQ ID NO: 1880167
cgagcaagagcuuauauag

SEQ ID NO: 1947145 - RNA, 19 nt, Artificial Sequence
  Description of Artificial Sequence: Synthetic oligonucleotide
  Antisense strand to SEQ ID NO: 1947144
cuauauaagcucuugcucg

SEQ ID NO: 1947146 - RNA, 19 nt, Artificial Sequence
  Description of Artificial Sequence: Synthetic oligonucleotide
  Sense strand starting at position 2288 of SEQ ID NO: 1880167
uggaguugucucugggaug

SEQ ID NO: 1947147 - RNA, 19 nt, Artificial Sequence
  Description of Artificial Sequence: Synthetic oligonucleotide
  Antisense strand to SEQ ID NO: 1947146
caucccagagacaacucca

SEQ ID NO: 1947148 - RNA, 19 nt, Artificial Sequence
  Description of Artificial Sequence: Synthetic oligonucleotide
  Sense strand starting at position 2302 of SEQ ID NO: 1880167
ggaugucuuucagucugga

SEQ ID NO: 1947149 - RNA, 19 nt, Artificial Sequence
  Description of Artificial Sequence: Synthetic oligonucleotide
  Antisense strand to SEQ ID NO: 1947148
uccagacugaaagacaucc

SEQ ID NO: 1947150 - RNA, 19 nt, Artificial Sequence
  Description of Artificial Sequence: Synthetic oligonucleotide
  Sense strand starting at position 2443 of SEQ ID NO: 1880167
aggcuugucucuuccacua

SEQ ID NO: 1947151 - RNA, 19 nt, Artificial Sequence
  Description of Artificial Sequence: Synthetic oligonucleotide
  Antisense strand to SEQ ID NO: 1947150
uaguggaagagacaagccu

SEQ ID NO: 1947152 - RNA, 19 nt, Artificial Sequence
  Description of Artificial Sequence: Synthetic oligonucleotide
  Sense strand starting at position 2490 of SEQ ID NO: 1880167
uuuaacugugucugauuau

SEQ ID NO: 1947153 - RNA, 19 nt, Artificial Sequence
  Description of Artificial Sequence: Synthetic oligonucleotide
  Antisense strand to SEQ ID NO: 1947152
auaaucagacacaguuaaa

SEQ ID NO: 1947154 - RNA, 19 nt, Artificial Sequence
  Description of Artificial Sequence: Synthetic oligonucleotide
  Sense strand starting at position 2501 of SEQ ID NO: 1880167
cugauuaucugaucuaguu

SEQ ID NO: 1947155 - RNA, 19 nt, Artificial Sequence
  Description of Artificial Sequence: Synthetic oligonucleotide
  Antisense strand to SEQ ID NO: 1947154
aacuagaucagauaaucag

SEQ ID NO: 1947156 - RNA, 19 nt, Artificial Sequence
  Description of Artificial Sequence: Synthetic oligonucleotide
  Sense strand starting at position 2536 of SEQ ID NO: 1880167
guacgcucuguggacaaau

SEQ ID NO: 1947157 - RNA, 19 nt, Artificial Sequence
  Description of Artificial Sequence: Synthetic oligonucleotide
  Antisense strand to SEQ ID NO: 1947156
auuuguccacagagcguac

SEQ ID NO: 1947158 - RNA, 19 nt, Artificial Sequence
  Description of Artificial Sequence: Synthetic oligonucleotide
  Sense strand starting at position 2538 of SEQ ID NO: 1880167
acgcucuguggacaaauaa

SEQ ID NO: 1947159 - RNA, 19 nt, Artificial Sequence
  Description of Artificial Sequence: Synthetic oligonucleotide
  Antisense strand to SEQ ID NO: 1947158
uuauuuguccacagagcgu

SEQ ID NO: 1947160 - RNA, 19 nt, Artificial Sequence
  Description of Artificial Sequence: Synthetic oligonucleotide
  Sense strand starting at position 2659 of SEQ ID NO: 1880167
augaauaagccucaguaug

SEQ ID NO: 1947161 - RNA, 19 nt, Artificial Sequence
  Description of Artificial Sequence: Synthetic oligonucleotide
  Antisense strand to SEQ ID NO: 1947160
cauacugaggcuuauucau

SEQ ID NO: 1947162 - RNA, 19 nt, Artificial Sequence
  Description of Artificial Sequence: Synthetic oligonucleotide
  Sense strand starting at position 2688 of SEQ ID NO: 1880167
ggugauugccgagaauuaa

SEQ ID NO: 1947163 - RNA, 19 nt, Artificial Sequence
  Description of Artificial Sequence: Synthetic oligonucleotide
  Antisense strand to SEQ ID NO: 1947162
uuaauucucggcaaucacc

SEQ ID NO: 1947164 - RNA, 19 nt, Artificial Sequence
  Description of Artificial Sequence: Synthetic oligonucleotide
  Sense strand starting at position 2893 of SEQ ID NO: 1880167
ggccaacuuuccuugcuua

SEQ ID NO: 1947165 - RNA, 19 nt, Artificial Sequence
  Description of Artificial Sequence: Synthetic oligonucleotide
  Antisense strand to SEQ ID NO: 1947164
uaagcaaggaaaguuggcc

SEQ ID NO: 1947166 - RNA, 19 nt, Artificial Sequence
  Description of Artificial Sequence: Synthetic oligonucleotide
  Sense strand starting at position 3405 of SEQ ID NO: 1880167
ccuaaucguugacccagau

SEQ ID NO: 1947167 - RNA, 19 nt, Artificial Sequence
  Description of Artificial Sequence: Synthetic oligonucleotide
  Antisense strand to SEQ ID NO: 1947166
aucugggucaacgauuagg

SEQ ID NO: 1947168 - RNA, 19 nt, Artificial Sequence
  Description of Artificial Sequence: Synthetic oligonucleotide
  Sense strand starting at position 3409 of SEQ ID NO: 1880167
aucguugacccagaugaua

SEQ ID NO: 1947169 - RNA, 19 nt, Artificial Sequence
  Description of Artificial Sequence: Synthetic oligonucleotide
  Antisense strand to SEQ ID NO: 1947168
uaucaucugggucaacgau

SEQ ID NO: 1947170 - RNA, 19 nt, Artificial Sequence
  Description of Artificial Sequence: Synthetic oligonucleotide
  Sense strand starting at position 3433 of SEQ ID NO: 1880167
agucucuuaucucccagau

SEQ ID NO: 1947171 - RNA, 19 nt, Artificial Sequence
  Description of Artificial Sequence: Synthetic oligonucleotide
  Antisense strand to SEQ ID NO: 1947170
aucugggagauaagagacu

SEQ ID NO: 1947172 - RNA, 19 nt, Artificial Sequence
  Description of Artificial Sequence: Synthetic oligonucleotide
  Sense strand starting at position 224 of SEQ ID NO: 1880168
gcaggagaaucacuuagca

SEQ ID NO: 1947173 - RNA, 19 nt, Artificial Sequence
  Description of Artificial Sequence: Synthetic oligonucleotide
  Antisense strand to SEQ ID NO: 1947172
ugcuaagugauucuccugc

SEQ ID NO: 1947174 - RNA, 19 nt, Artificial Sequence
  Description of Artificial Sequence: Synthetic oligonucleotide
  Sense strand starting at position 564 of SEQ ID NO: 1880168
guguauccacguuggacaa

SEQ ID NO: 1947175 - RNA, 19 nt, Artificial Sequence
  Description of Artificial Sequence: Synthetic oligonucleotide
  Antisense strand to SEQ ID NO: 1947174
uuguccaacguggauacac

SEQ ID NO: 1947176 - RNA, 19 nt, Artificial Sequence
  Description of Artificial Sequence: Synthetic oligonucleotide
  Sense strand starting at position 577 of SEQ ID NO: 1880168
ggacaaucaguguaacgca

SEQ ID NO: 1947177 - RNA, 19 nt, Artificial Sequence
  Description of Artificial Sequence: Synthetic oligonucleotide
  Antisense strand to SEQ ID NO: 1947176
ugcguuacacugauugucc

SEQ ID NO: 1947178 - RNA, 19 nt, Artificial Sequence
  Description of Artificial Sequence: Synthetic oligonucleotide
  Sense strand starting at position 592 of SEQ ID NO: 1880168
cgcauaaauuuacagaauc

SEQ ID NO: 1947179 - RNA, 19 nt, Artificial Sequence
  Description of Artificial Sequence: Synthetic oligonucleotide
  Antisense strand to SEQ ID NO: 1947178
gauucuguaaauuuaugcg

SEQ ID NO: 1947180 - RNA, 19 nt, Artificial Sequence
  Description of Artificial Sequence: Synthetic oligonucleotide
  Sense strand starting at position 709 of SEQ ID NO: 1880168
cgguuucuagacugguaac

SEQ ID NO: 1947181 - RNA, 19 nt, Artificial Sequence
  Description of Artificial Sequence: Synthetic oligonucleotide
  Antisense strand to SEQ ID NO: 1947180
guuaccagucuagaaaccg

SEQ ID NO: 1947182 - RNA, 19 nt, Artificial Sequence
  Description of Artificial Sequence: Synthetic oligonucleotide
  Sense strand starting at position 710 of SEQ ID NO: 1880168
gguuucuagacugguaaca

SEQ ID NO: 1947183 - RNA, 19 nt, Artificial Sequence
  Description of Artificial Sequence: Synthetic oligonucleotide
  Antisense strand to SEQ ID NO: 1947182
uguuaccagucuagaaacc

SEQ ID NO: 1947184 - RNA, 19 nt, Artificial Sequence
  Description of Artificial Sequence: Synthetic oligonucleotide
  Sense strand starting at position 712 of SEQ ID NO: 1880168
uuucuagacugguaacaug

SEQ ID NO: 1947185 - RNA, 19 nt, Artificial Sequence
  Description of Artificial Sequence: Synthetic oligonucleotide
  Antisense strand to SEQ ID NO: 1947184
cauguuaccagucuagaaa

SEQ ID NO: 1947186 - RNA, 19 nt, Artificial Sequence
  Description of Artificial Sequence: Synthetic oligonucleotide
  Sense strand starting at position 764 of SEQ ID NO: 1880168
cgguuaguacuauguggaa

SEQ ID NO: 1947187 - RNA, 19 nt, Artificial Sequence
  Description of Artificial Sequence: Synthetic oligonucleotide
  Antisense strand to SEQ ID NO: 1947186
uuccacauaguacuaaccg

SEQ ID NO: 1947188 - RNA, 19 nt, Artificial Sequence
  Description of Artificial Sequence: Synthetic oligonucleotide
  Sense strand starting at position 768 of SEQ ID NO: 1880168
uaguacuauguggaaggua

SEQ ID NO: 1947189 - RNA, 19 nt, Artificial Sequence
  Description of Artificial Sequence: Synthetic oligonucleotide
  Antisense strand to SEQ ID NO: 1947188
uaccuuccacauaguacua

SEQ ID NO: 1947190 - RNA, 19 nt, Artificial Sequence
  Description of Artificial Sequence: Synthetic oligonucleotide
  Sense strand starting at position 810 of SEQ ID NO: 1880168
aggcccagcuauccuaaau

SEQ ID NO: 1947191 - RNA, 19 nt, Artificial Sequence
  Description of Artificial Sequence: Synthetic oligonucleotide
  Antisense strand to SEQ ID NO: 1947190
auuuaggauagcugggccu

SEQ ID NO: 1947192 - RNA, 19 nt, Artificial Sequence
  Description of Artificial Sequence: Synthetic oligonucleotide
  Sense strand starting at position 1255 of SEQ ID NO: 1880168
acgacaaugugccuacuau

SEQ ID NO: 1947193 - RNA, 19 nt, Artificial Sequence
  Description of Artificial Sequence: Synthetic oligonucleotide
  Antisense strand to SEQ ID NO: 1947192
auaguaggcacauugucgu

SEQ ID NO: 1947194 - RNA, 19 nt, Artificial Sequence
  Description of Artificial Sequence: Synthetic oligonucleotide
  Sense strand starting at position 1256 of SEQ ID NO: 1880168
cgacaaugugccuacuaug

SEQ ID NO: 1947195 - RNA, 19 nt, Artificial Sequence
  Description of Artificial Sequence: Synthetic oligonucleotide
  Antisense strand to SEQ ID NO: 1947194
cauaguaggcacauugucg

SEQ ID NO: 1947196 - RNA, 19 nt, Artificial Sequence
  Description of Artificial Sequence: Synthetic oligonucleotide
  Sense strand starting at position 1511 of SEQ ID NO: 1880168
ggugguggaucaccggaaa

SEQ ID NO: 1947197 - RNA, 19 nt, Artificial Sequence
  Description of Artificial Sequence: Synthetic oligonucleotide
  Antisense strand to SEQ ID NO: 1947196
uuuccggugauccaccacc

SEQ ID NO: 1947198 - RNA, 19 nt, Artificial Sequence
  Description of Artificial Sequence: Synthetic oligonucleotide
  Sense strand starting at position 1761 of SEQ ID NO: 1880168
auaugaucuuccuagggaa

SEQ ID NO: 1947199 - RNA, 19 nt, Artificial Sequence
  Description of Artificial Sequence: Synthetic oligonucleotide
  Antisense strand to SEQ ID NO: 1947198
uucccuaggaagaucauau

SEQ ID NO: 1947200 - RNA, 19 nt, Artificial Sequence
  Description of Artificial Sequence: Synthetic oligonucleotide
  Sense strand starting at position 1783 of SEQ ID NO: 1880168
cggcuacugaucuauagca

SEQ ID NO: 1947201 - RNA, 19 nt, Artificial Sequence
  Description of Artificial Sequence: Synthetic oligonucleotide
  Antisense strand to SEQ ID NO: 1947200
ugcuauagaucaguagccg

SEQ ID NO: 1947202 - RNA, 19 nt, Artificial Sequence
  Description of Artificial Sequence: Synthetic oligonucleotide
  Sense strand starting at position 1785 of SEQ ID NO: 1880168
gcuacugaucuauagcauu

SEQ ID NO: 1947203 - RNA, 19 nt, Artificial Sequence
  Description of Artificial Sequence: Synthetic oligonucleotide
  Antisense strand to SEQ ID NO: 1947202
aaugcuauagaucaguagc

SEQ ID NO: 1947204 - RNA, 19 nt, Artificial Sequence
  Description of Artificial Sequence: Synthetic oligonucleotide
  Sense strand starting at position 1788 of SEQ ID NO: 1880168
acugaucuauagcauuaga

SEQ ID NO: 1947205 - RNA, 19 nt, Artificial Sequence
  Description of Artificial Sequence: Synthetic oligonucleotide
  Antisense strand to SEQ ID NO: 1947204
ucuaaugcuauagaucagu

SEQ ID NO: 1947206 - RNA, 19 nt, Artificial Sequence
  Description of Artificial Sequence: Synthetic oligonucleotide
  Sense strand starting at position 1822 of SEQ ID NO: 1880168
gcaagcaucugaucacacu

SEQ ID NO: 1947207 - RNA, 19 nt, Artificial Sequence
  Description of Artificial Sequence: Synthetic oligonucleotide
  Antisense strand to SEQ ID NO: 1947206
agugugaucagaugcuugc

SEQ ID NO: 1947208 - RNA, 19 nt, Artificial Sequence
  Description of Artificial Sequence: Synthetic oligonucleotide
  Sense strand starting at position 2106 of SEQ ID NO: 1880168
gggaauguacguuacagaa

SEQ ID NO: 1947209 - RNA, 19 nt, Artificial Sequence
  Description of Artificial Sequence: Synthetic oligonucleotide
  Antisense strand to SEQ ID NO: 1947208
uucuguaacguacauuccc

SEQ ID NO: 1947210 - RNA, 19 nt, Artificial Sequence
  Description of Artificial Sequence: Synthetic oligonucleotide
  Sense strand starting at position 2114 of SEQ ID NO: 1880168
acguuacagaaauagguuu

SEQ ID NO: 1947211 - RNA, 19 nt, Artificial Sequence
  Description of Artificial Sequence: Synthetic oligonucleotide
  Antisense strand to SEQ ID NO: 1947210
aaaccuauuucuguaacgu

SEQ ID NO: 1947212 - RNA, 19 nt, Artificial Sequence
  Description of Artificial Sequence: Synthetic oligonucleotide
  Sense strand starting at position 2120 of SEQ ID NO: 1880168
cagaaauagguuuguaggu

SEQ ID NO: 1947213 - RNA, 19 nt, Artificial Sequence
  Description of Artificial Sequence: Synthetic oligonucleotide
  Antisense strand to SEQ ID NO: 1947212
accuacaaaccuauuucug

SEQ ID NO: 1947214 - RNA, 19 nt, Artificial Sequence
  Description of Artificial Sequence: Synthetic oligonucleotide
  Sense strand starting at position 2121 of SEQ ID NO: 1880168
agaaauagguuuguaggua

SEQ ID NO: 1947215 - RNA, 19 nt, Artificial Sequence
  Description of Artificial Sequence: Synthetic oligonucleotide
  Antisense strand to SEQ ID NO: 1947214
uaccuacaaaccuauuucu

SEQ ID NO: 1947216 - RNA, 19 nt, Artificial Sequence
  Description of Artificial Sequence: Synthetic oligonucleotide
  Sense strand starting at position 2125 of SEQ ID NO: 1880168
auagguuuguagguaugua

SEQ ID NO: 1947217 - RNA, 19 nt, Artificial Sequence
  Description of Artificial Sequence: Synthetic oligonucleotide
  Antisense strand to SEQ ID NO: 1947216
uacauaccuacaaaccuau

SEQ ID NO: 1947218 - RNA, 19 nt, Artificial Sequence
  Description of Artificial Sequence: Synthetic oligonucleotide
  Sense strand starting at position 2133 of SEQ ID NO: 1880168
guagguauguagcugcaga

SEQ ID NO: 1947219 - RNA, 19 nt, Artificial Sequence
  Description of Artificial Sequence: Synthetic oligonucleotide
  Antisense strand to SEQ ID NO: 1947218
ucugcagcuacauaccuac

SEQ ID NO: 1947220 - RNA, 19 nt, Artificial Sequence
  Description of Artificial Sequence: Synthetic oligonucleotide
  Sense strand starting at position 2154 of SEQ ID NO: 1880168
acguuuacuucugugcaau

SEQ ID NO: 1947221 - RNA, 19 nt, Artificial Sequence
  Description of Artificial Sequence: Synthetic oligonucleotide
  Antisense strand to SEQ ID NO: 1947220
auugcacagaaguaaacgu

SEQ ID NO: 1947222 - RNA, 19 nt, Artificial Sequence
  Description of Artificial Sequence: Synthetic oligonucleotide
  Sense strand starting at position 2156 of SEQ ID NO: 1880168
guuuacuucugugcaauca

SEQ ID NO: 1947223 - RNA, 19 nt, Artificial Sequence
  Description of Artificial Sequence: Synthetic oligonucleotide
  Antisense strand to SEQ ID NO: 1947222
ugauugcacagaaguaaac

SEQ ID NO: 1947224 - RNA, 19 nt, Artificial Sequence
  Description of Artificial Sequence: Synthetic oligonucleotide
  Sense strand starting at position 2176 of SEQ ID NO: 1880168
uggacucagucuguaggau

SEQ ID NO: 1947225 - RNA, 19 nt, Artificial Sequence
  Description of Artificial Sequence: Synthetic oligonucleotide
  Antisense strand to SEQ ID NO: 1947224
auccuacagacugagucca

SEQ ID NO: 1947226 - RNA, 19 nt, Artificial Sequence
  Description of Artificial Sequence: Synthetic oligonucleotide
  Sense strand starting at position 2177 of SEQ ID NO: 1880168
ggacucagucuguaggaua

SEQ ID NO: 1947227 - RNA, 19 nt, Artificial Sequence
  Description of Artificial Sequence: Synthetic oligonucleotide
  Antisense strand to SEQ ID NO: 1947226
uauccuacagacugagucc

SEQ ID NO: 1947228 - RNA, 19 nt, Artificial Sequence
  Description of Artificial Sequence: Synthetic oligonucleotide
  Sense strand starting at position 2607 of SEQ ID NO: 1880168
cucugucaccugugaaaga

SEQ ID NO: 1947229 - RNA, 19 nt, Artificial Sequence
  Description of Artificial Sequence: Synthetic oligonucleotide
  Antisense strand to SEQ ID NO: 1947228
ucuuucacaggugacagag

SEQ ID NO: 1947230 - RNA, 19 nt, Artificial Sequence
  Description of Artificial Sequence: Synthetic oligonucleotide
  Sense strand starting at position 2631 of SEQ ID NO: 1880168
uuugauaaaugugaaggua

SEQ ID NO: 1947231 - RNA, 19 nt, Artificial Sequence
  Description of Artificial Sequence: Synthetic oligonucleotide
  Antisense strand to SEQ ID NO: 1947230
uaccuucacauuuaucaaa

SEQ ID NO: 1947232 - RNA, 19 nt, Artificial Sequence
  Description of Artificial Sequence: Synthetic oligonucleotide
  Sense strand starting at position 2643 of SEQ ID NO: 1880168
gaagguaaauaagaugaaa

SEQ ID NO: 1947233 - RNA, 19 nt, Artificial Sequence
  Description of Artificial Sequence: Synthetic oligonucleotide
  Antisense strand to SEQ ID NO: 1947232
uuucaucuuauuuaccuuc

SEQ ID NO: 1947234 - RNA, 19 nt, Artificial Sequence
  Description of Artificial Sequence: Synthetic oligonucleotide
  Sense strand starting at position 3474 of SEQ ID NO: 1880168
aguaaagaaugcuuacgau

SEQ ID NO: 1947235 - RNA, 19 nt, Artificial Sequence
  Description of Artificial Sequence: Synthetic oligonucleotide
  Antisense strand to SEQ ID NO: 1947234
aucguaagcauucuuuacu

SEQ ID NO: 1947236 - RNA, 19 nt, Artificial Sequence
  Description of Artificial Sequence: Synthetic oligonucleotide
  Sense strand starting at position 3584 of SEQ ID NO: 1880168
cugggcuaucuugaguagu

SEQ ID NO: 1947237 - RNA, 19 nt, Artificial Sequence
  Description of Artificial Sequence: Synthetic oligonucleotide
  Antisense strand to SEQ ID NO: 1947236
acuacucaagauagcccag

SEQ ID NO: 1947238 - RNA, 19 nt, Artificial Sequence
  Description of Artificial Sequence: Synthetic oligonucleotide
  Sense strand starting at position 3586 of SEQ ID NO: 1880168
gggcuaucuugaguaguaa

SEQ ID NO: 1947239 - RNA, 19 nt, Artificial Sequence
  Description of Artificial Sequence: Synthetic oligonucleotide
  Antisense strand to SEQ ID NO: 1947238
uuacuacucaagauagccc

SEQ ID NO: 1947240 - RNA, 19 nt, Artificial Sequence
  Description of Artificial Sequence: Synthetic oligonucleotide
  Sense strand starting at position 3587 of SEQ ID NO: 1880168
ggcuaucuugaguaguaac

SEQ ID NO: 1947241 - RNA, 19 nt, Artificial Sequence
  Description of Artificial Sequence: Synthetic oligonucleotide
  Antisense strand to SEQ ID NO: 1947240
guuacuacucaagauagcc

SEQ ID NO: 1947242 - RNA, 19 nt, Artificial Sequence
  Description of Artificial Sequence: Synthetic oligonucleotide
  Sense strand starting at position 3598 of SEQ ID NO: 1880168
guaguaacguuuauggugu

SEQ ID NO: 1947243 - RNA, 19 nt, Artificial Sequence
  Description of Artificial Sequence: Synthetic oligonucleotide
  Antisense strand to SEQ ID NO: 1947242
acaccauaaacguuacuac

SEQ ID NO: 1947244 - RNA, 19 nt, Artificial Sequence
  Description of Artificial Sequence: Synthetic oligonucleotide
  Sense strand starting at position 3613 of SEQ ID NO: 1880168
guguuccuccuacauauua

SEQ ID NO: 1947245 - RNA, 19 nt, Artificial Sequence
  Description of Artificial Sequence: Synthetic oligonucleotide
  Antisense strand to SEQ ID NO: 1947244
uaauauguaggaggaacac

SEQ ID NO: 1947246 - RNA, 19 nt, Artificial Sequence
  Description of Artificial Sequence: Synthetic oligonucleotide
  Sense strand starting at position 3641 of SEQ ID NO: 1880168
cugaaugcuuuauuacgua

SEQ ID NO: 1947247 - RNA, 19 nt, Artificial Sequence
  Description of Artificial Sequence: Synthetic oligonucleotide
  Antisense strand to SEQ ID NO: 1947246
uacguaauaaagcauucag

SEQ ID NO: 1947248 - RNA, 19 nt, Artificial Sequence
  Description of Artificial Sequence: Synthetic oligonucleotide
  Sense strand starting at position 3645 of SEQ ID NO: 1880168
augcuuuauuacguacauu

SEQ ID NO: 1947249 - RNA, 19 nt, Artificial Sequence
  Description of Artificial Sequence: Synthetic oligonucleotide
  Antisense strand to SEQ ID NO: 1947248
aauguacguaauaaagcau

SEQ ID NO: 1947250 - RNA, 19 nt, Artificial Sequence
  Description of Artificial Sequence: Synthetic oligonucleotide
  Sense strand starting at position 3666 of SEQ ID NO: 1880168
uuacuaucgcagcaauucu

SEQ ID NO: 1947251 - RNA, 19 nt, Artificial Sequence
  Description of Artificial Sequence: Synthetic oligonucleotide
  Antisense strand to SEQ ID NO: 1947250
agaauugcugcgauaguaa

SEQ ID NO: 1947252 - RNA, 19 nt, Artificial Sequence
  Description of Artificial Sequence: Synthetic oligonucleotide
  Sense strand starting at position 108 of SEQ ID NO: 1880169
ugcgccuggucgauagauu

SEQ ID NO: 1947253 - RNA, 19 nt, Artificial Sequence
  Description of Artificial Sequence: Synthetic oligonucleotide
  Antisense strand to SEQ ID NO: 1947252
aaucuaucgaccaggcgca

SEQ ID NO: 1947254 - RNA, 19 nt, Artificial Sequence
  Description of Artificial Sequence: Synthetic oligonucleotide
  Sense strand starting at position 109 of SEQ ID NO: 1880169
gcgccuggucgauagauua

SEQ ID NO: 1947255 - RNA, 19 nt, Artificial Sequence
  Description of Artificial Sequence: Synthetic oligonucleotide
  Antisense strand to SEQ ID NO: 1947254
uaaucuaucgaccaggcgc

SEQ ID NO: 1947256 - RNA, 19 nt, Artificial Sequence
  Description of Artificial Sequence: Synthetic oligonucleotide
  Sense strand starting at position 410 of SEQ ID NO: 1880169
gcuugaacuccugacauga

SEQ ID NO: 1947257 - RNA, 19 nt, Artificial Sequence
  Description of Artificial Sequence: Synthetic oligonucleotide
  Antisense strand to SEQ ID NO: 1947256
ucaugucaggaguucaagc

SEQ ID NO: 1947258 - RNA, 19 nt, Artificial Sequence
  Description of Artificial Sequence: Synthetic oligonucleotide
  Sense strand starting at position 491 of SEQ ID NO: 1880169
agccucaauuaccugugaa

SEQ ID NO: 1947259 - RNA, 19 nt, Artificial Sequence
  Description of Artificial Sequence: Synthetic oligonucleotide
  Antisense strand to SEQ ID NO: 1947258
uucacagguaauugaggcu

SEQ ID NO: 1947260 - RNA, 19 nt, Artificial Sequence
  Description of Artificial Sequence: Synthetic oligonucleotide
  Sense strand starting at position 494 of SEQ ID NO: 1880169
cucaauuaccugugaacag

SEQ ID NO: 1947261 - RNA, 19 nt, Artificial Sequence
  Description of Artificial Sequence: Synthetic oligonucleotide
  Antisense strand to SEQ ID NO: 1947260
cuguucacagguaauugag

SEQ ID NO: 1947262 - RNA, 19 nt, Artificial Sequence
  Description of Artificial Sequence: Synthetic oligonucleotide
  Sense strand starting at position 899 of SEQ ID NO: 1880169
aauuaccaugugugaggaa

SEQ ID NO: 1947263 - RNA, 19 nt, Artificial Sequence
  Description of Artificial Sequence: Synthetic oligonucleotide
  Antisense strand to SEQ ID NO: 1947262
uuccucacacaugguaauu

SEQ ID NO: 1947264 - RNA, 19 nt, Artificial Sequence
  Description of Artificial Sequence: Synthetic oligonucleotide
  Sense strand starting at position 967 of SEQ ID NO: 1880169
gcuugaaguuacuugccua

SEQ ID NO: 1947265 - RNA, 19 nt, Artificial Sequence
  Description of Artificial Sequence: Synthetic oligonucleotide
  Antisense strand to SEQ ID NO: 1947264
uaggcaaguaacuucaagc

SEQ ID NO: 1947266 - RNA, 19 nt, Artificial Sequence
  Description of Artificial Sequence: Synthetic oligonucleotide
  Sense strand starting at position 970 of SEQ ID NO: 1880169
ugaaguuacuugccuaaag

SEQ ID NO: 1947267 - RNA, 19 nt, Artificial Sequence
  Description of Artificial Sequence: Synthetic oligonucleotide
  Antisense strand to SEQ ID NO: 1947266
cuuuaggcaaguaacuuca

SEQ ID NO: 1947268 - RNA, 19 nt, Artificial Sequence
  Description of Artificial Sequence: Synthetic oligonucleotide
  Sense strand starting at position 971 of SEQ ID NO: 1880169
gaaguuacuugccuaaagu

SEQ ID NO: 1947269 - RNA, 19 nt, Artificial Sequence
  Description of Artificial Sequence: Synthetic oligonucleotide
  Antisense strand to SEQ ID NO: 1947268
acuuuaggcaaguaacuuc

SEQ ID NO: 1947270 - RNA, 19 nt, Artificial Sequence
  Description of Artificial Sequence: Synthetic oligonucleotide
  Sense strand starting at position 1011 of SEQ ID NO: 1880169
cacuguaaucauuagguug

SEQ ID NO: 1947271 - RNA, 19 nt, Artificial Sequence
  Description of Artificial Sequence: Synthetic oligonucleotide
  Antisense strand to SEQ ID NO: 1947270
caaccuaaugauuacagug

SEQ ID NO: 1947272 - RNA, 19 nt, Artificial Sequence
  Description of Artificial Sequence: Synthetic oligonucleotide
  Sense strand starting at position 1141 of SEQ ID NO: 1880169
caggguuuccaacggaaga

SEQ ID NO: 1947273 - RNA, 19 nt, Artificial Sequence
  Description of Artificial Sequence: Synthetic oligonucleotide
  Antisense strand to SEQ ID NO: 1947272
ucuuccguuggaaacccug

SEQ ID NO: 1947274 - RNA, 19 nt, Artificial Sequence
  Description of Artificial Sequence: Synthetic oligonucleotide
  Sense strand starting at position 1142 of SEQ ID NO: 1880169
aggguuuccaacggaagau

SEQ ID NO: 1947275 - RNA, 19 nt, Artificial Sequence
  Description of Artificial Sequence: Synthetic oligonucleotide
  Antisense strand to SEQ ID NO: 1947274
aucuuccguuggaaacccu

SEQ ID NO: 1947276 - RNA, 19 nt, Artificial Sequence
  Description of Artificial Sequence: Synthetic oligonucleotide
  Sense strand starting at position 1274 of SEQ ID NO: 1880169
aggagcauuuccuauguca

SEQ ID NO: 1947277 - RNA, 19 nt, Artificial Sequence
  Description of Artificial Sequence: Synthetic oligonucleotide
  Antisense strand to SEQ ID NO: 1947276
ugacauaggaaaugcuccu

SEQ ID NO: 1947278 - RNA, 19 nt, Artificial Sequence
  Description of Artificial Sequence: Synthetic oligonucleotide
  Sense strand starting at position 1409 of SEQ ID NO: 1880169
cuaaccuggcccuagaaau

SEQ ID NO: 1947279 - RNA, 19 nt, Artificial Sequence
  Description of Artificial Sequence: Synthetic oligonucleotide
  Antisense strand to SEQ ID NO: 1947278
auuucuagggccagguuag

SEQ ID NO: 1947280 - RNA, 19 nt, Artificial Sequence
  Description of Artificial Sequence: Synthetic oligonucleotide
  Sense strand starting at position 1454 of SEQ ID NO: 1880169
cuauuagucugccuaguca

SEQ ID NO: 1947281 - RNA, 19 nt, Artificial Sequence
  Description of Artificial Sequence: Synthetic oligonucleotide
  Antisense strand to SEQ ID NO: 1947280
ugacuaggcagacuaauag

SEQ ID NO: 1947282 - RNA, 19 nt, Artificial Sequence
  Description of Artificial Sequence: Synthetic oligonucleotide
  Sense strand starting at position 1519 of SEQ ID NO: 1880169
gcuggaacuagaugucuga

SEQ ID NO: 1947283 - RNA, 19 nt, Artificial Sequence
  Description of Artificial Sequence: Synthetic oligonucleotide
  Antisense strand to SEQ ID NO: 1947282
ucagacaucuaguuccagc

SEQ ID NO: 1947284 - RNA, 19 nt, Artificial Sequence
  Description of Artificial Sequence: Synthetic oligonucleotide
  Sense strand starting at position 1522 of SEQ ID NO: 1880169
ggaacuagaugucugauuc

SEQ ID NO: 1947285 - RNA, 19 nt, Artificial Sequence
  Description of Artificial Sequence: Synthetic oligonucleotide
  Antisense strand to SEQ ID NO: 1947284
gaaucagacaucuaguucc

SEQ ID NO: 1947286 - RNA, 19 nt, Artificial Sequence
  Description of Artificial Sequence: Synthetic oligonucleotide
  Sense strand starting at position 1523 of SEQ ID NO: 1880169
gaacuagaugucugauucu

SEQ ID NO: 1947287 - RNA, 19 nt, Artificial Sequence
  Description of Artificial Sequence: Synthetic oligonucleotide
  Antisense strand to SEQ ID NO: 1947286
agaaucagacaucuaguuc

SEQ ID NO: 1947288 - RNA, 19 nt, Artificial Sequence
  Description of Artificial Sequence: Synthetic oligonucleotide
  Sense strand starting at position 1526 of SEQ ID NO: 1880169
cuagaugucugauucuuag

SEQ ID NO: 1947289 - RNA, 19 nt, Artificial Sequence
  Description of Artificial Sequence: Synthetic oligonucleotide
  Antisense strand to SEQ ID NO: 1947288
cuaagaaucagacaucuag

SEQ ID NO: 1947290 - RNA, 19 nt, Artificial Sequence
  Description of Artificial Sequence: Synthetic oligonucleotide
  Sense strand starting at position 1532 of SEQ ID NO: 1880169
gucugauucuuagugcuag

SEQ ID NO: 1947291 - RNA, 19 nt, Artificial Sequence
  Description of Artificial Sequence: Synthetic oligonucleotide
  Antisense strand to SEQ ID NO: 1947290
cuagcacuaagaaucagac

SEQ ID NO: 1947292 - RNA, 19 nt, Artificial Sequence
  Description of Artificial Sequence: Synthetic oligonucleotide
  Sense strand starting at position 1550 of SEQ ID NO: 1880169
guaagaucagcgcugcagu

SEQ ID NO: 1947293 - RNA, 19 nt, Artificial Sequence
  Description of Artificial Sequence: Synthetic oligonucleotide
  Antisense strand to SEQ ID NO: 1947292
acugcagcgcugaucuuac

SEQ ID NO: 1947294 - RNA, 19 nt, Artificial Sequence
  Description of Artificial Sequence: Synthetic oligonucleotide
  Sense strand starting at position 1603 of SEQ ID NO: 1880169
gacuuaguauagcugaauu

SEQ ID NO: 1947295 - RNA, 19 nt, Artificial Sequence
  Description of Artificial Sequence: Synthetic oligonucleotide
  Antisense strand to SEQ ID NO: 1947294
aauucagcuauacuaaguc

SEQ ID NO: 1947296 - RNA, 19 nt, Artificial Sequence
  Description of Artificial Sequence: Synthetic oligonucleotide
  Sense strand starting at position 1605 of SEQ ID NO: 1880169
cuuaguauagcugaauuaa

SEQ ID NO: 1947297 - RNA, 19 nt, Artificial Sequence
  Description of Artificial Sequence: Synthetic oligonucleotide
  Antisense strand to SEQ ID NO: 1947296
uuaauucagcuauacuaag

SEQ ID NO: 1947298 - RNA, 19 nt, Artificial Sequence
  Description of Artificial Sequence: Synthetic oligonucleotide
  Sense strand starting at position 1680 of SEQ ID NO: 1880169
uuaguaacuuacguaucaa

SEQ ID NO: 1947299 - RNA, 19 nt, Artificial Sequence
  Description of Artificial Sequence: Synthetic oligonucleotide
  Antisense strand to SEQ ID NO: 1947298
uugauacguaaguuacuaa

SEQ ID NO: 1947300 - RNA, 19 nt, Artificial Sequence
  Description of Artificial Sequence: Synthetic oligonucleotide
  Sense strand starting at position 1777 of SEQ ID NO: 1880169
caaugaugcgaaugaagau

SEQ ID NO: 1947301 - RNA, 19 nt, Artificial Sequence
  Description of Artificial Sequence: Synthetic oligonucleotide
  Antisense strand to SEQ ID NO: 1947300
aucuucauucgcaucauug

SEQ ID NO: 1947302 - RNA, 19 nt, Artificial Sequence
  Description of Artificial Sequence: Synthetic oligonucleotide
  Sense strand starting at position 1864 of SEQ ID NO: 1880169
aaagaugucgcagguauga

SEQ ID NO: 1947303 - RNA, 19 nt, Artificial Sequence
  Description of Artificial Sequence: Synthetic oligonucleotide
  Antisense strand to SEQ ID NO: 1947302
ucauaccugcgacaucuuu

SEQ ID NO: 1947304 - RNA, 19 nt, Artificial Sequence
  Description of Artificial Sequence: Synthetic oligonucleotide
  Sense strand starting at position 1866 of SEQ ID NO: 1880169
agaugucgcagguaugaaa

SEQ ID NO: 1947305 - RNA, 19 nt, Artificial Sequence
  Description of Artificial Sequence: Synthetic oligonucleotide
  Antisense strand to SEQ ID NO: 1947304
uuucauaccugcgacaucu

SEQ ID NO: 1947306 - RNA, 19 nt, Artificial Sequence
  Description of Artificial Sequence: Synthetic oligonucleotide
  Sense strand starting at position 1986 of SEQ ID NO: 1880169
gguuuaagaaugcagcaau

SEQ ID NO: 1947307 - RNA, 19 nt, Artificial Sequence
  Description of Artificial Sequence: Synthetic oligonucleotide
  Antisense strand to SEQ ID NO: 1947306
auugcugcauucuuaaacc

SEQ ID NO: 1947308 - RNA, 19 nt, Artificial Sequence
  Description of Artificial Sequence: Synthetic oligonucleotide
  Sense strand starting at position 2416 of SEQ ID NO: 1880169
agugcauuugcacggcuaa

SEQ ID NO: 1947309 - RNA, 19 nt, Artificial Sequence
  Description of Artificial Sequence: Synthetic oligonucleotide
  Antisense strand to SEQ ID NO: 1947308
uuagccgugcaaaugcacu

SEQ ID NO: 1947310 - RNA, 19 nt, Artificial Sequence
  Description of Artificial Sequence: Synthetic oligonucleotide
  Sense strand starting at position 2417 of SEQ ID NO: 1880169
gugcauuugcacggcuaaa

SEQ ID NO: 1947311 - RNA, 19 nt, Artificial Sequence
  Description of Artificial Sequence: Synthetic oligonucleotide
  Antisense strand to SEQ ID NO: 1947310
uuuagccgugcaaaugcac

SEQ ID NO: 1947312 - RNA, 19 nt, Artificial Sequence
  Description of Artificial Sequence: Synthetic oligonucleotide
  Sense strand starting at position 2661 of SEQ ID NO: 1880169
cucgaagccuguucuugaa

SEQ ID NO: 1947313 - RNA, 19 nt, Artificial Sequence
  Description of Artificial Sequence: Synthetic oligonucleotide
  Antisense strand to SEQ ID NO: 1947312
uucaagaacaggcuucgag

SEQ ID NO: 1947314 - RNA, 19 nt, Artificial Sequence
  Description of Artificial Sequence: Synthetic oligonucleotide
  Sense strand starting at position 3226 of SEQ ID NO: 1880169
gccugugacuuguuugaau

SEQ ID NO: 1947315 - RNA, 19 nt, Artificial Sequence
  Description of Artificial Sequence: Synthetic oligonucleotide
  Antisense strand to SEQ ID NO: 1947314
auucaaacaagucacaggc

SEQ ID NO: 1947316 - RNA, 19 nt, Artificial Sequence
  Description of Artificial Sequence: Synthetic oligonucleotide
  Sense strand starting at position 3228 of SEQ ID NO: 1880169
cugugacuuguuugaauua

SEQ ID NO: 1947317 - RNA, 19 nt, Artificial Sequence
  Description of Artificial Sequence: Synthetic oligonucleotide
  Antisense strand to SEQ ID NO: 1947316
uaauucaaacaagucacag

SEQ ID NO: 1947318 - RNA, 19 nt, Artificial Sequence
  Description of Artificial Sequence: Synthetic oligonucleotide
  Sense strand starting at position 3276 of SEQ ID NO: 1880169
uccauugugcguagugguu

SEQ ID NO: 1947319 - RNA, 19 nt, Artificial Sequence
  Description of Artificial Sequence: Synthetic oligonucleotide
  Antisense strand to SEQ ID NO: 1947318
aaccacuacgcacaaugga

SEQ ID NO: 1947320 - RNA, 19 nt, Artificial Sequence
  Description of Artificial Sequence: Synthetic oligonucleotide
  Sense strand starting at position 3758 of SEQ ID NO: 1880169
uuaagauauugacaaggaa

SEQ ID NO: 1947321 - RNA, 19 nt, Artificial Sequence
  Description of Artificial Sequence: Synthetic oligonucleotide
  Antisense strand to SEQ ID NO: 1947320
uuccuugucaauaucuuaa

SEQ ID NO: 1947322 - RNA, 19 nt, Artificial Sequence
  Description of Artificial Sequence: Synthetic oligonucleotide
  Sense strand starting at position 3831 of SEQ ID NO: 1880169
agucaagcaucagugucaa

SEQ ID NO: 1947323 - RNA, 19 nt, Artificial Sequence
  Description of Artificial Sequence: Synthetic oligonucleotide
  Antisense strand to SEQ ID NO: 1947322
uugacacugaugcuugacu

SEQ ID NO: 1947324 - RNA, 19 nt, Artificial Sequence
  Description of Artificial Sequence: Synthetic oligonucleotide
  Sense strand starting at position 3864 of SEQ ID NO: 1880169
agagcuaccuuaccuugaa

SEQ ID NO: 1947325 - RNA, 19 nt, Artificial Sequence
  Description of Artificial Sequence: Synthetic oligonucleotide
  Antisense strand to SEQ ID NO: 1947324
uucaagguaagguagcucu

SEQ ID NO: 1947326 - RNA, 19 nt, Artificial Sequence
  Description of Artificial Sequence: Synthetic oligonucleotide
  Sense strand starting at position 3918 of SEQ ID NO: 1880169
ggcacauucccaggaaguu

SEQ ID NO: 1947327 - RNA, 19 nt, Artificial Sequence
  Description of Artificial Sequence: Synthetic oligonucleotide
  Antisense strand to SEQ ID NO: 1947326
aacuuccugggaaugugcc

SEQ ID NO: 1947328 - RNA, 19 nt, Artificial Sequence
  Description of Artificial Sequence: Synthetic oligonucleotide
  Sense strand starting at position 3919 of SEQ ID NO: 1880169
gcacauucccaggaaguuu

SEQ ID NO: 1947329 - RNA, 19 nt, Artificial Sequence
  Description of Artificial Sequence: Synthetic oligonucleotide
  Antisense strand to SEQ ID NO: 1947328
aaacuuccugggaaugugc

SEQ ID NO: 1947330 - RNA, 19 nt, Artificial Sequence
  Description of Artificial Sequence: Synthetic oligonucleotide
  Sense strand starting at position 3935 of SEQ ID NO: 1880169
uuuggcauucuuggucaca

SEQ ID NO: 1947331 - RNA, 19 nt, Artificial Sequence
  Description of Artificial Sequence: Synthetic oligonucleotide
  Antisense strand to SEQ ID NO: 1947330
ugugaccaagaaugccaaa

SEQ ID NO: 1947332 - RNA, 19 nt, Artificial Sequence
  Description of Artificial Sequence: Synthetic oligonucleotide
  Sense strand starting at position 261 of SEQ ID NO: 1880170
ggaggcaauuagccaagau

SEQ ID NO: 1947333 - RNA, 19 nt, Artificial Sequence
  Description of Artificial Sequence: Synthetic oligonucleotide
  Antisense strand to SEQ ID NO: 1947332
aucuuggcuaauugccucc

SEQ ID NO: 1947334 - RNA, 19 nt, Artificial Sequence
  Description of Artificial Sequence: Synthetic oligonucleotide
  Sense strand starting at position 367 of SEQ ID NO: 1880170
guaaccuuauaguucuauu

SEQ ID NO: 1947335 - RNA, 19 nt, Artificial Sequence
  Description of Artificial Sequence: Synthetic oligonucleotide
  Antisense strand to SEQ ID NO: 1947334
aauagaacuauaagguuac

SEQ ID NO: 1947336 - RNA, 19 nt, Artificial Sequence
  Description of Artificial Sequence: Synthetic oligonucleotide
  Sense strand starting at position 378 of SEQ ID NO: 1880170
guucuauuagguugacuac

SEQ ID NO: 1947337 - RNA, 19 nt, Artificial Sequence
  Description of Artificial Sequence: Synthetic oligonucleotide
  Antisense strand to SEQ ID NO: 1947336
guagucaaccuaauagaac

SEQ ID NO: 1947338 - RNA, 19 nt, Artificial Sequence
  Description of Artificial Sequence: Synthetic oligonucleotide
  Sense strand starting at position 381 of SEQ ID NO: 1880170
cuauuagguugacuacuua

SEQ ID NO: 1947339 - RNA, 19 nt, Artificial Sequence
  Description of Artificial Sequence: Synthetic oligonucleotide
  Antisense strand to SEQ ID NO: 1947338
uaaguagucaaccuaauag

SEQ ID NO: 1947340 - RNA, 19 nt, Artificial Sequence
  Description of Artificial Sequence: Synthetic oligonucleotide
  Sense strand starting at position 460 of SEQ ID NO: 1880170
uuggguagucacuaacuua

SEQ ID NO: 1947341 - RNA, 19 nt, Artificial Sequence
  Description of Artificial Sequence: Synthetic oligonucleotide
  Antisense strand to SEQ ID NO: 1947340
uaaguuagugacuacccaa

SEQ ID NO: 1947342 - RNA, 19 nt, Artificial Sequence
  Description of Artificial Sequence: Synthetic oligonucleotide
  Sense strand starting at position 488 of SEQ ID NO: 1880170
auagguccauagucacaaa

SEQ ID NO: 1947343 - RNA, 19 nt, Artificial Sequence
  Description of Artificial Sequence: Synthetic oligonucleotide
  Antisense strand to SEQ ID NO: 1947342
uuugugacuauggaccuau

SEQ ID NO: 1947344 - RNA, 19 nt, Artificial Sequence
  Description of Artificial Sequence: Synthetic oligonucleotide
  Sense strand starting at position 507 of SEQ ID NO: 1880170
ugaggacagcuuuacaugu

SEQ ID NO: 1947345 - RNA, 19 nt, Artificial Sequence
  Description of Artificial Sequence: Synthetic oligonucleotide
  Antisense strand to SEQ ID NO: 1947344
acauguaaagcuguccuca

SEQ ID NO: 1947346 - RNA, 19 nt, Artificial Sequence
  Description of Artificial Sequence: Synthetic oligonucleotide
  Sense strand starting at position 599 of SEQ ID NO: 1880170
gcaguaauaggucagcuau

SEQ ID NO: 1947347 - RNA, 19 nt, Artificial Sequence
  Description of Artificial Sequence: Synthetic oligonucleotide
  Antisense strand to SEQ ID NO: 1947346
auagcugaccuauuacugc

SEQ ID NO: 1947348 - RNA, 19 nt, Artificial Sequence
  Description of Artificial Sequence: Synthetic oligonucleotide
  Sense strand starting at position 601 of SEQ ID NO: 1880170
aguaauaggucagcuauua

SEQ ID NO: 1947349 - RNA, 19 nt, Artificial Sequence
  Description of Artificial Sequence: Synthetic oligonucleotide
  Antisense strand to SEQ ID NO: 1947348
uaauagcugaccuauuacu

SEQ ID NO: 1947350 - RNA, 19 nt, Artificial Sequence
  Description of Artificial Sequence: Synthetic oligonucleotide
  Sense strand starting at position 705 of SEQ ID NO: 1880170
ucugaaaccugucugaaac

SEQ ID NO: 1947351 - RNA, 19 nt, Artificial Sequence
  Description of Artificial Sequence: Synthetic oligonucleotide
  Antisense strand to SEQ ID NO: 1947350
guuucagacagguuucaga

SEQ ID NO: 1947352 - RNA, 19 nt, Artificial Sequence
  Description of Artificial Sequence: Synthetic oligonucleotide
  Sense strand starting at position 706 of SEQ ID NO: 1880170
cugaaaccugucugaaacu

SEQ ID NO: 1947353 - RNA, 19 nt, Artificial Sequence
  Description of Artificial Sequence: Synthetic oligonucleotide
  Antisense strand to SEQ ID NO: 1947352
aguuucagacagguuucag

SEQ ID NO: 1947354 - RNA, 19 nt, Artificial Sequence
  Description of Artificial Sequence: Synthetic oligonucleotide
  Sense strand starting at position 837 of SEQ ID NO: 1880170
ggauuaagcugaucaacuu

SEQ ID NO: 1947355 - RNA, 19 nt, Artificial Sequence
  Description of Artificial Sequence: Synthetic oligonucleotide
  Antisense strand to SEQ ID NO: 1947354
aaguugaucagcuuaaucc

SEQ ID NO: 1947356 - RNA, 19 nt, Artificial Sequence
  Description of Artificial Sequence: Synthetic oligonucleotide
  Sense strand starting at position 1039 of SEQ ID NO: 1880170
ucagaaguucgagacccau

SEQ ID NO: 1947357 - RNA, 19 nt, Artificial Sequence
  Description of Artificial Sequence: Synthetic oligonucleotide
  Antisense strand to SEQ ID NO: 1947356
augggucucgaacuucuga

SEQ ID NO: 1947358 - RNA, 19 nt, Artificial Sequence
  Description of Artificial Sequence: Synthetic oligonucleotide
  Sense strand starting at position 1312 of SEQ ID NO: 1880170
agcccugguccugaaacau

SEQ ID NO: 1947359 - RNA, 19 nt, Artificial Sequence
  Description of Artificial Sequence: Synthetic oligonucleotide
  Antisense strand to SEQ ID NO: 1947358
auguuucaggaccagggcu

SEQ ID NO: 1947360 - RNA, 19 nt, Artificial Sequence
  Description of Artificial Sequence: Synthetic oligonucleotide
  Sense strand starting at position 1368 of SEQ ID NO: 1880170
ugaccugcgcugucaaagu

SEQ ID NO: 1947361 - RNA, 19 nt, Artificial Sequence
  Description of Artificial Sequence: Synthetic oligonucleotide
  Antisense strand to SEQ ID NO: 1947360
acuuugacagcgcagguca

SEQ ID NO: 1947362 - RNA, 19 nt, Artificial Sequence
  Description of Artificial Sequence: Synthetic oligonucleotide
  Sense strand starting at position 1544 of SEQ ID NO: 1880170
aguccucgaucaccagaaa

SEQ ID NO: 1947363 - RNA, 19 nt, Artificial Sequence
  Description of Artificial Sequence: Synthetic oligonucleotide
  Antisense strand to SEQ ID NO: 1947362
uuucuggugaucgaggacu

SEQ ID NO: 1947364 - RNA, 19 nt, Artificial Sequence
  Description of Artificial Sequence: Synthetic oligonucleotide
  Sense strand starting at position 1648 of SEQ ID NO: 1880170
ugguccucagaaugauaca

SEQ ID NO: 1947365 - RNA, 19 nt, Artificial Sequence
  Description of Artificial Sequence: Synthetic oligonucleotide
  Antisense strand to SEQ ID NO: 1947364
uguaucauucugaggacca

SEQ ID NO: 1947366 - RNA, 19 nt, Artificial Sequence
  Description of Artificial Sequence: Synthetic oligonucleotide
  Sense strand starting at position 1762 of SEQ ID NO: 1880170
ugguuaacuguacaugcaa

SEQ ID NO: 1947367 - RNA, 19 nt, Artificial Sequence
  Description of Artificial Sequence: Synthetic oligonucleotide
  Antisense strand to SEQ ID NO: 1947366
uugcauguacaguuaacca

SEQ ID NO: 1947368 - RNA, 19 nt, Artificial Sequence
  Description of Artificial Sequence: Synthetic oligonucleotide
  Sense strand starting at position 1795 of SEQ ID NO: 1880170
ugcuguucuguggaaacaa

SEQ ID NO: 1947369 - RNA, 19 nt, Artificial Sequence
  Description of Artificial Sequence: Synthetic oligonucleotide
  Antisense strand to SEQ ID NO: 1947368
uuguuuccacagaacagca

SEQ ID NO: 1947370 - RNA, 19 nt, Artificial Sequence
  Description of Artificial Sequence: Synthetic oligonucleotide
  Sense strand starting at position 1822 of SEQ ID NO: 1880170
ugauaaaggucucuggcua

SEQ ID NO: 1947371 - RNA, 19 nt, Artificial Sequence
  Description of Artificial Sequence: Synthetic oligonucleotide
  Antisense strand to SEQ ID NO: 1947370
uagccagagaccuuuauca

SEQ ID NO: 1947372 - RNA, 19 nt, Artificial Sequence
  Description of Artificial Sequence: Synthetic oligonucleotide
  Sense strand starting at position 1823 of SEQ ID NO: 1880170
gauaaaggucucuggcuac

SEQ ID NO: 1947373 - RNA, 19 nt, Artificial Sequence
  Description of Artificial Sequence: Synthetic oligonucleotide
  Antisense strand to SEQ ID NO: 1947372
guagccagagaccuuuauc

SEQ ID NO: 1947374 - RNA, 19 nt, Artificial Sequence
  Description of Artificial Sequence: Synthetic oligonucleotide
  Sense strand starting at position 1885 of SEQ ID NO: 1880170
uguugcagaucaguuacaa

SEQ ID NO: 1947375 - RNA, 19 nt, Artificial Sequence
  Description of Artificial Sequence: Synthetic oligonucleotide
  Antisense strand to SEQ ID NO: 1947374
uuguaacugaucugcaaca

SEQ ID NO: 1947376 - RNA, 19 nt, Artificial Sequence
  Description of Artificial Sequence: Synthetic oligonucleotide
  Sense strand starting at position 1975 of SEQ ID NO: 1880170
gcagcugcagcuucgauaa

SEQ ID NO: 1947377 - RNA, 19 nt, Artificial Sequence
  Description of Artificial Sequence: Synthetic oligonucleotide
  Antisense strand to SEQ ID NO: 1947376
uuaucgaagcugcagcugc

SEQ ID NO: 1947378 - RNA, 19 nt, Artificial Sequence
  Description of Artificial Sequence: Synthetic oligonucleotide
  Sense strand starting at position 2034 of SEQ ID NO: 1880170
gccucaccuguccaucauu

SEQ ID NO: 1947379 - RNA, 19 nt, Artificial Sequence
  Description of Artificial Sequence: Synthetic oligonucleotide
  Antisense strand to SEQ ID NO: 1947378
aaugauggacaggugaggc

SEQ ID NO: 1947380 - RNA, 19 nt, Artificial Sequence
  Description of Artificial Sequence: Synthetic oligonucleotide
  Sense strand starting at position 2071 of SEQ ID NO: 1880170
ccgggaucucuguagacua

SEQ ID NO: 1947381 - RNA, 19 nt, Artificial Sequence
  Description of Artificial Sequence: Synthetic oligonucleotide
  Antisense strand to SEQ ID NO: 1947380
uagucuacagagaucccgg

SEQ ID NO: 1947382 - RNA, 19 nt, Artificial Sequence
  Description of Artificial Sequence: Synthetic oligonucleotide
  Sense strand starting at position 2081 of SEQ ID NO: 1880170
uguagacuaagucagucau

SEQ ID NO: 1947383 - RNA, 19 nt, Artificial Sequence
  Description of Artificial Sequence: Synthetic oligonucleotide
  Antisense strand to SEQ ID NO: 1947382
augacugacuuagucuaca

SEQ ID NO: 1947384 - RNA, 19 nt, Artificial Sequence
  Description of Artificial Sequence: Synthetic oligonucleotide
  Sense strand starting at position 2145 of SEQ ID NO: 1880170
uuucucagucuugauggga

SEQ ID NO: 1947385 - RNA, 19 nt, Artificial Sequence
  Description of Artificial Sequence: Synthetic oligonucleotide
  Antisense strand to SEQ ID NO: 1947384
ucccaucaagacugagaaa

SEQ ID NO: 1947386 - RNA, 19 nt, Artificial Sequence
  Description of Artificial Sequence: Synthetic oligonucleotide
  Sense strand starting at position 2189 of SEQ ID NO: 1880170
agagguuuagaccgauuaa

SEQ ID NO: 1947387 - RNA, 19 nt, Artificial Sequence
  Description of Artificial Sequence: Synthetic oligonucleotide
  Antisense strand to SEQ ID NO: 1947386
uuaaucggucuaaaccucu

SEQ ID NO: 1947388 - RNA, 19 nt, Artificial Sequence
  Description of Artificial Sequence: Synthetic oligonucleotide
  Sense strand starting at position 2201 of SEQ ID NO: 1880170
cgauuaaguuacuuccuga

SEQ ID NO: 1947389 - RNA, 19 nt, Artificial Sequence
  Description of Artificial Sequence: Synthetic oligonucleotide
  Antisense strand to SEQ ID NO: 1947388
ucaggaaguaacuuaaucg

SEQ ID NO: 1947390 - RNA, 19 nt, Artificial Sequence
  Description of Artificial Sequence: Synthetic oligonucleotide
  Sense strand starting at position 2206 of SEQ ID NO: 1880170
aaguuacuuccugaagguc

SEQ ID NO: 1947391 - RNA, 19 nt, Artificial Sequence
  Description of Artificial Sequence: Synthetic oligonucleotide
  Antisense strand to SEQ ID NO: 1947390
gaccuucaggaaguaacuu

SEQ ID NO: 1947392 - RNA, 19 nt, Artificial Sequence
  Description of Artificial Sequence: Synthetic oligonucleotide
  Sense strand starting at position 2223 of SEQ ID NO: 1880170
ucgcuuagucacuuagcga

SEQ ID NO: 1947393 - RNA, 19 nt, Artificial Sequence
  Description of Artificial Sequence: Synthetic oligonucleotide
  Antisense strand to SEQ ID NO: 1947392
ucgcuaagugacuaagcga

SEQ ID NO: 1947394 - RNA, 19 nt, Artificial Sequence
  Description of Artificial Sequence: Synthetic oligonucleotide
  Sense strand starting at position 2833 of SEQ ID NO: 1880170
cgagcaagagcuuauauag

SEQ ID NO: 1947395 - RNA, 19 nt, Artificial Sequence
  Description of Artificial Sequence: Synthetic oligonucleotide
  Antisense strand to SEQ ID NO: 1947394
cuauauaagcucuugcucg

SEQ ID NO: 1947396 - RNA, 19 nt, Artificial Sequence
  Description of Artificial Sequence: Synthetic oligonucleotide
  Sense strand starting at position 3089 of SEQ ID NO: 1880170
uggaguugucucugggaug

SEQ ID NO: 1947397 - RNA, 19 nt, Artificial Sequence
  Description of Artificial Sequence: Synthetic oligonucleotide
  Antisense strand to SEQ ID NO: 1947396
caucccagagacaacucca

SEQ ID NO: 1947398 - RNA, 19 nt, Artificial Sequence
  Description of Artificial Sequence: Synthetic oligonucleotide
  Sense strand starting at position 3103 of SEQ ID NO: 1880170
ggaugucuuucagucugga

SEQ ID NO: 1947399 - RNA, 19 nt, Artificial Sequence
  Description of Artificial Sequence: Synthetic oligonucleotide
  Antisense strand to SEQ ID NO: 1947398
uccagacugaaagacaucc

SEQ ID NO: 1947400 - RNA, 19 nt, Artificial Sequence
  Description of Artificial Sequence: Synthetic oligonucleotide
  Sense strand starting at position 3291 of SEQ ID NO: 1880170
uuuaacugugucugauuau

SEQ ID NO: 1947401 - RNA, 19 nt, Artificial Sequence
  Description of Artificial Sequence: Synthetic oligonucleotide
  Antisense strand to SEQ ID NO: 1947400
auaaucagacacaguuaaa

SEQ ID NO: 1947402 - RNA, 19 nt, Artificial Sequence
  Description of Artificial Sequence: Synthetic oligonucleotide
  Sense strand starting at position 3302 of SEQ ID NO: 1880170
cugauuaucugaucuaguu

SEQ ID NO: 1947403 - RNA, 19 nt, Artificial Sequence
  Description of Artificial Sequence: Synthetic oligonucleotide
  Antisense strand to SEQ ID NO: 1947402
aacuagaucagauaaucag

SEQ ID NO: 1947404 - RNA, 19 nt, Artificial Sequence
  Description of Artificial Sequence: Synthetic oligonucleotide
  Sense strand starting at position 3337 of SEQ ID NO: 1880170
guacgcucuguggacaaau

SEQ ID NO: 1947405 - RNA, 19 nt, Artificial Sequence
  Description of Artificial Sequence: Synthetic oligonucleotide
  Antisense strand to SEQ ID NO: 1947404
auuuguccacagagcguac

SEQ ID NO: 1947406 - RNA, 19 nt, Artificial Sequence
  Description of Artificial Sequence: Synthetic oligonucleotide
  Sense strand starting at position 3339 of SEQ ID NO: 1880170
acgcucuguggacaaauaa

SEQ ID NO: 1947407 - RNA, 19 nt, Artificial Sequence
  Description of Artificial Sequence: Synthetic oligonucleotide
  Antisense strand to SEQ ID NO: 1947406
uuauuuguccacagagcgu

SEQ ID NO: 1947408 - RNA, 19 nt, Artificial Sequence
  Description of Artificial Sequence: Synthetic oligonucleotide
  Sense strand starting at position 3460 of SEQ ID NO: 1880170
augaauaagccucaguaug

SEQ ID NO: 1947409 - RNA, 19 nt, Artificial Sequence
  Description of Artificial Sequence: Synthetic oligonucleotide
  Antisense strand to SEQ ID NO: 1947408
cauacugaggcuuauucau

SEQ ID NO: 1947410 - RNA, 19 nt, Artificial Sequence
  Description of Artificial Sequence: Synthetic oligonucleotide
  Sense strand starting at position 3489 of SEQ ID NO: 1880170
ggugauugccgagaauuaa

SEQ ID NO: 1947411 - RNA, 19 nt, Artificial Sequence
  Description of Artificial Sequence: Synthetic oligonucleotide
  Antisense strand to SEQ ID NO: 1947410
uuaauucucggcaaucacc

SEQ ID NO: 1947412 - RNA, 19 nt, Artificial Sequence
  Description of Artificial Sequence: Synthetic oligonucleotide
  Sense strand starting at position 143 of SEQ ID NO: 1880171
aguguagugacaugaucag

SEQ ID NO: 1947413 - RNA, 19 nt, Artificial Sequence
  Description of Artificial Sequence: Synthetic oligonucleotide
  Antisense strand to SEQ ID NO: 1947412
cugaucaugucacuacacu

SEQ ID NO: 1947414 - RNA, 19 nt, Artificial Sequence
  Description of Artificial Sequence: Synthetic oligonucleotide
  Sense strand starting at position 162 of SEQ ID NO: 1880171
aggucauuguaaccuugaa

SEQ ID NO: 1947415 - RNA, 19 nt, Artificial Sequence
  Description of Artificial Sequence: Synthetic oligonucleotide
  Antisense strand to SEQ ID NO: 1947414
uucaagguuacaaugaccu

SEQ ID NO: 1947416 - RNA, 19 nt, Artificial Sequence
  Description of Artificial Sequence: Synthetic oligonucleotide
  Sense strand starting at position 175 of SEQ ID NO: 1880171
cuugaacuccuaggcuuau

SEQ ID NO: 1947417 - RNA, 19 nt, Artificial Sequence
  Description of Artificial Sequence: Synthetic oligonucleotide
  Antisense strand to SEQ ID NO: 1947416
auaagccuaggaguucaag

SEQ ID NO: 1947418 - RNA, 19 nt, Artificial Sequence
  Description of Artificial Sequence: Synthetic oligonucleotide
  Sense strand starting at position 176 of SEQ ID NO: 1880171
uugaacuccuaggcuuauu

SEQ ID NO: 1947419 - RNA, 19 nt, Artificial Sequence
  Description of Artificial Sequence: Synthetic oligonucleotide
  Antisense strand to SEQ ID NO: 1947418
aauaagccuaggaguucaa

SEQ ID NO: 1947420 - RNA, 19 nt, Artificial Sequence
  Description of Artificial Sequence: Synthetic oligonucleotide
  Sense strand starting at position 187 of SEQ ID NO: 1880171
ggcuuauuguaaccuugaa

SEQ ID NO: 1947421 - RNA, 19 nt, Artificial Sequence
  Description of Artificial Sequence: Synthetic oligonucleotide
  Antisense strand to SEQ ID NO: 1947420
uucaagguuacaauaagcc

SEQ ID NO: 1947422 - RNA, 19 nt, Artificial Sequence
  Description of Artificial Sequence: Synthetic oligonucleotide
  Sense strand starting at position 577 of SEQ ID NO: 1880171
ccugucugggacugacauu

SEQ ID NO: 1947423 - RNA, 19 nt, Artificial Sequence
  Description of Artificial Sequence: Synthetic oligonucleotide
  Antisense strand to SEQ ID NO: 1947422
aaugucagucccagacagg

SEQ ID NO: 1947424 - RNA, 19 nt, Artificial Sequence
  Description of Artificial Sequence: Synthetic oligonucleotide
  Sense strand starting at position 914 of SEQ ID NO: 1880171
gcccguagccuguuauuaa

SEQ ID NO: 1947425 - RNA, 19 nt, Artificial Sequence
  Description of Artificial Sequence: Synthetic oligonucleotide
  Antisense strand to SEQ ID NO: 1947424
uuaauaacaggcuacgggc

SEQ ID NO: 1947426 - RNA, 19 nt, Artificial Sequence
  Description of Artificial Sequence: Synthetic oligonucleotide
  Sense strand starting at position 932 of SEQ ID NO: 1880171
aacgaaaugucauuaugca

SEQ ID NO: 1947427 - RNA, 19 nt, Artificial Sequence
  Description of Artificial Sequence: Synthetic oligonucleotide
  Antisense strand to SEQ ID NO: 1947426
ugcauaaugacauuucguu

SEQ ID NO: 1947428 - RNA, 19 nt, Artificial Sequence
  Description of Artificial Sequence: Synthetic oligonucleotide
  Sense strand starting at position 933 of SEQ ID NO: 1880171
acgaaaugucauuaugcag

SEQ ID NO: 1947429 - RNA, 19 nt, Artificial Sequence
  Description of Artificial Sequence: Synthetic oligonucleotide
  Antisense strand to SEQ ID NO: 1947428
cugcauaaugacauuucgu

SEQ ID NO: 1947430 - RNA, 19 nt, Artificial Sequence
  Description of Artificial Sequence: Synthetic oligonucleotide
  Sense strand starting at position 980 of SEQ ID NO: 1880171
caauauugugcagagauau

SEQ ID NO: 1947431 - RNA, 19 nt, Artificial Sequence
  Description of Artificial Sequence: Synthetic oligonucleotide
  Antisense strand to SEQ ID NO: 1947430
auaucucugcacaauauug

SEQ ID NO: 1947432 - RNA, 19 nt, Artificial Sequence
  Description of Artificial Sequence: Synthetic oligonucleotide
  Sense strand starting at position 1317 of SEQ ID NO: 1880171
gcucacuauuuagaaagga

SEQ ID NO: 1947433 - RNA, 19 nt, Artificial Sequence
  Description of Artificial Sequence: Synthetic oligonucleotide
  Antisense strand to SEQ ID NO: 1947432
uccuuucuaaauagugagc

SEQ ID NO: 1947434 - RNA, 19 nt, Artificial Sequence
  Description of Artificial Sequence: Synthetic oligonucleotide
  Sense strand starting at position 1360 of SEQ ID NO: 1880171
ggcagacuucuaugaugau

SEQ ID NO: 1947435 - RNA, 19 nt, Artificial Sequence
  Description of Artificial Sequence: Synthetic oligonucleotide
  Antisense strand to SEQ ID NO: 1947434
aucaucauagaagucugcc

SEQ ID NO: 1947436 - RNA, 19 nt, Artificial Sequence
  Description of Artificial Sequence: Synthetic oligonucleotide
  Sense strand starting at position 1377 of SEQ ID NO: 1880171
aucucaugagcuuguuaac

SEQ ID NO: 1947437 - RNA, 19 nt, Artificial Sequence
  Description of Artificial Sequence: Synthetic oligonucleotide
  Antisense strand to SEQ ID NO: 1947436
guuaacaagcucaugagau

SEQ ID NO: 1947438 - RNA, 19 nt, Artificial Sequence
  Description of Artificial Sequence: Synthetic oligonucleotide
  Sense strand starting at position 1387 of SEQ ID NO: 1880171
cuuguuaacuguccucaca

SEQ ID NO: 1947439 - RNA, 19 nt, Artificial Sequence
  Description of Artificial Sequence: Synthetic oligonucleotide
  Antisense strand to SEQ ID NO: 1947438
ugugaggacaguuaacaag

SEQ ID NO: 1947440 - RNA, 19 nt, Artificial Sequence
  Description of Artificial Sequence: Synthetic oligonucleotide
  Sense strand starting at position 1546 of SEQ ID NO: 1880171
cugucuuggcuuugaugaa

SEQ ID NO: 1947441 - RNA, 19 nt, Artificial Sequence
  Description of Artificial Sequence: Synthetic oligonucleotide
  Antisense strand to SEQ ID NO: 1947440
uucaucaaagccaagacag

SEQ ID NO: 1947442 - RNA, 19 nt, Artificial Sequence
  Description of Artificial Sequence: Synthetic oligonucleotide
  Sense strand starting at position 1550 of SEQ ID NO: 1880171
cuuggcuuugaugaaguaa

SEQ ID NO: 1947443 - RNA, 19 nt, Artificial Sequence
  Description of Artificial Sequence: Synthetic oligonucleotide
  Antisense strand to SEQ ID NO: 1947442
uuacuucaucaaagccaag

SEQ ID NO: 1947444 - RNA, 19 nt, Artificial Sequence
  Description of Artificial Sequence: Synthetic oligonucleotide
  Sense strand starting at position 1579 of SEQ ID NO: 1880171
uggagaagccugggugaca

SEQ ID NO: 1947445 - RNA, 19 nt, Artificial Sequence
  Description of Artificial Sequence: Synthetic oligonucleotide
  Antisense strand to SEQ ID NO: 1947444
ugucacccaggcuucucca

SEQ ID NO: 1947446 - RNA, 19 nt, Artificial Sequence
  Description of Artificial Sequence: Synthetic oligonucleotide
  Sense strand starting at position 1580 of SEQ ID NO: 1880171
ggagaagccugggugacaa

SEQ ID NO: 1947447 - RNA, 19 nt, Artificial Sequence
  Description of Artificial Sequence: Synthetic oligonucleotide
  Antisense strand to SEQ ID NO: 1947446
uugucacccaggcuucucc

SEQ ID NO: 1947448 - RNA, 19 nt, Artificial Sequence
  Description of Artificial Sequence: Synthetic oligonucleotide
  Sense strand starting at position 1641 of SEQ ID NO: 1880171
aggcucucaguccaacaua

SEQ ID NO: 1947449 - RNA, 19 nt, Artificial Sequence
  Description of Artificial Sequence: Synthetic oligonucleotide
  Antisense strand to SEQ ID NO: 1947448
uauguuggacugagagccu

SEQ ID NO: 1947450 - RNA, 19 nt, Artificial Sequence
  Description of Artificial Sequence: Synthetic oligonucleotide
  Sense strand starting at position 1859 of SEQ ID NO: 1880171
cucccaauggaaugguauu

SEQ ID NO: 1947451 - RNA, 19 nt, Artificial Sequence
  Description of Artificial Sequence: Synthetic oligonucleotide
  Antisense strand to SEQ ID NO: 1947450
aauaccauuccauugggag

SEQ ID NO: 1947452 - RNA, 19 nt, Artificial Sequence
  Description of Artificial Sequence: Synthetic oligonucleotide
  Sense strand starting at position 2385 of SEQ ID NO: 1880171
acccaaauguaguuccuua

SEQ ID NO: 1947453 - RNA, 19 nt, Artificial Sequence
  Description of Artificial Sequence: Synthetic oligonucleotide
  Antisense strand to SEQ ID NO: 1947452
uaaggaacuacauuugggu

SEQ ID NO: 1947454 - RNA, 19 nt, Artificial Sequence
  Description of Artificial Sequence: Synthetic oligonucleotide
  Sense strand starting at position 2422 of SEQ ID NO: 1880171
uucaaugucgggcaguauu

SEQ ID NO: 1947455 - RNA, 19 nt, Artificial Sequence
  Description of Artificial Sequence: Synthetic oligonucleotide
  Antisense strand to SEQ ID NO: 1947454
aauacugcccgacauugaa

SEQ ID NO: 1947456 - RNA, 19 nt, Artificial Sequence
  Description of Artificial Sequence: Synthetic oligonucleotide
  Sense strand starting at position 2432 of SEQ ID NO: 1880171
ggcaguauugaauaacgaa

SEQ ID NO: 1947457 - RNA, 19 nt, Artificial Sequence
  Description of Artificial Sequence: Synthetic oligonucleotide
  Antisense strand to SEQ ID NO: 1947456
uucguuauucaauacugcc

SEQ ID NO: 1947458 - RNA, 19 nt, Artificial Sequence
  Description of Artificial Sequence: Synthetic oligonucleotide
  Sense strand starting at position 2545 of SEQ ID NO: 1880171
ggcacacugccugaucuua

SEQ ID NO: 1947459 - RNA, 19 nt, Artificial Sequence
  Description of Artificial Sequence: Synthetic oligonucleotide
  Antisense strand to SEQ ID NO: 1947458
uaagaucaggcagugugcc

SEQ ID NO: 1947460 - RNA, 19 nt, Artificial Sequence
  Description of Artificial Sequence: Synthetic oligonucleotide
  Sense strand starting at position 2895 of SEQ ID NO: 1880171
uggaauaagaacgguguuu

SEQ ID NO: 1947461 - RNA, 19 nt, Artificial Sequence
  Description of Artificial Sequence: Synthetic oligonucleotide
  Antisense strand to SEQ ID NO: 1947460
aaacaccguucuuauucca

SEQ ID NO: 1947462 - RNA, 19 nt, Artificial Sequence
  Description of Artificial Sequence: Synthetic oligonucleotide
  Sense strand starting at position 2942 of SEQ ID NO: 1880171
gcagcuuugaguggaagga

SEQ ID NO: 1947463 - RNA, 19 nt, Artificial Sequence
  Description of Artificial Sequence: Synthetic oligonucleotide
  Antisense strand to SEQ ID NO: 1947462
uccuuccacucaaagcugc

SEQ ID NO: 1947464 - RNA, 19 nt, Artificial Sequence
  Description of Artificial Sequence: Synthetic oligonucleotide
  Sense strand starting at position 2993 of SEQ ID NO: 1880171
gaaagucaugccgacucuu

SEQ ID NO: 1947465 - RNA, 19 nt, Artificial Sequence
  Description of Artificial Sequence: Synthetic oligonucleotide
  Antisense strand to SEQ ID NO: 1947464
aagagucggcaugacuuuc

SEQ ID NO: 1947466 - RNA, 19 nt, Artificial Sequence
  Description of Artificial Sequence: Synthetic oligonucleotide
  Sense strand starting at position 3029 of SEQ ID NO: 1880171
cauggaaacuuagcuguaa

SEQ ID NO: 1947467 - RNA, 19 nt, Artificial Sequence
  Description of Artificial Sequence: Synthetic oligonucleotide
  Antisense strand to SEQ ID NO: 1947466
uuacagcuaaguuuccaug

SEQ ID NO: 1947468 - RNA, 19 nt, Artificial Sequence
  Description of Artificial Sequence: Synthetic oligonucleotide
  Sense strand starting at position 3030 of SEQ ID NO: 1880171
auggaaacuuagcuguaau

SEQ ID NO: 1947469 - RNA, 19 nt, Artificial Sequence
  Description of Artificial Sequence: Synthetic oligonucleotide
  Antisense strand to SEQ ID NO: 1947468
auuacagcuaaguuuccau

SEQ ID NO: 1947470 - RNA, 19 nt, Artificial Sequence
  Description of Artificial Sequence: Synthetic oligonucleotide
  Sense strand starting at position 3031 of SEQ ID NO: 1880171
uggaaacuuagcuguaaug

SEQ ID NO: 1947471 - RNA, 19 nt, Artificial Sequence
  Description of Artificial Sequence: Synthetic oligonucleotide
  Antisense strand to SEQ ID NO: 1947470
cauuacagcuaaguuucca

SEQ ID NO: 1947472 - RNA, 19 nt, Artificial Sequence
  Description of Artificial Sequence: Synthetic oligonucleotide
  Sense strand starting at position 3358 of SEQ ID NO: 1880171
gauuacaggcuugaguaau

SEQ ID NO: 1947473 - RNA, 19 nt, Artificial Sequence
  Description of Artificial Sequence: Synthetic oligonucleotide
  Antisense strand to SEQ ID NO: 1947472
auuacucaagccuguaauc

SEQ ID NO: 1947474 - RNA, 19 nt, Artificial Sequence
  Description of Artificial Sequence: Synthetic oligonucleotide
  Sense strand starting at position 3409 of SEQ ID NO: 1880171
uguagaaagcuuugauagg

SEQ ID NO: 1947475 - RNA, 19 nt, Artificial Sequence
  Description of Artificial Sequence: Synthetic oligonucleotide
  Antisense strand to SEQ ID NO: 1947474
ccuaucaaagcuuucuaca

SEQ ID NO: 1947476 - RNA, 19 nt, Artificial Sequence
  Description of Artificial Sequence: Synthetic oligonucleotide
  Sense strand starting at position 3493 of SEQ ID NO: 1880171
gcuggaauggccuauguua

SEQ ID NO: 1947477 - RNA, 19 nt, Artificial Sequence
  Description of Artificial Sequence: Synthetic oligonucleotide
  Antisense strand to SEQ ID NO: 1947476
uaacauaggccauuccagc

SEQ ID NO: 1947478 - RNA, 19 nt, Artificial Sequence
  Description of Artificial Sequence: Synthetic oligonucleotide
  Sense strand starting at position 3495 of SEQ ID NO: 1880171
uggaauggccuauguuaga

SEQ ID NO: 1947479 - RNA, 19 nt, Artificial Sequence
  Description of Artificial Sequence: Synthetic oligonucleotide
  Antisense strand to SEQ ID NO: 1947478
ucuaacauaggccauucca

SEQ ID NO: 1947480 - RNA, 19 nt, Artificial Sequence
  Description of Artificial Sequence: Synthetic oligonucleotide
  Sense strand starting at position 3518 of SEQ ID NO: 1880171
gcaagaucucuauaucgag

SEQ ID NO: 1947481 - RNA, 19 nt, Artificial Sequence
  Description of Artificial Sequence: Synthetic oligonucleotide
  Antisense strand to SEQ ID NO: 1947480
cucgauauagagaucuugc

SEQ ID NO: 1947482 - RNA, 19 nt, Artificial Sequence
  Description of Artificial Sequence: Synthetic oligonucleotide
  Sense strand starting at position 3524 of SEQ ID NO: 1880171
ucucuauaucgagagaucu

SEQ ID NO: 1947483 - RNA, 19 nt, Artificial Sequence
  Description of Artificial Sequence: Synthetic oligonucleotide
  Antisense strand to SEQ ID NO: 1947482
agaucucucgauauagaga

SEQ ID NO: 1947484 - RNA, 19 nt, Artificial Sequence
  Description of Artificial Sequence: Synthetic oligonucleotide
  Sense strand starting at position 3532 of SEQ ID NO: 1880171
ucgagagaucuuuaugagu

SEQ ID NO: 1947485 - RNA, 19 nt, Artificial Sequence
  Description of Artificial Sequence: Synthetic oligonucleotide
  Antisense strand to SEQ ID NO: 1947484
acucauaaagaucucucga

SEQ ID NO: 1947486 - RNA, 19 nt, Artificial Sequence
  Description of Artificial Sequence: Synthetic oligonucleotide
  Sense strand starting at position 3537 of SEQ ID NO: 1880171
agaucuuuaugaguuggaa

SEQ ID NO: 1947487 - RNA, 19 nt, Artificial Sequence
  Description of Artificial Sequence: Synthetic oligonucleotide
  Antisense strand to SEQ ID NO: 1947486
uuccaacucauaaagaucu

SEQ ID NO: 1947488 - RNA, 19 nt, Artificial Sequence
  Description of Artificial Sequence: Synthetic oligonucleotide
  Sense strand starting at position 3565 of SEQ ID NO: 1880171
cuuucuuaaccuggguauu

SEQ ID NO: 1947489 - RNA, 19 nt, Artificial Sequence
  Description of Artificial Sequence: Synthetic oligonucleotide
  Antisense strand to SEQ ID NO: 1947488
aauacccagguuaagaaag

SEQ ID NO: 1947490 - RNA, 19 nt, Artificial Sequence
  Description of Artificial Sequence: Synthetic oligonucleotide
  Sense strand starting at position 3674 of SEQ ID NO: 1880171
cucccuaaucgucaagguu

SEQ ID NO: 1947491 - RNA, 19 nt, Artificial Sequence
  Description of Artificial Sequence: Synthetic oligonucleotide
  Antisense strand to SEQ ID NO: 1947490
aaccuugacgauuagggag

SEQ ID NO: 1947492 - RNA, 19 nt, Artificial Sequence
  Description of Artificial Sequence: Synthetic oligonucleotide
  Sense strand starting at position 134 of SEQ ID NO: 1880172
agucccucucaauauaagu

SEQ ID NO: 1947493 - RNA, 19 nt, Artificial Sequence
  Description of Artificial Sequence: Synthetic oligonucleotide
  Antisense strand to SEQ ID NO: 1947492
acuuauauugagagggacu

SEQ ID NO: 1947494 - RNA, 19 nt, Artificial Sequence
  Description of Artificial Sequence: Synthetic oligonucleotide
  Sense strand starting at position 190 of SEQ ID NO: 1880172
cuaguagagugacuaauga

SEQ ID NO: 1947495 - RNA, 19 nt, Artificial Sequence
  Description of Artificial Sequence: Synthetic oligonucleotide
  Antisense strand to SEQ ID NO: 1947494
ucauuagucacucuacuag

SEQ ID NO: 1947496 - RNA, 19 nt, Artificial Sequence
  Description of Artificial Sequence: Synthetic oligonucleotide
  Sense strand starting at position 212 of SEQ ID NO: 1880172
ccucuuugacaaugugaua

SEQ ID NO: 1947497 - RNA, 19 nt, Artificial Sequence
  Description of Artificial Sequence: Synthetic oligonucleotide
  Antisense strand to SEQ ID NO: 1947496
uaucacauugucaaagagg

SEQ ID NO: 1947498 - RNA, 19 nt, Artificial Sequence
  Description of Artificial Sequence: Synthetic oligonucleotide
  Sense strand starting at position 255 of SEQ ID NO: 1880172
gggagaaagccaugugacu

SEQ ID NO: 1947499 - RNA, 19 nt, Artificial Sequence
  Description of Artificial Sequence: Synthetic oligonucleotide
  Antisense strand to SEQ ID NO: 1947498
agucacauggcuuucuccc

SEQ ID NO: 1947500 - RNA, 19 nt, Artificial Sequence
  Description of Artificial Sequence: Synthetic oligonucleotide
  Sense strand starting at position 261 of SEQ ID NO: 1880172
aagccaugugacuagcuaa

SEQ ID NO: 1947501 - RNA, 19 nt, Artificial Sequence
  Description of Artificial Sequence: Synthetic oligonucleotide
  Antisense strand to SEQ ID NO: 1947500
uuagcuagucacauggcuu

SEQ ID NO: 1947502 - RNA, 19 nt, Artificial Sequence
  Description of Artificial Sequence: Synthetic oligonucleotide
  Sense strand starting at position 306 of SEQ ID NO: 1880172
uucuaaaugcucuagagua

SEQ ID NO: 1947503 - RNA, 19 nt, Artificial Sequence
  Description of Artificial Sequence: Synthetic oligonucleotide
  Antisense strand to SEQ ID NO: 1947502
uacucuagagcauuuagaa

SEQ ID NO: 1947504 - RNA, 19 nt, Artificial Sequence
  Description of Artificial Sequence: Synthetic oligonucleotide
  Sense strand starting at position 313 of SEQ ID NO: 1880172
ugcucuagaguaggaauau

SEQ ID NO: 1947505 - RNA, 19 nt, Artificial Sequence
  Description of Artificial Sequence: Synthetic oligonucleotide
  Antisense strand to SEQ ID NO: 1947504
auauuccuacucuagagca

SEQ ID NO: 1947506 - RNA, 19 nt, Artificial Sequence
  Description of Artificial Sequence: Synthetic oligonucleotide
  Sense strand starting at position 542 of SEQ ID NO: 1880172
auauguuaaguuugacauc

SEQ ID NO: 1947507 - RNA, 19 nt, Artificial Sequence
  Description of Artificial Sequence: Synthetic oligonucleotide
  Antisense strand to SEQ ID NO: 1947506
gaugucaaacuuaacauau

SEQ ID NO: 1947508 - RNA, 19 nt, Artificial Sequence
  Description of Artificial Sequence: Synthetic oligonucleotide
  Sense strand starting at position 551 of SEQ ID NO: 1880172
guuugacaucuagguagaa

SEQ ID NO: 1947509 - RNA, 19 nt, Artificial Sequence
  Description of Artificial Sequence: Synthetic oligonucleotide
  Antisense strand to SEQ ID NO: 1947508
uucuaccuagaugucaaac

SEQ ID NO: 1947510 - RNA, 19 nt, Artificial Sequence
  Description of Artificial Sequence: Synthetic oligonucleotide
  Sense strand starting at position 552 of SEQ ID NO: 1880172
uuugacaucuagguagaaa

SEQ ID NO: 1947511 - RNA, 19 nt, Artificial Sequence
  Description of Artificial Sequence: Synthetic oligonucleotide
  Antisense strand to SEQ ID NO: 1947510
uuucuaccuagaugucaaa

SEQ ID NO: 1947512 - RNA, 19 nt, Artificial Sequence
  Description of Artificial Sequence: Synthetic oligonucleotide
  Sense strand starting at position 589 of SEQ ID NO: 1880172
gagaaaugaguaugaggcu

SEQ ID NO: 1947513 - RNA, 19 nt, Artificial Sequence
  Description of Artificial Sequence: Synthetic oligonucleotide
  Antisense strand to SEQ ID NO: 1947512
agccucauacucauuucuc

SEQ ID NO: 1947514 - RNA, 19 nt, Artificial Sequence
  Description of Artificial Sequence: Synthetic oligonucleotide
  Sense strand starting at position 821 of SEQ ID NO: 1880172
ucuugaacucuacgaaaca

SEQ ID NO: 1947515 - RNA, 19 nt, Artificial Sequence
  Description of Artificial Sequence: Synthetic oligonucleotide
  Antisense strand to SEQ ID NO: 1947514
uguuucguagaguucaaga

SEQ ID NO: 1947516 - RNA, 19 nt, Artificial Sequence
  Description of Artificial Sequence: Synthetic oligonucleotide
  Sense strand starting at position 913 of SEQ ID NO: 1880172
guccaauucguauacuuga

SEQ ID NO: 1947517 - RNA, 19 nt, Artificial Sequence
  Description of Artificial Sequence: Synthetic oligonucleotide
  Antisense strand to SEQ ID NO: 1947516
ucaaguauacgaauuggac

SEQ ID NO: 1947518 - RNA, 19 nt, Artificial Sequence
  Description of Artificial Sequence: Synthetic oligonucleotide
  Sense strand starting at position 929 of SEQ ID NO: 1880172
ugauaccucuacuugaaug

SEQ ID NO: 1947519 - RNA, 19 nt, Artificial Sequence
  Description of Artificial Sequence: Synthetic oligonucleotide
  Antisense strand to SEQ ID NO: 1947518
cauucaaguagagguauca

SEQ ID NO: 1947520 - RNA, 19 nt, Artificial Sequence
  Description of Artificial Sequence: Synthetic oligonucleotide
  Sense strand starting at position 957 of SEQ ID NO: 1880172
gucagaaguuaaccuguaa

SEQ ID NO: 1947521 - RNA, 19 nt, Artificial Sequence
  Description of Artificial Sequence: Synthetic oligonucleotide
  Antisense strand to SEQ ID NO: 1947520
uuacagguuaacuucugac

SEQ ID NO: 1947522 - RNA, 19 nt, Artificial Sequence
  Description of Artificial Sequence: Synthetic oligonucleotide
  Sense strand starting at position 1200 of SEQ ID NO: 1880172
ucauucucucuugggugaa

SEQ ID NO: 1947523 - RNA, 19 nt, Artificial Sequence
  Description of Artificial Sequence: Synthetic oligonucleotide
  Antisense strand to SEQ ID NO: 1947522
uucacccaagagagaauga

SEQ ID NO: 1947524 - RNA, 19 nt, Artificial Sequence
  Description of Artificial Sequence: Synthetic oligonucleotide
  Sense strand starting at position 1202 of SEQ ID NO: 1880172
auucucucuugggugaauu

SEQ ID NO: 1947525 - RNA, 19 nt, Artificial Sequence
  Description of Artificial Sequence: Synthetic oligonucleotide
  Antisense strand to SEQ ID NO: 1947524
aauucacccaagagagaau

SEQ ID NO: 1947526 - RNA, 19 nt, Artificial Sequence
  Description of Artificial Sequence: Synthetic oligonucleotide
  Sense strand starting at position 1203 of SEQ ID NO: 1880172
uucucucuugggugaauua

SEQ ID NO: 1947527 - RNA, 19 nt, Artificial Sequence
  Description of Artificial Sequence: Synthetic oligonucleotide
  Antisense strand to SEQ ID NO: 1947526
uaauucacccaagagagaa

SEQ ID NO: 1947528 - RNA, 19 nt, Artificial Sequence
  Description of Artificial Sequence: Synthetic oligonucleotide
  Sense strand starting at position 1204 of SEQ ID NO: 1880172
ucucucuugggugaauuau

SEQ ID NO: 1947529 - RNA, 19 nt, Artificial Sequence
  Description of Artificial Sequence: Synthetic oligonucleotide
  Antisense strand to SEQ ID NO: 1947528
auaauucacccaagagaga

SEQ ID NO: 1947530 - RNA, 19 nt, Artificial Sequence
  Description of Artificial Sequence: Synthetic oligonucleotide
  Sense strand starting at position 1210 of SEQ ID NO: 1880172
uugggugaauuauugcaau

SEQ ID NO: 1947531 - RNA, 19 nt, Artificial Sequence
  Description of Artificial Sequence: Synthetic oligonucleotide
  Antisense strand to SEQ ID NO: 1947530
auugcaauaauucacccaa

SEQ ID NO: 1947532 - RNA, 19 nt, Artificial Sequence
  Description of Artificial Sequence: Synthetic oligonucleotide
  Sense strand starting at position 1309 of SEQ ID NO: 1880172
agaauccaucagugacauc

SEQ ID NO: 1947533 - RNA, 19 nt, Artificial Sequence
  Description of Artificial Sequence: Synthetic oligonucleotide
  Antisense strand to SEQ ID NO: 1947532
gaugucacugauggauucu

SEQ ID NO: 1947534 - RNA, 19 nt, Artificial Sequence
  Description of Artificial Sequence: Synthetic oligonucleotide
  Sense strand starting at position 1357 of SEQ ID NO: 1880172
uuaucccuacgugaucuaa

SEQ ID NO: 1947535 - RNA, 19 nt, Artificial Sequence
  Description of Artificial Sequence: Synthetic oligonucleotide
  Antisense strand to SEQ ID NO: 1947534
uuagaucacguagggauaa

SEQ ID NO: 1947536 - RNA, 19 nt, Artificial Sequence
  Description of Artificial Sequence: Synthetic oligonucleotide
  Sense strand starting at position 1581 of SEQ ID NO: 1880172
aaugucauguccuuggaga

SEQ ID NO: 1947537 - RNA, 19 nt, Artificial Sequence
  Description of Artificial Sequence: Synthetic oligonucleotide
  Antisense strand to SEQ ID NO: 1947536
ucuccaaggacaugacauu

SEQ ID NO: 1947538 - RNA, 19 nt, Artificial Sequence
  Description of Artificial Sequence: Synthetic oligonucleotide
  Sense strand starting at position 1582 of SEQ ID NO: 1880172
augucauguccuuggagag

SEQ ID NO: 1947539 - RNA, 19 nt, Artificial Sequence
  Description of Artificial Sequence: Synthetic oligonucleotide
  Antisense strand to SEQ ID NO: 1947538
cucuccaaggacaugacau

SEQ ID NO: 1947540 - RNA, 19 nt, Artificial Sequence
  Description of Artificial Sequence: Synthetic oligonucleotide
  Sense strand starting at position 1670 of SEQ ID NO: 1880172
caugaugcccacuaagagu

SEQ ID NO: 1947541 - RNA, 19 nt, Artificial Sequence
  Description of Artificial Sequence: Synthetic oligonucleotide
  Antisense strand to SEQ ID NO: 1947540
acucuuagugggcaucaug

SEQ ID NO: 1947542 - RNA, 19 nt, Artificial Sequence
  Description of Artificial Sequence: Synthetic oligonucleotide
  Sense strand starting at position 1678 of SEQ ID NO: 1880172
ccacuaagaguuugauauu

SEQ ID NO: 1947543 - RNA, 19 nt, Artificial Sequence
  Description of Artificial Sequence: Synthetic oligonucleotide
  Antisense strand to SEQ ID NO: 1947542
aauaucaaacucuuagugg

SEQ ID NO: 1947544 - RNA, 19 nt, Artificial Sequence
  Description of Artificial Sequence: Synthetic oligonucleotide
  Sense strand starting at position 2039 of SEQ ID NO: 1880172
cugaaauguuuaccaauag

SEQ ID NO: 1947545 - RNA, 19 nt, Artificial Sequence
  Description of Artificial Sequence: Synthetic oligonucleotide
  Antisense strand to SEQ ID NO: 1947544
cuauugguaaacauuucag

SEQ ID NO: 1947546 - RNA, 19 nt, Artificial Sequence
  Description of Artificial Sequence: Synthetic oligonucleotide
  Sense strand starting at position 2068 of SEQ ID NO: 1880172
cagaguauuccauguaaga

SEQ ID NO: 1947547 - RNA, 19 nt, Artificial Sequence
  Description of Artificial Sequence: Synthetic oligonucleotide
  Antisense strand to SEQ ID NO: 1947546
ucuuacauggaauacucug

SEQ ID NO: 1947548 - RNA, 19 nt, Artificial Sequence
  Description of Artificial Sequence: Synthetic oligonucleotide
  Sense strand starting at position 2081 of SEQ ID NO: 1880172
guaagagcuaugcaguaaa

SEQ ID NO: 1947549 - RNA, 19 nt, Artificial Sequence
  Description of Artificial Sequence: Synthetic oligonucleotide
  Antisense strand to SEQ ID NO: 1947548
uuuacugcauagcucuuac

SEQ ID NO: 1947550 - RNA, 19 nt, Artificial Sequence
  Description of Artificial Sequence: Synthetic oligonucleotide
  Sense strand starting at position 2084 of SEQ ID NO: 1880172
agagcuaugcaguaaauag

SEQ ID NO: 1947551 - RNA, 19 nt, Artificial Sequence
  Description of Artificial Sequence: Synthetic oligonucleotide
  Antisense strand to SEQ ID NO: 1947550
cuauuuacugcauagcucu

SEQ ID NO: 1947552 - RNA, 19 nt, Artificial Sequence
  Description of Artificial Sequence: Synthetic oligonucleotide
  Sense strand starting at position 2118 of SEQ ID NO: 1880172
gucagauauccuuagccuc

SEQ ID NO: 1947553 - RNA, 19 nt, Artificial Sequence
  Description of Artificial Sequence: Synthetic oligonucleotide
  Antisense strand to SEQ ID NO: 1947552
gaggcuaaggauaucugac

SEQ ID NO: 1947554 - RNA, 19 nt, Artificial Sequence
  Description of Artificial Sequence: Synthetic oligonucleotide
  Sense strand starting at position 2186 of SEQ ID NO: 1880172
ccaguuugcauagaaugag

SEQ ID NO: 1947555 - RNA, 19 nt, Artificial Sequence
  Description of Artificial Sequence: Synthetic oligonucleotide
  Antisense strand to SEQ ID NO: 1947554
cucauucuaugcaaacugg

SEQ ID NO: 1947556 - RNA, 19 nt, Artificial Sequence
  Description of Artificial Sequence: Synthetic oligonucleotide
  Sense strand starting at position 2281 of SEQ ID NO: 1880172
uggugugcuggagaaacaa

SEQ ID NO: 1947557 - RNA, 19 nt, Artificial Sequence
  Description of Artificial Sequence: Synthetic oligonucleotide
  Antisense strand to SEQ ID NO: 1947556
uuguuucuccagcacacca

SEQ ID NO: 1947558 - RNA, 19 nt, Artificial Sequence
  Description of Artificial Sequence: Synthetic oligonucleotide
  Sense strand starting at position 2425 of SEQ ID NO: 1880172
aacagagaagcaugucuuu

SEQ ID NO: 1947559 - RNA, 19 nt, Artificial Sequence
  Description of Artificial Sequence: Synthetic oligonucleotide
  Antisense strand to SEQ ID NO: 1947558
aaagacaugcuucucuguu

SEQ ID NO: 1947560 - RNA, 19 nt, Artificial Sequence
  Description of Artificial Sequence: Synthetic oligonucleotide
  Sense strand starting at position 2428 of SEQ ID NO: 1880172
agagaagcaugucuuuaca

SEQ ID NO: 1947561 - RNA, 19 nt, Artificial Sequence
  Description of Artificial Sequence: Synthetic oligonucleotide
  Antisense strand to SEQ ID NO: 1947560
uguaaagacaugcuucucu

SEQ ID NO: 1947562 - RNA, 19 nt, Artificial Sequence
  Description of Artificial Sequence: Synthetic oligonucleotide
  Sense strand starting at position 2660 of SEQ ID NO: 1880172
acacuugaccaagguuaca

SEQ ID NO: 1947563 - RNA, 19 nt, Artificial Sequence
  Description of Artificial Sequence: Synthetic oligonucleotide
  Antisense strand to SEQ ID NO: 1947562
uguaaccuuggucaagugu

SEQ ID NO: 1947564 - RNA, 19 nt, Artificial Sequence
  Description of Artificial Sequence: Synthetic oligonucleotide
  Sense strand starting at position 2734 of SEQ ID NO: 1880172
uuagucaaacagugaguga

SEQ ID NO: 1947565 - RNA, 19 nt, Artificial Sequence
  Description of Artificial Sequence: Synthetic oligonucleotide
  Antisense strand to SEQ ID NO: 1947564
ucacucacuguuugacuaa

SEQ ID NO: 1947566 - RNA, 19 nt, Artificial Sequence
  Description of Artificial Sequence: Synthetic oligonucleotide
  Sense strand starting at position 2738 of SEQ ID NO: 1880172
ucaaacagugagugacuua

SEQ ID NO: 1947567 - RNA, 19 nt, Artificial Sequence
  Description of Artificial Sequence: Synthetic oligonucleotide
  Antisense strand to SEQ ID NO: 1947566
uaagucacucacuguuuga

SEQ ID NO: 1947568 - RNA, 19 nt, Artificial Sequence
  Description of Artificial Sequence: Synthetic oligonucleotide
  Sense strand starting at position 3129 of SEQ ID NO: 1880172
gauauaugccuaugaugau

SEQ ID NO: 1947569 - RNA, 19 nt, Artificial Sequence
  Description of Artificial Sequence: Synthetic oligonucleotide
  Antisense strand to SEQ ID NO: 1947568
aucaucauaggcauauauc

SEQ ID NO: 1947570 - RNA, 19 nt, Artificial Sequence
  Description of Artificial Sequence: Synthetic oligonucleotide
  Sense strand starting at position 3135 of SEQ ID NO: 1880172
ugccuaugaugaucugaau

SEQ ID NO: 1947571 - RNA, 19 nt, Artificial Sequence
  Description of Artificial Sequence: Synthetic oligonucleotide
  Antisense strand to SEQ ID NO: 1947570
auucagaucaucauaggca

SEQ ID NO: 1947572 - RNA, 19 nt, Artificial Sequence
  Description of Artificial Sequence: Synthetic oligonucleotide
  Sense strand starting at position 56 of SEQ ID NO: 1880173
auugaucaccucugaaguu

SEQ ID NO: 1947573 - RNA, 19 nt, Artificial Sequence
  Description of Artificial Sequence: Synthetic oligonucleotide
  Antisense strand to SEQ ID NO: 1947572
aacuucagaggugaucaau

SEQ ID NO: 1947574 - RNA, 19 nt, Artificial Sequence
  Description of Artificial Sequence: Synthetic oligonucleotide
  Sense strand starting at position 146 of SEQ ID NO: 1880173
uucugcuucccauagagau

SEQ ID NO: 1947575 - RNA, 19 nt, Artificial Sequence
  Description of Artificial Sequence: Synthetic oligonucleotide
  Antisense strand to SEQ ID NO: 1947574
aucucuaugggaagcagaa

SEQ ID NO: 1947576 - RNA, 19 nt, Artificial Sequence
  Description of Artificial Sequence: Synthetic oligonucleotide
  Sense strand starting at position 156 of SEQ ID NO: 1880173
cauagagauuguccugcaa

SEQ ID NO: 1947577 - RNA, 19 nt, Artificial Sequence
  Description of Artificial Sequence: Synthetic oligonucleotide
  Antisense strand to SEQ ID NO: 1947576
uugcaggacaaucucuaug

SEQ ID NO: 1947578 - RNA, 19 nt, Artificial Sequence
  Description of Artificial Sequence: Synthetic oligonucleotide
  Sense strand starting at position 248 of SEQ ID NO: 1880173
gucccauauccgcauuucu

SEQ ID NO: 1947579 - RNA, 19 nt, Artificial Sequence
  Description of Artificial Sequence: Synthetic oligonucleotide
  Antisense strand to SEQ ID NO: 1947578
agaaaugcggauaugggac

SEQ ID NO: 1947580 - RNA, 19 nt, Artificial Sequence
  Description of Artificial Sequence: Synthetic oligonucleotide
  Sense strand starting at position 322 of SEQ ID NO: 1880173
cagugugugcuacauggaa

SEQ ID NO: 1947581 - RNA, 19 nt, Artificial Sequence
  Description of Artificial Sequence: Synthetic oligonucleotide
  Antisense strand to SEQ ID NO: 1947580
uuccauguagcacacacug

SEQ ID NO: 1947582 - RNA, 19 nt, Artificial Sequence
  Description of Artificial Sequence: Synthetic oligonucleotide
  Sense strand starting at position 494 of SEQ ID NO: 1880173
gguaaaucauguucuaacc

SEQ ID NO: 1947583 - RNA, 19 nt, Artificial Sequence
  Description of Artificial Sequence: Synthetic oligonucleotide
  Antisense strand to SEQ ID NO: 1947582
gguuagaacaugauuuacc

SEQ ID NO: 1947584 - RNA, 19 nt, Artificial Sequence
  Description of Artificial Sequence: Synthetic oligonucleotide
  Sense strand starting at position 523 of SEQ ID NO: 1880173
ucugguaaugaauagcuaa

SEQ ID NO: 1947585 - RNA, 19 nt, Artificial Sequence
  Description of Artificial Sequence: Synthetic oligonucleotide
  Antisense strand to SEQ ID NO: 1947584
uuagcuauucauuaccaga

SEQ ID NO: 1947586 - RNA, 19 nt, Artificial Sequence
  Description of Artificial Sequence: Synthetic oligonucleotide
  Sense strand starting at position 802 of SEQ ID NO: 1880173
ggaggcaauuagccaagau

SEQ ID NO: 1947587 - RNA, 19 nt, Artificial Sequence
  Description of Artificial Sequence: Synthetic oligonucleotide
  Antisense strand to SEQ ID NO: 1947586
aucuuggcuaauugccucc

SEQ ID NO: 1947588 - RNA, 19 nt, Artificial Sequence
  Description of Artificial Sequence: Synthetic oligonucleotide
  Sense strand starting at position 919 of SEQ ID NO: 1880173
guucuauuagguugacuac

SEQ ID NO: 1947589 - RNA, 19 nt, Artificial Sequence
  Description of Artificial Sequence: Synthetic oligonucleotide
  Antisense strand to SEQ ID NO: 1947588
guagucaaccuaauagaac

SEQ ID NO: 1947590 - RNA, 19 nt, Artificial Sequence
  Description of Artificial Sequence: Synthetic oligonucleotide
  Sense strand starting at position 922 of SEQ ID NO: 1880173
cuauuagguugacuacuua

SEQ ID NO: 1947591 - RNA, 19 nt, Artificial Sequence
  Description of Artificial Sequence: Synthetic oligonucleotide
  Antisense strand to SEQ ID NO: 1947590
uaaguagucaaccuaauag

SEQ ID NO: 1947592 - RNA, 19 nt, Artificial Sequence
  Description of Artificial Sequence: Synthetic oligonucleotide
  Sense strand starting at position 1001 of SEQ ID NO: 1880173
uuggguagucacuaacuua

SEQ ID NO: 1947593 - RNA, 19 nt, Artificial Sequence
  Description of Artificial Sequence: Synthetic oligonucleotide
  Antisense strand to SEQ ID NO: 1947592
uaaguuagugacuacccaa

SEQ ID NO: 1947594 - RNA, 19 nt, Artificial Sequence
  Description of Artificial Sequence: Synthetic oligonucleotide
  Sense strand starting at position 1029 of SEQ ID NO: 1880173
auagguccauagucacaaa

SEQ ID NO: 1947595 - RNA, 19 nt, Artificial Sequence
  Description of Artificial Sequence: Synthetic oligonucleotide
  Antisense strand to SEQ ID NO: 1947594
uuugugacuauggaccuau

SEQ ID NO: 1947596 - RNA, 19 nt, Artificial Sequence
  Description of Artificial Sequence: Synthetic oligonucleotide
  Sense strand starting at position 1048 of SEQ ID NO: 1880173
ugaggacagcuuuacaugu

SEQ ID NO: 1947597 - RNA, 19 nt, Artificial Sequence
  Description of Artificial Sequence: Synthetic oligonucleotide
  Antisense strand to SEQ ID NO: 1947596
acauguaaagcuguccuca

SEQ ID NO: 1947598 - RNA, 19 nt, Artificial Sequence
  Description of Artificial Sequence: Synthetic oligonucleotide
  Sense strand starting at position 1140 of SEQ ID NO: 1880173
gcaguaauaggucagcuau

SEQ ID NO: 1947599 - RNA, 19 nt, Artificial Sequence
  Description of Artificial Sequence: Synthetic oligonucleotide
  Antisense strand to SEQ ID NO: 1947598
auagcugaccuauuacugc

SEQ ID NO: 1947600 - RNA, 19 nt, Artificial Sequence
  Description of Artificial Sequence: Synthetic oligonucleotide
  Sense strand starting at position 1142 of SEQ ID NO: 1880173
aguaauaggucagcuauua

SEQ ID NO: 1947601 - RNA, 19 nt, Artificial Sequence
  Description of Artificial Sequence: Synthetic oligonucleotide
  Antisense strand to SEQ ID NO: 1947600
uaauagcugaccuauuacu

SEQ ID NO: 1947602 - RNA, 19 nt, Artificial Sequence
  Description of Artificial Sequence: Synthetic oligonucleotide
  Sense strand starting at position 1246 of SEQ ID NO: 1880173
ucugaaaccugucugaaac

SEQ ID NO: 1947603 - RNA, 19 nt, Artificial Sequence
  Description of Artificial Sequence: Synthetic oligonucleotide
  Antisense strand to SEQ ID NO: 1947602
guuucagacagguuucaga

SEQ ID NO: 1947604 - RNA, 19 nt, Artificial Sequence
  Description of Artificial Sequence: Synthetic oligonucleotide
  Sense strand starting at position 1247 of SEQ ID NO: 1880173
cugaaaccugucugaaacu

SEQ ID NO: 1947605 - RNA, 19 nt, Artificial Sequence
  Description of Artificial Sequence: Synthetic oligonucleotide
  Antisense strand to SEQ ID NO: 1947604
aguuucagacagguuucag

SEQ ID NO: 1947606 - RNA, 19 nt, Artificial Sequence
  Description of Artificial Sequence: Synthetic oligonucleotide
  Sense strand starting at position 1378 of SEQ ID NO: 1880173
ggauuaagcugaucaacuu

SEQ ID NO: 1947607 - RNA, 19 nt, Artificial Sequence
  Description of Artificial Sequence: Synthetic oligonucleotide
  Antisense strand to SEQ ID NO: 1947606
aaguugaucagcuuaaucc

SEQ ID NO: 1947608 - RNA, 19 nt, Artificial Sequence
  Description of Artificial Sequence: Synthetic oligonucleotide
  Sense strand starting at position 1580 of SEQ ID NO: 1880173
ucagaaguucgagacccau

SEQ ID NO: 1947609 - RNA, 19 nt, Artificial Sequence
  Description of Artificial Sequence: Synthetic oligonucleotide
  Antisense strand to SEQ ID NO: 1947608
augggucucgaacuucuga

SEQ ID NO: 1947610 - RNA, 19 nt, Artificial Sequence
  Description of Artificial Sequence: Synthetic oligonucleotide
  Sense strand starting at position 1853 of SEQ ID NO: 1880173
agcccugguccugaaacau

SEQ ID NO: 1947611 - RNA, 19 nt, Artificial Sequence
  Description of Artificial Sequence: Synthetic oligonucleotide
  Antisense strand to SEQ ID NO: 1947610
auguuucaggaccagggcu

SEQ ID NO: 1947612 - RNA, 19 nt, Artificial Sequence
  Description of Artificial Sequence: Synthetic oligonucleotide
  Sense strand starting at position 1909 of SEQ ID NO: 1880173
ugaccugcgcugucaaagu

SEQ ID NO: 1947613 - RNA, 19 nt, Artificial Sequence
  Description of Artificial Sequence: Synthetic oligonucleotide
  Antisense strand to SEQ ID NO: 1947612
acuuugacagcgcagguca

SEQ ID NO: 1947614 - RNA, 19 nt, Artificial Sequence
  Description of Artificial Sequence: Synthetic oligonucleotide
  Sense strand starting at position 2085 of SEQ ID NO: 1880173
aguccucgaucaccagaaa

SEQ ID NO: 1947615 - RNA, 19 nt, Artificial Sequence
  Description of Artificial Sequence: Synthetic oligonucleotide
  Antisense strand to SEQ ID NO: 1947614
uuucuggugaucgaggacu

SEQ ID NO: 1947616 - RNA, 19 nt, Artificial Sequence
  Description of Artificial Sequence: Synthetic oligonucleotide
  Sense strand starting at position 2189 of SEQ ID NO: 1880173
ugguccucagaaugauaca

SEQ ID NO: 1947617 - RNA, 19 nt, Artificial Sequence
  Description of Artificial Sequence: Synthetic oligonucleotide
  Antisense strand to SEQ ID NO: 1947616
uguaucauucugaggacca

SEQ ID NO: 1947618 - RNA, 19 nt, Artificial Sequence
  Description of Artificial Sequence: Synthetic oligonucleotide
  Sense strand starting at position 2303 of SEQ ID NO: 1880173
ugguuaacuguacaugcaa

SEQ ID NO: 1947619 - RNA, 19 nt, Artificial Sequence
  Description of Artificial Sequence: Synthetic oligonucleotide
  Antisense strand to SEQ ID NO: 1947618
uugcauguacaguuaacca

SEQ ID NO: 1947620 - RNA, 19 nt, Artificial Sequence
  Description of Artificial Sequence: Synthetic oligonucleotide
  Sense strand starting at position 2336 of SEQ ID NO: 1880173
ugcuguucuguggaaacaa

SEQ ID NO: 1947621 - RNA, 19 nt, Artificial Sequence
  Description of Artificial Sequence: Synthetic oligonucleotide
  Antisense strand to SEQ ID NO: 1947620
uuguuuccacagaacagca

SEQ ID NO: 1947622 - RNA, 19 nt, Artificial Sequence
  Description of Artificial Sequence: Synthetic oligonucleotide
  Sense strand starting at position 2363 of SEQ ID NO: 1880173
ugauaaaggucucuggcua

SEQ ID NO: 1947623 - RNA, 19 nt, Artificial Sequence
  Description of Artificial Sequence: Synthetic oligonucleotide
  Antisense strand to SEQ ID NO: 1947622
uagccagagaccuuuauca

SEQ ID NO: 1947624 - RNA, 19 nt, Artificial Sequence
  Description of Artificial Sequence: Synthetic oligonucleotide
  Sense strand starting at position 2364 of SEQ ID NO: 1880173
gauaaaggucucuggcuac

SEQ ID NO: 1947625 - RNA, 19 nt, Artificial Sequence
  Description of Artificial Sequence: Synthetic oligonucleotide
  Antisense strand to SEQ ID NO: 1947624
guagccagagaccuuuauc

SEQ ID NO: 1947626 - RNA, 19 nt, Artificial Sequence
  Description of Artificial Sequence: Synthetic oligonucleotide
  Sense strand starting at position 2516 of SEQ ID NO: 1880173
gcagcugcagcuucgauaa

SEQ ID NO: 1947627 - RNA, 19 nt, Artificial Sequence
  Description of Artificial Sequence: Synthetic oligonucleotide
  Antisense strand to SEQ ID NO: 1947626
uuaucgaagcugcagcugc

SEQ ID NO: 1947628 - RNA, 19 nt, Artificial Sequence
  Description of Artificial Sequence: Synthetic oligonucleotide
  Sense strand starting at position 2612 of SEQ ID NO: 1880173
ccgggaucucuguagacua

SEQ ID NO: 1947629 - RNA, 19 nt, Artificial Sequence
  Description of Artificial Sequence: Synthetic oligonucleotide
  Antisense strand to SEQ ID NO: 1947628
uagucuacagagaucccgg

SEQ ID NO: 1947630 - RNA, 19 nt, Artificial Sequence
  Description of Artificial Sequence: Synthetic oligonucleotide
  Sense strand starting at position 2622 of SEQ ID NO: 1880173
uguagacuaagucagucau

SEQ ID NO: 1947631 - RNA, 19 nt, Artificial Sequence
  Description of Artificial Sequence: Synthetic oligonucleotide
  Antisense strand to SEQ ID NO: 1947630
augacugacuuagucuaca

SEQ ID NO: 1947632 - RNA, 19 nt, Artificial Sequence
  Description of Artificial Sequence: Synthetic oligonucleotide
  Sense strand starting at position 2686 of SEQ ID NO: 1880173
uuucucagucuugauggga

SEQ ID NO: 1947633 - RNA, 19 nt, Artificial Sequence
  Description of Artificial Sequence: Synthetic oligonucleotide
  Antisense strand to SEQ ID NO: 1947632
ucccaucaagacugagaaa

SEQ ID NO: 1947634 - RNA, 19 nt, Artificial Sequence
  Description of Artificial Sequence: Synthetic oligonucleotide
  Sense strand starting at position 2730 of SEQ ID NO: 1880173
agagguuuagaccgauuaa

SEQ ID NO: 1947635 - RNA, 19 nt, Artificial Sequence
  Description of Artificial Sequence: Synthetic oligonucleotide
  Antisense strand to SEQ ID NO: 1947634
uuaaucggucuaaaccucu

SEQ ID NO: 1947636 - RNA, 19 nt, Artificial Sequence
  Description of Artificial Sequence: Synthetic oligonucleotide
  Sense strand starting at position 2742 of SEQ ID NO: 1880173
cgauuaaguuacuuccuga

SEQ ID NO: 1947637 - RNA, 19 nt, Artificial Sequence
  Description of Artificial Sequence: Synthetic oligonucleotide
  Antisense strand to SEQ ID NO: 1947636
ucaggaaguaacuuaaucg

SEQ ID NO: 1947638 - RNA, 19 nt, Artificial Sequence
  Description of Artificial Sequence: Synthetic oligonucleotide
  Sense strand starting at position 2747 of SEQ ID NO: 1880173
aaguuacuuccugaagguc

SEQ ID NO: 1947639 - RNA, 19 nt, Artificial Sequence
  Description of Artificial Sequence: Synthetic oligonucleotide
  Antisense strand to SEQ ID NO: 1947638
gaccuucaggaaguaacuu

SEQ ID NO: 1947640 - RNA, 19 nt, Artificial Sequence
  Description of Artificial Sequence: Synthetic oligonucleotide
  Sense strand starting at position 2764 of SEQ ID NO: 1880173
ucgcuuagucacuuagcga

SEQ ID NO: 1947641 - RNA, 19 nt, Artificial Sequence
  Description of Artificial Sequence: Synthetic oligonucleotide
  Antisense strand to SEQ ID NO: 1947640
ucgcuaagugacuaagcga

SEQ ID NO: 1947642 - RNA, 19 nt, Artificial Sequence
  Description of Artificial Sequence: Synthetic oligonucleotide
  Sense strand starting at position 3374 of SEQ ID NO: 1880173
cgagcaagagcuuauauag

SEQ ID NO: 1947643 - RNA, 19 nt, Artificial Sequence
  Description of Artificial Sequence: Synthetic oligonucleotide
  Antisense strand to SEQ ID NO: 1947642
cuauauaagcucuugcucg

SEQ ID NO: 1947644 - RNA, 19 nt, Artificial Sequence
  Description of Artificial Sequence: Synthetic oligonucleotide
  Sense strand starting at position 3630 of SEQ ID NO: 1880173
uggaguugucucugggaug

SEQ ID NO: 1947645 - RNA, 19 nt, Artificial Sequence
  Description of Artificial Sequence: Synthetic oligonucleotide
  Antisense strand to SEQ ID NO: 1947644
caucccagagacaacucca

SEQ ID NO: 1947646 - RNA, 19 nt, Artificial Sequence
  Description of Artificial Sequence: Synthetic oligonucleotide
  Sense strand starting at position 3644 of SEQ ID NO: 1880173
ggaugucuuucagucugga

SEQ ID NO: 1947647 - RNA, 19 nt, Artificial Sequence
  Description of Artificial Sequence: Synthetic oligonucleotide
  Antisense strand to SEQ ID NO: 1947646
uccagacugaaagacaucc

SEQ ID NO: 1947648 - RNA, 19 nt, Artificial Sequence
  Description of Artificial Sequence: Synthetic oligonucleotide
  Sense strand starting at position 3843 of SEQ ID NO: 1880173
cugauuaucugaucuaguu

SEQ ID NO: 1947649 - RNA, 19 nt, Artificial Sequence
  Description of Artificial Sequence: Synthetic oligonucleotide
  Antisense strand to SEQ ID NO: 1947648
aacuagaucagauaaucag

SEQ ID NO: 1947650 - RNA, 19 nt, Artificial Sequence
  Description of Artificial Sequence: Synthetic oligonucleotide
  Sense strand starting at position 3880 of SEQ ID NO: 1880173
acgcucuguggacaaauaa

SEQ ID NO: 1947651 - RNA, 19 nt, Artificial Sequence
  Description of Artificial Sequence: Synthetic oligonucleotide
  Antisense strand to SEQ ID NO: 1947650
uuauuuguccacagagcgu

SEQ ID NO: 1947652 - RNA, 19 nt, Artificial Sequence
  Description of Artificial Sequence: Synthetic oligonucleotide
  Sense strand starting at position 494 of SEQ ID NO: 1880174
aggguucuggcacaggauu

SEQ ID NO: 1947653 - RNA, 19 nt, Artificial Sequence
  Description of Artificial Sequence: Synthetic oligonucleotide
  Antisense strand to SEQ ID NO: 1947652
aauccugugccagaacccu

SEQ ID NO: 1947654 - RNA, 19 nt, Artificial Sequence
  Description of Artificial Sequence: Synthetic oligonucleotide
  Sense strand starting at position 529 of SEQ ID NO: 1880174
agucacaaccucuaaggua

SEQ ID NO: 1947655 - RNA, 19 nt, Artificial Sequence
  Description of Artificial Sequence: Synthetic oligonucleotide
  Antisense strand to SEQ ID NO: 1947654
uaccuuagagguugugacu

SEQ ID NO: 1947656 - RNA, 19 nt, Artificial Sequence
  Description of Artificial Sequence: Synthetic oligonucleotide
  Sense strand starting at position 625 of SEQ ID NO: 1880174
acucaaagauguuuccuga

SEQ ID NO: 1947657 - RNA, 19 nt, Artificial Sequence
  Description of Artificial Sequence: Synthetic oligonucleotide
  Antisense strand to SEQ ID NO: 1947656
ucaggaaacaucuuugagu

SEQ ID NO: 1947658 - RNA, 19 nt, Artificial Sequence
  Description of Artificial Sequence: Synthetic oligonucleotide
  Sense strand starting at position 678 of SEQ ID NO: 1880174
acaucuugagaguaguacu

SEQ ID NO: 1947659 - RNA, 19 nt, Artificial Sequence
  Description of Artificial Sequence: Synthetic oligonucleotide
  Antisense strand to SEQ ID NO: 1947658
aguacuacucucaagaugu

SEQ ID NO: 1947660 - RNA, 19 nt, Artificial Sequence
  Description of Artificial Sequence: Synthetic oligonucleotide
  Sense strand starting at position 685 of SEQ ID NO: 1880174
gagaguaguacugagcaau

SEQ ID NO: 1947661 - RNA, 19 nt, Artificial Sequence
  Description of Artificial Sequence: Synthetic oligonucleotide
  Antisense strand to SEQ ID NO: 1947660
auugcucaguacuacucuc

SEQ ID NO: 1947662 - RNA, 19 nt, Artificial Sequence
  Description of Artificial Sequence: Synthetic oligonucleotide
  Sense strand starting at position 726 of SEQ ID NO: 1880174
ucaagaccucgguggacaa

SEQ ID NO: 1947663 - RNA, 19 nt, Artificial Sequence
  Description of Artificial Sequence: Synthetic oligonucleotide
  Antisense strand to SEQ ID NO: 1947662
uuguccaccgaggucuuga

SEQ ID NO: 1947664 - RNA, 19 nt, Artificial Sequence
  Description of Artificial Sequence: Synthetic oligonucleotide
  Sense strand starting at position 878 of SEQ ID NO: 1880174
ccuagauucuagucucacu

SEQ ID NO: 1947665 - RNA, 19 nt, Artificial Sequence
  Description of Artificial Sequence: Synthetic oligonucleotide
  Antisense strand to SEQ ID NO: 1947664
agugagacuagaaucuagg

SEQ ID NO: 1947666 - RNA, 19 nt, Artificial Sequence
  Description of Artificial Sequence: Synthetic oligonucleotide
  Sense strand starting at position 907 of SEQ ID NO: 1880174
aggcucaauuuccaagaaa

SEQ ID NO: 1947667 - RNA, 19 nt, Artificial Sequence
  Description of Artificial Sequence: Synthetic oligonucleotide
  Antisense strand to SEQ ID NO: 1947666
uuucuuggaaauugagccu

SEQ ID NO: 1947668 - RNA, 19 nt, Artificial Sequence
  Description of Artificial Sequence: Synthetic oligonucleotide
  Sense strand starting at position 1001 of SEQ ID NO: 1880174
auggcauucuuccuaauag

SEQ ID NO: 1947669 - RNA, 19 nt, Artificial Sequence
  Description of Artificial Sequence: Synthetic oligonucleotide
  Antisense strand to SEQ ID NO: 1947668
cuauuaggaagaaugccau

SEQ ID NO: 1947670 - RNA, 19 nt, Artificial Sequence
  Description of Artificial Sequence: Synthetic oligonucleotide
  Sense strand starting at position 1012 of SEQ ID NO: 1880174
ccuaauagacaagguuauu

SEQ ID NO: 1947671 - RNA, 19 nt, Artificial Sequence
  Description of Artificial Sequence: Synthetic oligonucleotide
  Antisense strand to SEQ ID NO: 1947670
aauaaccuugucuauuagg

SEQ ID NO: 1947672 - RNA, 19 nt, Artificial Sequence
  Description of Artificial Sequence: Synthetic oligonucleotide
  Sense strand starting at position 1117 of SEQ ID NO: 1880174
agaagugcaucacuccaua

SEQ ID NO: 1947673 - RNA, 19 nt, Artificial Sequence
  Description of Artificial Sequence: Synthetic oligonucleotide
  Antisense strand to SEQ ID NO: 1947672
uauggagugaugcacuucu

SEQ ID NO: 1947674 - RNA, 19 nt, Artificial Sequence
  Description of Artificial Sequence: Synthetic oligonucleotide
  Sense strand starting at position 1136 of SEQ ID NO: 1880174
acucucuaccaaugagaug

SEQ ID NO: 1947675 - RNA, 19 nt, Artificial Sequence
  Description of Artificial Sequence: Synthetic oligonucleotide
  Antisense strand to SEQ ID NO: 1947674
caucucauugguagagagu

SEQ ID NO: 1947676 - RNA, 19 nt, Artificial Sequence
  Description of Artificial Sequence: Synthetic oligonucleotide
  Sense strand starting at position 1157 of SEQ ID NO: 1880174
ccaguaagguaugugaaua

SEQ ID NO: 1947677 - RNA, 19 nt, Artificial Sequence
  Description of Artificial Sequence: Synthetic oligonucleotide
  Antisense strand to SEQ ID NO: 1947676
uauucacauaccuuacugg

SEQ ID NO: 1947678 - RNA, 19 nt, Artificial Sequence
  Description of Artificial Sequence: Synthetic oligonucleotide
  Sense strand starting at position 1249 of SEQ ID NO: 1880174
acuugacuacuaggcagau

SEQ ID NO: 1947679 - RNA, 19 nt, Artificial Sequence
  Description of Artificial Sequence: Synthetic oligonucleotide
  Antisense strand to SEQ ID NO: 1947678
aucugccuaguagucaagu

SEQ ID NO: 1947680 - RNA, 19 nt, Artificial Sequence
  Description of Artificial Sequence: Synthetic oligonucleotide
  Sense strand starting at position 1250 of SEQ ID NO: 1880174
cuugacuacuaggcagaua

SEQ ID NO: 1947681 - RNA, 19 nt, Artificial Sequence
  Description of Artificial Sequence: Synthetic oligonucleotide
  Antisense strand to SEQ ID NO: 1947680
uaucugccuaguagucaag

SEQ ID NO: 1947682 - RNA, 19 nt, Artificial Sequence
  Description of Artificial Sequence: Synthetic oligonucleotide
  Sense strand starting at position 1262 of SEQ ID NO: 1880174
gcagauaagcaaggauaga

SEQ ID NO: 1947683 - RNA, 19 nt, Artificial Sequence
  Description of Artificial Sequence: Synthetic oligonucleotide
  Antisense strand to SEQ ID NO: 1947682
ucuauccuugcuuaucugc

SEQ ID NO: 1947684 - RNA, 19 nt, Artificial Sequence
  Description of Artificial Sequence: Synthetic oligonucleotide
  Sense strand starting at position 1703 of SEQ ID NO: 1880174
gcuaacuuaguugauauga

SEQ ID NO: 1947685 - RNA, 19 nt, Artificial Sequence
  Description of Artificial Sequence: Synthetic oligonucleotide
  Antisense strand to SEQ ID NO: 1947684
ucauaucaacuaaguuagc

SEQ ID NO: 1947686 - RNA, 19 nt, Artificial Sequence
  Description of Artificial Sequence: Synthetic oligonucleotide
  Sense strand starting at position 1917 of SEQ ID NO: 1880174
cuggauuuccucugcucau

SEQ ID NO: 1947687 - RNA, 19 nt, Artificial Sequence
  Description of Artificial Sequence: Synthetic oligonucleotide
  Antisense strand to SEQ ID NO: 1947686
augagcagaggaaauccag

SEQ ID NO: 1947688 - RNA, 19 nt, Artificial Sequence
  Description of Artificial Sequence: Synthetic oligonucleotide
  Sense strand starting at position 1918 of SEQ ID NO: 1880174
uggauuuccucugcucauu

SEQ ID NO: 1947689 - RNA, 19 nt, Artificial Sequence
  Description of Artificial Sequence: Synthetic oligonucleotide
  Antisense strand to SEQ ID NO: 1947688
aaugagcagaggaaaucca

SEQ ID NO: 1947690 - RNA, 19 nt, Artificial Sequence
  Description of Artificial Sequence: Synthetic oligonucleotide
  Sense strand starting at position 2021 of SEQ ID NO: 1880174
gggucaaauuccucuccag

SEQ ID NO: 1947691 - RNA, 19 nt, Artificial Sequence
  Description of Artificial Sequence: Synthetic oligonucleotide
  Antisense strand to SEQ ID NO: 1947690
cuggagaggaauuugaccc

SEQ ID NO: 1947692 - RNA, 19 nt, Artificial Sequence
  Description of Artificial Sequence: Synthetic oligonucleotide
  Sense strand starting at position 2039 of SEQ ID NO: 1880174
gacuccagugcuugggaaa

SEQ ID NO: 1947693 - RNA, 19 nt, Artificial Sequence
  Description of Artificial Sequence: Synthetic oligonucleotide
  Antisense strand to SEQ ID NO: 1947692
uuucccaagcacuggaguc

SEQ ID NO: 1947694 - RNA, 19 nt, Artificial Sequence
  Description of Artificial Sequence: Synthetic oligonucleotide
  Sense strand starting at position 2051 of SEQ ID NO: 1880174
ugggaaacaguguaauguu

SEQ ID NO: 1947695 - RNA, 19 nt, Artificial Sequence
  Description of Artificial Sequence: Synthetic oligonucleotide
  Antisense strand to SEQ ID NO: 1947694
aacauuacacuguuuccca

SEQ ID NO: 1947696 - RNA, 19 nt, Artificial Sequence
  Description of Artificial Sequence: Synthetic oligonucleotide
  Sense strand starting at position 2060 of SEQ ID NO: 1880174
guguaauguuaaccuaaug

SEQ ID NO: 1947697 - RNA, 19 nt, Artificial Sequence
  Description of Artificial Sequence: Synthetic oligonucleotide
  Antisense strand to SEQ ID NO: 1947696
cauuagguuaacauuacac

SEQ ID NO: 1947698 - RNA, 19 nt, Artificial Sequence
  Description of Artificial Sequence: Synthetic oligonucleotide
  Sense strand starting at position 2082 of SEQ ID NO: 1880174
ugucauucuccagaaugca

SEQ ID NO: 1947699 - RNA, 19 nt, Artificial Sequence
  Description of Artificial Sequence: Synthetic oligonucleotide
  Antisense strand to SEQ ID NO: 1947698
ugcauucuggagaaugaca

SEQ ID NO: 1947700 - RNA, 19 nt, Artificial Sequence
  Description of Artificial Sequence: Synthetic oligonucleotide
  Sense strand starting at position 2182 of SEQ ID NO: 1880174
ugccaauaagccuauaaug

SEQ ID NO: 1947701 - RNA, 19 nt, Artificial Sequence
  Description of Artificial Sequence: Synthetic oligonucleotide
  Antisense strand to SEQ ID NO: 1947700
cauuauaggcuuauuggca

SEQ ID NO: 1947702 - RNA, 19 nt, Artificial Sequence
  Description of Artificial Sequence: Synthetic oligonucleotide
  Sense strand starting at position 2221 of SEQ ID NO: 1880174
cccagaucgcaguauaaua

SEQ ID NO: 1947703 - RNA, 19 nt, Artificial Sequence
  Description of Artificial Sequence: Synthetic oligonucleotide
  Antisense strand to SEQ ID NO: 1947702
uauuauacugcgaucuggg

SEQ ID NO: 1947704 - RNA, 19 nt, Artificial Sequence
  Description of Artificial Sequence: Synthetic oligonucleotide
  Sense strand starting at position 2237 of SEQ ID NO: 1880174
auaccuuagcacugguaau

SEQ ID NO: 1947705 - RNA, 19 nt, Artificial Sequence
  Description of Artificial Sequence: Synthetic oligonucleotide
  Antisense strand to SEQ ID NO: 1947704
auuaccagugcuaagguau

SEQ ID NO: 1947706 - RNA, 19 nt, Artificial Sequence
  Description of Artificial Sequence: Synthetic oligonucleotide
  Sense strand starting at position 2313 of SEQ ID NO: 1880174
guucuuaauguagagauuc

SEQ ID NO: 1947707 - RNA, 19 nt, Artificial Sequence
  Description of Artificial Sequence: Synthetic oligonucleotide
  Antisense strand to SEQ ID NO: 1947706
gaaucucuacauuaagaac

SEQ ID NO: 1947708 - RNA, 19 nt, Artificial Sequence
  Description of Artificial Sequence: Synthetic oligonucleotide
  Sense strand starting at position 2846 of SEQ ID NO: 1880174
acaagcucugcugaugaau

SEQ ID NO: 1947709 - RNA, 19 nt, Artificial Sequence
  Description of Artificial Sequence: Synthetic oligonucleotide
  Antisense strand to SEQ ID NO: 1947708
auucaucagcagagcuugu

SEQ ID NO: 1947710 - RNA, 19 nt, Artificial Sequence
  Description of Artificial Sequence: Synthetic oligonucleotide
  Sense strand starting at position 2885 of SEQ ID NO: 1880174
ugaaacuacugcccugaaa

SEQ ID NO: 1947711 - RNA, 19 nt, Artificial Sequence
  Description of Artificial Sequence: Synthetic oligonucleotide
  Antisense strand to SEQ ID NO: 1947710
uuucagggcaguaguuuca

SEQ ID NO: 1947712 - RNA, 19 nt, Artificial Sequence
  Description of Artificial Sequence: Synthetic oligonucleotide
  Sense strand starting at position 3113 of SEQ ID NO: 1880174
guucuauaauaaucaguca

SEQ ID NO: 1947713 - RNA, 19 nt, Artificial Sequence
  Description of Artificial Sequence: Synthetic oligonucleotide
  Antisense strand to SEQ ID NO: 1947712
ugacugauuauuauagaac

SEQ ID NO: 1947714 - RNA, 19 nt, Artificial Sequence
  Description of Artificial Sequence: Synthetic oligonucleotide
  Sense strand starting at position 3135 of SEQ ID NO: 1880174
guaguagguauauauccuu

SEQ ID NO: 1947715 - RNA, 19 nt, Artificial Sequence
  Description of Artificial Sequence: Synthetic oligonucleotide
  Antisense strand to SEQ ID NO: 1947714
aaggauauauaccuacuac

SEQ ID NO: 1947716 - RNA, 19 nt, Artificial Sequence
  Description of Artificial Sequence: Synthetic oligonucleotide
  Sense strand starting at position 3291 of SEQ ID NO: 1880174
ccugauaucgacuaauucu

SEQ ID NO: 1947717 - RNA, 19 nt, Artificial Sequence
  Description of Artificial Sequence: Synthetic oligonucleotide
  Antisense strand to SEQ ID NO: 1947716
agaauuagucgauaucagg

SEQ ID NO: 1947718 - RNA, 19 nt, Artificial Sequence
  Description of Artificial Sequence: Synthetic oligonucleotide
  Sense strand starting at position 3474 of SEQ ID NO: 1880174
ggucuuauucuggaggucu

SEQ ID NO: 1947719 - RNA, 19 nt, Artificial Sequence
  Description of Artificial Sequence: Synthetic oligonucleotide
  Antisense strand to SEQ ID NO: 1947718
agaccuccagaauaagacc

SEQ ID NO: 1947720 - RNA, 19 nt, Artificial Sequence
  Description of Artificial Sequence: Synthetic oligonucleotide
  Sense strand starting at position 3476 of SEQ ID NO: 1880174
ucuuauucuggaggucuaa

SEQ ID NO: 1947721 - RNA, 19 nt, Artificial Sequence
  Description of Artificial Sequence: Synthetic oligonucleotide
  Antisense strand to SEQ ID NO: 1947720
uuagaccuccagaauaaga

SEQ ID NO: 1947722 - RNA, 19 nt, Artificial Sequence
  Description of Artificial Sequence: Synthetic oligonucleotide
  Sense strand starting at position 3607 of SEQ ID NO: 1880174
auggguuauugauccagau

SEQ ID NO: 1947723 - RNA, 19 nt, Artificial Sequence
  Description of Artificial Sequence: Synthetic oligonucleotide
  Antisense strand to SEQ ID NO: 1947722
aucuggaucaauaacccau

SEQ ID NO: 1947724 - RNA, 19 nt, Artificial Sequence
  Description of Artificial Sequence: Synthetic oligonucleotide
  Sense strand starting at position 3631 of SEQ ID NO: 1880174
agaaauaguacagguguau

SEQ ID NO: 1947725 - RNA, 19 nt, Artificial Sequence
  Description of Artificial Sequence: Synthetic oligonucleotide
  Antisense strand to SEQ ID NO: 1947724
auacaccuguacuauuucu

SEQ ID NO: 1947726 - RNA, 19 nt, Artificial Sequence
  Description of Artificial Sequence: Synthetic oligonucleotide
  Sense strand starting at position 3643 of SEQ ID NO: 1880174
gguguauaaacacaagugu

SEQ ID NO: 1947727 - RNA, 19 nt, Artificial Sequence
  Description of Artificial Sequence: Synthetic oligonucleotide
  Antisense strand to SEQ ID NO: 1947726
acacuuguguuuauacacc

SEQ ID NO: 1947728 - RNA, 19 nt, Artificial Sequence
  Description of Artificial Sequence: Synthetic oligonucleotide
  Sense strand starting at position 3671 of SEQ ID NO: 1880174
agccuagggcgauauaaua

SEQ ID NO: 1947729 - RNA, 19 nt, Artificial Sequence
  Description of Artificial Sequence: Synthetic oligonucleotide
  Antisense strand to SEQ ID NO: 1947728
uauuauaucgcccuaggcu

SEQ ID NO: 1947730 - RNA, 19 nt, Artificial Sequence
  Description of Artificial Sequence: Synthetic oligonucleotide
  Sense strand starting at position 3779 of SEQ ID NO: 1880174
gcugccgugcuguuaucaa

SEQ ID NO: 1947731 - RNA, 19 nt, Artificial Sequence
  Description of Artificial Sequence: Synthetic oligonucleotide
  Antisense strand to SEQ ID NO: 1947730
uugauaacagcacggcagc

SEQ ID NO: 1947732 - RNA, 19 nt, Artificial Sequence
  Description of Artificial Sequence: Synthetic oligonucleotide
  Sense strand starting at position 454 of SEQ ID NO: 1880175
augggauguacacgucaaa

SEQ ID NO: 1947733 - RNA, 19 nt, Artificial Sequence
  Description of Artificial Sequence: Synthetic oligonucleotide
  Antisense strand to SEQ ID NO: 1947732
uuugacguguacaucccau

SEQ ID NO: 1947734 - RNA, 19 nt, Artificial Sequence
  Description of Artificial Sequence: Synthetic oligonucleotide
  Sense strand starting at position 904 of SEQ ID NO: 1880175
cugaucugcagagguaaga

SEQ ID NO: 1947735 - RNA, 19 nt, Artificial Sequence
  Description of Artificial Sequence: Synthetic oligonucleotide
  Antisense strand to SEQ ID NO: 1947734
ucuuaccucugcagaucag

SEQ ID NO: 1947736 - RNA, 19 nt, Artificial Sequence
  Description of Artificial Sequence: Synthetic oligonucleotide
  Sense strand starting at position 946 of SEQ ID NO: 1880175
acaucuaaggucuggugau

SEQ ID NO: 1947737 - RNA, 19 nt, Artificial Sequence
  Description of Artificial Sequence: Synthetic oligonucleotide
  Antisense strand to SEQ ID NO: 1947736
aucaccagaccuuagaugu

SEQ ID NO: 1947738 - RNA, 19 nt, Artificial Sequence
  Description of Artificial Sequence: Synthetic oligonucleotide
  Sense strand starting at position 947 of SEQ ID NO: 1880175
caucuaaggucuggugaug

SEQ ID NO: 1947739 - RNA, 19 nt, Artificial Sequence
  Description of Artificial Sequence: Synthetic oligonucleotide
  Antisense strand to SEQ ID NO: 1947738
caucaccagaccuuagaug

SEQ ID NO: 1947740 - RNA, 19 nt, Artificial Sequence
  Description of Artificial Sequence: Synthetic oligonucleotide
  Sense strand starting at position 956 of SEQ ID NO: 1880175
ucuggugauggcugaugaa

SEQ ID NO: 1947741 - RNA, 19 nt, Artificial Sequence
  Description of Artificial Sequence: Synthetic oligonucleotide
  Antisense strand to SEQ ID NO: 1947740
uucaucagccaucaccaga

SEQ ID NO: 1947742 - RNA, 19 nt, Artificial Sequence
  Description of Artificial Sequence: Synthetic oligonucleotide
  Sense strand starting at position 959 of SEQ ID NO: 1880175
ggugauggcugaugaagga

SEQ ID NO: 1947743 - RNA, 19 nt, Artificial Sequence
  Description of Artificial Sequence: Synthetic oligonucleotide
  Antisense strand to SEQ ID NO: 1947742
uccuucaucagccaucacc

SEQ ID NO: 1947744 - RNA, 19 nt, Artificial Sequence
  Description of Artificial Sequence: Synthetic oligonucleotide
  Sense strand starting at position 1002 of SEQ ID NO: 1880175
cuaggucuuucuuaccaca

SEQ ID NO: 1947745 - RNA, 19 nt, Artificial Sequence
  Description of Artificial Sequence: Synthetic oligonucleotide
  Antisense strand to SEQ ID NO: 1947744
ugugguaagaaagaccuag

SEQ ID NO: 1947746 - RNA, 19 nt, Artificial Sequence
  Description of Artificial Sequence: Synthetic oligonucleotide
  Sense strand starting at position 1030 of SEQ ID NO: 1880175
cugcccaccugcuuugaaa

SEQ ID NO: 1947747 - RNA, 19 nt, Artificial Sequence
  Description of Artificial Sequence: Synthetic oligonucleotide
  Antisense strand to SEQ ID NO: 1947746
uuucaaagcaggugggcag

SEQ ID NO: 1947748 - RNA, 19 nt, Artificial Sequence
  Description of Artificial Sequence: Synthetic oligonucleotide
  Sense strand starting at position 1262 of SEQ ID NO: 1880175
ggcgcuauuuccgauccau

SEQ ID NO: 1947749 - RNA, 19 nt, Artificial Sequence
  Description of Artificial Sequence: Synthetic oligonucleotide
  Antisense strand to SEQ ID NO: 1947748
auggaucggaaauagcgcc

SEQ ID NO: 1947750 - RNA, 19 nt, Artificial Sequence
  Description of Artificial Sequence: Synthetic oligonucleotide
  Sense strand starting at position 1316 of SEQ ID NO: 1880175
uguaucauucuugaaugca

SEQ ID NO: 1947751 - RNA, 19 nt, Artificial Sequence
  Description of Artificial Sequence: Synthetic oligonucleotide
  Antisense strand to SEQ ID NO: 1947750
ugcauucaagaaugauaca

SEQ ID NO: 1947752 - RNA, 19 nt, Artificial Sequence
  Description of Artificial Sequence: Synthetic oligonucleotide
  Sense strand starting at position 1346 of SEQ ID NO: 1880175
ccggguaugccgggugaga

SEQ ID NO: 1947753 - RNA, 19 nt, Artificial Sequence
  Description of Artificial Sequence: Synthetic oligonucleotide
  Antisense strand to SEQ ID NO: 1947752
ucucacccggcauacccgg

SEQ ID NO: 1947754 - RNA, 19 nt, Artificial Sequence
  Description of Artificial Sequence: Synthetic oligonucleotide
  Sense strand starting at position 1348 of SEQ ID NO: 1880175
ggguaugccgggugagaau

SEQ ID NO: 1947755 - RNA, 19 nt, Artificial Sequence
  Description of Artificial Sequence: Synthetic oligonucleotide
  Antisense strand to SEQ ID NO: 1947754
auucucacccggcauaccc

SEQ ID NO: 1947756 - RNA, 19 nt, Artificial Sequence
  Description of Artificial Sequence: Synthetic oligonucleotide
  Sense strand starting at position 1498 of SEQ ID NO: 1880175
cuguguagccuugaaugaa

SEQ ID NO: 1947757 - RNA, 19 nt, Artificial Sequence
  Description of Artificial Sequence: Synthetic oligonucleotide
  Antisense strand to SEQ ID NO: 1947756
uucauucaaggcuacacag

SEQ ID NO: 1947758 - RNA, 19 nt, Artificial Sequence
  Description of Artificial Sequence: Synthetic oligonucleotide
  Sense strand starting at position 1501 of SEQ ID NO: 1880175
uguagccuugaaugaauca

SEQ ID NO: 1947759 - RNA, 19 nt, Artificial Sequence
  Description of Artificial Sequence: Synthetic oligonucleotide
  Antisense strand to SEQ ID NO: 1947758
ugauucauucaaggcuaca

SEQ ID NO: 1947760 - RNA, 19 nt, Artificial Sequence
  Description of Artificial Sequence: Synthetic oligonucleotide
  Sense strand starting at position 1519 of SEQ ID NO: 1880175
accugcuaugaccaauagu

SEQ ID NO: 1947761 - RNA, 19 nt, Artificial Sequence
  Description of Artificial Sequence: Synthetic oligonucleotide
  Antisense strand to SEQ ID NO: 1947760
acuauuggucauagcaggu

SEQ ID NO: 1947762 - RNA, 19 nt, Artificial Sequence
  Description of Artificial Sequence: Synthetic oligonucleotide
  Sense strand starting at position 1553 of SEQ ID NO: 1880175
gcaacacagugaucagaca

SEQ ID NO: 1947763 - RNA, 19 nt, Artificial Sequence
  Description of Artificial Sequence: Synthetic oligonucleotide
  Antisense strand to SEQ ID NO: 1947762
ugucugaucacuguguugc

SEQ ID NO: 1947764 - RNA, 19 nt, Artificial Sequence
  Description of Artificial Sequence: Synthetic oligonucleotide
  Sense strand starting at position 1603 of SEQ ID NO: 1880175
uagcuauucgcaggagcuu

SEQ ID NO: 1947765 - RNA, 19 nt, Artificial Sequence
  Description of Artificial Sequence: Synthetic oligonucleotide
  Antisense strand to SEQ ID NO: 1947764
aagcuccugcgaauagcua

SEQ ID NO: 1947766 - RNA, 19 nt, Artificial Sequence
  Description of Artificial Sequence: Synthetic oligonucleotide
  Sense strand starting at position 1731 of SEQ ID NO: 1880175
uacgguuuccacuguuaag

SEQ ID NO: 1947767 - RNA, 19 nt, Artificial Sequence
  Description of Artificial Sequence: Synthetic oligonucleotide
  Antisense strand to SEQ ID NO: 1947766
cuuaacaguggaaaccgua

SEQ ID NO: 1947768 - RNA, 19 nt, Artificial Sequence
  Description of Artificial Sequence: Synthetic oligonucleotide
  Sense strand starting at position 2512 of SEQ ID NO: 1880175
gggaaauacuucuaaaucc

SEQ ID NO: 1947769 - RNA, 19 nt, Artificial Sequence
  Description of Artificial Sequence: Synthetic oligonucleotide
  Antisense strand to SEQ ID NO: 1947768
ggauuuagaaguauuuccc

SEQ ID NO: 1947770 - RNA, 19 nt, Artificial Sequence
  Description of Artificial Sequence: Synthetic oligonucleotide
  Sense strand starting at position 2532 of SEQ ID NO: 1880175
gaaauucuaucuugugggu

SEQ ID NO: 1947771 - RNA, 19 nt, Artificial Sequence
  Description of Artificial Sequence: Synthetic oligonucleotide
  Antisense strand to SEQ ID NO: 1947770
acccacaagauagaauuuc

SEQ ID NO: 1947772 - RNA, 19 nt, Artificial Sequence
  Description of Artificial Sequence: Synthetic oligonucleotide
  Sense strand starting at position 2796 of SEQ ID NO: 1880175
gagacagccuggcguuaaa

SEQ ID NO: 1947773 - RNA, 19 nt, Artificial Sequence
  Description of Artificial Sequence: Synthetic oligonucleotide
  Antisense strand to SEQ ID NO: 1947772
uuuaacgccaggcugucuc

SEQ ID NO: 1947774 - RNA, 19 nt, Artificial Sequence
  Description of Artificial Sequence: Synthetic oligonucleotide
  Sense strand starting at position 2952 of SEQ ID NO: 1880175
uuuggaaacuucuaguugu

SEQ ID NO: 1947775 - RNA, 19 nt, Artificial Sequence
  Description of Artificial Sequence: Synthetic oligonucleotide
  Antisense strand to SEQ ID NO: 1947774
acaacuagaaguuuccaaa

SEQ ID NO: 1947776 - RNA, 19 nt, Artificial Sequence
  Description of Artificial Sequence: Synthetic oligonucleotide
  Sense strand starting at position 2955 of SEQ ID NO: 1880175
ggaaacuucuaguuguuac

SEQ ID NO: 1947777 - RNA, 19 nt, Artificial Sequence
  Description of Artificial Sequence: Synthetic oligonucleotide
  Antisense strand to SEQ ID NO: 1947776
guaacaacuagaaguuucc

SEQ ID NO: 1947778 - RNA, 19 nt, Artificial Sequence
  Description of Artificial Sequence: Synthetic oligonucleotide
  Sense strand starting at position 3284 of SEQ ID NO: 1880175
cuggaaguguucugaaacc

SEQ ID NO: 1947779 - RNA, 19 nt, Artificial Sequence
  Description of Artificial Sequence: Synthetic oligonucleotide
  Antisense strand to SEQ ID NO: 1947778
gguuucagaacacuuccag

SEQ ID NO: 1947780 - RNA, 19 nt, Artificial Sequence
  Description of Artificial Sequence: Synthetic oligonucleotide
  Sense strand starting at position 3483 of SEQ ID NO: 1880175
gguucuaacuucucuguga

SEQ ID NO: 1947781 - RNA, 19 nt, Artificial Sequence
  Description of Artificial Sequence: Synthetic oligonucleotide
  Antisense strand to SEQ ID NO: 1947780
ucacagagaaguuagaacc

SEQ ID NO: 1947782 - RNA, 19 nt, Artificial Sequence
  Description of Artificial Sequence: Synthetic oligonucleotide
  Sense strand starting at position 3484 of SEQ ID NO: 1880175
guucuaacuucucugugaa

SEQ ID NO: 1947783 - RNA, 19 nt, Artificial Sequence
  Description of Artificial Sequence: Synthetic oligonucleotide
  Antisense strand to SEQ ID NO: 1947782
uucacagagaaguuagaac

SEQ ID NO: 1947784 - RNA, 19 nt, Artificial Sequence
  Description of Artificial Sequence: Synthetic oligonucleotide
  Sense strand starting at position 3485 of SEQ ID NO: 1880175
uucuaacuucucugugaag

SEQ ID NO: 1947785 - RNA, 19 nt, Artificial Sequence
  Description of Artificial Sequence: Synthetic oligonucleotide
  Antisense strand to SEQ ID NO: 1947784
cuucacagagaaguuagaa

SEQ ID NO: 1947786 - RNA, 19 nt, Artificial Sequence
  Description of Artificial Sequence: Synthetic oligonucleotide
  Sense strand starting at position 3487 of SEQ ID NO: 1880175
cuaacuucucugugaagca

SEQ ID NO: 1947787 - RNA, 19 nt, Artificial Sequence
  Description of Artificial Sequence: Synthetic oligonucleotide
  Antisense strand to SEQ ID NO: 1947786
ugcuucacagagaaguuag

SEQ ID NO: 1947788 - RNA, 19 nt, Artificial Sequence
  Description of Artificial Sequence: Synthetic oligonucleotide
  Sense strand starting at position 3591 of SEQ ID NO: 1880175
uuccacauguccuggauaa

SEQ ID NO: 1947789 - RNA, 19 nt, Artificial Sequence
  Description of Artificial Sequence: Synthetic oligonucleotide
  Antisense strand to SEQ ID NO: 1947788
uuauccaggacauguggaa

SEQ ID NO: 1947790 - RNA, 19 nt, Artificial Sequence
  Description of Artificial Sequence: Synthetic oligonucleotide
  Sense strand starting at position 3592 of SEQ ID NO: 1880175
uccacauguccuggauaag

SEQ ID NO: 1947791 - RNA, 19 nt, Artificial Sequence
  Description of Artificial Sequence: Synthetic oligonucleotide
  Antisense strand to SEQ ID NO: 1947790
cuuauccaggacaugugga

SEQ ID NO: 1947792 - RNA, 19 nt, Artificial Sequence
  Description of Artificial Sequence: Synthetic oligonucleotide
  Sense strand starting at position 3593 of SEQ ID NO: 1880175
ccacauguccuggauaagu

SEQ ID NO: 1947793 - RNA, 19 nt, Artificial Sequence
  Description of Artificial Sequence: Synthetic oligonucleotide
  Antisense strand to SEQ ID NO: 1947792
acuuauccaggacaugugg

SEQ ID NO: 1947794 - RNA, 19 nt, Artificial Sequence
  Description of Artificial Sequence: Synthetic oligonucleotide
  Sense strand starting at position 3595 of SEQ ID NO: 1880175
acauguccuggauaagucu

SEQ ID NO: 1947795 - RNA, 19 nt, Artificial Sequence
  Description of Artificial Sequence: Synthetic oligonucleotide
  Antisense strand to SEQ ID NO: 1947794
agacuuauccaggacaugu

SEQ ID NO: 1947796 - RNA, 19 nt, Artificial Sequence
  Description of Artificial Sequence: Synthetic oligonucleotide
  Sense strand starting at position 3602 of SEQ ID NO: 1880175
cuggauaagucucuuugcu

SEQ ID NO: 1947797 - RNA, 19 nt, Artificial Sequence
  Description of Artificial Sequence: Synthetic oligonucleotide
  Antisense strand to SEQ ID NO: 1947796
agcaaagagacuuauccag

SEQ ID NO: 1947798 - RNA, 19 nt, Artificial Sequence
  Description of Artificial Sequence: Synthetic oligonucleotide
  Sense strand starting at position 3604 of SEQ ID NO: 1880175
ggauaagucucuuugcuga

SEQ ID NO: 1947799 - RNA, 19 nt, Artificial Sequence
  Description of Artificial Sequence: Synthetic oligonucleotide
  Antisense strand to SEQ ID NO: 1947798
ucagcaaagagacuuaucc

SEQ ID NO: 1947800 - RNA, 19 nt, Artificial Sequence
  Description of Artificial Sequence: Synthetic oligonucleotide
  Sense strand starting at position 3716 of SEQ ID NO: 1880175
aagugacugccuuguucca

SEQ ID NO: 1947801 - RNA, 19 nt, Artificial Sequence
  Description of Artificial Sequence: Synthetic oligonucleotide
  Antisense strand to SEQ ID NO: 1947800
uggaacaaggcagucacuu

SEQ ID NO: 1947802 - RNA, 19 nt, Artificial Sequence
  Description of Artificial Sequence: Synthetic oligonucleotide
  Sense strand starting at position 3786 of SEQ ID NO: 1880175
uauucuaacugguuggcaa

SEQ ID NO: 1947803 - RNA, 19 nt, Artificial Sequence
  Description of Artificial Sequence: Synthetic oligonucleotide
  Antisense strand to SEQ ID NO: 1947802
uugccaaccaguuagaaua

SEQ ID NO: 1947804 - RNA, 19 nt, Artificial Sequence
  Description of Artificial Sequence: Synthetic oligonucleotide
  Sense strand starting at position 3787 of SEQ ID NO: 1880175
auucuaacugguuggcaau

SEQ ID NO: 1947805 - RNA, 19 nt, Artificial Sequence
  Description of Artificial Sequence: Synthetic oligonucleotide
  Antisense strand to SEQ ID NO: 1947804
auugccaaccaguuagaau

SEQ ID NO: 1947806 - RNA, 19 nt, Artificial Sequence
  Description of Artificial Sequence: Synthetic oligonucleotide
  Sense strand starting at position 3820 of SEQ ID NO: 1880175
cuuguaaagucucaaugcu

SEQ ID NO: 1947807 - RNA, 19 nt, Artificial Sequence
  Description of Artificial Sequence: Synthetic oligonucleotide
  Antisense strand to SEQ ID NO: 1947806
agcauugagacuuuacaag

SEQ ID NO: 1947808 - RNA, 19 nt, Artificial Sequence
  Description of Artificial Sequence: Synthetic oligonucleotide
  Sense strand starting at position 3827 of SEQ ID NO: 1880175
agucucaaugcugaaauua

SEQ ID NO: 1947809 - RNA, 19 nt, Artificial Sequence
  Description of Artificial Sequence: Synthetic oligonucleotide
  Antisense strand to SEQ ID NO: 1947808
uaauuucagcauugagacu

SEQ ID NO: 1947810 - RNA, 19 nt, Artificial Sequence
  Description of Artificial Sequence: Synthetic oligonucleotide
  Sense strand starting at position 3892 of SEQ ID NO: 1880175
cucacaucuugcgcucuaa

SEQ ID NO: 1947811 - RNA, 19 nt, Artificial Sequence
  Description of Artificial Sequence: Synthetic oligonucleotide
  Antisense strand to SEQ ID NO: 1947810
uuagagcgcaagaugugag

SEQ ID NO: 1947812 - RNA, 19 nt, Artificial Sequence
  Description of Artificial Sequence: Synthetic oligonucleotide
  Sense strand starting at position 454 of SEQ ID NO: 1880176
augggauguacacgucaaa

SEQ ID NO: 1947813 - RNA, 19 nt, Artificial Sequence
  Description of Artificial Sequence: Synthetic oligonucleotide
  Antisense strand to SEQ ID NO: 1947812
uuugacguguacaucccau

SEQ ID NO: 1947814 - RNA, 19 nt, Artificial Sequence
  Description of Artificial Sequence: Synthetic oligonucleotide
  Sense strand starting at position 904 of SEQ ID NO: 1880176
cugaucugcagagguaaga

SEQ ID NO: 1947815 - RNA, 19 nt, Artificial Sequence
  Description of Artificial Sequence: Synthetic oligonucleotide
  Antisense strand to SEQ ID NO: 1947814
ucuuaccucugcagaucag

SEQ ID NO: 1947816 - RNA, 19 nt, Artificial Sequence
  Description of Artificial Sequence: Synthetic oligonucleotide
  Sense strand starting at position 946 of SEQ ID NO: 1880176
acaucuaaggucuggugau

SEQ ID NO: 1947817 - RNA, 19 nt, Artificial Sequence
  Description of Artificial Sequence: Synthetic oligonucleotide
  Antisense strand to SEQ ID NO: 1947816
aucaccagaccuuagaugu

SEQ ID NO: 1947818 - RNA, 19 nt, Artificial Sequence
  Description of Artificial Sequence: Synthetic oligonucleotide
  Sense strand starting at position 947 of SEQ ID NO: 1880176
caucuaaggucuggugaug

SEQ ID NO: 1947819 - RNA, 19 nt, Artificial Sequence
  Description of Artificial Sequence: Synthetic oligonucleotide
  Antisense strand to SEQ ID NO: 1947818
caucaccagaccuuagaug

SEQ ID NO: 1947820 - RNA, 19 nt, Artificial Sequence
  Description of Artificial Sequence: Synthetic oligonucleotide
  Sense strand starting at position 956 of SEQ ID NO: 1880176
ucuggugauggcugaugaa

SEQ ID NO: 1947821 - RNA, 19 nt, Artificial Sequence
  Description of Artificial Sequence: Synthetic oligonucleotide
  Antisense strand to SEQ ID NO: 1947820
uucaucagccaucaccaga

SEQ ID NO: 1947822 - RNA, 19 nt, Artificial Sequence
  Description of Artificial Sequence: Synthetic oligonucleotide
  Sense strand starting at position 959 of SEQ ID NO: 1880176
ggugauggcugaugaagga

SEQ ID NO: 1947823 - RNA, 19 nt, Artificial Sequence
  Description of Artificial Sequence: Synthetic oligonucleotide
  Antisense strand to SEQ ID NO: 1947822
uccuucaucagccaucacc

SEQ ID NO: 1947824 - RNA, 19 nt, Artificial Sequence
  Description of Artificial Sequence: Synthetic oligonucleotide
  Sense strand starting at position 1002 of SEQ ID NO: 1880176
cuaggucuuucuuaccaca

SEQ ID NO: 1947825 - RNA, 19 nt, Artificial Sequence
  Description of Artificial Sequence: Synthetic oligonucleotide
  Antisense strand to SEQ ID NO: 1947824
ugugguaagaaagaccuag

SEQ ID NO: 1947826 - RNA, 19 nt, Artificial Sequence
  Description of Artificial Sequence: Synthetic oligonucleotide
  Sense strand starting at position 1030 of SEQ ID NO: 1880176
cugcccaccugcuuugaaa

SEQ ID NO: 1947827 - RNA, 19 nt, Artificial Sequence
  Description of Artificial Sequence: Synthetic oligonucleotide
  Antisense strand to SEQ ID NO: 1947826
uuucaaagcaggugggcag

SEQ ID NO: 1947828 - RNA, 19 nt, Artificial Sequence
  Description of Artificial Sequence: Synthetic oligonucleotide
  Sense strand starting at position 1262 of SEQ ID NO: 1880176
ggcgcuauuuccgauccau

SEQ ID NO: 1947829 - RNA, 19 nt, Artificial Sequence
  Description of Artificial Sequence: Synthetic oligonucleotide
  Antisense strand to SEQ ID NO: 1947828
auggaucggaaauagcgcc

SEQ ID NO: 1947830 - RNA, 19 nt, Artificial Sequence
  Description of Artificial Sequence: Synthetic oligonucleotide
  Sense strand starting at position 1316 of SEQ ID NO: 1880176
uguaucauucuugaaugca

SEQ ID NO: 1947831 - RNA, 19 nt, Artificial Sequence
  Description of Artificial Sequence: Synthetic oligonucleotide
  Antisense strand to SEQ ID NO: 1947830
ugcauucaagaaugauaca

SEQ ID NO: 1947832 - RNA, 19 nt, Artificial Sequence
  Description of Artificial Sequence: Synthetic oligonucleotide
  Sense strand starting at position 1346 of SEQ ID NO: 1880176
ccggguaugccgggugaga

SEQ ID NO: 1947833 - RNA, 19 nt, Artificial Sequence
  Description of Artificial Sequence: Synthetic oligonucleotide
  Antisense strand to SEQ ID NO: 1947832
ucucacccggcauacccgg

SEQ ID NO: 1947834 - RNA, 19 nt, Artificial Sequence
  Description of Artificial Sequence: Synthetic oligonucleotide
  Sense strand starting at position 1348 of SEQ ID NO: 1880176
ggguaugccgggugagaau

SEQ ID NO: 1947835 - RNA, 19 nt, Artificial Sequence
  Description of Artificial Sequence: Synthetic oligonucleotide
  Antisense strand to SEQ ID NO: 1947834
auucucacccggcauaccc

SEQ ID NO: 1947836 - RNA, 19 nt, Artificial Sequence
  Description of Artificial Sequence: Synthetic oligonucleotide
  Sense strand starting at position 1498 of SEQ ID NO: 1880176
cuguguagccuugaaugaa

SEQ ID NO: 1947837 - RNA, 19 nt, Artificial Sequence
  Description of Artificial Sequence: Synthetic oligonucleotide
  Antisense strand to SEQ ID NO: 1947836
uucauucaaggcuacacag

SEQ ID NO: 1947838 - RNA, 19 nt, Artificial Sequence
  Description of Artificial Sequence: Synthetic oligonucleotide
  Sense strand starting at position 1501 of SEQ ID NO: 1880176
uguagccuugaaugaauca

SEQ ID NO: 1947839 - RNA, 19 nt, Artificial Sequence
  Description of Artificial Sequence: Synthetic oligonucleotide
  Antisense strand to SEQ ID NO: 1947838
ugauucauucaaggcuaca

SEQ ID NO: 1947840 - RNA, 19 nt, Artificial Sequence
  Description of Artificial Sequence: Synthetic oligonucleotide
  Sense strand starting at position 1519 of SEQ ID NO: 1880176
accugcuaugaccaauagu

SEQ ID NO: 1947841 - RNA, 19 nt, Artificial Sequence
  Description of Artificial Sequence: Synthetic oligonucleotide
  Antisense strand to SEQ ID NO: 1947840
acuauuggucauagcaggu

SEQ ID NO: 1947842 - RNA, 19 nt, Artificial Sequence
  Description of Artificial Sequence: Synthetic oligonucleotide
  Sense strand starting at position 1553 of SEQ ID NO: 1880176
gcaacacagugaucagaca

SEQ ID NO: 1947843 - RNA, 19 nt, Artificial Sequence
  Description of Artificial Sequence: Synthetic oligonucleotide
  Antisense strand to SEQ ID NO: 1947842
ugucugaucacuguguugc

SEQ ID NO: 1947844 - RNA, 19 nt, Artificial Sequence
  Description of Artificial Sequence: Synthetic oligonucleotide
  Sense strand starting at position 1603 of SEQ ID NO: 1880176
uagcuauucgcaggagcuu

SEQ ID NO: 1947845 - RNA, 19 nt, Artificial Sequence
  Description of Artificial Sequence: Synthetic oligonucleotide
  Antisense strand to SEQ ID NO: 1947844
aagcuccugcgaauagcua

SEQ ID NO: 1947846 - RNA, 19 nt, Artificial Sequence
  Description of Artificial Sequence: Synthetic oligonucleotide
  Sense strand starting at position 1731 of SEQ ID NO: 1880176
uacgguuuccacuguuaag

SEQ ID NO: 1947847 - RNA, 19 nt, Artificial Sequence
  Description of Artificial Sequence: Synthetic oligonucleotide
  Antisense strand to SEQ ID NO: 1947846
cuuaacaguggaaaccgua

SEQ ID NO: 1947848 - RNA, 19 nt, Artificial Sequence
  Description of Artificial Sequence: Synthetic oligonucleotide
  Sense strand starting at position 2512 of SEQ ID NO: 1880176
gggaaauacuucuaaaucc

SEQ ID NO: 1947849 - RNA, 19 nt, Artificial Sequence
  Description of Artificial Sequence: Synthetic oligonucleotide
  Antisense strand to SEQ ID NO: 1947848
ggauuuagaaguauuuccc

SEQ ID NO: 1947850 - RNA, 19 nt, Artificial Sequence
  Description of Artificial Sequence: Synthetic oligonucleotide
  Sense strand starting at position 2532 of SEQ ID NO: 1880176
gaaauucuaucuugugggu

SEQ ID NO: 1947851 - RNA, 19 nt, Artificial Sequence
  Description of Artificial Sequence: Synthetic oligonucleotide
  Antisense strand to SEQ ID NO: 1947850
acccacaagauagaauuuc

SEQ ID NO: 1947852 - RNA, 19 nt, Artificial Sequence
  Description of Artificial Sequence: Synthetic oligonucleotide
  Sense strand starting at position 2796 of SEQ ID NO: 1880176
gagacagccuggcguuaaa

SEQ ID NO: 1947853 - RNA, 19 nt, Artificial Sequence
  Description of Artificial Sequence: Synthetic oligonucleotide
  Antisense strand to SEQ ID NO: 1947852
uuuaacgccaggcugucuc

SEQ ID NO: 1947854 - RNA, 19 nt, Artificial Sequence
  Description of Artificial Sequence: Synthetic oligonucleotide
  Sense strand starting at position 2952 of SEQ ID NO: 1880176
uuuggaaacuucuaguugu

SEQ ID NO: 1947855 - RNA, 19 nt, Artificial Sequence
  Description of Artificial Sequence: Synthetic oligonucleotide
  Antisense strand to SEQ ID NO: 1947854
acaacuagaaguuuccaaa

SEQ ID NO: 1947856 - RNA, 19 nt, Artificial Sequence
  Description of Artificial Sequence: Synthetic oligonucleotide
  Sense strand starting at position 2955 of SEQ ID NO: 1880176
ggaaacuucuaguuguuac

SEQ ID NO: 1947857 - RNA, 19 nt, Artificial Sequence
  Description of Artificial Sequence: Synthetic oligonucleotide
  Antisense strand to SEQ ID NO: 1947856
guaacaacuagaaguuucc

SEQ ID NO: 1947858 - RNA, 19 nt, Artificial Sequence
  Description of Artificial Sequence: Synthetic oligonucleotide
  Sense strand starting at position 3284 of SEQ ID NO: 1880176
cuggaaguguucugaaacc

SEQ ID NO: 1947859 - RNA, 19 nt, Artificial Sequence
  Description of Artificial Sequence: Synthetic oligonucleotide
  Antisense strand to SEQ ID NO: 1947858
gguuucagaacacuuccag

SEQ ID NO: 1947860 - RNA, 19 nt, Artificial Sequence
  Description of Artificial Sequence: Synthetic oligonucleotide
  Sense strand starting at position 3483 of SEQ ID NO: 1880176
gguucuaacuucucuguga

SEQ ID NO: 1947861 - RNA, 19 nt, Artificial Sequence
  Description of Artificial Sequence: Synthetic oligonucleotide
  Antisense strand to SEQ ID NO: 1947860
ucacagagaaguuagaacc

SEQ ID NO: 1947862 - RNA, 19 nt, Artificial Sequence
  Description of Artificial Sequence: Synthetic oligonucleotide
  Sense strand starting at position 3484 of SEQ ID NO: 1880176
guucuaacuucucugugaa

SEQ ID NO: 1947863 - RNA, 19 nt, Artificial Sequence
  Description of Artificial Sequence: Synthetic oligonucleotide
  Antisense strand to SEQ ID NO: 1947862
uucacagagaaguuagaac

SEQ ID NO: 1947864 - RNA, 19 nt, Artificial Sequence
  Description of Artificial Sequence: Synthetic oligonucleotide
  Sense strand starting at position 3485 of SEQ ID NO: 1880176
uucuaacuucucugugaag

SEQ ID NO: 1947865 - RNA, 19 nt, Artificial Sequence
  Description of Artificial Sequence: Synthetic oligonucleotide
  Antisense strand to SEQ ID NO: 1947864
cuucacagagaaguuagaa

SEQ ID NO: 1947866 - RNA, 19 nt, Artificial Sequence
  Description of Artificial Sequence: Synthetic oligonucleotide
  Sense strand starting at position 3487 of SEQ ID NO: 1880176
cuaacuucucugugaagca

SEQ ID NO: 1947867 - RNA, 19 nt, Artificial Sequence
  Description of Artificial Sequence: Synthetic oligonucleotide
  Antisense strand to SEQ ID NO: 1947866
ugcuucacagagaaguuag

SEQ ID NO: 1947868 - RNA, 19 nt, Artificial Sequence
  Description of Artificial Sequence: Synthetic oligonucleotide
  Sense strand starting at position 3591 of SEQ ID NO: 1880176
uuccacauguccuggauaa

SEQ ID NO: 1947869 - RNA, 19 nt, Artificial Sequence
  Description of Artificial Sequence: Synthetic oligonucleotide
  Antisense strand to SEQ ID NO: 1947868
uuauccaggacauguggaa

SEQ ID NO: 1947870 - RNA, 19 nt, Artificial Sequence
  Description of Artificial Sequence: Synthetic oligonucleotide
  Sense strand starting at position 3592 of SEQ ID NO: 1880176
uccacauguccuggauaag

SEQ ID NO: 1947871 - RNA, 19 nt, Artificial Sequence
  Description of Artificial Sequence: Synthetic oligonucleotide
  Antisense strand to SEQ ID NO: 1947870
cuuauccaggacaugugga

SEQ ID NO: 1947872 - RNA, 19 nt, Artificial Sequence
  Description of Artificial Sequence: Synthetic oligonucleotide
  Sense strand starting at position 3593 of SEQ ID NO: 1880176
ccacauguccuggauaagu

SEQ ID NO: 1947873 - RNA, 19 nt, Artificial Sequence
  Description of Artificial Sequence: Synthetic oligonucleotide
  Antisense strand to SEQ ID NO: 1947872
acuuauccaggacaugugg

SEQ ID NO: 1947874 - RNA, 19 nt, Artificial Sequence
  Description of Artificial Sequence: Synthetic oligonucleotide
  Sense strand starting at position 3595 of SEQ ID NO: 1880176
acauguccuggauaagucu

SEQ ID NO: 1947875 - RNA, 19 nt, Artificial Sequence
  Description of Artificial Sequence: Synthetic oligonucleotide
  Antisense strand to SEQ ID NO: 1947874
agacuuauccaggacaugu

SEQ ID NO: 1947876 - RNA, 19 nt, Artificial Sequence
  Description of Artificial Sequence: Synthetic oligonucleotide
  Sense strand starting at position 3602 of SEQ ID NO: 1880176
cuggauaagucucuuugcu

SEQ ID NO: 1947877 - RNA, 19 nt, Artificial Sequence
  Description of Artificial Sequence: Synthetic oligonucleotide
  Antisense strand to SEQ ID NO: 1947876
agcaaagagacuuauccag

SEQ ID NO: 1947878 - RNA, 19 nt, Artificial Sequence
  Description of Artificial Sequence: Synthetic oligonucleotide
  Sense strand starting at position 3604 of SEQ ID NO: 1880176
ggauaagucucuuugcuga

SEQ ID NO: 1947879 - RNA, 19 nt, Artificial Sequence
  Description of Artificial Sequence: Synthetic oligonucleotide
  Antisense strand to SEQ ID NO: 1947878
ucagcaaagagacuuaucc

SEQ ID NO: 1947880 - RNA, 19 nt, Artificial Sequence
  Description of Artificial Sequence: Synthetic oligonucleotide
  Sense strand starting at position 3716 of SEQ ID NO: 1880176
aagugacugccuuguucca

SEQ ID NO: 1947881 - RNA, 19 nt, Artificial Sequence
  Description of Artificial Sequence: Synthetic oligonucleotide
  Antisense strand to SEQ ID NO: 1947880
uggaacaaggcagucacuu

SEQ ID NO: 1947882 - RNA, 19 nt, Artificial Sequence
  Description of Artificial Sequence: Synthetic oligonucleotide
  Sense strand starting at position 3786 of SEQ ID NO: 1880176
uauucuaacugguuggcaa

SEQ ID NO: 1947883 - RNA, 19 nt, Artificial Sequence
  Description of Artificial Sequence: Synthetic oligonucleotide
  Antisense strand to SEQ ID NO: 1947882
uugccaaccaguuagaaua

SEQ ID NO: 1947884 - RNA, 19 nt, Artificial Sequence
  Description of Artificial Sequence: Synthetic oligonucleotide
  Sense strand starting at position 3787 of SEQ ID NO: 1880176
auucuaacugguuggcaau

SEQ ID NO: 1947885 - RNA, 19 nt, Artificial Sequence
  Description of Artificial Sequence: Synthetic oligonucleotide
  Antisense strand to SEQ ID NO: 1947884
auugccaaccaguuagaau

SEQ ID NO: 1947886 - RNA, 19 nt, Artificial Sequence
  Description of Artificial Sequence: Synthetic oligonucleotide
  Sense strand starting at position 3820 of SEQ ID NO: 1880176
cuuguaaagucucaaugcu

SEQ ID NO: 1947887 - RNA, 19 nt, Artificial Sequence
  Description of Artificial Sequence: Synthetic oligonucleotide
  Antisense strand to SEQ ID NO: 1947886
agcauugagacuuuacaag

SEQ ID NO: 1947888 - RNA, 19 nt, Artificial Sequence
  Description of Artificial Sequence: Synthetic oligonucleotide
  Sense strand starting at position 3827 of SEQ ID NO: 1880176
agucucaaugcugaaauua

SEQ ID NO: 1947889 - RNA, 19 nt, Artificial Sequence
  Description of Artificial Sequence: Synthetic oligonucleotide
  Antisense strand to SEQ ID NO: 1947888
uaauuucagcauugagacu

SEQ ID NO: 1947890 - RNA, 19 nt, Artificial Sequence
  Description of Artificial Sequence: Synthetic oligonucleotide
  Sense strand starting at position 3892 of SEQ ID NO: 1880176
cucacaucuugcgcucuaa

SEQ ID NO: 1947891 - RNA, 19 nt, Artificial Sequence
  Description of Artificial Sequence: Synthetic oligonucleotide
  Antisense strand to SEQ ID NO: 1947890
uuagagcgcaagaugugag

SEQ ID NO: 1947892 - RNA, 19 nt, Artificial Sequence
  Description of Artificial Sequence: Synthetic oligonucleotide
  Sense strand starting at position 675 of SEQ ID NO: 1880177
auugaucaccucugaaguu

SEQ ID NO: 1947893 - RNA, 19 nt, Artificial Sequence
  Description of Artificial Sequence: Synthetic oligonucleotide
  Antisense strand to SEQ ID NO: 1947892
aacuucagaggugaucaau

SEQ ID NO: 1947894 - RNA, 19 nt, Artificial Sequence
  Description of Artificial Sequence: Synthetic oligonucleotide
  Sense strand starting at position 765 of SEQ ID NO: 1880177
uucugcuucccauagagau

SEQ ID NO: 1947895 - RNA, 19 nt, Artificial Sequence
  Description of Artificial Sequence: Synthetic oligonucleotide
  Antisense strand to SEQ ID NO: 1947894
aucucuaugggaagcagaa

SEQ ID NO: 1947896 - RNA, 19 nt, Artificial Sequence
  Description of Artificial Sequence: Synthetic oligonucleotide
  Sense strand starting at position 775 of SEQ ID NO: 1880177
cauagagauuguccugcaa

SEQ ID NO: 1947897 - RNA, 19 nt, Artificial Sequence
  Description of Artificial Sequence: Synthetic oligonucleotide
  Antisense strand to SEQ ID NO: 1947896
uugcaggacaaucucuaug

SEQ ID NO: 1947898 - RNA, 19 nt, Artificial Sequence
  Description of Artificial Sequence: Synthetic oligonucleotide
  Sense strand starting at position 867 of SEQ ID NO: 1880177
gucccauauccgcauuucu

SEQ ID NO: 1947899 - RNA, 19 nt, Artificial Sequence
  Description of Artificial Sequence: Synthetic oligonucleotide
  Antisense strand to SEQ ID NO: 1947898
agaaaugcggauaugggac

SEQ ID NO: 1947900 - RNA, 19 nt, Artificial Sequence
  Description of Artificial Sequence: Synthetic oligonucleotide
  Sense strand starting at position 941 of SEQ ID NO: 1880177
cagugugugcuacauggaa

SEQ ID NO: 1947901 - RNA, 19 nt, Artificial Sequence
  Description of Artificial Sequence: Synthetic oligonucleotide
  Antisense strand to SEQ ID NO: 1947900
uuccauguagcacacacug

SEQ ID NO: 1947902 - RNA, 19 nt, Artificial Sequence
  Description of Artificial Sequence: Synthetic oligonucleotide
  Sense strand starting at position 1113 of SEQ ID NO: 1880177
gguaaaucauguucuaacc

SEQ ID NO: 1947903 - RNA, 19 nt, Artificial Sequence
  Description of Artificial Sequence: Synthetic oligonucleotide
  Antisense strand to SEQ ID NO: 1947902
gguuagaacaugauuuacc

SEQ ID NO: 1947904 - RNA, 19 nt, Artificial Sequence
  Description of Artificial Sequence: Synthetic oligonucleotide
  Sense strand starting at position 1142 of SEQ ID NO: 1880177
ucugguaaugaauagcuaa

SEQ ID NO: 1947905 - RNA, 19 nt, Artificial Sequence
  Description of Artificial Sequence: Synthetic oligonucleotide
  Antisense strand to SEQ ID NO: 1947904
uuagcuauucauuaccaga

SEQ ID NO: 1947906 - RNA, 19 nt, Artificial Sequence
  Description of Artificial Sequence: Synthetic oligonucleotide
  Sense strand starting at position 1421 of SEQ ID NO: 1880177
ggaggcaauuagccaagau

SEQ ID NO: 1947907 - RNA, 19 nt, Artificial Sequence
  Description of Artificial Sequence: Synthetic oligonucleotide
  Antisense strand to SEQ ID NO: 1947906
aucuuggcuaauugccucc

SEQ ID NO: 1947908 - RNA, 19 nt, Artificial Sequence
  Description of Artificial Sequence: Synthetic oligonucleotide
  Sense strand starting at position 1527 of SEQ ID NO: 1880177
guaaccuuauaguucuauu

SEQ ID NO: 1947909 - RNA, 19 nt, Artificial Sequence
  Description of Artificial Sequence: Synthetic oligonucleotide
  Antisense strand to SEQ ID NO: 1947908
aauagaacuauaagguuac

SEQ ID NO: 1947910 - RNA, 19 nt, Artificial Sequence
  Description of Artificial Sequence: Synthetic oligonucleotide
  Sense strand starting at position 1538 of SEQ ID NO: 1880177
guucuauuagguugacuac

SEQ ID NO: 1947911 - RNA, 19 nt, Artificial Sequence
  Description of Artificial Sequence: Synthetic oligonucleotide
  Antisense strand to SEQ ID NO: 1947910
guagucaaccuaauagaac

SEQ ID NO: 1947912 - RNA, 19 nt, Artificial Sequence
  Description of Artificial Sequence: Synthetic oligonucleotide
  Sense strand starting at position 1541 of SEQ ID NO: 1880177
cuauuagguugacuacuua

SEQ ID NO: 1947913 - RNA, 19 nt, Artificial Sequence
  Description of Artificial Sequence: Synthetic oligonucleotide
  Antisense strand to SEQ ID NO: 1947912
uaaguagucaaccuaauag

SEQ ID NO: 1947914 - RNA, 19 nt, Artificial Sequence
  Description of Artificial Sequence: Synthetic oligonucleotide
  Sense strand starting at position 1616 of SEQ ID NO: 1880177
agcuuuggguagucacuaa

SEQ ID NO: 1947915 - RNA, 19 nt, Artificial Sequence
  Description of Artificial Sequence: Synthetic oligonucleotide
  Antisense strand to SEQ ID NO: 1947914
uuagugacuacccaaagcu

SEQ ID NO: 1947916 - RNA, 19 nt, Artificial Sequence
  Description of Artificial Sequence: Synthetic oligonucleotide
  Sense strand starting at position 1620 of SEQ ID NO: 1880177
uuggguagucacuaacuua

SEQ ID NO: 1947917 - RNA, 19 nt, Artificial Sequence
  Description of Artificial Sequence: Synthetic oligonucleotide
  Antisense strand to SEQ ID NO: 1947916
uaaguuagugacuacccaa

SEQ ID NO: 1947918 - RNA, 19 nt, Artificial Sequence
  Description of Artificial Sequence: Synthetic oligonucleotide
  Sense strand starting at position 1648 of SEQ ID NO: 1880177
auagguccauagucacaaa

SEQ ID NO: 1947919 - RNA, 19 nt, Artificial Sequence
  Description of Artificial Sequence: Synthetic oligonucleotide
  Antisense strand to SEQ ID NO: 1947918
uuugugacuauggaccuau

SEQ ID NO: 1947920 - RNA, 19 nt, Artificial Sequence
  Description of Artificial Sequence: Synthetic oligonucleotide
  Sense strand starting at position 1667 of SEQ ID NO: 1880177
ugaggacagcuuuacaugu

SEQ ID NO: 1947921 - RNA, 19 nt, Artificial Sequence
  Description of Artificial Sequence: Synthetic oligonucleotide
  Antisense strand to SEQ ID NO: 1947920
acauguaaagcuguccuca

SEQ ID NO: 1947922 - RNA, 19 nt, Artificial Sequence
  Description of Artificial Sequence: Synthetic oligonucleotide
  Sense strand starting at position 1759 of SEQ ID NO: 1880177
gcaguaauaggucagcuau

SEQ ID NO: 1947923 - RNA, 19 nt, Artificial Sequence
  Description of Artificial Sequence: Synthetic oligonucleotide
  Antisense strand to SEQ ID NO: 1947922
auagcugaccuauuacugc

SEQ ID NO: 1947924 - RNA, 19 nt, Artificial Sequence
  Description of Artificial Sequence: Synthetic oligonucleotide
  Sense strand starting at position 1761 of SEQ ID NO: 1880177
aguaauaggucagcuauua

SEQ ID NO: 1947925 - RNA, 19 nt, Artificial Sequence
  Description of Artificial Sequence: Synthetic oligonucleotide
  Antisense strand to SEQ ID NO: 1947924
uaauagcugaccuauuacu

SEQ ID NO: 1947926 - RNA, 19 nt, Artificial Sequence
  Description of Artificial Sequence: Synthetic oligonucleotide
  Sense strand starting at position 1865 of SEQ ID NO: 1880177
ucugaaaccugucugaaac

SEQ ID NO: 1947927 - RNA, 19 nt, Artificial Sequence
  Description of Artificial Sequence: Synthetic oligonucleotide
  Antisense strand to SEQ ID NO: 1947926
guuucagacagguuucaga

SEQ ID NO: 1947928 - RNA, 19 nt, Artificial Sequence
  Description of Artificial Sequence: Synthetic oligonucleotide
  Sense strand starting at position 1866 of SEQ ID NO: 1880177
cugaaaccugucugaaacu

SEQ ID NO: 1947929 - RNA, 19 nt, Artificial Sequence
  Description of Artificial Sequence: Synthetic oligonucleotide
  Antisense strand to SEQ ID NO: 1947928
aguuucagacagguuucag

SEQ ID NO: 1947930 - RNA, 19 nt, Artificial Sequence
  Description of Artificial Sequence: Synthetic oligonucleotide
  Sense strand starting at position 1997 of SEQ ID NO: 1880177
ggauuaagcugaucaacuu

SEQ ID NO: 1947931 - RNA, 19 nt, Artificial Sequence
  Description of Artificial Sequence: Synthetic oligonucleotide
  Antisense strand to SEQ ID NO: 1947930
aaguugaucagcuuaaucc

SEQ ID NO: 1947932 - RNA, 19 nt, Artificial Sequence
  Description of Artificial Sequence: Synthetic oligonucleotide
  Sense strand starting at position 2199 of SEQ ID NO: 1880177
ucagaaguucgagacccau

SEQ ID NO: 1947933 - RNA, 19 nt, Artificial Sequence
  Description of Artificial Sequence: Synthetic oligonucleotide
  Antisense strand to SEQ ID NO: 1947932
augggucucgaacuucuga

SEQ ID NO: 1947934 - RNA, 19 nt, Artificial Sequence
  Description of Artificial Sequence: Synthetic oligonucleotide
  Sense strand starting at position 2472 of SEQ ID NO: 1880177
agcccugguccugaaacau

SEQ ID NO: 1947935 - RNA, 19 nt, Artificial Sequence
  Description of Artificial Sequence: Synthetic oligonucleotide
  Antisense strand to SEQ ID NO: 1947934
auguuucaggaccagggcu

SEQ ID NO: 1947936 - RNA, 19 nt, Artificial Sequence
  Description of Artificial Sequence: Synthetic oligonucleotide
  Sense strand starting at position 2528 of SEQ ID NO: 1880177
ugaccugcgcugucaaagu

SEQ ID NO: 1947937 - RNA, 19 nt, Artificial Sequence
  Description of Artificial Sequence: Synthetic oligonucleotide
  Antisense strand to SEQ ID NO: 1947936
acuuugacagcgcagguca

SEQ ID NO: 1947938 - RNA, 19 nt, Artificial Sequence
  Description of Artificial Sequence: Synthetic oligonucleotide
  Sense strand starting at position 2704 of SEQ ID NO: 1880177
aguccucgaucaccagaaa

SEQ ID NO: 1947939 - RNA, 19 nt, Artificial Sequence
  Description of Artificial Sequence: Synthetic oligonucleotide
  Antisense strand to SEQ ID NO: 1947938
uuucuggugaucgaggacu

SEQ ID NO: 1947940 - RNA, 19 nt, Artificial Sequence
  Description of Artificial Sequence: Synthetic oligonucleotide
  Sense strand starting at position 2808 of SEQ ID NO: 1880177
ugguccucagaaugauaca

SEQ ID NO: 1947941 - RNA, 19 nt, Artificial Sequence
  Description of Artificial Sequence: Synthetic oligonucleotide
  Antisense strand to SEQ ID NO: 1947940
uguaucauucugaggacca

SEQ ID NO: 1947942 - RNA, 19 nt, Artificial Sequence
  Description of Artificial Sequence: Synthetic oligonucleotide
  Sense strand starting at position 2922 of SEQ ID NO: 1880177
ugguuaacuguacaugcaa

SEQ ID NO: 1947943 - RNA, 19 nt, Artificial Sequence
  Description of Artificial Sequence: Synthetic oligonucleotide
  Antisense strand to SEQ ID NO: 1947942
uugcauguacaguuaacca

SEQ ID NO: 1947944 - RNA, 19 nt, Artificial Sequence
  Description of Artificial Sequence: Synthetic oligonucleotide
  Sense strand starting at position 2955 of SEQ ID NO: 1880177
ugcuguucuguggaaacaa

SEQ ID NO: 1947945 - RNA, 19 nt, Artificial Sequence
  Description of Artificial Sequence: Synthetic oligonucleotide
  Antisense strand to SEQ ID NO: 1947944
uuguuuccacagaacagca

SEQ ID NO: 1947946 - RNA, 19 nt, Artificial Sequence
  Description of Artificial Sequence: Synthetic oligonucleotide
  Sense strand starting at position 2982 of SEQ ID NO: 1880177
ugauaaaggucucuggcua

SEQ ID NO: 1947947 - RNA, 19 nt, Artificial Sequence
  Description of Artificial Sequence: Synthetic oligonucleotide
  Antisense strand to SEQ ID NO: 1947946
uagccagagaccuuuauca

SEQ ID NO: 1947948 - RNA, 19 nt, Artificial Sequence
  Description of Artificial Sequence: Synthetic oligonucleotide
  Sense strand starting at position 2983 of SEQ ID NO: 1880177
gauaaaggucucuggcuac

SEQ ID NO: 1947949 - RNA, 19 nt, Artificial Sequence
  Description of Artificial Sequence: Synthetic oligonucleotide
  Antisense strand to SEQ ID NO: 1947948
guagccagagaccuuuauc

SEQ ID NO: 1947950 - RNA, 19 nt, Artificial Sequence
  Description of Artificial Sequence: Synthetic oligonucleotide
  Sense strand starting at position 3045 of SEQ ID NO: 1880177
uguugcagaucaguuacaa

SEQ ID NO: 1947951 - RNA, 19 nt, Artificial Sequence
  Description of Artificial Sequence: Synthetic oligonucleotide
  Antisense strand to SEQ ID NO: 1947950
uuguaacugaucugcaaca

SEQ ID NO: 1947952 - RNA, 19 nt, Artificial Sequence
  Description of Artificial Sequence: Synthetic oligonucleotide
  Sense strand starting at position 3135 of SEQ ID NO: 1880177
gcagcugcagcuucgauaa

SEQ ID NO: 1947953 - RNA, 19 nt, Artificial Sequence
  Description of Artificial Sequence: Synthetic oligonucleotide
  Antisense strand to SEQ ID NO: 1947952
uuaucgaagcugcagcugc

SEQ ID NO: 1947954 - RNA, 19 nt, Artificial Sequence
  Description of Artificial Sequence: Synthetic oligonucleotide
  Sense strand starting at position 3194 of SEQ ID NO: 1880177
gccucaccuguccaucauu

SEQ ID NO: 1947955 - RNA, 19 nt, Artificial Sequence
  Description of Artificial Sequence: Synthetic oligonucleotide
  Antisense strand to SEQ ID NO: 1947954
aaugauggacaggugaggc

SEQ ID NO: 1947956 - RNA, 19 nt, Artificial Sequence
  Description of Artificial Sequence: Synthetic oligonucleotide
  Sense strand starting at position 3231 of SEQ ID NO: 1880177
ccgggaucucuguagacua

SEQ ID NO: 1947957 - RNA, 19 nt, Artificial Sequence
  Description of Artificial Sequence: Synthetic oligonucleotide
  Antisense strand to SEQ ID NO: 1947956
uagucuacagagaucccgg

SEQ ID NO: 1947958 - RNA, 19 nt, Artificial Sequence
  Description of Artificial Sequence: Synthetic oligonucleotide
  Sense strand starting at position 3241 of SEQ ID NO: 1880177
uguagacuaagucagucau

SEQ ID NO: 1947959 - RNA, 19 nt, Artificial Sequence
  Description of Artificial Sequence: Synthetic oligonucleotide
  Antisense strand to SEQ ID NO: 1947958
augacugacuuagucuaca

SEQ ID NO: 1947960 - RNA, 19 nt, Artificial Sequence
  Description of Artificial Sequence: Synthetic oligonucleotide
  Sense strand starting at position 3305 of SEQ ID NO: 1880177
uuucucagucuugauggga

SEQ ID NO: 1947961 - RNA, 19 nt, Artificial Sequence
  Description of Artificial Sequence: Synthetic oligonucleotide
  Antisense strand to SEQ ID NO: 1947960
ucccaucaagacugagaaa

SEQ ID NO: 1947962 - RNA, 19 nt, Artificial Sequence
  Description of Artificial Sequence: Synthetic oligonucleotide
  Sense strand starting at position 3333 of SEQ ID NO: 1880177
ccgccuauuacagguaaga

SEQ ID NO: 1947963 - RNA, 19 nt, Artificial Sequence
  Description of Artificial Sequence: Synthetic oligonucleotide
  Antisense strand to SEQ ID NO: 1947962
ucuuaccuguaauaggcgg

SEQ ID NO: 1947964 - RNA, 19 nt, Artificial Sequence
  Description of Artificial Sequence: Synthetic oligonucleotide
  Sense strand starting at position 3349 of SEQ ID NO: 1880177
agagguuuagaccgauuaa

SEQ ID NO: 1947965 - RNA, 19 nt, Artificial Sequence
  Description of Artificial Sequence: Synthetic oligonucleotide
  Antisense strand to SEQ ID NO: 1947964
uuaaucggucuaaaccucu

SEQ ID NO: 1947966 - RNA, 19 nt, Artificial Sequence
  Description of Artificial Sequence: Synthetic oligonucleotide
  Sense strand starting at position 3361 of SEQ ID NO: 1880177
cgauuaaguuacuuccuga

SEQ ID NO: 1947967 - RNA, 19 nt, Artificial Sequence
  Description of Artificial Sequence: Synthetic oligonucleotide
  Antisense strand to SEQ ID NO: 1947966
ucaggaaguaacuuaaucg

SEQ ID NO: 1947968 - RNA, 19 nt, Artificial Sequence
  Description of Artificial Sequence: Synthetic oligonucleotide
  Sense strand starting at position 3366 of SEQ ID NO: 1880177
aaguuacuuccugaagguc

SEQ ID NO: 1947969 - RNA, 19 nt, Artificial Sequence
  Description of Artificial Sequence: Synthetic oligonucleotide
  Antisense strand to SEQ ID NO: 1947968
gaccuucaggaaguaacuu

SEQ ID NO: 1947970 - RNA, 19 nt, Artificial Sequence
  Description of Artificial Sequence: Synthetic oligonucleotide
  Sense strand starting at position 3383 of SEQ ID NO: 1880177
ucgcuuagucacuuagcga

SEQ ID NO: 1947971 - RNA, 19 nt, Artificial Sequence
  Description of Artificial Sequence: Synthetic oligonucleotide
  Antisense strand to SEQ ID NO: 1947970
ucgcuaagugacuaagcga

SEQ ID NO: 1947972 - RNA, 19 nt, Artificial Sequence
  Description of Artificial Sequence: Synthetic oligonucleotide
  Sense strand starting at position 9 of SEQ ID NO: 1880178
cuuaguaucacgcagcuga

SEQ ID NO: 1947973 - RNA, 19 nt, Artificial Sequence
  Description of Artificial Sequence: Synthetic oligonucleotide
  Antisense strand to SEQ ID NO: 1947972
ucagcugcgugauacuaag

SEQ ID NO: 1947974 - RNA, 19 nt, Artificial Sequence
  Description of Artificial Sequence: Synthetic oligonucleotide
  Sense strand starting at position 105 of SEQ ID NO: 1880178
cuguaagugcaagacuaaa

SEQ ID NO: 1947975 - RNA, 19 nt, Artificial Sequence
  Description of Artificial Sequence: Synthetic oligonucleotide
  Antisense strand to SEQ ID NO: 1947974
uuuagucuugcacuuacag

SEQ ID NO: 1947976 - RNA, 19 nt, Artificial Sequence
  Description of Artificial Sequence: Synthetic oligonucleotide
  Sense strand starting at position 168 of SEQ ID NO: 1880178
caguauauccugugggcca

SEQ ID NO: 1947977 - RNA, 19 nt, Artificial Sequence
  Description of Artificial Sequence: Synthetic oligonucleotide
  Antisense strand to SEQ ID NO: 1947976
uggcccacaggauauacug

SEQ ID NO: 1947978 - RNA, 19 nt, Artificial Sequence
  Description of Artificial Sequence: Synthetic oligonucleotide
  Sense strand starting at position 170 of SEQ ID NO: 1880178
guauauccugugggccaaa

SEQ ID NO: 1947979 - RNA, 19 nt, Artificial Sequence
  Description of Artificial Sequence: Synthetic oligonucleotide
  Antisense strand to SEQ ID NO: 1947978
uuuggcccacaggauauac

SEQ ID NO: 1947980 - RNA, 19 nt, Artificial Sequence
  Description of Artificial Sequence: Synthetic oligonucleotide
  Sense strand starting at position 188 of SEQ ID NO: 1880178
agggcuauuucuuaaagag

SEQ ID NO: 1947981 - RNA, 19 nt, Artificial Sequence
  Description of Artificial Sequence: Synthetic oligonucleotide
  Antisense strand to SEQ ID NO: 1947980
cucuuuaagaaauagcccu

SEQ ID NO: 1947982 - RNA, 19 nt, Artificial Sequence
  Description of Artificial Sequence: Synthetic oligonucleotide
  Sense strand starting at position 198 of SEQ ID NO: 1880178
cuuaaagaggcauguaaau

SEQ ID NO: 1947983 - RNA, 19 nt, Artificial Sequence
  Description of Artificial Sequence: Synthetic oligonucleotide
  Antisense strand to SEQ ID NO: 1947982
auuuacaugccucuuuaag

SEQ ID NO: 1947984 - RNA, 19 nt, Artificial Sequence
  Description of Artificial Sequence: Synthetic oligonucleotide
  Sense strand starting at position 297 of SEQ ID NO: 1880178
ucacacguauacucagauu

SEQ ID NO: 1947985 - RNA, 19 nt, Artificial Sequence
  Description of Artificial Sequence: Synthetic oligonucleotide
  Antisense strand to SEQ ID NO: 1947984
aaucugaguauacguguga

SEQ ID NO: 1947986 - RNA, 19 nt, Artificial Sequence
  Description of Artificial Sequence: Synthetic oligonucleotide
  Sense strand starting at position 386 of SEQ ID NO: 1880178
aaagguuucgccuaccuaa

SEQ ID NO: 1947987 - RNA, 19 nt, Artificial Sequence
  Description of Artificial Sequence: Synthetic oligonucleotide
  Antisense strand to SEQ ID NO: 1947986
uuagguaggcgaaaccuuu

SEQ ID NO: 1947988 - RNA, 19 nt, Artificial Sequence
  Description of Artificial Sequence: Synthetic oligonucleotide
  Sense strand starting at position 439 of SEQ ID NO: 1880178
uggacagcuuucucucaaa

SEQ ID NO: 1947989 - RNA, 19 nt, Artificial Sequence
  Description of Artificial Sequence: Synthetic oligonucleotide
  Antisense strand to SEQ ID NO: 1947988
uuugagagaaagcugucca

SEQ ID NO: 1947990 - RNA, 19 nt, Artificial Sequence
  Description of Artificial Sequence: Synthetic oligonucleotide
  Sense strand starting at position 594 of SEQ ID NO: 1880178
gggagagcuguucaucaua

SEQ ID NO: 1947991 - RNA, 19 nt, Artificial Sequence
  Description of Artificial Sequence: Synthetic oligonucleotide
  Antisense strand to SEQ ID NO: 1947990
uaugaugaacagcucuccc

SEQ ID NO: 1947992 - RNA, 19 nt, Artificial Sequence
  Description of Artificial Sequence: Synthetic oligonucleotide
  Sense strand starting at position 748 of SEQ ID NO: 1880178
caggguauuuccuauaagg

SEQ ID NO: 1947993 - RNA, 19 nt, Artificial Sequence
  Description of Artificial Sequence: Synthetic oligonucleotide
  Antisense strand to SEQ ID NO: 1947992
ccuuauaggaaauacccug

SEQ ID NO: 1947994 - RNA, 19 nt, Artificial Sequence
  Description of Artificial Sequence: Synthetic oligonucleotide
  Sense strand starting at position 776 of SEQ ID NO: 1880178
auaagagcuuaacacagaa

SEQ ID NO: 1947995 - RNA, 19 nt, Artificial Sequence
  Description of Artificial Sequence: Synthetic oligonucleotide
  Antisense strand to SEQ ID NO: 1947994
uucuguguuaagcucuuau

SEQ ID NO: 1947996 - RNA, 19 nt, Artificial Sequence
  Description of Artificial Sequence: Synthetic oligonucleotide
  Sense strand starting at position 1061 of SEQ ID NO: 1880178
uugcaaucagaagguuaaa

SEQ ID NO: 1947997 - RNA, 19 nt, Artificial Sequence
  Description of Artificial Sequence: Synthetic oligonucleotide
  Antisense strand to SEQ ID NO: 1947996
uuuaaccuucugauugcaa

SEQ ID NO: 1947998 - RNA, 19 nt, Artificial Sequence
  Description of Artificial Sequence: Synthetic oligonucleotide
  Sense strand starting at position 1102 of SEQ ID NO: 1880178
acuuauguaugaucuuaag

SEQ ID NO: 1947999 - RNA, 19 nt, Artificial Sequence
  Description of Artificial Sequence: Synthetic oligonucleotide
  Antisense strand to SEQ ID NO: 1947998
cuuaagaucauacauaagu

SEQ ID NO: 1948000 - RNA, 19 nt, Artificial Sequence
  Description of Artificial Sequence: Synthetic oligonucleotide
  Sense strand starting at position 1108 of SEQ ID NO: 1880178
guaugaucuuaagcuaacu

SEQ ID NO: 1948001 - RNA, 19 nt, Artificial Sequence
  Description of Artificial Sequence: Synthetic oligonucleotide
  Antisense strand to SEQ ID NO: 1948000
aguuagcuuaagaucauac

SEQ ID NO: 1948002 - RNA, 19 nt, Artificial Sequence
  Description of Artificial Sequence: Synthetic oligonucleotide
  Sense strand starting at position 1233 of SEQ ID NO: 1880178
uugaaaucaguuuguccaa

SEQ ID NO: 1948003 - RNA, 19 nt, Artificial Sequence
  Description of Artificial Sequence: Synthetic oligonucleotide
  Antisense strand to SEQ ID NO: 1948002
uuggacaaacugauuucaa

SEQ ID NO: 1948004 - RNA, 19 nt, Artificial Sequence
  Description of Artificial Sequence: Synthetic oligonucleotide
  Sense strand starting at position 1235 of SEQ ID NO: 1880178
gaaaucaguuuguccaaga

SEQ ID NO: 1948005 - RNA, 19 nt, Artificial Sequence
  Description of Artificial Sequence: Synthetic oligonucleotide
  Antisense strand to SEQ ID NO: 1948004
ucuuggacaaacugauuuc

SEQ ID NO: 1948006 - RNA, 19 nt, Artificial Sequence
  Description of Artificial Sequence: Synthetic oligonucleotide
  Sense strand starting at position 1236 of SEQ ID NO: 1880178
aaaucaguuuguccaagag

SEQ ID NO: 1948007 - RNA, 19 nt, Artificial Sequence
  Description of Artificial Sequence: Synthetic oligonucleotide
  Antisense strand to SEQ ID NO: 1948006
cucuuggacaaacugauuu

SEQ ID NO: 1948008 - RNA, 19 nt, Artificial Sequence
  Description of Artificial Sequence: Synthetic oligonucleotide
  Sense strand starting at position 1240 of SEQ ID NO: 1880178
caguuuguccaagagagug

SEQ ID NO: 1948009 - RNA, 19 nt, Artificial Sequence
  Description of Artificial Sequence: Synthetic oligonucleotide
  Antisense strand to SEQ ID NO: 1948008
cacucucuuggacaaacug

SEQ ID NO: 1948010 - RNA, 19 nt, Artificial Sequence
  Description of Artificial Sequence: Synthetic oligonucleotide
  Sense strand starting at position 1401 of SEQ ID NO: 1880178
ggagaauauugugcucagu

SEQ ID NO: 1948011 - RNA, 19 nt, Artificial Sequence
  Description of Artificial Sequence: Synthetic oligonucleotide
  Antisense strand to SEQ ID NO: 1948010
acugagcacaauauucucc

SEQ ID NO: 1948012 - RNA, 19 nt, Artificial Sequence
  Description of Artificial Sequence: Synthetic oligonucleotide
  Sense strand starting at position 1403 of SEQ ID NO: 1880178
agaauauugugcucaguga

SEQ ID NO: 1948013 - RNA, 19 nt, Artificial Sequence
  Description of Artificial Sequence: Synthetic oligonucleotide
  Antisense strand to SEQ ID NO: 1948012
ucacugagcacaauauucu

SEQ ID NO: 1948014 - RNA, 19 nt, Artificial Sequence
  Description of Artificial Sequence: Synthetic oligonucleotide
  Sense strand starting at position 1404 of SEQ ID NO: 1880178
gaauauugugcucagugaa

SEQ ID NO: 1948015 - RNA, 19 nt, Artificial Sequence
  Description of Artificial Sequence: Synthetic oligonucleotide
  Antisense strand to SEQ ID NO: 1948014
uucacugagcacaauauuc

SEQ ID NO: 1948016 - RNA, 19 nt, Artificial Sequence
  Description of Artificial Sequence: Synthetic oligonucleotide
  Sense strand starting at position 1538 of SEQ ID NO: 1880178
ggcagaugauagucaagua

SEQ ID NO: 1948017 - RNA, 19 nt, Artificial Sequence
  Description of Artificial Sequence: Synthetic oligonucleotide
  Antisense strand to SEQ ID NO: 1948016
uacuugacuaucaucugcc

SEQ ID NO: 1948018 - RNA, 19 nt, Artificial Sequence
  Description of Artificial Sequence: Synthetic oligonucleotide
  Sense strand starting at position 1539 of SEQ ID NO: 1880178
gcagaugauagucaaguau

SEQ ID NO: 1948019 - RNA, 19 nt, Artificial Sequence
  Description of Artificial Sequence: Synthetic oligonucleotide
  Antisense strand to SEQ ID NO: 1948018
auacuugacuaucaucugc

SEQ ID NO: 1948020 - RNA, 19 nt, Artificial Sequence
  Description of Artificial Sequence: Synthetic oligonucleotide
  Sense strand starting at position 1688 of SEQ ID NO: 1880178
ugaggugaauauguuaaau

SEQ ID NO: 1948021 - RNA, 19 nt, Artificial Sequence
  Description of Artificial Sequence: Synthetic oligonucleotide
  Antisense strand to SEQ ID NO: 1948020
auuuaacauauucaccuca

SEQ ID NO: 1948022 - RNA, 19 nt, Artificial Sequence
  Description of Artificial Sequence: Synthetic oligonucleotide
  Sense strand starting at position 1729 of SEQ ID NO: 1880178
uuguauuugugggccauca

SEQ ID NO: 1948023 - RNA, 19 nt, Artificial Sequence
  Description of Artificial Sequence: Synthetic oligonucleotide
  Antisense strand to SEQ ID NO: 1948022
ugauggcccacaaauacaa

SEQ ID NO: 1948024 - RNA, 19 nt, Artificial Sequence
  Description of Artificial Sequence: Synthetic oligonucleotide
  Sense strand starting at position 1739 of SEQ ID NO: 1880178
gggccaucacaucacuuua

SEQ ID NO: 1948025 - RNA, 19 nt, Artificial Sequence
  Description of Artificial Sequence: Synthetic oligonucleotide
  Antisense strand to SEQ ID NO: 1948024
uaaagugaugugauggccc

SEQ ID NO: 1948026 - RNA, 19 nt, Artificial Sequence
  Description of Artificial Sequence: Synthetic oligonucleotide
  Sense strand starting at position 1750 of SEQ ID NO: 1880178
ucacuuuaugcuuacaugu

SEQ ID NO: 1948027 - RNA, 19 nt, Artificial Sequence
  Description of Artificial Sequence: Synthetic oligonucleotide
  Antisense strand to SEQ ID NO: 1948026
acauguaagcauaaaguga

SEQ ID NO: 1948028 - RNA, 19 nt, Artificial Sequence
  Description of Artificial Sequence: Synthetic oligonucleotide
  Sense strand starting at position 1826 of SEQ ID NO: 1880178
agcaacuugucagccaaua

SEQ ID NO: 1948029 - RNA, 19 nt, Artificial Sequence
  Description of Artificial Sequence: Synthetic oligonucleotide
  Antisense strand to SEQ ID NO: 1948028
uauuggcugacaaguugcu

SEQ ID NO: 1948030 - RNA, 19 nt, Artificial Sequence
  Description of Artificial Sequence: Synthetic oligonucleotide
  Sense strand starting at position 1985 of SEQ ID NO: 1880178
agugaucgaguuugcacaa

SEQ ID NO: 1948031 - RNA, 19 nt, Artificial Sequence
  Description of Artificial Sequence: Synthetic oligonucleotide
  Antisense strand to SEQ ID NO: 1948030
uugugcaaacucgaucacu

SEQ ID NO: 1948032 - RNA, 19 nt, Artificial Sequence
  Description of Artificial Sequence: Synthetic oligonucleotide
  Sense strand starting at position 2363 of SEQ ID NO: 1880178
ugugaauuaucacuacaga

SEQ ID NO: 1948033 - RNA, 19 nt, Artificial Sequence
  Description of Artificial Sequence: Synthetic oligonucleotide
  Antisense strand to SEQ ID NO: 1948032
ucuguagugauaauucaca

SEQ ID NO: 1948034 - RNA, 19 nt, Artificial Sequence
  Description of Artificial Sequence: Synthetic oligonucleotide
  Sense strand starting at position 2550 of SEQ ID NO: 1880178
gcaauuauuaaugguggca

SEQ ID NO: 1948035 - RNA, 19 nt, Artificial Sequence
  Description of Artificial Sequence: Synthetic oligonucleotide
  Antisense strand to SEQ ID NO: 1948034
ugccaccauuaauaauugc

SEQ ID NO: 1948036 - RNA, 19 nt, Artificial Sequence
  Description of Artificial Sequence: Synthetic oligonucleotide
  Sense strand starting at position 2992 of SEQ ID NO: 1880178
cugucugaccuagauucuu

SEQ ID NO: 1948037 - RNA, 19 nt, Artificial Sequence
  Description of Artificial Sequence: Synthetic oligonucleotide
  Antisense strand to SEQ ID NO: 1948036
aagaaucuaggucagacag

SEQ ID NO: 1948038 - RNA, 19 nt, Artificial Sequence
  Description of Artificial Sequence: Synthetic oligonucleotide
  Sense strand starting at position 3056 of SEQ ID NO: 1880178
aacguaugggaccaagagu

SEQ ID NO: 1948039 - RNA, 19 nt, Artificial Sequence
  Description of Artificial Sequence: Synthetic oligonucleotide
  Antisense strand to SEQ ID NO: 1948038
acucuuggucccauacguu

SEQ ID NO: 1948040 - RNA, 19 nt, Artificial Sequence
  Description of Artificial Sequence: Synthetic oligonucleotide
  Sense strand starting at position 3195 of SEQ ID NO: 1880178
aguaauucccagcauuaug

SEQ ID NO: 1948041 - RNA, 19 nt, Artificial Sequence
  Description of Artificial Sequence: Synthetic oligonucleotide
  Antisense strand to SEQ ID NO: 1948040
cauaaugcugggaauuacu

SEQ ID NO: 1948042 - RNA, 19 nt, Artificial Sequence
  Description of Artificial Sequence: Synthetic oligonucleotide
  Sense strand starting at position 3258 of SEQ ID NO: 1880178
cuaguaucuagugguaaua

SEQ ID NO: 1948043 - RNA, 19 nt, Artificial Sequence
  Description of Artificial Sequence: Synthetic oligonucleotide
  Antisense strand to SEQ ID NO: 1948042
uauuaccacuagauacuag

SEQ ID NO: 1948044 - RNA, 19 nt, Artificial Sequence
  Description of Artificial Sequence: Synthetic oligonucleotide
  Sense strand starting at position 3320 of SEQ ID NO: 1880178
gccaaccgaucagauauuu

SEQ ID NO: 1948045 - RNA, 19 nt, Artificial Sequence
  Description of Artificial Sequence: Synthetic oligonucleotide
  Antisense strand to SEQ ID NO: 1948044
aaauaucugaucgguuggc

SEQ ID NO: 1948046 - RNA, 19 nt, Artificial Sequence
  Description of Artificial Sequence: Synthetic oligonucleotide
  Sense strand starting at position 3688 of SEQ ID NO: 1880178
agcugcaacucucugaaua

SEQ ID NO: 1948047 - RNA, 19 nt, Artificial Sequence
  Description of Artificial Sequence: Synthetic oligonucleotide
  Antisense strand to SEQ ID NO: 1948046
uauucagagaguugcagcu

SEQ ID NO: 1948048 - RNA, 19 nt, Artificial Sequence
  Description of Artificial Sequence: Synthetic oligonucleotide
  Sense strand starting at position 3689 of SEQ ID NO: 1880178
gcugcaacucucugaauau

SEQ ID NO: 1948049 - RNA, 19 nt, Artificial Sequence
  Description of Artificial Sequence: Synthetic oligonucleotide
  Antisense strand to SEQ ID NO: 1948048
auauucagagaguugcagc

SEQ ID NO: 1948050 - RNA, 19 nt, Artificial Sequence
  Description of Artificial Sequence: Synthetic oligonucleotide
  Sense strand starting at position 3780 of SEQ ID NO: 1880178
augugauuacuacaugcau

SEQ ID NO: 1948051 - RNA, 19 nt, Artificial Sequence
  Description of Artificial Sequence: Synthetic oligonucleotide
  Antisense strand to SEQ ID NO: 1948050
augcauguaguaaucacau

SEQ ID NO: 1948052 - RNA, 19 nt, Artificial Sequence
  Description of Artificial Sequence: Synthetic oligonucleotide
  Sense strand starting at position 591 of SEQ ID NO: 1880179
ucuaguauacuagauaugu

SEQ ID NO: 1948053 - RNA, 19 nt, Artificial Sequence
  Description of Artificial Sequence: Synthetic oligonucleotide
  Antisense strand to SEQ ID NO: 1948052
acauaucuaguauacuaga

SEQ ID NO: 1948054 - RNA, 19 nt, Artificial Sequence
  Description of Artificial Sequence: Synthetic oligonucleotide
  Sense strand starting at position 601 of SEQ ID NO: 1880179
uagauauguuuccugcaug

SEQ ID NO: 1948055 - RNA, 19 nt, Artificial Sequence
  Description of Artificial Sequence: Synthetic oligonucleotide
  Antisense strand to SEQ ID NO: 1948054
caugcaggaaacauaucua

SEQ ID NO: 1948056 - RNA, 19 nt, Artificial Sequence
  Description of Artificial Sequence: Synthetic oligonucleotide
  Sense strand starting at position 793 of SEQ ID NO: 1880179
ggguauccacguuggaaug

SEQ ID NO: 1948057 - RNA, 19 nt, Artificial Sequence
  Description of Artificial Sequence: Synthetic oligonucleotide
  Antisense strand to SEQ ID NO: 1948056
cauuccaacguggauaccc

SEQ ID NO: 1948058 - RNA, 19 nt, Artificial Sequence
  Description of Artificial Sequence: Synthetic oligonucleotide
  Sense strand starting at position 804 of SEQ ID NO: 1880179
uuggaaugcucauuaguga

SEQ ID NO: 1948059 - RNA, 19 nt, Artificial Sequence
  Description of Artificial Sequence: Synthetic oligonucleotide
  Antisense strand to SEQ ID NO: 1948058
ucacuaaugagcauuccaa

SEQ ID NO: 1948060 - RNA, 19 nt, Artificial Sequence
  Description of Artificial Sequence: Synthetic oligonucleotide
  Sense strand starting at position 805 of SEQ ID NO: 1880179
uggaaugcucauuagugag

SEQ ID NO: 1948061 - RNA, 19 nt, Artificial Sequence
  Description of Artificial Sequence: Synthetic oligonucleotide
  Antisense strand to SEQ ID NO: 1948060
cucacuaaugagcauucca

SEQ ID NO: 1948062 - RNA, 19 nt, Artificial Sequence
  Description of Artificial Sequence: Synthetic oligonucleotide
  Sense strand starting at position 807 of SEQ ID NO: 1880179
gaaugcucauuagugagga

SEQ ID NO: 1948063 - RNA, 19 nt, Artificial Sequence
  Description of Artificial Sequence: Synthetic oligonucleotide
  Antisense strand to SEQ ID NO: 1948062
uccucacuaaugagcauuc

SEQ ID NO: 1948064 - RNA, 19 nt, Artificial Sequence
  Description of Artificial Sequence: Synthetic oligonucleotide
  Sense strand starting at position 809 of SEQ ID NO: 1880179
augcucauuagugaggaau

SEQ ID NO: 1948065 - RNA, 19 nt, Artificial Sequence
  Description of Artificial Sequence: Synthetic oligonucleotide
  Antisense strand to SEQ ID NO: 1948064
auuccucacuaaugagcau

SEQ ID NO: 1948066 - RNA, 19 nt, Artificial Sequence
  Description of Artificial Sequence: Synthetic oligonucleotide
  Sense strand starting at position 817 of SEQ ID NO: 1880179
uagugaggaauuggaguaa

SEQ ID NO: 1948067 - RNA, 19 nt, Artificial Sequence
  Description of Artificial Sequence: Synthetic oligonucleotide
  Antisense strand to SEQ ID NO: 1948066
uuacuccaauuccucacua

SEQ ID NO: 1948068 - RNA, 19 nt, Artificial Sequence
  Description of Artificial Sequence: Synthetic oligonucleotide
  Sense strand starting at position 837 of SEQ ID NO: 1880179
cgacaaauccaauauugcu

SEQ ID NO: 1948069 - RNA, 19 nt, Artificial Sequence
  Description of Artificial Sequence: Synthetic oligonucleotide
  Antisense strand to SEQ ID NO: 1948068
agcaauauuggauuugucg

SEQ ID NO: 1948070 - RNA, 19 nt, Artificial Sequence
  Description of Artificial Sequence: Synthetic oligonucleotide
  Sense strand starting at position 877 of SEQ ID NO: 1880179
gggcuaguaucuuucucag

SEQ ID NO: 1948071 - RNA, 19 nt, Artificial Sequence
  Description of Artificial Sequence: Synthetic oligonucleotide
  Antisense strand to SEQ ID NO: 1948070
cugagaaagauacuagccc

SEQ ID NO: 1948072 - RNA, 19 nt, Artificial Sequence
  Description of Artificial Sequence: Synthetic oligonucleotide
  Sense strand starting at position 1008 of SEQ ID NO: 1880179
agagcauauguugaaguua

SEQ ID NO: 1948073 - RNA, 19 nt, Artificial Sequence
  Description of Artificial Sequence: Synthetic oligonucleotide
  Antisense strand to SEQ ID NO: 1948072
uaacuucaacauaugcucu

SEQ ID NO: 1948074 - RNA, 19 nt, Artificial Sequence
  Description of Artificial Sequence: Synthetic oligonucleotide
  Sense strand starting at position 1013 of SEQ ID NO: 1880179
auauguugaaguuauguca

SEQ ID NO: 1948075 - RNA, 19 nt, Artificial Sequence
  Description of Artificial Sequence: Synthetic oligonucleotide
  Antisense strand to SEQ ID NO: 1948074
ugacauaacuucaacauau

SEQ ID NO: 1948076 - RNA, 19 nt, Artificial Sequence
  Description of Artificial Sequence: Synthetic oligonucleotide
  Sense strand starting at position 1016 of SEQ ID NO: 1880179
uguugaaguuaugucaaca

SEQ ID NO: 1948077 - RNA, 19 nt, Artificial Sequence
  Description of Artificial Sequence: Synthetic oligonucleotide
  Antisense strand to SEQ ID NO: 1948076
uguugacauaacuucaaca

SEQ ID NO: 1948078 - RNA, 19 nt, Artificial Sequence
  Description of Artificial Sequence: Synthetic oligonucleotide
  Sense strand starting at position 1057 of SEQ ID NO: 1880179
ucgauauuuggcuauugcu

SEQ ID NO: 1948079 - RNA, 19 nt, Artificial Sequence
  Description of Artificial Sequence: Synthetic oligonucleotide
  Antisense strand to SEQ ID NO: 1948078
agcaauagccaaauaucga

SEQ ID NO: 1948080 - RNA, 19 nt, Artificial Sequence
  Description of Artificial Sequence: Synthetic oligonucleotide
  Sense strand starting at position 1065 of SEQ ID NO: 1880179
uggcuauugcucugagaau

SEQ ID NO: 1948081 - RNA, 19 nt, Artificial Sequence
  Description of Artificial Sequence: Synthetic oligonucleotide
  Antisense strand to SEQ ID NO: 1948080
auucucagagcaauagcca

SEQ ID NO: 1948082 - RNA, 19 nt, Artificial Sequence
  Description of Artificial Sequence: Synthetic oligonucleotide
  Sense strand starting at position 1071 of SEQ ID NO: 1880179
uugcucugagaaugauuaa

SEQ ID NO: 1948083 - RNA, 19 nt, Artificial Sequence
  Description of Artificial Sequence: Synthetic oligonucleotide
  Antisense strand to SEQ ID NO: 1948082
uuaaucauucucagagcaa

SEQ ID NO: 1948084 - RNA, 19 nt, Artificial Sequence
  Description of Artificial Sequence: Synthetic oligonucleotide
  Sense strand starting at position 1084 of SEQ ID NO: 1880179
gauuaaaugccucagaggu

SEQ ID NO: 1948085 - RNA, 19 nt, Artificial Sequence
  Description of Artificial Sequence: Synthetic oligonucleotide
  Antisense strand to SEQ ID NO: 1948084
accucugaggcauuuaauc

SEQ ID NO: 1948086 - RNA, 19 nt, Artificial Sequence
  Description of Artificial Sequence: Synthetic oligonucleotide
  Sense strand starting at position 1100 of SEQ ID NO: 1880179
gguaaauccugaccaacua

SEQ ID NO: 1948087 - RNA, 19 nt, Artificial Sequence
  Description of Artificial Sequence: Synthetic oligonucleotide
  Antisense strand to SEQ ID NO: 1948086
uaguuggucaggauuuacc

SEQ ID NO: 1948088 - RNA, 19 nt, Artificial Sequence
  Description of Artificial Sequence: Synthetic oligonucleotide
  Sense strand starting at position 1152 of SEQ ID NO: 1880179
agaaaucauugacaaagag

SEQ ID NO: 1948089 - RNA, 19 nt, Artificial Sequence
  Description of Artificial Sequence: Synthetic oligonucleotide
  Antisense strand to SEQ ID NO: 1948088
cucuuugucaaugauuucu

SEQ ID NO: 1948090 - RNA, 19 nt, Artificial Sequence
  Description of Artificial Sequence: Synthetic oligonucleotide
  Sense strand starting at position 1337 of SEQ ID NO: 1880179
ggaguauagguuugaguau

SEQ ID NO: 1948091 - RNA, 19 nt, Artificial Sequence
  Description of Artificial Sequence: Synthetic oligonucleotide
  Antisense strand to SEQ ID NO: 1948090
auacucaaaccuauacucc

SEQ ID NO: 1948092 - RNA, 19 nt, Artificial Sequence
  Description of Artificial Sequence: Synthetic oligonucleotide
  Sense strand starting at position 1343 of SEQ ID NO: 1880179
uagguuugaguauagguca

SEQ ID NO: 1948093 - RNA, 19 nt, Artificial Sequence
  Description of Artificial Sequence: Synthetic oligonucleotide
  Antisense strand to SEQ ID NO: 1948092
ugaccuauacucaaaccua

SEQ ID NO: 1948094 - RNA, 19 nt, Artificial Sequence
  Description of Artificial Sequence: Synthetic oligonucleotide
  Sense strand starting at position 1646 of SEQ ID NO: 1880179
gcaggagaaucacuuagca

SEQ ID NO: 1948095 - RNA, 19 nt, Artificial Sequence
  Description of Artificial Sequence: Synthetic oligonucleotide
  Antisense strand to SEQ ID NO: 1948094
ugcuaagugauucuccugc

SEQ ID NO: 1948096 - RNA, 19 nt, Artificial Sequence
  Description of Artificial Sequence: Synthetic oligonucleotide
  Sense strand starting at position 1999 of SEQ ID NO: 1880179
ggacaaucaguguaacgca

SEQ ID NO: 1948097 - RNA, 19 nt, Artificial Sequence
  Description of Artificial Sequence: Synthetic oligonucleotide
  Antisense strand to SEQ ID NO: 1948096
ugcguuacacugauugucc

SEQ ID NO: 1948098 - RNA, 19 nt, Artificial Sequence
  Description of Artificial Sequence: Synthetic oligonucleotide
  Sense strand starting at position 2014 of SEQ ID NO: 1880179
cgcauaaauuuacagaauc

SEQ ID NO: 1948099 - RNA, 19 nt, Artificial Sequence
  Description of Artificial Sequence: Synthetic oligonucleotide
  Antisense strand to SEQ ID NO: 1948098
gauucuguaaauuuaugcg

SEQ ID NO: 1948100 - RNA, 19 nt, Artificial Sequence
  Description of Artificial Sequence: Synthetic oligonucleotide
  Sense strand starting at position 2132 of SEQ ID NO: 1880179
gguuucuagacugguaaca

SEQ ID NO: 1948101 - RNA, 19 nt, Artificial Sequence
  Description of Artificial Sequence: Synthetic oligonucleotide
  Antisense strand to SEQ ID NO: 1948100
uguuaccagucuagaaacc

SEQ ID NO: 1948102 - RNA, 19 nt, Artificial Sequence
  Description of Artificial Sequence: Synthetic oligonucleotide
  Sense strand starting at position 2190 of SEQ ID NO: 1880179
uaguacuauguggaaggua

SEQ ID NO: 1948103 - RNA, 19 nt, Artificial Sequence
  Description of Artificial Sequence: Synthetic oligonucleotide
  Antisense strand to SEQ ID NO: 1948102
uaccuuccacauaguacua

SEQ ID NO: 1948104 - RNA, 19 nt, Artificial Sequence
  Description of Artificial Sequence: Synthetic oligonucleotide
  Sense strand starting at position 2232 of SEQ ID NO: 1880179
aggcccagcuauccuaaau

SEQ ID NO: 1948105 - RNA, 19 nt, Artificial Sequence
  Description of Artificial Sequence: Synthetic oligonucleotide
  Antisense strand to SEQ ID NO: 1948104
auuuaggauagcugggccu

SEQ ID NO: 1948106 - RNA, 19 nt, Artificial Sequence
  Description of Artificial Sequence: Synthetic oligonucleotide
  Sense strand starting at position 2677 of SEQ ID NO: 1880179
acgacaaugugccuacuau

SEQ ID NO: 1948107 - RNA, 19 nt, Artificial Sequence
  Description of Artificial Sequence: Synthetic oligonucleotide
  Antisense strand to SEQ ID NO: 1948106
auaguaggcacauugucgu

SEQ ID NO: 1948108 - RNA, 19 nt, Artificial Sequence
  Description of Artificial Sequence: Synthetic oligonucleotide
  Sense strand starting at position 2678 of SEQ ID NO: 1880179
cgacaaugugccuacuaug

SEQ ID NO: 1948109 - RNA, 19 nt, Artificial Sequence
  Description of Artificial Sequence: Synthetic oligonucleotide
  Antisense strand to SEQ ID NO: 1948108
cauaguaggcacauugucg

SEQ ID NO: 1948110 - RNA, 19 nt, Artificial Sequence
  Description of Artificial Sequence: Synthetic oligonucleotide
  Sense strand starting at position 2933 of SEQ ID NO: 1880179
ggugguggaucaccggaaa

SEQ ID NO: 1948111 - RNA, 19 nt, Artificial Sequence
  Description of Artificial Sequence: Synthetic oligonucleotide
  Antisense strand to SEQ ID NO: 1948110
uuuccggugauccaccacc

SEQ ID NO: 1948112 - RNA, 19 nt, Artificial Sequence
  Description of Artificial Sequence: Synthetic oligonucleotide
  Sense strand starting at position 3205 of SEQ ID NO: 1880179
cggcuacugaucuauagca

SEQ ID NO: 1948113 - RNA, 19 nt, Artificial Sequence
  Description of Artificial Sequence: Synthetic oligonucleotide
  Antisense strand to SEQ ID NO: 1948112
ugcuauagaucaguagccg

SEQ ID NO: 1948114 - RNA, 19 nt, Artificial Sequence
  Description of Artificial Sequence: Synthetic oligonucleotide
  Sense strand starting at position 3207 of SEQ ID NO: 1880179
gcuacugaucuauagcauu

SEQ ID NO: 1948115 - RNA, 19 nt, Artificial Sequence
  Description of Artificial Sequence: Synthetic oligonucleotide
  Antisense strand to SEQ ID NO: 1948114
aaugcuauagaucaguagc

SEQ ID NO: 1948116 - RNA, 19 nt, Artificial Sequence
  Description of Artificial Sequence: Synthetic oligonucleotide
  Sense strand starting at position 3244 of SEQ ID NO: 1880179
gcaagcaucugaucacacu

SEQ ID NO: 1948117 - RNA, 19 nt, Artificial Sequence
  Description of Artificial Sequence: Synthetic oligonucleotide
  Antisense strand to SEQ ID NO: 1948116
agugugaucagaugcuugc

SEQ ID NO: 1948118 - RNA, 19 nt, Artificial Sequence
  Description of Artificial Sequence: Synthetic oligonucleotide
  Sense strand starting at position 3528 of SEQ ID NO: 1880179
gggaauguacguuacagaa

SEQ ID NO: 1948119 - RNA, 19 nt, Artificial Sequence
  Description of Artificial Sequence: Synthetic oligonucleotide
  Antisense strand to SEQ ID NO: 1948118
uucuguaacguacauuccc

SEQ ID NO: 1948120 - RNA, 19 nt, Artificial Sequence
  Description of Artificial Sequence: Synthetic oligonucleotide
  Sense strand starting at position 3536 of SEQ ID NO: 1880179
acguuacagaaauagguuu

SEQ ID NO: 1948121 - RNA, 19 nt, Artificial Sequence
  Description of Artificial Sequence: Synthetic oligonucleotide
  Antisense strand to SEQ ID NO: 1948120
aaaccuauuucuguaacgu

SEQ ID NO: 1948122 - RNA, 19 nt, Artificial Sequence
  Description of Artificial Sequence: Synthetic oligonucleotide
  Sense strand starting at position 3542 of SEQ ID NO: 1880179
cagaaauagguuuguaggu

SEQ ID NO: 1948123 - RNA, 19 nt, Artificial Sequence
  Description of Artificial Sequence: Synthetic oligonucleotide
  Antisense strand to SEQ ID NO: 1948122
accuacaaaccuauuucug

SEQ ID NO: 1948124 - RNA, 19 nt, Artificial Sequence
  Description of Artificial Sequence: Synthetic oligonucleotide
  Sense strand starting at position 3543 of SEQ ID NO: 1880179
agaaauagguuuguaggua

SEQ ID NO: 1948125 - RNA, 19 nt, Artificial Sequence
  Description of Artificial Sequence: Synthetic oligonucleotide
  Antisense strand to SEQ ID NO: 1948124
uaccuacaaaccuauuucu

SEQ ID NO: 1948126 - RNA, 19 nt, Artificial Sequence
  Description of Artificial Sequence: Synthetic oligonucleotide
  Sense strand starting at position 3547 of SEQ ID NO: 1880179
auagguuuguagguaugua

SEQ ID NO: 1948127 - RNA, 19 nt, Artificial Sequence
  Description of Artificial Sequence: Synthetic oligonucleotide
  Antisense strand to SEQ ID NO: 1948126
uacauaccuacaaaccuau

SEQ ID NO: 1948128 - RNA, 19 nt, Artificial Sequence
  Description of Artificial Sequence: Synthetic oligonucleotide
  Sense strand starting at position 3598 of SEQ ID NO: 1880179
uggacucagucuguaggau

SEQ ID NO: 1948129 - RNA, 19 nt, Artificial Sequence
  Description of Artificial Sequence: Synthetic oligonucleotide
  Antisense strand to SEQ ID NO: 1948128
auccuacagacugagucca

SEQ ID NO: 1948130 - RNA, 19 nt, Artificial Sequence
  Description of Artificial Sequence: Synthetic oligonucleotide
  Sense strand starting at position 3599 of SEQ ID NO: 1880179
ggacucagucuguaggaua

SEQ ID NO: 1948131 - RNA, 19 nt, Artificial Sequence
  Description of Artificial Sequence: Synthetic oligonucleotide
  Antisense strand to SEQ ID NO: 1948130
uauccuacagacugagucc

SEQ ID NO: 1948132 - RNA, 19 nt, Artificial Sequence
  Description of Artificial Sequence: Synthetic oligonucleotide
  Sense strand starting at position 1748 of SEQ ID NO: 1880180
ugauuagacuccugaagau

SEQ ID NO: 1948133 - RNA, 19 nt, Artificial Sequence
  Description of Artificial Sequence: Synthetic oligonucleotide
  Antisense strand to SEQ ID NO: 1948132
aucuucaggagucuaauca

SEQ ID NO: 1948134 - RNA, 19 nt, Artificial Sequence
  Description of Artificial Sequence: Synthetic oligonucleotide
  Sense strand starting at position 1784 of SEQ ID NO: 1880180
ucuaguauacuagauaugu

SEQ ID NO: 1948135 - RNA, 19 nt, Artificial Sequence
  Description of Artificial Sequence: Synthetic oligonucleotide
  Antisense strand to SEQ ID NO: 1948134
acauaucuaguauacuaga

SEQ ID NO: 1948136 - RNA, 19 nt, Artificial Sequence
  Description of Artificial Sequence: Synthetic oligonucleotide
  Sense strand starting at position 1793 of SEQ ID NO: 1880180
cuagauauguuuccugcau

SEQ ID NO: 1948137 - RNA, 19 nt, Artificial Sequence
  Description of Artificial Sequence: Synthetic oligonucleotide
  Antisense strand to SEQ ID NO: 1948136
augcaggaaacauaucuag

SEQ ID NO: 1948138 - RNA, 19 nt, Artificial Sequence
  Description of Artificial Sequence: Synthetic oligonucleotide
  Sense strand starting at position 1794 of SEQ ID NO: 1880180
uagauauguuuccugcaug

SEQ ID NO: 1948139 - RNA, 19 nt, Artificial Sequence
  Description of Artificial Sequence: Synthetic oligonucleotide
  Antisense strand to SEQ ID NO: 1948138
caugcaggaaacauaucua

SEQ ID NO: 1948140 - RNA, 19 nt, Artificial Sequence
  Description of Artificial Sequence: Synthetic oligonucleotide
  Sense strand starting at position 1986 of SEQ ID NO: 1880180
ggguauccacguuggaaug

SEQ ID NO: 1948141 - RNA, 19 nt, Artificial Sequence
  Description of Artificial Sequence: Synthetic oligonucleotide
  Antisense strand to SEQ ID NO: 1948140
cauuccaacguggauaccc

SEQ ID NO: 1948142 - RNA, 19 nt, Artificial Sequence
  Description of Artificial Sequence: Synthetic oligonucleotide
  Sense strand starting at position 1997 of SEQ ID NO: 1880180
uuggaaugcucauuaguga

SEQ ID NO: 1948143 - RNA, 19 nt, Artificial Sequence
  Description of Artificial Sequence: Synthetic oligonucleotide
  Antisense strand to SEQ ID NO: 1948142
ucacuaaugagcauuccaa

SEQ ID NO: 1948144 - RNA, 19 nt, Artificial Sequence
  Description of Artificial Sequence: Synthetic oligonucleotide
  Sense strand starting at position 1998 of SEQ ID NO: 1880180
uggaaugcucauuagugag

SEQ ID NO: 1948145 - RNA, 19 nt, Artificial Sequence
  Description of Artificial Sequence: Synthetic oligonucleotide
  Antisense strand to SEQ ID NO: 1948144
cucacuaaugagcauucca

SEQ ID NO: 1948146 - RNA, 19 nt, Artificial Sequence
  Description of Artificial Sequence: Synthetic oligonucleotide
  Sense strand starting at position 2000 of SEQ ID NO: 1880180
gaaugcucauuagugagga

SEQ ID NO: 1948147 - RNA, 19 nt, Artificial Sequence
  Description of Artificial Sequence: Synthetic oligonucleotide
  Antisense strand to SEQ ID NO: 1948146
uccucacuaaugagcauuc

SEQ ID NO: 1948148 - RNA, 19 nt, Artificial Sequence
  Description of Artificial Sequence: Synthetic oligonucleotide
  Sense strand starting at position 2002 of SEQ ID NO: 1880180
augcucauuagugaggaau

SEQ ID NO: 1948149 - RNA, 19 nt, Artificial Sequence
  Description of Artificial Sequence: Synthetic oligonucleotide
  Antisense strand to SEQ ID NO: 1948148
auuccucacuaaugagcau

SEQ ID NO: 1948150 - RNA, 19 nt, Artificial Sequence
  Description of Artificial Sequence: Synthetic oligonucleotide
  Sense strand starting at position 2010 of SEQ ID NO: 1880180
uagugaggaauuggaguaa

SEQ ID NO: 1948151 - RNA, 19 nt, Artificial Sequence
  Description of Artificial Sequence: Synthetic oligonucleotide
  Antisense strand to SEQ ID NO: 1948150
uuacuccaauuccucacua

SEQ ID NO: 1948152 - RNA, 19 nt, Artificial Sequence
  Description of Artificial Sequence: Synthetic oligonucleotide
  Sense strand starting at position 2030 of SEQ ID NO: 1880180
cgacaaauccaauauugcu

SEQ ID NO: 1948153 - RNA, 19 nt, Artificial Sequence
  Description of Artificial Sequence: Synthetic oligonucleotide
  Antisense strand to SEQ ID NO: 1948152
agcaauauuggauuugucg

SEQ ID NO: 1948154 - RNA, 19 nt, Artificial Sequence
  Description of Artificial Sequence: Synthetic oligonucleotide
  Sense strand starting at position 2070 of SEQ ID NO: 1880180
gggcuaguaucuuucucag

SEQ ID NO: 1948155 - RNA, 19 nt, Artificial Sequence
  Description of Artificial Sequence: Synthetic oligonucleotide
  Antisense strand to SEQ ID NO: 1948154
cugagaaagauacuagccc

SEQ ID NO: 1948156 - RNA, 19 nt, Artificial Sequence
  Description of Artificial Sequence: Synthetic oligonucleotide
  Sense strand starting at position 2072 of SEQ ID NO: 1880180
gcuaguaucuuucucagcu

SEQ ID NO: 1948157 - RNA, 19 nt, Artificial Sequence
  Description of Artificial Sequence: Synthetic oligonucleotide
  Antisense strand to SEQ ID NO: 1948156
agcugagaaagauacuagc

SEQ ID NO: 1948158 - RNA, 19 nt, Artificial Sequence
  Description of Artificial Sequence: Synthetic oligonucleotide
  Sense strand starting at position 2201 of SEQ ID NO: 1880180
agagcauauguugaaguua

SEQ ID NO: 1948159 - RNA, 19 nt, Artificial Sequence
  Description of Artificial Sequence: Synthetic oligonucleotide
  Antisense strand to SEQ ID NO: 1948158
uaacuucaacauaugcucu

SEQ ID NO: 1948160 - RNA, 19 nt, Artificial Sequence
  Description of Artificial Sequence: Synthetic oligonucleotide
  Sense strand starting at position 2206 of SEQ ID NO: 1880180
auauguugaaguuauguca

SEQ ID NO: 1948161 - RNA, 19 nt, Artificial Sequence
  Description of Artificial Sequence: Synthetic oligonucleotide
  Antisense strand to SEQ ID NO: 1948160
ugacauaacuucaacauau

SEQ ID NO: 1948162 - RNA, 19 nt, Artificial Sequence
  Description of Artificial Sequence: Synthetic oligonucleotide
  Sense strand starting at position 2209 of SEQ ID NO: 1880180
uguugaaguuaugucaaca

SEQ ID NO: 1948163 - RNA, 19 nt, Artificial Sequence
  Description of Artificial Sequence: Synthetic oligonucleotide
  Antisense strand to SEQ ID NO: 1948162
uguugacauaacuucaaca

SEQ ID NO: 1948164 - RNA, 19 nt, Artificial Sequence
  Description of Artificial Sequence: Synthetic oligonucleotide
  Sense strand starting at position 2250 of SEQ ID NO: 1880180
ucgauauuuggcuauugcu

SEQ ID NO: 1948165 - RNA, 19 nt, Artificial Sequence
  Description of Artificial Sequence: Synthetic oligonucleotide
  Antisense strand to SEQ ID NO: 1948164
agcaauagccaaauaucga

SEQ ID NO: 1948166 - RNA, 19 nt, Artificial Sequence
  Description of Artificial Sequence: Synthetic oligonucleotide
  Sense strand starting at position 2256 of SEQ ID NO: 1880180
uuuggcuauugcucugaga

SEQ ID NO: 1948167 - RNA, 19 nt, Artificial Sequence
  Description of Artificial Sequence: Synthetic oligonucleotide
  Antisense strand to SEQ ID NO: 1948166
ucucagagcaauagccaaa

SEQ ID NO: 1948168 - RNA, 19 nt, Artificial Sequence
  Description of Artificial Sequence: Synthetic oligonucleotide
  Sense strand starting at position 2258 of SEQ ID NO: 1880180
uggcuauugcucugagaau

SEQ ID NO: 1948169 - RNA, 19 nt, Artificial Sequence
  Description of Artificial Sequence: Synthetic oligonucleotide
  Antisense strand to SEQ ID NO: 1948168
auucucagagcaauagcca

SEQ ID NO: 1948170 - RNA, 19 nt, Artificial Sequence
  Description of Artificial Sequence: Synthetic oligonucleotide
  Sense strand starting at position 2264 of SEQ ID NO: 1880180
uugcucugagaaugauuaa

SEQ ID NO: 1948171 - RNA, 19 nt, Artificial Sequence
  Description of Artificial Sequence: Synthetic oligonucleotide
  Antisense strand to SEQ ID NO: 1948170
uuaaucauucucagagcaa

SEQ ID NO: 1948172 - RNA, 19 nt, Artificial Sequence
  Description of Artificial Sequence: Synthetic oligonucleotide
  Sense strand starting at position 2277 of SEQ ID NO: 1880180
gauuaaaugccucagaggu

SEQ ID NO: 1948173 - RNA, 19 nt, Artificial Sequence
  Description of Artificial Sequence: Synthetic oligonucleotide
  Antisense strand to SEQ ID NO: 1948172
accucugaggcauuuaauc

SEQ ID NO: 1948174 - RNA, 19 nt, Artificial Sequence
  Description of Artificial Sequence: Synthetic oligonucleotide
  Sense strand starting at position 2279 of SEQ ID NO: 1880180
uuaaaugccucagagguaa

SEQ ID NO: 1948175 - RNA, 19 nt, Artificial Sequence
  Description of Artificial Sequence: Synthetic oligonucleotide
  Antisense strand to SEQ ID NO: 1948174
uuaccucugaggcauuuaa

SEQ ID NO: 1948176 - RNA, 19 nt, Artificial Sequence
  Description of Artificial Sequence: Synthetic oligonucleotide
  Sense strand starting at position 2290 of SEQ ID NO: 1880180
agagguaaauccugaccaa

SEQ ID NO: 1948177 - RNA, 19 nt, Artificial Sequence
  Description of Artificial Sequence: Synthetic oligonucleotide
  Antisense strand to SEQ ID NO: 1948176
uuggucaggauuuaccucu

SEQ ID NO: 1948178 - RNA, 19 nt, Artificial Sequence
  Description of Artificial Sequence: Synthetic oligonucleotide
  Sense strand starting at position 2293 of SEQ ID NO: 1880180
gguaaauccugaccaacua

SEQ ID NO: 1948179 - RNA, 19 nt, Artificial Sequence
  Description of Artificial Sequence: Synthetic oligonucleotide
  Antisense strand to SEQ ID NO: 1948178
uaguuggucaggauuuacc

SEQ ID NO: 1948180 - RNA, 19 nt, Artificial Sequence
  Description of Artificial Sequence: Synthetic oligonucleotide
  Sense strand starting at position 2345 of SEQ ID NO: 1880180
agaaaucauugacaaagag

SEQ ID NO: 1948181 - RNA, 19 nt, Artificial Sequence
  Description of Artificial Sequence: Synthetic oligonucleotide
  Antisense strand to SEQ ID NO: 1948180
cucuuugucaaugauuucu

SEQ ID NO: 1948182 - RNA, 19 nt, Artificial Sequence
  Description of Artificial Sequence: Synthetic oligonucleotide
  Sense strand starting at position 2530 of SEQ ID NO: 1880180
ggaguauagguuugaguau

SEQ ID NO: 1948183 - RNA, 19 nt, Artificial Sequence
  Description of Artificial Sequence: Synthetic oligonucleotide
  Antisense strand to SEQ ID NO: 1948182
auacucaaaccuauacucc

SEQ ID NO: 1948184 - RNA, 19 nt, Artificial Sequence
  Description of Artificial Sequence: Synthetic oligonucleotide
  Sense strand starting at position 2531 of SEQ ID NO: 1880180
gaguauagguuugaguaua

SEQ ID NO: 1948185 - RNA, 19 nt, Artificial Sequence
  Description of Artificial Sequence: Synthetic oligonucleotide
  Antisense strand to SEQ ID NO: 1948184
uauacucaaaccuauacuc

SEQ ID NO: 1948186 - RNA, 19 nt, Artificial Sequence
  Description of Artificial Sequence: Synthetic oligonucleotide
  Sense strand starting at position 2536 of SEQ ID NO: 1880180
uagguuugaguauagguca

SEQ ID NO: 1948187 - RNA, 19 nt, Artificial Sequence
  Description of Artificial Sequence: Synthetic oligonucleotide
  Antisense strand to SEQ ID NO: 1948186
ugaccuauacucaaaccua

SEQ ID NO: 1948188 - RNA, 19 nt, Artificial Sequence
  Description of Artificial Sequence: Synthetic oligonucleotide
  Sense strand starting at position 2839 of SEQ ID NO: 1880180
gcaggagaaucacuuagca

SEQ ID NO: 1948189 - RNA, 19 nt, Artificial Sequence
  Description of Artificial Sequence: Synthetic oligonucleotide
  Antisense strand to SEQ ID NO: 1948188
ugcuaagugauucuccugc

SEQ ID NO: 1948190 - RNA, 19 nt, Artificial Sequence
  Description of Artificial Sequence: Synthetic oligonucleotide
  Sense strand starting at position 3179 of SEQ ID NO: 1880180
guguauccacguuggacaa

SEQ ID NO: 1948191 - RNA, 19 nt, Artificial Sequence
  Description of Artificial Sequence: Synthetic oligonucleotide
  Antisense strand to SEQ ID NO: 1948190
uuguccaacguggauacac

SEQ ID NO: 1948192 - RNA, 19 nt, Artificial Sequence
  Description of Artificial Sequence: Synthetic oligonucleotide
  Sense strand starting at position 3192 of SEQ ID NO: 1880180
ggacaaucaguguaacgca

SEQ ID NO: 1948193 - RNA, 19 nt, Artificial Sequence
  Description of Artificial Sequence: Synthetic oligonucleotide
  Antisense strand to SEQ ID NO: 1948192
ugcguuacacugauugucc

SEQ ID NO: 1948194 - RNA, 19 nt, Artificial Sequence
  Description of Artificial Sequence: Synthetic oligonucleotide
  Sense strand starting at position 3207 of SEQ ID NO: 1880180
cgcauaaauuuacagaauc

SEQ ID NO: 1948195 - RNA, 19 nt, Artificial Sequence
  Description of Artificial Sequence: Synthetic oligonucleotide
  Antisense strand to SEQ ID NO: 1948194
gauucuguaaauuuaugcg

SEQ ID NO: 1948196 - RNA, 19 nt, Artificial Sequence
  Description of Artificial Sequence: Synthetic oligonucleotide
  Sense strand starting at position 3324 of SEQ ID NO: 1880180
cgguuucuagacugguaac

SEQ ID NO: 1948197 - RNA, 19 nt, Artificial Sequence
  Description of Artificial Sequence: Synthetic oligonucleotide
  Antisense strand to SEQ ID NO: 1948196
guuaccagucuagaaaccg

SEQ ID NO: 1948198 - RNA, 19 nt, Artificial Sequence
  Description of Artificial Sequence: Synthetic oligonucleotide
  Sense strand starting at position 3325 of SEQ ID NO: 1880180
gguuucuagacugguaaca

SEQ ID NO: 1948199 - RNA, 19 nt, Artificial Sequence
  Description of Artificial Sequence: Synthetic oligonucleotide
  Antisense strand to SEQ ID NO: 1948198
uguuaccagucuagaaacc

SEQ ID NO: 1948200 - RNA, 19 nt, Artificial Sequence
  Description of Artificial Sequence: Synthetic oligonucleotide
  Sense strand starting at position 3327 of SEQ ID NO: 1880180
uuucuagacugguaacaug

SEQ ID NO: 1948201 - RNA, 19 nt, Artificial Sequence
  Description of Artificial Sequence: Synthetic oligonucleotide
  Antisense strand to SEQ ID NO: 1948200
cauguuaccagucuagaaa

SEQ ID NO: 1948202 - RNA, 19 nt, Artificial Sequence
  Description of Artificial Sequence: Synthetic oligonucleotide
  Sense strand starting at position 3379 of SEQ ID NO: 1880180
cgguuaguacuauguggaa

SEQ ID NO: 1948203 - RNA, 19 nt, Artificial Sequence
  Description of Artificial Sequence: Synthetic oligonucleotide
  Antisense strand to SEQ ID NO: 1948202
uuccacauaguacuaaccg

SEQ ID NO: 1948204 - RNA, 19 nt, Artificial Sequence
  Description of Artificial Sequence: Synthetic oligonucleotide
  Sense strand starting at position 3383 of SEQ ID NO: 1880180
uaguacuauguggaaggua

SEQ ID NO: 1948205 - RNA, 19 nt, Artificial Sequence
  Description of Artificial Sequence: Synthetic oligonucleotide
  Antisense strand to SEQ ID NO: 1948204
uaccuuccacauaguacua

SEQ ID NO: 1948206 - RNA, 19 nt, Artificial Sequence
  Description of Artificial Sequence: Synthetic oligonucleotide
  Sense strand starting at position 3425 of SEQ ID NO: 1880180
aggcccagcuauccuaaau

SEQ ID NO: 1948207 - RNA, 19 nt, Artificial Sequence
  Description of Artificial Sequence: Synthetic oligonucleotide
  Antisense strand to SEQ ID NO: 1948206
auuuaggauagcugggccu

SEQ ID NO: 1948208 - RNA, 19 nt, Artificial Sequence
  Description of Artificial Sequence: Synthetic oligonucleotide
  Sense strand starting at position 3870 of SEQ ID NO: 1880180
acgacaaugugccuacuau

SEQ ID NO: 1948209 - RNA, 19 nt, Artificial Sequence
  Description of Artificial Sequence: Synthetic oligonucleotide
  Antisense strand to SEQ ID NO: 1948208
auaguaggcacauugucgu

SEQ ID NO: 1948210 - RNA, 19 nt, Artificial Sequence
  Description of Artificial Sequence: Synthetic oligonucleotide
  Sense strand starting at position 3871 of SEQ ID NO: 1880180
cgacaaugugccuacuaug

SEQ ID NO: 1948211 - RNA, 19 nt, Artificial Sequence
  Description of Artificial Sequence: Synthetic oligonucleotide
  Antisense strand to SEQ ID NO: 1948210
cauaguaggcacauugucg

SEQ ID NO: 1948212 - RNA, 19 nt, Artificial Sequence
  Description of Artificial Sequence: Synthetic oligonucleotide
  Sense strand starting at position 992 of SEQ ID NO: 1880181
gagggaaucuuggcuagga

SEQ ID NO: 1948213 - RNA, 19 nt, Artificial Sequence
  Description of Artificial Sequence: Synthetic oligonucleotide
  Antisense strand to SEQ ID NO: 1948212
uccuagccaagauucccuc

SEQ ID NO: 1948214 - RNA, 19 nt, Artificial Sequence
  Description of Artificial Sequence: Synthetic oligonucleotide
  Sense strand starting at position 1029 of SEQ ID NO: 1880181
agaagugguugauccugaa

SEQ ID NO: 1948215 - RNA, 19 nt, Artificial Sequence
  Description of Artificial Sequence: Synthetic oligonucleotide
  Antisense strand to SEQ ID NO: 1948214
uucaggaucaaccacuucu

SEQ ID NO: 1948216 - RNA, 19 nt, Artificial Sequence
  Description of Artificial Sequence: Synthetic oligonucleotide
  Sense strand starting at position 1032 of SEQ ID NO: 1880181
agugguugauccugaagaa

SEQ ID NO: 1948217 - RNA, 19 nt, Artificial Sequence
  Description of Artificial Sequence: Synthetic oligonucleotide
  Antisense strand to SEQ ID NO: 1948216
uucuucaggaucaaccacu

SEQ ID NO: 1948218 - RNA, 19 nt, Artificial Sequence
  Description of Artificial Sequence: Synthetic oligonucleotide
  Sense strand starting at position 1130 of SEQ ID NO: 1880181
gcgccagguucuaugggua

SEQ ID NO: 1948219 - RNA, 19 nt, Artificial Sequence
  Description of Artificial Sequence: Synthetic oligonucleotide
  Antisense strand to SEQ ID NO: 1948218
uacccauagaaccuggcgc

SEQ ID NO: 1948220 - RNA, 19 nt, Artificial Sequence
  Description of Artificial Sequence: Synthetic oligonucleotide
  Sense strand starting at position 1234 of SEQ ID NO: 1880181
guaggucccgcuggaaauu

SEQ ID NO: 1948221 - RNA, 19 nt, Artificial Sequence
  Description of Artificial Sequence: Synthetic oligonucleotide
  Antisense strand to SEQ ID NO: 1948220
aauuuccagcgggaccuac

SEQ ID NO: 1948222 - RNA, 19 nt, Artificial Sequence
  Description of Artificial Sequence: Synthetic oligonucleotide
  Sense strand starting at position 1597 of SEQ ID NO: 1880181
uggaguuucucuucuugaa

SEQ ID NO: 1948223 - RNA, 19 nt, Artificial Sequence
  Description of Artificial Sequence: Synthetic oligonucleotide
  Antisense strand to SEQ ID NO: 1948222
uucaagaagagaaacucca

SEQ ID NO: 1948224 - RNA, 19 nt, Artificial Sequence
  Description of Artificial Sequence: Synthetic oligonucleotide
  Sense strand starting at position 2069 of SEQ ID NO: 1880181
guguguaauggcgcgaucu

SEQ ID NO: 1948225 - RNA, 19 nt, Artificial Sequence
  Description of Artificial Sequence: Synthetic oligonucleotide
  Antisense strand to SEQ ID NO: 1948224
agaucgcgccauuacacac

SEQ ID NO: 1948226 - RNA, 19 nt, Artificial Sequence
  Description of Artificial Sequence: Synthetic oligonucleotide
  Sense strand starting at position 2357 of SEQ ID NO: 1880181
auaaguuccuaccagguau

SEQ ID NO: 1948227 - RNA, 19 nt, Artificial Sequence
  Description of Artificial Sequence: Synthetic oligonucleotide
  Antisense strand to SEQ ID NO: 1948226
auaccugguaggaacuuau

SEQ ID NO: 1948228 - RNA, 19 nt, Artificial Sequence
  Description of Artificial Sequence: Synthetic oligonucleotide
  Sense strand starting at position 2368 of SEQ ID NO: 1880181
ccagguauauaguuuagaa

SEQ ID NO: 1948229 - RNA, 19 nt, Artificial Sequence
  Description of Artificial Sequence: Synthetic oligonucleotide
  Antisense strand to SEQ ID NO: 1948228
uucuaaacuauauaccugg

SEQ ID NO: 1948230 - RNA, 19 nt, Artificial Sequence
  Description of Artificial Sequence: Synthetic oligonucleotide
  Sense strand starting at position 2412 of SEQ ID NO: 1880181
acacuaacgaggugggauu

SEQ ID NO: 1948231 - RNA, 19 nt, Artificial Sequence
  Description of Artificial Sequence: Synthetic oligonucleotide
  Antisense strand to SEQ ID NO: 1948230
aaucccaccucguuagugu

SEQ ID NO: 1948232 - RNA, 19 nt, Artificial Sequence
  Description of Artificial Sequence: Synthetic oligonucleotide
  Sense strand starting at position 3062 of SEQ ID NO: 1880181
uuugaagaucucuagccaa

SEQ ID NO: 1948233 - RNA, 19 nt, Artificial Sequence
  Description of Artificial Sequence: Synthetic oligonucleotide
  Antisense strand to SEQ ID NO: 1948232
uuggcuagagaucuucaaa

SEQ ID NO: 1948234 - RNA, 19 nt, Artificial Sequence
  Description of Artificial Sequence: Synthetic oligonucleotide
  Sense strand starting at position 3218 of SEQ ID NO: 1880181
augcuuagaucagcgcauu

SEQ ID NO: 1948235 - RNA, 19 nt, Artificial Sequence
  Description of Artificial Sequence: Synthetic oligonucleotide
  Antisense strand to SEQ ID NO: 1948234
aaugcgcugaucuaagcau

SEQ ID NO: 1948236 - RNA, 19 nt, Artificial Sequence
  Description of Artificial Sequence: Synthetic oligonucleotide
  Sense strand starting at position 3388 of SEQ ID NO: 1880181
gcuuccuccuugucaggaa

SEQ ID NO: 1948237 - RNA, 19 nt, Artificial Sequence
  Description of Artificial Sequence: Synthetic oligonucleotide
  Antisense strand to SEQ ID NO: 1948236
uuccugacaaggaggaagc

SEQ ID NO: 1948238 - RNA, 19 nt, Artificial Sequence
  Description of Artificial Sequence: Synthetic oligonucleotide
  Sense strand starting at position 3392 of SEQ ID NO: 1880181
ccuccuugucaggaagcaa

SEQ ID NO: 1948239 - RNA, 19 nt, Artificial Sequence
  Description of Artificial Sequence: Synthetic oligonucleotide
  Antisense strand to SEQ ID NO: 1948238
uugcuuccugacaaggagg

SEQ ID NO: 1948240 - RNA, 19 nt, Artificial Sequence
  Description of Artificial Sequence: Synthetic oligonucleotide
  Sense strand starting at position 3578 of SEQ ID NO: 1880181
gugugaggaagcuauauua

SEQ ID NO: 1948241 - RNA, 19 nt, Artificial Sequence
  Description of Artificial Sequence: Synthetic oligonucleotide
  Antisense strand to SEQ ID NO: 1948240
uaauauagcuuccucacac

SEQ ID NO: 1948242 - RNA, 19 nt, Artificial Sequence
  Description of Artificial Sequence: Synthetic oligonucleotide
  Sense strand starting at position 3594 of SEQ ID NO: 1880181
uuaagugaaugcuggguau

SEQ ID NO: 1948243 - RNA, 19 nt, Artificial Sequence
  Description of Artificial Sequence: Synthetic oligonucleotide
  Antisense strand to SEQ ID NO: 1948242
auacccagcauucacuuaa

SEQ ID NO: 1948244 - RNA, 19 nt, Artificial Sequence
  Description of Artificial Sequence: Synthetic oligonucleotide
  Sense strand starting at position 3596 of SEQ ID NO: 1880181
aagugaaugcuggguaugu

SEQ ID NO: 1948245 - RNA, 19 nt, Artificial Sequence
  Description of Artificial Sequence: Synthetic oligonucleotide
  Antisense strand to SEQ ID NO: 1948244
acauacccagcauucacuu

SEQ ID NO: 1948246 - RNA, 19 nt, Artificial Sequence
  Description of Artificial Sequence: Synthetic oligonucleotide
  Sense strand starting at position 3597 of SEQ ID NO: 1880181
agugaaugcuggguauguu

SEQ ID NO: 1948247 - RNA, 19 nt, Artificial Sequence
  Description of Artificial Sequence: Synthetic oligonucleotide
  Antisense strand to SEQ ID NO: 1948246
aacauacccagcauucacu

SEQ ID NO: 1948248 - RNA, 19 nt, Artificial Sequence
  Description of Artificial Sequence: Synthetic oligonucleotide
  Sense strand starting at position 3605 of SEQ ID NO: 1880181
cuggguauguuggcauauu

SEQ ID NO: 1948249 - RNA, 19 nt, Artificial Sequence
  Description of Artificial Sequence: Synthetic oligonucleotide
  Antisense strand to SEQ ID NO: 1948248
aauaugccaacauacccag

SEQ ID NO: 1948250 - RNA, 19 nt, Artificial Sequence
  Description of Artificial Sequence: Synthetic oligonucleotide
  Sense strand starting at position 3617 of SEQ ID NO: 1880181
gcauauugauauugucuaa

SEQ ID NO: 1948251 - RNA, 19 nt, Artificial Sequence
  Description of Artificial Sequence: Synthetic oligonucleotide
  Antisense strand to SEQ ID NO: 1948250
uuagacaauaucaauaugc

SEQ ID NO: 1948252 - RNA, 19 nt, Artificial Sequence
  Description of Artificial Sequence: Synthetic oligonucleotide
  Sense strand starting at position 3688 of SEQ ID NO: 1880181
aggucuagugcuugcaaga

SEQ ID NO: 1948253 - RNA, 19 nt, Artificial Sequence
  Description of Artificial Sequence: Synthetic oligonucleotide
  Antisense strand to SEQ ID NO: 1948252
ucuugcaagcacuagaccu

SEQ ID NO: 1948254 - RNA, 19 nt, Artificial Sequence
  Description of Artificial Sequence: Synthetic oligonucleotide
  Sense strand starting at position 3695 of SEQ ID NO: 1880181
gugcuugcaagagaccuua

SEQ ID NO: 1948255 - RNA, 19 nt, Artificial Sequence
  Description of Artificial Sequence: Synthetic oligonucleotide
  Antisense strand to SEQ ID NO: 1948254
uaaggucucuugcaagcac

SEQ ID NO: 1948256 - RNA, 19 nt, Artificial Sequence
  Description of Artificial Sequence: Synthetic oligonucleotide
  Sense strand starting at position 3770 of SEQ ID NO: 1880181
gagcuaaaggacuaugcua

SEQ ID NO: 1948257 - RNA, 19 nt, Artificial Sequence
  Description of Artificial Sequence: Synthetic oligonucleotide
  Antisense strand to SEQ ID NO: 1948256
uagcauaguccuuuagcuc

SEQ ID NO: 1948258 - RNA, 19 nt, Artificial Sequence
  Description of Artificial Sequence: Synthetic oligonucleotide
  Sense strand starting at position 3772 of SEQ ID NO: 1880181
gcuaaaggacuaugcuaau

SEQ ID NO: 1948259 - RNA, 19 nt, Artificial Sequence
  Description of Artificial Sequence: Synthetic oligonucleotide
  Antisense strand to SEQ ID NO: 1948258
auuagcauaguccuuuagc

SEQ ID NO: 1948260 - RNA, 19 nt, Artificial Sequence
  Description of Artificial Sequence: Synthetic oligonucleotide
  Sense strand starting at position 3775 of SEQ ID NO: 1880181
aaaggacuaugcuaauagu

SEQ ID NO: 1948261 - RNA, 19 nt, Artificial Sequence
  Description of Artificial Sequence: Synthetic oligonucleotide
  Antisense strand to SEQ ID NO: 1948260
acuauuagcauaguccuuu

SEQ ID NO: 1948262 - RNA, 19 nt, Artificial Sequence
  Description of Artificial Sequence: Synthetic oligonucleotide
  Sense strand starting at position 3788 of SEQ ID NO: 1880181
aauagugucccauggucua

SEQ ID NO: 1948263 - RNA, 19 nt, Artificial Sequence
  Description of Artificial Sequence: Synthetic oligonucleotide
  Antisense strand to SEQ ID NO: 1948262
uagaccaugggacacuauu

SEQ ID NO: 1948264 - RNA, 19 nt, Artificial Sequence
  Description of Artificial Sequence: Synthetic oligonucleotide
  Sense strand starting at position 3795 of SEQ ID NO: 1880181
ucccauggucuaggucauu

SEQ ID NO: 1948265 - RNA, 19 nt, Artificial Sequence
  Description of Artificial Sequence: Synthetic oligonucleotide
  Antisense strand to SEQ ID NO: 1948264
aaugaccuagaccauggga

SEQ ID NO: 1948266 - RNA, 19 nt, Artificial Sequence
  Description of Artificial Sequence: Synthetic oligonucleotide
  Sense strand starting at position 3854 of SEQ ID NO: 1880181
gcgugucuguccugaagcu

SEQ ID NO: 1948267 - RNA, 19 nt, Artificial Sequence
  Description of Artificial Sequence: Synthetic oligonucleotide
  Antisense strand to SEQ ID NO: 1948266
agcuucaggacagacacgc

SEQ ID NO: 1948268 - RNA, 19 nt, Artificial Sequence
  Description of Artificial Sequence: Synthetic oligonucleotide
  Sense strand starting at position 3915 of SEQ ID NO: 1880181
aagagaugcuggccgacaa

SEQ ID NO: 1948269 - RNA, 19 nt, Artificial Sequence
  Description of Artificial Sequence: Synthetic oligonucleotide
  Antisense strand to SEQ ID NO: 1948268
uugucggccagcaucucuu

SEQ ID NO: 1948270 - RNA, 19 nt, Artificial Sequence
  Description of Artificial Sequence: Synthetic oligonucleotide
  Sense strand starting at position 34 of SEQ ID NO: 1880182
cuaagcuacuaugucaaga

SEQ ID NO: 1948271 - RNA, 19 nt, Artificial Sequence
  Description of Artificial Sequence: Synthetic oligonucleotide
  Antisense strand to SEQ ID NO: 1948270
ucuugacauaguagcuuag

SEQ ID NO: 1948272 - RNA, 19 nt, Artificial Sequence
  Description of Artificial Sequence: Synthetic oligonucleotide
  Sense strand starting at position 42 of SEQ ID NO: 1880182
cuaugucaagauuaagucu

SEQ ID NO: 1948273 - RNA, 19 nt, Artificial Sequence
  Description of Artificial Sequence: Synthetic oligonucleotide
  Antisense strand to SEQ ID NO: 1948272
agacuuaaucuugacauag

SEQ ID NO: 1948274 - RNA, 19 nt, Artificial Sequence
  Description of Artificial Sequence: Synthetic oligonucleotide
  Sense strand starting at position 45 of SEQ ID NO: 1880182
ugucaagauuaagucuaau

SEQ ID NO: 1948275 - RNA, 19 nt, Artificial Sequence
  Description of Artificial Sequence: Synthetic oligonucleotide
  Antisense strand to SEQ ID NO: 1948274
auuagacuuaaucuugaca

SEQ ID NO: 1948276 - RNA, 19 nt, Artificial Sequence
  Description of Artificial Sequence: Synthetic oligonucleotide
  Sense strand starting at position 54 of SEQ ID NO: 1880182
uaagucuaauguuugaaga

SEQ ID NO: 1948277 - RNA, 19 nt, Artificial Sequence
  Description of Artificial Sequence: Synthetic oligonucleotide
  Antisense strand to SEQ ID NO: 1948276
ucuucaaacauuagacuua

SEQ ID NO: 1948278 - RNA, 19 nt, Artificial Sequence
  Description of Artificial Sequence: Synthetic oligonucleotide
  Sense strand starting at position 122 of SEQ ID NO: 1880182
gaggaauaggcaggucuga

SEQ ID NO: 1948279 - RNA, 19 nt, Artificial Sequence
  Description of Artificial Sequence: Synthetic oligonucleotide
  Antisense strand to SEQ ID NO: 1948278
ucagaccugccuauuccuc

SEQ ID NO: 1948280 - RNA, 19 nt, Artificial Sequence
  Description of Artificial Sequence: Synthetic oligonucleotide
  Sense strand starting at position 367 of SEQ ID NO: 1880182
guacuugugauccaucugu

SEQ ID NO: 1948281 - RNA, 19 nt, Artificial Sequence
  Description of Artificial Sequence: Synthetic oligonucleotide
  Antisense strand to SEQ ID NO: 1948280
acagauggaucacaaguac

SEQ ID NO: 1948282 - RNA, 19 nt, Artificial Sequence
  Description of Artificial Sequence: Synthetic oligonucleotide
  Sense strand starting at position 538 of SEQ ID NO: 1880182
uacgauauggccuauucuu

SEQ ID NO: 1948283 - RNA, 19 nt, Artificial Sequence
  Description of Artificial Sequence: Synthetic oligonucleotide
  Antisense strand to SEQ ID NO: 1948282
aagaauaggccauaucgua

SEQ ID NO: 1948284 - RNA, 19 nt, Artificial Sequence
  Description of Artificial Sequence: Synthetic oligonucleotide
  Sense strand starting at position 689 of SEQ ID NO: 1880182
ugcagucuaucacugacua

SEQ ID NO: 1948285 - RNA, 19 nt, Artificial Sequence
  Description of Artificial Sequence: Synthetic oligonucleotide
  Antisense strand to SEQ ID NO: 1948284
uagucagugauagacugca

SEQ ID NO: 1948286 - RNA, 19 nt, Artificial Sequence
  Description of Artificial Sequence: Synthetic oligonucleotide
  Sense strand starting at position 690 of SEQ ID NO: 1880182
gcagucuaucacugacuaa

SEQ ID NO: 1948287 - RNA, 19 nt, Artificial Sequence
  Description of Artificial Sequence: Synthetic oligonucleotide
  Antisense strand to SEQ ID NO: 1948286
uuagucagugauagacugc

SEQ ID NO: 1948288 - RNA, 19 nt, Artificial Sequence
  Description of Artificial Sequence: Synthetic oligonucleotide
  Sense strand starting at position 719 of SEQ ID NO: 1880182
gguggcugacuguauuaau

SEQ ID NO: 1948289 - RNA, 19 nt, Artificial Sequence
  Description of Artificial Sequence: Synthetic oligonucleotide
  Antisense strand to SEQ ID NO: 1948288
auuaauacagucagccacc

SEQ ID NO: 1948290 - RNA, 19 nt, Artificial Sequence
  Description of Artificial Sequence: Synthetic oligonucleotide
  Sense strand starting at position 749 of SEQ ID NO: 1880182
cguuuacugacagauugga

SEQ ID NO: 1948291 - RNA, 19 nt, Artificial Sequence
  Description of Artificial Sequence: Synthetic oligonucleotide
  Antisense strand to SEQ ID NO: 1948290
uccaaucugucaguaaacg

SEQ ID NO: 1948292 - RNA, 19 nt, Artificial Sequence
  Description of Artificial Sequence: Synthetic oligonucleotide
  Sense strand starting at position 783 of SEQ ID NO: 1880182
cuugcaaaccucugagauu

SEQ ID NO: 1948293 - RNA, 19 nt, Artificial Sequence
  Description of Artificial Sequence: Synthetic oligonucleotide
  Antisense strand to SEQ ID NO: 1948292
aaucucagagguuugcaag

SEQ ID NO: 1948294 - RNA, 19 nt, Artificial Sequence
  Description of Artificial Sequence: Synthetic oligonucleotide
  Sense strand starting at position 784 of SEQ ID NO: 1880182
uugcaaaccucugagauuu

SEQ ID NO: 1948295 - RNA, 19 nt, Artificial Sequence
  Description of Artificial Sequence: Synthetic oligonucleotide
  Antisense strand to SEQ ID NO: 1948294
aaaucucagagguuugcaa

SEQ ID NO: 1948296 - RNA, 19 nt, Artificial Sequence
  Description of Artificial Sequence: Synthetic oligonucleotide
  Sense strand starting at position 2618 of SEQ ID NO: 1880182
ccucuuaaguagcugaaau

SEQ ID NO: 1948297 - RNA, 19 nt, Artificial Sequence
  Description of Artificial Sequence: Synthetic oligonucleotide
  Antisense strand to SEQ ID NO: 1948296
auuucagcuacuuaagagg

SEQ ID NO: 1948298 - RNA, 19 nt, Artificial Sequence
  Description of Artificial Sequence: Synthetic oligonucleotide
  Sense strand starting at position 2706 of SEQ ID NO: 1880182
ggucucaaacugugcuaaa

SEQ ID NO: 1948299 - RNA, 19 nt, Artificial Sequence
  Description of Artificial Sequence: Synthetic oligonucleotide
  Antisense strand to SEQ ID NO: 1948298
uuuagcacaguuugagacc

SEQ ID NO: 1948300 - RNA, 19 nt, Artificial Sequence
  Description of Artificial Sequence: Synthetic oligonucleotide
  Sense strand starting at position 2707 of SEQ ID NO: 1880182
gucucaaacugugcuaaag

SEQ ID NO: 1948301 - RNA, 19 nt, Artificial Sequence
  Description of Artificial Sequence: Synthetic oligonucleotide
  Antisense strand to SEQ ID NO: 1948300
cuuuagcacaguuugagac

SEQ ID NO: 1948302 - RNA, 19 nt, Artificial Sequence
  Description of Artificial Sequence: Synthetic oligonucleotide
  Sense strand starting at position 2747 of SEQ ID NO: 1880182
agaugcugagauuauguuu

SEQ ID NO: 1948303 - RNA, 19 nt, Artificial Sequence
  Description of Artificial Sequence: Synthetic oligonucleotide
  Antisense strand to SEQ ID NO: 1948302
aaacauaaucucagcaucu

SEQ ID NO: 1948304 - RNA, 19 nt, Artificial Sequence
  Description of Artificial Sequence: Synthetic oligonucleotide
  Sense strand starting at position 2752 of SEQ ID NO: 1880182
cugagauuauguuuccuuc

SEQ ID NO: 1948305 - RNA, 19 nt, Artificial Sequence
  Description of Artificial Sequence: Synthetic oligonucleotide
  Antisense strand to SEQ ID NO: 1948304
gaaggaaacauaaucucag

SEQ ID NO: 1948306 - RNA, 19 nt, Artificial Sequence
  Description of Artificial Sequence: Synthetic oligonucleotide
  Sense strand starting at position 2777 of SEQ ID NO: 1880182
uugaaaugcuaacucaguu

SEQ ID NO: 1948307 - RNA, 19 nt, Artificial Sequence
  Description of Artificial Sequence: Synthetic oligonucleotide
  Antisense strand to SEQ ID NO: 1948306
aacugaguuagcauuucaa

SEQ ID NO: 1948308 - RNA, 19 nt, Artificial Sequence
  Description of Artificial Sequence: Synthetic oligonucleotide
  Sense strand starting at position 2793 of SEQ ID NO: 1880182
guuccaauuacugagaggu

SEQ ID NO: 1948309 - RNA, 19 nt, Artificial Sequence
  Description of Artificial Sequence: Synthetic oligonucleotide
  Antisense strand to SEQ ID NO: 1948308
accucucaguaauuggaac

SEQ ID NO: 1948310 - RNA, 19 nt, Artificial Sequence
  Description of Artificial Sequence: Synthetic oligonucleotide
  Sense strand starting at position 2801 of SEQ ID NO: 1880182
uacugagagguguggugaa

SEQ ID NO: 1948311 - RNA, 19 nt, Artificial Sequence
  Description of Artificial Sequence: Synthetic oligonucleotide
  Antisense strand to SEQ ID NO: 1948310
uucaccacaccucucagua

SEQ ID NO: 1948312 - RNA, 19 nt, Artificial Sequence
  Description of Artificial Sequence: Synthetic oligonucleotide
  Sense strand starting at position 2805 of SEQ ID NO: 1880182
gagagguguggugaaggua

SEQ ID NO: 1948313 - RNA, 19 nt, Artificial Sequence
  Description of Artificial Sequence: Synthetic oligonucleotide
  Antisense strand to SEQ ID NO: 1948312
uaccuucaccacaccucuc

SEQ ID NO: 1948314 - RNA, 19 nt, Artificial Sequence
  Description of Artificial Sequence: Synthetic oligonucleotide
  Sense strand starting at position 2826 of SEQ ID NO: 1880182
cccauucuccuugaggacu

SEQ ID NO: 1948315 - RNA, 19 nt, Artificial Sequence
  Description of Artificial Sequence: Synthetic oligonucleotide
  Antisense strand to SEQ ID NO: 1948314
aguccucaaggagaauggg

SEQ ID NO: 1948316 - RNA, 19 nt, Artificial Sequence
  Description of Artificial Sequence: Synthetic oligonucleotide
  Sense strand starting at position 2834 of SEQ ID NO: 1880182
ccuugaggacuuuguuaac

SEQ ID NO: 1948317 - RNA, 19 nt, Artificial Sequence
  Description of Artificial Sequence: Synthetic oligonucleotide
  Antisense strand to SEQ ID NO: 1948316
guuaacaaaguccucaagg

SEQ ID NO: 1948318 - RNA, 19 nt, Artificial Sequence
  Description of Artificial Sequence: Synthetic oligonucleotide
  Sense strand starting at position 2843 of SEQ ID NO: 1880182
cuuuguuaacacugcaaag

SEQ ID NO: 1948319 - RNA, 19 nt, Artificial Sequence
  Description of Artificial Sequence: Synthetic oligonucleotide
  Antisense strand to SEQ ID NO: 1948318
cuuugcaguguuaacaaag

SEQ ID NO: 1948320 - RNA, 19 nt, Artificial Sequence
  Description of Artificial Sequence: Synthetic oligonucleotide
  Sense strand starting at position 3000 of SEQ ID NO: 1880182
acaaccaccgagugugaua

SEQ ID NO: 1948321 - RNA, 19 nt, Artificial Sequence
  Description of Artificial Sequence: Synthetic oligonucleotide
  Antisense strand to SEQ ID NO: 1948320
uaucacacucggugguugu

SEQ ID NO: 1948322 - RNA, 19 nt, Artificial Sequence
  Description of Artificial Sequence: Synthetic oligonucleotide
  Sense strand starting at position 3009 of SEQ ID NO: 1880182
gagugugauaguugugaca

SEQ ID NO: 1948323 - RNA, 19 nt, Artificial Sequence
  Description of Artificial Sequence: Synthetic oligonucleotide
  Antisense strand to SEQ ID NO: 1948322
ugucacaacuaucacacuc

SEQ ID NO: 1948324 - RNA, 19 nt, Artificial Sequence
  Description of Artificial Sequence: Synthetic oligonucleotide
  Sense strand starting at position 3028 of SEQ ID NO: 1880182
gagaauguauggcccuuaa

SEQ ID NO: 1948325 - RNA, 19 nt, Artificial Sequence
  Description of Artificial Sequence: Synthetic oligonucleotide
  Antisense strand to SEQ ID NO: 1948324
uuaagggccauacauucuc

SEQ ID NO: 1948326 - RNA, 19 nt, Artificial Sequence
  Description of Artificial Sequence: Synthetic oligonucleotide
  Sense strand starting at position 3109 of SEQ ID NO: 1880182
agcuauuuggugugcaaga

SEQ ID NO: 1948327 - RNA, 19 nt, Artificial Sequence
  Description of Artificial Sequence: Synthetic oligonucleotide
  Antisense strand to SEQ ID NO: 1948326
ucuugcacaccaaauagcu

SEQ ID NO: 1948328 - RNA, 19 nt, Artificial Sequence
  Description of Artificial Sequence: Synthetic oligonucleotide
  Sense strand starting at position 3110 of SEQ ID NO: 1880182
gcuauuuggugugcaagac

SEQ ID NO: 1948329 - RNA, 19 nt, Artificial Sequence
  Description of Artificial Sequence: Synthetic oligonucleotide
  Antisense strand to SEQ ID NO: 1948328
gucuugcacaccaaauagc

SEQ ID NO: 1948330 - RNA, 19 nt, Artificial Sequence
  Description of Artificial Sequence: Synthetic oligonucleotide
  Sense strand starting at position 3360 of SEQ ID NO: 1880182
uuguguuaucggguauugu

SEQ ID NO: 1948331 - RNA, 19 nt, Artificial Sequence
  Description of Artificial Sequence: Synthetic oligonucleotide
  Antisense strand to SEQ ID NO: 1948330
acaauacccgauaacacaa

SEQ ID NO: 1948332 - RNA, 19 nt, Artificial Sequence
  Description of Artificial Sequence: Synthetic oligonucleotide
  Sense strand starting at position 3389 of SEQ ID NO: 1880182
gugggacuccaguagguaa

SEQ ID NO: 1948333 - RNA, 19 nt, Artificial Sequence
  Description of Artificial Sequence: Synthetic oligonucleotide
  Antisense strand to SEQ ID NO: 1948332
uuaccuacuggagucccac

SEQ ID NO: 1948334 - RNA, 19 nt, Artificial Sequence
  Description of Artificial Sequence: Synthetic oligonucleotide
  Sense strand starting at position 3402 of SEQ ID NO: 1880182
agguaaugccggcaagacu

SEQ ID NO: 1948335 - RNA, 19 nt, Artificial Sequence
  Description of Artificial Sequence: Synthetic oligonucleotide
  Antisense strand to SEQ ID NO: 1948334
agucuugccggcauuaccu

SEQ ID NO: 1948336 - RNA, 19 nt, Artificial Sequence
  Description of Artificial Sequence: Synthetic oligonucleotide
  Sense strand starting at position 3519 of SEQ ID NO: 1880182
auagccauuggauggauaa

SEQ ID NO: 1948337 - RNA, 19 nt, Artificial Sequence
  Description of Artificial Sequence: Synthetic oligonucleotide
  Antisense strand to SEQ ID NO: 1948336
uuauccauccaauggcuau

SEQ ID NO: 1948338 - RNA, 19 nt, Artificial Sequence
  Description of Artificial Sequence: Synthetic oligonucleotide
  Sense strand starting at position 3520 of SEQ ID NO: 1880182
uagccauuggauggauaau

SEQ ID NO: 1948339 - RNA, 19 nt, Artificial Sequence
  Description of Artificial Sequence: Synthetic oligonucleotide
  Antisense strand to SEQ ID NO: 1948338
auuauccauccaauggcua

SEQ ID NO: 1948340 - RNA, 19 nt, Artificial Sequence
  Description of Artificial Sequence: Synthetic oligonucleotide
  Sense strand starting at position 3534 of SEQ ID NO: 1880182
auaauauggugguugagga

SEQ ID NO: 1948341 - RNA, 19 nt, Artificial Sequence
  Description of Artificial Sequence: Synthetic oligonucleotide
  Antisense strand to SEQ ID NO: 1948340
uccucaaccaccauauuau

SEQ ID NO: 1948342 - RNA, 19 nt, Artificial Sequence
  Description of Artificial Sequence: Synthetic oligonucleotide
  Sense strand starting at position 3559 of SEQ ID NO: 1880182
cuacuuauagcagaggguu

SEQ ID NO: 1948343 - RNA, 19 nt, Artificial Sequence
  Description of Artificial Sequence: Synthetic oligonucleotide
  Antisense strand to SEQ ID NO: 1948342
aacccucugcuauaaguag

SEQ ID NO: 1948344 - RNA, 19 nt, Artificial Sequence
  Description of Artificial Sequence: Synthetic oligonucleotide
  Sense strand starting at position 3740 of SEQ ID NO: 1880182
acagucuagccucaaguau

SEQ ID NO: 1948345 - RNA, 19 nt, Artificial Sequence
  Description of Artificial Sequence: Synthetic oligonucleotide
  Antisense strand to SEQ ID NO: 1948344
auacuugaggcuagacugu

SEQ ID NO: 1948346 - RNA, 19 nt, Artificial Sequence
  Description of Artificial Sequence: Synthetic oligonucleotide
  Sense strand starting at position 3825 of SEQ ID NO: 1880182
aagguacagcaguauuaau

SEQ ID NO: 1948347 - RNA, 19 nt, Artificial Sequence
  Description of Artificial Sequence: Synthetic oligonucleotide
  Antisense strand to SEQ ID NO: 1948346
auuaauacugcuguaccuu

SEQ ID NO: 1948348 - RNA, 19 nt, Artificial Sequence
  Description of Artificial Sequence: Synthetic oligonucleotide
  Sense strand starting at position 3911 of SEQ ID NO: 1880182
agccgaagcugugcauuua

SEQ ID NO: 1948349 - RNA, 19 nt, Artificial Sequence
  Description of Artificial Sequence: Synthetic oligonucleotide
  Antisense strand to SEQ ID NO: 1948348
uaaaugcacagcuucggcu

SEQ ID NO: 1948350 - RNA, 19 nt, Artificial Sequence
  Description of Artificial Sequence: Synthetic oligonucleotide
  Sense strand starting at position 179 of SEQ ID NO: 1880183
aagguugaauggcuaacaa

SEQ ID NO: 1948351 - RNA, 19 nt, Artificial Sequence
  Description of Artificial Sequence: Synthetic oligonucleotide
  Antisense strand to SEQ ID NO: 1948350
uuguuagccauucaaccuu

SEQ ID NO: 1948352 - RNA, 19 nt, Artificial Sequence
  Description of Artificial Sequence: Synthetic oligonucleotide
  Sense strand starting at position 451 of SEQ ID NO: 1880183
gggagcauucuacauaccu

SEQ ID NO: 1948353 - RNA, 19 nt, Artificial Sequence
  Description of Artificial Sequence: Synthetic oligonucleotide
  Antisense strand to SEQ ID NO: 1948352
agguauguagaaugcuccc

SEQ ID NO: 1948354 - RNA, 19 nt, Artificial Sequence
  Description of Artificial Sequence: Synthetic oligonucleotide
  Sense strand starting at position 588 of SEQ ID NO: 1880183
auaaauguaccgcaguaga

SEQ ID NO: 1948355 - RNA, 19 nt, Artificial Sequence
  Description of Artificial Sequence: Synthetic oligonucleotide
  Antisense strand to SEQ ID NO: 1948354
ucuacugcgguacauuuau

SEQ ID NO: 1948356 - RNA, 19 nt, Artificial Sequence
  Description of Artificial Sequence: Synthetic oligonucleotide
  Sense strand starting at position 684 of SEQ ID NO: 1880183
guugauccggucuagaaau

SEQ ID NO: 1948357 - RNA, 19 nt, Artificial Sequence
  Description of Artificial Sequence: Synthetic oligonucleotide
  Antisense strand to SEQ ID NO: 1948356
auuucuagaccggaucaac

SEQ ID NO: 1948358 - RNA, 19 nt, Artificial Sequence
  Description of Artificial Sequence: Synthetic oligonucleotide
  Sense strand starting at position 686 of SEQ ID NO: 1880183
ugauccggucuagaaauca

SEQ ID NO: 1948359 - RNA, 19 nt, Artificial Sequence
  Description of Artificial Sequence: Synthetic oligonucleotide
  Antisense strand to SEQ ID NO: 1948358
ugauuucuagaccggauca

SEQ ID NO: 1948360 - RNA, 19 nt, Artificial Sequence
  Description of Artificial Sequence: Synthetic oligonucleotide
  Sense strand starting at position 890 of SEQ ID NO: 1880183
uguuucugucaugagaacu

SEQ ID NO: 1948361 - RNA, 19 nt, Artificial Sequence
  Description of Artificial Sequence: Synthetic oligonucleotide
  Antisense strand to SEQ ID NO: 1948360
aguucucaugacagaaaca

SEQ ID NO: 1948362 - RNA, 19 nt, Artificial Sequence
  Description of Artificial Sequence: Synthetic oligonucleotide
  Sense strand starting at position 1516 of SEQ ID NO: 1880183
uggaaagggucaucacucu

SEQ ID NO: 1948363 - RNA, 19 nt, Artificial Sequence
  Description of Artificial Sequence: Synthetic oligonucleotide
  Antisense strand to SEQ ID NO: 1948362
agagugaugacccuuucca

SEQ ID NO: 1948364 - RNA, 19 nt, Artificial Sequence
  Description of Artificial Sequence: Synthetic oligonucleotide
  Sense strand starting at position 1540 of SEQ ID NO: 1880183
guaucacuccguuagagag

SEQ ID NO: 1948365 - RNA, 19 nt, Artificial Sequence
  Description of Artificial Sequence: Synthetic oligonucleotide
  Antisense strand to SEQ ID NO: 1948364
cucucuaacggagugauac

SEQ ID NO: 1948366 - RNA, 19 nt, Artificial Sequence
  Description of Artificial Sequence: Synthetic oligonucleotide
  Sense strand starting at position 1567 of SEQ ID NO: 1880183
guacccacacguuauagaa

SEQ ID NO: 1948367 - RNA, 19 nt, Artificial Sequence
  Description of Artificial Sequence: Synthetic oligonucleotide
  Antisense strand to SEQ ID NO: 1948366
uucuauaacguguggguac

SEQ ID NO: 1948368 - RNA, 19 nt, Artificial Sequence
  Description of Artificial Sequence: Synthetic oligonucleotide
  Sense strand starting at position 1621 of SEQ ID NO: 1880183
guauuucuccaguguccca

SEQ ID NO: 1948369 - RNA, 19 nt, Artificial Sequence
  Description of Artificial Sequence: Synthetic oligonucleotide
  Antisense strand to SEQ ID NO: 1948368
ugggacacuggagaaauac

SEQ ID NO: 1948370 - RNA, 19 nt, Artificial Sequence
  Description of Artificial Sequence: Synthetic oligonucleotide
  Sense strand starting at position 1713 of SEQ ID NO: 1880183
guguuuagcacugaaugaa

SEQ ID NO: 1948371 - RNA, 19 nt, Artificial Sequence
  Description of Artificial Sequence: Synthetic oligonucleotide
  Antisense strand to SEQ ID NO: 1948370
uucauucagugcuaaacac

SEQ ID NO: 1948372 - RNA, 19 nt, Artificial Sequence
  Description of Artificial Sequence: Synthetic oligonucleotide
  Sense strand starting at position 2603 of SEQ ID NO: 1880183
gcugauucucuagagauca

SEQ ID NO: 1948373 - RNA, 19 nt, Artificial Sequence
  Description of Artificial Sequence: Synthetic oligonucleotide
  Antisense strand to SEQ ID NO: 1948372
ugaucucuagagaaucagc

SEQ ID NO: 1948374 - RNA, 19 nt, Artificial Sequence
  Description of Artificial Sequence: Synthetic oligonucleotide
  Sense strand starting at position 2705 of SEQ ID NO: 1880183
ggacaauggugacuccaca

SEQ ID NO: 1948375 - RNA, 19 nt, Artificial Sequence
  Description of Artificial Sequence: Synthetic oligonucleotide
  Antisense strand to SEQ ID NO: 1948374
uguggagucaccauugucc

SEQ ID NO: 1948376 - RNA, 19 nt, Artificial Sequence
  Description of Artificial Sequence: Synthetic oligonucleotide
  Sense strand starting at position 3023 of SEQ ID NO: 1880183
acgugaggcgugaguaaca

SEQ ID NO: 1948377 - RNA, 19 nt, Artificial Sequence
  Description of Artificial Sequence: Synthetic oligonucleotide
  Antisense strand to SEQ ID NO: 1948376
uguuacucacgccucacgu

SEQ ID NO: 1948378 - RNA, 19 nt, Artificial Sequence
  Description of Artificial Sequence: Synthetic oligonucleotide
  Sense strand starting at position 3889 of SEQ ID NO: 1880183
gcuuuaauaguggauuaga

SEQ ID NO: 1948379 - RNA, 19 nt, Artificial Sequence
  Description of Artificial Sequence: Synthetic oligonucleotide
  Antisense strand to SEQ ID NO: 1948378
ucuaauccacuauuaaagc

SEQ ID NO: 1948380 - RNA, 19 nt, Artificial Sequence
  Description of Artificial Sequence: Synthetic oligonucleotide
  Sense strand starting at position 199 of SEQ ID NO: 1880184
caggaaugguucucaauua

SEQ ID NO: 1948381 - RNA, 19 nt, Artificial Sequence
  Description of Artificial Sequence: Synthetic oligonucleotide
  Antisense strand to SEQ ID NO: 1948380
uaauugagaaccauuccug

SEQ ID NO: 1948382 - RNA, 19 nt, Artificial Sequence
  Description of Artificial Sequence: Synthetic oligonucleotide
  Sense strand starting at position 263 of SEQ ID NO: 1880184
ugagucugugaguaggaaa

SEQ ID NO: 1948383 - RNA, 19 nt, Artificial Sequence
  Description of Artificial Sequence: Synthetic oligonucleotide
  Antisense strand to SEQ ID NO: 1948382
uuuccuacucacagacuca

SEQ ID NO: 1948384 - RNA, 19 nt, Artificial Sequence
  Description of Artificial Sequence: Synthetic oligonucleotide
  Sense strand starting at position 274 of SEQ ID NO: 1880184
guaggaaaugggugauggu

SEQ ID NO: 1948385 - RNA, 19 nt, Artificial Sequence
  Description of Artificial Sequence: Synthetic oligonucleotide
  Antisense strand to SEQ ID NO: 1948384
accaucacccauuuccuac

SEQ ID NO: 1948386 - RNA, 19 nt, Artificial Sequence
  Description of Artificial Sequence: Synthetic oligonucleotide
  Sense strand starting at position 473 of SEQ ID NO: 1880184
ggauuuauguuagaagacu

SEQ ID NO: 1948387 - RNA, 19 nt, Artificial Sequence
  Description of Artificial Sequence: Synthetic oligonucleotide
  Antisense strand to SEQ ID NO: 1948386
agucuucuaacauaaaucc

SEQ ID NO: 1948388 - RNA, 19 nt, Artificial Sequence
  Description of Artificial Sequence: Synthetic oligonucleotide
  Sense strand starting at position 481 of SEQ ID NO: 1880184
guuagaagacugcaaguca

SEQ ID NO: 1948389 - RNA, 19 nt, Artificial Sequence
  Description of Artificial Sequence: Synthetic oligonucleotide
  Antisense strand to SEQ ID NO: 1948388
ugacuugcagucuucuaac

SEQ ID NO: 1948390 - RNA, 19 nt, Artificial Sequence
  Description of Artificial Sequence: Synthetic oligonucleotide
  Sense strand starting at position 1064 of SEQ ID NO: 1880184
agagauggcuucccuggau

SEQ ID NO: 1948391 - RNA, 19 nt, Artificial Sequence
  Description of Artificial Sequence: Synthetic oligonucleotide
  Antisense strand to SEQ ID NO: 1948390
auccagggaagccaucucu

SEQ ID NO: 1948392 - RNA, 19 nt, Artificial Sequence
  Description of Artificial Sequence: Synthetic oligonucleotide
  Sense strand starting at position 1149 of SEQ ID NO: 1880184
uuugcaucuagagaagagu

SEQ ID NO: 1948393 - RNA, 19 nt, Artificial Sequence
  Description of Artificial Sequence: Synthetic oligonucleotide
  Antisense strand to SEQ ID NO: 1948392
acucuucucuagaugcaaa

SEQ ID NO: 1948394 - RNA, 19 nt, Artificial Sequence
  Description of Artificial Sequence: Synthetic oligonucleotide
  Sense strand starting at position 1712 of SEQ ID NO: 1880184
aguacuaagcacugaauaa

SEQ ID NO: 1948395 - RNA, 19 nt, Artificial Sequence
  Description of Artificial Sequence: Synthetic oligonucleotide
  Antisense strand to SEQ ID NO: 1948394
uuauucagugcuuaguacu

SEQ ID NO: 1948396 - RNA, 19 nt, Artificial Sequence
  Description of Artificial Sequence: Synthetic oligonucleotide
  Sense strand starting at position 1787 of SEQ ID NO: 1880184
ggcacauaccuuugaaacu

SEQ ID NO: 1948397 - RNA, 19 nt, Artificial Sequence
  Description of Artificial Sequence: Synthetic oligonucleotide
  Antisense strand to SEQ ID NO: 1948396
aguuucaaagguaugugcc

SEQ ID NO: 1948398 - RNA, 19 nt, Artificial Sequence
  Description of Artificial Sequence: Synthetic oligonucleotide
  Sense strand starting at position 2576 of SEQ ID NO: 1880184
agguggguuggaugaaagu

SEQ ID NO: 1948399 - RNA, 19 nt, Artificial Sequence
  Description of Artificial Sequence: Synthetic oligonucleotide
  Antisense strand to SEQ ID NO: 1948398
acuuucauccaacccaccu

SEQ ID NO: 1948400 - RNA, 19 nt, Artificial Sequence
  Description of Artificial Sequence: Synthetic oligonucleotide
  Sense strand starting at position 2577 of SEQ ID NO: 1880184
gguggguuggaugaaaguu

SEQ ID NO: 1948401 - RNA, 19 nt, Artificial Sequence
  Description of Artificial Sequence: Synthetic oligonucleotide
  Antisense strand to SEQ ID NO: 1948400
aacuuucauccaacccacc

SEQ ID NO: 1948402 - RNA, 19 nt, Artificial Sequence
  Description of Artificial Sequence: Synthetic oligonucleotide
  Sense strand starting at position 2589 of SEQ ID NO: 1880184
gaaaguuugacuuguugga

SEQ ID NO: 1948403 - RNA, 19 nt, Artificial Sequence
  Description of Artificial Sequence: Synthetic oligonucleotide
  Antisense strand to SEQ ID NO: 1948402
uccaacaagucaaacuuuc

SEQ ID NO: 1948404 - RNA, 19 nt, Artificial Sequence
  Description of Artificial Sequence: Synthetic oligonucleotide
  Sense strand starting at position 2591 of SEQ ID NO: 1880184
aaguuugacuuguuggaga

SEQ ID NO: 1948405 - RNA, 19 nt, Artificial Sequence
  Description of Artificial Sequence: Synthetic oligonucleotide
  Antisense strand to SEQ ID NO: 1948404
ucuccaacaagucaaacuu

SEQ ID NO: 1948406 - RNA, 19 nt, Artificial Sequence
  Description of Artificial Sequence: Synthetic oligonucleotide
  Sense strand starting at position 2593 of SEQ ID NO: 1880184
guuugacuuguuggagaaa

SEQ ID NO: 1948407 - RNA, 19 nt, Artificial Sequence
  Description of Artificial Sequence: Synthetic oligonucleotide
  Antisense strand to SEQ ID NO: 1948406
uuucuccaacaagucaaac

SEQ ID NO: 1948408 - RNA, 19 nt, Artificial Sequence
  Description of Artificial Sequence: Synthetic oligonucleotide
  Sense strand starting at position 2690 of SEQ ID NO: 1880184
aguucuagccaauggaaga

SEQ ID NO: 1948409 - RNA, 19 nt, Artificial Sequence
  Description of Artificial Sequence: Synthetic oligonucleotide
  Antisense strand to SEQ ID NO: 1948408
ucuuccauuggcuagaacu

SEQ ID NO: 1948410 - RNA, 19 nt, Artificial Sequence
  Description of Artificial Sequence: Synthetic oligonucleotide
  Sense strand starting at position 2741 of SEQ ID NO: 1880184
cuugaucugcaacaaguuu

SEQ ID NO: 1948411 - RNA, 19 nt, Artificial Sequence
  Description of Artificial Sequence: Synthetic oligonucleotide
  Antisense strand to SEQ ID NO: 1948410
aaacuuguugcagaucaag

SEQ ID NO: 1948412 - RNA, 19 nt, Artificial Sequence
  Description of Artificial Sequence: Synthetic oligonucleotide
  Sense strand starting at position 2864 of SEQ ID NO: 1880184
cuacauguaccauggagaa

SEQ ID NO: 1948413 - RNA, 19 nt, Artificial Sequence
  Description of Artificial Sequence: Synthetic oligonucleotide
  Antisense strand to SEQ ID NO: 1948412
uucuccaugguacauguag

SEQ ID NO: 1948414 - RNA, 19 nt, Artificial Sequence
  Description of Artificial Sequence: Synthetic oligonucleotide
  Sense strand starting at position 3059 of SEQ ID NO: 1880184
agacauaauguguggguaa

SEQ ID NO: 1948415 - RNA, 19 nt, Artificial Sequence
  Description of Artificial Sequence: Synthetic oligonucleotide
  Antisense strand to SEQ ID NO: 1948414
uuacccacacauuaugucu

SEQ ID NO: 1948416 - RNA, 19 nt, Artificial Sequence
  Description of Artificial Sequence: Synthetic oligonucleotide
  Sense strand starting at position 3062 of SEQ ID NO: 1880184
cauaauguguggguaaaca

SEQ ID NO: 1948417 - RNA, 19 nt, Artificial Sequence
  Description of Artificial Sequence: Synthetic oligonucleotide
  Antisense strand to SEQ ID NO: 1948416
uguuuacccacacauuaug

SEQ ID NO: 1948418 - RNA, 19 nt, Artificial Sequence
  Description of Artificial Sequence: Synthetic oligonucleotide
  Sense strand starting at position 3070 of SEQ ID NO: 1880184
guggguaaacaccauuacu

SEQ ID NO: 1948419 - RNA, 19 nt, Artificial Sequence
  Description of Artificial Sequence: Synthetic oligonucleotide
  Antisense strand to SEQ ID NO: 1948418
aguaaugguguuuacccac

SEQ ID NO: 1948420 - RNA, 19 nt, Artificial Sequence
  Description of Artificial Sequence: Synthetic oligonucleotide
  Sense strand starting at position 3264 of SEQ ID NO: 1880184
uuaagaaguuucucggaua

SEQ ID NO: 1948421 - RNA, 19 nt, Artificial Sequence
  Description of Artificial Sequence: Synthetic oligonucleotide
  Antisense strand to SEQ ID NO: 1948420
uauccgagaaacuucuuaa

SEQ ID NO: 1948422 - RNA, 19 nt, Artificial Sequence
  Description of Artificial Sequence: Synthetic oligonucleotide
  Sense strand starting at position 3269 of SEQ ID NO: 1880184
aaguuucucggauacccaa

SEQ ID NO: 1948423 - RNA, 19 nt, Artificial Sequence
  Description of Artificial Sequence: Synthetic oligonucleotide
  Antisense strand to SEQ ID NO: 1948422
uuggguauccgagaaacuu

SEQ ID NO: 1948424 - RNA, 19 nt, Artificial Sequence
  Description of Artificial Sequence: Synthetic oligonucleotide
  Sense strand starting at position 3809 of SEQ ID NO: 1880184
gaggcuacacaauguuaaa

SEQ ID NO: 1948425 - RNA, 19 nt, Artificial Sequence
  Description of Artificial Sequence: Synthetic oligonucleotide
  Antisense strand to SEQ ID NO: 1948424
uuuaacauuguguagccuc

SEQ ID NO: 1948426 - RNA, 19 nt, Artificial Sequence
  Description of Artificial Sequence: Synthetic oligonucleotide
  Sense strand starting at position 3877 of SEQ ID NO: 1880184
ucacauaaucgugagauug

SEQ ID NO: 1948427 - RNA, 19 nt, Artificial Sequence
  Description of Artificial Sequence: Synthetic oligonucleotide
  Antisense strand to SEQ ID NO: 1948426
caaucucacgauuauguga

SEQ ID NO: 1948428 - RNA, 19 nt, Artificial Sequence
  Description of Artificial Sequence: Synthetic oligonucleotide
  Sense strand starting at position 3970 of SEQ ID NO: 1880184
ucaagcuugguccaaauca

SEQ ID NO: 1948429 - RNA, 19 nt, Artificial Sequence
  Description of Artificial Sequence: Synthetic oligonucleotide
  Antisense strand to SEQ ID NO: 1948428
ugauuuggaccaagcuuga

SEQ ID NO: 1948430 - RNA, 19 nt, Artificial Sequence
  Description of Artificial Sequence: Synthetic oligonucleotide
  Sense strand starting at position 179 of SEQ ID NO: 1880185
aagguugaauggcuaacaa

SEQ ID NO: 1948431 - RNA, 19 nt, Artificial Sequence
  Description of Artificial Sequence: Synthetic oligonucleotide
  Antisense strand to SEQ ID NO: 1948430
uuguuagccauucaaccuu

SEQ ID NO: 1948432 - RNA, 19 nt, Artificial Sequence
  Description of Artificial Sequence: Synthetic oligonucleotide
  Sense strand starting at position 451 of SEQ ID NO: 1880185
gggagcauucuacauaccu

SEQ ID NO: 1948433 - RNA, 19 nt, Artificial Sequence
  Description of Artificial Sequence: Synthetic oligonucleotide
  Antisense strand to SEQ ID NO: 1948432
agguauguagaaugcuccc

SEQ ID NO: 1948434 - RNA, 19 nt, Artificial Sequence
  Description of Artificial Sequence: Synthetic oligonucleotide
  Sense strand starting at position 588 of SEQ ID NO: 1880185
auaaauguaccgcaguaga

SEQ ID NO: 1948435 - RNA, 19 nt, Artificial Sequence
  Description of Artificial Sequence: Synthetic oligonucleotide
  Antisense strand to SEQ ID NO: 1948434
ucuacugcgguacauuuau

SEQ ID NO: 1948436 - RNA, 19 nt, Artificial Sequence
  Description of Artificial Sequence: Synthetic oligonucleotide
  Sense strand starting at position 684 of SEQ ID NO: 1880185
guugauccggucuagaaau

SEQ ID NO: 1948437 - RNA, 19 nt, Artificial Sequence
  Description of Artificial Sequence: Synthetic oligonucleotide
  Antisense strand to SEQ ID NO: 1948436
auuucuagaccggaucaac

SEQ ID NO: 1948438 - RNA, 19 nt, Artificial Sequence
  Description of Artificial Sequence: Synthetic oligonucleotide
  Sense strand starting at position 686 of SEQ ID NO: 1880185
ugauccggucuagaaauca

SEQ ID NO: 1948439 - RNA, 19 nt, Artificial Sequence
  Description of Artificial Sequence: Synthetic oligonucleotide
  Antisense strand to SEQ ID NO: 1948438
ugauuucuagaccggauca

SEQ ID NO: 1948440 - RNA, 19 nt, Artificial Sequence
  Description of Artificial Sequence: Synthetic oligonucleotide
  Sense strand starting at position 890 of SEQ ID NO: 1880185
uguuucugucaugagaacu

SEQ ID NO: 1948441 - RNA, 19 nt, Artificial Sequence
  Description of Artificial Sequence: Synthetic oligonucleotide
  Antisense strand to SEQ ID NO: 1948440
aguucucaugacagaaaca

SEQ ID NO: 1948442 - RNA, 19 nt, Artificial Sequence
  Description of Artificial Sequence: Synthetic oligonucleotide
  Sense strand starting at position 1516 of SEQ ID NO: 1880185
uggaaagggucaucacucu

SEQ ID NO: 1948443 - RNA, 19 nt, Artificial Sequence
  Description of Artificial Sequence: Synthetic oligonucleotide
  Antisense strand to SEQ ID NO: 1948442
agagugaugacccuuucca

SEQ ID NO: 1948444 - RNA, 19 nt, Artificial Sequence
  Description of Artificial Sequence: Synthetic oligonucleotide
  Sense strand starting at position 1540 of SEQ ID NO: 1880185
guaucacuccguuagagag

SEQ ID NO: 1948445 - RNA, 19 nt, Artificial Sequence
  Description of Artificial Sequence: Synthetic oligonucleotide
  Antisense strand to SEQ ID NO: 1948444
cucucuaacggagugauac

SEQ ID NO: 1948446 - RNA, 19 nt, Artificial Sequence
  Description of Artificial Sequence: Synthetic oligonucleotide
  Sense strand starting at position 1567 of SEQ ID NO: 1880185
guacccacacguuauagaa

SEQ ID NO: 1948447 - RNA, 19 nt, Artificial Sequence
  Description of Artificial Sequence: Synthetic oligonucleotide
  Antisense strand to SEQ ID NO: 1948446
uucuauaacguguggguac

SEQ ID NO: 1948448 - RNA, 19 nt, Artificial Sequence
  Description of Artificial Sequence: Synthetic oligonucleotide
  Sense strand starting at position 1621 of SEQ ID NO: 1880185
guauuucuccaguguccca

SEQ ID NO: 1948449 - RNA, 19 nt, Artificial Sequence
  Description of Artificial Sequence: Synthetic oligonucleotide
  Antisense strand to SEQ ID NO: 1948448
ugggacacuggagaaauac

SEQ ID NO: 1948450 - RNA, 19 nt, Artificial Sequence
  Description of Artificial Sequence: Synthetic oligonucleotide
  Sense strand starting at position 1713 of SEQ ID NO: 1880185
guguuuagcacugaaugaa

SEQ ID NO: 1948451 - RNA, 19 nt, Artificial Sequence
  Description of Artificial Sequence: Synthetic oligonucleotide
  Antisense strand to SEQ ID NO: 1948450
uucauucagugcuaaacac

SEQ ID NO: 1948452 - RNA, 19 nt, Artificial Sequence
  Description of Artificial Sequence: Synthetic oligonucleotide
  Sense strand starting at position 2603 of SEQ ID NO: 1880185
gcugauucucuagagauca

SEQ ID NO: 1948453 - RNA, 19 nt, Artificial Sequence
  Description of Artificial Sequence: Synthetic oligonucleotide
  Antisense strand to SEQ ID NO: 1948452
ugaucucuagagaaucagc

SEQ ID NO: 1948454 - RNA, 19 nt, Artificial Sequence
  Description of Artificial Sequence: Synthetic oligonucleotide
  Sense strand starting at position 2705 of SEQ ID NO: 1880185
ggacaauggugacuccaca

SEQ ID NO: 1948455 - RNA, 19 nt, Artificial Sequence
  Description of Artificial Sequence: Synthetic oligonucleotide
  Antisense strand to SEQ ID NO: 1948454
uguggagucaccauugucc

SEQ ID NO: 1948456 - RNA, 19 nt, Artificial Sequence
  Description of Artificial Sequence: Synthetic oligonucleotide
  Sense strand starting at position 3023 of SEQ ID NO: 1880185
acgugaggcgugaguaaca

SEQ ID NO: 1948457 - RNA, 19 nt, Artificial Sequence
  Description of Artificial Sequence: Synthetic oligonucleotide
  Antisense strand to SEQ ID NO: 1948456
uguuacucacgccucacgu

SEQ ID NO: 1948458 - RNA, 19 nt, Artificial Sequence
  Description of Artificial Sequence: Synthetic oligonucleotide
  Sense strand starting at position 3889 of SEQ ID NO: 1880185
gcuuuaauaguggauuaga

SEQ ID NO: 1948459 - RNA, 19 nt, Artificial Sequence
  Description of Artificial Sequence: Synthetic oligonucleotide
  Antisense strand to SEQ ID NO: 1948458
ucuaauccacuauuaaagc

SEQ ID NO: 1948460 - RNA, 19 nt, Artificial Sequence
  Description of Artificial Sequence: Synthetic oligonucleotide
  Sense strand starting at position 199 of SEQ ID NO: 1880186
caggaaugguucucaauua

SEQ ID NO: 1948461 - RNA, 19 nt, Artificial Sequence
  Description of Artificial Sequence: Synthetic oligonucleotide
  Antisense strand to SEQ ID NO: 1948460
uaauugagaaccauuccug

SEQ ID NO: 1948462 - RNA, 19 nt, Artificial Sequence
  Description of Artificial Sequence: Synthetic oligonucleotide
  Sense strand starting at position 263 of SEQ ID NO: 1880186
ugagucugugaguaggaaa

SEQ ID NO: 1948463 - RNA, 19 nt, Artificial Sequence
  Description of Artificial Sequence: Synthetic oligonucleotide
  Antisense strand to SEQ ID NO: 1948462
uuuccuacucacagacuca

SEQ ID NO: 1948464 - RNA, 19 nt, Artificial Sequence
  Description of Artificial Sequence: Synthetic oligonucleotide
  Sense strand starting at position 274 of SEQ ID NO: 1880186
guaggaaaugggugauggu

SEQ ID NO: 1948465 - RNA, 19 nt, Artificial Sequence
  Description of Artificial Sequence: Synthetic oligonucleotide
  Antisense strand to SEQ ID NO: 1948464
accaucacccauuuccuac

SEQ ID NO: 1948466 - RNA, 19 nt, Artificial Sequence
  Description of Artificial Sequence: Synthetic oligonucleotide
  Sense strand starting at position 473 of SEQ ID NO: 1880186
ggauuuauguuagaagacu

SEQ ID NO: 1948467 - RNA, 19 nt, Artificial Sequence
  Description of Artificial Sequence: Synthetic oligonucleotide
  Antisense strand to SEQ ID NO: 1948466
agucuucuaacauaaaucc

SEQ ID NO: 1948468 - RNA, 19 nt, Artificial Sequence
  Description of Artificial Sequence: Synthetic oligonucleotide
  Sense strand starting at position 481 of SEQ ID NO: 1880186
guuagaagacugcaaguca

SEQ ID NO: 1948469 - RNA, 19 nt, Artificial Sequence
  Description of Artificial Sequence: Synthetic oligonucleotide
  Antisense strand to SEQ ID NO: 1948468
ugacuugcagucuucuaac

SEQ ID NO: 1948470 - RNA, 19 nt, Artificial Sequence
  Description of Artificial Sequence: Synthetic oligonucleotide
  Sense strand starting at position 1064 of SEQ ID NO: 1880186
agagauggcuucccuggau

SEQ ID NO: 1948471 - RNA, 19 nt, Artificial Sequence
  Description of Artificial Sequence: Synthetic oligonucleotide
  Antisense strand to SEQ ID NO: 1948470
auccagggaagccaucucu

SEQ ID NO: 1948472 - RNA, 19 nt, Artificial Sequence
  Description of Artificial Sequence: Synthetic oligonucleotide
  Sense strand starting at position 1149 of SEQ ID NO: 1880186
uuugcaucuagagaagagu

SEQ ID NO: 1948473 - RNA, 19 nt, Artificial Sequence
  Description of Artificial Sequence: Synthetic oligonucleotide
  Antisense strand to SEQ ID NO: 1948472
acucuucucuagaugcaaa

SEQ ID NO: 1948474 - RNA, 19 nt, Artificial Sequence
  Description of Artificial Sequence: Synthetic oligonucleotide
  Sense strand starting at position 1712 of SEQ ID NO: 1880186
aguacuaagcacugaauaa

SEQ ID NO: 1948475 - RNA, 19 nt, Artificial Sequence
  Description of Artificial Sequence: Synthetic oligonucleotide
  Antisense strand to SEQ ID NO: 1948474
uuauucagugcuuaguacu

SEQ ID NO: 1948476 - RNA, 19 nt, Artificial Sequence
  Description of Artificial Sequence: Synthetic oligonucleotide
  Sense strand starting at position 1787 of SEQ ID NO: 1880186
ggcacauaccuuugaaacu

SEQ ID NO: 1948477 - RNA, 19 nt, Artificial Sequence
  Description of Artificial Sequence: Synthetic oligonucleotide
  Antisense strand to SEQ ID NO: 1948476
aguuucaaagguaugugcc

SEQ ID NO: 1948478 - RNA, 19 nt, Artificial Sequence
  Description of Artificial Sequence: Synthetic oligonucleotide
  Sense strand starting at position 2576 of SEQ ID NO: 1880186
agguggguuggaugaaagu

SEQ ID NO: 1948479 - RNA, 19 nt, Artificial Sequence
  Description of Artificial Sequence: Synthetic oligonucleotide
  Antisense strand to SEQ ID NO: 1948478
acuuucauccaacccaccu

SEQ ID NO: 1948480 - RNA, 19 nt, Artificial Sequence
  Description of Artificial Sequence: Synthetic oligonucleotide
  Sense strand starting at position 2577 of SEQ ID NO: 1880186
gguggguuggaugaaaguu

SEQ ID NO: 1948481 - RNA, 19 nt, Artificial Sequence
  Description of Artificial Sequence: Synthetic oligonucleotide
  Antisense strand to SEQ ID NO: 1948480
aacuuucauccaacccacc

SEQ ID NO: 1948482 - RNA, 19 nt, Artificial Sequence
  Description of Artificial Sequence: Synthetic oligonucleotide
  Sense strand starting at position 2589 of SEQ ID NO: 1880186
gaaaguuugacuuguugga

SEQ ID NO: 1948483 - RNA, 19 nt, Artificial Sequence
  Description of Artificial Sequence: Synthetic oligonucleotide
  Antisense strand to SEQ ID NO: 1948482
uccaacaagucaaacuuuc

SEQ ID NO: 1948484 - RNA, 19 nt, Artificial Sequence
  Description of Artificial Sequence: Synthetic oligonucleotide
  Sense strand starting at position 2591 of SEQ ID NO: 1880186
aaguuugacuuguuggaga

SEQ ID NO: 1948485 - RNA, 19 nt, Artificial Sequence
  Description of Artificial Sequence: Synthetic oligonucleotide
  Antisense strand to SEQ ID NO: 1948484
ucuccaacaagucaaacuu

SEQ ID NO: 1948486 - RNA, 19 nt, Artificial Sequence
  Description of Artificial Sequence: Synthetic oligonucleotide
  Sense strand starting at position 2593 of SEQ ID NO: 1880186
guuugacuuguuggagaaa

SEQ ID NO: 1948487 - RNA, 19 nt, Artificial Sequence
  Description of Artificial Sequence: Synthetic oligonucleotide
  Antisense strand to SEQ ID NO: 1948486
uuucuccaacaagucaaac

SEQ ID NO: 1948488 - RNA, 19 nt, Artificial Sequence
  Description of Artificial Sequence: Synthetic oligonucleotide
  Sense strand starting at position 2690 of SEQ ID NO: 1880186
aguucuagccaauggaaga

SEQ ID NO: 1948489 - RNA, 19 nt, Artificial Sequence
  Description of Artificial Sequence: Synthetic oligonucleotide
  Antisense strand to SEQ ID NO: 1948488
ucuuccauuggcuagaacu

SEQ ID NO: 1948490 - RNA, 19 nt, Artificial Sequence
  Description of Artificial Sequence: Synthetic oligonucleotide
  Sense strand starting at position 2741 of SEQ ID NO: 1880186
cuugaucugcaacaaguuu

SEQ ID NO: 1948491 - RNA, 19 nt, Artificial Sequence
  Description of Artificial Sequence: Synthetic oligonucleotide
  Antisense strand to SEQ ID NO: 1948490
aaacuuguugcagaucaag

SEQ ID NO: 1948492 - RNA, 19 nt, Artificial Sequence
  Description of Artificial Sequence: Synthetic oligonucleotide
  Sense strand starting at position 2864 of SEQ ID NO: 1880186
cuacauguaccauggagaa

SEQ ID NO: 1948493 - RNA, 19 nt, Artificial Sequence
  Description of Artificial Sequence: Synthetic oligonucleotide
  Antisense strand to SEQ ID NO: 1948492
uucuccaugguacauguag

SEQ ID NO: 1948494 - RNA, 19 nt, Artificial Sequence
  Description of Artificial Sequence: Synthetic oligonucleotide
  Sense strand starting at position 3059 of SEQ ID NO: 1880186
agacauaauguguggguaa

SEQ ID NO: 1948495 - RNA, 19 nt, Artificial Sequence
  Description of Artificial Sequence: Synthetic oligonucleotide
  Antisense strand to SEQ ID NO: 1948494
uuacccacacauuaugucu

SEQ ID NO: 1948496 - RNA, 19 nt, Artificial Sequence
  Description of Artificial Sequence: Synthetic oligonucleotide
  Sense strand starting at position 3062 of SEQ ID NO: 1880186
cauaauguguggguaaaca

SEQ ID NO: 1948497 - RNA, 19 nt, Artificial Sequence
  Description of Artificial Sequence: Synthetic oligonucleotide
  Antisense strand to SEQ ID NO: 1948496
uguuuacccacacauuaug

SEQ ID NO: 1948498 - RNA, 19 nt, Artificial Sequence
  Description of Artificial Sequence: Synthetic oligonucleotide
  Sense strand starting at position 3070 of SEQ ID NO: 1880186
guggguaaacaccauuacu

SEQ ID NO: 1948499 - RNA, 19 nt, Artificial Sequence
  Description of Artificial Sequence: Synthetic oligonucleotide
  Antisense strand to SEQ ID NO: 1948498
aguaaugguguuuacccac

SEQ ID NO: 1948500 - RNA, 19 nt, Artificial Sequence
  Description of Artificial Sequence: Synthetic oligonucleotide
  Sense strand starting at position 3264 of SEQ ID NO: 1880186
uuaagaaguuucucggaua

SEQ ID NO: 1948501 - RNA, 19 nt, Artificial Sequence
  Description of Artificial Sequence: Synthetic oligonucleotide
  Antisense strand to SEQ ID NO: 1948500
uauccgagaaacuucuuaa

SEQ ID NO: 1948502 - RNA, 19 nt, Artificial Sequence
  Description of Artificial Sequence: Synthetic oligonucleotide
  Sense strand starting at position 3269 of SEQ ID NO: 1880186
aaguuucucggauacccaa

SEQ ID NO: 1948503 - RNA, 19 nt, Artificial Sequence
  Description of Artificial Sequence: Synthetic oligonucleotide
  Antisense strand to SEQ ID NO: 1948502
uuggguauccgagaaacuu

SEQ ID NO: 1948504 - RNA, 19 nt, Artificial Sequence
  Description of Artificial Sequence: Synthetic oligonucleotide
  Sense strand starting at position 3809 of SEQ ID NO: 1880186
gaggcuacacaauguuaaa

SEQ ID NO: 1948505 - RNA, 19 nt, Artificial Sequence
  Description of Artificial Sequence: Synthetic oligonucleotide
  Antisense strand to SEQ ID NO: 1948504
uuuaacauuguguagccuc

SEQ ID NO: 1948506 - RNA, 19 nt, Artificial Sequence
  Description of Artificial Sequence: Synthetic oligonucleotide
  Sense strand starting at position 3877 of SEQ ID NO: 1880186
ucacauaaucgugagauug

SEQ ID NO: 1948507 - RNA, 19 nt, Artificial Sequence
  Description of Artificial Sequence: Synthetic oligonucleotide
  Antisense strand to SEQ ID NO: 1948506
caaucucacgauuauguga

SEQ ID NO: 1948508 - RNA, 19 nt, Artificial Sequence
  Description of Artificial Sequence: Synthetic oligonucleotide
  Sense strand starting at position 3970 of SEQ ID NO: 1880186
ucaagcuugguccaaauca

SEQ ID NO: 1948509 - RNA, 19 nt, Artificial Sequence
  Description of Artificial Sequence: Synthetic oligonucleotide
  Antisense strand to SEQ ID NO: 1948508
ugauuuggaccaagcuuga

SEQ ID NO: 1948510 - RNA, 19 nt, Artificial Sequence
  Description of Artificial Sequence: Synthetic oligonucleotide
  Sense strand starting at position 258 of SEQ ID NO: 1880187
agcugcaacucucugaaua

SEQ ID NO: 1948511 - RNA, 19 nt, Artificial Sequence
  Description of Artificial Sequence: Synthetic oligonucleotide
  Antisense strand to SEQ ID NO: 1948510
uauucagagaguugcagcu

SEQ ID NO: 1948512 - RNA, 19 nt, Artificial Sequence
  Description of Artificial Sequence: Synthetic oligonucleotide
  Sense strand starting at position 350 of SEQ ID NO: 1880187
augugauuacuacaugcau

SEQ ID NO: 1948513 - RNA, 19 nt, Artificial Sequence
  Description of Artificial Sequence: Synthetic oligonucleotide
  Antisense strand to SEQ ID NO: 1948512
augcauguaguaaucacau

SEQ ID NO: 1948514 - RNA, 19 nt, Artificial Sequence
  Description of Artificial Sequence: Synthetic oligonucleotide
  Sense strand starting at position 565 of SEQ ID NO: 1880187
cuuccaagacgucagacaa

SEQ ID NO: 1948515 - RNA, 19 nt, Artificial Sequence
  Description of Artificial Sequence: Synthetic oligonucleotide
  Antisense strand to SEQ ID NO: 1948514
uugucugacgucuuggaag

SEQ ID NO: 1948516 - RNA, 19 nt, Artificial Sequence
  Description of Artificial Sequence: Synthetic oligonucleotide
  Sense strand starting at position 591 of SEQ ID NO: 1880187
uguagauaaugccugaauu

SEQ ID NO: 1948517 - RNA, 19 nt, Artificial Sequence
  Description of Artificial Sequence: Synthetic oligonucleotide
  Antisense strand to SEQ ID NO: 1948516
aauucaggcauuaucuaca

SEQ ID NO: 1948518 - RNA, 19 nt, Artificial Sequence
  Description of Artificial Sequence: Synthetic oligonucleotide
  Sense strand starting at position 592 of SEQ ID NO: 1880187
guagauaaugccugaauug

SEQ ID NO: 1948519 - RNA, 19 nt, Artificial Sequence
  Description of Artificial Sequence: Synthetic oligonucleotide
  Antisense strand to SEQ ID NO: 1948518
caauucaggcauuaucuac

SEQ ID NO: 1948520 - RNA, 19 nt, Artificial Sequence
  Description of Artificial Sequence: Synthetic oligonucleotide
  Sense strand starting at position 679 of SEQ ID NO: 1880187
gauagaggccacuguagau

SEQ ID NO: 1948521 - RNA, 19 nt, Artificial Sequence
  Description of Artificial Sequence: Synthetic oligonucleotide
  Antisense strand to SEQ ID NO: 1948520
aucuacaguggccucuauc

SEQ ID NO: 1948522 - RNA, 19 nt, Artificial Sequence
  Description of Artificial Sequence: Synthetic oligonucleotide
  Sense strand starting at position 737 of SEQ ID NO: 1880187
aguagucuagcugaaggaa

SEQ ID NO: 1948523 - RNA, 19 nt, Artificial Sequence
  Description of Artificial Sequence: Synthetic oligonucleotide
  Antisense strand to SEQ ID NO: 1948522
uuccuucagcuagacuacu

SEQ ID NO: 1948524 - RNA, 19 nt, Artificial Sequence
  Description of Artificial Sequence: Synthetic oligonucleotide
  Sense strand starting at position 909 of SEQ ID NO: 1880187
accucuuuaccaggaugaa

SEQ ID NO: 1948525 - RNA, 19 nt, Artificial Sequence
  Description of Artificial Sequence: Synthetic oligonucleotide
  Antisense strand to SEQ ID NO: 1948524
uucauccugguaaagaggu

SEQ ID NO: 1948526 - RNA, 19 nt, Artificial Sequence
  Description of Artificial Sequence: Synthetic oligonucleotide
  Sense strand starting at position 1039 of SEQ ID NO: 1880187
ccuuuacacuguguccaaa

SEQ ID NO: 1948527 - RNA, 19 nt, Artificial Sequence
  Description of Artificial Sequence: Synthetic oligonucleotide
  Antisense strand to SEQ ID NO: 1948526
uuuggacacaguguaaagg

SEQ ID NO: 1948528 - RNA, 19 nt, Artificial Sequence
  Description of Artificial Sequence: Synthetic oligonucleotide
  Sense strand starting at position 1049 of SEQ ID NO: 1880187
guguccaaagcauagaaau

SEQ ID NO: 1948529 - RNA, 19 nt, Artificial Sequence
  Description of Artificial Sequence: Synthetic oligonucleotide
  Antisense strand to SEQ ID NO: 1948528
auuucuaugcuuuggacac

SEQ ID NO: 1948530 - RNA, 19 nt, Artificial Sequence
  Description of Artificial Sequence: Synthetic oligonucleotide
  Sense strand starting at position 1204 of SEQ ID NO: 1880187
ugggacucauucuugcaaa

SEQ ID NO: 1948531 - RNA, 19 nt, Artificial Sequence
  Description of Artificial Sequence: Synthetic oligonucleotide
  Antisense strand to SEQ ID NO: 1948530
uuugcaagaaugaguccca

SEQ ID NO: 1948532 - RNA, 19 nt, Artificial Sequence
  Description of Artificial Sequence: Synthetic oligonucleotide
  Sense strand starting at position 1251 of SEQ ID NO: 1880187
cgcagacccagugaucaaa

SEQ ID NO: 1948533 - RNA, 19 nt, Artificial Sequence
  Description of Artificial Sequence: Synthetic oligonucleotide
  Antisense strand to SEQ ID NO: 1948532
uuugaucacugggucugcg

SEQ ID NO: 1948534 - RNA, 19 nt, Artificial Sequence
  Description of Artificial Sequence: Synthetic oligonucleotide
  Sense strand starting at position 1279 of SEQ ID NO: 1880187
cuguguacaugucugagau

SEQ ID NO: 1948535 - RNA, 19 nt, Artificial Sequence
  Description of Artificial Sequence: Synthetic oligonucleotide
  Antisense strand to SEQ ID NO: 1948534
aucucagacauguacacag

SEQ ID NO: 1948536 - RNA, 19 nt, Artificial Sequence
  Description of Artificial Sequence: Synthetic oligonucleotide
  Sense strand starting at position 1280 of SEQ ID NO: 1880187
uguguacaugucugagaua

SEQ ID NO: 1948537 - RNA, 19 nt, Artificial Sequence
  Description of Artificial Sequence: Synthetic oligonucleotide
  Antisense strand to SEQ ID NO: 1948536
uaucucagacauguacaca

SEQ ID NO: 1948538 - RNA, 19 nt, Artificial Sequence
  Description of Artificial Sequence: Synthetic oligonucleotide
  Sense strand starting at position 1321 of SEQ ID NO: 1880187
acacauaugcuaugaagag

SEQ ID NO: 1948539 - RNA, 19 nt, Artificial Sequence
  Description of Artificial Sequence: Synthetic oligonucleotide
  Antisense strand to SEQ ID NO: 1948538
cucuucauagcauaugugu

SEQ ID NO: 1948540 - RNA, 19 nt, Artificial Sequence
  Description of Artificial Sequence: Synthetic oligonucleotide
  Sense strand starting at position 1339 of SEQ ID NO: 1880187
gcuuuccucccagauggua

SEQ ID NO: 1948541 - RNA, 19 nt, Artificial Sequence
  Description of Artificial Sequence: Synthetic oligonucleotide
  Antisense strand to SEQ ID NO: 1948540
uaccaucugggaggaaagc

SEQ ID NO: 1948542 - RNA, 19 nt, Artificial Sequence
  Description of Artificial Sequence: Synthetic oligonucleotide
  Sense strand starting at position 1368 of SEQ ID NO: 1880187
ugaaguuuauuaucuagca

SEQ ID NO: 1948543 - RNA, 19 nt, Artificial Sequence
  Description of Artificial Sequence: Synthetic oligonucleotide
  Antisense strand to SEQ ID NO: 1948542
ugcuagauaauaaacuuca

SEQ ID NO: 1948544 - RNA, 19 nt, Artificial Sequence
  Description of Artificial Sequence: Synthetic oligonucleotide
  Sense strand starting at position 1487 of SEQ ID NO: 1880187
ugaagucucccacacuuga

SEQ ID NO: 1948545 - RNA, 19 nt, Artificial Sequence
  Description of Artificial Sequence: Synthetic oligonucleotide
  Antisense strand to SEQ ID NO: 1948544
ucaagugugggagacuuca

SEQ ID NO: 1948546 - RNA, 19 nt, Artificial Sequence
  Description of Artificial Sequence: Synthetic oligonucleotide
  Sense strand starting at position 1542 of SEQ ID NO: 1880187
uagcucauguugucaagaa

SEQ ID NO: 1948547 - RNA, 19 nt, Artificial Sequence
  Description of Artificial Sequence: Synthetic oligonucleotide
  Antisense strand to SEQ ID NO: 1948546
uucuugacaacaugagcua

SEQ ID NO: 1948548 - RNA, 19 nt, Artificial Sequence
  Description of Artificial Sequence: Synthetic oligonucleotide
  Sense strand starting at position 1546 of SEQ ID NO: 1880187
ucauguugucaagaaacac

SEQ ID NO: 1948549 - RNA, 19 nt, Artificial Sequence
  Description of Artificial Sequence: Synthetic oligonucleotide
  Antisense strand to SEQ ID NO: 1948548
guguuucuugacaacauga

SEQ ID NO: 1948550 - RNA, 19 nt, Artificial Sequence
  Description of Artificial Sequence: Synthetic oligonucleotide
  Sense strand starting at position 1820 of SEQ ID NO: 1880187
gggaaucguuugguacuaa

SEQ ID NO: 1948551 - RNA, 19 nt, Artificial Sequence
  Description of Artificial Sequence: Synthetic oligonucleotide
  Antisense strand to SEQ ID NO: 1948550
uuaguaccaaacgauuccc

SEQ ID NO: 1948552 - RNA, 19 nt, Artificial Sequence
  Description of Artificial Sequence: Synthetic oligonucleotide
  Sense strand starting at position 1999 of SEQ ID NO: 1880187
agcagcucaucucugaauu

SEQ ID NO: 1948553 - RNA, 19 nt, Artificial Sequence
  Description of Artificial Sequence: Synthetic oligonucleotide
  Antisense strand to SEQ ID NO: 1948552
aauucagagaugagcugcu

SEQ ID NO: 1948554 - RNA, 19 nt, Artificial Sequence
  Description of Artificial Sequence: Synthetic oligonucleotide
  Sense strand starting at position 2090 of SEQ ID NO: 1880187
uuagucauccagcacauca

SEQ ID NO: 1948555 - RNA, 19 nt, Artificial Sequence
  Description of Artificial Sequence: Synthetic oligonucleotide
  Antisense strand to SEQ ID NO: 1948554
ugaugugcuggaugacuaa

SEQ ID NO: 1948556 - RNA, 19 nt, Artificial Sequence
  Description of Artificial Sequence: Synthetic oligonucleotide
  Sense strand starting at position 2210 of SEQ ID NO: 1880187
aagugagaaugcucuuggu

SEQ ID NO: 1948557 - RNA, 19 nt, Artificial Sequence
  Description of Artificial Sequence: Synthetic oligonucleotide
  Antisense strand to SEQ ID NO: 1948556
accaagagcauucucacuu

SEQ ID NO: 1948558 - RNA, 19 nt, Artificial Sequence
  Description of Artificial Sequence: Synthetic oligonucleotide
  Sense strand starting at position 2322 of SEQ ID NO: 1880187
uugguuaaaucaccaaaug

SEQ ID NO: 1948559 - RNA, 19 nt, Artificial Sequence
  Description of Artificial Sequence: Synthetic oligonucleotide
  Antisense strand to SEQ ID NO: 1948558
cauuuggugauuuaaccaa

SEQ ID NO: 1948560 - RNA, 19 nt, Artificial Sequence
  Description of Artificial Sequence: Synthetic oligonucleotide
  Sense strand starting at position 2593 of SEQ ID NO: 1880187
agaggauggaguugcucau

SEQ ID NO: 1948561 - RNA, 19 nt, Artificial Sequence
  Description of Artificial Sequence: Synthetic oligonucleotide
  Antisense strand to SEQ ID NO: 1948560
augagcaacuccauccucu

SEQ ID NO: 1948562 - RNA, 19 nt, Artificial Sequence
  Description of Artificial Sequence: Synthetic oligonucleotide
  Sense strand starting at position 2818 of SEQ ID NO: 1880187
cgguuaucuccacagucca

SEQ ID NO: 1948563 - RNA, 19 nt, Artificial Sequence
  Description of Artificial Sequence: Synthetic oligonucleotide
  Antisense strand to SEQ ID NO: 1948562
uggacuguggagauaaccg

SEQ ID NO: 1948564 - RNA, 19 nt, Artificial Sequence
  Description of Artificial Sequence: Synthetic oligonucleotide
  Sense strand starting at position 2885 of SEQ ID NO: 1880187
auaguauucuuaccuguga

SEQ ID NO: 1948565 - RNA, 19 nt, Artificial Sequence
  Description of Artificial Sequence: Synthetic oligonucleotide
  Antisense strand to SEQ ID NO: 1948564
ucacagguaagaauacuau

SEQ ID NO: 1948566 - RNA, 19 nt, Artificial Sequence
  Description of Artificial Sequence: Synthetic oligonucleotide
  Sense strand starting at position 2889 of SEQ ID NO: 1880187
uauucuuaccugugaggga

SEQ ID NO: 1948567 - RNA, 19 nt, Artificial Sequence
  Description of Artificial Sequence: Synthetic oligonucleotide
  Antisense strand to SEQ ID NO: 1948566
ucccucacagguaagaaua

SEQ ID NO: 1948568 - RNA, 19 nt, Artificial Sequence
  Description of Artificial Sequence: Synthetic oligonucleotide
  Sense strand starting at position 2893 of SEQ ID NO: 1880187
cuuaccugugagggauaga

SEQ ID NO: 1948569 - RNA, 19 nt, Artificial Sequence
  Description of Artificial Sequence: Synthetic oligonucleotide
  Antisense strand to SEQ ID NO: 1948568
ucuaucccucacagguaag

SEQ ID NO: 1948570 - RNA, 19 nt, Artificial Sequence
  Description of Artificial Sequence: Synthetic oligonucleotide
  Sense strand starting at position 3167 of SEQ ID NO: 1880187
augucauaaccguaaggac

SEQ ID NO: 1948571 - RNA, 19 nt, Artificial Sequence
  Description of Artificial Sequence: Synthetic oligonucleotide
  Antisense strand to SEQ ID NO: 1948570
guccuuacgguuaugacau

SEQ ID NO: 1948572 - RNA, 19 nt, Artificial Sequence
  Description of Artificial Sequence: Synthetic oligonucleotide
  Sense strand starting at position 3334 of SEQ ID NO: 1880187
gcuacauguccacacuuga

SEQ ID NO: 1948573 - RNA, 19 nt, Artificial Sequence
  Description of Artificial Sequence: Synthetic oligonucleotide
  Antisense strand to SEQ ID NO: 1948572
ucaaguguggacauguagc

SEQ ID NO: 1948574 - RNA, 19 nt, Artificial Sequence
  Description of Artificial Sequence: Synthetic oligonucleotide
  Sense strand starting at position 3350 of SEQ ID NO: 1880187
ugacuuaugcagcaaucaa

SEQ ID NO: 1948575 - RNA, 19 nt, Artificial Sequence
  Description of Artificial Sequence: Synthetic oligonucleotide
  Antisense strand to SEQ ID NO: 1948574
uugauugcugcauaaguca

SEQ ID NO: 1948576 - RNA, 19 nt, Artificial Sequence
  Description of Artificial Sequence: Synthetic oligonucleotide
  Sense strand starting at position 3357 of SEQ ID NO: 1880187
ugcagcaaucaaugagaau

SEQ ID NO: 1948577 - RNA, 19 nt, Artificial Sequence
  Description of Artificial Sequence: Synthetic oligonucleotide
  Antisense strand to SEQ ID NO: 1948576
auucucauugauugcugca

SEQ ID NO: 1948578 - RNA, 19 nt, Artificial Sequence
  Description of Artificial Sequence: Synthetic oligonucleotide
  Sense strand starting at position 3432 of SEQ ID NO: 1880187
caaugaguggguugucauc

SEQ ID NO: 1948579 - RNA, 19 nt, Artificial Sequence
  Description of Artificial Sequence: Synthetic oligonucleotide
  Antisense strand to SEQ ID NO: 1948578
gaugacaacccacucauug

SEQ ID NO: 1948580 - RNA, 19 nt, Artificial Sequence
  Description of Artificial Sequence: Synthetic oligonucleotide
  Sense strand starting at position 3434 of SEQ ID NO: 1880187
augaguggguugucaucaa

SEQ ID NO: 1948581 - RNA, 19 nt, Artificial Sequence
  Description of Artificial Sequence: Synthetic oligonucleotide
  Antisense strand to SEQ ID NO: 1948580
uugaugacaacccacucau

SEQ ID NO: 1948582 - RNA, 19 nt, Artificial Sequence
  Description of Artificial Sequence: Synthetic oligonucleotide
  Sense strand starting at position 3438 of SEQ ID NO: 1880187
guggguugucaucaaccuu

SEQ ID NO: 1948583 - RNA, 19 nt, Artificial Sequence
  Description of Artificial Sequence: Synthetic oligonucleotide
  Antisense strand to SEQ ID NO: 1948582
aagguugaugacaacccac

SEQ ID NO: 1948584 - RNA, 19 nt, Artificial Sequence
  Description of Artificial Sequence: Synthetic oligonucleotide
  Sense strand starting at position 3457 of SEQ ID NO: 1880187
gcugcacaugcuuaacaau

SEQ ID NO: 1948585 - RNA, 19 nt, Artificial Sequence
  Description of Artificial Sequence: Synthetic oligonucleotide
  Antisense strand to SEQ ID NO: 1948584
auuguuaagcaugugcagc

SEQ ID NO: 1948586 - RNA, 19 nt, Artificial Sequence
  Description of Artificial Sequence: Synthetic oligonucleotide
  Sense strand starting at position 3916 of SEQ ID NO: 1880187
agccaagauucuccaguuu

SEQ ID NO: 1948587 - RNA, 19 nt, Artificial Sequence
  Description of Artificial Sequence: Synthetic oligonucleotide
  Antisense strand to SEQ ID NO: 1948586
aaacuggagaaucuuggcu

SEQ ID NO: 1948588 - RNA, 19 nt, Artificial Sequence
  Description of Artificial Sequence: Synthetic oligonucleotide
  Sense strand starting at position 3941 of SEQ ID NO: 1880187
gcauauaaaucacuuggua

SEQ ID NO: 1948589 - RNA, 19 nt, Artificial Sequence
  Description of Artificial Sequence: Synthetic oligonucleotide
  Antisense strand to SEQ ID NO: 1948588
uaccaagugauuuauaugc

SEQ ID NO: 1948590 - RNA, 19 nt, Artificial Sequence
  Description of Artificial Sequence: Synthetic oligonucleotide
  Sense strand starting at position 49 of SEQ ID NO: 1880188
guggcuuaugccugaaacc

SEQ ID NO: 1948591 - RNA, 19 nt, Artificial Sequence
  Description of Artificial Sequence: Synthetic oligonucleotide
  Antisense strand to SEQ ID NO: 1948590
gguuucaggcauaagccac

SEQ ID NO: 1948592 - RNA, 19 nt, Artificial Sequence
  Description of Artificial Sequence: Synthetic oligonucleotide
  Sense strand starting at position 50 of SEQ ID NO: 1880188
uggcuuaugccugaaaccu

SEQ ID NO: 1948593 - RNA, 19 nt, Artificial Sequence
  Description of Artificial Sequence: Synthetic oligonucleotide
  Antisense strand to SEQ ID NO: 1948592
agguuucaggcauaagcca

SEQ ID NO: 1948594 - RNA, 19 nt, Artificial Sequence
  Description of Artificial Sequence: Synthetic oligonucleotide
  Sense strand starting at position 488 of SEQ ID NO: 1880188
gugccuauugucucagcua

SEQ ID NO: 1948595 - RNA, 19 nt, Artificial Sequence
  Description of Artificial Sequence: Synthetic oligonucleotide
  Antisense strand to SEQ ID NO: 1948594
uagcugagacaauaggcac

SEQ ID NO: 1948596 - RNA, 19 nt, Artificial Sequence
  Description of Artificial Sequence: Synthetic oligonucleotide
  Sense strand starting at position 660 of SEQ ID NO: 1880188
aaagauaaguguuugacag

SEQ ID NO: 1948597 - RNA, 19 nt, Artificial Sequence
  Description of Artificial Sequence: Synthetic oligonucleotide
  Antisense strand to SEQ ID NO: 1948596
cugucaaacacuuaucuuu

SEQ ID NO: 1948598 - RNA, 19 nt, Artificial Sequence
  Description of Artificial Sequence: Synthetic oligonucleotide
  Sense strand starting at position 667 of SEQ ID NO: 1880188
aguguuugacagggcaagu

SEQ ID NO: 1948599 - RNA, 19 nt, Artificial Sequence
  Description of Artificial Sequence: Synthetic oligonucleotide
  Antisense strand to SEQ ID NO: 1948598
acuugcccugucaaacacu

SEQ ID NO: 1948600 - RNA, 19 nt, Artificial Sequence
  Description of Artificial Sequence: Synthetic oligonucleotide
  Sense strand starting at position 678 of SEQ ID NO: 1880188
gggcaaguuuaagucaaag

SEQ ID NO: 1948601 - RNA, 19 nt, Artificial Sequence
  Description of Artificial Sequence: Synthetic oligonucleotide
  Antisense strand to SEQ ID NO: 1948600
cuuugacuuaaacuugccc

SEQ ID NO: 1948602 - RNA, 19 nt, Artificial Sequence
  Description of Artificial Sequence: Synthetic oligonucleotide
  Sense strand starting at position 721 of SEQ ID NO: 1880188
ggcagaaaucacuguuaau

SEQ ID NO: 1948603 - RNA, 19 nt, Artificial Sequence
  Description of Artificial Sequence: Synthetic oligonucleotide
  Antisense strand to SEQ ID NO: 1948602
auuaacagugauuucugcc

SEQ ID NO: 1948604 - RNA, 19 nt, Artificial Sequence
  Description of Artificial Sequence: Synthetic oligonucleotide
  Sense strand starting at position 776 of SEQ ID NO: 1880188
agcaauauagccugagauu

SEQ ID NO: 1948605 - RNA, 19 nt, Artificial Sequence
  Description of Artificial Sequence: Synthetic oligonucleotide
  Antisense strand to SEQ ID NO: 1948604
aaucucaggcuauauugcu

SEQ ID NO: 1948606 - RNA, 19 nt, Artificial Sequence
  Description of Artificial Sequence: Synthetic oligonucleotide
  Sense strand starting at position 777 of SEQ ID NO: 1880188
gcaauauagccugagauuc

SEQ ID NO: 1948607 - RNA, 19 nt, Artificial Sequence
  Description of Artificial Sequence: Synthetic oligonucleotide
  Antisense strand to SEQ ID NO: 1948606
gaaucucaggcuauauugc

SEQ ID NO: 1948608 - RNA, 19 nt, Artificial Sequence
  Description of Artificial Sequence: Synthetic oligonucleotide
  Sense strand starting at position 802 of SEQ ID NO: 1880188
ugacucagccagcacaaua

SEQ ID NO: 1948609 - RNA, 19 nt, Artificial Sequence
  Description of Artificial Sequence: Synthetic oligonucleotide
  Antisense strand to SEQ ID NO: 1948608
uauugugcuggcugaguca

SEQ ID NO: 1948610 - RNA, 19 nt, Artificial Sequence
  Description of Artificial Sequence: Synthetic oligonucleotide
  Sense strand starting at position 890 of SEQ ID NO: 1880188
ugagaaauguucccacuau

SEQ ID NO: 1948611 - RNA, 19 nt, Artificial Sequence
  Description of Artificial Sequence: Synthetic oligonucleotide
  Antisense strand to SEQ ID NO: 1948610
auagugggaacauuucuca

SEQ ID NO: 1948612 - RNA, 19 nt, Artificial Sequence
  Description of Artificial Sequence: Synthetic oligonucleotide
  Sense strand starting at position 1096 of SEQ ID NO: 1880188
acauaaaugugggaacaaa

SEQ ID NO: 1948613 - RNA, 19 nt, Artificial Sequence
  Description of Artificial Sequence: Synthetic oligonucleotide
  Antisense strand to SEQ ID NO: 1948612
uuuguucccacauuuaugu

SEQ ID NO: 1948614 - RNA, 19 nt, Artificial Sequence
  Description of Artificial Sequence: Synthetic oligonucleotide
  Sense strand starting at position 1278 of SEQ ID NO: 1880188
guaggugauccuuagcaca

SEQ ID NO: 1948615 - RNA, 19 nt, Artificial Sequence
  Description of Artificial Sequence: Synthetic oligonucleotide
  Antisense strand to SEQ ID NO: 1948614
ugugcuaaggaucaccuac

SEQ ID NO: 1948616 - RNA, 19 nt, Artificial Sequence
  Description of Artificial Sequence: Synthetic oligonucleotide
  Sense strand starting at position 1280 of SEQ ID NO: 1880188
aggugauccuuagcacaac

SEQ ID NO: 1948617 - RNA, 19 nt, Artificial Sequence
  Description of Artificial Sequence: Synthetic oligonucleotide
  Antisense strand to SEQ ID NO: 1948616
guugugcuaaggaucaccu

SEQ ID NO: 1948618 - RNA, 19 nt, Artificial Sequence
  Description of Artificial Sequence: Synthetic oligonucleotide
  Sense strand starting at position 1322 of SEQ ID NO: 1880188
ucuccacccgcuuaagaau

SEQ ID NO: 1948619 - RNA, 19 nt, Artificial Sequence
  Description of Artificial Sequence: Synthetic oligonucleotide
  Antisense strand to SEQ ID NO: 1948618
auucuuaagcggguggaga

SEQ ID NO: 1948620 - RNA, 19 nt, Artificial Sequence
  Description of Artificial Sequence: Synthetic oligonucleotide
  Sense strand starting at position 1333 of SEQ ID NO: 1880188
uuaagaaucucuguggguu

SEQ ID NO: 1948621 - RNA, 19 nt, Artificial Sequence
  Description of Artificial Sequence: Synthetic oligonucleotide
  Antisense strand to SEQ ID NO: 1948620
aacccacagagauucuuaa

SEQ ID NO: 1948622 - RNA, 19 nt, Artificial Sequence
  Description of Artificial Sequence: Synthetic oligonucleotide
  Sense strand starting at position 1334 of SEQ ID NO: 1880188
uaagaaucucuguggguuc

SEQ ID NO: 1948623 - RNA, 19 nt, Artificial Sequence
  Description of Artificial Sequence: Synthetic oligonucleotide
  Antisense strand to SEQ ID NO: 1948622
gaacccacagagauucuua

SEQ ID NO: 1948624 - RNA, 19 nt, Artificial Sequence
  Description of Artificial Sequence: Synthetic oligonucleotide
  Sense strand starting at position 1378 of SEQ ID NO: 1880188
ccagcugucuccucagaca

SEQ ID NO: 1948625 - RNA, 19 nt, Artificial Sequence
  Description of Artificial Sequence: Synthetic oligonucleotide
  Antisense strand to SEQ ID NO: 1948624
ugucugaggagacagcugg

SEQ ID NO: 1948626 - RNA, 19 nt, Artificial Sequence
  Description of Artificial Sequence: Synthetic oligonucleotide
  Sense strand starting at position 1588 of SEQ ID NO: 1880188
gcagccuguuaucagugaa

SEQ ID NO: 1948627 - RNA, 19 nt, Artificial Sequence
  Description of Artificial Sequence: Synthetic oligonucleotide
  Antisense strand to SEQ ID NO: 1948626
uucacugauaacaggcugc

SEQ ID NO: 1948628 - RNA, 19 nt, Artificial Sequence
  Description of Artificial Sequence: Synthetic oligonucleotide
  Sense strand starting at position 1591 of SEQ ID NO: 1880188
gccuguuaucagugaaccc

SEQ ID NO: 1948629 - RNA, 19 nt, Artificial Sequence
  Description of Artificial Sequence: Synthetic oligonucleotide
  Antisense strand to SEQ ID NO: 1948628
ggguucacugauaacaggc

SEQ ID NO: 1948630 - RNA, 19 nt, Artificial Sequence
  Description of Artificial Sequence: Synthetic oligonucleotide
  Sense strand starting at position 1893 of SEQ ID NO: 1880188
gggagcuuucucgaacccu

SEQ ID NO: 1948631 - RNA, 19 nt, Artificial Sequence
  Description of Artificial Sequence: Synthetic oligonucleotide
  Antisense strand to SEQ ID NO: 1948630
aggguucgagaaagcuccc

SEQ ID NO: 1948632 - RNA, 19 nt, Artificial Sequence
  Description of Artificial Sequence: Synthetic oligonucleotide
  Sense strand starting at position 2239 of SEQ ID NO: 1880188
ggagaaauuuggcaucaag

SEQ ID NO: 1948633 - RNA, 19 nt, Artificial Sequence
  Description of Artificial Sequence: Synthetic oligonucleotide
  Antisense strand to SEQ ID NO: 1948632
cuugaugccaaauuucucc

SEQ ID NO: 1948634 - RNA, 19 nt, Artificial Sequence
  Description of Artificial Sequence: Synthetic oligonucleotide
  Sense strand starting at position 2268 of SEQ ID NO: 1880188
gacaaauggcccuggcaca

SEQ ID NO: 1948635 - RNA, 19 nt, Artificial Sequence
  Description of Artificial Sequence: Synthetic oligonucleotide
  Antisense strand to SEQ ID NO: 1948634
ugugccagggccauuuguc

SEQ ID NO: 1948636 - RNA, 19 nt, Artificial Sequence
  Description of Artificial Sequence: Synthetic oligonucleotide
  Sense strand starting at position 2330 of SEQ ID NO: 1880188
agggaacucucagccuuua

SEQ ID NO: 1948637 - RNA, 19 nt, Artificial Sequence
  Description of Artificial Sequence: Synthetic oligonucleotide
  Antisense strand to SEQ ID NO: 1948636
uaaaggcugagaguucccu

SEQ ID NO: 1948638 - RNA, 19 nt, Artificial Sequence
  Description of Artificial Sequence: Synthetic oligonucleotide
  Sense strand starting at position 2359 of SEQ ID NO: 1880188
ggcaucaguucgucuucca

SEQ ID NO: 1948639 - RNA, 19 nt, Artificial Sequence
  Description of Artificial Sequence: Synthetic oligonucleotide
  Antisense strand to SEQ ID NO: 1948638
uggaagacgaacugaugcc

SEQ ID NO: 1948640 - RNA, 19 nt, Artificial Sequence
  Description of Artificial Sequence: Synthetic oligonucleotide
  Sense strand starting at position 2362 of SEQ ID NO: 1880188
aucaguucgucuuccacaa

SEQ ID NO: 1948641 - RNA, 19 nt, Artificial Sequence
  Description of Artificial Sequence: Synthetic oligonucleotide
  Antisense strand to SEQ ID NO: 1948640
uuguggaagacgaacugau

SEQ ID NO: 1948642 - RNA, 19 nt, Artificial Sequence
  Description of Artificial Sequence: Synthetic oligonucleotide
  Sense strand starting at position 2390 of SEQ ID NO: 1880188
ccacguuucuaguuauguu

SEQ ID NO: 1948643 - RNA, 19 nt, Artificial Sequence
  Description of Artificial Sequence: Synthetic oligonucleotide
  Antisense strand to SEQ ID NO: 1948642
aacauaacuagaaacgugg

SEQ ID NO: 1948644 - RNA, 19 nt, Artificial Sequence
  Description of Artificial Sequence: Synthetic oligonucleotide
  Sense strand starting at position 2397 of SEQ ID NO: 1880188
ucuaguuauguuuggcaac

SEQ ID NO: 1948645 - RNA, 19 nt, Artificial Sequence
  Description of Artificial Sequence: Synthetic oligonucleotide
  Antisense strand to SEQ ID NO: 1948644
guugccaaacauaacuaga

SEQ ID NO: 1948646 - RNA, 19 nt, Artificial Sequence
  Description of Artificial Sequence: Synthetic oligonucleotide
  Sense strand starting at position 2840 of SEQ ID NO: 1880188
uggucuaagccacagacua

SEQ ID NO: 1948647 - RNA, 19 nt, Artificial Sequence
  Description of Artificial Sequence: Synthetic oligonucleotide
  Antisense strand to SEQ ID NO: 1948646
uagucuguggcuuagacca

SEQ ID NO: 1948648 - RNA, 19 nt, Artificial Sequence
  Description of Artificial Sequence: Synthetic oligonucleotide
  Sense strand starting at position 2848 of SEQ ID NO: 1880188
gccacagacuacuugcuaa

SEQ ID NO: 1948649 - RNA, 19 nt, Artificial Sequence
  Description of Artificial Sequence: Synthetic oligonucleotide
  Antisense strand to SEQ ID NO: 1948648
uuagcaaguagucuguggc

SEQ ID NO: 1948650 - RNA, 19 nt, Artificial Sequence
  Description of Artificial Sequence: Synthetic oligonucleotide
  Sense strand starting at position 2890 of SEQ ID NO: 1880188
cugagagucucgcucuguu

SEQ ID NO: 1948651 - RNA, 19 nt, Artificial Sequence
  Description of Artificial Sequence: Synthetic oligonucleotide
  Antisense strand to SEQ ID NO: 1948650
aacagagcgagacucucag

SEQ ID NO: 1948652 - RNA, 19 nt, Artificial Sequence
  Description of Artificial Sequence: Synthetic oligonucleotide
  Sense strand starting at position 3009 of SEQ ID NO: 1880188
ggugaaucuuaagaccguu

SEQ ID NO: 1948653 - RNA, 19 nt, Artificial Sequence
  Description of Artificial Sequence: Synthetic oligonucleotide
  Antisense strand to SEQ ID NO: 1948652
aacggucuuaagauucacc

SEQ ID NO: 1948654 - RNA, 19 nt, Artificial Sequence
  Description of Artificial Sequence: Synthetic oligonucleotide
  Sense strand starting at position 3248 of SEQ ID NO: 1880188
ggcaacagucaguguaacu

SEQ ID NO: 1948655 - RNA, 19 nt, Artificial Sequence
  Description of Artificial Sequence: Synthetic oligonucleotide
  Antisense strand to SEQ ID NO: 1948654
aguuacacugacuguugcc

SEQ ID NO: 1948656 - RNA, 19 nt, Artificial Sequence
  Description of Artificial Sequence: Synthetic oligonucleotide
  Sense strand starting at position 3413 of SEQ ID NO: 1880188
agacuaggcuucugacuau

SEQ ID NO: 1948657 - RNA, 19 nt, Artificial Sequence
  Description of Artificial Sequence: Synthetic oligonucleotide
  Antisense strand to SEQ ID NO: 1948656
auagucagaagccuagucu

SEQ ID NO: 1948658 - RNA, 19 nt, Artificial Sequence
  Description of Artificial Sequence: Synthetic oligonucleotide
  Sense strand starting at position 3472 of SEQ ID NO: 1880188
acaguauccuucucucuga

SEQ ID NO: 1948659 - RNA, 19 nt, Artificial Sequence
  Description of Artificial Sequence: Synthetic oligonucleotide
  Antisense strand to SEQ ID NO: 1948658
ucagagagaaggauacugu

SEQ ID NO: 1948660 - RNA, 19 nt, Artificial Sequence
  Description of Artificial Sequence: Synthetic oligonucleotide
  Sense strand starting at position 3518 of SEQ ID NO: 1880188
gagggagcauucccucuuu

SEQ ID NO: 1948661 - RNA, 19 nt, Artificial Sequence
  Description of Artificial Sequence: Synthetic oligonucleotide
  Antisense strand to SEQ ID NO: 1948660
aaagagggaaugcucccuc

SEQ ID NO: 1948662 - RNA, 19 nt, Artificial Sequence
  Description of Artificial Sequence: Synthetic oligonucleotide
  Sense strand starting at position 3530 of SEQ ID NO: 1880188
ccucuuugguacuuacuua

SEQ ID NO: 1948663 - RNA, 19 nt, Artificial Sequence
  Description of Artificial Sequence: Synthetic oligonucleotide
  Antisense strand to SEQ ID NO: 1948662
uaaguaaguaccaaagagg

SEQ ID NO: 1948664 - RNA, 19 nt, Artificial Sequence
  Description of Artificial Sequence: Synthetic oligonucleotide
  Sense strand starting at position 3616 of SEQ ID NO: 1880188
gcacaacugucacacggaa

SEQ ID NO: 1948665 - RNA, 19 nt, Artificial Sequence
  Description of Artificial Sequence: Synthetic oligonucleotide
  Antisense strand to SEQ ID NO: 1948664
uuccgugugacaguugugc

SEQ ID NO: 1948666 - RNA, 19 nt, Artificial Sequence
  Description of Artificial Sequence: Synthetic oligonucleotide
  Sense strand starting at position 3799 of SEQ ID NO: 1880188
ccgagagaugccugcaugu

SEQ ID NO: 1948667 - RNA, 19 nt, Artificial Sequence
  Description of Artificial Sequence: Synthetic oligonucleotide
  Antisense strand to SEQ ID NO: 1948666
acaugcaggcaucucucgg

SEQ ID NO: 1948668 - RNA, 19 nt, Artificial Sequence
  Description of Artificial Sequence: Synthetic oligonucleotide
  Sense strand starting at position 3904 of SEQ ID NO: 1880188
cgcucagcucuccaagguu

SEQ ID NO: 1948669 - RNA, 19 nt, Artificial Sequence
  Description of Artificial Sequence: Synthetic oligonucleotide
  Antisense strand to SEQ ID NO: 1948668
aaccuuggagagcugagcg

SEQ ID NO: 1948670 - RNA, 19 nt, Artificial Sequence
  Description of Artificial Sequence: Synthetic oligonucleotide
  Sense strand starting at position 597 of SEQ ID NO: 1880189
guggcuuaugccugaaacc

SEQ ID NO: 1948671 - RNA, 19 nt, Artificial Sequence
  Description of Artificial Sequence: Synthetic oligonucleotide
  Antisense strand to SEQ ID NO: 1948670
gguuucaggcauaagccac

SEQ ID NO: 1948672 - RNA, 19 nt, Artificial Sequence
  Description of Artificial Sequence: Synthetic oligonucleotide
  Sense strand starting at position 598 of SEQ ID NO: 1880189
uggcuuaugccugaaaccu

SEQ ID NO: 1948673 - RNA, 19 nt, Artificial Sequence
  Description of Artificial Sequence: Synthetic oligonucleotide
  Antisense strand to SEQ ID NO: 1948672
agguuucaggcauaagcca

SEQ ID NO: 1948674 - RNA, 19 nt, Artificial Sequence
  Description of Artificial Sequence: Synthetic oligonucleotide
  Sense strand starting at position 1036 of SEQ ID NO: 1880189
gugccuauugucucagcua

SEQ ID NO: 1948675 - RNA, 19 nt, Artificial Sequence
  Description of Artificial Sequence: Synthetic oligonucleotide
  Antisense strand to SEQ ID NO: 1948674
uagcugagacaauaggcac

SEQ ID NO: 1948676 - RNA, 19 nt, Artificial Sequence
  Description of Artificial Sequence: Synthetic oligonucleotide
  Sense strand starting at position 1208 of SEQ ID NO: 1880189
aaagauaaguguuugacag

SEQ ID NO: 1948677 - RNA, 19 nt, Artificial Sequence
  Description of Artificial Sequence: Synthetic oligonucleotide
  Antisense strand to SEQ ID NO: 1948676
cugucaaacacuuaucuuu

SEQ ID NO: 1948678 - RNA, 19 nt, Artificial Sequence
  Description of Artificial Sequence: Synthetic oligonucleotide
  Sense strand starting at position 1215 of SEQ ID NO: 1880189
aguguuugacagggcaagu

SEQ ID NO: 1948679 - RNA, 19 nt, Artificial Sequence
  Description of Artificial Sequence: Synthetic oligonucleotide
  Antisense strand to SEQ ID NO: 1948678
acuugcccugucaaacacu

SEQ ID NO: 1948680 - RNA, 19 nt, Artificial Sequence
  Description of Artificial Sequence: Synthetic oligonucleotide
  Sense strand starting at position 1226 of SEQ ID NO: 1880189
gggcaaguuuaagucaaag

SEQ ID NO: 1948681 - RNA, 19 nt, Artificial Sequence
  Description of Artificial Sequence: Synthetic oligonucleotide
  Antisense strand to SEQ ID NO: 1948680
cuuugacuuaaacuugccc

SEQ ID NO: 1948682 - RNA, 19 nt, Artificial Sequence
  Description of Artificial Sequence: Synthetic oligonucleotide
  Sense strand starting at position 1269 of SEQ ID NO: 1880189
ggcagaaaucacuguuaau

SEQ ID NO: 1948683 - RNA, 19 nt, Artificial Sequence
  Description of Artificial Sequence: Synthetic oligonucleotide
  Antisense strand to SEQ ID NO: 1948682
auuaacagugauuucugcc

SEQ ID NO: 1948684 - RNA, 19 nt, Artificial Sequence
  Description of Artificial Sequence: Synthetic oligonucleotide
  Sense strand starting at position 1324 of SEQ ID NO: 1880189
agcaauauagccugagauu

SEQ ID NO: 1948685 - RNA, 19 nt, Artificial Sequence
  Description of Artificial Sequence: Synthetic oligonucleotide
  Antisense strand to SEQ ID NO: 1948684
aaucucaggcuauauugcu

SEQ ID NO: 1948686 - RNA, 19 nt, Artificial Sequence
  Description of Artificial Sequence: Synthetic oligonucleotide
  Sense strand starting at position 1325 of SEQ ID NO: 1880189
gcaauauagccugagauuc

SEQ ID NO: 1948687 - RNA, 19 nt, Artificial Sequence
  Description of Artificial Sequence: Synthetic oligonucleotide
  Antisense strand to SEQ ID NO: 1948686
gaaucucaggcuauauugc

SEQ ID NO: 1948688 - RNA, 19 nt, Artificial Sequence
  Description of Artificial Sequence: Synthetic oligonucleotide
  Sense strand starting at position 1350 of SEQ ID NO: 1880189
ugacucagccagcacaaua

SEQ ID NO: 1948689 - RNA, 19 nt, Artificial Sequence
  Description of Artificial Sequence: Synthetic oligonucleotide
  Antisense strand to SEQ ID NO: 1948688
uauugugcuggcugaguca

SEQ ID NO: 1948690 - RNA, 19 nt, Artificial Sequence
  Description of Artificial Sequence: Synthetic oligonucleotide
  Sense strand starting at position 1438 of SEQ ID NO: 1880189
ugagaaauguucccacuau

SEQ ID NO: 1948691 - RNA, 19 nt, Artificial Sequence
  Description of Artificial Sequence: Synthetic oligonucleotide
  Antisense strand to SEQ ID NO: 1948690
auagugggaacauuucuca

SEQ ID NO: 1948692 - RNA, 19 nt, Artificial Sequence
  Description of Artificial Sequence: Synthetic oligonucleotide
  Sense strand starting at position 1644 of SEQ ID NO: 1880189
acauaaaugugggaacaaa

SEQ ID NO: 1948693 - RNA, 19 nt, Artificial Sequence
  Description of Artificial Sequence: Synthetic oligonucleotide
  Antisense strand to SEQ ID NO: 1948692
uuuguucccacauuuaugu

SEQ ID NO: 1948694 - RNA, 19 nt, Artificial Sequence
  Description of Artificial Sequence: Synthetic oligonucleotide
  Sense strand starting at position 1826 of SEQ ID NO: 1880189
guaggugauccuuagcaca

SEQ ID NO: 1948695 - RNA, 19 nt, Artificial Sequence
  Description of Artificial Sequence: Synthetic oligonucleotide
  Antisense strand to SEQ ID NO: 1948694
ugugcuaaggaucaccuac

SEQ ID NO: 1948696 - RNA, 19 nt, Artificial Sequence
  Description of Artificial Sequence: Synthetic oligonucleotide
  Sense strand starting at position 1828 of SEQ ID NO: 1880189
aggugauccuuagcacaac

SEQ ID NO: 1948697 - RNA, 19 nt, Artificial Sequence
  Description of Artificial Sequence: Synthetic oligonucleotide
  Antisense strand to SEQ ID NO: 1948696
guugugcuaaggaucaccu

SEQ ID NO: 1948698 - RNA, 19 nt, Artificial Sequence
  Description of Artificial Sequence: Synthetic oligonucleotide
  Sense strand starting at position 1870 of SEQ ID NO: 1880189
ucuccacccgcuuaagaau

SEQ ID NO: 1948699 - RNA, 19 nt, Artificial Sequence
  Description of Artificial Sequence: Synthetic oligonucleotide
  Antisense strand to SEQ ID NO: 1948698
auucuuaagcggguggaga

SEQ ID NO: 1948700 - RNA, 19 nt, Artificial Sequence
  Description of Artificial Sequence: Synthetic oligonucleotide
  Sense strand starting at position 1881 of SEQ ID NO: 1880189
uuaagaaucucuguggguu

SEQ ID NO: 1948701 - RNA, 19 nt, Artificial Sequence
  Description of Artificial Sequence: Synthetic oligonucleotide
  Antisense strand to SEQ ID NO: 1948700
aacccacagagauucuuaa

SEQ ID NO: 1948702 - RNA, 19 nt, Artificial Sequence
  Description of Artificial Sequence: Synthetic oligonucleotide
  Sense strand starting at position 1882 of SEQ ID NO: 1880189
uaagaaucucuguggguuc

SEQ ID NO: 1948703 - RNA, 19 nt, Artificial Sequence
  Description of Artificial Sequence: Synthetic oligonucleotide
  Antisense strand to SEQ ID NO: 1948702
gaacccacagagauucuua

SEQ ID NO: 1948704 - RNA, 19 nt, Artificial Sequence
  Description of Artificial Sequence: Synthetic oligonucleotide
  Sense strand starting at position 1926 of SEQ ID NO: 1880189
ccagcugucuccucagaca

SEQ ID NO: 1948705 - RNA, 19 nt, Artificial Sequence
  Description of Artificial Sequence: Synthetic oligonucleotide
  Antisense strand to SEQ ID NO: 1948704
ugucugaggagacagcugg

SEQ ID NO: 1948706 - RNA, 19 nt, Artificial Sequence
  Description of Artificial Sequence: Synthetic oligonucleotide
  Sense strand starting at position 2136 of SEQ ID NO: 1880189
gcagccuguuaucagugaa

SEQ ID NO: 1948707 - RNA, 19 nt, Artificial Sequence
  Description of Artificial Sequence: Synthetic oligonucleotide
  Antisense strand to SEQ ID NO: 1948706
uucacugauaacaggcugc

SEQ ID NO: 1948708 - RNA, 19 nt, Artificial Sequence
  Description of Artificial Sequence: Synthetic oligonucleotide
  Sense strand starting at position 2139 of SEQ ID NO: 1880189
gccuguuaucagugaaccc

SEQ ID NO: 1948709 - RNA, 19 nt, Artificial Sequence
  Description of Artificial Sequence: Synthetic oligonucleotide
  Antisense strand to SEQ ID NO: 1948708
ggguucacugauaacaggc

SEQ ID NO: 1948710 - RNA, 19 nt, Artificial Sequence
  Description of Artificial Sequence: Synthetic oligonucleotide
  Sense strand starting at position 2441 of SEQ ID NO: 1880189
gggagcuuucucgaacccu

SEQ ID NO: 1948711 - RNA, 19 nt, Artificial Sequence
  Description of Artificial Sequence: Synthetic oligonucleotide
  Antisense strand to SEQ ID NO: 1948710
aggguucgagaaagcuccc

SEQ ID NO: 1948712 - RNA, 19 nt, Artificial Sequence
  Description of Artificial Sequence: Synthetic oligonucleotide
  Sense strand starting at position 2787 of SEQ ID NO: 1880189
ggagaaauuuggcaucaag

SEQ ID NO: 1948713 - RNA, 19 nt, Artificial Sequence
  Description of Artificial Sequence: Synthetic oligonucleotide
  Antisense strand to SEQ ID NO: 1948712
cuugaugccaaauuucucc

SEQ ID NO: 1948714 - RNA, 19 nt, Artificial Sequence
  Description of Artificial Sequence: Synthetic oligonucleotide
  Sense strand starting at position 2816 of SEQ ID NO: 1880189
gacaaauggcccuggcaca

SEQ ID NO: 1948715 - RNA, 19 nt, Artificial Sequence
  Description of Artificial Sequence: Synthetic oligonucleotide
  Antisense strand to SEQ ID NO: 1948714
ugugccagggccauuuguc

SEQ ID NO: 1948716 - RNA, 19 nt, Artificial Sequence
  Description of Artificial Sequence: Synthetic oligonucleotide
  Sense strand starting at position 2878 of SEQ ID NO: 1880189
agggaacucucagccuuua

SEQ ID NO: 1948717 - RNA, 19 nt, Artificial Sequence
  Description of Artificial Sequence: Synthetic oligonucleotide
  Antisense strand to SEQ ID NO: 1948716
uaaaggcugagaguucccu

SEQ ID NO: 1948718 - RNA, 19 nt, Artificial Sequence
  Description of Artificial Sequence: Synthetic oligonucleotide
  Sense strand starting at position 2907 of SEQ ID NO: 1880189
ggcaucaguucgucuucca

SEQ ID NO: 1948719 - RNA, 19 nt, Artificial Sequence
  Description of Artificial Sequence: Synthetic oligonucleotide
  Antisense strand to SEQ ID NO: 1948718
uggaagacgaacugaugcc

SEQ ID NO: 1948720 - RNA, 19 nt, Artificial Sequence
  Description of Artificial Sequence: Synthetic oligonucleotide
  Sense strand starting at position 2910 of SEQ ID NO: 1880189
aucaguucgucuuccacaa

SEQ ID NO: 1948721 - RNA, 19 nt, Artificial Sequence
  Description of Artificial Sequence: Synthetic oligonucleotide
  Antisense strand to SEQ ID NO: 1948720
uuguggaagacgaacugau

SEQ ID NO: 1948722 - RNA, 19 nt, Artificial Sequence
  Description of Artificial Sequence: Synthetic oligonucleotide
  Sense strand starting at position 2938 of SEQ ID NO: 1880189
ccacguuucuaguuauguu

SEQ ID NO: 1948723 - RNA, 19 nt, Artificial Sequence
  Description of Artificial Sequence: Synthetic oligonucleotide
  Antisense strand to SEQ ID NO: 1948722
aacauaacuagaaacgugg

SEQ ID NO: 1948724 - RNA, 19 nt, Artificial Sequence
  Description of Artificial Sequence: Synthetic oligonucleotide
  Sense strand starting at position 2945 of SEQ ID NO: 1880189
ucuaguuauguuuggcaac

SEQ ID NO: 1948725 - RNA, 19 nt, Artificial Sequence
  Description of Artificial Sequence: Synthetic oligonucleotide
  Antisense strand to SEQ ID NO: 1948724
guugccaaacauaacuaga

SEQ ID NO: 1948726 - RNA, 19 nt, Artificial Sequence
  Description of Artificial Sequence: Synthetic oligonucleotide
  Sense strand starting at position 3388 of SEQ ID NO: 1880189
uggucuaagccacagacua

SEQ ID NO: 1948727 - RNA, 19 nt, Artificial Sequence
  Description of Artificial Sequence: Synthetic oligonucleotide
  Antisense strand to SEQ ID NO: 1948726
uagucuguggcuuagacca

SEQ ID NO: 1948728 - RNA, 19 nt, Artificial Sequence
  Description of Artificial Sequence: Synthetic oligonucleotide
  Sense strand starting at position 3396 of SEQ ID NO: 1880189
gccacagacuacuugcuaa

SEQ ID NO: 1948729 - RNA, 19 nt, Artificial Sequence
  Description of Artificial Sequence: Synthetic oligonucleotide
  Antisense strand to SEQ ID NO: 1948728
uuagcaaguagucuguggc

SEQ ID NO: 1948730 - RNA, 19 nt, Artificial Sequence
  Description of Artificial Sequence: Synthetic oligonucleotide
  Sense strand starting at position 3438 of SEQ ID NO: 1880189
cugagagucucgcucuguu

SEQ ID NO: 1948731 - RNA, 19 nt, Artificial Sequence
  Description of Artificial Sequence: Synthetic oligonucleotide
  Antisense strand to SEQ ID NO: 1948730
aacagagcgagacucucag

SEQ ID NO: 1948732 - RNA, 19 nt, Artificial Sequence
  Description of Artificial Sequence: Synthetic oligonucleotide
  Sense strand starting at position 3557 of SEQ ID NO: 1880189
ggugaaucuuaagaccguu

SEQ ID NO: 1948733 - RNA, 19 nt, Artificial Sequence
  Description of Artificial Sequence: Synthetic oligonucleotide
  Antisense strand to SEQ ID NO: 1948732
aacggucuuaagauucacc

SEQ ID NO: 1948734 - RNA, 19 nt, Artificial Sequence
  Description of Artificial Sequence: Synthetic oligonucleotide
  Sense strand starting at position 3796 of SEQ ID NO: 1880189
ggcaacagucaguguaacu

SEQ ID NO: 1948735 - RNA, 19 nt, Artificial Sequence
  Description of Artificial Sequence: Synthetic oligonucleotide
  Antisense strand to SEQ ID NO: 1948734
aguuacacugacuguugcc

SEQ ID NO: 1948736 - RNA, 19 nt, Artificial Sequence
  Description of Artificial Sequence: Synthetic oligonucleotide
  Sense strand starting at position 3961 of SEQ ID NO: 1880189
agacuaggcuucugacuau

SEQ ID NO: 1948737 - RNA, 19 nt, Artificial Sequence
  Description of Artificial Sequence: Synthetic oligonucleotide
  Antisense strand to SEQ ID NO: 1948736
auagucagaagccuagucu

SEQ ID NO: 1948738 - RNA, 19 nt, Artificial Sequence
  Description of Artificial Sequence: Synthetic oligonucleotide
  Sense strand starting at position 143 of SEQ ID NO: 1880190
ucaaguaaucagugagaga

SEQ ID NO: 1948739 - RNA, 19 nt, Artificial Sequence
  Description of Artificial Sequence: Synthetic oligonucleotide
  Antisense strand to SEQ ID NO: 1948738
ucucucacugauuacuuga

SEQ ID NO: 1948740 - RNA, 19 nt, Artificial Sequence
  Description of Artificial Sequence: Synthetic oligonucleotide
  Sense strand starting at position 159 of SEQ ID NO: 1880190
agaguucaaguuggauuga

SEQ ID NO: 1948741 - RNA, 19 nt, Artificial Sequence
  Description of Artificial Sequence: Synthetic oligonucleotide
  Antisense strand to SEQ ID NO: 1948740
ucaauccaacuugaacucu

SEQ ID NO: 1948742 - RNA, 19 nt, Artificial Sequence
  Description of Artificial Sequence: Synthetic oligonucleotide
  Sense strand starting at position 392 of SEQ ID NO: 1880190
uuggcagaaucauuacauc

SEQ ID NO: 1948743 - RNA, 19 nt, Artificial Sequence
  Description of Artificial Sequence: Synthetic oligonucleotide
  Antisense strand to SEQ ID NO: 1948742
gauguaaugauucugccaa

SEQ ID NO: 1948744 - RNA, 19 nt, Artificial Sequence
  Description of Artificial Sequence: Synthetic oligonucleotide
  Sense strand starting at position 400 of SEQ ID NO: 1880190
aucauuacaucauugguua

SEQ ID NO: 1948745 - RNA, 19 nt, Artificial Sequence
  Description of Artificial Sequence: Synthetic oligonucleotide
  Antisense strand to SEQ ID NO: 1948744
uaaccaaugauguaaugau

SEQ ID NO: 1948746 - RNA, 19 nt, Artificial Sequence
  Description of Artificial Sequence: Synthetic oligonucleotide
  Sense strand starting at position 404 of SEQ ID NO: 1880190
uuacaucauugguuacacu

SEQ ID NO: 1948747 - RNA, 19 nt, Artificial Sequence
  Description of Artificial Sequence: Synthetic oligonucleotide
  Antisense strand to SEQ ID NO: 1948746
aguguaaccaaugauguaa

SEQ ID NO: 1948748 - RNA, 19 nt, Artificial Sequence
  Description of Artificial Sequence: Synthetic oligonucleotide
  Sense strand starting at position 448 of SEQ ID NO: 1880190
ugacucaccuaguuuagga

SEQ ID NO: 1948749 - RNA, 19 nt, Artificial Sequence
  Description of Artificial Sequence: Synthetic oligonucleotide
  Antisense strand to SEQ ID NO: 1948748
uccuaaacuaggugaguca

SEQ ID NO: 1948750 - RNA, 19 nt, Artificial Sequence
  Description of Artificial Sequence: Synthetic oligonucleotide
  Sense strand starting at position 662 of SEQ ID NO: 1880190
caugaauucugaguccuga

SEQ ID NO: 1948751 - RNA, 19 nt, Artificial Sequence
  Description of Artificial Sequence: Synthetic oligonucleotide
  Antisense strand to SEQ ID NO: 1948750
ucaggacucagaauucaug

SEQ ID NO: 1948752 - RNA, 19 nt, Artificial Sequence
  Description of Artificial Sequence: Synthetic oligonucleotide
  Sense strand starting at position 787 of SEQ ID NO: 1880190
gaauguuaccgccagauac

SEQ ID NO: 1948753 - RNA, 19 nt, Artificial Sequence
  Description of Artificial Sequence: Synthetic oligonucleotide
  Antisense strand to SEQ ID NO: 1948752
guaucuggcgguaacauuc

SEQ ID NO: 1948754 - RNA, 19 nt, Artificial Sequence
  Description of Artificial Sequence: Synthetic oligonucleotide
  Sense strand starting at position 789 of SEQ ID NO: 1880190
auguuaccgccagauacau

SEQ ID NO: 1948755 - RNA, 19 nt, Artificial Sequence
  Description of Artificial Sequence: Synthetic oligonucleotide
  Antisense strand to SEQ ID NO: 1948754
auguaucuggcgguaacau

SEQ ID NO: 1948756 - RNA, 19 nt, Artificial Sequence
  Description of Artificial Sequence: Synthetic oligonucleotide
  Sense strand starting at position 833 of SEQ ID NO: 1880190
ugcucaucagcguuagucu

SEQ ID NO: 1948757 - RNA, 19 nt, Artificial Sequence
  Description of Artificial Sequence: Synthetic oligonucleotide
  Antisense strand to SEQ ID NO: 1948756
agacuaacgcugaugagca

SEQ ID NO: 1948758 - RNA, 19 nt, Artificial Sequence
  Description of Artificial Sequence: Synthetic oligonucleotide
  Sense strand starting at position 841 of SEQ ID NO: 1880190
agcguuagucugcugaacu

SEQ ID NO: 1948759 - RNA, 19 nt, Artificial Sequence
  Description of Artificial Sequence: Synthetic oligonucleotide
  Antisense strand to SEQ ID NO: 1948758
aguucagcagacuaacgcu

SEQ ID NO: 1948760 - RNA, 19 nt, Artificial Sequence
  Description of Artificial Sequence: Synthetic oligonucleotide
  Sense strand starting at position 858 of SEQ ID NO: 1880190
cuauguuaucaucauugua

SEQ ID NO: 1948761 - RNA, 19 nt, Artificial Sequence
  Description of Artificial Sequence: Synthetic oligonucleotide
  Antisense strand to SEQ ID NO: 1948760
uacaaugaugauaacauag

SEQ ID NO: 1948762 - RNA, 19 nt, Artificial Sequence
  Description of Artificial Sequence: Synthetic oligonucleotide
  Sense strand starting at position 860 of SEQ ID NO: 1880190
auguuaucaucauuguauc

SEQ ID NO: 1948763 - RNA, 19 nt, Artificial Sequence
  Description of Artificial Sequence: Synthetic oligonucleotide
  Antisense strand to SEQ ID NO: 1948762
gauacaaugaugauaacau

SEQ ID NO: 1948764 - RNA, 19 nt, Artificial Sequence
  Description of Artificial Sequence: Synthetic oligonucleotide
  Sense strand starting at position 872 of SEQ ID NO: 1880190
uuguaucggcuuuacaaca

SEQ ID NO: 1948765 - RNA, 19 nt, Artificial Sequence
  Description of Artificial Sequence: Synthetic oligonucleotide
  Antisense strand to SEQ ID NO: 1948764
uguuguaaagccgauacaa

SEQ ID NO: 1948766 - RNA, 19 nt, Artificial Sequence
  Description of Artificial Sequence: Synthetic oligonucleotide
  Sense strand starting at position 1486 of SEQ ID NO: 1880190
gcaagucauccauggauaa

SEQ ID NO: 1948767 - RNA, 19 nt, Artificial Sequence
  Description of Artificial Sequence: Synthetic oligonucleotide
  Antisense strand to SEQ ID NO: 1948766
uuauccauggaugacuugc

SEQ ID NO: 1948768 - RNA, 19 nt, Artificial Sequence
  Description of Artificial Sequence: Synthetic oligonucleotide
  Sense strand starting at position 1869 of SEQ ID NO: 1880190
aagaaauaagaguggucuu

SEQ ID NO: 1948769 - RNA, 19 nt, Artificial Sequence
  Description of Artificial Sequence: Synthetic oligonucleotide
  Antisense strand to SEQ ID NO: 1948768
aagaccacucuuauuucuu

SEQ ID NO: 1948770 - RNA, 19 nt, Artificial Sequence
  Description of Artificial Sequence: Synthetic oligonucleotide
  Sense strand starting at position 1870 of SEQ ID NO: 1880190
agaaauaagaguggucuua

SEQ ID NO: 1948771 - RNA, 19 nt, Artificial Sequence
  Description of Artificial Sequence: Synthetic oligonucleotide
  Antisense strand to SEQ ID NO: 1948770
uaagaccacucuuauuucu

SEQ ID NO: 1948772 - RNA, 19 nt, Artificial Sequence
  Description of Artificial Sequence: Synthetic oligonucleotide
  Sense strand starting at position 1872 of SEQ ID NO: 1880190
aaauaagaguggucuuaga

SEQ ID NO: 1948773 - RNA, 19 nt, Artificial Sequence
  Description of Artificial Sequence: Synthetic oligonucleotide
  Antisense strand to SEQ ID NO: 1948772
ucuaagaccacucuuauuu

SEQ ID NO: 1948774 - RNA, 19 nt, Artificial Sequence
  Description of Artificial Sequence: Synthetic oligonucleotide
  Sense strand starting at position 1974 of SEQ ID NO: 1880190
gucagcauuugcuuaucau

SEQ ID NO: 1948775 - RNA, 19 nt, Artificial Sequence
  Description of Artificial Sequence: Synthetic oligonucleotide
  Antisense strand to SEQ ID NO: 1948774
augauaagcaaaugcugac

SEQ ID NO: 1948776 - RNA, 19 nt, Artificial Sequence
  Description of Artificial Sequence: Synthetic oligonucleotide
  Sense strand starting at position 2101 of SEQ ID NO: 1880190
uaggaaguuugcccaguua

SEQ ID NO: 1948777 - RNA, 19 nt, Artificial Sequence
  Description of Artificial Sequence: Synthetic oligonucleotide
  Antisense strand to SEQ ID NO: 1948776
uaacugggcaaacuuccua

SEQ ID NO: 1948778 - RNA, 19 nt, Artificial Sequence
  Description of Artificial Sequence: Synthetic oligonucleotide
  Sense strand starting at position 2117 of SEQ ID NO: 1880190
uuaccugcuuacuuggaua

SEQ ID NO: 1948779 - RNA, 19 nt, Artificial Sequence
  Description of Artificial Sequence: Synthetic oligonucleotide
  Antisense strand to SEQ ID NO: 1948778
uauccaaguaagcagguaa

SEQ ID NO: 1948780 - RNA, 19 nt, Artificial Sequence
  Description of Artificial Sequence: Synthetic oligonucleotide
  Sense strand starting at position 2119 of SEQ ID NO: 1880190
accugcuuacuuggauaca

SEQ ID NO: 1948781 - RNA, 19 nt, Artificial Sequence
  Description of Artificial Sequence: Synthetic oligonucleotide
  Antisense strand to SEQ ID NO: 1948780
uguauccaaguaagcaggu

SEQ ID NO: 1948782 - RNA, 19 nt, Artificial Sequence
  Description of Artificial Sequence: Synthetic oligonucleotide
  Sense strand starting at position 2122 of SEQ ID NO: 1880190
ugcuuacuuggauacaguu

SEQ ID NO: 1948783 - RNA, 19 nt, Artificial Sequence
  Description of Artificial Sequence: Synthetic oligonucleotide
  Antisense strand to SEQ ID NO: 1948782
aacuguauccaaguaagca

SEQ ID NO: 1948784 - RNA, 19 nt, Artificial Sequence
  Description of Artificial Sequence: Synthetic oligonucleotide
  Sense strand starting at position 2303 of SEQ ID NO: 1880190
augauuaaaucugcugaac

SEQ ID NO: 1948785 - RNA, 19 nt, Artificial Sequence
  Description of Artificial Sequence: Synthetic oligonucleotide
  Antisense strand to SEQ ID NO: 1948784
guucagcagauuuaaucau

SEQ ID NO: 1948786 - RNA, 19 nt, Artificial Sequence
  Description of Artificial Sequence: Synthetic oligonucleotide
  Sense strand starting at position 2568 of SEQ ID NO: 1880190
agguguacucucuauguuc

SEQ ID NO: 1948787 - RNA, 19 nt, Artificial Sequence
  Description of Artificial Sequence: Synthetic oligonucleotide
  Antisense strand to SEQ ID NO: 1948786
gaacauagagaguacaccu

SEQ ID NO: 1948788 - RNA, 19 nt, Artificial Sequence
  Description of Artificial Sequence: Synthetic oligonucleotide
  Sense strand starting at position 2603 of SEQ ID NO: 1880190
gggugccucaguuaagaua

SEQ ID NO: 1948789 - RNA, 19 nt, Artificial Sequence
  Description of Artificial Sequence: Synthetic oligonucleotide
  Antisense strand to SEQ ID NO: 1948788
uaucuuaacugaggcaccc

SEQ ID NO: 1948790 - RNA, 19 nt, Artificial Sequence
  Description of Artificial Sequence: Synthetic oligonucleotide
  Sense strand starting at position 2617 of SEQ ID NO: 1880190
agauaauggugguuaagau

SEQ ID NO: 1948791 - RNA, 19 nt, Artificial Sequence
  Description of Artificial Sequence: Synthetic oligonucleotide
  Antisense strand to SEQ ID NO: 1948790
aucuuaaccaccauuaucu

SEQ ID NO: 1948792 - RNA, 19 nt, Artificial Sequence
  Description of Artificial Sequence: Synthetic oligonucleotide
  Sense strand starting at position 2626 of SEQ ID NO: 1880190
ugguuaagauccucaucau

SEQ ID NO: 1948793 - RNA, 19 nt, Artificial Sequence
  Description of Artificial Sequence: Synthetic oligonucleotide
  Antisense strand to SEQ ID NO: 1948792
augaugaggaucuuaacca

SEQ ID NO: 1948794 - RNA, 19 nt, Artificial Sequence
  Description of Artificial Sequence: Synthetic oligonucleotide
  Sense strand starting at position 2627 of SEQ ID NO: 1880190
gguuaagauccucaucauu

SEQ ID NO: 1948795 - RNA, 19 nt, Artificial Sequence
  Description of Artificial Sequence: Synthetic oligonucleotide
  Antisense strand to SEQ ID NO: 1948794
aaugaugaggaucuuaacc

SEQ ID NO: 1948796 - RNA, 19 nt, Artificial Sequence
  Description of Artificial Sequence: Synthetic oligonucleotide
  Sense strand starting at position 2648 of SEQ ID NO: 1880190
agcacucaagaguagcaaa

SEQ ID NO: 1948797 - RNA, 19 nt, Artificial Sequence
  Description of Artificial Sequence: Synthetic oligonucleotide
  Antisense strand to SEQ ID NO: 1948796
uuugcuacucuugagugcu

SEQ ID NO: 1948798 - RNA, 19 nt, Artificial Sequence
  Description of Artificial Sequence: Synthetic oligonucleotide
  Sense strand starting at position 3105 of SEQ ID NO: 1880190
accaaugaugcagguaaca

SEQ ID NO: 1948799 - RNA, 19 nt, Artificial Sequence
  Description of Artificial Sequence: Synthetic oligonucleotide
  Antisense strand to SEQ ID NO: 1948798
uguuaccugcaucauuggu

SEQ ID NO: 1948800 - RNA, 19 nt, Artificial Sequence
  Description of Artificial Sequence: Synthetic oligonucleotide
  Sense strand starting at position 3130 of SEQ ID NO: 1880190
ucauuaucuagcgacaggu

SEQ ID NO: 1948801 - RNA, 19 nt, Artificial Sequence
  Description of Artificial Sequence: Synthetic oligonucleotide
  Antisense strand to SEQ ID NO: 1948800
accugucgcuagauaauga

SEQ ID NO: 1948802 - RNA, 19 nt, Artificial Sequence
  Description of Artificial Sequence: Synthetic oligonucleotide
  Sense strand starting at position 3132 of SEQ ID NO: 1880190
auuaucuagcgacagguaa

SEQ ID NO: 1948803 - RNA, 19 nt, Artificial Sequence
  Description of Artificial Sequence: Synthetic oligonucleotide
  Antisense strand to SEQ ID NO: 1948802
uuaccugucgcuagauaau

SEQ ID NO: 1948804 - RNA, 19 nt, Artificial Sequence
  Description of Artificial Sequence: Synthetic oligonucleotide
  Sense strand starting at position 3220 of SEQ ID NO: 1880190
guggcucacggcuuguaau

SEQ ID NO: 1948805 - RNA, 19 nt, Artificial Sequence
  Description of Artificial Sequence: Synthetic oligonucleotide
  Antisense strand to SEQ ID NO: 1948804
auuacaagccgugagccac

SEQ ID NO: 1948806 - RNA, 19 nt, Artificial Sequence
  Description of Artificial Sequence: Synthetic oligonucleotide
  Sense strand starting at position 3232 of SEQ ID NO: 1880190
uuguaaucccaguauguug

SEQ ID NO: 1948807 - RNA, 19 nt, Artificial Sequence
  Description of Artificial Sequence: Synthetic oligonucleotide
  Antisense strand to SEQ ID NO: 1948806
caacauacugggauuacaa

SEQ ID NO: 1948808 - RNA, 19 nt, Artificial Sequence
  Description of Artificial Sequence: Synthetic oligonucleotide
  Sense strand starting at position 3416 of SEQ ID NO: 1880190
ggagguugccauuaaccga

SEQ ID NO: 1948809 - RNA, 19 nt, Artificial Sequence
  Description of Artificial Sequence: Synthetic oligonucleotide
  Antisense strand to SEQ ID NO: 1948808
ucgguuaauggcaaccucc

SEQ ID NO: 1948810 - RNA, 19 nt, Artificial Sequence
  Description of Artificial Sequence: Synthetic oligonucleotide
  Sense strand starting at position 3601 of SEQ ID NO: 1880190
ggucacggcccuuaacaau

SEQ ID NO: 1948811 - RNA, 19 nt, Artificial Sequence
  Description of Artificial Sequence: Synthetic oligonucleotide
  Antisense strand to SEQ ID NO: 1948810
auuguuaagggccgugacc

SEQ ID NO: 1948812 - RNA, 19 nt, Artificial Sequence
  Description of Artificial Sequence: Synthetic oligonucleotide
  Sense strand starting at position 3607 of SEQ ID NO: 1880190
ggcccuuaacaauagcuua

SEQ ID NO: 1948813 - RNA, 19 nt, Artificial Sequence
  Description of Artificial Sequence: Synthetic oligonucleotide
  Antisense strand to SEQ ID NO: 1948812
uaagcuauuguuaagggcc

SEQ ID NO: 1948814 - RNA, 19 nt, Artificial Sequence
  Description of Artificial Sequence: Synthetic oligonucleotide
  Sense strand starting at position 3975 of SEQ ID NO: 1880190
ugggcuccuguauauaaga

SEQ ID NO: 1948815 - RNA, 19 nt, Artificial Sequence
  Description of Artificial Sequence: Synthetic oligonucleotide
  Antisense strand to SEQ ID NO: 1948814
ucuuauauacaggagccca

SEQ ID NO: 1948816 - RNA, 19 nt, Artificial Sequence
  Description of Artificial Sequence: Synthetic oligonucleotide
  Sense strand starting at position 3977 of SEQ ID NO: 1880190
ggcuccuguauauaagagu

SEQ ID NO: 1948817 - RNA, 19 nt, Artificial Sequence
  Description of Artificial Sequence: Synthetic oligonucleotide
  Antisense strand to SEQ ID NO: 1948816
acucuuauauacaggagcc

SEQ ID NO: 1948818 - RNA, 19 nt, Artificial Sequence
  Description of Artificial Sequence: Synthetic oligonucleotide
  Sense strand starting at position 31 of SEQ ID NO: 1880191
uuugucucuguguauauaa

SEQ ID NO: 1948819 - RNA, 19 nt, Artificial Sequence
  Description of Artificial Sequence: Synthetic oligonucleotide
  Antisense strand to SEQ ID NO: 1948818
uuauauacacagagacaaa

SEQ ID NO: 1948820 - RNA, 19 nt, Artificial Sequence
  Description of Artificial Sequence: Synthetic oligonucleotide
  Sense strand starting at position 400 of SEQ ID NO: 1880191
uuacaucauugaccuugua

SEQ ID NO: 1948821 - RNA, 19 nt, Artificial Sequence
  Description of Artificial Sequence: Synthetic oligonucleotide
  Antisense strand to SEQ ID NO: 1948820
uacaaggucaaugauguaa

SEQ ID NO: 1948822 - RNA, 19 nt, Artificial Sequence
  Description of Artificial Sequence: Synthetic oligonucleotide
  Sense strand starting at position 403 of SEQ ID NO: 1880191
caucauugaccuuguagga

SEQ ID NO: 1948823 - RNA, 19 nt, Artificial Sequence
  Description of Artificial Sequence: Synthetic oligonucleotide
  Antisense strand to SEQ ID NO: 1948822
uccuacaaggucaaugaug

SEQ ID NO: 1948824 - RNA, 19 nt, Artificial Sequence
  Description of Artificial Sequence: Synthetic oligonucleotide
  Sense strand starting at position 494 of SEQ ID NO: 1880191
acauacuaucaagaucguu

SEQ ID NO: 1948825 - RNA, 19 nt, Artificial Sequence
  Description of Artificial Sequence: Synthetic oligonucleotide
  Antisense strand to SEQ ID NO: 1948824
aacgaucuugauaguaugu

SEQ ID NO: 1948826 - RNA, 19 nt, Artificial Sequence
  Description of Artificial Sequence: Synthetic oligonucleotide
  Sense strand starting at position 499 of SEQ ID NO: 1880191
cuaucaagaucguugcaau

SEQ ID NO: 1948827 - RNA, 19 nt, Artificial Sequence
  Description of Artificial Sequence: Synthetic oligonucleotide
  Antisense strand to SEQ ID NO: 1948826
auugcaacgaucuugauag

SEQ ID NO: 1948828 - RNA, 19 nt, Artificial Sequence
  Description of Artificial Sequence: Synthetic oligonucleotide
  Sense strand starting at position 500 of SEQ ID NO: 1880191
uaucaagaucguugcaauu

SEQ ID NO: 1948829 - RNA, 19 nt, Artificial Sequence
  Description of Artificial Sequence: Synthetic oligonucleotide
  Antisense strand to SEQ ID NO: 1948828
aauugcaacgaucuugaua

SEQ ID NO: 1948830 - RNA, 19 nt, Artificial Sequence
  Description of Artificial Sequence: Synthetic oligonucleotide
  Sense strand starting at position 854 of SEQ ID NO: 1880191
cugaucaguagugaguuua

SEQ ID NO: 1948831 - RNA, 19 nt, Artificial Sequence
  Description of Artificial Sequence: Synthetic oligonucleotide
  Antisense strand to SEQ ID NO: 1948830
uaaacucacuacugaucag

SEQ ID NO: 1948832 - RNA, 19 nt, Artificial Sequence
  Description of Artificial Sequence: Synthetic oligonucleotide
  Sense strand starting at position 954 of SEQ ID NO: 1880191
uuaguuaaucuauggcuga

SEQ ID NO: 1948833 - RNA, 19 nt, Artificial Sequence
  Description of Artificial Sequence: Synthetic oligonucleotide
  Antisense strand to SEQ ID NO: 1948832
ucagccauagauuaacuaa

SEQ ID NO: 1948834 - RNA, 19 nt, Artificial Sequence
  Description of Artificial Sequence: Synthetic oligonucleotide
  Sense strand starting at position 957 of SEQ ID NO: 1880191
guuaaucuauggcugacaa

SEQ ID NO: 1948835 - RNA, 19 nt, Artificial Sequence
  Description of Artificial Sequence: Synthetic oligonucleotide
  Antisense strand to SEQ ID NO: 1948834
uugucagccauagauuaac

SEQ ID NO: 1948836 - RNA, 19 nt, Artificial Sequence
  Description of Artificial Sequence: Synthetic oligonucleotide
  Sense strand starting at position 958 of SEQ ID NO: 1880191
uuaaucuauggcugacaau

SEQ ID NO: 1948837 - RNA, 19 nt, Artificial Sequence
  Description of Artificial Sequence: Synthetic oligonucleotide
  Antisense strand to SEQ ID NO: 1948836
auugucagccauagauuaa

SEQ ID NO: 1948838 - RNA, 19 nt, Artificial Sequence
  Description of Artificial Sequence: Synthetic oligonucleotide
  Sense strand starting at position 986 of SEQ ID NO: 1880191
gcuuuaguuucucccauga

SEQ ID NO: 1948839 - RNA, 19 nt, Artificial Sequence
  Description of Artificial Sequence: Synthetic oligonucleotide
  Antisense strand to SEQ ID NO: 1948838
ucaugggagaaacuaaagc

SEQ ID NO: 1948840 - RNA, 19 nt, Artificial Sequence
  Description of Artificial Sequence: Synthetic oligonucleotide
  Sense strand starting at position 1038 of SEQ ID NO: 1880191
agugaaguucagggagagu

SEQ ID NO: 1948841 - RNA, 19 nt, Artificial Sequence
  Description of Artificial Sequence: Synthetic oligonucleotide
  Antisense strand to SEQ ID NO: 1948840
acucucccugaacuucacu

SEQ ID NO: 1948842 - RNA, 19 nt, Artificial Sequence
  Description of Artificial Sequence: Synthetic oligonucleotide
  Sense strand starting at position 1053 of SEQ ID NO: 1880191
gaguauuucuuuccgagua

SEQ ID NO: 1948843 - RNA, 19 nt, Artificial Sequence
  Description of Artificial Sequence: Synthetic oligonucleotide
  Antisense strand to SEQ ID NO: 1948842
uacucggaaagaaauacuc

SEQ ID NO: 1948844 - RNA, 19 nt, Artificial Sequence
  Description of Artificial Sequence: Synthetic oligonucleotide
  Sense strand starting at position 1058 of SEQ ID NO: 1880191
uuucuuuccgaguaccuau

SEQ ID NO: 1948845 - RNA, 19 nt, Artificial Sequence
  Description of Artificial Sequence: Synthetic oligonucleotide
  Antisense strand to SEQ ID NO: 1948844
auagguacucggaaagaaa

SEQ ID NO: 1948846 - RNA, 19 nt, Artificial Sequence
  Description of Artificial Sequence: Synthetic oligonucleotide
  Sense strand starting at position 1101 of SEQ ID NO: 1880191
uaauguggacucuguacaa

SEQ ID NO: 1948847 - RNA, 19 nt, Artificial Sequence
  Description of Artificial Sequence: Synthetic oligonucleotide
  Antisense strand to SEQ ID NO: 1948846
uuguacagaguccacauua

SEQ ID NO: 1948848 - RNA, 19 nt, Artificial Sequence
  Description of Artificial Sequence: Synthetic oligonucleotide
  Sense strand starting at position 1182 of SEQ ID NO: 1880191
aaagauguuuaagcccaga

SEQ ID NO: 1948849 - RNA, 19 nt, Artificial Sequence
  Description of Artificial Sequence: Synthetic oligonucleotide
  Antisense strand to SEQ ID NO: 1948848
ucugggcuuaaacaucuuu

SEQ ID NO: 1948850 - RNA, 19 nt, Artificial Sequence
  Description of Artificial Sequence: Synthetic oligonucleotide
  Sense strand starting at position 1185 of SEQ ID NO: 1880191
gauguuuaagcccagauaa

SEQ ID NO: 1948851 - RNA, 19 nt, Artificial Sequence
  Description of Artificial Sequence: Synthetic oligonucleotide
  Antisense strand to SEQ ID NO: 1948850
uuaucugggcuuaaacauc

SEQ ID NO: 1948852 - RNA, 19 nt, Artificial Sequence
  Description of Artificial Sequence: Synthetic oligonucleotide
  Sense strand starting at position 1208 of SEQ ID NO: 1880191
guggcuaaucaaugauaca

SEQ ID NO: 1948853 - RNA, 19 nt, Artificial Sequence
  Description of Artificial Sequence: Synthetic oligonucleotide
  Antisense strand to SEQ ID NO: 1948852
uguaucauugauuagccac

SEQ ID NO: 1948854 - RNA, 19 nt, Artificial Sequence
  Description of Artificial Sequence: Synthetic oligonucleotide
  Sense strand starting at position 1689 of SEQ ID NO: 1880191
uggccuuaacuccaugauu

SEQ ID NO: 1948855 - RNA, 19 nt, Artificial Sequence
  Description of Artificial Sequence: Synthetic oligonucleotide
  Antisense strand to SEQ ID NO: 1948854
aaucauggaguuaaggcca

SEQ ID NO: 1948856 - RNA, 19 nt, Artificial Sequence
  Description of Artificial Sequence: Synthetic oligonucleotide
  Sense strand starting at position 1776 of SEQ ID NO: 1880191
cccacaaaucgguagacua

SEQ ID NO: 1948857 - RNA, 19 nt, Artificial Sequence
  Description of Artificial Sequence: Synthetic oligonucleotide
  Antisense strand to SEQ ID NO: 1948856
uagucuaccgauuuguggg

SEQ ID NO: 1948858 - RNA, 19 nt, Artificial Sequence
  Description of Artificial Sequence: Synthetic oligonucleotide
  Sense strand starting at position 1840 of SEQ ID NO: 1880191
cuaaguuguuuacuacuuu

SEQ ID NO: 1948859 - RNA, 19 nt, Artificial Sequence
  Description of Artificial Sequence: Synthetic oligonucleotide
  Antisense strand to SEQ ID NO: 1948858
aaaguaguaaacaacuuag

SEQ ID NO: 1948860 - RNA, 19 nt, Artificial Sequence
  Description of Artificial Sequence: Synthetic oligonucleotide
  Sense strand starting at position 1859 of SEQ ID NO: 1880191
uugcuaagauugucccaga

SEQ ID NO: 1948861 - RNA, 19 nt, Artificial Sequence
  Description of Artificial Sequence: Synthetic oligonucleotide
  Antisense strand to SEQ ID NO: 1948860
ucugggacaaucuuagcaa

SEQ ID NO: 1948862 - RNA, 19 nt, Artificial Sequence
  Description of Artificial Sequence: Synthetic oligonucleotide
  Sense strand starting at position 2077 of SEQ ID NO: 1880191
gcccucucaguauagguaa

SEQ ID NO: 1948863 - RNA, 19 nt, Artificial Sequence
  Description of Artificial Sequence: Synthetic oligonucleotide
  Antisense strand to SEQ ID NO: 1948862
uuaccuauacugagagggc

SEQ ID NO: 1948864 - RNA, 19 nt, Artificial Sequence
  Description of Artificial Sequence: Synthetic oligonucleotide
  Sense strand starting at position 2184 of SEQ ID NO: 1880191
cauggaguuggaugccauu

SEQ ID NO: 1948865 - RNA, 19 nt, Artificial Sequence
  Description of Artificial Sequence: Synthetic oligonucleotide
  Antisense strand to SEQ ID NO: 1948864
aauggcauccaacuccaug

SEQ ID NO: 1948866 - RNA, 19 nt, Artificial Sequence
  Description of Artificial Sequence: Synthetic oligonucleotide
  Sense strand starting at position 2224 of SEQ ID NO: 1880191
acugcuuaugacugucaca

SEQ ID NO: 1948867 - RNA, 19 nt, Artificial Sequence
  Description of Artificial Sequence: Synthetic oligonucleotide
  Antisense strand to SEQ ID NO: 1948866
ugugacagucauaagcagu

SEQ ID NO: 1948868 - RNA, 19 nt, Artificial Sequence
  Description of Artificial Sequence: Synthetic oligonucleotide
  Sense strand starting at position 2407 of SEQ ID NO: 1880191
gugguaaucucaucaaugu

SEQ ID NO: 1948869 - RNA, 19 nt, Artificial Sequence
  Description of Artificial Sequence: Synthetic oligonucleotide
  Antisense strand to SEQ ID NO: 1948868
acauugaugagauuaccac

SEQ ID NO: 1948870 - RNA, 19 nt, Artificial Sequence
  Description of Artificial Sequence: Synthetic oligonucleotide
  Sense strand starting at position 2408 of SEQ ID NO: 1880191
ugguaaucucaucaauguu

SEQ ID NO: 1948871 - RNA, 19 nt, Artificial Sequence
  Description of Artificial Sequence: Synthetic oligonucleotide
  Antisense strand to SEQ ID NO: 1948870
aacauugaugagauuacca

SEQ ID NO: 1948872 - RNA, 19 nt, Artificial Sequence
  Description of Artificial Sequence: Synthetic oligonucleotide
  Sense strand starting at position 2423 of SEQ ID NO: 1880191
uguuuaccucuacaacguu

SEQ ID NO: 1948873 - RNA, 19 nt, Artificial Sequence
  Description of Artificial Sequence: Synthetic oligonucleotide
  Antisense strand to SEQ ID NO: 1948872
aacguuguagagguaaaca

SEQ ID NO: 1948874 - RNA, 19 nt, Artificial Sequence
  Description of Artificial Sequence: Synthetic oligonucleotide
  Sense strand starting at position 2560 of SEQ ID NO: 1880191
gcuugagccagggaaauua

SEQ ID NO: 1948875 - RNA, 19 nt, Artificial Sequence
  Description of Artificial Sequence: Synthetic oligonucleotide
  Antisense strand to SEQ ID NO: 1948874
uaauuucccuggcucaagc

SEQ ID NO: 1948876 - RNA, 19 nt, Artificial Sequence
  Description of Artificial Sequence: Synthetic oligonucleotide
  Sense strand starting at position 2923 of SEQ ID NO: 1880191
acgguuuacauguggcaga

SEQ ID NO: 1948877 - RNA, 19 nt, Artificial Sequence
  Description of Artificial Sequence: Synthetic oligonucleotide
  Antisense strand to SEQ ID NO: 1948876
ucugccacauguaaaccgu

SEQ ID NO: 1948878 - RNA, 19 nt, Artificial Sequence
  Description of Artificial Sequence: Synthetic oligonucleotide
  Sense strand starting at position 2988 of SEQ ID NO: 1880191
cgaauucuugcuuaaucaa

SEQ ID NO: 1948879 - RNA, 19 nt, Artificial Sequence
  Description of Artificial Sequence: Synthetic oligonucleotide
  Antisense strand to SEQ ID NO: 1948878
uugauuaagcaagaauucg

SEQ ID NO: 1948880 - RNA, 19 nt, Artificial Sequence
  Description of Artificial Sequence: Synthetic oligonucleotide
  Sense strand starting at position 3102 of SEQ ID NO: 1880191
gagucucuguauuugcaga

SEQ ID NO: 1948881 - RNA, 19 nt, Artificial Sequence
  Description of Artificial Sequence: Synthetic oligonucleotide
  Antisense strand to SEQ ID NO: 1948880
ucugcaaauacagagacuc

SEQ ID NO: 1948882 - RNA, 19 nt, Artificial Sequence
  Description of Artificial Sequence: Synthetic oligonucleotide
  Sense strand starting at position 3128 of SEQ ID NO: 1880191
augugaugcggcucuaguu

SEQ ID NO: 1948883 - RNA, 19 nt, Artificial Sequence
  Description of Artificial Sequence: Synthetic oligonucleotide
  Antisense strand to SEQ ID NO: 1948882
aacuagagccgcaucacau

SEQ ID NO: 1948884 - RNA, 19 nt, Artificial Sequence
  Description of Artificial Sequence: Synthetic oligonucleotide
  Sense strand starting at position 3159 of SEQ ID NO: 1880191
auaucuuccucauugagag

SEQ ID NO: 1948885 - RNA, 19 nt, Artificial Sequence
  Description of Artificial Sequence: Synthetic oligonucleotide
  Antisense strand to SEQ ID NO: 1948884
cucucaaugaggaagauau

SEQ ID NO: 1948886 - RNA, 19 nt, Artificial Sequence
  Description of Artificial Sequence: Synthetic oligonucleotide
  Sense strand starting at position 3215 of SEQ ID NO: 1880191
ggaagugauuaaguaccga

SEQ ID NO: 1948887 - RNA, 19 nt, Artificial Sequence
  Description of Artificial Sequence: Synthetic oligonucleotide
  Antisense strand to SEQ ID NO: 1948886
ucgguacuuaaucacuucc

SEQ ID NO: 1948888 - RNA, 19 nt, Artificial Sequence
  Description of Artificial Sequence: Synthetic oligonucleotide
  Sense strand starting at position 3362 of SEQ ID NO: 1880191
cagaaaucgggcugcucaa

SEQ ID NO: 1948889 - RNA, 19 nt, Artificial Sequence
  Description of Artificial Sequence: Synthetic oligonucleotide
  Antisense strand to SEQ ID NO: 1948888
uugagcagcccgauuucug

SEQ ID NO: 1948890 - RNA, 19 nt, Artificial Sequence
  Description of Artificial Sequence: Synthetic oligonucleotide
  Sense strand starting at position 3537 of SEQ ID NO: 1880191
aggugaccagugugcuuaa

SEQ ID NO: 1948891 - RNA, 19 nt, Artificial Sequence
  Description of Artificial Sequence: Synthetic oligonucleotide
  Antisense strand to SEQ ID NO: 1948890
uuaagcacacuggucaccu

SEQ ID NO: 1948892 - RNA, 19 nt, Artificial Sequence
  Description of Artificial Sequence: Synthetic oligonucleotide
  Sense strand starting at position 3824 of SEQ ID NO: 1880191
accauaugcuugucccaua

SEQ ID NO: 1948893 - RNA, 19 nt, Artificial Sequence
  Description of Artificial Sequence: Synthetic oligonucleotide
  Antisense strand to SEQ ID NO: 1948892
uaugggacaagcauauggu

SEQ ID NO: 1948894 - RNA, 19 nt, Artificial Sequence
  Description of Artificial Sequence: Synthetic oligonucleotide
  Sense strand starting at position 3835 of SEQ ID NO: 1880191
gucccauagucacuccgau

SEQ ID NO: 1948895 - RNA, 19 nt, Artificial Sequence
  Description of Artificial Sequence: Synthetic oligonucleotide
  Antisense strand to SEQ ID NO: 1948894
aucggagugacuaugggac

SEQ ID NO: 1948896 - RNA, 19 nt, Artificial Sequence
  Description of Artificial Sequence: Synthetic oligonucleotide
  Sense strand starting at position 3881 of SEQ ID NO: 1880191
uuaaauaucugaguugcuu

SEQ ID NO: 1948897 - RNA, 19 nt, Artificial Sequence
  Description of Artificial Sequence: Synthetic oligonucleotide
  Antisense strand to SEQ ID NO: 1948896
aagcaacucagauauuuaa

SEQ ID NO: 1948898 - RNA, 19 nt, Artificial Sequence
  Description of Artificial Sequence: Synthetic oligonucleotide
  Sense strand starting at position 41 of SEQ ID NO: 1880192
uguuaaauuccagaguauu

SEQ ID NO: 1948899 - RNA, 19 nt, Artificial Sequence
  Description of Artificial Sequence: Synthetic oligonucleotide
  Antisense strand to SEQ ID NO: 1948898
aauacucuggaauuuaaca

SEQ ID NO: 1948900 - RNA, 19 nt, Artificial Sequence
  Description of Artificial Sequence: Synthetic oligonucleotide
  Sense strand starting at position 211 of SEQ ID NO: 1880192
caaaucaaggcagguguua

SEQ ID NO: 1948901 - RNA, 19 nt, Artificial Sequence
  Description of Artificial Sequence: Synthetic oligonucleotide
  Antisense strand to SEQ ID NO: 1948900
uaacaccugccuugauuug

SEQ ID NO: 1948902 - RNA, 19 nt, Artificial Sequence
  Description of Artificial Sequence: Synthetic oligonucleotide
  Sense strand starting at position 400 of SEQ ID NO: 1880192
guagcucuugccuauaauu

SEQ ID NO: 1948903 - RNA, 19 nt, Artificial Sequence
  Description of Artificial Sequence: Synthetic oligonucleotide
  Antisense strand to SEQ ID NO: 1948902
aauuauaggcaagagcuac

SEQ ID NO: 1948904 - RNA, 19 nt, Artificial Sequence
  Description of Artificial Sequence: Synthetic oligonucleotide
  Sense strand starting at position 856 of SEQ ID NO: 1880192
aucuuaagcugcuuaaaga

SEQ ID NO: 1948905 - RNA, 19 nt, Artificial Sequence
  Description of Artificial Sequence: Synthetic oligonucleotide
  Antisense strand to SEQ ID NO: 1948904
ucuuuaagcagcuuaagau

SEQ ID NO: 1948906 - RNA, 19 nt, Artificial Sequence
  Description of Artificial Sequence: Synthetic oligonucleotide
  Sense strand starting at position 857 of SEQ ID NO: 1880192
ucuuaagcugcuuaaagaa

SEQ ID NO: 1948907 - RNA, 19 nt, Artificial Sequence
  Description of Artificial Sequence: Synthetic oligonucleotide
  Antisense strand to SEQ ID NO: 1948906
uucuuuaagcagcuuaaga

SEQ ID NO: 1948908 - RNA, 19 nt, Artificial Sequence
  Description of Artificial Sequence: Synthetic oligonucleotide
  Sense strand starting at position 920 of SEQ ID NO: 1880192
cccaaaguauuaguccauu

SEQ ID NO: 1948909 - RNA, 19 nt, Artificial Sequence
  Description of Artificial Sequence: Synthetic oligonucleotide
  Antisense strand to SEQ ID NO: 1948908
aauggacuaauacuuuggg

SEQ ID NO: 1948910 - RNA, 19 nt, Artificial Sequence
  Description of Artificial Sequence: Synthetic oligonucleotide
  Sense strand starting at position 1037 of SEQ ID NO: 1880192
agcagagauuaucuacguu

SEQ ID NO: 1948911 - RNA, 19 nt, Artificial Sequence
  Description of Artificial Sequence: Synthetic oligonucleotide
  Antisense strand to SEQ ID NO: 1948910
aacguagauaaucucugcu

SEQ ID NO: 1948912 - RNA, 19 nt, Artificial Sequence
  Description of Artificial Sequence: Synthetic oligonucleotide
  Sense strand starting at position 1040 of SEQ ID NO: 1880192
agagauuaucuacguuuau

SEQ ID NO: 1948913 - RNA, 19 nt, Artificial Sequence
  Description of Artificial Sequence: Synthetic oligonucleotide
  Antisense strand to SEQ ID NO: 1948912
auaaacguagauaaucucu

SEQ ID NO: 1948914 - RNA, 19 nt, Artificial Sequence
  Description of Artificial Sequence: Synthetic oligonucleotide
  Sense strand starting at position 1041 of SEQ ID NO: 1880192
gagauuaucuacguuuauc

SEQ ID NO: 1948915 - RNA, 19 nt, Artificial Sequence
  Description of Artificial Sequence: Synthetic oligonucleotide
  Antisense strand to SEQ ID NO: 1948914
gauaaacguagauaaucuc

SEQ ID NO: 1948916 - RNA, 19 nt, Artificial Sequence
  Description of Artificial Sequence: Synthetic oligonucleotide
  Sense strand starting at position 1401 of SEQ ID NO: 1880192
uggacuaaaucugacauua

SEQ ID NO: 1948917 - RNA, 19 nt, Artificial Sequence
  Description of Artificial Sequence: Synthetic oligonucleotide
  Antisense strand to SEQ ID NO: 1948916
uaaugucagauuuagucca

SEQ ID NO: 1948918 - RNA, 19 nt, Artificial Sequence
  Description of Artificial Sequence: Synthetic oligonucleotide
  Sense strand starting at position 1516 of SEQ ID NO: 1880192
agcguaagaaucugcaaua

SEQ ID NO: 1948919 - RNA, 19 nt, Artificial Sequence
  Description of Artificial Sequence: Synthetic oligonucleotide
  Antisense strand to SEQ ID NO: 1948918
uauugcagauucuuacgcu

SEQ ID NO: 1948920 - RNA, 19 nt, Artificial Sequence
  Description of Artificial Sequence: Synthetic oligonucleotide
  Sense strand starting at position 1517 of SEQ ID NO: 1880192
gcguaagaaucugcaauaa

SEQ ID NO: 1948921 - RNA, 19 nt, Artificial Sequence
  Description of Artificial Sequence: Synthetic oligonucleotide
  Antisense strand to SEQ ID NO: 1948920
uuauugcagauucuuacgc

SEQ ID NO: 1948922 - RNA, 19 nt, Artificial Sequence
  Description of Artificial Sequence: Synthetic oligonucleotide
  Sense strand starting at position 1534 of SEQ ID NO: 1880192
aaagacaaguauuagguaa

SEQ ID NO: 1948923 - RNA, 19 nt, Artificial Sequence
  Description of Artificial Sequence: Synthetic oligonucleotide
  Antisense strand to SEQ ID NO: 1948922
uuaccuaauacuugucuuu

SEQ ID NO: 1948924 - RNA, 19 nt, Artificial Sequence
  Description of Artificial Sequence: Synthetic oligonucleotide
  Sense strand starting at position 1619 of SEQ ID NO: 1880192
uuugucucuguguauauaa

SEQ ID NO: 1948925 - RNA, 19 nt, Artificial Sequence
  Description of Artificial Sequence: Synthetic oligonucleotide
  Antisense strand to SEQ ID NO: 1948924
uuauauacacagagacaaa

SEQ ID NO: 1948926 - RNA, 19 nt, Artificial Sequence
  Description of Artificial Sequence: Synthetic oligonucleotide
  Sense strand starting at position 1988 of SEQ ID NO: 1880192
uuacaucauugaccuugua

SEQ ID NO: 1948927 - RNA, 19 nt, Artificial Sequence
  Description of Artificial Sequence: Synthetic oligonucleotide
  Antisense strand to SEQ ID NO: 1948926
uacaaggucaaugauguaa

SEQ ID NO: 1948928 - RNA, 19 nt, Artificial Sequence
  Description of Artificial Sequence: Synthetic oligonucleotide
  Sense strand starting at position 1991 of SEQ ID NO: 1880192
caucauugaccuuguagga

SEQ ID NO: 1948929 - RNA, 19 nt, Artificial Sequence
  Description of Artificial Sequence: Synthetic oligonucleotide
  Antisense strand to SEQ ID NO: 1948928
uccuacaaggucaaugaug

SEQ ID NO: 1948930 - RNA, 19 nt, Artificial Sequence
  Description of Artificial Sequence: Synthetic oligonucleotide
  Sense strand starting at position 2082 of SEQ ID NO: 1880192
acauacuaucaagaucguu

SEQ ID NO: 1948931 - RNA, 19 nt, Artificial Sequence
  Description of Artificial Sequence: Synthetic oligonucleotide
  Antisense strand to SEQ ID NO: 1948930
aacgaucuugauaguaugu

SEQ ID NO: 1948932 - RNA, 19 nt, Artificial Sequence
  Description of Artificial Sequence: Synthetic oligonucleotide
  Sense strand starting at position 2087 of SEQ ID NO: 1880192
cuaucaagaucguugcaau

SEQ ID NO: 1948933 - RNA, 19 nt, Artificial Sequence
  Description of Artificial Sequence: Synthetic oligonucleotide
  Antisense strand to SEQ ID NO: 1948932
auugcaacgaucuugauag

SEQ ID NO: 1948934 - RNA, 19 nt, Artificial Sequence
  Description of Artificial Sequence: Synthetic oligonucleotide
  Sense strand starting at position 2088 of SEQ ID NO: 1880192
uaucaagaucguugcaauu

SEQ ID NO: 1948935 - RNA, 19 nt, Artificial Sequence
  Description of Artificial Sequence: Synthetic oligonucleotide
  Antisense strand to SEQ ID NO: 1948934
aauugcaacgaucuugaua

SEQ ID NO: 1948936 - RNA, 19 nt, Artificial Sequence
  Description of Artificial Sequence: Synthetic oligonucleotide
  Sense strand starting at position 2442 of SEQ ID NO: 1880192
cugaucaguagugaguuua

SEQ ID NO: 1948937 - RNA, 19 nt, Artificial Sequence
  Description of Artificial Sequence: Synthetic oligonucleotide
  Antisense strand to SEQ ID NO: 1948936
uaaacucacuacugaucag

SEQ ID NO: 1948938 - RNA, 19 nt, Artificial Sequence
  Description of Artificial Sequence: Synthetic oligonucleotide
  Sense strand starting at position 2542 of SEQ ID NO: 1880192
uuaguuaaucuauggcuga

SEQ ID NO: 1948939 - RNA, 19 nt, Artificial Sequence
  Description of Artificial Sequence: Synthetic oligonucleotide
  Antisense strand to SEQ ID NO: 1948938
ucagccauagauuaacuaa

SEQ ID NO: 1948940 - RNA, 19 nt, Artificial Sequence
  Description of Artificial Sequence: Synthetic oligonucleotide
  Sense strand starting at position 2545 of SEQ ID NO: 1880192
guuaaucuauggcugacaa

SEQ ID NO: 1948941 - RNA, 19 nt, Artificial Sequence
  Description of Artificial Sequence: Synthetic oligonucleotide
  Antisense strand to SEQ ID NO: 1948940
uugucagccauagauuaac

SEQ ID NO: 1948942 - RNA, 19 nt, Artificial Sequence
  Description of Artificial Sequence: Synthetic oligonucleotide
  Sense strand starting at position 2546 of SEQ ID NO: 1880192
uuaaucuauggcugacaau

SEQ ID NO: 1948943 - RNA, 19 nt, Artificial Sequence
  Description of Artificial Sequence: Synthetic oligonucleotide
  Antisense strand to SEQ ID NO: 1948942
auugucagccauagauuaa

SEQ ID NO: 1948944 - RNA, 19 nt, Artificial Sequence
  Description of Artificial Sequence: Synthetic oligonucleotide
  Sense strand starting at position 2574 of SEQ ID NO: 1880192
gcuuuaguuucucccauga

SEQ ID NO: 1948945 - RNA, 19 nt, Artificial Sequence
  Description of Artificial Sequence: Synthetic oligonucleotide
  Antisense strand to SEQ ID NO: 1948944
ucaugggagaaacuaaagc

SEQ ID NO: 1948946 - RNA, 19 nt, Artificial Sequence
  Description of Artificial Sequence: Synthetic oligonucleotide
  Sense strand starting at position 2626 of SEQ ID NO: 1880192
agugaaguucagggagagu

SEQ ID NO: 1948947 - RNA, 19 nt, Artificial Sequence
  Description of Artificial Sequence: Synthetic oligonucleotide
  Antisense strand to SEQ ID NO: 1948946
acucucccugaacuucacu

SEQ ID NO: 1948948 - RNA, 19 nt, Artificial Sequence
  Description of Artificial Sequence: Synthetic oligonucleotide
  Sense strand starting at position 2641 of SEQ ID NO: 1880192
gaguauuucuuuccgagua

SEQ ID NO: 1948949 - RNA, 19 nt, Artificial Sequence
  Description of Artificial Sequence: Synthetic oligonucleotide
  Antisense strand to SEQ ID NO: 1948948
uacucggaaagaaauacuc

SEQ ID NO: 1948950 - RNA, 19 nt, Artificial Sequence
  Description of Artificial Sequence: Synthetic oligonucleotide
  Sense strand starting at position 2646 of SEQ ID NO: 1880192
uuucuuuccgaguaccuau

SEQ ID NO: 1948951 - RNA, 19 nt, Artificial Sequence
  Description of Artificial Sequence: Synthetic oligonucleotide
  Antisense strand to SEQ ID NO: 1948950
auagguacucggaaagaaa

SEQ ID NO: 1948952 - RNA, 19 nt, Artificial Sequence
  Description of Artificial Sequence: Synthetic oligonucleotide
  Sense strand starting at position 2689 of SEQ ID NO: 1880192
uaauguggacucuguacaa

SEQ ID NO: 1948953 - RNA, 19 nt, Artificial Sequence
  Description of Artificial Sequence: Synthetic oligonucleotide
  Antisense strand to SEQ ID NO: 1948952
uuguacagaguccacauua

SEQ ID NO: 1948954 - RNA, 19 nt, Artificial Sequence
  Description of Artificial Sequence: Synthetic oligonucleotide
  Sense strand starting at position 2770 of SEQ ID NO: 1880192
aaagauguuuaagcccaga

SEQ ID NO: 1948955 - RNA, 19 nt, Artificial Sequence
  Description of Artificial Sequence: Synthetic oligonucleotide
  Antisense strand to SEQ ID NO: 1948954
ucugggcuuaaacaucuuu

SEQ ID NO: 1948956 - RNA, 19 nt, Artificial Sequence
  Description of Artificial Sequence: Synthetic oligonucleotide
  Sense strand starting at position 2773 of SEQ ID NO: 1880192
gauguuuaagcccagauaa

SEQ ID NO: 1948957 - RNA, 19 nt, Artificial Sequence
  Description of Artificial Sequence: Synthetic oligonucleotide
  Antisense strand to SEQ ID NO: 1948956
uuaucugggcuuaaacauc

SEQ ID NO: 1948958 - RNA, 19 nt, Artificial Sequence
  Description of Artificial Sequence: Synthetic oligonucleotide
  Sense strand starting at position 2796 of SEQ ID NO: 1880192
guggcuaaucaaugauaca

SEQ ID NO: 1948959 - RNA, 19 nt, Artificial Sequence
  Description of Artificial Sequence: Synthetic oligonucleotide
  Antisense strand to SEQ ID NO: 1948958
uguaucauugauuagccac

SEQ ID NO: 1948960 - RNA, 19 nt, Artificial Sequence
  Description of Artificial Sequence: Synthetic oligonucleotide
  Sense strand starting at position 2824 of SEQ ID NO: 1880192
guauuaggauuccagaaac

SEQ ID NO: 1948961 - RNA, 19 nt, Artificial Sequence
  Description of Artificial Sequence: Synthetic oligonucleotide
  Antisense strand to SEQ ID NO: 1948960
guuucuggaauccuaauac

SEQ ID NO: 1948962 - RNA, 19 nt, Artificial Sequence
  Description of Artificial Sequence: Synthetic oligonucleotide
  Sense strand starting at position 3277 of SEQ ID NO: 1880192
uggccuuaacuccaugauu

SEQ ID NO: 1948963 - RNA, 19 nt, Artificial Sequence
  Description of Artificial Sequence: Synthetic oligonucleotide
  Antisense strand to SEQ ID NO: 1948962
aaucauggaguuaaggcca

SEQ ID NO: 1948964 - RNA, 19 nt, Artificial Sequence
  Description of Artificial Sequence: Synthetic oligonucleotide
  Sense strand starting at position 3364 of SEQ ID NO: 1880192
cccacaaaucgguagacua

SEQ ID NO: 1948965 - RNA, 19 nt, Artificial Sequence
  Description of Artificial Sequence: Synthetic oligonucleotide
  Antisense strand to SEQ ID NO: 1948964
uagucuaccgauuuguggg

SEQ ID NO: 1948966 - RNA, 19 nt, Artificial Sequence
  Description of Artificial Sequence: Synthetic oligonucleotide
  Sense strand starting at position 3428 of SEQ ID NO: 1880192
cuaaguuguuuacuacuuu

SEQ ID NO: 1948967 - RNA, 19 nt, Artificial Sequence
  Description of Artificial Sequence: Synthetic oligonucleotide
  Antisense strand to SEQ ID NO: 1948966
aaaguaguaaacaacuuag

SEQ ID NO: 1948968 - RNA, 19 nt, Artificial Sequence
  Description of Artificial Sequence: Synthetic oligonucleotide
  Sense strand starting at position 3447 of SEQ ID NO: 1880192
uugcuaagauugucccaga

SEQ ID NO: 1948969 - RNA, 19 nt, Artificial Sequence
  Description of Artificial Sequence: Synthetic oligonucleotide
  Antisense strand to SEQ ID NO: 1948968
ucugggacaaucuuagcaa

SEQ ID NO: 1948970 - RNA, 19 nt, Artificial Sequence
  Description of Artificial Sequence: Synthetic oligonucleotide
  Sense strand starting at position 3665 of SEQ ID NO: 1880192
gcccucucaguauagguaa

SEQ ID NO: 1948971 - RNA, 19 nt, Artificial Sequence
  Description of Artificial Sequence: Synthetic oligonucleotide
  Antisense strand to SEQ ID NO: 1948970
uuaccuauacugagagggc

SEQ ID NO: 1948972 - RNA, 19 nt, Artificial Sequence
  Description of Artificial Sequence: Synthetic oligonucleotide
  Sense strand starting at position 3762 of SEQ ID NO: 1880192
caguucucugcauggaguu

SEQ ID NO: 1948973 - RNA, 19 nt, Artificial Sequence
  Description of Artificial Sequence: Synthetic oligonucleotide
  Antisense strand to SEQ ID NO: 1948972
aacuccaugcagagaacug

SEQ ID NO: 1948974 - RNA, 19 nt, Artificial Sequence
  Description of Artificial Sequence: Synthetic oligonucleotide
  Sense strand starting at position 3772 of SEQ ID NO: 1880192
cauggaguuggaugccauu

SEQ ID NO: 1948975 - RNA, 19 nt, Artificial Sequence
  Description of Artificial Sequence: Synthetic oligonucleotide
  Antisense strand to SEQ ID NO: 1948974
aauggcauccaacuccaug

SEQ ID NO: 1948976 - RNA, 19 nt, Artificial Sequence
  Description of Artificial Sequence: Synthetic oligonucleotide
  Sense strand starting at position 3812 of SEQ ID NO: 1880192
acugcuuaugacugucaca

SEQ ID NO: 1948977 - RNA, 19 nt, Artificial Sequence
  Description of Artificial Sequence: Synthetic oligonucleotide
  Antisense strand to SEQ ID NO: 1948976
ugugacagucauaagcagu

SEQ ID NO: 1948978 - RNA, 19 nt, Artificial Sequence
  Description of Artificial Sequence: Synthetic oligonucleotide
  Sense strand starting at position 37 of SEQ ID NO: 1880193
cugaucaguagugaguuua

SEQ ID NO: 1948979 - RNA, 19 nt, Artificial Sequence
  Description of Artificial Sequence: Synthetic oligonucleotide
  Antisense strand to SEQ ID NO: 1948978
uaaacucacuacugaucag

SEQ ID NO: 1948980 - RNA, 19 nt, Artificial Sequence
  Description of Artificial Sequence: Synthetic oligonucleotide
  Sense strand starting at position 137 of SEQ ID NO: 1880193
uuaguuaaucuauggcuga

SEQ ID NO: 1948981 - RNA, 19 nt, Artificial Sequence
  Description of Artificial Sequence: Synthetic oligonucleotide
  Antisense strand to SEQ ID NO: 1948980
ucagccauagauuaacuaa

SEQ ID NO: 1948982 - RNA, 19 nt, Artificial Sequence
  Description of Artificial Sequence: Synthetic oligonucleotide
  Sense strand starting at position 140 of SEQ ID NO: 1880193
guuaaucuauggcugacaa

SEQ ID NO: 1948983 - RNA, 19 nt, Artificial Sequence
  Description of Artificial Sequence: Synthetic oligonucleotide
  Antisense strand to SEQ ID NO: 1948982
uugucagccauagauuaac

SEQ ID NO: 1948984 - RNA, 19 nt, Artificial Sequence
  Description of Artificial Sequence: Synthetic oligonucleotide
  Sense strand starting at position 141 of SEQ ID NO: 1880193
uuaaucuauggcugacaau

SEQ ID NO: 1948985 - RNA, 19 nt, Artificial Sequence
  Description of Artificial Sequence: Synthetic oligonucleotide
  Antisense strand to SEQ ID NO: 1948984
auugucagccauagauuaa

SEQ ID NO: 1948986 - RNA, 19 nt, Artificial Sequence
  Description of Artificial Sequence: Synthetic oligonucleotide
  Sense strand starting at position 169 of SEQ ID NO: 1880193
gcuuuaguuucucccauga

SEQ ID NO: 1948987 - RNA, 19 nt, Artificial Sequence
  Description of Artificial Sequence: Synthetic oligonucleotide
  Antisense strand to SEQ ID NO: 1948986
ucaugggagaaacuaaagc

SEQ ID NO: 1948988 - RNA, 19 nt, Artificial Sequence
  Description of Artificial Sequence: Synthetic oligonucleotide
  Sense strand starting at position 221 of SEQ ID NO: 1880193
agugaaguucagggagagu

SEQ ID NO: 1948989 - RNA, 19 nt, Artificial Sequence
  Description of Artificial Sequence: Synthetic oligonucleotide
  Antisense strand to SEQ ID NO: 1948988
acucucccugaacuucacu

SEQ ID NO: 1948990 - RNA, 19 nt, Artificial Sequence
  Description of Artificial Sequence: Synthetic oligonucleotide
  Sense strand starting at position 236 of SEQ ID NO: 1880193
gaguauuucuuuccgagua

SEQ ID NO: 1948991 - RNA, 19 nt, Artificial Sequence
  Description of Artificial Sequence: Synthetic oligonucleotide
  Antisense strand to SEQ ID NO: 1948990
uacucggaaagaaauacuc

SEQ ID NO: 1948992 - RNA, 19 nt, Artificial Sequence
  Description of Artificial Sequence: Synthetic oligonucleotide
  Sense strand starting at position 241 of SEQ ID NO: 1880193
uuucuuuccgaguaccuau

SEQ ID NO: 1948993 - RNA, 19 nt, Artificial Sequence
  Description of Artificial Sequence: Synthetic oligonucleotide
  Antisense strand to SEQ ID NO: 1948992
auagguacucggaaagaaa

SEQ ID NO: 1948994 - RNA, 19 nt, Artificial Sequence
  Description of Artificial Sequence: Synthetic oligonucleotide
  Sense strand starting at position 284 of SEQ ID NO: 1880193
uaauguggacucuguacaa

SEQ ID NO: 1948995 - RNA, 19 nt, Artificial Sequence
  Description of Artificial Sequence: Synthetic oligonucleotide
  Antisense strand to SEQ ID NO: 1948994
uuguacagaguccacauua

SEQ ID NO: 1948996 - RNA, 19 nt, Artificial Sequence
  Description of Artificial Sequence: Synthetic oligonucleotide
  Sense strand starting at position 365 of SEQ ID NO: 1880193
aaagauguuuaagcccaga

SEQ ID NO: 1948997 - RNA, 19 nt, Artificial Sequence
  Description of Artificial Sequence: Synthetic oligonucleotide
  Antisense strand to SEQ ID NO: 1948996
ucugggcuuaaacaucuuu

SEQ ID NO: 1948998 - RNA, 19 nt, Artificial Sequence
  Description of Artificial Sequence: Synthetic oligonucleotide
  Sense strand starting at position 368 of SEQ ID NO: 1880193
gauguuuaagcccagauaa

SEQ ID NO: 1948999 - RNA, 19 nt, Artificial Sequence
  Description of Artificial Sequence: Synthetic oligonucleotide
  Antisense strand to SEQ ID NO: 1948998
uuaucugggcuuaaacauc

SEQ ID NO: 1949000 - RNA, 19 nt, Artificial Sequence
  Description of Artificial Sequence: Synthetic oligonucleotide
  Sense strand starting at position 391 of SEQ ID NO: 1880193
guggcuaaucaaugauaca

SEQ ID NO: 1949001 - RNA, 19 nt, Artificial Sequence
  Description of Artificial Sequence: Synthetic oligonucleotide
  Antisense strand to SEQ ID NO: 1949000
uguaucauugauuagccac

SEQ ID NO: 1949002 - RNA, 19 nt, Artificial Sequence
  Description of Artificial Sequence: Synthetic oligonucleotide
  Sense strand starting at position 872 of SEQ ID NO: 1880193
uggccuuaacuccaugauu

SEQ ID NO: 1949003 - RNA, 19 nt, Artificial Sequence
  Description of Artificial Sequence: Synthetic oligonucleotide
  Antisense strand to SEQ ID NO: 1949002
aaucauggaguuaaggcca

SEQ ID NO: 1949004 - RNA, 19 nt, Artificial Sequence
  Description of Artificial Sequence: Synthetic oligonucleotide
  Sense strand starting at position 959 of SEQ ID NO: 1880193
cccacaaaucgguagacua

SEQ ID NO: 1949005 - RNA, 19 nt, Artificial Sequence
  Description of Artificial Sequence: Synthetic oligonucleotide
  Antisense strand to SEQ ID NO: 1949004
uagucuaccgauuuguggg

SEQ ID NO: 1949006 - RNA, 19 nt, Artificial Sequence
  Description of Artificial Sequence: Synthetic oligonucleotide
  Sense strand starting at position 1023 of SEQ ID NO: 1880193
cuaaguuguuuacuacuuu

SEQ ID NO: 1949007 - RNA, 19 nt, Artificial Sequence
  Description of Artificial Sequence: Synthetic oligonucleotide
  Antisense strand to SEQ ID NO: 1949006
aaaguaguaaacaacuuag

SEQ ID NO: 1949008 - RNA, 19 nt, Artificial Sequence
  Description of Artificial Sequence: Synthetic oligonucleotide
  Sense strand starting at position 1042 of SEQ ID NO: 1880193
uugcuaagauugucccaga

SEQ ID NO: 1949009 - RNA, 19 nt, Artificial Sequence
  Description of Artificial Sequence: Synthetic oligonucleotide
  Antisense strand to SEQ ID NO: 1949008
ucugggacaaucuuagcaa

SEQ ID NO: 1949010 - RNA, 19 nt, Artificial Sequence
  Description of Artificial Sequence: Synthetic oligonucleotide
  Sense strand starting at position 1260 of SEQ ID NO: 1880193
gcccucucaguauagguaa

SEQ ID NO: 1949011 - RNA, 19 nt, Artificial Sequence
  Description of Artificial Sequence: Synthetic oligonucleotide
  Antisense strand to SEQ ID NO: 1949010
uuaccuauacugagagggc

SEQ ID NO: 1949012 - RNA, 19 nt, Artificial Sequence
  Description of Artificial Sequence: Synthetic oligonucleotide
  Sense strand starting at position 1367 of SEQ ID NO: 1880193
cauggaguuggaugccauu

SEQ ID NO: 1949013 - RNA, 19 nt, Artificial Sequence
  Description of Artificial Sequence: Synthetic oligonucleotide
  Antisense strand to SEQ ID NO: 1949012
aauggcauccaacuccaug

SEQ ID NO: 1949014 - RNA, 19 nt, Artificial Sequence
  Description of Artificial Sequence: Synthetic oligonucleotide
  Sense strand starting at position 1407 of SEQ ID NO: 1880193
acugcuuaugacugucaca

SEQ ID NO: 1949015 - RNA, 19 nt, Artificial Sequence
  Description of Artificial Sequence: Synthetic oligonucleotide
  Antisense strand to SEQ ID NO: 1949014
ugugacagucauaagcagu

SEQ ID NO: 1949016 - RNA, 19 nt, Artificial Sequence
  Description of Artificial Sequence: Synthetic oligonucleotide
  Sense strand starting at position 1590 of SEQ ID NO: 1880193
gugguaaucucaucaaugu

SEQ ID NO: 1949017 - RNA, 19 nt, Artificial Sequence
  Description of Artificial Sequence: Synthetic oligonucleotide
  Antisense strand to SEQ ID NO: 1949016
acauugaugagauuaccac

SEQ ID NO: 1949018 - RNA, 19 nt, Artificial Sequence
  Description of Artificial Sequence: Synthetic oligonucleotide
  Sense strand starting at position 1591 of SEQ ID NO: 1880193
ugguaaucucaucaauguu

SEQ ID NO: 1949019 - RNA, 19 nt, Artificial Sequence
  Description of Artificial Sequence: Synthetic oligonucleotide
  Antisense strand to SEQ ID NO: 1949018
aacauugaugagauuacca

SEQ ID NO: 1949020 - RNA, 19 nt, Artificial Sequence
  Description of Artificial Sequence: Synthetic oligonucleotide
  Sense strand starting at position 1606 of SEQ ID NO: 1880193
uguuuaccucuacaacguu

SEQ ID NO: 1949021 - RNA, 19 nt, Artificial Sequence
  Description of Artificial Sequence: Synthetic oligonucleotide
  Antisense strand to SEQ ID NO: 1949020
aacguuguagagguaaaca

SEQ ID NO: 1949022 - RNA, 19 nt, Artificial Sequence
  Description of Artificial Sequence: Synthetic oligonucleotide
  Sense strand starting at position 1743 of SEQ ID NO: 1880193
gcuugagccagggaaauua

SEQ ID NO: 1949023 - RNA, 19 nt, Artificial Sequence
  Description of Artificial Sequence: Synthetic oligonucleotide
  Antisense strand to SEQ ID NO: 1949022
uaauuucccuggcucaagc

SEQ ID NO: 1949024 - RNA, 19 nt, Artificial Sequence
  Description of Artificial Sequence: Synthetic oligonucleotide
  Sense strand starting at position 2106 of SEQ ID NO: 1880193
acgguuuacauguggcaga

SEQ ID NO: 1949025 - RNA, 19 nt, Artificial Sequence
  Description of Artificial Sequence: Synthetic oligonucleotide
  Antisense strand to SEQ ID NO: 1949024
ucugccacauguaaaccgu

SEQ ID NO: 1949026 - RNA, 19 nt, Artificial Sequence
  Description of Artificial Sequence: Synthetic oligonucleotide
  Sense strand starting at position 2171 of SEQ ID NO: 1880193
cgaauucuugcuuaaucaa

SEQ ID NO: 1949027 - RNA, 19 nt, Artificial Sequence
  Description of Artificial Sequence: Synthetic oligonucleotide
  Antisense strand to SEQ ID NO: 1949026
uugauuaagcaagaauucg

SEQ ID NO: 1949028 - RNA, 19 nt, Artificial Sequence
  Description of Artificial Sequence: Synthetic oligonucleotide
  Sense strand starting at position 2285 of SEQ ID NO: 1880193
gagucucuguauuugcaga

SEQ ID NO: 1949029 - RNA, 19 nt, Artificial Sequence
  Description of Artificial Sequence: Synthetic oligonucleotide
  Antisense strand to SEQ ID NO: 1949028
ucugcaaauacagagacuc

SEQ ID NO: 1949030 - RNA, 19 nt, Artificial Sequence
  Description of Artificial Sequence: Synthetic oligonucleotide
  Sense strand starting at position 2311 of SEQ ID NO: 1880193
augugaugcggcucuaguu

SEQ ID NO: 1949031 - RNA, 19 nt, Artificial Sequence
  Description of Artificial Sequence: Synthetic oligonucleotide
  Antisense strand to SEQ ID NO: 1949030
aacuagagccgcaucacau

SEQ ID NO: 1949032 - RNA, 19 nt, Artificial Sequence
  Description of Artificial Sequence: Synthetic oligonucleotide
  Sense strand starting at position 2342 of SEQ ID NO: 1880193
auaucuuccucauugagag

SEQ ID NO: 1949033 - RNA, 19 nt, Artificial Sequence
  Description of Artificial Sequence: Synthetic oligonucleotide
  Antisense strand to SEQ ID NO: 1949032
cucucaaugaggaagauau

SEQ ID NO: 1949034 - RNA, 19 nt, Artificial Sequence
  Description of Artificial Sequence: Synthetic oligonucleotide
  Sense strand starting at position 2398 of SEQ ID NO: 1880193
ggaagugauuaaguaccga

SEQ ID NO: 1949035 - RNA, 19 nt, Artificial Sequence
  Description of Artificial Sequence: Synthetic oligonucleotide
  Antisense strand to SEQ ID NO: 1949034
ucgguacuuaaucacuucc

SEQ ID NO: 1949036 - RNA, 19 nt, Artificial Sequence
  Description of Artificial Sequence: Synthetic oligonucleotide
  Sense strand starting at position 2545 of SEQ ID NO: 1880193
cagaaaucgggcugcucaa

SEQ ID NO: 1949037 - RNA, 19 nt, Artificial Sequence
  Description of Artificial Sequence: Synthetic oligonucleotide
  Antisense strand to SEQ ID NO: 1949036
uugagcagcccgauuucug

SEQ ID NO: 1949038 - RNA, 19 nt, Artificial Sequence
  Description of Artificial Sequence: Synthetic oligonucleotide
  Sense strand starting at position 2720 of SEQ ID NO: 1880193
aggugaccagugugcuuaa

SEQ ID NO: 1949039 - RNA, 19 nt, Artificial Sequence
  Description of Artificial Sequence: Synthetic oligonucleotide
  Antisense strand to SEQ ID NO: 1949038
uuaagcacacuggucaccu

SEQ ID NO: 1949040 - RNA, 19 nt, Artificial Sequence
  Description of Artificial Sequence: Synthetic oligonucleotide
  Sense strand starting at position 3007 of SEQ ID NO: 1880193
accauaugcuugucccaua

SEQ ID NO: 1949041 - RNA, 19 nt, Artificial Sequence
  Description of Artificial Sequence: Synthetic oligonucleotide
  Antisense strand to SEQ ID NO: 1949040
uaugggacaagcauauggu

SEQ ID NO: 1949042 - RNA, 19 nt, Artificial Sequence
  Description of Artificial Sequence: Synthetic oligonucleotide
  Sense strand starting at position 3018 of SEQ ID NO: 1880193
gucccauagucacuccgau

SEQ ID NO: 1949043 - RNA, 19 nt, Artificial Sequence
  Description of Artificial Sequence: Synthetic oligonucleotide
  Antisense strand to SEQ ID NO: 1949042
aucggagugacuaugggac

SEQ ID NO: 1949044 - RNA, 19 nt, Artificial Sequence
  Description of Artificial Sequence: Synthetic oligonucleotide
  Sense strand starting at position 3064 of SEQ ID NO: 1880193
uuaaauaucugaguugcuu

SEQ ID NO: 1949045 - RNA, 19 nt, Artificial Sequence
  Description of Artificial Sequence: Synthetic oligonucleotide
  Antisense strand to SEQ ID NO: 1949044
aagcaacucagauauuuaa

SEQ ID NO: 1949046 - RNA, 19 nt, Artificial Sequence
  Description of Artificial Sequence: Synthetic oligonucleotide
  Sense strand starting at position 3286 of SEQ ID NO: 1880193
aaagauaauucggcgauua

SEQ ID NO: 1949047 - RNA, 19 nt, Artificial Sequence
  Description of Artificial Sequence: Synthetic oligonucleotide
  Antisense strand to SEQ ID NO: 1949046
uaaucgccgaauuaucuuu

SEQ ID NO: 1949048 - RNA, 19 nt, Artificial Sequence
  Description of Artificial Sequence: Synthetic oligonucleotide
  Sense strand starting at position 3287 of SEQ ID NO: 1880193
aagauaauucggcgauuag

SEQ ID NO: 1949049 - RNA, 19 nt, Artificial Sequence
  Description of Artificial Sequence: Synthetic oligonucleotide
  Antisense strand to SEQ ID NO: 1949048
cuaaucgccgaauuaucuu

SEQ ID NO: 1949050 - RNA, 19 nt, Artificial Sequence
  Description of Artificial Sequence: Synthetic oligonucleotide
  Sense strand starting at position 3288 of SEQ ID NO: 1880193
agauaauucggcgauuagg

SEQ ID NO: 1949051 - RNA, 19 nt, Artificial Sequence
  Description of Artificial Sequence: Synthetic oligonucleotide
  Antisense strand to SEQ ID NO: 1949050
ccuaaucgccgaauuaucu

SEQ ID NO: 1949052 - RNA, 19 nt, Artificial Sequence
  Description of Artificial Sequence: Synthetic oligonucleotide
  Sense strand starting at position 3408 of SEQ ID NO: 1880193
agaacugguugagccaaau

SEQ ID NO: 1949053 - RNA, 19 nt, Artificial Sequence
  Description of Artificial Sequence: Synthetic oligonucleotide
  Antisense strand to SEQ ID NO: 1949052
auuuggcucaaccaguucu

SEQ ID NO: 1949054 - RNA, 19 nt, Artificial Sequence
  Description of Artificial Sequence: Synthetic oligonucleotide
  Sense strand starting at position 3426 of SEQ ID NO: 1880193
uuaccaaucugggugguuu

SEQ ID NO: 1949055 - RNA, 19 nt, Artificial Sequence
  Description of Artificial Sequence: Synthetic oligonucleotide
  Antisense strand to SEQ ID NO: 1949054
aaaccacccagauugguaa

SEQ ID NO: 1949056 - RNA, 19 nt, Artificial Sequence
  Description of Artificial Sequence: Synthetic oligonucleotide
  Sense strand starting at position 3481 of SEQ ID NO: 1880193
ucaagaacuuaucuuaggu

SEQ ID NO: 1949057 - RNA, 19 nt, Artificial Sequence
  Description of Artificial Sequence: Synthetic oligonucleotide
  Antisense strand to SEQ ID NO: 1949056
accuaagauaaguucuuga

SEQ ID NO: 1949058 - RNA, 19 nt, Artificial Sequence
  Description of Artificial Sequence: Synthetic oligonucleotide
  Sense strand starting at position 28 of SEQ ID NO: 1880194
ccagcugucuccucagaca

SEQ ID NO: 1949059 - RNA, 19 nt, Artificial Sequence
  Description of Artificial Sequence: Synthetic oligonucleotide
  Antisense strand to SEQ ID NO: 1949058
ugucugaggagacagcugg

SEQ ID NO: 1949060 - RNA, 19 nt, Artificial Sequence
  Description of Artificial Sequence: Synthetic oligonucleotide
  Sense strand starting at position 241 of SEQ ID NO: 1880194
gccuguuaucagugaaccc

SEQ ID NO: 1949061 - RNA, 19 nt, Artificial Sequence
  Description of Artificial Sequence: Synthetic oligonucleotide
  Antisense strand to SEQ ID NO: 1949060
ggguucacugauaacaggc

SEQ ID NO: 1949062 - RNA, 19 nt, Artificial Sequence
  Description of Artificial Sequence: Synthetic oligonucleotide
  Sense strand starting at position 543 of SEQ ID NO: 1880194
gggagcuuucucgaacccu

SEQ ID NO: 1949063 - RNA, 19 nt, Artificial Sequence
  Description of Artificial Sequence: Synthetic oligonucleotide
  Antisense strand to SEQ ID NO: 1949062
aggguucgagaaagcuccc

SEQ ID NO: 1949064 - RNA, 19 nt, Artificial Sequence
  Description of Artificial Sequence: Synthetic oligonucleotide
  Sense strand starting at position 889 of SEQ ID NO: 1880194
ggagaaauuuggcaucaag

SEQ ID NO: 1949065 - RNA, 19 nt, Artificial Sequence
  Description of Artificial Sequence: Synthetic oligonucleotide
  Antisense strand to SEQ ID NO: 1949064
cuugaugccaaauuucucc

SEQ ID NO: 1949066 - RNA, 19 nt, Artificial Sequence
  Description of Artificial Sequence: Synthetic oligonucleotide
  Sense strand starting at position 918 of SEQ ID NO: 1880194
gacaaauggcccuggcaca

SEQ ID NO: 1949067 - RNA, 19 nt, Artificial Sequence
  Description of Artificial Sequence: Synthetic oligonucleotide
  Antisense strand to SEQ ID NO: 1949066
ugugccagggccauuuguc

SEQ ID NO: 1949068 - RNA, 19 nt, Artificial Sequence
  Description of Artificial Sequence: Synthetic oligonucleotide
  Sense strand starting at position 980 of SEQ ID NO: 1880194
agggaacucucagccuuua

SEQ ID NO: 1949069 - RNA, 19 nt, Artificial Sequence
  Description of Artificial Sequence: Synthetic oligonucleotide
  Antisense strand to SEQ ID NO: 1949068
uaaaggcugagaguucccu

SEQ ID NO: 1949070 - RNA, 19 nt, Artificial Sequence
  Description of Artificial Sequence: Synthetic oligonucleotide
  Sense strand starting at position 1009 of SEQ ID NO: 1880194
ggcaucaguucgucuucca

SEQ ID NO: 1949071 - RNA, 19 nt, Artificial Sequence
  Description of Artificial Sequence: Synthetic oligonucleotide
  Antisense strand to SEQ ID NO: 1949070
uggaagacgaacugaugcc

SEQ ID NO: 1949072 - RNA, 19 nt, Artificial Sequence
  Description of Artificial Sequence: Synthetic oligonucleotide
  Sense strand starting at position 1012 of SEQ ID NO: 1880194
aucaguucgucuuccacaa

SEQ ID NO: 1949073 - RNA, 19 nt, Artificial Sequence
  Description of Artificial Sequence: Synthetic oligonucleotide
  Antisense strand to SEQ ID NO: 1949072
uuguggaagacgaacugau

SEQ ID NO: 1949074 - RNA, 19 nt, Artificial Sequence
  Description of Artificial Sequence: Synthetic oligonucleotide
  Sense strand starting at position 1040 of SEQ ID NO: 1880194
ccacguuucuaguuauguu

SEQ ID NO: 1949075 - RNA, 19 nt, Artificial Sequence
  Description of Artificial Sequence: Synthetic oligonucleotide
  Antisense strand to SEQ ID NO: 1949074
aacauaacuagaaacgugg

SEQ ID NO: 1949076 - RNA, 19 nt, Artificial Sequence
  Description of Artificial Sequence: Synthetic oligonucleotide
  Sense strand starting at position 1047 of SEQ ID NO: 1880194
ucuaguuauguuuggcaac

SEQ ID NO: 1949077 - RNA, 19 nt, Artificial Sequence
  Description of Artificial Sequence: Synthetic oligonucleotide
  Antisense strand to SEQ ID NO: 1949076
guugccaaacauaacuaga

SEQ ID NO: 1949078 - RNA, 19 nt, Artificial Sequence
  Description of Artificial Sequence: Synthetic oligonucleotide
  Sense strand starting at position 1490 of SEQ ID NO: 1880194
uggucuaagccacagacua

SEQ ID NO: 1949079 - RNA, 19 nt, Artificial Sequence
  Description of Artificial Sequence: Synthetic oligonucleotide
  Antisense strand to SEQ ID NO: 1949078
uagucuguggcuuagacca

SEQ ID NO: 1949080 - RNA, 19 nt, Artificial Sequence
  Description of Artificial Sequence: Synthetic oligonucleotide
  Sense strand starting at position 1498 of SEQ ID NO: 1880194
gccacagacuacuugcuaa

SEQ ID NO: 1949081 - RNA, 19 nt, Artificial Sequence
  Description of Artificial Sequence: Synthetic oligonucleotide
  Antisense strand to SEQ ID NO: 1949080
uuagcaaguagucuguggc

SEQ ID NO: 1949082 - RNA, 19 nt, Artificial Sequence
  Description of Artificial Sequence: Synthetic oligonucleotide
  Sense strand starting at position 1540 of SEQ ID NO: 1880194
cugagagucucgcucuguu

SEQ ID NO: 1949083 - RNA, 19 nt, Artificial Sequence
  Description of Artificial Sequence: Synthetic oligonucleotide
  Antisense strand to SEQ ID NO: 1949082
aacagagcgagacucucag

SEQ ID NO: 1949084 - RNA, 19 nt, Artificial Sequence
  Description of Artificial Sequence: Synthetic oligonucleotide
  Sense strand starting at position 1898 of SEQ ID NO: 1880194
ggcaacagucaguguaacu

SEQ ID NO: 1949085 - RNA, 19 nt, Artificial Sequence
  Description of Artificial Sequence: Synthetic oligonucleotide
  Antisense strand to SEQ ID NO: 1949084
aguuacacugacuguugcc

SEQ ID NO: 1949086 - RNA, 19 nt, Artificial Sequence
  Description of Artificial Sequence: Synthetic oligonucleotide
  Sense strand starting at position 2122 of SEQ ID NO: 1880194
acaguauccuucucucuga

SEQ ID NO: 1949087 - RNA, 19 nt, Artificial Sequence
  Description of Artificial Sequence: Synthetic oligonucleotide
  Antisense strand to SEQ ID NO: 1949086
ucagagagaaggauacugu

SEQ ID NO: 1949088 - RNA, 19 nt, Artificial Sequence
  Description of Artificial Sequence: Synthetic oligonucleotide
  Sense strand starting at position 2168 of SEQ ID NO: 1880194
gagggagcauucccucuuu

SEQ ID NO: 1949089 - RNA, 19 nt, Artificial Sequence
  Description of Artificial Sequence: Synthetic oligonucleotide
  Antisense strand to SEQ ID NO: 1949088
aaagagggaaugcucccuc

SEQ ID NO: 1949090 - RNA, 19 nt, Artificial Sequence
  Description of Artificial Sequence: Synthetic oligonucleotide
  Sense strand starting at position 2180 of SEQ ID NO: 1880194
ccucuuugguacuuacuua

SEQ ID NO: 1949091 - RNA, 19 nt, Artificial Sequence
  Description of Artificial Sequence: Synthetic oligonucleotide
  Antisense strand to SEQ ID NO: 1949090
uaaguaaguaccaaagagg

SEQ ID NO: 1949092 - RNA, 19 nt, Artificial Sequence
  Description of Artificial Sequence: Synthetic oligonucleotide
  Sense strand starting at position 2449 of SEQ ID NO: 1880194
ccgagagaugccugcaugu

SEQ ID NO: 1949093 - RNA, 19 nt, Artificial Sequence
  Description of Artificial Sequence: Synthetic oligonucleotide
  Antisense strand to SEQ ID NO: 1949092
acaugcaggcaucucucgg

SEQ ID NO: 1949094 - RNA, 19 nt, Artificial Sequence
  Description of Artificial Sequence: Synthetic oligonucleotide
  Sense strand starting at position 2554 of SEQ ID NO: 1880194
cgcucagcucuccaagguu

SEQ ID NO: 1949095 - RNA, 19 nt, Artificial Sequence
  Description of Artificial Sequence: Synthetic oligonucleotide
  Antisense strand to SEQ ID NO: 1949094
aaccuuggagagcugagcg

SEQ ID NO: 1949096 - RNA, 19 nt, Artificial Sequence
  Description of Artificial Sequence: Synthetic oligonucleotide
  Sense strand starting at position 2978 of SEQ ID NO: 1880194
uuguuucugagcgccgaaa

SEQ ID NO: 1949097 - RNA, 19 nt, Artificial Sequence
  Description of Artificial Sequence: Synthetic oligonucleotide
  Antisense strand to SEQ ID NO: 1949096
uuucggcgcucagaaacaa

SEQ ID NO: 1949098 - RNA, 19 nt, Artificial Sequence
  Description of Artificial Sequence: Synthetic oligonucleotide
  Sense strand starting at position 2980 of SEQ ID NO: 1880194
guuucugagcgccgaaaca

SEQ ID NO: 1949099 - RNA, 19 nt, Artificial Sequence
  Description of Artificial Sequence: Synthetic oligonucleotide
  Antisense strand to SEQ ID NO: 1949098
uguuucggcgcucagaaac

SEQ ID NO: 1949100 - RNA, 19 nt, Artificial Sequence
  Description of Artificial Sequence: Synthetic oligonucleotide
  Sense strand starting at position 3138 of SEQ ID NO: 1880194
ggcagaucugggcguguuu

SEQ ID NO: 1949101 - RNA, 19 nt, Artificial Sequence
  Description of Artificial Sequence: Synthetic oligonucleotide
  Antisense strand to SEQ ID NO: 1949100
aaacacgcccagaucugcc

SEQ ID NO: 1949102 - RNA, 19 nt, Artificial Sequence
  Description of Artificial Sequence: Synthetic oligonucleotide
  Sense strand starting at position 3147 of SEQ ID NO: 1880194
gggcguguuuagacuaguu

SEQ ID NO: 1949103 - RNA, 19 nt, Artificial Sequence
  Description of Artificial Sequence: Synthetic oligonucleotide
  Antisense strand to SEQ ID NO: 1949102
aacuagucuaaacacgccc

SEQ ID NO: 1949104 - RNA, 19 nt, Artificial Sequence
  Description of Artificial Sequence: Synthetic oligonucleotide
  Sense strand starting at position 3149 of SEQ ID NO: 1880194
gcguguuuagacuaguuuc

SEQ ID NO: 1949105 - RNA, 19 nt, Artificial Sequence
  Description of Artificial Sequence: Synthetic oligonucleotide
  Antisense strand to SEQ ID NO: 1949104
gaaacuagucuaaacacgc

SEQ ID NO: 1949106 - RNA, 19 nt, Artificial Sequence
  Description of Artificial Sequence: Synthetic oligonucleotide
  Sense strand starting at position 3180 of SEQ ID NO: 1880194
ggucguuuaggaugagaug

SEQ ID NO: 1949107 - RNA, 19 nt, Artificial Sequence
  Description of Artificial Sequence: Synthetic oligonucleotide
  Antisense strand to SEQ ID NO: 1949106
caucucauccuaaacgacc

SEQ ID NO: 1949108 - RNA, 19 nt, Artificial Sequence
  Description of Artificial Sequence: Synthetic oligonucleotide
  Sense strand starting at position 3181 of SEQ ID NO: 1880194
gucguuuaggaugagaugu

SEQ ID NO: 1949109 - RNA, 19 nt, Artificial Sequence
  Description of Artificial Sequence: Synthetic oligonucleotide
  Antisense strand to SEQ ID NO: 1949108
acaucucauccuaaacgac

SEQ ID NO: 1949110 - RNA, 19 nt, Artificial Sequence
  Description of Artificial Sequence: Synthetic oligonucleotide
  Sense strand starting at position 3318 of SEQ ID NO: 1880194
ugucaaggauuccuaagau

SEQ ID NO: 1949111 - RNA, 19 nt, Artificial Sequence
  Description of Artificial Sequence: Synthetic oligonucleotide
  Antisense strand to SEQ ID NO: 1949110
aucuuaggaauccuugaca

SEQ ID NO: 1949112 - RNA, 19 nt, Artificial Sequence
  Description of Artificial Sequence: Synthetic oligonucleotide
  Sense strand starting at position 3322 of SEQ ID NO: 1880194
aaggauuccuaagauuguc

SEQ ID NO: 1949113 - RNA, 19 nt, Artificial Sequence
  Description of Artificial Sequence: Synthetic oligonucleotide
  Antisense strand to SEQ ID NO: 1949112
gacaaucuuaggaauccuu

SEQ ID NO: 1949114 - RNA, 19 nt, Artificial Sequence
  Description of Artificial Sequence: Synthetic oligonucleotide
  Sense strand starting at position 3328 of SEQ ID NO: 1880194
uccuaagauugucacuuga

SEQ ID NO: 1949115 - RNA, 19 nt, Artificial Sequence
  Description of Artificial Sequence: Synthetic oligonucleotide
  Antisense strand to SEQ ID NO: 1949114
ucaagugacaaucuuagga

SEQ ID NO: 1949116 - RNA, 19 nt, Artificial Sequence
  Description of Artificial Sequence: Synthetic oligonucleotide
  Sense strand starting at position 3330 of SEQ ID NO: 1880194
cuaagauugucacuugauc

SEQ ID NO: 1949117 - RNA, 19 nt, Artificial Sequence
  Description of Artificial Sequence: Synthetic oligonucleotide
  Antisense strand to SEQ ID NO: 1949116
gaucaagugacaaucuuag

SEQ ID NO: 1949118 - RNA, 19 nt, Artificial Sequence
  Description of Artificial Sequence: Synthetic oligonucleotide
  Sense strand starting at position 3342 of SEQ ID NO: 1880194
cuugaucaaucggauaaau

SEQ ID NO: 1949119 - RNA, 19 nt, Artificial Sequence
  Description of Artificial Sequence: Synthetic oligonucleotide
  Antisense strand to SEQ ID NO: 1949118
auuuauccgauugaucaag

SEQ ID NO: 1949120 - RNA, 19 nt, Artificial Sequence
  Description of Artificial Sequence: Synthetic oligonucleotide
  Sense strand starting at position 3425 of SEQ ID NO: 1880194
agaucuugcuaagucaugu

SEQ ID NO: 1949121 - RNA, 19 nt, Artificial Sequence
  Description of Artificial Sequence: Synthetic oligonucleotide
  Antisense strand to SEQ ID NO: 1949120
acaugacuuagcaagaucu

SEQ ID NO: 1949122 - RNA, 19 nt, Artificial Sequence
  Description of Artificial Sequence: Synthetic oligonucleotide
  Sense strand starting at position 3436 of SEQ ID NO: 1880194
agucauguugagugggacu

SEQ ID NO: 1949123 - RNA, 19 nt, Artificial Sequence
  Description of Artificial Sequence: Synthetic oligonucleotide
  Antisense strand to SEQ ID NO: 1949122
agucccacucaacaugacu

SEQ ID NO: 1949124 - RNA, 19 nt, Artificial Sequence
  Description of Artificial Sequence: Synthetic oligonucleotide
  Sense strand starting at position 3438 of SEQ ID NO: 1880194
ucauguugagugggacuaa

SEQ ID NO: 1949125 - RNA, 19 nt, Artificial Sequence
  Description of Artificial Sequence: Synthetic oligonucleotide
  Antisense strand to SEQ ID NO: 1949124
uuagucccacucaacauga

SEQ ID NO: 1949126 - RNA, 19 nt, Artificial Sequence
  Description of Artificial Sequence: Synthetic oligonucleotide
  Sense strand starting at position 3470 of SEQ ID NO: 1880194
gaauauuaaugacugguca

SEQ ID NO: 1949127 - RNA, 19 nt, Artificial Sequence
  Description of Artificial Sequence: Synthetic oligonucleotide
  Antisense strand to SEQ ID NO: 1949126
ugaccagucauuaauauuc

SEQ ID NO: 1949128 - RNA, 19 nt, Artificial Sequence
  Description of Artificial Sequence: Synthetic oligonucleotide
  Sense strand starting at position 3483 of SEQ ID NO: 1880194
uggucauccuuauaaggga

SEQ ID NO: 1949129 - RNA, 19 nt, Artificial Sequence
  Description of Artificial Sequence: Synthetic oligonucleotide
  Antisense strand to SEQ ID NO: 1949128
ucccuuauaaggaugacca

SEQ ID NO: 1949130 - RNA, 19 nt, Artificial Sequence
  Description of Artificial Sequence: Synthetic oligonucleotide
  Sense strand starting at position 3497 of SEQ ID NO: 1880194
agggaucugcaccgaagau

SEQ ID NO: 1949131 - RNA, 19 nt, Artificial Sequence
  Description of Artificial Sequence: Synthetic oligonucleotide
  Antisense strand to SEQ ID NO: 1949130
aucuucggugcagaucccu

SEQ ID NO: 1949132 - RNA, 19 nt, Artificial Sequence
  Description of Artificial Sequence: Synthetic oligonucleotide
  Sense strand starting at position 3522 of SEQ ID NO: 1880194
uugggaaucguuggcuuau

SEQ ID NO: 1949133 - RNA, 19 nt, Artificial Sequence
  Description of Artificial Sequence: Synthetic oligonucleotide
  Antisense strand to SEQ ID NO: 1949132
auaagccaacgauucccaa

SEQ ID NO: 1949134 - RNA, 19 nt, Artificial Sequence
  Description of Artificial Sequence: Synthetic oligonucleotide
  Sense strand starting at position 3523 of SEQ ID NO: 1880194
ugggaaucguuggcuuaua

SEQ ID NO: 1949135 - RNA, 19 nt, Artificial Sequence
  Description of Artificial Sequence: Synthetic oligonucleotide
  Antisense strand to SEQ ID NO: 1949134
uauaagccaacgauuccca

SEQ ID NO: 1949136 - RNA, 19 nt, Artificial Sequence
  Description of Artificial Sequence: Synthetic oligonucleotide
  Sense strand starting at position 3524 of SEQ ID NO: 1880194
gggaaucguuggcuuauaa

SEQ ID NO: 1949137 - RNA, 19 nt, Artificial Sequence
  Description of Artificial Sequence: Synthetic oligonucleotide
  Antisense strand to SEQ ID NO: 1949136
uuauaagccaacgauuccc

SEQ ID NO: 1949138 - RNA, 19 nt, Artificial Sequence
  Description of Artificial Sequence: Synthetic oligonucleotide
  Sense strand starting at position 386 of SEQ ID NO: 1880195
gugugagacauucggguga

SEQ ID NO: 1949139 - RNA, 19 nt, Artificial Sequence
  Description of Artificial Sequence: Synthetic oligonucleotide
  Antisense strand to SEQ ID NO: 1949138
ucacccgaaugucucacac

SEQ ID NO: 1949140 - RNA, 19 nt, Artificial Sequence
  Description of Artificial Sequence: Synthetic oligonucleotide
  Sense strand starting at position 415 of SEQ ID NO: 1880195
augaaagaaugugcuuauu

SEQ ID NO: 1949141 - RNA, 19 nt, Artificial Sequence
  Description of Artificial Sequence: Synthetic oligonucleotide
  Antisense strand to SEQ ID NO: 1949140
aauaagcacauucuuucau

SEQ ID NO: 1949142 - RNA, 19 nt, Artificial Sequence
  Description of Artificial Sequence: Synthetic oligonucleotide
  Sense strand starting at position 514 of SEQ ID NO: 1880195
caaugagauugugaaauga

SEQ ID NO: 1949143 - RNA, 19 nt, Artificial Sequence
  Description of Artificial Sequence: Synthetic oligonucleotide
  Antisense strand to SEQ ID NO: 1949142
ucauuucacaaucucauug

SEQ ID NO: 1949144 - RNA, 19 nt, Artificial Sequence
  Description of Artificial Sequence: Synthetic oligonucleotide
  Sense strand starting at position 593 of SEQ ID NO: 1880195
ggcucaggccugugaaauc

SEQ ID NO: 1949145 - RNA, 19 nt, Artificial Sequence
  Description of Artificial Sequence: Synthetic oligonucleotide
  Antisense strand to SEQ ID NO: 1949144
gauuucacaggccugagcc

SEQ ID NO: 1949146 - RNA, 19 nt, Artificial Sequence
  Description of Artificial Sequence: Synthetic oligonucleotide
  Sense strand starting at position 657 of SEQ ID NO: 1880195
aaaugaguugguugugaug

SEQ ID NO: 1949147 - RNA, 19 nt, Artificial Sequence
  Description of Artificial Sequence: Synthetic oligonucleotide
  Antisense strand to SEQ ID NO: 1949146
caucacaaccaacucauuu

SEQ ID NO: 1949148 - RNA, 19 nt, Artificial Sequence
  Description of Artificial Sequence: Synthetic oligonucleotide
  Sense strand starting at position 1726 of SEQ ID NO: 1880195
ucaaguaaucagugagaga

SEQ ID NO: 1949149 - RNA, 19 nt, Artificial Sequence
  Description of Artificial Sequence: Synthetic oligonucleotide
  Antisense strand to SEQ ID NO: 1949148
ucucucacugauuacuuga

SEQ ID NO: 1949150 - RNA, 19 nt, Artificial Sequence
  Description of Artificial Sequence: Synthetic oligonucleotide
  Sense strand starting at position 1742 of SEQ ID NO: 1880195
agaguucaaguuggauuga

SEQ ID NO: 1949151 - RNA, 19 nt, Artificial Sequence
  Description of Artificial Sequence: Synthetic oligonucleotide
  Antisense strand to SEQ ID NO: 1949150
ucaauccaacuugaacucu

SEQ ID NO: 1949152 - RNA, 19 nt, Artificial Sequence
  Description of Artificial Sequence: Synthetic oligonucleotide
  Sense strand starting at position 1837 of SEQ ID NO: 1880195
gcuuguuguggucauuaaa

SEQ ID NO: 1949153 - RNA, 19 nt, Artificial Sequence
  Description of Artificial Sequence: Synthetic oligonucleotide
  Antisense strand to SEQ ID NO: 1949152
uuuaaugaccacaacaagc

SEQ ID NO: 1949154 - RNA, 19 nt, Artificial Sequence
  Description of Artificial Sequence: Synthetic oligonucleotide
  Sense strand starting at position 1905 of SEQ ID NO: 1880195
ugaugcuuguuaguagagu

SEQ ID NO: 1949155 - RNA, 19 nt, Artificial Sequence
  Description of Artificial Sequence: Synthetic oligonucleotide
  Antisense strand to SEQ ID NO: 1949154
acucuacuaacaagcauca

SEQ ID NO: 1949156 - RNA, 19 nt, Artificial Sequence
  Description of Artificial Sequence: Synthetic oligonucleotide
  Sense strand starting at position 1919 of SEQ ID NO: 1880195
agaguaaccucagaaucaa

SEQ ID NO: 1949157 - RNA, 19 nt, Artificial Sequence
  Description of Artificial Sequence: Synthetic oligonucleotide
  Antisense strand to SEQ ID NO: 1949156
uugauucugagguuacucu

SEQ ID NO: 1949158 - RNA, 19 nt, Artificial Sequence
  Description of Artificial Sequence: Synthetic oligonucleotide
  Sense strand starting at position 1975 of SEQ ID NO: 1880195
uuggcagaaucauuacauc

SEQ ID NO: 1949159 - RNA, 19 nt, Artificial Sequence
  Description of Artificial Sequence: Synthetic oligonucleotide
  Antisense strand to SEQ ID NO: 1949158
gauguaaugauucugccaa

SEQ ID NO: 1949160 - RNA, 19 nt, Artificial Sequence
  Description of Artificial Sequence: Synthetic oligonucleotide
  Sense strand starting at position 1983 of SEQ ID NO: 1880195
aucauuacaucauugguua

SEQ ID NO: 1949161 - RNA, 19 nt, Artificial Sequence
  Description of Artificial Sequence: Synthetic oligonucleotide
  Antisense strand to SEQ ID NO: 1949160
uaaccaaugauguaaugau

SEQ ID NO: 1949162 - RNA, 19 nt, Artificial Sequence
  Description of Artificial Sequence: Synthetic oligonucleotide
  Sense strand starting at position 1987 of SEQ ID NO: 1880195
uuacaucauugguuacacu

SEQ ID NO: 1949163 - RNA, 19 nt, Artificial Sequence
  Description of Artificial Sequence: Synthetic oligonucleotide
  Antisense strand to SEQ ID NO: 1949162
aguguaaccaaugauguaa

SEQ ID NO: 1949164 - RNA, 19 nt, Artificial Sequence
  Description of Artificial Sequence: Synthetic oligonucleotide
  Sense strand starting at position 2031 of SEQ ID NO: 1880195
ugacucaccuaguuuagga

SEQ ID NO: 1949165 - RNA, 19 nt, Artificial Sequence
  Description of Artificial Sequence: Synthetic oligonucleotide
  Antisense strand to SEQ ID NO: 1949164
uccuaaacuaggugaguca

SEQ ID NO: 1949166 - RNA, 19 nt, Artificial Sequence
  Description of Artificial Sequence: Synthetic oligonucleotide
  Sense strand starting at position 2054 of SEQ ID NO: 1880195
aggucugccuguuugaaga

SEQ ID NO: 1949167 - RNA, 19 nt, Artificial Sequence
  Description of Artificial Sequence: Synthetic oligonucleotide
  Antisense strand to SEQ ID NO: 1949166
ucuucaaacaggcagaccu

SEQ ID NO: 1949168 - RNA, 19 nt, Artificial Sequence
  Description of Artificial Sequence: Synthetic oligonucleotide
  Sense strand starting at position 2245 of SEQ ID NO: 1880195
caugaauucugaguccuga

SEQ ID NO: 1949169 - RNA, 19 nt, Artificial Sequence
  Description of Artificial Sequence: Synthetic oligonucleotide
  Antisense strand to SEQ ID NO: 1949168
ucaggacucagaauucaug

SEQ ID NO: 1949170 - RNA, 19 nt, Artificial Sequence
  Description of Artificial Sequence: Synthetic oligonucleotide
  Sense strand starting at position 2370 of SEQ ID NO: 1880195
gaauguuaccgccagauac

SEQ ID NO: 1949171 - RNA, 19 nt, Artificial Sequence
  Description of Artificial Sequence: Synthetic oligonucleotide
  Antisense strand to SEQ ID NO: 1949170
guaucuggcgguaacauuc

SEQ ID NO: 1949172 - RNA, 19 nt, Artificial Sequence
  Description of Artificial Sequence: Synthetic oligonucleotide
  Sense strand starting at position 2372 of SEQ ID NO: 1880195
auguuaccgccagauacau

SEQ ID NO: 1949173 - RNA, 19 nt, Artificial Sequence
  Description of Artificial Sequence: Synthetic oligonucleotide
  Antisense strand to SEQ ID NO: 1949172
auguaucuggcgguaacau

SEQ ID NO: 1949174 - RNA, 19 nt, Artificial Sequence
  Description of Artificial Sequence: Synthetic oligonucleotide
  Sense strand starting at position 2381 of SEQ ID NO: 1880195
ccagauacaucagauagga

SEQ ID NO: 1949175 - RNA, 19 nt, Artificial Sequence
  Description of Artificial Sequence: Synthetic oligonucleotide
  Antisense strand to SEQ ID NO: 1949174
uccuaucugauguaucugg

SEQ ID NO: 1949176 - RNA, 19 nt, Artificial Sequence
  Description of Artificial Sequence: Synthetic oligonucleotide
  Sense strand starting at position 2416 of SEQ ID NO: 1880195
ugcucaucagcguuagucu

SEQ ID NO: 1949177 - RNA, 19 nt, Artificial Sequence
  Description of Artificial Sequence: Synthetic oligonucleotide
  Antisense strand to SEQ ID NO: 1949176
agacuaacgcugaugagca

SEQ ID NO: 1949178 - RNA, 19 nt, Artificial Sequence
  Description of Artificial Sequence: Synthetic oligonucleotide
  Sense strand starting at position 2424 of SEQ ID NO: 1880195
agcguuagucugcugaacu

SEQ ID NO: 1949179 - RNA, 19 nt, Artificial Sequence
  Description of Artificial Sequence: Synthetic oligonucleotide
  Antisense strand to SEQ ID NO: 1949178
aguucagcagacuaacgcu

SEQ ID NO: 1949180 - RNA, 19 nt, Artificial Sequence
  Description of Artificial Sequence: Synthetic oligonucleotide
  Sense strand starting at position 2441 of SEQ ID NO: 1880195
cuauguuaucaucauugua

SEQ ID NO: 1949181 - RNA, 19 nt, Artificial Sequence
  Description of Artificial Sequence: Synthetic oligonucleotide
  Antisense strand to SEQ ID NO: 1949180
uacaaugaugauaacauag

SEQ ID NO: 1949182 - RNA, 19 nt, Artificial Sequence
  Description of Artificial Sequence: Synthetic oligonucleotide
  Sense strand starting at position 2443 of SEQ ID NO: 1880195
auguuaucaucauuguauc

SEQ ID NO: 1949183 - RNA, 19 nt, Artificial Sequence
  Description of Artificial Sequence: Synthetic oligonucleotide
  Antisense strand to SEQ ID NO: 1949182
gauacaaugaugauaacau

SEQ ID NO: 1949184 - RNA, 19 nt, Artificial Sequence
  Description of Artificial Sequence: Synthetic oligonucleotide
  Sense strand starting at position 2455 of SEQ ID NO: 1880195
uuguaucggcuuuacaaca

SEQ ID NO: 1949185 - RNA, 19 nt, Artificial Sequence
  Description of Artificial Sequence: Synthetic oligonucleotide
  Antisense strand to SEQ ID NO: 1949184
uguuguaaagccgauacaa

SEQ ID NO: 1949186 - RNA, 19 nt, Artificial Sequence
  Description of Artificial Sequence: Synthetic oligonucleotide
  Sense strand starting at position 2690 of SEQ ID NO: 1880195
guugcagugaacugauagu

SEQ ID NO: 1949187 - RNA, 19 nt, Artificial Sequence
  Description of Artificial Sequence: Synthetic oligonucleotide
  Antisense strand to SEQ ID NO: 1949186
acuaucaguucacugcaac

SEQ ID NO: 1949188 - RNA, 19 nt, Artificial Sequence
  Description of Artificial Sequence: Synthetic oligonucleotide
  Sense strand starting at position 3069 of SEQ ID NO: 1880195
gcaagucauccauggauaa

SEQ ID NO: 1949189 - RNA, 19 nt, Artificial Sequence
  Description of Artificial Sequence: Synthetic oligonucleotide
  Antisense strand to SEQ ID NO: 1949188
uuauccauggaugacuugc

SEQ ID NO: 1949190 - RNA, 19 nt, Artificial Sequence
  Description of Artificial Sequence: Synthetic oligonucleotide
  Sense strand starting at position 3183 of SEQ ID NO: 1880195
aguguuaccuuugucuaca

SEQ ID NO: 1949191 - RNA, 19 nt, Artificial Sequence
  Description of Artificial Sequence: Synthetic oligonucleotide
  Antisense strand to SEQ ID NO: 1949190
uguagacaaagguaacacu

SEQ ID NO: 1949192 - RNA, 19 nt, Artificial Sequence
  Description of Artificial Sequence: Synthetic oligonucleotide
  Sense strand starting at position 3184 of SEQ ID NO: 1880195
guguuaccuuugucuacau

SEQ ID NO: 1949193 - RNA, 19 nt, Artificial Sequence
  Description of Artificial Sequence: Synthetic oligonucleotide
  Antisense strand to SEQ ID NO: 1949192
auguagacaaagguaacac

SEQ ID NO: 1949194 - RNA, 19 nt, Artificial Sequence
  Description of Artificial Sequence: Synthetic oligonucleotide
  Sense strand starting at position 3330 of SEQ ID NO: 1880195
gccuuaagccauuagcuca

SEQ ID NO: 1949195 - RNA, 19 nt, Artificial Sequence
  Description of Artificial Sequence: Synthetic oligonucleotide
  Antisense strand to SEQ ID NO: 1949194
ugagcuaauggcuuaaggc

SEQ ID NO: 1949196 - RNA, 19 nt, Artificial Sequence
  Description of Artificial Sequence: Synthetic oligonucleotide
  Sense strand starting at position 3452 of SEQ ID NO: 1880195
aagaaauaagaguggucuu

SEQ ID NO: 1949197 - RNA, 19 nt, Artificial Sequence
  Description of Artificial Sequence: Synthetic oligonucleotide
  Antisense strand to SEQ ID NO: 1949196
aagaccacucuuauuucuu

SEQ ID NO: 1949198 - RNA, 19 nt, Artificial Sequence
  Description of Artificial Sequence: Synthetic oligonucleotide
  Sense strand starting at position 3453 of SEQ ID NO: 1880195
agaaauaagaguggucuua

SEQ ID NO: 1949199 - RNA, 19 nt, Artificial Sequence
  Description of Artificial Sequence: Synthetic oligonucleotide
  Antisense strand to SEQ ID NO: 1949198
uaagaccacucuuauuucu

SEQ ID NO: 1949200 - RNA, 19 nt, Artificial Sequence
  Description of Artificial Sequence: Synthetic oligonucleotide
  Sense strand starting at position 3455 of SEQ ID NO: 1880195
aaauaagaguggucuuaga

SEQ ID NO: 1949201 - RNA, 19 nt, Artificial Sequence
  Description of Artificial Sequence: Synthetic oligonucleotide
  Antisense strand to SEQ ID NO: 1949200
ucuaagaccacucuuauuu

SEQ ID NO: 1949202 - RNA, 19 nt, Artificial Sequence
  Description of Artificial Sequence: Synthetic oligonucleotide
  Sense strand starting at position 3516 of SEQ ID NO: 1880195
ugccuuuagucaguuagag

SEQ ID NO: 1949203 - RNA, 19 nt, Artificial Sequence
  Description of Artificial Sequence: Synthetic oligonucleotide
  Antisense strand to SEQ ID NO: 1949202
cucuaacugacuaaaggca

SEQ ID NO: 1949204 - RNA, 19 nt, Artificial Sequence
  Description of Artificial Sequence: Synthetic oligonucleotide
  Sense strand starting at position 3557 of SEQ ID NO: 1880195
gucagcauuugcuuaucau

SEQ ID NO: 1949205 - RNA, 19 nt, Artificial Sequence
  Description of Artificial Sequence: Synthetic oligonucleotide
  Antisense strand to SEQ ID NO: 1949204
augauaagcaaaugcugac

SEQ ID NO: 1949206 - RNA, 19 nt, Artificial Sequence
  Description of Artificial Sequence: Synthetic oligonucleotide
  Sense strand starting at position 3683 of SEQ ID NO: 1880195
guaggaaguuugcccaguu

SEQ ID NO: 1949207 - RNA, 19 nt, Artificial Sequence
  Description of Artificial Sequence: Synthetic oligonucleotide
  Antisense strand to SEQ ID NO: 1949206
aacugggcaaacuuccuac

SEQ ID NO: 1949208 - RNA, 19 nt, Artificial Sequence
  Description of Artificial Sequence: Synthetic oligonucleotide
  Sense strand starting at position 3684 of SEQ ID NO: 1880195
uaggaaguuugcccaguua

SEQ ID NO: 1949209 - RNA, 19 nt, Artificial Sequence
  Description of Artificial Sequence: Synthetic oligonucleotide
  Antisense strand to SEQ ID NO: 1949208
uaacugggcaaacuuccua

SEQ ID NO: 1949210 - RNA, 19 nt, Artificial Sequence
  Description of Artificial Sequence: Synthetic oligonucleotide
  Sense strand starting at position 3700 of SEQ ID NO: 1880195
uuaccugcuuacuuggaua

SEQ ID NO: 1949211 - RNA, 19 nt, Artificial Sequence
  Description of Artificial Sequence: Synthetic oligonucleotide
  Antisense strand to SEQ ID NO: 1949210
uauccaaguaagcagguaa

SEQ ID NO: 1949212 - RNA, 19 nt, Artificial Sequence
  Description of Artificial Sequence: Synthetic oligonucleotide
  Sense strand starting at position 3702 of SEQ ID NO: 1880195
accugcuuacuuggauaca

SEQ ID NO: 1949213 - RNA, 19 nt, Artificial Sequence
  Description of Artificial Sequence: Synthetic oligonucleotide
  Antisense strand to SEQ ID NO: 1949212
uguauccaaguaagcaggu

SEQ ID NO: 1949214 - RNA, 19 nt, Artificial Sequence
  Description of Artificial Sequence: Synthetic oligonucleotide
  Sense strand starting at position 3705 of SEQ ID NO: 1880195
ugcuuacuuggauacaguu

SEQ ID NO: 1949215 - RNA, 19 nt, Artificial Sequence
  Description of Artificial Sequence: Synthetic oligonucleotide
  Antisense strand to SEQ ID NO: 1949214
aacuguauccaaguaagca

SEQ ID NO: 1949216 - RNA, 19 nt, Artificial Sequence
  Description of Artificial Sequence: Synthetic oligonucleotide
  Sense strand starting at position 3886 of SEQ ID NO: 1880195
augauuaaaucugcugaac

SEQ ID NO: 1949217 - RNA, 19 nt, Artificial Sequence
  Description of Artificial Sequence: Synthetic oligonucleotide
  Antisense strand to SEQ ID NO: 1949216
guucagcagauuuaaucau

SEQ ID NO: 1949218 - RNA, 19 nt, Artificial Sequence
  Description of Artificial Sequence: Synthetic oligonucleotide
  Sense strand starting at position 262 of SEQ ID NO: 1880196
ggagaaauuuggcaucaag

SEQ ID NO: 1949219 - RNA, 19 nt, Artificial Sequence
  Description of Artificial Sequence: Synthetic oligonucleotide
  Antisense strand to SEQ ID NO: 1949218
cuugaugccaaauuucucc

SEQ ID NO: 1949220 - RNA, 19 nt, Artificial Sequence
  Description of Artificial Sequence: Synthetic oligonucleotide
  Sense strand starting at position 291 of SEQ ID NO: 1880196
gacaaauggcccuggcaca

SEQ ID NO: 1949221 - RNA, 19 nt, Artificial Sequence
  Description of Artificial Sequence: Synthetic oligonucleotide
  Antisense strand to SEQ ID NO: 1949220
ugugccagggccauuuguc

SEQ ID NO: 1949222 - RNA, 19 nt, Artificial Sequence
  Description of Artificial Sequence: Synthetic oligonucleotide
  Sense strand starting at position 353 of SEQ ID NO: 1880196
agggaacucucagccuuua

SEQ ID NO: 1949223 - RNA, 19 nt, Artificial Sequence
  Description of Artificial Sequence: Synthetic oligonucleotide
  Antisense strand to SEQ ID NO: 1949222
uaaaggcugagaguucccu

SEQ ID NO: 1949224 - RNA, 19 nt, Artificial Sequence
  Description of Artificial Sequence: Synthetic oligonucleotide
  Sense strand starting at position 382 of SEQ ID NO: 1880196
ggcaucaguucgucuucca

SEQ ID NO: 1949225 - RNA, 19 nt, Artificial Sequence
  Description of Artificial Sequence: Synthetic oligonucleotide
  Antisense strand to SEQ ID NO: 1949224
uggaagacgaacugaugcc

SEQ ID NO: 1949226 - RNA, 19 nt, Artificial Sequence
  Description of Artificial Sequence: Synthetic oligonucleotide
  Sense strand starting at position 385 of SEQ ID NO: 1880196
aucaguucgucuuccacaa

SEQ ID NO: 1949227 - RNA, 19 nt, Artificial Sequence
  Description of Artificial Sequence: Synthetic oligonucleotide
  Antisense strand to SEQ ID NO: 1949226
uuguggaagacgaacugau

SEQ ID NO: 1949228 - RNA, 19 nt, Artificial Sequence
  Description of Artificial Sequence: Synthetic oligonucleotide
  Sense strand starting at position 413 of SEQ ID NO: 1880196
ccacguuucuaguuauguu

SEQ ID NO: 1949229 - RNA, 19 nt, Artificial Sequence
  Description of Artificial Sequence: Synthetic oligonucleotide
  Antisense strand to SEQ ID NO: 1949228
aacauaacuagaaacgugg

SEQ ID NO: 1949230 - RNA, 19 nt, Artificial Sequence
  Description of Artificial Sequence: Synthetic oligonucleotide
  Sense strand starting at position 420 of SEQ ID NO: 1880196
ucuaguuauguuuggcaac

SEQ ID NO: 1949231 - RNA, 19 nt, Artificial Sequence
  Description of Artificial Sequence: Synthetic oligonucleotide
  Antisense strand to SEQ ID NO: 1949230
guugccaaacauaacuaga

SEQ ID NO: 1949232 - RNA, 19 nt, Artificial Sequence
  Description of Artificial Sequence: Synthetic oligonucleotide
  Sense strand starting at position 863 of SEQ ID NO: 1880196
uggucuaagccacagacua

SEQ ID NO: 1949233 - RNA, 19 nt, Artificial Sequence
  Description of Artificial Sequence: Synthetic oligonucleotide
  Antisense strand to SEQ ID NO: 1949232
uagucuguggcuuagacca

SEQ ID NO: 1949234 - RNA, 19 nt, Artificial Sequence
  Description of Artificial Sequence: Synthetic oligonucleotide
  Sense strand starting at position 871 of SEQ ID NO: 1880196
gccacagacuacuugcuaa

SEQ ID NO: 1949235 - RNA, 19 nt, Artificial Sequence
  Description of Artificial Sequence: Synthetic oligonucleotide
  Antisense strand to SEQ ID NO: 1949234
uuagcaaguagucuguggc

SEQ ID NO: 1949236 - RNA, 19 nt, Artificial Sequence
  Description of Artificial Sequence: Synthetic oligonucleotide
  Sense strand starting at position 913 of SEQ ID NO: 1880196
cugagagucucgcucuguu

SEQ ID NO: 1949237 - RNA, 19 nt, Artificial Sequence
  Description of Artificial Sequence: Synthetic oligonucleotide
  Antisense strand to SEQ ID NO: 1949236
aacagagcgagacucucag

SEQ ID NO: 1949238 - RNA, 19 nt, Artificial Sequence
  Description of Artificial Sequence: Synthetic oligonucleotide
  Sense strand starting at position 1271 of SEQ ID NO: 1880196
ggcaacagucaguguaacu

SEQ ID NO: 1949239 - RNA, 19 nt, Artificial Sequence
  Description of Artificial Sequence: Synthetic oligonucleotide
  Antisense strand to SEQ ID NO: 1949238
aguuacacugacuguugcc

SEQ ID NO: 1949240 - RNA, 19 nt, Artificial Sequence
  Description of Artificial Sequence: Synthetic oligonucleotide
  Sense strand starting at position 1495 of SEQ ID NO: 1880196
acaguauccuucucucuga

SEQ ID NO: 1949241 - RNA, 19 nt, Artificial Sequence
  Description of Artificial Sequence: Synthetic oligonucleotide
  Antisense strand to SEQ ID NO: 1949240
ucagagagaaggauacugu

SEQ ID NO: 1949242 - RNA, 19 nt, Artificial Sequence
  Description of Artificial Sequence: Synthetic oligonucleotide
  Sense strand starting at position 1541 of SEQ ID NO: 1880196
gagggagcauucccucuuu

SEQ ID NO: 1949243 - RNA, 19 nt, Artificial Sequence
  Description of Artificial Sequence: Synthetic oligonucleotide
  Antisense strand to SEQ ID NO: 1949242
aaagagggaaugcucccuc

SEQ ID NO: 1949244 - RNA, 19 nt, Artificial Sequence
  Description of Artificial Sequence: Synthetic oligonucleotide
  Sense strand starting at position 1553 of SEQ ID NO: 1880196
ccucuuugguacuuacuua

SEQ ID NO: 1949245 - RNA, 19 nt, Artificial Sequence
  Description of Artificial Sequence: Synthetic oligonucleotide
  Antisense strand to SEQ ID NO: 1949244
uaaguaaguaccaaagagg

SEQ ID NO: 1949246 - RNA, 19 nt, Artificial Sequence
  Description of Artificial Sequence: Synthetic oligonucleotide
  Sense strand starting at position 1822 of SEQ ID NO: 1880196
ccgagagaugccugcaugu

SEQ ID NO: 1949247 - RNA, 19 nt, Artificial Sequence
  Description of Artificial Sequence: Synthetic oligonucleotide
  Antisense strand to SEQ ID NO: 1949246
acaugcaggcaucucucgg

SEQ ID NO: 1949248 - RNA, 19 nt, Artificial Sequence
  Description of Artificial Sequence: Synthetic oligonucleotide
  Sense strand starting at position 1927 of SEQ ID NO: 1880196
cgcucagcucuccaagguu

SEQ ID NO: 1949249 - RNA, 19 nt, Artificial Sequence
  Description of Artificial Sequence: Synthetic oligonucleotide
  Antisense strand to SEQ ID NO: 1949248
aaccuuggagagcugagcg

SEQ ID NO: 1949250 - RNA, 19 nt, Artificial Sequence
  Description of Artificial Sequence: Synthetic oligonucleotide
  Sense strand starting at position 2351 of SEQ ID NO: 1880196
uuguuucugagcgccgaaa

SEQ ID NO: 1949251 - RNA, 19 nt, Artificial Sequence
  Description of Artificial Sequence: Synthetic oligonucleotide
  Antisense strand to SEQ ID NO: 1949250
uuucggcgcucagaaacaa

SEQ ID NO: 1949252 - RNA, 19 nt, Artificial Sequence
  Description of Artificial Sequence: Synthetic oligonucleotide
  Sense strand starting at position 2520 of SEQ ID NO: 1880196
gggcguguuuagacuaguu

SEQ ID NO: 1949253 - RNA, 19 nt, Artificial Sequence
  Description of Artificial Sequence: Synthetic oligonucleotide
  Antisense strand to SEQ ID NO: 1949252
aacuagucuaaacacgccc

SEQ ID NO: 1949254 - RNA, 19 nt, Artificial Sequence
  Description of Artificial Sequence: Synthetic oligonucleotide
  Sense strand starting at position 2522 of SEQ ID NO: 1880196
gcguguuuagacuaguuuc

SEQ ID NO: 1949255 - RNA, 19 nt, Artificial Sequence
  Description of Artificial Sequence: Synthetic oligonucleotide
  Antisense strand to SEQ ID NO: 1949254
gaaacuagucuaaacacgc

SEQ ID NO: 1949256 - RNA, 19 nt, Artificial Sequence
  Description of Artificial Sequence: Synthetic oligonucleotide
  Sense strand starting at position 2553 of SEQ ID NO: 1880196
ggucguuuaggaugagaug

SEQ ID NO: 1949257 - RNA, 19 nt, Artificial Sequence
  Description of Artificial Sequence: Synthetic oligonucleotide
  Antisense strand to SEQ ID NO: 1949256
caucucauccuaaacgacc

SEQ ID NO: 1949258 - RNA, 19 nt, Artificial Sequence
  Description of Artificial Sequence: Synthetic oligonucleotide
  Sense strand starting at position 2554 of SEQ ID NO: 1880196
gucguuuaggaugagaugu

SEQ ID NO: 1949259 - RNA, 19 nt, Artificial Sequence
  Description of Artificial Sequence: Synthetic oligonucleotide
  Antisense strand to SEQ ID NO: 1949258
acaucucauccuaaacgac

SEQ ID NO: 1949260 - RNA, 19 nt, Artificial Sequence
  Description of Artificial Sequence: Synthetic oligonucleotide
  Sense strand starting at position 2691 of SEQ ID NO: 1880196
ugucaaggauuccuaagau

SEQ ID NO: 1949261 - RNA, 19 nt, Artificial Sequence
  Description of Artificial Sequence: Synthetic oligonucleotide
  Antisense strand to SEQ ID NO: 1949260
aucuuaggaauccuugaca

SEQ ID NO: 1949262 - RNA, 19 nt, Artificial Sequence
  Description of Artificial Sequence: Synthetic oligonucleotide
  Sense strand starting at position 2695 of SEQ ID NO: 1880196
aaggauuccuaagauuguc

SEQ ID NO: 1949263 - RNA, 19 nt, Artificial Sequence
  Description of Artificial Sequence: Synthetic oligonucleotide
  Antisense strand to SEQ ID NO: 1949262
gacaaucuuaggaauccuu

SEQ ID NO: 1949264 - RNA, 19 nt, Artificial Sequence
  Description of Artificial Sequence: Synthetic oligonucleotide
  Sense strand starting at position 2703 of SEQ ID NO: 1880196
cuaagauugucacuugauc

SEQ ID NO: 1949265 - RNA, 19 nt, Artificial Sequence
  Description of Artificial Sequence: Synthetic oligonucleotide
  Antisense strand to SEQ ID NO: 1949264
gaucaagugacaaucuuag

SEQ ID NO: 1949266 - RNA, 19 nt, Artificial Sequence
  Description of Artificial Sequence: Synthetic oligonucleotide
  Sense strand starting at position 2715 of SEQ ID NO: 1880196
cuugaucaaucggauaaau

SEQ ID NO: 1949267 - RNA, 19 nt, Artificial Sequence
  Description of Artificial Sequence: Synthetic oligonucleotide
  Antisense strand to SEQ ID NO: 1949266
auuuauccgauugaucaag

SEQ ID NO: 1949268 - RNA, 19 nt, Artificial Sequence
  Description of Artificial Sequence: Synthetic oligonucleotide
  Sense strand starting at position 2798 of SEQ ID NO: 1880196
agaucuugcuaagucaugu

SEQ ID NO: 1949269 - RNA, 19 nt, Artificial Sequence
  Description of Artificial Sequence: Synthetic oligonucleotide
  Antisense strand to SEQ ID NO: 1949268
acaugacuuagcaagaucu

SEQ ID NO: 1949270 - RNA, 19 nt, Artificial Sequence
  Description of Artificial Sequence: Synthetic oligonucleotide
  Sense strand starting at position 2809 of SEQ ID NO: 1880196
agucauguugagugggacu

SEQ ID NO: 1949271 - RNA, 19 nt, Artificial Sequence
  Description of Artificial Sequence: Synthetic oligonucleotide
  Antisense strand to SEQ ID NO: 1949270
agucccacucaacaugacu

SEQ ID NO: 1949272 - RNA, 19 nt, Artificial Sequence
  Description of Artificial Sequence: Synthetic oligonucleotide
  Sense strand starting at position 2811 of SEQ ID NO: 1880196
ucauguugagugggacuaa

SEQ ID NO: 1949273 - RNA, 19 nt, Artificial Sequence
  Description of Artificial Sequence: Synthetic oligonucleotide
  Antisense strand to SEQ ID NO: 1949272
uuagucccacucaacauga

SEQ ID NO: 1949274 - RNA, 19 nt, Artificial Sequence
  Description of Artificial Sequence: Synthetic oligonucleotide
  Sense strand starting at position 2843 of SEQ ID NO: 1880196
gaauauuaaugacugguca

SEQ ID NO: 1949275 - RNA, 19 nt, Artificial Sequence
  Description of Artificial Sequence: Synthetic oligonucleotide
  Antisense strand to SEQ ID NO: 1949274
ugaccagucauuaauauuc

SEQ ID NO: 1949276 - RNA, 19 nt, Artificial Sequence
  Description of Artificial Sequence: Synthetic oligonucleotide
  Sense strand starting at position 2856 of SEQ ID NO: 1880196
uggucauccuuauaaggga

SEQ ID NO: 1949277 - RNA, 19 nt, Artificial Sequence
  Description of Artificial Sequence: Synthetic oligonucleotide
  Antisense strand to SEQ ID NO: 1949276
ucccuuauaaggaugacca

SEQ ID NO: 1949278 - RNA, 19 nt, Artificial Sequence
  Description of Artificial Sequence: Synthetic oligonucleotide
  Sense strand starting at position 2870 of SEQ ID NO: 1880196
agggaucugcaccgaagau

SEQ ID NO: 1949279 - RNA, 19 nt, Artificial Sequence
  Description of Artificial Sequence: Synthetic oligonucleotide
  Antisense strand to SEQ ID NO: 1949278
aucuucggugcagaucccu

SEQ ID NO: 1949280 - RNA, 19 nt, Artificial Sequence
  Description of Artificial Sequence: Synthetic oligonucleotide
  Sense strand starting at position 2895 of SEQ ID NO: 1880196
uugggaaucguuggcuuau

SEQ ID NO: 1949281 - RNA, 19 nt, Artificial Sequence
  Description of Artificial Sequence: Synthetic oligonucleotide
  Antisense strand to SEQ ID NO: 1949280
auaagccaacgauucccaa

SEQ ID NO: 1949282 - RNA, 19 nt, Artificial Sequence
  Description of Artificial Sequence: Synthetic oligonucleotide
  Sense strand starting at position 2896 of SEQ ID NO: 1880196
ugggaaucguuggcuuaua

SEQ ID NO: 1949283 - RNA, 19 nt, Artificial Sequence
  Description of Artificial Sequence: Synthetic oligonucleotide
  Antisense strand to SEQ ID NO: 1949282
uauaagccaacgauuccca

SEQ ID NO: 1949284 - RNA, 19 nt, Artificial Sequence
  Description of Artificial Sequence: Synthetic oligonucleotide
  Sense strand starting at position 2897 of SEQ ID NO: 1880196
gggaaucguuggcuuauaa

SEQ ID NO: 1949285 - RNA, 19 nt, Artificial Sequence
  Description of Artificial Sequence: Synthetic oligonucleotide
  Antisense strand to SEQ ID NO: 1949284
uuauaagccaacgauuccc

SEQ ID NO: 1949286 - RNA, 19 nt, Artificial Sequence
  Description of Artificial Sequence: Synthetic oligonucleotide
  Sense strand starting at position 3557 of SEQ ID NO: 1880196
aggucuuauuuaugaugau

SEQ ID NO: 1949287 - RNA, 19 nt, Artificial Sequence
  Description of Artificial Sequence: Synthetic oligonucleotide
  Antisense strand to SEQ ID NO: 1949286
aucaucauaaauaagaccu

SEQ ID NO: 1949288 - RNA, 19 nt, Artificial Sequence
  Description of Artificial Sequence: Synthetic oligonucleotide
  Sense strand starting at position 3558 of SEQ ID NO: 1880196
ggucuuauuuaugaugaua

SEQ ID NO: 1949289 - RNA, 19 nt, Artificial Sequence
  Description of Artificial Sequence: Synthetic oligonucleotide
  Antisense strand to SEQ ID NO: 1949288
uaucaucauaaauaagacc

SEQ ID NO: 1949290 - RNA, 19 nt, Artificial Sequence
  Description of Artificial Sequence: Synthetic oligonucleotide
  Sense strand starting at position 3727 of SEQ ID NO: 1880196
augcgauucucuuugcaua

SEQ ID NO: 1949291 - RNA, 19 nt, Artificial Sequence
  Description of Artificial Sequence: Synthetic oligonucleotide
  Antisense strand to SEQ ID NO: 1949290
uaugcaaagagaaucgcau

SEQ ID NO: 1949292 - RNA, 19 nt, Artificial Sequence
  Description of Artificial Sequence: Synthetic oligonucleotide
  Sense strand starting at position 3728 of SEQ ID NO: 1880196
ugcgauucucuuugcauaa

SEQ ID NO: 1949293 - RNA, 19 nt, Artificial Sequence
  Description of Artificial Sequence: Synthetic oligonucleotide
  Antisense strand to SEQ ID NO: 1949292
uuaugcaaagagaaucgca

SEQ ID NO: 1949294 - RNA, 19 nt, Artificial Sequence
  Description of Artificial Sequence: Synthetic oligonucleotide
  Sense strand starting at position 3729 of SEQ ID NO: 1880196
gcgauucucuuugcauaag

SEQ ID NO: 1949295 - RNA, 19 nt, Artificial Sequence
  Description of Artificial Sequence: Synthetic oligonucleotide
  Antisense strand to SEQ ID NO: 1949294
cuuaugcaaagagaaucgc

SEQ ID NO: 1949296 - RNA, 19 nt, Artificial Sequence
  Description of Artificial Sequence: Synthetic oligonucleotide
  Sense strand starting at position 3732 of SEQ ID NO: 1880196
auucucuuugcauaagugu

SEQ ID NO: 1949297 - RNA, 19 nt, Artificial Sequence
  Description of Artificial Sequence: Synthetic oligonucleotide
  Antisense strand to SEQ ID NO: 1949296
acacuuaugcaaagagaau

SEQ ID NO: 1949298 - RNA, 19 nt, Artificial Sequence
  Description of Artificial Sequence: Synthetic oligonucleotide
  Sense strand starting at position 152 of SEQ ID NO: 1880197
aagaaauaagaguggucuu

SEQ ID NO: 1949299 - RNA, 19 nt, Artificial Sequence
  Description of Artificial Sequence: Synthetic oligonucleotide
  Antisense strand to SEQ ID NO: 1949298
aagaccacucuuauuucuu

SEQ ID NO: 1949300 - RNA, 19 nt, Artificial Sequence
  Description of Artificial Sequence: Synthetic oligonucleotide
  Sense strand starting at position 153 of SEQ ID NO: 1880197
agaaauaagaguggucuua

SEQ ID NO: 1949301 - RNA, 19 nt, Artificial Sequence
  Description of Artificial Sequence: Synthetic oligonucleotide
  Antisense strand to SEQ ID NO: 1949300
uaagaccacucuuauuucu

SEQ ID NO: 1949302 - RNA, 19 nt, Artificial Sequence
  Description of Artificial Sequence: Synthetic oligonucleotide
  Sense strand starting at position 155 of SEQ ID NO: 1880197
aaauaagaguggucuuaga

SEQ ID NO: 1949303 - RNA, 19 nt, Artificial Sequence
  Description of Artificial Sequence: Synthetic oligonucleotide
  Antisense strand to SEQ ID NO: 1949302
ucuaagaccacucuuauuu

SEQ ID NO: 1949304 - RNA, 19 nt, Artificial Sequence
  Description of Artificial Sequence: Synthetic oligonucleotide
  Sense strand starting at position 257 of SEQ ID NO: 1880197
gucagcauuugcuuaucau

SEQ ID NO: 1949305 - RNA, 19 nt, Artificial Sequence
  Description of Artificial Sequence: Synthetic oligonucleotide
  Antisense strand to SEQ ID NO: 1949304
augauaagcaaaugcugac

SEQ ID NO: 1949306 - RNA, 19 nt, Artificial Sequence
  Description of Artificial Sequence: Synthetic oligonucleotide
  Sense strand starting at position 400 of SEQ ID NO: 1880197
uuaccugcuuacuuggaua

SEQ ID NO: 1949307 - RNA, 19 nt, Artificial Sequence
  Description of Artificial Sequence: Synthetic oligonucleotide
  Antisense strand to SEQ ID NO: 1949306
uauccaaguaagcagguaa

SEQ ID NO: 1949308 - RNA, 19 nt, Artificial Sequence
  Description of Artificial Sequence: Synthetic oligonucleotide
  Sense strand starting at position 402 of SEQ ID NO: 1880197
accugcuuacuuggauaca

SEQ ID NO: 1949309 - RNA, 19 nt, Artificial Sequence
  Description of Artificial Sequence: Synthetic oligonucleotide
  Antisense strand to SEQ ID NO: 1949308
uguauccaaguaagcaggu

SEQ ID NO: 1949310 - RNA, 19 nt, Artificial Sequence
  Description of Artificial Sequence: Synthetic oligonucleotide
  Sense strand starting at position 405 of SEQ ID NO: 1880197
ugcuuacuuggauacaguu

SEQ ID NO: 1949311 - RNA, 19 nt, Artificial Sequence
  Description of Artificial Sequence: Synthetic oligonucleotide
  Antisense strand to SEQ ID NO: 1949310
aacuguauccaaguaagca

SEQ ID NO: 1949312 - RNA, 19 nt, Artificial Sequence
  Description of Artificial Sequence: Synthetic oligonucleotide
  Sense strand starting at position 586 of SEQ ID NO: 1880197
augauuaaaucugcugaac

SEQ ID NO: 1949313 - RNA, 19 nt, Artificial Sequence
  Description of Artificial Sequence: Synthetic oligonucleotide
  Antisense strand to SEQ ID NO: 1949312
guucagcagauuuaaucau

SEQ ID NO: 1949314 - RNA, 19 nt, Artificial Sequence
  Description of Artificial Sequence: Synthetic oligonucleotide
  Sense strand starting at position 886 of SEQ ID NO: 1880197
gggugccucaguuaagaua

SEQ ID NO: 1949315 - RNA, 19 nt, Artificial Sequence
  Description of Artificial Sequence: Synthetic oligonucleotide
  Antisense strand to SEQ ID NO: 1949314
uaucuuaacugaggcaccc

SEQ ID NO: 1949316 - RNA, 19 nt, Artificial Sequence
  Description of Artificial Sequence: Synthetic oligonucleotide
  Sense strand starting at position 900 of SEQ ID NO: 1880197
agauaauggugguuaagau

SEQ ID NO: 1949317 - RNA, 19 nt, Artificial Sequence
  Description of Artificial Sequence: Synthetic oligonucleotide
  Antisense strand to SEQ ID NO: 1949316
aucuuaaccaccauuaucu

SEQ ID NO: 1949318 - RNA, 19 nt, Artificial Sequence
  Description of Artificial Sequence: Synthetic oligonucleotide
  Sense strand starting at position 909 of SEQ ID NO: 1880197
ugguuaagauccucaucau

SEQ ID NO: 1949319 - RNA, 19 nt, Artificial Sequence
  Description of Artificial Sequence: Synthetic oligonucleotide
  Antisense strand to SEQ ID NO: 1949318
augaugaggaucuuaacca

SEQ ID NO: 1949320 - RNA, 19 nt, Artificial Sequence
  Description of Artificial Sequence: Synthetic oligonucleotide
  Sense strand starting at position 910 of SEQ ID NO: 1880197
gguuaagauccucaucauu

SEQ ID NO: 1949321 - RNA, 19 nt, Artificial Sequence
  Description of Artificial Sequence: Synthetic oligonucleotide
  Antisense strand to SEQ ID NO: 1949320
aaugaugaggaucuuaacc

SEQ ID NO: 1949322 - RNA, 19 nt, Artificial Sequence
  Description of Artificial Sequence: Synthetic oligonucleotide
  Sense strand starting at position 931 of SEQ ID NO: 1880197
agcacucaagaguagcaaa

SEQ ID NO: 1949323 - RNA, 19 nt, Artificial Sequence
  Description of Artificial Sequence: Synthetic oligonucleotide
  Antisense strand to SEQ ID NO: 1949322
uuugcuacucuugagugcu

SEQ ID NO: 1949324 - RNA, 19 nt, Artificial Sequence
  Description of Artificial Sequence: Synthetic oligonucleotide
  Sense strand starting at position 1388 of SEQ ID NO: 1880197
accaaugaugcagguaaca

SEQ ID NO: 1949325 - RNA, 19 nt, Artificial Sequence
  Description of Artificial Sequence: Synthetic oligonucleotide
  Antisense strand to SEQ ID NO: 1949324
uguuaccugcaucauuggu

SEQ ID NO: 1949326 - RNA, 19 nt, Artificial Sequence
  Description of Artificial Sequence: Synthetic oligonucleotide
  Sense strand starting at position 1413 of SEQ ID NO: 1880197
ucauuaucuagcgacaggu

SEQ ID NO: 1949327 - RNA, 19 nt, Artificial Sequence
  Description of Artificial Sequence: Synthetic oligonucleotide
  Antisense strand to SEQ ID NO: 1949326
accugucgcuagauaauga

SEQ ID NO: 1949328 - RNA, 19 nt, Artificial Sequence
  Description of Artificial Sequence: Synthetic oligonucleotide
  Sense strand starting at position 1415 of SEQ ID NO: 1880197
auuaucuagcgacagguaa

SEQ ID NO: 1949329 - RNA, 19 nt, Artificial Sequence
  Description of Artificial Sequence: Synthetic oligonucleotide
  Antisense strand to SEQ ID NO: 1949328
uuaccugucgcuagauaau

SEQ ID NO: 1949330 - RNA, 19 nt, Artificial Sequence
  Description of Artificial Sequence: Synthetic oligonucleotide
  Sense strand starting at position 1503 of SEQ ID NO: 1880197
guggcucacggcuuguaau

SEQ ID NO: 1949331 - RNA, 19 nt, Artificial Sequence
  Description of Artificial Sequence: Synthetic oligonucleotide
  Antisense strand to SEQ ID NO: 1949330
auuacaagccgugagccac

SEQ ID NO: 1949332 - RNA, 19 nt, Artificial Sequence
  Description of Artificial Sequence: Synthetic oligonucleotide
  Sense strand starting at position 1515 of SEQ ID NO: 1880197
uuguaaucccaguauguug

SEQ ID NO: 1949333 - RNA, 19 nt, Artificial Sequence
  Description of Artificial Sequence: Synthetic oligonucleotide
  Antisense strand to SEQ ID NO: 1949332
caacauacugggauuacaa

SEQ ID NO: 1949334 - RNA, 19 nt, Artificial Sequence
  Description of Artificial Sequence: Synthetic oligonucleotide
  Sense strand starting at position 1699 of SEQ ID NO: 1880197
ggagguugccauuaaccga

SEQ ID NO: 1949335 - RNA, 19 nt, Artificial Sequence
  Description of Artificial Sequence: Synthetic oligonucleotide
  Antisense strand to SEQ ID NO: 1949334
ucgguuaauggcaaccucc

SEQ ID NO: 1949336 - RNA, 19 nt, Artificial Sequence
  Description of Artificial Sequence: Synthetic oligonucleotide
  Sense strand starting at position 1884 of SEQ ID NO: 1880197
ggucacggcccuuaacaau

SEQ ID NO: 1949337 - RNA, 19 nt, Artificial Sequence
  Description of Artificial Sequence: Synthetic oligonucleotide
  Antisense strand to SEQ ID NO: 1949336
auuguuaagggccgugacc

SEQ ID NO: 1949338 - RNA, 19 nt, Artificial Sequence
  Description of Artificial Sequence: Synthetic oligonucleotide
  Sense strand starting at position 1890 of SEQ ID NO: 1880197
ggcccuuaacaauagcuua

SEQ ID NO: 1949339 - RNA, 19 nt, Artificial Sequence
  Description of Artificial Sequence: Synthetic oligonucleotide
  Antisense strand to SEQ ID NO: 1949338
uaagcuauuguuaagggcc

SEQ ID NO: 1949340 - RNA, 19 nt, Artificial Sequence
  Description of Artificial Sequence: Synthetic oligonucleotide
  Sense strand starting at position 2258 of SEQ ID NO: 1880197
ugggcuccuguauauaaga

SEQ ID NO: 1949341 - RNA, 19 nt, Artificial Sequence
  Description of Artificial Sequence: Synthetic oligonucleotide
  Antisense strand to SEQ ID NO: 1949340
ucuuauauacaggagccca

SEQ ID NO: 1949342 - RNA, 19 nt, Artificial Sequence
  Description of Artificial Sequence: Synthetic oligonucleotide
  Sense strand starting at position 2260 of SEQ ID NO: 1880197
ggcuccuguauauaagagu

SEQ ID NO: 1949343 - RNA, 19 nt, Artificial Sequence
  Description of Artificial Sequence: Synthetic oligonucleotide
  Antisense strand to SEQ ID NO: 1949342
acucuuauauacaggagcc

SEQ ID NO: 1949344 - RNA, 19 nt, Artificial Sequence
  Description of Artificial Sequence: Synthetic oligonucleotide
  Sense strand starting at position 2547 of SEQ ID NO: 1880197
guguaaggcugagugauuu

SEQ ID NO: 1949345 - RNA, 19 nt, Artificial Sequence
  Description of Artificial Sequence: Synthetic oligonucleotide
  Antisense strand to SEQ ID NO: 1949344
aaaucacucagccuuacac

SEQ ID NO: 1949346 - RNA, 19 nt, Artificial Sequence
  Description of Artificial Sequence: Synthetic oligonucleotide
  Sense strand starting at position 3054 of SEQ ID NO: 1880197
gaaguuccucagugacauu

SEQ ID NO: 1949347 - RNA, 19 nt, Artificial Sequence
  Description of Artificial Sequence: Synthetic oligonucleotide
  Antisense strand to SEQ ID NO: 1949346
aaugucacugaggaacuuc

SEQ ID NO: 1949348 - RNA, 19 nt, Artificial Sequence
  Description of Artificial Sequence: Synthetic oligonucleotide
  Sense strand starting at position 3104 of SEQ ID NO: 1880197
cuuccuaacgcagaagaaa

SEQ ID NO: 1949349 - RNA, 19 nt, Artificial Sequence
  Description of Artificial Sequence: Synthetic oligonucleotide
  Antisense strand to SEQ ID NO: 1949348
uuucuucugcguuaggaag

SEQ ID NO: 1949350 - RNA, 19 nt, Artificial Sequence
  Description of Artificial Sequence: Synthetic oligonucleotide
  Sense strand starting at position 3116 of SEQ ID NO: 1880197
gaagaaagcugcucaagug

SEQ ID NO: 1949351 - RNA, 19 nt, Artificial Sequence
  Description of Artificial Sequence: Synthetic oligonucleotide
  Antisense strand to SEQ ID NO: 1949350
cacuugagcagcuuucuuc

SEQ ID NO: 1949352 - RNA, 19 nt, Artificial Sequence
  Description of Artificial Sequence: Synthetic oligonucleotide
  Sense strand starting at position 3374 of SEQ ID NO: 1880197
aggucagauuggcuaaagu

SEQ ID NO: 1949353 - RNA, 19 nt, Artificial Sequence
  Description of Artificial Sequence: Synthetic oligonucleotide
  Antisense strand to SEQ ID NO: 1949352
acuuuagccaaucugaccu

SEQ ID NO: 1949354 - RNA, 19 nt, Artificial Sequence
  Description of Artificial Sequence: Synthetic oligonucleotide
  Sense strand starting at position 3384 of SEQ ID NO: 1880197
ggcuaaaguugauuguuga

SEQ ID NO: 1949355 - RNA, 19 nt, Artificial Sequence
  Description of Artificial Sequence: Synthetic oligonucleotide
  Antisense strand to SEQ ID NO: 1949354
ucaacaaucaacuuuagcc

SEQ ID NO: 1949356 - RNA, 19 nt, Artificial Sequence
  Description of Artificial Sequence: Synthetic oligonucleotide
  Sense strand starting at position 3385 of SEQ ID NO: 1880197
gcuaaaguugauuguugaa

SEQ ID NO: 1949357 - RNA, 19 nt, Artificial Sequence
  Description of Artificial Sequence: Synthetic oligonucleotide
  Antisense strand to SEQ ID NO: 1949356
uucaacaaucaacuuuagc
